United States Patent Application Publication US 2004/0034888 A1 - sequence listing, part 20

SEQ ID NO: 59467 - protein, 518 aa, Zea mays
  Clone ID: LIB3180-017-E1_FLI.pep
KMVVLAASIVSKSGKALVSRQFVDMSRIRIEGLLAAFPKLVGTGKQHTYVETENVRYVYQPIEGLYLLLITNKQSNILEDLDTLRLLSKLVPEYSPSLDEEGICKTAFEIIFAFDEAISLGNKEDVTVQQVKQYCEMESHEEKAHKLMMQTKINETKDLMKKRANELDKMRMERGKLDKGGYSSISGPRVIEKTFSDMSISGSGLGGLSTDMDSFASKPKGRPSTAATAPGKGFGMKLGKTQKTNQFLESLKAEGEVILEDVQPSAVSTRSSALPPSDPVTVTIEEKLNVVVKRDGGINNFDVQGTLALQVLNDTDGFIQLQIESQDIPGLSFKTHPNINKDLFNSQQILGAKDPNRPFPSGQNETPLVKWRIQGMDESSLPLSVNCWPSVSGNETYVNIEYEASEMFDLHNVVISIPLPAVREAPSVRQIDGEWKLDSRNSVLEWSILLIDQSNRSGSMEFVVPPADPSSFFPISVGFSASSTFSDLKVTGILPLKEGNPPKFSQRARLLTANYQVV

SEQ ID NO: 59468 - protein, 452 aa, Zea mays; identical to SEQ ID NO: 52903
  Clone ID: LIB3180-031-C5_FLI.pep

SEQ ID NO: 59469 - protein, 164 aa, Zea mays; identical to SEQ ID NO: 56717
  Clone ID: LIB3150-099-F12_FLI.pep

SEQ ID NO: 59470 - protein, 387 aa, Zea mays; identical to SEQ ID NO: 41756
  Clone ID: LIB3151-003-G6_FLI.pep

SEQ ID NO: 59471 - protein, 370 aa, Zea mays
  Clone ID: LIB3151-024-C2_FLI.pep
NSDPSYHIRSPLPFPPLARRLHADPGDMPRYDDRYGGTRLYVGRLATRTRSRDLEHLFGRYGRIREVELKRDYAFIEFSDYRDADEARYQLDGRDVDGSRIVVEFAKGVPRGSGGSREYMGRGPPPGTGRCFNCGVDGHWARDCKAGDWKNKCYRCGERGHIERNCQNSPRSLRRERSYSRSPSPRRGRGRSRSYSRSRSRSRSYSRSRSLSRSPRGGRRDRDDRRSRSPSYSRSPMRSASPPVKEKERSPAPDGSRSPRSRSPQDQVMSPPPKDNGEGNGSDRGGSPRGRENSRSRSRSPSGSNRSPAANGRSRSPGGERSPSPGGERSPSPGGDRSPSPNGNGNNDAAADVDADAAARGGSPTGSKSP

SEQ ID NO: 59472 - protein, 446 aa, Zea mays
  Clone ID: LIB3179-001-C3_FLI.pep
STQAHWVIIHTCKPPTLSFVYYYCYLSLSLSSWLSLDNSLLCFAWWSSAESVIYAGGGGADAVARARDEVVVGEPDRLHEGVDDSGADEAEAAPDHVLADGLRLGRLHRDLPAVLVARRQRLVVHERPHVLVQRAKVPPHLKNPAGVVDGSSDGAQIQPVVGAQRRHLLLGVLGDRIHVEAGERLPVDVSFLEDGSPIGPDLHARQCEHLEQQLVVVHGHSPLLVVVRHIQGVRVGRDEATALLVEPGGGGGWDGRLGRGGGADSALHPGEGRGAAVVRDPRLALRLRLRGMLPPRRGDAPRRLERLWRRERRHRQHGAGLPGLGPGLLRGHGARRLGRPRGGRGRGRRRRRQQRRRRRRRTGVLGRGGTGGHGGIVVVGRRHGEGLVQGLLERAGGVRRRHAVARRLQHRAAVDLGDARGLDVGVAHAAWTGQVVSCLFLAPPVG

SEQ ID NO: 59473 - protein, 419 aa, Zea mays
  Clone ID: LIB3180-001-F5_FLI.pep
SPPPHHKHLRSVPDHRTTCSPPRSRVSTQRRDGRGGSDPKDAQEGLRRRRRRLLRVEPRRPAHALRRLHRRRQALARRRRPLPPQLLRLRQGRLRPTRRGHLRPRPARGDEGEGGGGEGGRRAGAALRRGDVVAQRPRRAGRPHGALPRRHLQGPQAGAVHQLPAHGVRGHLHGPVHRVRVARVGSAGARRREAGVEPAGLGHRQAARLRCRAPGALAAGPRRGGAQLPGGAAGRGHPRRGPRRGAQHGQPAAGARGRARRRPGPHRRPLHVLPGLLVRLGVPGHVHRARQRPGAGGRARREARAGDPHRGRVPLHRAPLPCRVQDRRRVRDGVVLHHHHPEPGVQPPGGEDVGVEGHLAGGAAGVLQHHSGDGEAVPLQEARLGDLFRASQLQLKHQLSKTGERRSFSIVVKVMVINN

SEQ ID NO: 59474 - protein, 376 aa, Zea mays
  Clone ID: LIB3180-005-D11_FLI.pep
LFTIPPQNTSCDPRSLRRASIMSAYCGKYADELIKNAAYIGTPGKGILAADESTGTIGKRLSSINVENVEENRRALRELLFCCPGALQYISGVILFEETLYQKTKDGKPFVDVLKEGGVLPGIKVDKGTIEVVGTDKETTTQGHDDLGKRCAKYYEAGARFAKWRAVLKIGPNEPSQLAIDLNAQGLARYAIICQENGLVPIVEPEILVDGPHDIDRCAYVTETVLAACYKALNEHHVLLEGTLLKPNMVTPGSDSKKVTPEVIAQYTVRTLQRTVPAAVPAVVFLSGGQSEEEATLNLNAMNKLSTKKPWALSFSFGRALQASTLKAWAGKVENVEKARAAFLARCKANSEATLGTYKGDAAADTESLHVKDYKY

SEQ ID NO: 59475 - protein, 607 aa, Zea mays
  Clone ID: LIB3180-010-D3_FLI.pep
EATLRRLRFSPHHPKLSPTTASPPAPPSAVMYRAAASLASKARQAGNSLAARQVGSRLAWSRNYAAKDIKFAVEARALMLRGVEELADAVKVTMGPKGRNVVIEQSFGAPKVTKDGVTVAKSIEFKDRVKNVGASLVKQVANATNDTAGDGTTCATVLTKAIFTEGCKSVAAGMNAMDLRRGISMAVDAVVTNLKGMARMISTSEEIAQVGTISANGEREIGELIAKAMEKVGKEGVITIADGNTLYNELEVVEGMKLDRGYISPYFITNSKTQKCELEDPLILIHDKKVTNMHAVVKVLEMALKKQKPLLIVAEDVESEALGTLIINKLRAGIKVCAVKAPGFGENRKANLQDLAILTGGEVITEELGMNLENFEPHMLGTCKKVTVSKDDTVILDGAGDKKSIEERAEQIRSAIENSTSDYDKEKLQERLAKLSGGVAVLKIGGASEAEVGEKKDRVTDALNATKAAVEEGIVPGGGVALLYASKELDKLQTANFDQKIGVQIIQNALKTPVHTIASNAGVEGAVVVGKLLEQENTDLGYDAAKGEYVDMVKTGIIDPLKVIRTALVDAASVSSLMTTTESIIVEIPKEEAPAPAMGGGMGGMDY

SEQ ID NO: 59476 - protein, 620 aa, Zea mays
  Clone ID: LIB3180-018-H9_FLI.pep
PPKALGRVTGCLGLYASLVMLRRLRLRSPVCAVAGAAAAMASLTNVAYADGLFRRQSPPSNPGDEDNLGASAFGRDPETLERMARALREINNSPLAKQVFGLMRKQEETRLTELEAEKVQYAIYEKLRDMERMEKKAEDYRNSLQQEAQVKAQALRFEDELARKRMQTEHAAQRQQDAELVKMQEASALRREEARRATEQKILEEMIRTEKEKAEIDQEVNRAKALAEAEARVHEEKQSEEVTKRMMLERMKGEKEKWLAAINTTFSHIEGGFKALLTDRSKLIMGIGGVTALAAGVYTTREGARVTWSYINRILGQPSLIRESSMPKFPLPMSRLLKPSSASLSGGAGFENVILHPSLKRRIEHLARATANTKSHGAPFRNMLFYGPPGTGKTLVAREMARKSGLDYAMMTGGDVAPLGSEAVTKIHQIFDWAKKSKKGMLVFIDEADAFLCERNSTHMSEAQRSALNALLFRTGDQSRDIVLVLATNRPGDLDAAITDRIDEVIEFPLPGEEERFQLLKLYLHQYILKEEGKGSWGALFKKQQRKIQVNGISDDLLREAARRIDGFSGREIAKLVASVQAAVYGRPGCTLDPQLFSEVVDYKVTEHHQRIMLASEGMA

SEQ ID NO: 59477 - protein, 300 aa, Zea mays
  Clone ID: LIB3279-054-C9_FLI.pep
LTSTRFGSSFTPTAVSATSPVPRFVLACQAAMAATSPFDCVLLDLDDTLYPGDTGIGAALRRNIDEFLQAKLGVSADEAAATRAELFRAHGSSLAGLIALGYDVHPDEYHSYVHGRLPYDRIARDPQLARLLQSIPQRKVLFTNSDRAHMERALERLGVDEAAFDAVVCFETMNPHLFGDDGGDRRPAVVLKPAVDAIVAGLRAAGSNPRRTLFLDDSERNIAAGKALGLRTALVGKRARSKEADYAVESIGALRRAIPEIWGEAAERSSDKLPVPAVSVVRSTTSDLDSIIIQPTSIHA

SEQ ID NO: 59478 - protein, 160 aa, Zea mays
  Clone ID: LIB3180-042-A10_FLI.pep
QGVGFCVAASECHCYPSPDNMVSFEMNDLKKIGLGLTGFGIFFSFLGIIFFFDKGLIAMGNILFLSGLGLTIGLKSTMQFFTKPKNYKGTISFGAGFFLVLIGWPFLGMLLEAYGFVVLFSGFWPTLAVFLQRIPIIGWIFQQPFVTSFLDRYRGKRVPV

SEQ ID NO: 59479 - protein, 323 aa, Zea mays
  Clone ID: LIB3180-055-D5_FLI.pep
NINSTHDRPRHTTIEHACKLFFFIQKIPRSGDDDDVLLLLHACSPLRTTAVAAARRGLLLLLGGRAGDEVLVDDAGEAGADHGPHPVHPLVSPATGAHDGGPERARRIHHGALQRAAGQHVGPRQEPHGERRRQRSGAGADPPRFVHHRRKVGVHEPERHGRLQHRRVPSAHAPRQRVLRQMHPSGGEPEHERGGDGAEQLRGPVDEGADEADPAGEQRAEGDGRVDVAAGDVGGAPHGGREREGVRERHRRQAAAALVMVVHPPERERGALGGEDEDGGGEELGGRVAQRGGVLGRSQVADGEPAPYCPDHIHGCQLMDRSI

SEQ ID NO: 59480 - protein, 295 aa, Zea mays
  Clone ID: LIB3279-001-G4_FLI.pep
FAKMEEGNDYYVVRKGDVVAVYKTLSDCQGQICSSVSGPAASAYKGHSWSRGKEEYLSSRGLSDATYVINAAELREDILGPLVPCSFQDILGSSSNQLAPNHIGFHNVIASQTGAQYVDLNHEARSSSSRHISPANFNHTGTVDAQPISKQYMVGILHFDGASKGNPGKAGAGAVLMTEDGRVISRLREGLGVATNNVAEYRGLILGLKYAIRHGFKRIKVHGDSQLVCNQVNGVWQTKQPNMMELCTEARKLKENFHSFEIIHVRREWNAEADRQANIGITLASGAVFEERGDI

SEQ ID NO: 59481 - protein, 171 aa, Zea mays
  Clone ID: LIB3279-005-H11_FLI.pep
QIKEYRGKIEAELSNICDGILKLLDTHLVPSSTATESKVFYLKMKGDYHRYLAEFKTGAERKESAESTMVAYKAAQDIALAELPPIHPIRLGLALNFSVFYYEIQNSPDKACNLAKEAFDEAISQLDMLGEDSYKDSNLIMQLLRDNLTLWTEDGIEEGLESSKGDAGEGQ

SEQ ID NO: 59482 - protein, 186 aa, Zea mays
  Clone ID: LIB3279-012-E10_FLI.pep
TSTTHPSPHGSFGGAGVLVISTKACLRSGHPSLHANMSRRKTREPKEENVTLGPTVREGEYVFGVAHIFASFNDTFIHITDLSGRETLVRITGGMKVKADRDESSPYAAMLAAQDVAQRCKELGITALHIKLRATGGNKTKTPGPGAQSALRALARSGMKIGRIEDVTPVPTDSTRRKGGRRGRRL

SEQ ID NO: 59483 - protein, 214 aa, Zea mays
  Clone ID: LIB3279-013-A8_FLI.pep
HRKTKEETGRLADPSGEAASWPDPVRPLRSARARRDPAPSSSPPPPPPMAASTFSGDETAPFFGFLGAAAALVFSCMGAAYGTAKSGVGVASMGVMRPELVMKSIVPVVMAGVLGTYGLIIAVIISTGINPKAKPYFLFDGYAHLSSGLACGLAGLAAGMAIGIVGDAGVRANAQQPKLFVGMILILIFAEALALYGLIVGIILSSRAGQSRAD

SEQ ID NO: 59484 - protein, 159 aa, Zea mays
  Clone ID: LIB3279-019-H6_FLI.pep
QTMVPVRLYVRNVQEDLEYIEDAVPVSDWENVSYINRPFETRKAEGRSYITLEHALQTLLPEFFSSKPPGSADGSQHAGAMDAAADSSDATNSSSRSQEAEQALASPPEAGSAKRAKVKLVRVQGVELDMDIPFLWVADHLKNPEYYVHICVYVGTRKQ

SEQ ID NO: 59485 - protein, 258 aa, Zea mays
  Clone ID: LIB3279-020-D1_FLI.pep
HLRLRDRSSSQTVIVAMAAAAPASSVKEVLPSPLTSASEPPPLFDGTTRLYVAYHCPYAQRAWIARNYKGLQDKIKIVAIDLADRPTWYKEKVYPENKVPSLEHNNQVKGESLDLVKYIDSNFEGPSLLPEDPSKKQFAEELLAYTDAFNKALYFCIVSKEDVSEEAVAALDKIEDALGKFNEGPFSLGQFSLVDIAYVPFIERFQIFYSNIKNYDITKGRPNLQKFIEEVDKIDAYTQTKQDPQFLLEQTKKRLGIA

SEQ ID NO: 59486 - protein, 325 aa, Zea mays
  Clone ID: LIB3279-173-F6_FLI.pep
IFCCILPGSCNRSGFMQELQEQHNILRNSIEQLKVSESLRATLIFHLKEALNEQEFKVEQVRSQLQAAQPRFKRASELCVGLGSNMERRQPSNQGLKRSSLSDPLSTVAPEAVKSLQKGHSSAVLYSQEGNGVEHSVTETKLAAGAASDNIRGGALSSRVNGGNTMLKIEEHTSGNKRQKLEDDAHVSQPRSESPPPPPPPFPHPDTFQPPPPPPEYPRSPDPSPPPPRTSLPPHIIPPPPPPPPAMPLHMFSHLPPPAGTFVPFPAGPPGPMYCTYPSFTPVVNFPMTSPPGFRNLTPPPSFRGLAGTFYGPQFPTAPPPADRK

SEQ ID NO: 59487 - protein, 404 aa, Zea mays
  Clone ID: LIB3279-183-C3_FLI.pep
RSLGEKMAAEMVKAATSDKLKEMDWAKNIEICELVAQDPGNAKDVIKSIKKSVGSKNKSTQHFAVMLLEMLLNNCGEPVHRQVVDNSLLPILVKIVKKKTDLPVREKIFLLLDATQTSLGGAKAKFPQYYEAYYELVSAGVQFSNRPNVVVTRAEVPVPETRTEPNNVSLSARLHEAQQEVHTQPALDTSIVQKACSVMEVLRDVLNSMDPRHPEGATDEFVLDLVEQCTFQKQRMMHLVMTSRDEMVVSQAIELNEELHKVLVRHDVLLSVHPTTTVASNINEEENAESLYRRLRKGKALSQDYTDDSVPSFRSMPEDKLRRLLTIQSPHPDKRLGALNIHLPDGEEPRHDPAPLIPPPPAKHAERERFFQEKSIDEHRRRSGQPAGSPEGPVAAQPGQQQLV

SEQ ID NO: 59488 - protein, 255 aa, Zea mays
  Clone ID: LIB3279-225-D8_FLI.pep
PANRGRWKGENRAEPPGCSSFPLSTAPPLPIAVPDRSAGLRMSEEDKAAASAEQPKRAPKLNERILSSLSRRSVAAHPWHDLEIGPGAPAVFNVVVEITKGSKVKYELDKKTGLIKVDRVLYSSVVYPHNYGFIPRTLCEDNDPMDVLVLMQEPVVPGSFLRARAIGLMPMIDQGEKDDKIIAVCADDPEYRHYNDISELSPHRLQEIKRFFEDYKKNENKEVAVDAFLPATTAQEAIQYSMDLYAQYILQSLRQ

SEQ ID NO: 59489 - protein, 562 aa, Zea mays
  Clone ID: LIB3332-003-B1_FLI.pep
ARGDDWATAGADLRQVPKPSTGPSPTTSTHESEMSSVGSGSGTRAANGAAAISAAATAAGSADARFHPQLLQQDRQSRWAGCFSGLSCFGSQKGGKRIVPAARTSDGNGSNARGNGLQSGANSNQNMPMNLSLLAPPSSPASFSNSALPSTAQSPNCFLSVSANSPGGPTSNMFAVGPYANEPQLVSPPVFSTYTTEPSTAPLTPPPELAHATTPSSPDVPYARFLSSSMDIKTASKEHNMPFLSTTYSGGSGLQASYPLYPESPCSSLISPASVTPRTGLSSPIPEQEVPPAHWKTSRSACDTPYFRASPIPEQETTAQWKTSRSACDTPYARTSPTNIFGLDSNTPRNYMLDSNFFRPAASAQFYLDQAQQAFPHNGGRVSVSREKQDADEIEAYRASFGFSADEIVQSQSYVGIPDAVDESFSISPFGNNAPATEICPFSDLPSEVQKADKSCTYVKDGTSPKKSANHLSIDSPNKVLRLDVFKVTKGGHLSEDEGIARDGHPFRRTTDEISLKPIEVRKKSPPGHSCSDAEIEYRRTRSLRDANGVLSRRSALARQLH

SEQ ID NO: 59490 - protein, 452 aa, Zea mays; identical to SEQ ID NO: 47560
  Clone ID: LIB3332-005-A11_FLI.pep

SEQ ID NO: 59491 - protein, 250 aa, Zea mays; identical to SEQ ID NO: 48188
  Clone ID: LIB3332-009-H1_FLI.pep

SEQ ID NO: 59492 - protein, 351 aa, Zea mays
  Clone ID: LIB3332-013-C8_FLI.pep
TLESLELSVPDPLDLDILGRLGPEVGVGRLHALEDADDLAGLRVALGDAQRDVAGGGGGVLDVLLLELLLVTSAPGGERDGVVVAGGAAAALGVEEGGATVAGHEEGPAEALGLAGGDELLDGEEERHALAPRELHGDGGVVDAVLLLELERAVGADLERALDLVQRVREAGHELGLLELGRGVLGDALRLDGEGRRLQAQLLHLVLAGLERERLHAAVDGRALVRRARALHLHVRFALDLVVGQPLGRALRARARDEERRGGEREAGELRGVDAPAGDVLQGARDPGGAGVDAERPAGELRRRAGRQRGKGRPAADLGRLHQGGRGLERGCHRRRGGDAFWLLPFSSGGC

SEQ ID NO: 59493 - protein, 89 aa, Zea mays
  Clone ID: LIB3356-012-D7_FLI.pep
PPLRRLRRSDAVAQDLPDQEEAGEEDAPEPPHPLLDPHAHGQHHQVQRQAQALAPHQARLLSARIGRLLRRNSRVSTFPLVLSMSLVFL

SEQ ID NO: 59494 - protein, 245 aa, Zea mays
  Clone ID: LIB3356-023-F11_FLI.pep
VAANMEEKGAGGKAAVPHDELPRFTIFLIPNRREPPLDLVELVCLHHRISLGNGVPGSSPVVELAVVLVGVAVECAVQVPTPAVESRKSNPLPAGAAPVRPYLPPFGDRRHPLAGSGNISGLLHVHCLQLNLGNSYYRVAASNNRLHDGVAAVHDAVDRGGSQLGLILLRYHLLVALGAHVHGRRAAEEATVIDAEDGSLGGLAPSLLVLHGFLNSDETALFAIPLRRSPRGRRGGEGRGIAGNS

SEQ ID NO: 59495 - protein, 174 aa, Zea mays
  Clone ID: LIB3356-053-H8_FLI.pep
PAPALLAVAASLRATDLPSAATMSLIAGEDFQHILRLLNTNVDGKQKIMFAMTSIKGVGRRFSNIVCKKADIDMNKRAGELTPDELERLMTVVANPRQFKVPDWFLNRKKDYKDGRFSQVVSNALDMKLRDDFERLKKIRNHRGLRHYWGLRVRGQHTKTTGRRGKTVGVSKKR

SEQ ID NO: 59496 - protein, 273 aa, Zea mays
  Clone ID: LIB3354-110-C6_FLI.pep
HEYFFSDDTTEVIRSVKELGYPEYNPIFVKKLITIAMDRKNREKEMASVLLPSLSMELFSSEDIAKGFVMLLESAEDTALDILDASDELGLFLARAVIDDVLAPLNLDEISSKLPPNCSGAETLNMARSLASARHAGERLLRCWGGGTGWAVEDAKDKITKLLEEYESGGDVGEACNCIRELGMSFFNHEVVKKALVMAMEKKNERTLNLLQECFGEGIITINQMTKGFSRVRDGLDDLALDIPDAREKFLSYVQRAKKSGWLLPGFGVASSA

SEQ ID NO: 59497 - protein, 265 aa, Zea mays
  Clone ID: LIB3354-112-E6_FLI.pep
FYVFTAPRPPLGPRRDRRLPSPTRCSLLHTSQSRRSAPPPCCDPPCVPMMLEGKSYLVPRSLLSSKTETQWAYLAHEVHGGKRLAPEDCEVEDLDEADGGSKCSKPPSPQPHTPDISEARGSSRHASGCGEQQGTGSNPMNSIGDGWKVLCDPLALHPRRGHQRGLAPRRLTPPPCAASRASRQTRPLLPHGRTQPEFRAVAARPRRLRPGQRVHPQPLLRPGVPARQVVVPLRSPRPRIMQQWFCHAVVVRYPRASHERCEITP

SEQ ID NO: 59498 - protein, 225 aa, Zea mays; identical to SEQ ID NO: 53252
  Clone ID: LIB3354-113-B3_FLI.pep

SEQ ID NO: 59499 - protein, 128 aa, Zea mays
  Clone ID: LIB3354-116-B9_FLI.pep
QQPHHARLFTVAGAIALGRAEGVFTTVGHVKEAILVLVLFVDCRHQRGSWWQGVLHKDKDGLLWAQLDSLPHHIDKLADSEISRDKVLLLINLGDISFASFLNNHRNSVGILIPDPGRFGLPFLCNSK

SEQ ID NO: 59500 - protein, 462 aa, Zea mays
  Clone ID: LIB3354-119-B2_FLI.pep
RRSGRVLRRRRRRTRMVKSVLGDEEHLKAFEETLASPSSPPCQAQVGLVVGKLSSSSDRALIYALLPTPLTDAAAPACSLRAAPKSKPSKGGGKAPSSSDASLDFDVEWISEHARQVIRAICQACYGSASGVRLLLHISYSPRRWACRICEVASGSLRPCDFKYSKLLASLQTFRCTYNFEIRLTSVQAEPFKKIILKAISHLTEEVQNARALVDGQLFSEEMNISTEDPHQVDFLVPFKNAVPVEECSLEGVAGLIRFIGSVSALAYLGPKESISEAISDLKADIVTSLKSRLDIILDEADDGPATAEVEKSPSQKSTQVIFHELREPYSFSFPRRVLIPWLSGTYVCDYLQQPETAEDAVDRFKEVIGALETAVERSSILEPESAAAACSVLESFWDMVPGSGSGGQGGSSKLKDSHSIQKDDSSKGQGGLNFSIVAALIVLLVALIAGLLFTGSAGYPI

SEQ ID NO: 59501 - protein, 319 aa, Zea mays
  Clone ID: LIB3354-121-G1_FLI.pep
GLAMPLNIDIDLFKLDIDELIADYSKENCTSLFEFKRVWMGKKFSYIYEGRPKTNSGLFMQSLFLHCIGHLTSQSSLHQRLAGLYCLYCLYECQPYKPQFKIYLSLEECRQLKDIVVMAKQNGLQLVPALVKRMLDKDMFLFGYMNLINDNGDKQVEELTALQNKQVKFACDKLFANSQAERYMHMDLGAEFELDTIKKLSKEYAEAKELALAEASQTVEVEDAKHLLQSERLLGDKIDEVVKEWDVQKEGFYERTGLSSSPGDQLMAVDNDESGAQCHKDGSCGDQLMAVDNDESGVQDHEDLDDDDDGFAELELLLE

SEQ ID NO: 59502 - protein, 339 aa, Zea mays
  Clone ID: LIB3354-122-G2_FLI.pep
RERERERERERRRAKEAEQSNSSRSRKRRREGPGDSTAARKSKSKMLRGGTGMLGVVNFITFLISIPILGGGIWLASRANSTDCIRFLQWPIIVVGLVLMVVSLMGFAGACYRQTWLLRLYLFATFFVVLALLFFVVFAFAVTDRGAGQVVMSRRFPEYQLSDYGGWLRDRVADPQYWATISACLRDGHACAGMRRLARDPNTGMLVPETPAMFYGRNLSPIQSGCCKPPTSCAFTYMNETYWEQNPGVPTVTNDPDCSRWSNDQQMLCFQCDSCKAGVLAGIKKSWRKVAVLNIVVLIILVIVYVAGCAAFRNAKRIENDEPVGMARMTKSHPSRFQF

SEQ ID NO: 59503 - protein, 426 aa, Zea mays
  Clone ID: LIB3354-125-E3_FLI.pep
GEEVMIRPGSRDSQNYDNNNQRVHPQPVDENMNQNGDSVDTMIGRIFNNISSLKSAYIQLQEAHTPYDPDKIQEADKLVIEELTNLSELKHAYREKHPKPIAASPQDSRLLSEIQEQQNLLKTYEVMVKKFQSQIQTRDTEITHLQQQIDEAKLRKSKLEKKLKQRGLLNRESEESDEEENYFSIELTPSLFTSAVDNAYQSIHEFSKPLINMMKAAGWDLDGAANAIEPGVVYTRRAHKKFAFESYICQRMFSGFQEESFSIKDSNISVSNEAFFHQFLAVRAMDPLDVLSQNPDSVFGKFCRSKYLLLVHQKMEGSFFGNMDQRNYVMSGGHPRTPFYQAFLKLAKSIWLLHRLAYSFDPKAKVFQVKKGSEFSDIHMESVVKNIILEEGAERPKVGLMVMPGFLIGTSVIQSRVYLSDAKCAD

SEQ ID NO: 59504 - protein, 203 aa, Zea mays
  Clone ID: LIB3355-004-E1_FLI.pep
RGPPREPLSSSSSSESIEQGGGWPIEFPFRQAVTAASLTFTGDTIAQVRSRIVDRRRCCPDSNTKELIPDILLNHDWIRALRMASYGFLLYGPGSYEWYQLLDRCMPKQTFVNLSAKVILNQIVLGPCVIAVIFAWNNLWLGKLSELPSKYQNDALPTLLYGFKFWIPVSIVNFGVIPLPARVAFMSSCSIFWNFYLSTTMSK

SEQ ID NO: 59505 - protein, 124 aa, Zea mays; identical to SEQ ID NO: 41198
  Clone ID: LIB3355-009-B4_FLI.pep

SEQ ID NO: 59506 - protein, 423 aa, Zea mays
  Clone ID: LIB3355-011-G9_FLI.pep
GIPPDQQRLIFAGKQLEDGRTLADYNIQKESTLHLVLRLRGGMQIFVKTLTGKTITLEVESSDTIDNVKAKIQDKEGIPPDQQRLIFAGKQLEDGRTLADYNIQKESTLHLVLRLRGGMQIFVKTLTGKTITLEVESSDTIDNVKAKIQDKEGIPPDQQRLIFAGKQLEDGRTLADYNIQKESTLHLVLRLRGGMQIFVKTLTGKTITLEVESSDTIDNVKAKIQDKEGIPPDQQRLIFAGKQLEDGRTLADYNIQKESTLHLVLRLRGGMQIFVKTLTGKTITLEVESSDTIDNVKAKIQDKEGIPPDQQRLIFAGKQLEDGRTLADYNIQKESTLHLVLRLRGGMQIFVKTLTGKTITLEVESSDTIDNVKAKIQDKEGIPPDQQRLIFAGKQLEDGRTLADYNIQKESTLHLVLRLRGGQ

SEQ ID NO: 59507 - protein, 239 aa, Zea mays
  Clone ID: LIB3355-028-A3_FLI.pep
HNTQRSPALSMSSSHGIGVQLRAADLLPMDHRRLRRIDFLHIFPCCCGGLHGLRDPLPAGERRDGLARFGHHLAWRRHALRYRAPDVLLAALHGAGDRLAERAVLVARTELLGDVPRDGRSFGLPAGAGGGRRGGVRVLLRVGSRRRRAGRLCGLLHLARHGGADAGDLLVHCARQLLAVLRGARSRGLDLVSIARRPRRAVGRVRGSRGAFPLLNAGVRYRRRLAVCAFRLGRALLRT

SEQ ID NO: 59508 - protein, 177 aa, Zea mays
  Clone ID: LIB3355-052-B10_FLI.pep
EEEATSHGLRWPETQTGLHHLVREGRGEGRLLLRRRLRLHRPPPRPVPQVKHARVRPVLPDPDARLINLPHLRAFLGLLCRWAELESGATTIAFTPLHQRETDELSGAVQLPDSSAAGRGSVEVCFAYADVDAAYKRAVENGAVAVSAPEDKPWGQKSGFVRDMDGNIVRIASYVRE

SEQ ID NO: 59509 - protein, 209 aa, Zea mays
  Clone ID: LIB3355-052-C4_FLI.pep
AGWRRASTCWSAAAGPWCSRPAPSWAACGRACQTARRCTRRGPCTSTPTSRGRTPSPRCSPTTGRSCPTWTPTRATSACWTASASAAACSGWSTTASPRTTWRRGRSGAETARRSAAPALASGASRWPTPRDALRYICGYYTPLTPLRATEESDKPFGPNGGHVQLYHQTSSLSYRQASQGSVVHEHLEGHPFQRHLQTLVCGLAEQIR

SEQ ID NO: 59510 - protein, 79 aa, Zea mays
  Clone ID: LIB3356-002-E10_FLI.pep
GQSYMNKSMLDDPWVDLQPGVGNILIPRGEYDSNKSWLPESLRKKKETPPAHGQIKPAPGLSLSEYLDLSFNEVSDKEK

SEQ ID NO: 59511 - protein, 406 aa, Zea mays
  Clone ID: LIB3356-009-A3_FLI.pep
QKRTLNLFVVLSPSSVRSAREPPMGDAVEDVVIAGAGLAGLATALGLHRKGVRCLVLESSPALRASGFAFTTWTNAFRALDALGVGDKIREHHLLYERMIAFSAATGEAAAEVSLKIQSKSGPHEIRCVKRDFLLRTLADELPEGTIRYSAKVVAMEEDGVGGAKTLQLHLADGSTIKAKVVIGCDGVNSVVAQWLGLPKPILSGRSATRGLAEYPGGHGFGPEILQFIGHGFRSGVLPCSDTSVYWNYTWYPSPADGDAEESVAKMRSHVVAKLRGAKVPAEALEVVERSEMSDVASSPLRFRSPLALVRGSISRGGVCVAGDALHPMTPELGQGGCAALEDGVVLARCLGKAFALLGHERDEGRVVTAALEEYAAARRWRSIQLITAAYVVGFIQQSNNAVVRR

SEQ ID NO: 59512 - protein, 158 aa, Zea mays
  Clone ID: LIB3356-009-A7_FLI.pep
GIQTSRSLFYFNLTSAFLQKGFTHSTRAHTEQPSSGHKAMVHTRSGTAEGHKITRLCRLPRHRPCRRGPPSWRRRCSGLPHAPRHRRPCPAPSRSGWRPGPPATAGPCACGSPRRPPTRTSSASSGRPGARPVLPTLCVRAGTWSLPSLAALLVSGSP

SEQ ID NO: 59513 - protein, 284 aa, Zea mays
  Clone ID: 700429636_FLI.pep
HAIKSQLHGRKPAAAASASFHPSILLSSFSPGQPLHSSKQARLRTNEAARIRIHGRRAGGEAGARAAAVQPEHGRAHRGGLHPVPRAARRRAGGAGDHVPEGARHDVPQGRVGGGRVHGRGRPARGPRGGRRARRHRTGPRPLALQEPPLRGPDLRGLHVPAPRRRRAPPVARDGVPQAHLGNGAAGDGRVPALVDARGAGAARRAASRAAVCPLIVVIDWGNKRGGRREPPCAHAATALSLSRCSGRPAGPAFRVWNLVALTGESNGAPRGSCALAMLSCDPP

SEQ ID NO: 59514 - protein, 66 aa, Zea mays
  Clone ID: 701180794_FLI.pep
CTMRHQSFSPWSAASKTWTPKPFSHLSRPPRSSSSTFARNLVKWTNQKISRILWMKKKIKSKSDAR

SEQ ID NO: 59515 - protein, 282 aa, Zea mays
  Clone ID: 701185406_FLI.pep
LASCIAAELAKGATMLHAVQAAKKFVESALYHSKDLVIGNGPQGPFDHHFELKSPSYKMGSLQKFNPDDLFLYAVTDSGMNKKWGRSIKDAVKAAIEGGATIVQLREKDAETREFLEAAKACVEICKSSGVPLLINDRVDVALACDADGVHVGQSDMPAWEVRRLLGPGKIIGVSCKTPAQAEQAWKDGADYIGCGGVFPTTTKANNPTLGFEGLRTVCLASKLPVVAIGGINAGNAGSVMELGLPNLKGVAVVSALFDRERVAAETRNLRSILMKNAYSRS

SEQ ID NO: 59516 - protein, 115 aa, Zea mays
  Clone ID: 701186219_FLI.pep
SSSNHALEISRPFLSTFCARNFAFFWIHLISLFMEFRNNHHRYVLSDSSDELNNIVQCRTFSSTVSSCLKEFLSKPMVGSSRMTNLGFISISMAMLTVLTSLPPDHPQCAHRSVS

SEQ ID NO: 59517 - protein, 166 aa, Glycine max
  Clone ID: LIB3109-017-E9_FLI.pep
GESIERNMSGIARGRLAEERKSWRKNHPHGFVAKPETLPDGTVNLMVWHCTIPGKTGTDWEGGYFPLTMHFSEDYPSKPPKCKFPQGFFHPNVYPSGTVCLSILNEDSGWRPARTVKQILVGIQDLLDQPNPADPAQTEGYHLFIQDAAEYKRRVRQQSKQYPPLV

SEQ ID NO: 59518 - protein, 122 aa, Zea mays
  Clone ID: 700159538_FLI.pep
VAPEQVERCTIPFAAAKMVNVPKTKKTYCKNKECKKHTLHKVTQYKKGKDSLSAQGKRRYDRKQSGYGGQTKPVFHKKAKTTKKIVLKLQCQSCKHYSQHAIKRCKHFEIGGDKKGKGTSLF

SEQ ID NO: 59519 - protein, 138 aa, Zea mays
  Clone ID: 700095575_FLI.pep
SATMAMAALRETSRCLASRGRSAAWRPVLLAQSRGITYKLFVGGLSQFATEASLAEAFSRYGQVIEATVVRDKVTDVPKGFGFVKFASPEEANNAREEMNGKALNGRVIYVDIAKARQDRAADALPIARGPPKPISND

SEQ ID NO: 59520 - protein, 75 aa, Zea mays
  Clone ID: 700337389_FLI.pep
ESQKRRFGKKMTNPVMRSMFSKMAGEHGNKIVRQLGLIEPLGAAPLARRWHFYEGRTTRGVNHPIERRASNCLCV

SEQ ID NO: 59521 - protein, 70 aa, Zea mays
  Clone ID: 700340195_FLI.pep
ELQGEAWPEKAQCVVWPLVSVYSRFVSYVSTGIDSTELLVGTVFFVSFTLLVAKFSVSFFFVIGMVIAFK

SEQ ID NO: 59522 - protein, 91 aa, Zea mays
  Clone ID: 700379531_FLI.pep
NPYFTFEFVTFLLSLCSLDCTCLVYCLFVISQCVECMILCVDNEQSVVPECVVGDFPEQQHGEGCSNCNQCSGGDEGNMEDFEEFQDYDEF

SEQ ID NO: 59523 - protein, 446 aa, Zea mays
  Clone ID: 700467903_FLI.pep
CHESTHPSRWDTIGVFFKKKLDSSTLCRFYFDFSPTYIGCGLICPHIVNCSTLLGAIISWGILWPYISTKAGDWYPADLGSNDFKGLYGYKVFISVSVILGDGLYNLIKIIYATIKEIMNARAKQGRLPLAQVQDGDEGSNLSAEEKHLNETFIKDSIPPWLAGSGYIGLAAISIATVPMIFPQIKWYLVLSAYVVAPLLAFCNSYGTGLTDWNLASTYGKIGLFIFASWVGQNGGVIAGLAACGVMMSIVSTAADLMQDFKTGYLTLSSPRSMFVSQLIGTALGCVIAPLTFWLYWSAFDIGNPDGAFKAPYAVIFREMSILGVEGFSALPQHCLAICSFFFIASLVINLLRDVTPKNVSRFIPIPMAMAIPFYIGAYFAIDMFVGTVILFVWERVNRKECDDFAGAVASGLICGDGIWTVPSAILSILRIDPPICMYFKPSLSS

SEQ ID NO: 59524 - protein, 414 aa, Zea mays
  Clone ID: 700471369_FLI.pep
QNDELFSDLSTPLPKLQFQCDDRQVWLDAEMGHEVYAADPTASSGAVVTAECTVTELPLGDLEGLLLQIANDQHMVESQSDLSAPTPHHNFNQADIGDLHESHGARVGNLSCIVQESTFCEPRTEPSDQFPQSNVTNLPFSGEANSSEGTSVAHSVSGLISYHSQDADEEFLEINDFFDLEDVGQNANCMTTEYMMSATNGMFDNLEYSDASSFLPGSFDTVGLVAENQYFDTDYSGIQNQGYQNTTEVRTYNQAALTVRSHMKHDHVVLSSHASGTLNIHAANELHNQSSTSSQSWFNAALSALLDSVPSSPALAAEIENTVINRTLQRISSFRPHQTAGEENTFINRTLQHISSFRSQQATGEEPGTPSIQVTRGGRLMFISLLVILASVIWTFTSGSALNFCKGLWKSSST

SEQ ID NO: 59525 - protein, 202 aa, Zea mays
  Clone ID: 700578633_FLI.pep
NSVHEQMQRVQPANGAQSSNVGKINQMEQSFILSGENEKPFTYIYSMLIDWGRQQDTKAYIQGKIKGLITSVKKFQYKQRTKYELYVYIDDGSFISEAFIDSDIVNNMLGLSPGEVTAALAGELEFASPSEVKETLKGFQKFLVKFEGMMLIELNKNSPVPVVRELNEGCSSSTAWLLLGRLKTISSQKKTIQTQDIMDTTP

SEQ ID NO: 59526 - protein, 89 aa, Zea mays
  Clone ID: 700431757_FLI.pep
NSHSARGDTSASAHCQAASSWSRAGQAGMVVASSLSTAHLRRLPSSTTICTGSTPRPLATASMTSLIPARNSSRSTAPSPSRSKRAKSA

SEQ ID NO: 59527 - protein, 179 aa, Zea mays
  Clone ID: 701159078_FLI.pep
KNVKCRKRDPFASSVIKTLNEAGNACRSVSARCTISSTEGKLSVLLMLMVSGVSSQRYCSCILARFSSHHSLACLSLNFSRLNRTRRSSLVPPGKARIVIYTPGSSSSTHSLSWSLALLMDTVSSPDLSTSSGDELVLIDASMDEVSVLAPLILDNFGVDARPIESQHWCPCWCRRPVQ

SEQ ID NO: 59528 - protein, 144 aa, Zea mays
  Clone ID: LIB3355-023-E5_FLI.pep
CGSRQRERFSGFKVSHLQFFSQFGCGASLKLSDMLRSAKKLRREREMFCRQMQKRLTIQERESLYTKWGVSLSSKRRRLQVARRLWTETKDLEHVRESASLVARLIVLLEPGKALREMFGLSFAPQQFTRRSHNSWRYGRSSLD

SEQ ID NO: 59529 - protein, 147 aa, Zea mays; identical to SEQ ID NO: 56325
  Clone ID: LIB3356-046-C7_FLI.pep

SEQ ID NO: 59530 - protein, 120 aa, Zea mays
  Clone ID: LIB3591-117-D2_FLI.pep
DYRSNKLSTRSQLSTQKSSSMLKVWFAAAPPLRLDITDAFWYSPTRFSKKLVLPCREMSSIQSKGLATLYIFLCPSAMSRRSATNSMYWLMSPPFIPTSATGSASQTNSRSMSTASATIS

SEQ ID NO: 59531 - protein, 355 aa, Zea mays
  Clone ID: LIB3592-047-E7_FLI.pep
FTMCNTVSGLNKINTSLLLQAAGWPCMNHDRCNASGSFTTRMHLAFHSKQLAAAAAAAGMLMHHVLVELEAGEHVVVDGVGEVVEQVLERADAGDEPLDEVTEDGEHGEPAVLDLLELELIHLLLGLAEAERVEEGPAGVGRVAGAGEELLEAEEVLLAHGARVVPVLEAAVLGEAHERHVEDEERVGVGPVVVGARGRDDARLEPRQRGLRGDDAHLAEDLRGDGAHRAQHGVAAVDHLAIGQPLGLDEAPGALRVREAQRVEAIVAGQRAIEVGEGLLGREPQLPVGTLLGWRAGAGPDDEGRLPRRRPRDGRLHGAAQQLPAGEESLGRHRSGTGASSNLSFRQRTCLRSRS

SEQ ID NO: 59532 - protein, 82 aa, Zea mays
  Clone ID: LIB3592-083-E7_FLI.pep
LHTCKKHTRGWTSTSRRSLNEQRSSPFRDANKEKAATVSSNLAKLKDLYGDITAKKEDSDAEKLHRDSCAEEVIRLGGPRWR

SEQ ID NO: 59533 - protein, 116 aa, Zea mays
  Clone ID: LIB3180-029-B10_FLI.pep
STRTLSSPSNARERPPSQGSRQQLSRPSPLQFPPWLASGCCHGPRPTSTPLARPSSSPQLLAWRTSSRRTRRSSRWRGSTRTRTRRSTSRTPPSRAPAVRTQGSSGLERETIKLPP

SEQ ID NO: 59534 - protein, 83 aa, Zea mays
  Clone ID: LIB3356-011-C4_FLI.pep
SVLQRESAAAVKMIIPVRCFTCGKVIGNKWDVYLDLLQADYSEGDALDALELFRYCCRRMLMTHVDLIEKLLNYNTLEKTETS

SEQ ID NO: 59535 - protein, 205 aa, Zea mays
  Clone ID: LIB3356-019-C2_FLI.pep
KTWTRANDHSQHGRNIGTTKAFTPVTHHTQIHPSRSATSPRAGDREGLSQYHFIYCAPQEPDGAPHDCWGCEFIPVSSGGGLGLAYSAKITHPSRNFPSFPSIPLAASSVVAYLTKPNPLENPLTRSVTTRACKTSPNSAKASLSPSLVVRLLKPETKRLGDGSALGRAAGAFGGAKAETENMRRNPDLATAAAIAAGNLVPRDW

SEQ ID NO: 59536 - protein, 189 aa, Zea mays
  Clone ID: LIB3356-021-D9_FLI.pep
SGKLRQLKPNKYWIENSQKRYIPSVEDTVLGIVVDTKPDNFLVDIKGPNLAFLPVLSFEGGTRRNIPKFEIGTLIYARVVKANSIMNPELSCMDATGKAAEFGQLKDGYMFDTSTGMSRMLLSSPTCPVLEVLGKKLSFEIAVGLNGRVWVNAPAASTVILVSNAIMRSESLSGIKQRAMVENLLERLS

SEQ ID NO: 59537 - protein, 419 aa, Zea mays
  Clone ID: LIB3356-022-D3_FLI.pep
DHRTMESLTLRASTAASPLQRRRLLPGRQRATYVRATASAGEPDLSVRVNGLQMPNPFVIGSGPPGTNYTVMKRAFDEGWGAVIAKTVSLDAEKVINVTPRYAKLRAEPNGAAMGRIIGWQNIELISDRPLETMLNEFKQLKKEYPDRILIGSIMEEYNKAAWHELIERVEESGVDALEINFSCPHGMPERKMGAAVGQDCDLLEEVCGWINEKATVPVWAKMTPNITDITQPARISLKSGCEGVSAINTIMSVMGINLKTLRPEPCVEGYSTPGGYSARAVHPIALAKVMQIARMMKEEFADGQSLSAIGGVETGNDAAEFILLGADTVQVCTGVMIHGYPLVKKLCAELQDFMREHNFSSIEEFRGASLPYFTTHTDLVHRQQEAVRQRKAIKKGLQSDKEWTGDGFVKETESMVSN

SEQ ID NO: 59538 - protein, 256 aa, Zea mays; identical to SEQ ID NO: 44857
  Clone ID: LIB3356-025-E10_FLI.pep

SEQ ID NO: 59539 - protein, 171 aa, Zea mays; identical to SEQ ID NO: 48228
  Clone ID: LIB3356-027-A6_FLI.pep

SEQ ID NO: 59540 - protein, 288 aa, Zea mays
  Clone ID: LIB3356-037-D8_FLI.pep
GTGDPVIERLSDAAHLAGVLAGKLPGEANAWVVDAARFAGPFAVYRELVPTVDAAGDPKGYDPTGFPAAAGVANILARSIGEIQNQVPGLSAKDSAGNQHPPSYHPPARTIILGFSKGGVVVNQLVTELSRWGASGSTNQAAAADVPRPAAAGPGPPPHPTQNDLLLLGAPTRSSDDLLSSISELHYVDAGLNRAGAYVADRAVIGRIREHVVRAGDKSLRFALHGTPRQWCDPSRPWIREEKDAMVQVLADEARRSEGRLVLSEKLYFEGRPRSLLMHFEVLEAMDI

SEQ ID NO: 59541 - protein, 357 aa, Zea mays
  Clone ID: LIB3356-043-C7_FLI.pep
GEAPNPSHTRRNATPMGCAQGKCCLRRHPRRGSAAAAVGGGATLGRAAVPGAGLVLEYAALAVAGLYPDSTARESQDAHLVATRFAGDPDLHLFAVFDGHGTAGTACAGFARDALPRLLASLSLASAADPTAAFREAMLGANAEMHAAPEVDDSMSGTTAVAALVSGGALHVANVGDSRAVAGVWRAGRVVAEDLSWDQTPFRADERERVRACGARVMSVEQVEGMRDPEAERWAPDEGDPPRVWARDGLYPGTAFTRSLGDLAAEAIGVIAEPEVKSVEITPSHLFFVVASDGVFEFLSSQEVVDRVATYQDPRDACSAIAAESYKLWLEHENRTDDITIIIVHIRDMESVGAPKF

SEQ ID NO: 59542 - protein, 45 aa, Zea mays
  Clone ID: LIB3356-052-D7_FLI.pep
GQNCEMLRLAYHRLCFNFWFVWTFAVGRKYDVFLHFHKWLNWFDW

SEQ ID NO: 59543 - protein, 217 aa, Zea mays
  Clone ID: LIB3356-052-F3_FLI.pep
ARPPDERSPQAAAMLAPPTPGPRAPRPRATAVVQPSNREPSRAGVYHSSFADDDGITKACSCPLLPLKTHIKGPAPASDPDKADIVDEAITFFRANVFFKNFHVKSSADKLLIYLTFYINIALKRLEGCRTLAVGTKAIINLGLEKVPVPGEPGFPFPGLFTLPQSQEEAELLRNYLKQIREETSGRLLNCAYRANGFPNKWWLAFAKRKFMNIVIL

SEQ ID NO: 59544 - protein, 497 aa, Zea mays
  Clone ID: LIB3356-057-B10_FLI.pep
DCVSASKRVILGGCHKALYQLSNEKAEQAKSQVEALEDALDVEDLEADKRPEDLMLSFVSGEKGKDRSDKEVVTPWFKFLWETYRTVLEILRNNSKLEALYAMAAHRAFQFCKQYKRTTEFRRLCEIIRNHLANLNKYRDQRDRPDLTAPESLQLYLDTRVEQLKVATELCLWQEAFRSVEDIHGLMSMVKKMPKPSILVVYYAKLTEIFWVSDSHLYHAYAWLKLFNLQKNYNKNLSQKDLQLIASSVLLAALSVAPYDKKYGASHLETENEKERNMRMANLVNFSLDSKRENREMPSRASLLSELASKGVLSCASQEVRDLYNLLEHEFLPLDLASKVQPLLSKISKMGGKLSSASSVPEVKLSQYISALEKLTALRVLQQASCIFQSMKIDMLSRMIPFFDFFVVEKISVVAVRRNFVAIKVNHLSGAVHFGTVDIESDGLSDHLSVVADSLNKAKIHICPPVKKPSKLGESFISLAGIVENEHQEASCKEVHN

SEQ ID NO: 59545 - protein, 589 aa, Zea mays
  Clone ID: LIB3357-007-E11_FLI.pep
GLGQQYIAMKYMKLGSKPDTFYTEEAVRSVVSDIPADLIIHVNNTKYQLHKFPLLLKCGLLQRLCSDTDDGDEEPVPVALHDIPGGEQAFELCAKFCYGISISISAGNLVPAMLAARFLRMTEAVAKGNLVAKLETFFDSCVLQGWKDSVAALQAAWRISGWNESRIVQPCIDSIVEKILLPPSKVTWSYTYTRPGYNSTRKPHQSVPKDWWTEDISDLDIEVFRSVISTVRASRLLPPPLIGEALHVYACKHLVDPLHVASDAGLTANGVLHQPPQSSDDGEEKLVAMQRRVLESIVTMVPGEPGSVTGRFLLRLLRVANYVSASSSTRAQLIRQAGSQLDEARAADLLIPLPSDPHAYDVGTAEAVLEHFLAQFQRPAPTDERRRMSAAMEKVARIFDEYLRTIALDRSFPVGKFVDLVECLPDIARSDHDGLYYAIDIYLKEHPELSKADKKRLCRLIDCRKLSPDVRAQAIANDRMPLRTIVQLLFVEQERTIGAAAGSHAASGGAADRASVGVISQLAAGTKDEEPASSAGHKSDVHRPRRDHARVADGASAMARSLSASTKTPPAARKERTPEETGSRMRNKQ

SEQ ID NO: 59546 - protein, 112 aa, Zea mays
  Clone ID: LIB3357-010-D10_FLI.pep
LRSDRSSCHRHIQTYMSESNYIHIFSFCILYLCILWNASEIHNVVAPDQNLSQVSRELPINVLLSVGKLEIHIGVHRSKITFVLHTPLEFDNYRLPRQVVQERFWVNWHSRH

SEQ ID NO: 59547 - protein, 161 aa, Zea mays
  Clone ID: LIB3357-011-G5_FLI.pep
LRSTCSLPTTEPMADQLTDDQIAEFKEAFSLFDKDGDGCITTKELGTVMRSLGQNPTEAELQDMINEVDADGNGTIDFPEFLNLMARKMKDTDSEEELKEAFRVFDKDQNGFISAAELRHVMTNLGEKLTDEEVDEMIREADVDGDGQINYEEFVKVMMAK

SEQ ID NO: 59548 - protein, 402 aa, Zea mays
  Clone ID: LIB3357-012-A11_FLI.pep
EPRAIPSRPFHFSDPASQPAIPLRTAFLAVAELAAVVSSPSSCLLLARSPLPNSEKRMGRAPCCEKVGLKKGRWTKEEDEVLARYIKEHGEGSWRSLPKNAGLLRCGKSCRLRWINYLRAGLKRGNISEEEEDMIIKLHATLGNRWSLIAGHLPGRTDNEIKNYWNSHLSRRAADFRDGVVVDIDLSKLPGGGKRRGGRASRGAVVAAAKEKKAKEKDDRGNSKVAEAEQQLRDTEDDDGGSVSTPRPQSDDCGTAQSEEEQAQASASDLTSDGHGPEEEEEEDPLALSEEMVSALLAPESPKLEVGPDGSCMDSYSGPPSGESGCGSSGPSGDVAQDLDLDDDKAIMDWDLMGLDISTAGDMWDQLVWDYDETLVTEPEGGEEGHQQQDDVMSDLFFLDNL

SEQ ID NO: 59549 - protein, 290 aa, Zea mays
  Clone ID: LIB3357-018-H12_FLI.pep
LPPPDMLEAHKKYGGMGTLLVNKVSAESANQFGELVADPETNELLHYTEKPETFVSDLINCGVYIFTPNIFSAIEDVLKQKKDRANLRRVSSFEALHSATKALPPDFVRLDQDILSPRAGKKELYTYQTLDFWEQIKTPGMSLRCSGLYLSRFRRTSPHLLASGDGKRTATIVGDVYIHPSAKVHPTSKIGPNVSISANARVGAGARLINCIILDGVEIMENAVVIHSIVGWKSSIGKWSRVQGEGDQNAKLGITILGEAVDVEDEVVIVNSIVLPNKTLNVSVQEEIIL

SEQ ID NO: 59550 - protein, 96 aa, Zea mays; identical to SEQ ID NO: 39238
  Clone ID: LIB3357-033-G3_FLI.pep

SEQ ID NO: 59551 - protein, 185 aa, Zea mays
  Clone ID: LIB3357-052-D5_FLI.pep
ARHRKHPPPSTSDITTTNSSSATAQALSPLMRRASWMSLGMMVTLLAWMAQRLVSSKSPTRYASAASCSAATAEDWNRRSVLKSCAISRTRRWEGSLRMSSSVLFWYLRISRSATVPGRKRCGFFTPPVAGADLRAALVASCFRGALPPVDLRAVCFVRAIRSGEEEGAVCTPGSGSGGGKGRFE

SEQ ID NO: 59552 - protein, 233 aa, Zea mays
  Clone ID: LIB3357-060-C9_FLI.pep
GRKFLLVQRTGSIIGNPSLVVVISSSLTLSRVNQRDLLCHRAQQHRIWSRRAPDLPVCPRRQAKTTEATAQMAESGREKAKKLGIREQPSWPWDLTRGAEPRPAVCALWWQTNLVGGCILGRGGPWRHRWHDRLLAVDEESVEAATGGSGCHRPDNKFDWQGHNLSHLVTEHDSKEGREAPNPSLDPRALLGVLLIQLLVVAQAGEQGHQVEIRYHDESDGAGVTVGPINRHA

SEQ ID NO: 59553 - protein, 262 aa, Zea mays
  Clone ID: LIB3357-032-C1_FLI.pep
LTTRGRRPKKIKSSAAVRAEGDDVGGAGGAGEDGRRVVVGVGVSLGARRLEEAGVGRGLALLGAPELPRAAVLRRAVGGAGAAAPHHAALAADGEPRGAHAVQVAHAPGRRAPGARPVHRRHRDGDVVPVHQAHVVEVLGRRGAQGDLRQRGRRVERAPLPSPHAPRPPRGEPHRRRPPRRQLQPAARQHLLPGARLDARPHRLPAPVVQHQRRRRRAAHGRRRHQQRRRHGAQCHCCHGWASRHYLTRRRRVISIALALAR

SEQ ID NO: 59554 - protein, 229 aa, Zea mays; identical to SEQ ID NO: 47856
  Clone ID: LIB3357-033-H4_FLI.pep

SEQ ID NO: 59555 - protein, 80 aa, Zea mays
  Clone ID: LIB3357-037-E4_FLI.pep
RGEGDEAEAAGPLRLPIQDDLRLEDLAVGAEGVVEGVVVGGPGEAANEATVLNVRRRHLFPLAHEPEPEHEPVGEEKPTR

SEQ ID NO: 59556 - protein, 132 aa, Zea mays
  Clone ID: LIB3357-041-C4_FLI.pep
FQEAESNRALRVLLAIRSQGGEQALMQTLNRARELYAQRLQASPSVDELASLLAQCAIAEAQSSNTNPPQGPGSDPVNMLNSDEACILAESGRKQIILDAFADGSSFICLKCGGLFSTSRKDEHLAYWCGTA

SEQ ID NO: 59557 - protein, 275 aa, Zea mays
  Clone ID: LIB3357-046-H9_FLI.pep
SLTGPRLARAGTDSKIDRSHLISFLLIGCLVAYLACLSDGPGAAPGQPALRQQRRRRRLGVRGAVAGGVIRGRGVGAGVAEPVRVAEAAGLEHVRAVPAEPPAAAVPGALQRRARAGVPALPRPVRQDQGAHPGLPLLRPPGAAGALPVPAPPGVGQPGRARGQAARRLRGERRAAREQPLRRARRQALPSRGPRPSVPRPGRQLREEEAQEGPGAPRPCRRHLLLPRRQRAPLRAPDAAAAAARRRGLTGQPAGRPELPVPARPHVCYYHMHYY

SEQ ID NO: 59558 - protein, 169 aa, Zea mays
  Clone ID: LIB3357-053-E4_FLI.pep
AEIGCNLLRAVLCPLRYYHQKHPVNLLLLGLFTVAISFAVGMTCAFTSGKIILEAAILTAVVVISLTAYTFWAAKRGHDFNFLGPFLFAAIMVLMVFSLIQIFFPLGKISVMIYGGLASLIFCGYIIYDTDNVIKRYTYDEYIWAAVSLYLDVINLFLSLLQLLRAADS

SEQ ID NO: 59559 - protein, 174 aa, Zea mays
  Clone ID: LIB3357-054-H7_FLI.pep
SLPLPAPLRLPRHRPCARQETGPETMADQLTDDQIAEFKEAFSLFDKDGDGCITTKELGTVMRSLGQNPTEAELQDMINEVDADGNGTIDFPEFLNLMARKMKDTDSEEELKEAFRVFDKDQNGFISAAELRHVMTNLGEKLTDEEVDEMIREADVDGDGQINYEEFVKVMMAK

SEQ ID NO: 59560 - protein, 448 aa, Zea mays
  Clone ID: LIB3357-062-F6_FLI.pep
SEIRNQIPSLFIPSLAPASYASMRHHQACSRAHQVGALVLVSATFLLTRLFDRFLLDTYSSAPINPGRPFSSADLRIYVYAEDEIQGLRALLRGRDGTINAATCLKGQWGTQVKVHQFLLKSRFRTFNKDHANLFFVPSYVKCVRMTGALSDKEINQTYVKVLSQMPYFRRSGGRDHIFVFPSGAGAHLFRSWAIFLNRSIILTPEGDRTDKRGTSAFNTWKDIIIPGNVDDSMVKSDAPAVQPIPLTKRKYLANFLGRAQGKAGRLQLVELAKQYPDKLESPELKLSGPNKLGRIEYFKHLRNAKFCLAPRGESSWTLRFYESFFVECVPVILSDEVELPFQNVIDYSEISIKWPSSRIGPELLEYLESISDERIEEMIGHGREMRCLWVYAADTEPCSAMSGILTELQKKVRRFHQSPETFWLHNRTIVNRDLIEFHSWRTPVPLP

SEQ ID NO: 59561 - protein, 142 aa, Zea mays
  Clone ID: LIB3357-065-G9_FLI.pep
PLSIFHLIRRRGTPCSSLAMARIKVHELRGKSKTDLQAQLKELKSELSLLRVAKVTGGAPNKLSKIKIVRTSIARVLTVISQKQKSALREAYKKKKLLPLDLRPKKTRAIRRRLTKYQLSLKTEREKKREKYFPMRKYAIKA

SEQ ID NO: 59562 - protein, 238 aa, Zea mays
  Clone ID: LIB3587-215-D9_FLI.pep
VAWGAGGRWRGHIMVQCLDGVRQLLAVLLNCCDVELKQPRGLQDPQVLARETVFSVSEVEALYELFKRISSAVIDDGLINKEEFQLALFKTNKKESLFADRVFDLFDTKHSGILGFEEFARALSVFHPNAPLDEKIDFSFRLYDLKQQGYIERQEVKQMVVATLAESGMNLSDEIVESIIDKTFEEADTKHDGRIDKEEWRNLVIRHPSLLKNMTLQYLKDITTTFPSFVFHSQVDDN

SEQ ID NO: 59563 - protein, 129 aa, Zea mays
  Clone ID: LIB3587-216-D11_FLI.pep
GNRLASMLGSIPAPPAMASEFPPSTGKSAGMLSAVSSSSIRFTAGIIQLDGLTFSSGSGQWPLQKNGDLSLLVSFAVEGDVASKLPVGLGRATRISTVPMVLRSGFYLFFMSAMILLFSYKVGSCIYSR

SEQ ID NO: 59564 - protein, 268 aa, Zea mays
  Clone ID: LIB3587-216-D2_FLI.pep
PRTESSLRSFLFLPVPVPVPVPEPCSWYLGQGLMGDHLALIVDRLLTESTLEAAIGGGKHMVDLRQETVDVEYCHRGLGGGSATKVVECRICQEEDWDTCMEAPCACCGSLKYAHRKCIQRWCNEKGDTMCEICLQQFRPGYTSPQQLFHYGSIPMNFRGNWEIARQDLNDSQIITMMPTERDFMDNYDDYFPIRTRSSTLCCRTIAIIFMSLLVLRHTLPLVIGDNGEYSLALFSLLVLRTAGILFPILVMVRALASFHHRRRQQII

SEQ ID NO: 59565 - protein, 488 aa, Zea mays
  Clone ID: LIB3587-224-D10_FLI.pep
LYNLYGMTPPCNSVSSVVDFVPNYIKAKIERHKLAKKIKELKERVKDVGERRERYGVTVPPTQAKKRSEAGTSAGDNLETKRKERQEFDQALREEEAFFDEKKDEAAGLSSPSTYISNMVRRWWISRPPFDQAIRKLAPELAPYARKIRGALLKHKAGGMRKNHDGRRFHVHDDTVVAICMEMVLRALHAFPQSRVGKEKEEELNKLMEALHVADLPNRVMTFCYSELTTEEKSCLQYLAAFRLETSISRTSLVRRIAAERLVKEDKEHQLSMEQSAERCFEELLFRGFISADATGAAGKVKCCRFRSESVKQFIVDMCKAENFVGGGLPVHLRIQNDIRSAALEGKQQHDDPVNKMLRELDLLPKSYRLNVMDLGGSMGILKKSHLANICKLRTLKYLSLRYTDVRSLPSQLQELRLLETLDIRHTNIPRGSRNTQALLPPSLKHLLAGNVDSQGDAPNATVRMPDSIQEMPCLEVRNRTFYYIPSS

SEQ ID NO: 59566 - protein, 353 aa, Zea mays
  Clone ID: LIB3587-228-A5_FLI.pep
LPEKMPLEIQDSEVDIVIAALRPNLTTFFEAWRPFFSRFHIIVVKDPDMAEDLQIPAGFDLKVYTKSDINGLLGASSSINLSGHSCRYFGYLVSRKKYVISIDDNCLPAKDTAGSTVDVVAQHMVNLKTPATPFFFNTLYDPYRKGADFVRGYPFSLREGVECMLSCGLWLHNADYDPMTHVVKRNQRNTTYVDAVMTVPLGAMLPVSGINVAFNRDVLGPAMFPGLRLRNEGKHRWDTLEDIWNGLCAKVVCDSLGYGVKTGLPYVMRSDAEAGKALESLKEWEGVKVMDDVLPFVQSLKLSRTAVTVDDCVKELAGVVREKLGPKNAIFTKAADAMVEWNNLWKVHGAQNA

SEQ ID NO: 59567 - protein, 223 aa, Zea mays
  Clone ID: LIB3587-230-G4_FLI.pep
LFRHLLLIFIVLTCTFTSVGYAFVYFEDERDGNDAIRALDGYPFGPGRRRLSVEWSRGEQAGRRDGNKPEANTKPTRTLFVINFDPMNTRVSDIERHFTPFGNISSVRIRKNFAFVQFETMEEARKALEATHATTLLDRVISVEYAFRDDSEVSDRYGSPRRGGGYGRRGDSPVYRSRPSPDYGRPASPVYGSYDGPGPVRDRYRRSPAYRSRSPPAKRRAYD

SEQ ID NO: 59568 - protein, 280 aa, Zea mays
  Clone ID: LIB3587-231-A4_FLI.pep
LRCAAHPWVGRLRLLVVGGGELLVGVGDEEQLVDDAGEAAADEGADPVHPLVAPLPADEGGAEGHGGVHGRAVEGAAHQDVGPHDEADGNGGDGAQAALLRVHRRRVHRVHQPEGHHDLQHQRLPHRHARQPEGARGLPARREAEQEARHGGPQQLRHPVQEPSEQGDVAAHEGAEGHGRVHVPAGDVRAHRHRHEQRERVRHRRRDQARRGRRAAAGQLAEGHAGALAGEDEDEGGDELSERRLEGARVVHLLVAPQGDPIDRHFHGPLASSRALVTTV

SEQ ID NO: 59569 - protein, 458 aa, Zea mays
  Clone ID: LIB3587-231-D1_FLI.pep
KMQIFVKTLTGKTITLEVESSDTIDNVKAKIQDKEGIPPDQQRLIFAGKQLEDGRTLADYNIQKESTLHLVLRLRGGMQIFVKTLTGKTITLEVESSDTIDNVKAKIQDKEGIPPDQQRLIFAGKQLEDGRTLADYNIQKESTLHLVLRLRGGMQIFVKTLTGKTITLEVESSDTIDNVKAKIQDKEGIPPDQQRLIFAGKQLEDGRTLADYNIQKESTLHLVLRLRGGMQIFVKTLTGKTITLEVESSDTIDNVKAKIQDKEGIPPDQQRLIFAGKQLEDGRTLADYNIQKESTLHLVLRLRGGMQIFVKTLTGKTITLEVESSDTIDNVKAKIQDKEGIPPDQQRLIFAGKQLEDGRTLADYNIQKESTLHLVLRLRGGMQIFVKTLTGKTITLEVESSDTIDNVKAKIQDKEGIPPDQQRLIFAGKQLEDGRTLADYNIQKESTLHLVLRLRGGQ

SEQ ID NO: 59570 - protein, 364 aa, Zea mays
  Clone ID: LIB3587-272-D12_FLI.pep
RYLRPTPPHTLPQSAHHELHLPISLISLHEPTKSNRFARSAPAQRLPAMASLTLPPAMANPRQDAIDLQKAFKGFGCDSTTVINILTHRDSVQRGLIQQEYRAMYHEELSHRISSELNGNHKKAMLLWILDPAGRDATVLREALSGDTMDLRAATDIICSRTPSQLQIMKQTYYARFGTYLEHDIGHHTSGDHQKLLLAYVGIPRYEGPEVDPTIVTHDAKDLYKAGEKRLGTDEKTFIRVFTERSWAHLASVSSAYHHMYDRKLEKVIKSETSGNFEFALLAILRCAENPAKYFAKLLRKAMKGLGTDDKTLIRVVVTRTEIDMQYIKAEYFKKYKKPLAEAIHSETSGNYRTFLLSLVGPGH

SEQ ID NO: 59571 - protein, 277 aa, Zea mays
  Clone ID: LIB3587-277-F12_FLI.pep
SRTGASWATTTAWRRIKHAKMPCPDYGRVHEGFKLAYPDMGRMHPCFGHAAAMPAAAWWRMCVRDSFEFVRAGYDYDDETFDRIFRRIYSTFGSAAPYAVFPYVRAALPPVAARGRRASSSASSATPSTGTGRDVVLPALGLNQGSEWDFGVFSGVVGVEKPDPRIYEAALRQAAGGGGGVAPGEALHIGDSMRKDYARPGAERWRRSGAPVLPDLVAAQEWLAGGARSQGGIEGQLAPGRPVLLARSSKCLGQQTRIGAIIPALGITECPDIDVVV

SEQ ID NO: 59572 - protein, 291 aa, Zea mays
  Clone ID: LIB3587-281-G7_FLI.pep
DSELVERLQEVLRSSDLNTTTTAALRRRLEEDFGADLSHKKALIREQVDLFLAEVAAKAEPQEPKEEEEECEDENSSGARKKQRGNDGKKRGGGFTKLCSLSPALQEFVGASELARTEVVKKLWAYIRENNLQDQNNRRKILPDERLKKIFNVNSIDMFQMNKALTKHIWPLNSEGPVSPDRSTPKEKPQKRDRSEGKKQKGGSSGAGSGFLVPLQLSDDLVKFIGTGESMLSRSDVVKKMWDYIKGNNLQDPSDRRKIICDEKLKDLFGVETFTGFTVSKLLAPHFTKTK

SEQ ID NO: 59573 - protein, 358 aa, Zea mays
  Clone ID: LIB3587-284-G6_FLI.pep
SNIYIMTKSGALQLARSTGGSLSKDQVKSAVDQYVKYHDLHGGEQESRKSNYADLANKYYDLVTGFYEYGWGDSFHFAGGYPGETSREAIKRHQHFMALQLGLKKGMKVLDVGCGIGGPLIEIARFSSTSITGLTNNDYHVSRGKEHIFSAGLSEQCCSLKGDFMNMPIADNTFDAAYAIQATCYAPEAQGVYSEVYRVLKPGQYFALDEWCLTDRFDPNNAKHLTAKAEIELGDGLPDIRTTRQCVQAMKDAGFEVIFAKDLAQDFPCPWYQTMDPNYFSWANFQCTRPGRIITRAIVNTLEFLRIAPAGSVGAYNVLTSASDGLLKGGREGIFTASFFVLGRKPLKESEIVNGGNL

SEQ ID NO: 59574 - protein, 116 aa, Zea mays; identical to SEQ ID NO: 47791
  Clone ID: LIB3587-284-H7_FLI.pep

SEQ ID NO: 59575 - protein, 469 aa, Zea mays; identical to SEQ ID NO: 58898
  Clone ID: LIB3587-285-C12_FLI.pep

SEQ ID NO: 59576 - protein, 282 aa, Zea mays
  Clone ID: LIB3591-003-D6_FLI.pep
YLVFQVVLTPTHLAIVMEYAAGGELFERICSAGRFSEDEARFFFQQLISGVSYCHSMQVCHRDLKLENTLLDGSVAPRLKICDFGYSKSSVLHSQPKSTVGTPAYIAPEVLSRKEYDGKVADVWSCGVTLYVMLVGAYPFEDPDDPKNFRKTITRILSVQYSIPDYVRVTMECGHLLSRIFVGNPEQRITIPEIKKHPWFLKNLPIEMTDEYQQSMQLADMNTPGQSLEEAMAIIQEARKPGDAMNLAGQLPCLGSVDLDDIDFDDIDDIDTENSGDFVCAV

SEQ ID NO: 59577 - protein, 183 aa, Zea mays
  Clone ID: LIB3591-009-F5_FLI.pep
QPAGRWSGSSRPAEPTLSQATSLRVIRPALGILLRKACSSATPLPTTSFSLLSAILSAVIGADATGGASPPPLLPGSPGQVSRELALSVAESCPASEFDSGSCVSGGDPTCSGEAEPARERDVCSVGARPWGRGGSTACGVGCWWKSAPDEIPIWDQSLGKANSIEEAPQMRNRRRRRRRRSR

SEQ ID NO: 59578 - protein, 477 aa, Zea mays
  Clone ID: LIB3591-009-H8_FLI.pep
FCSERTHRPSPISDPLVDPKMQIFVKTLTGKTITLEVESSDTIDNVKAKIQDKEGIPPDQQRLIFAGKQLEDGRTLADYNIQKESTLHLVLRLRGGMQIFVKTLTGKTITLEVESSDTIDNVKAKIQDKEGIPPDQQRLIFAGKQLEDGRTLADYNIQKESTLHLVLRLRGGMQIFVKTLTGKTITLEVESSDTIDNVKAKIQDKEGIPPDQQRLIFAGKQLEDGRTLADYNIQKESTLHLVLRLRGGMQIFVKTLTGKTITLEVESSDTIDNVKAKIQDKEGIPPDQQRLIFAGKQLEDGRTLADYNIQKESTLHLVLRLRGGMQIFVKTLTGKTITLEVESSDTIDNVKAKIQDKEGIPPDQQRLIFAGKQLEDGRTLADYNIQKESTLHLVLRLRGGMQIFVKTLTGKTITLEVESSDTIDNVKAKIQDKEGIPPDQQRLIFAGKQLEDGRTLADYNIQKESTLHLVLRLRGGQ

SEQ ID NO: 59579 - protein, 292 aa, Zea mays
  Clone ID: LIB3591-082-C3_FLI.pep
RTAGKIKEEAMAGGGQAAISFMTRMAKVAAGLGVAASAASTSFYTVDGGERAVIFDRVRGVLPRTMSEGTHLLVPILQKPFIFDIRTRPHSFSSTSGTKDLQMVSLTLRVLSRPDVEHLPDIFTSLGLEYDEKVLPSIGNEVLKAVVAQFNADQLLTERPHVSALVRESLTKRAREFNIVLDDVAITHLAYGQEFAQAVEKKQVAQQEAERSRFLVARAEQERRAAIVRAEGESEAARLISEATTTAGNGLIELRRIEAAKEIASVLSRTPNVSYIPAGDNGQMLLGLNAAR

SEQ ID NO: 59580 - protein, 581 aa, Zea mays
  Clone ID: LIB3591-084-E1_FLI.pep
TPAPRQKEQGRRRKAAPAAHTPRGGAMAELRHATAAAAATRATGSPSKRDAEAASSPLVASPRVGGGRDGLRPHQRWPLPPPVRALLACEDPRSPTASASYRILVAAIACFALAALFSAPSLWARLNAPYLCRKEGIRLHCPRVSQPDSLWENPHAAATSWKPCAERQRHEVSDLVSENETSGFIFIHAEGGLNQQRIAICNAVAIAKIMNATLILPVLKQDQIWKDQTKFEDIFDVDHFINYLKEDVHIVRDIPDWFTEKDDLFTSIKRTVKNVPKYASAQFYIDNVLPRIKEKKIMSIKPFVDRLGYDNVPMEINRLRCRVNYHALKFLPDIEEMADKLATRMRNRTGSLNPYMALHLRFEKGMVGLSFCDFAGTREEKAMMATYRQQQWPRRYKNGSHLWPLALQKRKEGRCPLEPGEIGIILRAMGYTKETQIYVASGQVYGGNNRMAPLRNMFPNMVSKEDLASKEEMEPFKKHVTSLAALDFLVCLKSDVFVMTHGGNFAKLIIGYRRYMGRHRLKSIKPDKGLMSKFFGDPYMPWATFVEDVVITHQTRTGLPEPTFPHYDLWENPLTPCMCRA

SEQ ID NO: 59581 - protein, 366 aa, Zea mays
  Clone ID: LIB3591-098-G6_FLI.pep
PARSPVSSSSLISNSESSSNTSFSWIIQRGTPVCCSSSSLVARGGGGGATMYRSAGVAMAWNVFRFCTALRGLGSIMILLVLAIVGVTYYAVVLCNYGPALFTGGGTTLAALAVLLSFHFLLAMLLWSYFSVVFTDPGSVPPNWNLDFDVEMGETAPLASSELCSQMNSQQSVALGNMTNPRVRYCRKCNQLKPPRCHHCSVCGRCVLKMDHHCVWVVNCVGALNYKYFLLFLFYTFLETTLVTLSLLPHFIAFFSDAEIPGSPAALATTFLTFVLNLAFSLSVLGFMIMHISLVSANTTTIEAYEKKTTPHWIYDLGRKRNFAQVFGNDRKYWFIPAYSEEDLRRTPALQGLDYPVRPDFDGQEL

SEQ ID NO: 59582 - protein, 345 aa, Zea mays
  Clone ID: LIB3591-108-A11_FLI.pep
LLESAMSSQGFGAGSPKSFRYPRGGDFDLESGSPRKGRKPKNPHLETSIVMRIRYFYEAHPVAVALILLSFGLSVLILLSVYETRFRTMRSVSAWSSDGGDYPLPMLRNLVMVAGHSIYTSSRCGETESENSWFLEPYQKHAGQAATFLAHIKEGVGIAARDEGALLLFSGGETRRDAGPRSEAQSYWAIAESKGWFGNDEGVRSRALTEEHARDSFENLLFSVCRFRELTGRYPQNITVVSYDFKEERFAQLHRTALGFPEGRFFFSGTPATPSAREAALKGEAAVRAQFLEDPYGCLGSLHVKRLKRDPFHRTIPYPAGCPELKGLFSYCGPVPYSGHLPWTE

SEQ ID NO: 59583 - protein, 269 aa, Zea mays
  Clone ID: LIB3591-110-G10_FLI.pep
PPDQQRLIFAGKQLEDGRTLADYNIQKESTLHLVLRLRGGMQIFVKTLTGKTITLEVESSDTIDNVKAKIQDKEGIPPDQQRLIFAGKQLEDGRTLADYNIQKESTLHLVLRLRGGMQIFVKTLTGKTITLEVESSDTIDNVKAKIQDKEGIPPDQQRLIFAGKQLEDGRTLADYNIQKESTLHLVLRLRGGMQIFVKTLTGKTITLEVESSDTIDNVKAKIQDKEGIPPDQQRLIFAGKQLEDGRTLADYNIQKESTLHLVLRLRGGQ

SEQ ID NO: 59584 - protein, 303 aa, Zea mays
  Clone ID: LIB3591-115-C9_FLI.pep
THREARPAAAKGRYKSSQGCWQQRRSPARSPWGGRRAARRRTPTRARGPRRRTSAWSRTSGRTARGAGARCPRPGLLRCGKSCRLRWINYLRPDLKRGNFTEEEDELIVKLHSVLGNKWSLIAGRLPGRTDNEIKNYWNTHIRRKLLSRGIDPVTHRPVTEHHASNITISFETEVAAAARDDKKGAVFRLEEEEERNKATMVVGRDRQSQSQSHSHPAGEWGQGKRPLKCPDLNLDLCISPPCQEEEEMEEAAMRVRPAVKREAGLCFGCSLGLPRTADCKCSSSSFLGLRTAMLDFRSLEMK

SEQ ID NO: 59585 - protein, 265 aa, Zea mays
  Clone ID: LIB3591-117-F5_FLI.pep
YPLPPVPSYLRHASSSASRSCRASPRFVAVRAMASGNPYAAELAAAKKAVTLAAKLCQTVQQDIMHSGVQAKADKSPVTVADYGSQILVGFSLKMDVSSGPFSLVAEEDSDELRKDGAEEILEDITDLVNETIFDDGSYNISFTKEGILSAIDDGKSEGGPSGRHWVLDPIDGTKGFLRGDQYAIALALLDEGKVVLGVLACPNLPLSSINNINGNSSGDKVGALFSATIGCGAQVESLDGSPPQKVIAFILINNLKFLTYLLSY

SEQ ID NO: 59586 - protein, 200 aa, Zea mays
  Clone ID: LIB3591-117-G10_FLI.pep
SPSSSPTRSPPATPAAPASAPRSSAPSCSSTPSSPPPTPSATPATPTSRFWLPSPSASPCSWCTWPPSPSPAPASTRPGAWAPPSSTTRTSPGTTTGSSGWALSWALPSRPSTTSTSSGLAPSRPSAPSGATRDERGLAVEQWRATYGRGAVSEENAIIHRSTWVPVVGSGRLFFVSAAAALRACVRFGLVSFPCNVIMS

SEQ ID NO: 59587 - protein, 172 aa, Zea mays; identical to SEQ ID NO: 45169
  Clone ID: LIB3592-006-H2_FLI.pep

SEQ ID NO: 59588 - protein, 145 aa, Zea mays
  Clone ID: LIB3592-060-A10_FLI.pep
NPAQAALYCLYQPRASLTDSGRPAPACPATARRSPGRRLLAVVALVKDLAREHRRLDDPTYDGRRLADVALVPRERRPRRAHPVEAAQQVLVAPRVEVVIYAERRLARPATALAPRWRCCPEQVADVEGLRRRRHQEEEKQRRPP

SEQ ID NO: 59589 - protein, 200 aa, Zea mays
  Clone ID: LIB3594-054-B6_FLI.pep
RNLELSRRRPQQRGGHSTTAPQGSYSRRSGSSEGKMSSVFSGDETAPFFGFLGAAAALVFSCMGAAYGTAKSGVGVASMGVMRPELVMKSIVPVVMAGVLGIYGLIIAVIISTGINPKAKPYYLFDGYAHLSSGLACGLAGLAAGMAIGIVGDAGVRANAQQPKLFVGMILILIFAEALALYGLIVGIILSSRAGQSRAD

SEQ ID NO: 59590 - protein, 244 aa, Zea mays
  Clone ID: LIB3597-002-C5_FLI.pep
YEQLRRRRKAISPIRRRRHRCWWDGPCVRSSEEEQRVGGAAGEVGPRGIEMVLWELTAITAYFLGLRRTYRLALRIQRRLIPPNHPRIRDFVYRRTRDVFNVAVSVHKNIQQRDIEVGRNLGNAILRWLDRMKPSAEIRPRLPGPPNGSTAEQFRHVSSASRGAGAQKTSSSSKASPHDSSGKMLFSRLNIGPKHFPVLPTLAQPNRISASSQCRRISYSYAPFPSVTARRKGVFREDIAQLMV

SEQ ID NO: 59591 - protein, 161 aa, Zea mays
  Clone ID: LIB3597-008-H12_FLI.pep
APIPPPPPPPSSVPFRRASSPEMANARSGVAVNDECMLKFGELQSKRLHRFITFKMDDKFKEIVVDQVGDRATSYDDFTNSLPENDCRYAIYDFDFVTAEDVQKSRIFYILWSPSSAKVKSKMLYASSNQKFKSGLNGIQVELQATDASEISLDEIKDRAR

SEQ ID NO: 59592 - protein, 294 aa, Zea mays
  Clone ID: LIB3592-087-H1_FLI.pep
TKRKGDRGGWRKPTRSGEQQVSSGRDRKRRVEGPEPVGVRQVERRQRVASSGGAPRADVLHGEERGHGVAEDALLRLRDGERRGGGLAPIARLREHGLHQGLALPHQMRHRLRLEEGLLQHRLHHGKPQHRAGALVVLLEDLGQACKQPAAYVVDAAVVEEQHHDAVEVDDLPADGGDLGLVQRRRRRRPAAAQRALDVVLQLPVADDELLLLVEEEGVDLLGLRVDLGHELGLLRGQRRAAAGAGLDAPLQLLVAQELVLPLREAPLDLPPQPLAELHHLLDSIDSCFASLCF

SEQ ID NO: 59593 - protein, 422 aa, Zea mays
  Clone ID: LIB3592-097-B3_FLI.pep
DSDGAGMMSHEQQIVPPSKGSVNGFPHRKLDKEGSGTQSRINLVRSSSGGFTNSENGIKLGHGSHSRDRLIYVLTQLIGHHVDVHVNNGSIISGIFHATNPDKDFGVVLKMAQVIKDGSARGQRYPAVLVKKPETMIIPARELVQVFAKDIELGGELPKVPGNDKRKDLLIDSAITRYHYLEERELERWAPDGGDSECIELEKYDRKGNRSWDQFETNAALFGVKTTFNEEIYTTKLERGPHMRELEKHASRIAREIEGEDTRDIHLAEERGLFLGDDLDHDEEIKYSAVRRDTDNSKYKPPFTKVPSSTCHVDSFNRTVNIDPNDSLACSSTMDKESSSHIFDDTDASATIHTNSVSQPTSDYLSDRPLSNDENRLDRKLNKESNENMDNRKLQHEDNLPDGARPLISEALDGRSSSSHAY

SEQ ID NO: 59594 - protein, 436 aa, Zea mays
  Clone ID: LIB3593-002-B10_FLI.pep
QQRKAGSANRNSHGLHRRRRGRGGGRGGVHVRDAAGVVVHPAHDAEERHRAGPAGGAAEGGRRRQGGAGARGGGGADARGARRPRRRGGHGGPHAPPARLLRRRPVPDGGPGRPVRAPLLRRARLQVAHPQRGRRVHGRPRAHEPGQGPHGELVLPQGRGAGRRHPVQQGVRDDGVRVPRHGRALQPRVQRGHEEPLGDHHQEAAGLLHGLRGRVDAGGRGRRRGRHAARHHVPPPAHLRGQLRPAARHLRGAAVPRRAPRGRGHVRVRARRRRHPHEVDPPRLERRALRHAAQELLRRAAGKWQGHRRRVRAAGQHGGHPQGAGRLPRRHDHARAQPRRQGAVRARVPRARKGRRLLRVQGHLHLRQRLGHRVHQVNHRRRDEMAWLPHALLAWSSYRTSPSSSSSGYCAATSLLSRMHVLLLNFLSSYHALWLA

SEQ ID NO: 59595 - protein, 412 aa, Zea mays
  Clone ID: LIB3593-004-C11_FLI.pep
LGFPPMAAPTTSRRGPGGARNMDDENLTFETSPGVEVVSSFDQMGIKDDLLRGIYGYGFEKPSAIQQRAVLPIINGRDVIAQAQSGTGKTSMISLTVCQIVDTAVREVQALILSPTRELASQTERVMLAIGDHLNVQVHACIGGKSIGEDIRRLENGVHVVSGTPGRVCDMIKRRTLRTRAIKLLVLDEADEMLSRGFKDQIYDVYRYLPPELQVVLISATLPHEILEMTSKFMTEPVRILVKRDELTLEGIKQFFVAVEKEEWKFDTLCDLYDTLTITQAVIFCNTKRKVDWLTEKMRSNNFTVSAMHGDMPQQERDAIMGEFRSGATRVLITTDVWARGLDVQQVSLVINYDLPNNRELYIHRIGRSGRFGRKGVAINFVRKDDIRILRDIEQYYSTQIDEMPMNVADLI

SEQ ID NO: 59596 - protein, 340 aa, Zea mays
  Clone ID: LIB3593-007-E9_FLI.pep
PSITPSSTESAQPEPISARVPADPAAPHQHNPGQRPPVDASLIGSPRSMGSPGSANGRRGEYVRIPEEVEVASKGEGDAAAAIKAAVAAECPRVLRCRAIRWWAKVAVLGIFLAGAGAAAVVFLGPLVIKKVVAPILYWESITFSRPAIALICFGTIALFPSVLLPSSPFMWLAGMTFGYLYGFLIITVGMSIGMSLPYFIGSAFHCRIHRWLEKWPKKAAFVRLAGEGDWHHQFKAVALLRISPFPYLVFNYASVATNVKYYPYIAGSMAGTIHETFLAIYSGKLLQSLAVATSQGSFLSVDQIIYNGIGFTIAATSTAAITIYAKKALQKLQAEDEIF

SEQ ID NO: 59597 - protein, 245 aa, Zea mays
  Clone ID: LIB3593-011-E11_FLI.pep
PATNKPASERAEEEMPGKGQRRREKNFRAAHGGVPCLPPPPKQRELEAIPTKLRRLIAFQNKHNANADASSGGAPKKQDDGLRKNKLATDKAKDKKTKKQALVVPADSKASDIKGNDKRSAANEDVNAEGSKGKRKRGNVKDLRFEELDKNISASKKQRRKQHLDEKKKKRKDNKTETLPDFPGREKVKFGEVVVAPPKLSFPKVKSASDASREMLRKEAIENYRYIKGWTSRPGLQLPTLAESQ

SEQ ID NO: 59598 - protein, 272 aa, Zea mays
  Clone ID: LIB3594-007-C1_FLI.pep
QINRKRQDIAFLVYVLNQSTSLQIILYDTPGVIRKEMHKLDSMMMKNVRSAIGSADCVLVVADACKAPEKIDEMLEEGVGNKDIGLPVLLVLNKKDLIKPGEIAKKLEWYQKFTNVDDVIPISAKFGHGVDDIKEWILSKLPLGPAYYPKDIASEHPERFFVGEIVREKIFVQYRQEIPYSCQVNVVSYKSRPTAKDFIQVEILVEKESQRGIILGKDGKSIKMLATASRLDIEDFLQKKVYLEVEVKVKENWRQDERLLKRYGYGGEIQAL

SEQ ID NO: 59599 - protein, 360 aa, Zea mays
  Clone ID: LIB3594-008-A5_FLI.pep
AEVAKTTRAAKRHLFPTLLHLHLRAAAEMGADGGLNRAAEKPRDGEGGEARVFRCTDYSLPRTTLALALWLGGIHFNVLLVLASLFLLSGRAAAIVVAFQLLFMFAPVNDRDKWGQSVARFICRHAMGYFPITLHVEDYKSLDPSRAYVFGYEPHSVLPIGLSALADLVGFLPLTKIKVLASSAVFYTPFLRQIWTWLGLVPATRKNFYCYLGAGYSCIVVPGGVREMLHMNNDSEVAFLKSRKGFVKIAIQSGCPLVPVFCFGQSYAYKWWRPGGKLFIKIARAVKFTPIIFWGRFGTPFPFPKPMHVVVGKPIEVNKIPHPTIDEINEVHEQFIIAMRDLFEKYKAKAGYPGLHLRVL

SEQ ID NO: 59600 - protein, 45 aa, Zea mays
  Clone ID: LIB3594-012-B5_FLI.pep
QMLRRQLRPHPRSRRKHLQRNLQGPSHKALTELSVSSPLCCLPPD

SEQ ID NO: 59601 - protein, 773 aa, Zea mays
  Clone ID: LIB3594-019-E1_FLI.pep
NQPAPPFQRLHPLLPMATPFPPEADEGEARELLYEAYNELHALASELGGAAAAPAVVVVGHQTDGKSALVEALMGFQFNHVGGGTKTRRPVALHLRFNPRCDEPQCRLLSATGDADEHDEAGVAARPMPLADIQAYIEAENLRLENDPCQFSEKEIIIKVEYKHSPNLTIIDTPGLILPAPGRKNRVLQSQASAVESLVRAKIQHKETIILCLEDCSDWSNATTRRVVMQVDPDLARTVLVSTKLDTKIPQFARPSDVEVFLHPPNCVLDVSLLGDSPFFTSVPSGRVGSCHEAVFRSNGEFKKAILSRELEDIASIEDKLGRSLTTMEKDRIGVGNLRLYLEELLQKRYVKSVPLIIPLLEKQHRNTTSKLREISHELSDLDEAKLKEKAQLFHDTFLTKLSLLLKGMVVAPPDKFGETLVNERINGGTFTGSENFQLPNKMMPNGGMRLYGGAQYHRAMAEFRLVVGSTRCPPITRDEIVNACGVEDIHDGTNYSRTACVIAVAKARDTFEPFLDQLGFRLLYILKRLIPISVYLLEKDGEHFNSHEVLIRRVQEAFKRFVESTEQSCRQRCMEDLESTTRYVTWSLHNKNRAGLRHFLDSFVAPEQLSVNTLNVQFSGLNDNKQDKAKGDSKSNHSPDTNSSTAMPETRLVDLLDSTLWNRRLVPSSERLVYALVHQIFHGIKEHFLVTTELKFNCFLLMPIVDKLPALLRQDLESAFEEELDSILDVTQLRQSLGQKKRELEIELKRIKRLKEKFGEINKKLNSLQVRQ

SEQ ID NO: 59602 - protein, 361 aa, Zea mays
  Clone ID: LIB3594-027-A1_FLI.pep
RERDREIIDRSIDDHGEATTSCFHACSCSARCDVRVHSYNRALHRRLLRHAGQQPAVQQRRGAALQVQGHQRHAHLLPRRQSPRRPAQLRHRAHPRHRQRRRRPGPARQERLVRGLVGAEQRAPLLPRRRHQVRRGGQRGAGRRHAQPPPGDAQPGRRPGARRLPGHQVLHVGALRRGRQLVPALQRLLRAGLHGGRRALPGRHRRAAARQRVPLLRVPGQPARHQPGLRHVPAGHHRQGQRQRPQLQQPVRRHGGRRRRRAREGRRAQRQGRRVRERLALGRRLRGQRRQRAEIQPGTHRPRRPRHAQEDRPAGDLRLRHVQREPEGRRSHGEELRPLLRQQAARVPDPVQLIKSGGSEE

SEQ ID NO: 59603 - protein, 172 aa, Zea mays
  Clone ID: LIB3594-051-H2_FLI.pep
GASLHRHMMWQPAGCSGSHRNIGGDGPRQQAPEHGGGGYGYGQSFFLSSSSSFFFLASSSAFFFFSSSSFFFFSSSSFFLSLTSSTTTMSARQTFLRSRLIMQVMSTLSPTTSSRSLASPAIPTEFTPTNLDAICMALDRFLSFGTPSLITDFCLDIASPAAAAAANDGFNV

SEQ ID NO: 59604 - protein, 442 aa, Zea mays
  Clone ID: LIB3594-053-H7_FLI.pep
LASSQAEAKYPKASDGARKHRQPVARAPGRGLLVGAAGPAGHRPAREPDRLRRAHAGHLRRVQPGAAVAARRRLRVRLLRPAGRLGRRGGRELRRHQVHLRHVGAPRRARGVPAAAAAGPAARVLEPGVQLDGLRRRRHRRRRRRARPPRHPRRVARHHARPRVGQRLRLHARVRRARAGPRRRRQPVRLGAPGLPLRVHVQQPGLQVQPDQRQRSGPGGGEQAGGTVQGRGDEHHGVRAQPGRVAGDAERRGPRGQRRERAAGRVVAAAVPRDGAGVREPARRGRQLQEGDRVVPGPAGAPREERRRHRADVPAAGVRGRGRAAAHRHGAVAVPAAARDDRDAAQPRVLPARRGRRAGQRRGVQAGGGPRRRAGQQGRGRAQGPVPGARPVVGRQEQVHGQGRRRPLCAPGLRADLIMHDAGVVRAGKLLVPLYRSITMYE

SEQ ID NO: 59605 - protein, 300 aa, Zea mays
  Clone ID: LIB3595-013-H11_FLI.pep
HRHRLRAPPRRATSAPLFAPAGVEAEAKASMHHDPNPFDEGSAEDNPFSNGGAGGGKQQYGFRPTEPVGFGGASRGDAVVDVPLETMGDSRSKVKELSSWESDLKRREADIKRREEALKNAGVPMEEKNWPPFFPIIHHDIANEIPANVQKLQYLAFASWLGIVLCLSWNFVAVIVCWIKEGDSKLFFLATIYALLGIPLSYLIWYRPLYRAMRTNSAFSFGWFFLCYLIHIGFCIIAAIAPPIVFHGKSLTGILAAIDTFSEHVIIGIFYFVGFALFCLETLLSIGVLQKVYMYFRGNK

SEQ ID NO: 59606 - protein, 111 aa, Zea mays
  Clone ID: LIB3595-016-D2_FLI.pep
SEELANDCDNKRLNPGNDNYPLSTAGANNLFLGIEQGAGSSNGQAAFSKFDYGSSMSLPSGQGMSGLIVKGAKWRDGDWLCNNCNNHNYASRAFCNRCKTQKESAVHPGVL

SEQ ID NO: 59607 - protein, 58 aa, Zea mays
  Clone ID: LIB3595-036-B5_FLI.pep
DEKLSTSIIVLSKVACDTYIHPTQSNPSVHRFGPSTTATAPPPLLLLHYSSSTSSPNP

SEQ ID NO: 59608 - protein, 399 aa, Zea mays
  Clone ID: LIB3595-051-D3_FLI.pep
SRRRPAVKMHRQKNPNSGWAAFDRKQRSADGSGYEGDADPFPSLSNSGASNIASSSITEKNGLKRKPFASVVRPSVDSGAVSTGCGNKNSANHVDSGNHGAISAPLNKVKILKDAHSWADIHLIEDVLAAVNNDVGQASDLLKVMDSPALQTGEGRTSGQLADVMNKTHGSPSESAAAGKANPDSSQLLLPLMNFPSIPLQPEFEDIDDEYFSYRKDALKMMRAATKHSQSASNAFLRDDHAAAKELSLRAQEERAAAEKLNNKAAEEIFRLRNSNNDIWKIDMHGLHASEAVAVLERHLHMIEFQQPGNKSASSEDLAKLESAYSESTTGSNIELAAEKVVLRRPKQSILHVITGMGNHSKGQASLPVAVRGFLIENGYRFDELRPGVFAVRPKFRRR

SEQ ID NO: 59609 - protein, 459 aa, Zea mays
  Clone ID: LIB3596-017-F8_FLI.pep
PAALAAMRIEEVQSTSKKQRIATHTHIKGLGLDVAARSCAPPRPVFFSRVLASVCLRTSSSLFSLLRFLIMGAEQANGMAIALAAGFVGQAAAREAAGLAVDMIRQKKMAGRAVLLAGPPATGKTALALGIAQELGSKVPFCPMVGSEVYSSEVKKTEVLMENFRRAIGLRIKENKEVYEGEVTELSPEEAESTTGGYAKSISHVIISLKTVKGTKQLKLDSSIYDALIKEKVAVGDVIYIEANSGAVKRVGRCDSFATEYDLEAEEYVPIPKGEVHKKKEIVQDVTLHDLDAANAQPQGGQDILSLMGQMMKPRKTEITEKLRQEINKVVNRYIDEGIAELVPGVLFIDEVHMLDIECFSYLNRALESPLSPIVILATNRGICNVRGTDMTSPHGIPVDLLDRLVIIRTETYGPTEMIQVLTYLGRYFYLLFFLCRIFINLCLLPFTDIGYPSTSGGD

SEQ ID NO: 59610 - protein, 459 aa, Zea mays
  Clone ID: LIB3596-030-A5_FLI.pep
LSSRMIKWGLSSGTPADSYYEVRSDCTDGVPKSKFKIKAGKTLSARKWQAAFSPDGCLDIASVLSRIQRGGVHPTVRGEVWEFLLGCFDPRSTFDEREEIRQIRRIQYARWKEDCRQMDSHVGSGKVITAPLITEDGRPIKDPLVLLEATSDTNTSGDAPTTSINGNEVDESAERITDKQIIEWKLTLHQIGLDVLRTDRTMVFYENKENLSKLWDILAVYAWIDKDVGYCQGMSDLCSPMIVLLNDEADAFWCFEKLMRRLRGNFRCTDQSVGVANQLQHLASIIQVLDPKLHDHLETLGGGDYLFAFRMFMVLFRREVSFGDSLYLWEMMWALEYDPDIFFAACEEQGAVNKNKVSKSKLKGLRHFGKWDNKDKDKDKEDAKNGAEDGEDGPVPISVFMVASVLKEKREKLLQEARGLDDLIRILNDVNGNLDAKKACAGALKLHKKYLKKVQEKKP

SEQ ID NO: 59611 - protein, 78 aa, Zea mays
  Clone ID: LIB3596-037-G5_FLI.pep
RRSCFRGLIVHDIAVTSVLPTSSAPWQLSPHRVSLQHQPFAVLLKQDVPNLSVLVLFFLAPEVSYNVHELFVSQAPPF

SEQ ID NO: 59612 - protein, 151 aa, Zea mays
  Clone ID: LIB3597-004-G3_FLI.pep
ALRARRLPSSPPPHSSRLTHMASIAGSSALSFAMPVKAINSNSLAFSPVRKGNTFLRLQPVPMRSVSCAAKKDTVDKVCEIVKKQLALPDHTEVCGESKFSELGADSLDTVEIVMGLEEHFDISVEESSAQTIATVEDAADLIDKLVAVKA

SEQ ID NO: 59613 - protein, 328 aa, Zea mays
  Clone ID: LIB3597-017-F4_FLI.pep
RDPMGEASPSIAKDVTELIGNTPLVYLNKVTDGCVGRVAAKLESMEPCSSVKDRIGYSMITDAEEKGLITPGVSVLIEPTSGNTGIGLAFMAAAKGYKLTLTMPASMSMERRIILKAFGAELVLTDPLLGMKGAVKKAEEIQAKTPNSYILQQFENPANPKIHCETTGPEIWKATAGKIDGLVSGIGTGGTITGTGRYLREQNPNVKLYGVEPVESAVLNGGKPGPHKIQGIGAGFIPGVLDVDLLDETLQVSSDEAIETAKALALKEGLLVGISSGAAAAAAVRLAKRPENAGKLFVVVFPSFGERYLSSVLFQSIKKEAESMVVEP

SEQ ID NO: 59614 - protein, 246 aa, Zea mays
  Clone ID: LIB3597-068-A5_FLI.pep
SRVFDFSRRRCSSHIPREDACSSPIDTMAVFSDLHTADGLKSLEAHLAGKTYVSGDSITKDDIKVFAAVPSKPGAEFPNAARWYETVSAAVASRFPGKAVGVNLPAGSAPAAAAPADEAEDDDDLDLFGDETEEDKKAADERAAAAKASSKKKESGKSSVLMDVKPWDDETDMKKLEEAVRSVQMEGLTWGASKLVPVGYGIKKMTIMLTIVDDLVSIDTLIEDHLTQEPINEYVQSCDIVAFNKI

SEQ ID NO: 59615 - protein, 69 aa, Zea mays
  Clone ID: LIB36-006-G3_FLI.pep
SGYEEAAYMEINKDRMNSKINQTNSQKDMAGSPSPLSLTHTNTRTMCAERFFYSVVVRSSSRHSSSDHA

SEQ ID NO: 59616 - protein, 219 aa, Zea mays
  Clone ID: LIB3607-034-F4_FLI.pep
HSRSRRKFEDEEQLHCGRTSGMEGQFQVGKEEVIQAWYMDDSEEDQRLPHHREPKEFIPLDKLSELGILSWRLNADDWENDENLKKIREARGYSYMDICDVCPEKLPNYEAKIKNFFEEHLHTDEEIRYCLEGSGYFDVRDQDDQWIRVAVKKGGMIVLPAGMYHRFTLDSDNYIKAMRLFVGEPVWTPYNRPHDHLPARKEYVEKIINRGGNQAVEAR

SEQ ID NO: 59617 - protein, 285 aa, Zea mays; identical to SEQ ID NO: 53470
  Clone ID: LIB3597-022-D2_FLI.pep

SEQ ID NO: 59618 - protein, 217 aa, Zea mays; identical to SEQ ID NO: 59358
  Clone ID: LIB3597-031-B12_FLI.pep

SEQ ID NO: 59619 - protein, 128 aa, Zea mays
  Clone ID: LIB3597-043-E8_FLI.pep
PYIRARLGSGRLVVVELEPHPVVDLVVLERDVVLVDVVPLLDADLLGARPRLRRHQLLEVADGVVLVALHPHLLPQAVVQHHLDHLRLPDPERAPLSPPTDSQTLDLASEWLACKQEVVRGGRGERTR

SEQ ID NO: 59620 - protein, 162 aa, Zea mays
  Clone ID: LIB3597-046-E11_FLI.pep
LAIIEHACVLDNHKDQQTWPLHCPSISPDLAVVAPGLVAVEPVVDGGGVGLRPVEEVGAHALGGQVAPRVEDAAPHVAGAARRRRRRRRRRRHRRRRGRRHRLRPLVAAAVRVFVDDERAGGGGLAELLEARLRARPGHHVVPQLVQHLLIRSPLSTSQNHQ

SEQ ID NO: 59621 - protein, 233 aa, Zea mays; identical to SEQ ID NO: 59224
  Clone ID: LIB3597-052-C3_FLI.pep

SEQ ID NO: 59622 - protein, 146 aa, Zea mays
  Clone ID: LIB3597-054-C5_FLI.pep
SGDQNMHQAGGMGRSLELLLIQFLMPDNDTRRQAEEQIRRLARDPQVVPALVHHLRTAKTPNVRQLAAVLLRKKITSHWPKLPPDSKASLKQALIDSITLDHRFFAKYLSPILLRMSALESARFQFTQIVHLAICLRNTLSVFSTY

SEQ ID NO: 59623 - protein, 231 aa, Zea mays
  Clone ID: LIB3597-055-F5_FLI.pep
GMAVPAPAKAARLLAASAAVLVLLWCVHFRGGLSFGSPTNKGLIFNVHPVLMLIGFIILGSEAIMSYKIWPWSHDTNKMVHMLLHAVALFLGSVGIYAAFKFHNESGIDNLYSLHSWVGLGTICLYGIQWLFGVATFFFPGASPTVRRRMLPWHTRAGLVVYILALLASELGFLEKLTFLQAAGLGRYSSEALLVNFTALVILLLGASVVLYVTAPMHNEHAHGYSAVHKP

SEQ ID NO: 59624 - protein, 170 aa, Zea mays
  Clone ID: LIB3597-067-B6_FLI.pep
ATDGCSRSVHPGGFVRSKAASELEDAGQAVGRRGGRASPGDGPREAPQGHHRPPARHQQRRGRRQLQAGAVDAVDPDDAGDAVVVVVVDDAARRRQRVAQRLPPGEQPGHQGHGRQPLRPAAAQLPHRLRLALQRRDQEQPPLDRARWMDSEEAMFAGPCGYLKRTHALL

SEQ ID NO: 59625 - protein, 193 aa, Zea mays
  Clone ID: LIB36-003-G11_FLI.pep
LADDHGVPLLCRHYRPFLHGRARSRSGQQEVLHRACLSPQGHCHRRRGRCRQRPACRRRRHGPGGAAGRRRRRARLRAQPVHRQGRRHHHLQEQRRLPAQRRVRRRRGAERRRRLQDLAGGVPQRARRDLLRHPHRAGHLRLLLRAAPRSRNGRQDHSQLKLAIHSMHLDLYVLRPSMDDASISTCFPHMYNN

SEQ ID NO: 59626 - protein, 114 aa, Zea mays
  Clone ID: LIB36-009-H6_FLI.pep
RAFSQLPGCRSQKMQSKQPIDGRTGRAAPSLPLPPSPPLPIDLPPGHVQQLGAVDLAELAAEDAAGDEAAPPLADEGGVDEARGVVGREADEELLDKIVHQRRRRRHHHHLSSP

SEQ ID NO: 59627 - protein, 336 aa, Zea mays
  Clone ID: LIB3600-022-G6_FLI.pep
TVHPHARSQVATRGRRGRHRTVALLPPPARDRGGIPRSHAAPGRGPSEMVNTFFLFCGCVDQASVAVVEKWGRFLRLADPGLHFFNPLAGECVAGSLTTRVQSLDVRVETKTKDNVFVQLICTIQYRVVKENADDAFYELQNPQQQIQAYVFDVVRAIVPRMNLDDLFEQKNDVAKAVLEELEKVMADYGYSIEHILMVDIIPDAAVRKAMNDINAAQRLQLASVYKGEAEKILMVKKAEAEAEAKYLSGVGIAKQRQAITDGLRENILNFSHSVSGTSAKEVMDLIMVTQYFDTIKELGDGSKNTTIFIPHGPGHVKDISEQIRDGMMQASSSNV

SEQ ID NO: 59628 - protein, 163 aa, Zea mays
  Clone ID: LIB3600-025-H1_FLI.pep
LGLSGPHRSVPPVPVVVAVAAAAVCTTVSPTAAVASTTTAVASTATAVAASITAPATVSATAASTAAAGLGLVNGDVAAVELLAVHALDGAAHRVLRGEGDEAEAAGPLRLPIQDDLRLEDLAVGAEGVVEGVVVGGPGEAANEATVLNVRRRHLFPLAHEPE

SEQ ID NO: 59629 - protein, 180 aa, Zea mays; identical to SEQ ID NO: 37897
  Clone ID: LIB3600-046-H11_FLI.pep

SEQ ID NO: 59630 - protein, 181 aa, Zea mays
  Clone ID: LIB3600-055-C6_FLI.pep
GSPCYLAFTDLPLPNRTVTSRRPGAVVLRLIAARQWWRAADRIEQRMDGGGGLGGLRWTAEEASTIGGIATVSLLHSFIPTHWLPFSIVARAQRWPLSRTLLVSQYPPPFRVPRSPHLLRLPLVTVHRLGASRSGYLLILRGWVKASSQLMVQECAIRVLLWLGCSRWLVPLDGSGFAWCH

SEQ ID NO: 59631 - protein, 197 aa, Zea mays
  Clone ID: LIB3606-028-C5_FLI.pep
TCCGKKNHAESNYRLTKEGFLAKVPILNGHVYSINDNATVEDAATDYEFMIRQLVKVRTIGVSERNDCPKFDLILLTMGSDGHVASLFPNHPAMELKDDWVTYITDSPQPPPERITFTLPVINSASNIAIVSTGDDKAKAVHIAVSDMAEGLDAPTSLPARMVQPTDGKLVWFLDKAAASFLDSKNDDDDACYERHE

SEQ ID NO: 59632 - protein, 200 aa, Zea mays
  Clone ID: LIB3606-030-B8_FLI.pep
KHRASLTIISANSLYQPNSNFKNTSHEDVRNTTEINIYSTGSEKEKVWFRRKKMMRCSRAMSSATPIVQNDESVFTGCIRSWLRYGGLPRMPTSTWLAWMVQWKSLVGTPLGSSMYMFTSSSVWSHSNTFCPAHGGDGDRNLRQRGRVPGEGRLWRIPGRGSGSPLCTKVWRFSGAKFSAMAGNRVESPRRKLIFRTRHF

SEQ ID NO: 59633 - protein, 162 aa, Zea mays; identical to SEQ ID NO: 59134
  Clone ID: LIB3606-031-H3_FLI.pep

SEQ ID NO: 59634 - protein, 413 aa, Zea mays
  Clone ID: LIB3606-053-G5_FLI.pep
LNSQKDPKEFLPFLKSLECLPPAIMRYTIDLRLGRYESALRNIVSAGDAYHEDCMKLLNDNPQLFPLGLQLFNEPDKRNQILEAWGDHLSGEKCFEDAALTYQCCSSYQKSLRAYRACGDWRGVFTVAGLLELKREEIVQLAHELCDEFQALGKPGDAARVALEYCSDAERGVSYYIMAREWEEALRVAYMLSTHDLVEAVRDAASECAASLIAEYQEGLLKIGKYAARYLAVRQRRLSLAAKLRSEDRFMDVEDDSVSETSTSFSEMSAYTTRESSASVMSSNASKSRAARRQKKGGKIRAGSPGEEMALVEHLRGMALTGGAQNELKSLLVALIQLGKAETARRVQEAADSFEVSQRAAVKLAEYTVSSDRVEERAHTLERYVRMLRDRESGHGEAGGTWRINALSPPVTG

SEQ ID NO: 59635 - protein, 674 aa, Zea mays
  Clone ID: LIB3606-054-E12_FLI.pep
GELPLPASPCASCAAARRRAHSPAALSSPRLPVIGLYIYRWFEVIGRTTQAKMASVHKATTLVLMFCLLALGRAEYLKYKDPKQPVAVRIKDLLGRMTLAEKIGQMTQIERENATADALAKYFIGSVLSGGGSVPAPQASAQAWAAMVTEMQKGALSTRLGIPIIYGIDAVHGHNNVYKATIFPHNVGLGATRDPDLVKRIGEATALEVRATGIPYAFAPCIAVCRDPRWGRCYESYSEDPKVVQSLTSLISGLQGDAPADSAGRPYVGGSKKVAACAKHYVGDGGTHNGINENNTIIDTHGLLSIHMPPYYNSIIRGVSTVMVSYSSWNGVKMHANHFLVTDFLKNKLKFRGFVISDWEGIDRITTPPHANYSYSIEAGVGAGIDMIMVPFRYTEFIDDLTTQVQNKVIPMSRIDDAVYRILRVKFTMGLFENPYPDSSLAGELGKQEHRELAREAVRKSLVLLKNGKSSYAPLLPLPKKAGKILVAGSHANDLGNQCGGWTITWQGSSGNTTAGTTILSGIEATVDPSTQVVYSESPDSGVLADKYDYAIVVVGEPPYAETFGDNLNLTIPAPGPSVIQSVCGAAKCVVVLISGRPLVVEPYLGDMDALVAAWLPGSEGQGVADVLFGDYGFTGKLPRTWFKSVDQLPMNVGDAHYDPLFPFGFGLTTKGTK

SEQ ID NO: 59636 - protein, 863 aa, Zea mays
  Clone ID: LIB3606-054-H7_FLI.pep
INNFPVRASRFSRSRSRSLSPFAYPVDPACVRAISCGDNWAIDAAAAVAAVYERCAGVRWSLRQAFVYPSPTTSTIYLQARFLCLTCGSLLQLLYKAAVLKMSEFLDLELQDGIRMPWNVIPGTKQETVNCVIPVSAIYTPLKPISDIPVLPYSPLRCRMCRSILNPFSIVDYVAKIWVCSFCFQRNQFPQHYSSISENNLPAELFPQYTTVEYISSTETGPIVPPVFIFVVDTCMIEEEIGYLKSALAQAVELLPDNSLVGFITFGTYVQVHELGFGLLPKSYVFKGTKEVTKEQILEQMCFFAGKKMPTTGVIAGTRDGLSSESISRFLLPASECEFVLNSVIEEIQKDPWPVPADQRASRCTGAALSVAANLLGVCVPGSGARIMAFVGGPSTEGPGPIVSKSLSEPIRSHKDLDKDSAPLYDKAVKFYDQIAKQLVHQGHVLDLFACAVDQVGVAEMKVAIEKTGGIVVLAESFGHSVFKDSLLRIFQSTDDNLGLSFNGILEINCSKDVKVQGIIGPCSSLEKKSPLSSDTVIGQGNTSAWKMCGLDRKTSLCLVYDIAKKDGPDSIAQSANNQFYFQFLTYYQHNEGQMRLRSTTISRRWVSGDNHVEELVAGFDQEAAAAVMARLVSFKMETEVDFDPVRWLDRALIRLCSKFGDYQKETPSSFSLSPRLSIFPQFIFNLRRSQFVQVFNNSPDETAYFRMMLDRENVTNTVVMIQPSLISYSFQSGPEPVLLDATAIASDKILLLDSYFTVVIFHGVTIAQWRNAGYQDQEGHEVFAQLLKAPHEEANLIIKERFPVPRLVVCDQYGSQARFLLAKLNPSVTYNSDNPSPGGDVIFTDDVSFQVFMDHLQRLAVQ

SEQ ID NO: 59637 - protein, 313 aa, Zea mays
  Clone ID: LIB3607-008-G2_FLI.pep
IGWARDRPLPPGREQQQPPSPAMTSAHSKLYSDDVSLVVVVVDTNPFFWAAAALPFADFFAHLIHFVNSLLLLNHLNRVVVIAAGVSSCAYILDSSDASPSGGVAVSDTFDKASRKAEEFIAQDARATAGNGSVASANAASLLSGALSISLCYIQRIFRSGSRHPQPRILCLQGSPDGPEQYVAVMNSIFSAQRSMVPIDSCIVGTQDSAFLQQASYITGGVYLKPQELNGLFQYLAAVFATDLHSRAFLRLPKTLGVDFRASCFCHKKTIDMGYVCSICLSIFCKNQKKCSTCGSEFSRAMPDLNSVPDQSK

SEQ ID NO: 59638 - protein, 436 aa, Zea mays
  Clone ID: LIB3607-014-C8_FLI.pep
LRFVVDELAKEYDTTRDQLNNAIPSIRISRRKCLVGDEGVKSSSCCIAVVAHAERNSISQLDTIKTRVIPSILDTLLKGFLEFKDVEIQCPHDGELLVKVCMSEHCKGGRFWPTLQNACIPVMELIDWELSQPSNVSDIFCSYGIDSAWKYFVESLKSATTDTGRNIRRELLLVIADSLSVTGQFHALSSQGLKQQRTRLSISSPFSEACFSRPAQSFINAAKQCSVDNLCGSLDAVAWGKEPFNGTSGPFEIMHSGKPHEPEQNESIYDFLCSSKVRNFEKNHLDTRRQSTENASICRLACKSSKGSTTVNGVAITIDQDFLHAKVSIWDNIIDMRTSLQNMLREYPLNGYVAEPDKSQLIEALKFHSRGAEKIGVGVREIKIGLNPSHPGTRCFILLRNDDTTEDFSYHKCVQGAADSISPQLGSYLKKLYYRA

SEQ ID NO: 59639 - protein, 227 aa, Zea mays
  Clone ID: LIB3607-020-A8_FLI.pep
CWSTVPKLAGLQRCGKSCRLRWINYLRPDLKRGAFSEEEEDLIVELHAVLGNRWSQIATRLPGRTDNEIKNLWNSSIKKKLRQKGIDPNTHKPLLVEVERSKAAPTTSTERTSESNDVDPSSGAALGNSSHLLLSETAQSPQLPALGKHRRETTSLAHLRVPPKELFLDQLASGHENLTGCRTAGPVPNFPFQQLMCYNNEFGNKNGASNNSLWLTTMRQVAAPFPL

SEQ ID NO: 59640 - protein, 464 aa, Zea mays
  Clone ID: LIB3607-021-B8_FLI.pep
HSLACFPNANVIDSTNGFPRRSHHFPRLCGACLRRRRRRPRRAHARPRRPQRDRVPVRPRRPAPRHAPAQRQEASPSRVVRRHGVRADPELAHRRGVPDGAGHRHAAAAVPGHRRHGQRPHLDAVRALHLPVLPPADAAVQPVQLHHVRRAPVQQLAERMRGGAGRDRDGPAAGVRVHVQRHVRQRVDECLSGVRDLHVRVHAGRSVPRPWHRLRLQHRQQRLQRLVRVRPRRAGQGEAVARLPARRPQVLLLPHAVPGHQQHEHAPPRAVGVAQRHRRRQLHAFRRQPFHCAHEHLLLSQPDRHIPRHDGTVHPARRLLAQRGRHRRAHHRLWHHHHITGQHGVPAGPGSGRLPGDAAHHRRVGSHGARPVLHAALLNVGAAGHAEHDAPLQRRGHGAPGGQLHDVGRLRLVVPGHAEPDRRRGKHSRQLPAAKHAHPLRHWAGDIVVCSGQMQRALIRALQN

SEQ ID NO: 59641 - protein, 67 aa, Zea mays
  Clone ID: LIB3607-023-H7_FLI.pep
KNLYRYNYKYRHVDWFLIPPYSCNDIEGSGTSPRVYTFMYNISFPSTICMDLILKLRVTSRTLVLIA

SEQ ID NO: 59642 - protein, 217 aa, Zea mays; identical to SEQ ID NO: 48281
  Clone ID: LIB3607-026-G3_FLI.pep

SEQ ID NO: 59643 - protein, 435 aa, Zea mays
  Clone ID: LIB3607-028-B9_FLI.pep
AAAGHTASAELTRRRRTAASSGTGRSAMGQKRALLVGINYLGTDGELKGCLNDVARMRRCLVGRFGFDEADIRVLADADPSTPPPTGANIRLELERLVAGARPGDALFFHYSGHGLQLPAETGEDDDTGYDECIVPCDLNLIKDQDFTDLVAKVPDGCRFTMVSDSCHSGGLIDKTKEQIGNSTKQNRTQQRREREMKPPPPAPGSALRVSLARIVRGVLESLGCIHCSRCRVQQQGNSNSSSISNRSLPLSTFIQMLRDKTGRHDVGVGSIRTTLFHHFGDEASPKVKRFMKAMLLGKLRHDGKEAEEQSRVPREAEVEETLAQDAHSVEEVYAGPAAAAAAARVPPRNGVLISGCQTDETSADATTADGMSYGALSNVIQTILAGDGKKRGVALAVTNRELVVRARELLSRQGYTQQPGLYCSDEHATLPFIC

SEQ ID NO: 59644 - protein, 252 aa, Zea mays
  Clone ID: LIB3607-029-D12_FLI.pep
RRPRQTQPAATTCIGTDDRLRASAFVRHATKRLCATSEGTKCIRPSPPPPPASQRPRWRSRWSASPSAAPARSRSGRSSASGPPASAPAPTTAASVSKALTAATFFSLFTHALMTNRCLHISASNTTTNRLPDVLVPVHHVRPHRGDRGPRRDVVRRGGDHLHAAGLLHGLPLDLLLHVPLQDARAARPPRSLLLRLLRPLLLRTLRALPAVQGAQGPRIRPRPRLGRQRAEGRRRRRHVPAAGGGDDDPLS

SEQ ID NO: 59645 - protein, 124 aa, Zea mays; identical to SEQ ID NO: 41198
  Clone ID: LIB3607-038-D4_FLI.pep

SEQ ID NO: 59646 - protein, 463 aa, Zea mays
  Clone ID: LIB3607-039-C6_FLI.pep
TCKTCMCALRRQTSNIVHLVQSPNSNLHPGHSPEMASELTYRGGSVAPGSASNGGEYSPKPSKPLSWLARAARYAAAEHRPVFALAGMLFAAAIFTFSSPSTLSPSEPAASVGFNHLAVSGHPSFRESVGGKVPLGLRRRALRVLVTGGAGFVGSHLVDRLLERGDSVIVVDNFFTGRKGNVAHHLQNPRFEVIRHDVVEPILLEVDQIYHLACPASPVHYKYNPIKTIKTNVVGTLNMLGLAKRIGARFLLTSTSEVYGDPLQHPQVETYWGNVNPIGVRSCYDEGKRTAETLTMDYHRGANLEVRIARIFNTYGPRMCIDDGRVVSNFVAQALRKEPLTVYGDGKQTRSFQYVSDLVEGLMKLMEGEHIGPFNLGNPGEFSMLELAKVVQDTIDPEAHIEFRPNTADDPHKRKPDISRAKELLGWEPKVPLREGLPRMVTDFRKRIFGDQEGSTEAAGGLS

SEQ ID NO: 59647 - protein, 407 aa, Zea mays
  Clone ID: LIB3607-044-C6_FLI.pep
APVHPLPFLVLTTQKSTSLLPSSNPKSHLLPVPAIAARVGSPLPPFSGSLDRLRDTPADRVGAEFSGNFSLLLPRSSGLDPRKRPTFLVVYPPAMAALLELFLGSSSAPVDWEAEAYPAYGDFAVLPLLVAFFPAVRFLLDRLVFEVLARKLIFGKEHDKLAETDDSRKKINKFKESAWKFVYFLSGELLSLSVTYNEPWFKNTRYFWIGPGDQIWPDQMIKLKLKAVYMYAAGFYTYSIFALLFWETRRSDFGVSMSHHIATVVLIVLSYIFRFARVGSVVLALHDASDIFLEIGKMAKYSSCEWLAVVAFLLFVASWILLRLVIFPFWILRSTSYEVLLTLDKEKHQFYGPIYYYVFNCLLFSLLVLHIYWWVLIWRMLVKQIQSKGHVGDDVRSDSEGEEEHED

SEQ ID NO: 59648 - protein, 634 aa, Zea mays
  Clone ID: LIB3607-052-B2_FLI.pep
SCPPFLFILSSLAARTLSALPSPKETYPPFRRSIHPSVQGEQGIINQSASESVEGRRRAGVRPARRGLVVPCVSGSAPRRRLLWFLRCVEEAESATRRRRERRSSGCAASVARQDGGVEDAGAGGGPLPLHPGQGEDRAGGRHEPAAPPLLRVHQHHVPVGAVPRRHDGVLPQLPVLRRHLLQVLRRLLGRPALGAADPRVRRAEAAPRVRRRGRDVGARHGRRGLRGHPLLPRPPQARRRRGRRRQLQRLLRPVAEEGAQGAARLPRGVRRRGRHQRRPPPGQALRCRALHPRAPPRRAGRRALRHGEPGVVRALQRRRPRHAPRGLQGRRPAAGHRLGLLLLRLRPQRQGPLLGARPHRPAGLTLRGHQEGRRGDHAHVQPHLRTLHHRPPLLHRVRALGPPRHGLLLLHPQHPSGEAHHGLPRQGPRGPGPRLHLHRRYCQGLPRLPGNGRQEHRHRRQEARAGALQDLQPRQHLSRYGAQPGVHPGEAPPRQGQEERGRDARQRRRALHARQHLPSQGAARVQTHHQPGRRPQEVCQVVPVLLRLHQGRIQELATLIRANSFSFSCFGPAVATMLGRTLTLDFVGWWKYVMLGCSSKKNPSLGEERSGGRKQWRAVFFFLFLSSVFFLSV

SEQ ID NO: 59649 - protein, 438 aa, Zea mays
  Clone ID: LIB3607-058-C1_FLI.pep
PPFSATIRPLPHLPADPTALSAMPDVQPLVSDFVLKLKRRKVEGSHAVARQTAELLRSVVSQHRMGSSANQAATLADAVRAVGEQLIAANPIELAVGNIVRRVLHIIKEEDISSTAVGIEGLSVTVDSDDEYDSEHDDRPALSAAVLAAHARNALRAPSLQTLLEDIPVSPAISRTASSTGDSDGKSKSAGDKSSTRKLKHDVIAAIGDLIDEIDSCYEPISEQAVELIHQNEVILTLGRSRTVKEFLYAAKEKKRSFRVFVAEGAPRYQGHVLAKELVEKGVQTTVITDSAVFAMISRVNMVIVGAHAIMANGGVIAPVGMNMVALAAQRHAVPFVVVAGSHKLCPLYPHNPEVLLNELKSPSDLLDFGEFSDCMNFSTQDGSPLLNVVNPTFDYVPPKLVSLFITDTGGHSPSYMYRLIAEYYSADDLVVRRKATS

SEQ ID NO: 59650 - protein, 458 aa, Zea mays
  Clone ID: LIB3607-058-C2_FLI.pep
EATSHRVPPPHTLVGAVVLANQPASDLHMEEAAPAAVMERERLTAEMAFRGADGARRDGGDPAPSIVIKIRRRLPDFARNIKLKYVKLGIRHGGSLTSLLPALCVPAVAAAAYSFVRLDVIYYSVDLLTCVAWLGTALLLLTVYYLKRPRPVYLVEFACYKPEERLKISKSAFLEMTESTGSFNEAALDFQTKITSRSALGDETYLPPGVQARPPRLNMAEARMEAEAVMFGCLDALFESTGIDPRRDVRILIVNCSLFNPTPSLASMIINHYRMREDVKSFNLGGMGCSAGLIAVDLAKDMLQANPGSYAVVLSTENITLNWYFGNDRSMLLSNCIFRMGGAAALLSNRRADAGRAKYRLLHTVRTHKGATDECFNCVYQREDEAGKAGVSLARELMAVAGDALKTNITTLGPLVLPLSEQLKFLRSLMMRRVFRVGGVRPYIPDFRRAFEHFCVHA

SEQ ID NO: 59651 - protein, 129 aa, Zea mays
  Clone ID: LIB3608-015-H8_FLI.pep
DIMLFPSFHHLIKMYNSKLSVTNRISRLQAQKHLCAVQRLHTTRIQSTGTTIARRCAKVGFSCSPGLACCTSILSCYTPCGMGSSGCCTLGRSSFLQGLPYCCCPCEMSSCYLPELASGLHISSCCKCF

SEQ ID NO: 59652 - protein, 137 aa, Zea mays
  Clone ID: LIB3608-029-D11_FLI.pep
VQVCIWIYLGINDNAVVELASKIFIVAVSFVALLGFSVYGGRLFVLLRRFPIESKGRQKKLYEVGTVTAICVTCFLIRCVVVALSAFDADVSLEVLDHPVLDFFYYMLAEILPSALVLFVLRKLPPKRVSAQYHPIN

SEQ ID NO: 59653 - protein, 205 aa, Zea mays; identical to SEQ ID NO: 47876
  Clone ID: LIB3608-031-C8_FLI.pep

SEQ ID NO: 59654 - protein, 389 aa, Zea mays
  Clone ID: LIB3608-033-G2_FLI.pep
GSFIHWSRIQISRLLATKYQPRRTGRMPKLSCRVLFAALLIASLAALLVRFPIHRLLNPHAAMDPDSELEFEMPGVLRVYKTGRVERFDGTETVPPSPDGDPANGVASKDIVLDPAAGISARLYLPAGVDAGKKLPVVVFFHGGAFMVHTAASPLYHIYAASLAAAVPAVVVSVDYRLAPEHRIPAAYDDAFAALKAVIAACRADGAETEAEAEPWLAAHGDASRIVLAGDSAGGNMAHNVAIRLRKEGGIEGYGDMVSGVVLLYPYFWGKEPLGAEPTDPGYRAMFDPTWEFICGGKFGLDHPYVNPMASPEEWRQLGSRRVLVTTADQCWFVERARAYAEGIKKCGWEGELEFYETEGEAHVFFLPKHGSEKAVKELALVAEFVRRC

SEQ ID NO: 59655 - protein, 120 aa, Zea mays
  Clone ID: LIB3608-034-H3_FLI.pep
MTGISLIELLIQSKSSASVSLLLLSRIRDTAYPLSILLKSRFCDLHQTNSLSAFFFFLSFFLSFFLSFFLSFFSEAYHQHSEVDSLKYRNFSRASSCRDVTNRITCIKSKLQVPWDRSSR

SEQ ID NO: 59656 - protein, 272 aa, Zea mays
  Clone ID: LIB3608-038-F11_FLI.pep
LRFYIHASYIFLPFGFRKKHAFVQHWRAQATQLLPPSSSRTIRVCSWIRVPRWRVCSLCLCMDQRSPGLRGRALHYPQLLARRDEHIPGHVSGEHEVAVLVLVGDGVLVVAAALCRRRGEGVGEERVQSLPELPVPLVHPEVHLPEVRRAVHAHLHVQASLLLLLLDLFGRRRLEGVLPVRPHRRPPDHLRLGRRGGVVVEVEVSGGRAGPRGLALGAVVQNALGPDGGRRLLLPVVSAAAAGPRQAEAELGGAQVVGIELHGSEAKGELVW

SEQ ID NO: 59657 - protein, 382 aa, Zea mays
  Clone ID: LIB3608-038-G5_FLI.pep
NEVVRNEAWKLVPSASLKHTFQLSSDRETQPAGGMLLLDGDLVLSSSGGTGAGAGAASRTSDSGRGLVAALLESPGIRHAVDRLKVAPERRISAGQEGAPRHVYVFQREYATVDPARVELVGTDEATTCIGVVIRNNKTGMTSVSHMDFPEIVEGGIKQMLELLGDDNAPFDVHLIGGFADASTKVVRSSGKKHIKQEGYSYPLCCKIVEVLHKSQLQFNLRSFCVLENNTKSDSFGNALPIIGGFVVETSSGVVIPATFDMDSRCPDEVVRRIRVSVSSYDPTWQGRLLETYDTQDDVFQIAPACWMPDWADIASSLNQLSDSEVLLRCSTSPAAEPPHFVENERRIWKYLIDNPDWEETFPKHKPRVFHRASDGSWSRYS

SEQ ID NO: 59658 - protein, 167 aa, Zea mays
  Clone ID: LIB3608-040-E7_FLI.pep
EFSGAFAKAQIAAGQKLPLSGTVFLSLNDLTKRHLAEIGRGFRELGFSIVATSGTAKVLQLEGVPVEPVLKIHEGRPNARDMLKNGQIQIMVITSSGDALDSKDGLQLRRLALAYKVPITTTVDGARASIDAIKSLKNKSIEILALQDYFQTADASEDLQAVARTTP

SEQ ID NO: 59659 - protein, 231 aa, Zea mays
  Clone ID: LIB3608-041-A10_FLI.pep
FTHEYDLTSQAYALTSHELLLLAEVLPGVRLVQHDDGVGVGLPAILRRPRRNAEPERDVSHGHDDHPVPGLGVLGDASERRLGHRVAKEKGTLGVGLEPDAAARVRSEEVERVDRKVERAVVGELADGRPHAGEARSGHGGGAAHERLGGVVDAIAVKAEAVAAGLRVGALHCGALQEVLQVGPRELEQLLEYLSRLLLVERPHGAAAVLGADGGLVLAGGGRWIGEWGRT

SEQ ID NO: 59660 - protein, 627 aa, Zea mays
  Clone ID: LIB3608-046-A11_FLI.pep
VPDPVSRCHDRGRAPIAVATTSNPLPAFASPSCSCSVLSPTPRFVPHPVPEPPQRFLLKKGTPSSPALDRQRAVVPFADSESGCRLRAGRNNLTREMGQCCSRATAPDSGRGGANGYGYSNQAKPAQAPPSYNPPQQAAEVRYTPSATNSSAVPPVAVPPKPTADTILGKQYEDVRSVYSLGKELGRGQFGVTYLCTEIASGRQYACKSISKRKLVSKADREDIRREIQIMQHLSGQPNIVEFRGAYEDKSNVHVVMELCAGGELFDRIIAKGHYTERAAATICRAVVNVVNICHFMGVMHRDLKPENFLLATKEENAMLKATDFGLSVFIEEGKMYRDIVGSAYYVAPEVLRRSYGKEIDVWSAGVILYILLSGVPPFWAETEKGIFDAILHEEIDFESQPWPSISESAKDLVRKMLTRDPKKRLTSAQVLQHQWLREGGEASDKPIDSAVLSRMKQFRAMNKLKKMALKVIASNLNEEEIKGLKQMFMNMDTDNSGTITYEELKAGLAKLGSKLSEAEVKQLMEAADVDGNGSIDYVEFITATMHRHKLERDEHLFKAFQYFDKDNSGFITRDELESALIEHEMGDTSTIKEIISEVDTDNDGRINYEEFCAMMRGGMQQPMRLK

SEQ ID NO: 59661 - protein, 191 aa, Zea mays
  Clone ID: LIB3608-047-A1_FLI.pep
AQRAAAAMSSSSSFPNSRFPFAAGAGASGGSGSSVRPWGSSGGTSVSSSGKRIQKELLDLNASDCSAGPKGDNLYHWLSTIIGPQGSPYEGGIFFLDIVFPPDYPFKPPMVTFKTRIYHCNIDSTGKVHLDILKDGWSPAFTISKVLLAIKDIISNPDPYSPLMMSISRQYLTDRAKHDEIAAEWTMRFAR

SEQ ID NO: 59662 - protein, 335 aa, Zea mays
  Clone ID: LIB3608-047-B6_FLI.pep
PINQILKRTEIAENLILEKTSCPLGVLLVIFESRPDALVQIASLAIRSGNGLLLKGGKEAMRSNKVLHKVITGAIPSNVGEKLIGLVTSRDEIADLLKLHDVIDLVIPRGSNKLVSQIKTSTKIPVLGHADGICHVYIDKSANMNMAKQIVMDAKIDYPAACNAMETLLVHKDLIKAPGLDDLLLSLKTKGVAIFGGPVAHEVLCIPEANSFHHEYSSMACTIEFVDDVQSAIDHIHCYGSAHTDCIVTTDDKVAETFLRQVDSAAVFHNASTRFSDGARFGLGAEVGISTGRIHARGPVGVEGLLTTRWIMRGSGQVVNGDNDIAYTHKNLPLP

SEQ ID NO: 59663 - protein, 204 aa, Zea mays; identical to SEQ ID NO: 37223
  Clone ID: LIB3608-050-F4_FLI.pep

SEQ ID NO: 59664 - protein, 526 aa, Zea mays
  Clone ID: LIB3632-003-E5_FLI.pep
EATDQNPPSSCGTVRGARLGSGAPTRGRSAGEVLAAPAARCARRARLWAEATGGRARRRAICFRVRSSYLSTTHPSRRDRVLKYTSAYAAGFGVVKTGTEELVDQRCGEMYRGGLDRFKKAQTLEPFSVKSESGTKKAPAAAGTAKALAPLTLPLNSNFVPGQNHQSPQGTISRVAGQGGDAPGHVGTQVGGGQSTWQPPDWAFEPRPGVYYLDVVKDGEVIDRINLDNRRHLFGRQVPACDFVLDHQSVSRQHAAVIPHRNGSIYVIDLGSVHGTFVANERLTKDNPVELEVGQSLRFAASTRTYILRKNAAALFPTPSLPSDVSLPSPPDPNDEDAVVAYNTVLNRYGISKSDILSSSKDSSGGASSANDGKHAVERLLKRGKKRRVSFRDQVGGELIQVVGISDGADVETEPGPIGVKEGSLVGKYESLVQVTVIPKGKEQASRKECTSTSPSGVTDKLQEVLKKVKSATRPGIYDDLYGDSVPAKVGSSWAYKSDDQPVEEKTHGMNLNMNSADDSDDLFGD

SEQ ID NO: 59665 - protein, 451 aa, Zea mays
  Clone ID: LIB3632-003-F9_FLI.pep
HLQAMGKEKSHINIVVIGHVDSGKSTTTGHLIYKLGGIDKRVIERFEKEAAEMNKRSFKYAWVLDKLKAERERGITIDIALWKFETTKYYCTVIDAPGHRDFIKNMITGTSQADCAVLIIDSTTGGFEAGISKDGQTREHALLAFTLGVKQMICCCNKMDATTPKYSKARYDEIVKEVSSYLKKVGYNPDKIAFVPISGFEGDNMIERSTNLDWYKGPTLLEALDQITEPKRPSDKPLRLPLQDVYKIGGIGTVPVGRVETGVIKPGMVVTFGPTGLTTEVKSVEMHHEALQEALPGDNVGFNVKNVAVKDIKRGYVASNSKDDPAKEAASFTSQVIIMNHPGQIGNGYAPVLDCHTSHIAVKFAELITKIDRRSGKELEKEPKFLKNGDAGMVKMIPTKPMVVETFSQYPPLGRFAVRDMRQTVAVGVIKSVEKKDPTGAKVTKAAAKKK

SEQ ID NO: 59666 - protein, 343 aa, Zea mays
  Clone ID: LIB3632-012-H11_FLI.pep
AHIGNKKASPSPLILSAQLSSAPRRSSPRPFIPDLGMGTATTNGSAEQASAPVPALKFLIYGRTGWIGGLLGGLCAARGIPFVYGAGRLENRAQLEADIDAAAPTHVFNAAGVTGRPNVDWCETHRAETIRANVVGTLTLADICRGRGVLLINYATGCIFEYDAGHPLGSGVGFKEEDTPNFVGSFYSKTKAMVEELLKNYENVRTLRVRMPISSDLSNPRNFITKITRYDKVVNIPNSMTVLDELLPISIEMAKRNLTGIWNFTNPGVVSHNEILEMYRDYIDPGFSWKNFNLEEQAKVIVAPRSNNELDQTKLKREFPELLSIKESLVKYVFEPNCKASKA

SEQ ID NO: 59667 - protein, 424 aa, Zea mays
  Clone ID: LIB3632-016-A12_FLI.pep
PSSTSKRREEGECEWTQEAAGEMKLNVKTLKGTNFEIEASPDASVAEVKRIIETTQGQSTYPADQQMLIYQGKILKDETTLESNGVAENSFLVIMLSKAKASSSGASTATAAKAPATPAQPAAPATSVVRTPTQAPVATAETAPPSAQTQAAPAATAAASDDADVYSQAASNLVSGNNLEQTIQQILDMGGGTWERGTVVRALRAAYNNPERAIDYLYSGIPENVEAPPVARAPAAGQQTNQQAPSPAQPAAAPPVQSSAASARPNANPLNLFPQGVPSGGANPGVVPAAGSGALDALRQLPQFQALLQLVQANPQILQPMLQELGKQNPQILRLIQENQAEFVRLVNETPEGGPGGNILGQLAAAMPQSVTVTPEEREAIQRLEGMGFNHELVLEVFFACNKDEELAANYLLDHGHEFDEQQQ

SEQ ID NO: 59668 - protein, 151 aa, Zea mays
  Clone ID: LIB3632-016-C4_FLI.pep
EPMADQLTDDQIAEFKEAFSLFDKDGDGCITTKELGTVMRSLGQNPTEAELQDMINEVDADGNGTIDFPEFLNLMARKMKDTDSEEELKEAFRVFDKDQNGFISAAELRHVMTNLGEKLTDEEVDEMIREADVDGDGQINYEEFVKVMMAK

SEQ ID NO: 59669 - protein, 558 aa, Zea mays
  Clone ID: LIB3632-018-G2_FLI.pep
TREKEMAKKKEKAVNVSGKPRHSNDVNRPNDKKGAGGGAGGGSRSAATVRRLKMYKTRPKRDRSGKVLRNDFQSKELPNTRIEPDRRWFGNTRVVGQPQLEMFREELQSRLSDNFSVILKERKLPLSLLQDHQKQAKAHLLEVEPFEHAFGPKGKRKRPKLTALDYESLLKRADDSQDVFEQKYASSKLPREEEEDGLRDLVRHTMFEKGQSKRIWGELYKVIDSSDVVVQVLDARDPMGTRCYHLERHLKENCKHKHLVFLLNKCDLIPAWATKGWLRTLSKDYPTLAFHASINKSFGKGSLLSVLRQFARLKNDKQAISVGFVGYPNVGKSSVINTLRSKSVCKVAPIPGETKVWQYITLTKKIFLIDCPGVVYQNNDSETDIVLKGVVRVTNLADAAEHIGEVLSRVKKEHLQRAYKIQDWSDDNDFLVQLCRTTGKLLKGGEPDLTTAAKMVLHDWQRGKIPFFVPPPQQSDGGASESAEQPIGITKEDGVSSDRTAAAMKAIAGIISSQQNMNVPCHKENNADNEDTENADNEDIESSDNEDNDDIEPAERSE

SEQ ID NO: 59670 - protein, 217 aa, Zea mays
  Clone ID: LIB3632-020-E5_FLI.pep
AGGLSPPAQPPRSDDGGRKRMSASRFIKCVTVGDGAVGKTCMLISYTSNTFPTDYVPTVFDNFSANVVVDGNTVNLGLWDTAGQEDYNRLRPLSYRGADVFLLAFSLISKASYENVSKKWIPELKHYAPGVPIILVGTKLDLRDDKQFFVDHPGAVPITTAQGEELRKQIGAPYYIECSSKTQLNVKGVFDAAIKVVLQPPKAKKKKKAQRGACSIL

SEQ ID NO: 59671 - protein, 501 aa, Zea mays
  Clone ID: LIB3632-025-C12_FLI.pep
AAPFSSSMSRDLDCPVQTQMAVAVLDRSFSSEYPGGSRTEGRQLSWKRVFVQTDNGSVLGIELERGENVQTVKKKLQIALNVPTDESSLTFGDLVLNDDLSSIRNDSPLLLKRNQIHRSNSTPCLSPTGQDVWQRDRSGPIEILGCSSPSSRMKQIAKDVIKAIMNGVDPVAINSGMGGAYYFKNIWGERVAIVKPTDEEPFAPNNPKGFVGKALGQPGLKRSVRVGETGFREVAAYLLDYDHFANVPPTMLVKITHTIFNVNDCVGCKSKVFCNKSESVSKIASLQEFIPHDFDASDHGTSSFPVSAVHRIGILDIRIFNTDRHAGNLLIKKVGPGADNFGEQTELIPIDHGLCLPECLEDPYFEWIHWPQSSVPFSVEELEYIAKLDPIKDAEMLRVELPMIREACLRVLVLSTVFLKEAAAFGLCLSEIGDMMSRQFTAKEEEPSQLELLCMETRKWVEEESYFFPTKPELKTAMMTSPSSLSTATPSNRQLSASLAA

SEQ ID NO: 59672 - protein, 274 aa, Zea mays
  Clone ID: LIB3632-044-D7_FLI.pep
VVEDFLMDEQFSSLCQHLLIHLDEERLLGFLNSLGKLINPTMQCKELTFPCCWLEVLLSGHYDHISLDDLVFLNCVIAKGRQLWRLMNDEEQHEEWGQMEELLKGGNHLTDADHFALMKELVETELPGVLKWVGIQSWIIFCELSKECKSGDSCESFFSHNKIEFHKADDYSLVRNYGFSISHMPDIDVEDLTRSSHKRRKRNRRKRHRYESDEDKFDELLELGSSDGKNGVESQRGSWRLSTDGFSASWDISDIPDHLSTCYFTIWVKWACFR

SEQ ID NO: 59673 - protein, 387 aa, Zea mays
  Clone ID: LIB3632-046-C12_FLI.pep
PPSVPSPKTPLSPRFSLTLPAAAAALPSAPAPVALPSHLPPVLCCHLSGSRLPPPPPPSSACSPRRRRRRLGSERREKMVASIRVPKTQRARRELLKHAPKLVETSKKTLILHGTKTSAVLNSVLSDIYHLKRDNAVKYTKKNDNIRPFESGGESSLEFFSLKADCSLIVYGSHSKKRPNNLILARTYDHHIYDLVEVGVENYKSMESYVYDKKLAPLLGSKPFFAFIGEHFESSEELKHLKEVLLDLFRGEVVENLNLAGVDRIYVCTAISPTTVYMMHCALRLKRSGTSIPRMELVEVGPSMDLVVRRHRLPAESLKKEAMKTAEHAKKMKNVTKDPVQGKLGKVYMPDQQVGKLTLSNDVKGLKRERREAKKNQDSKKQKVNPE

SEQ ID NO: 59674 - protein, 345 aa, Zea mays
  Clone ID: LIB3632-047-A7_FLI.pep
REMASLTGLTANPNPNKSFEILPNPGDSVSSLSFSPKSNLLVATSWDNQVRCWEIVGGNSQPKASISHDQPVLCSAWKDDGTTVFSGGCDKQVKMWPLLSGGQPQTVAMHDAPVKEVAWIPQMNLLVSGSWDKTLRYWDTRQSNPVHIQQLPERCYALTVNYPLMIVGTADRHLVVFNLQNPQTEFKRIQSPLKYQTRCLAAFPDQQGFLVGSIEGRVGVHHIDDAQQSKNFTFKCHREGNDIFSVNSLNFHPVHHTFATAGSDGAFNFWDKDSKQRLKAFSRCPLPIPCSTFNSDGSIFAYAVCYDWSRGAENHNPAAAKTSIYLHSPQETEVKGKPRIATGRK

SEQ ID NO: 59675 - protein, 488 aa, Zea mays
  Clone ID: LIB3632-048-G1_FLI.pep
HCFRASPPYKYKDTAAGPQRKRRAYSPAMAAPSPLPRFLILLLAVTSSAFAAAAATGAPVVGEDYVRPPPARCHRKALLSLFPWSKKEESAASSDPQQVHISLAGEKHMRITWVTNDNSVPSVVDYGTKESTYTMKSQGESTSYSYLLYSSGKIHHVVIGPLEDNTIYYYRCGGQGPEFQFKTPPSQFPLSLAVVGDLGQTSWTTSTLNHIKQCEHDMLLLPGDLSYADYMQHLWDSFGTLVEPLASNRPWMVTEGNHEKEHIPFFESGFQSYNARWKMPYEESGSRSNLYYSFEVAGAHIIMLGSYTDYDDSSDQYAWLKADLAKVDRKRTPWLIVLLHVPWYNSNWAHQGEGDSMMASMEPLLYAAHVDMVIAGHVHAYERAERVYNSRPDPCGAVHITIGDGGNREGLARRYRNPKPAWSVFREASFGHGELKIVNSTHAHWTWHRNDDEEPVRTDDVWINSLAGSGCIQEGSRDRESRKILMSP

SEQ ID NO: 59676 - protein, 241 aa, Zea mays; identical to SEQ ID NO: 47787
  Clone ID: LIB3632-049-H4_FLI.pep

SEQ ID NO: 59677 - protein, 456 aa, Zea mays
  Clone ID: LIB3632-053-H11_FLI.pep
SCLPEAGPAAMGHGASCGRPSEEVDFFGAAQSGDMARLAAALRSRPTLLSRTTLFDRLSALHIAAAHGHLQVVSLALDLCVHPDVVNRHKQTALMLSAMHGKTDCVRRLLDAGANIVMFDSSHGRTCLHYAAYYGHADCLRTILSAAAKSAPVSESWGFARFVNVRDDTGATPLHLAARQGWRRCVHVLLENGAIVSASSGAFGFPGSTPLHLAARGGNLDCVRQLLSWGADRLQRDSVGRIPYEVAAKRGHVACAALLNPSSAEPLVWPSALKFISELEPDAKSLLEAALMEANRERERRILKGAKNALPSPSHPDSGAHDTAIAEASDAEVCSICFEQACSIEVRECGHQMCAACTLALCCHAKPNPATQSQPLPTCPFCRGGIARLVVATRTRAGDDEERCKLESPRHCRSRRSMSLSGDAGSTSTLMGSIASSIGKMGRRRTESSEQVDDKP

SEQ ID NO: 59678 - protein, 268 aa, Zea mays
  Clone ID: LIB3637-212-B2_FLI.pep
FYCRTPDLQEGLVRSANYTARNGHHGDRGGAGAGAAGQRQRRAEDAALRGRPQEPAQERRPLPVHPGHERVPAGAGEHEGAPRDHRQAPMFLNMLIKLIGAKKTMEIGVYTGYSLLATALALPEDGTILAMDINRENYELGLPCIEKAGVAHKIDFREGPALPVLDDLIAEEKNHGSFDFVFVDADKDNYLNYHERLLKLVKLGGLIGYDNTLWNGSVVLPDDAPMRKYIRFYRDFVLVLNKALAADDRVEICQLPVGDGVTLCRRVK

SEQ ID NO: 59679 - protein, 189 aa, Zea mays
  Clone ID: LIB3637-223-F10_FLI.pep
PPSAAPRPPALRRASDGAEGRGTMRLEKCWFCSSTIYPGHGIQFVRNDAKVFRFCRSKCHKNFKMKRNPRKVKWTKAYRHLHGKDMTQDTTFEFERKRNRPERYDRNLTEQTLKAIPLITKIRHDRMGKHISNRHKPGKRKEMEKDSKELEQDIGMLPKKLIINHLAAEKTKVKVEVVQQQTEDNAMEE

SEQ ID NO: 59680 - protein, 63 aa, Zea mays
  Clone ID: LIB3637-225-E5_FLI.pep
GKQQHYHVLGRFTAYNRRSSSICPKQNAQQPHYKKPSDECIKLYIKPKANHQHSNKMNSIQSA

SEQ ID NO: 59681 - protein, 175 aa, Zea mays
  Clone ID: LIB3637-232-A4_FLI.pep
GRKRSRDRMHSFGHRANAVATFAVTILAAMCFAASFSDNFNTLTPTASVKILNINWFQKEANGNDEVSMTLNISADLSSLFTWNTKQVFVFVAAEYETRQNALNQVSLWDGIIPAKEHAKFLIHTTNKYRFIDQGSNLKGKEFNLTMHWHIMPKTGKMFADKIVMTGYQLPEQYR

SEQ ID NO: 59682 - protein, 401 aa, Zea mays
  Clone ID: LIB3637-248-H8_FLI.pep
VLSVLDSMGLSSKPLHRCPIPVADDPNVVVIPKRTPNTIVKKLAYITVDKQDKDPSPLFGGRQNWKQREESFKLNSTMKVHCGFMKNSGADMDIIDVKYIQKCKFVVASGIFDGYDIPHQPSNISRRSQKLFCFLMVVDEVSLDFIQKNTTVKIDSAGGKWVGIWRLLTVHRLPFDEPRRNGKIPKILTHRLFPQAWYSIWIDGKMELIVDPLLILERYLWRGKYTFAVAVHKHHRSIYEEGDAIKRRKRYARPLVDLQMKMYYYEGMEPWSPKKKMPGDVPEGAVLIREHTATTNLFSCLWFNEVNLFTPRDQISFGYVARRLGDALELFMFPNCEYNSLFVLHRHTREHSSKVEWAKTVDEIVEKGLRESRGGLGLWTPYPADLSSVELPAVRRTSPAG

SEQ ID NO: 59683 - protein, 342 aa, Zea mays
  Clone ID: LIB3637-251-A12_FLI.pep
RLTCEPTGPTRTWSVRRRSSPAVRSRRGREPKMGCSISGLNALYDAATGGGDVWINERRFRVLRQIGEGGFAFVYLVREHQPASDAAFARRDPAHVSEDGTYAMKKVLIQSKEQLDLSQQGDWSHEAYLLFPVHLDGTLFDNANIMLSRREFYSTADVLQIFQQMCEGLKHMHSFDPPYAHNDVKPGNVLITWRKGQAPVATLMDFGSARPARKEIRSRSEALQLQEWAAEHCSAPYRAPELWDCPSHADIDERTDIWSLGCTLFAIMYNVSPFEYALGESGGSLQLAIVNGQLKWPAGPKPPYPDELRHFVIWMLQPEAVMRPHISDVVLHVDKLIAKYLP

SEQ ID NO: 59684 - protein, 125 aa, Zea mays
  Clone ID: LIB3637-257-F4_FLI.pep
AATRPERMSWQTYVDEHLMCEIEGHHHLTSAAIIGHDGTVWAQSTAFPPFKPEEMANIMKDFDEPGFLAPTGLFLGPTKYMVIQGEPGAVIRGKKVPPPARRSRSYHISRRSLFLIIAGLPSFYG

SEQ ID NO: 59685 - protein, 345 aa, Zea mays
  Clone ID: LIB3689-001-H1_FLI.pep
AAKAYKEKQSKELHGREVRLDFAKGRSTQTPRSGNDGSFQKAARGNSSSIFIRGFDKNLSEDEIRSSLEQHFSDCGEMTRVSIPTDHESGAIKGMAYIDFKDQDSVSKALELSGSDIGGGYELYVDEAKPRGDGQRGGGRSGGRSGGRFGDRSGGRRGGGRFGERSGGRDGGGRFGGRRGGRDGGAAGRRGGGGDQVRRRGAAQLGQRPRGVRRRPPQAPPRLQLRRRVRVKDQVPVRQGQRRPQARAGGLRRRRHGFLSVVGRGQAQRVRLRVPGQRDRRAVPGADQPVHRRRGQPGAAHRPVVRPHGRLPHVRRAVEPQPGGVHGGRHAHPGVRERHAAPWLW

SEQ ID NO: 59686 - protein, 455 aa, Zea mays
  Clone ID: LIB3689-002-A4_FLI.pep
RCCSSSRMSKEDVLKVQTLMLRVNIHCDGCEKKVKKTLHKIDGVYQSSIDAEQGKVTVSGLLDPDTIIRKLNKAGKPAQLWGSKPGITQNAYHGGGHKGPGGGGGGGGGVGNPKMVMPQPTPQQLQQLQQQLQMKGLKLPPHLLGGNMPAFPAAAPMKDPKSVKFALPEDNFDDYGSEFDDDFDDGFDDDEDDYDDDGLDDDVYGDPKMMMKPMAVPPPAGGGDKKGGGGKKGGGGGNEIPVQIKGNNHGGAGGQPHNAKGGAPGGGAHLGQGKKGGGSAAAVGVGGPMGGMLPQQGMMRPPNILGGAGAGFPSTAQMGGGPMGMPVGHPHMGIMQQGGGGGGGGMPGLGFHPGLGGGGMHSGADMLQAAAASGNPVAQQQYMALMQQQQQQMMMMQQQQQQHGNGGLGYPAAMGYGYGRPPMHYPMGYPVLPPHSHAEPYNIFSDENANSCSLM

SEQ ID NO: 59687 - protein, 487 aa, Zea mays; identical to SEQ ID NO: 47714
  Clone ID: LIB3689-203-H8_FLI.pep

SEQ ID NO: 59688 - protein, 189 aa, Zea mays
  Clone ID: LIB3689-206-B11_FLI.pep
VYTSPRVREGRRNTPARNSRRPSLLTPRLRPHTHNSRRPSPLASRWNHPKSTIVRSWGRVGSRSGQTTAYAVLRWLVVDVDRAGGDPNLWQLPRSNSGHPRQLHCPRPGPRPRSPTHRLPRLRRVRYCCRRRGLHHLHGPVCRCQGKGATQPVVLALGIRGVLLDADGAGAERGHSKVDAAGGEDKGHK

SEQ ID NO: 59689 - protein, 174 aa, Zea mays; identical to SEQ ID NO: 57700
  Clone ID: LIB3689-207-C4_FLI.pep

SEQ ID NO: 59690 - protein, 294 aa, Zea mays
  Clone ID: LIB3689-211-D7_FLI.pep
FLFLSVDTFADADSVGPAPVFTSLAAETVVDEGCSPELGPLRASFSSFSCSIFLMYTFSAAFSSSLRTLPPEDRSLRCRNLDATLVAIAADRETLENADVTAGEVLVLGEDVVVDAQHAVQLLLVLRDAGLVGPHVLEVRRERQLERQLRARRVEALRLRLQPLLYGRPLQRPRAVQLLVPVVRELRAQVPADSPGINDCLVTVLESHLPGRIPQLDELGELVRLLEGVGADELELEVLLEEAGQHPGDVGGSRLSEHLQPRGHCSIRPVCVWTGCAAAIESNALDDRDEACCR

SEQ ID NO: 59691 - protein, 619 aa, Zea mays
  Clone ID: LIB3689-211-F3_FLI.pep
ELPVSVRRGPGRSSMRRRPVLPAHHDDVDKGGGKPASSRLCFLATLCAMFWVLIFYFHFAVVSNDPAASAAQGAEARIAGAHTRIPERDGASRVDVPLAFASEPPPPPPPPPPPPAARPKEAEDEVAAGVRREEAPPEVAAPYPFERALRTAENQSDPCGGRYIYVHDLPPRFNEDMLRDCEKLSVWTNMCRFMSNDGLGPPLGNEEGVFSDTGWYGTNQFSVDVIFGNRMKQYECLTKDSSVAAAVFVPFYAGFDVARYLWGYNITTRDAASLDLVEWLMNKPEWSVMGGRDHFLVAGRITWDFRRLTEEEADWGSKLLFLPAAKNMSMLVVESSPWNSNDFGIPYPTYFHPAKDAEVFLWQDRMRSLERPWLFSFAGAPRPGDPMSIRGQLIDQCRSSSLCKLLECDLGESKCHSPSTIMKMFQSSMFCLQPQGDSYTRRSAFDSMLAGCVPVFFHPGSAYVQYTWHLPKNYTTYSVFIPEDDIRSGNASIEERLKSIHPDVVKQMREEVINLIPKVIYADPRSKLETLKDAFDVSIEAIINKVTKLRRDIIAGQEDKDFIEENSWKYSLLDDGQQAIGPHKWDPFFSKPKDKGGDSSGSSAEAAKNSWKSEQRGQD

SEQ ID NO: 59692 - protein, 518 aa, Zea mays
  Clone ID: LIB3689-215-B7_FLI.pep
PNPRPNCPLPPRRRRSPEMSWLARSLATSLNIPDNSGADDDPDASHTPSPSARIPPPPPLPTHPPHSGAAEGVKEDLTELSKTLTRQFWGVANFLAPPPGETLPSPSHSPQSAGGQSADARTPPEIAGIRNDFAEIGGRFRSGISRISGHKAVSGFSKMASSFFAPDDGEEDEWEEERRRQIRHEMGEEAVWHEEAEGDEEWHQWEERVRLRVEDGDTRHELEMERARDEEDDELEEQRARHGDGGESGEQTTRPGEDGELEELRIRHEEEVEEEWDVIGITEEVLAFATNIARHPETWLDFPLLPDDDESDGPFSYFDMSDAQQEHSLAIEHLAPRLAALRIELCPIHMSQECFWKIYFVLLHPRLNKHDAELLSTPQIVEARAMLMQRLQYQSKLETEHLGHHKDDLGVQLRGDTLKDATEAFPFTRWEAASVMPITEIEIEKHPIQVTEVAVVDKSVIEEELPKGHAETSNVLQEAFDDDIDDWFEEADLAGHPTIHIGDEEDVSFSDLEEDDVK

SEQ ID NO: 59693 - protein, 186 aa, Zea mays
  Clone ID: LIB3689-215-H6_FLI.pep
RRPTAPTTSTSRRSLSLRRLRAPSCSAAACATKSLPRAWTSTCTKATGRSAARSAGAGRSSWTRTPAAAAAATATARAPPPPPCAAGGESRQDKDGNVNGRRSLAGAPDDQIFFMETWMGDGDKTRMKMMSTVWKCLPAHPPWGPSPSHAQHTSSTCVASCWTHWIRWPHDLEPLFGPHLMNWIRI

SEQ ID NO: 59694 - protein, 624 aa, Zea mays
  Clone ID: LIB3689-224-F1_FLI.pep
SSERFMVMDRAGWLWRRKSSDKSPGGSDSSLSVSSHSEQCSDDQGQYQSPEAFSRSKYDYSQETGVARSLNGKLAAGVNLNNFNPEHGQSFEQHISSNVGDEEIKETLESLNYKLSAALSTIRAKEDLVKQHAKVTEEAVAGWEQAEAEVTTLKGLLEASCRKNASLQDQVSHMDEALKECVRQLRLAREEQEDKVREIVSNSLVPQSENPELQNHIAELKKRLEVTRLEASSSMILQHDLHERLRAIERENLDLKAKHQAIEKENIDLKAKLLVQSKDLKILMLERDLSNQVAETASKQHLESVKKIARVEAECRRLQHLTRKTTLINNSRSTQNNCCMESLTDSQSDHGEHMVGVDNDLQNSDSWALALIAELDQFKNGKDGSRNIVNNPVEIDIMDDFLEMERLAALPESDGTSSNFEMETDSDKAVTRNSSLKVKNEELQNKVADLQEKFEAIACEKRELELVLVEVRDQLEISCDALVVAKNRLVEMQMQLDSANDSKLSALDDVERLDSERKALELQLESKSVEVEELLMAVASLEGNAEQKELESQLELMSAQATELRLTVASLEERVQAERDLFVQQKQNAEAMLNAKEELEAQLCSANTKMGKLRDIIKALENEV

SEQ ID NO: 59695 - protein, 624 aa, Zea mays
  Clone ID: LIB3689-225-H12_FLI.pep
AGSGEMSMYGRDPWGGPLEICHDSATDDDRSRNLDIDRGALSRTLDETQQSWLLAGPGDQGRKKKKYVDIGCLVVSHKLFVWTLGVLLAAAVFAGVVAGIAKAIPRRHRPPPPPDDYTVALHKALMFFNAQRSGKLPKHNNIPWRGNSCMKDGLSDPAIRRSLVGGYYDAGDAVKFNFPAAFSMTLLSWSVIEYSAKYDAAGELGHVRDIIKWGSDYFLKTFNSTADSIDRVIAQVGSTATSPGSTQPNDRYCWMRPEDIDYPRPVVECHTCSDLAAEMAAALAAASIVFKDNKAYSQKLVHGATTLFQFARERRGRYSAGGSDAAKFYNSTSYWDEFVWGSSWMYLATGNSSYLTLATHPKLAKHAGAFWGGPDYGVFSWDNKLTGAQVLLSRLRLFLSPGYPYEETLSTFHNQTSIIMCSYLPIFKSFNRTTGGLIQLNHGKPQPLQYVVNAAFLASVFSDYLEAADTPGWYCGPHFYSIEVLRSFARTQIEYILGKNPLKMSYVVGFGNHYPKHVHHRGASIPKNGVHYGCKGGWKWRDTKKPNPNIIVGAMVAGPDRHDGFKDVRKNYNYTEATLAGNAGLVAALVALSGEGHGVDKNTMFSAVPPMFPSPPPPPAPWKP

SEQ ID NO: 59696 - protein, 387 aa, Zea mays; identical to SEQ ID NO: 54013
  Clone ID: LIB3689-230-B6_FLI.pep

SEQ ID NO: 59697 - protein, 388 aa, Zea mays
  Clone ID: LIB3689-231-B7_FLI.pep
LHVRTCVCKQSDQLGSKQQRTNAMMAACLEAKKPYLIALAIQIIGTGMFVISKAAFDDGMSTFVFIFYRMAAASLILVPTAIVHQRKNMRSMSWKLLLKLFLLALIGNTFSLNTYNLTLKLTSATVGSALANSVPVFTFCLVLVLRMETVNLRTAAGVAKAAGVALCVAGVLVLAFYAGPAMSPVNHHRAFAAPRQHAASTGGPPSRSRWITGTLLMVLANVTWALWIVLQSALLKEYPNRMLVTATQCVFSMMQSFVVAVVAERGDMSKWKLRCDITLVAVLYVGFVVTGLSHYLQAWCMELKGPVFLAMTNPLCFVFTIFSSSFFLGEIVHLGSILGGALLVAGLYSVHWGKLKEDRRSEAAEQEKTKPQEEPAAVAGVPSVLDQA

SEQ ID NO: 59698 - protein, 204 aa, Zea mays
  Clone ID: LIB3689-231-C8_FLI.pep
QPPPPPSPASTMGDYGHGGGQMRGNPDSRPRGQGQRPNVQQLKLMGQIHPTGLTPNLLKLFEPRPPLEYKPPLEKRKLPAYTGMAQFVSHFAEPEDPEYAPPVPKCETRAEKKARIRNNKLEQGAAKVAEELQKYDPQSDPNATGDPYKTLFVARLNYETSEQRIKREFEGYGPIKRVSNVVIPVQVKLLHFGKVYGFFNHSKM

SEQ ID NO: 59699 - protein, 359 aa, Zea mays
  Clone ID: LIB3689-239-G2_FLI.pep
LAPKALAAYHQPALILHQRRRHGPPPVAAVTASKPVLKDPKKYQEWDSMTAKFAGAANIPFLLLQLPQIVLNTRNLLAGNKTALFAVPWLGMLTGLLGNLSLLSYFAKKKETEAVIVQTLGVISTYAVLVQLAMAESMPVPQFVATSVVVAAGLILNFLNYFGWLPGTLLLMWEDFITVGGLAVLPQVMWSTFVPFIPNSVLPGIISGSLAVAAVAMARMGKLSNAGVKFVGSLSGWTATLLFMWMPVAQMWTNYLNPSNIKGLSAFSMLLAMLGNGLMIPRAVFIRDLMWFTGSAWASVLQGWGNLACMYCFNSISGEVFFATSAGLLLWLGFTLWRDAIAYGNSSPLSSLKELFFGK

SEQ ID NO: 59700 - protein, 402 aa, Zea mays
  Clone ID: LIB3689-240-D8_FLI.pep
MVRMNCAASVLLLIGVTQLMIQCTGLADPYVKGHLGPFKFQTQIQRKTLSPKWFEEFKIPITSWEATNELVMEVRDKDPMFDDSLGQCTISLHDLRGGQRHDKWISLNNVKKGRIHLAVTIDDISEDQNTSSLDQSLKQADTELPVSTSVCSEVDASEPPEEKKVLMDEVEHINIDGQEQPGGLYVHRPGTGVPRTWESRKGRARNPDTQIHQEVDKQKEVPTPKGSGQGGLFNVGSFFRWNSRKGSSRNLDASPPATPGSQSVTELDPKLPQTPRPNLKELGEKRTSIKIVVDEEASPADTVGGADNSGEDVAKVIEKNAGEPGRSLTSTLSRKICRRRADDRLSDISEQIEARGSKPVSEGPILVRGEPMITEDHPTTEHSDGGGAEQDAVGAKVATQIS

SEQ ID NO: 59701 - protein, 190 aa, Zea mays
  Clone ID: LIB3689-240-E8_FLI.pep
TRALIWTYCLRLGIIQLIVAKKMEALGSLNSSLISILNRRNYMTQDTVRWAATATTEKALSYRLGSKVAMFQYSSVEIYSACKPQPTLEIHNPDMHKDAPRGSRIAEFLLDGNLVGPLKKTVSDLDEYDRYAFEFCRKVASHYSKQLFAIYQNKEALTFIHSPGRDMDLVELSVYGNVWRGPDLGGCKIQ

SEQ ID NO: 59702 - protein, 167 aa, Zea mays
  Clone ID: LIB3689-241-C2_FLI.pep
LLPVPVSYYCPSESFVLSAFLFVFSKSMWIEGGINPQLVKIHLNPHGLSTKRKGLTGFIIFANLFCNMQMQSFIIFSYVLTCMLVLFHLQGALALSGMPDAQSKPVLLCSLNDNTVRLYDLPSFSDRGRLFSKKEIRAIQMGPGGLFFTGDGTGELKVWQWVDLAQT

SEQ ID NO: 59703 - protein, 671 aa, Zea mays
  Clone ID: LIB3689-246-C3_FLI.pep
AAGDLCLHKLGANLYERIKKECEIHIAEKISALVGQSPDLVVFLSLVQRTWQDFCDQMLIIRGIALLLDVKYVKNVANICSVWDMGLQLFRKHLSLSPEIEHKTVTGLLRLIESERLGEAIDRTLLSHLLKMLTALGMYSESFEKPFLECTSEFYATEGVKYMQQSDIPDYLKHVESRLQEEHERCILYLEANTRKPLIATTETQLLERHTSAIIEKGFAMLMDANRINDLLRMYNLFQRVNAVELLKQALSSYIRATGQGIIMDEEKDRELVPFLLDFKASLDKILEESFAKNEAFSNTMKDSFEHLINLRQNRPAELIAKFLDEKLRAGNKGTSEEELEGILDKVLVMFRFIQGKDVFEAFYKKDLAKRLLLGKSASIDAEKSMITKLKTECGSQFTNKLEGMFKDIELSKEINDSFRQSSQARTKLPSGIEMSVHVLTTGYWPTYPPMDVKLPHELNVYQDIFKEFYLSKYSGRRLMWQNSLGHCVLKADFPKGKKELAVSLFQSVVLMLFNDAQKLSFLDIKDSTGIEDKELRRTLQSLACGKVRVLQKIPKGRDVEDKDDFVFNEDFSAPLYRIKVNAIQMKETVEENTSTTERVFQDRQYQVDAAIVRIMKTRKVLSHTLLITELYQQLKFPVKPADIKKRIESLIDREYLERDRSNPQIYNYLA

SEQ ID NO: 59704 - protein, 824 aa, Zea mays
  Clone ID: LIB3689-250-D7_FLI.pep
PLKSQIKSTPQPELSSPGLPSPSINARHRGGSRPPGAGSQAKPRTGRPRRIGTSPTARPPHLRRAMWRLRIAEGGGDPWLRTKNAHVGRQVWEFDAAADPDPAVDAARRAFVATRGHLKHSADLLMRIQFAKENSIELHLPGIKLGEHEDVTEEAVLTTLKRAISRFSTLQAHDGHWPGDYGGPMFLMPGLIITLYVTGALNTVLSLEHQKEIRRYLYNHQNEDGGWGLHIEGPSTMFGSALTYVILRLLGEGPDSGDGAMEKGRNWILDHGGATYITSWGKFWLSVLGVFEWSGNNPVPPEVWLLPYLLPFHPGRMWCHCRMVYLPMCYIYGKRFVGRITPLLLELRKELFKDPYSKIDWDKARNLCAKEDLYYPHPFVQDVLWATLHKFVEPVMMHWPGSKLREKALETVMQHVHYEDENTRYICIGPVNKVLNMLACWIEDPNSEAFKLHIPRVYDYLWLAEDGMKMQGYNGSQLWDTAFTVQAIVATNLIEEFGPTLKLAHNYIKNSQVLDDCPGDLNDWYRHTSKGAWPFSTADHGWPISDCTAEGLKASLLLSRISPKIVGEPMEANRFYDAVSCLMSYMNDNGGFATYELTRSYPWLELINPAETFGDIVIDYPYVECTSAAIQALTSFKKLYPGHRRKEVDNCISKASNFIESIQKSDGSWYGSWAVCFTYGTWFGVKGLIAAGRTFENSPAIRKACDFLLSKELPSGGWGESYLSSQDQVYTNLKGNRPHAVNTSWAMLALIDAGQAERDPTPLHRAAKVLINLQSHDGEFPQQEIIGVFNKNCMISYSQYRNIFPIWALGEYRCRVLGAGKSWR

SEQ ID NO: 59705 - protein, 509 aa, Zea mays
  Clone ID: LIB3689-250-H3_FLI.pep
MMIDVDLNLEVLGGVGVYKLEEEWRRGEPNASAIHGSKSNPKKLVEVMRARDLHPLCCLPAADGGPPPPPLGHAPPAVAGLLYKWTNIGKGWRPRWFAIRGAVLAYSKIPRRSTSPPSSASSSTATRIIGHARYGHDSPVGLVHLKISSFRESKSDDRRFYLITPAKTLQLRTDSANERAAWIEALVSARAESSPDGGLLTNQNDASFSTERLRNRMHEEGLGEEIIKDCEQIVHSEFSQYHTQMKQRCEEYVSFLSRLPQQFEVLSADDNANMIELHSHLMKPDYSSSGQGKCSESSNTESSDDVGQQELDELLDDDDYHFYDTRQSFSDSAGLSCLNMKCSDSGKDTFLYGDKFVKPKAGTGDSECLPPFFKRRTKLPDPVEKEKSVSLWSMIKDNVGRDLTQVCLPVYFNEPLSSLQKCFEDLEYSYLLDRAYECGLKGDNLMRILNVAAFAVSGYASSVGRPCKPFNPLLGETYEADYPENGIRFFSEKVYSLLKSHPFFVPVKS

SEQ ID NO: 59706 - protein, 485 aa, Zea mays
  Clone ID: LIB3689-254-C12_FLI.pep
ASSYSPISATQSFPQFPPFSHFSPPPPLPPFNNTMRECISIHIGQAGIQVGNACWELYCLEHGIQADGQMPGDKTIGGGDDAFNTFFSETGAGKHVPRAVFVDLEPTVIDEVRTGTYRQLFHPEQLISGKEDAANNFARGHYTIGKEIVDLCLDRIRKLADNCTGLQGFLVFNAVGGGTGSGLGSLLLERLSVDYGKKSKLGFTVYPSPQVSTSVVEPYNSVLSTHSLLEHTDVAVLLDNEAIYDICRRSLDIERPTYTNLNRLVSQVISSLTASLRFDGALNVDVNEFQTNLVPYPRIHFMLSSYAPVISAEKAYHEQLSVAEITNSAFEPSSMMAKCDPRHGKYMACCLMYRGDVVPKDVNAAVATIKTKRTIQFVDWCPTGFKCGINYQPPSVVPGGDLAKVQRAVCMISNSTSVVEVFSRIDHKFDLMYAKRAFVHWYVGEGMEEGEFSEAREDLAALEKDYEEVGAEFDEGEDGDEGDEY

SEQ ID NO: 59707 - protein, 542 aa, Zea mays
  Clone ID: LIB3689-256-D8_FLI.pep
YSGGKKGNMAESKVASLDARTTKIRNVPIAVTPEGFWCCPSQAVLQKTAKSQNPQAKTKPRGGASPLAPKAAPPIQRAPTISSERRTHSTPTRAKTNSEEQRCLPPAEDAAANNNATNPPKAVNERPQKQHKVSVGFGQLETSDLKVVLYGKDGVAVKMSVHKNTLAGNSTFFADKLSGQSPVSSIEVPDCEDVEIYVETVGLMYCSDVKQRLIKQTVPRVLRVLKVAELLGFPACVMSCLDYLEAVPWVGEEEENVVSSVRNLQSENYGVSPVLKRVAPSDRTTPPNDTFSHIIELVLRSSEDRGRREMKSLVQKLLKESSTGCMSGSSDLCSAVLYRSCRNCLDSLLILFQQATDSDFAEQALNTKEPVFRQVALEADNLLWLAEILADRNAADEFAVIWASQRELAGLHSRLPVKSRHLVSCVTARLFVGIGKGEMLPSKDTRRLLLDVWLQPLMDDYNWLQHGCRSFDRKVVEEGVGRTILTLPLEDQQTILLSWLGSFLKVGDSCPNLQKAFEVWWRRTFVRPYAEQQGNRSQSGRS

SEQ ID NO: 59708 - protein, 854 aa, Zea mays
  Clone ID: LIB3689-256-H1_FLI.pep
RTQIKNPEIPASESFLLLSVEELVDVSARWFEHLVWDPRKFVTWNFCPEEGRAVRCWGGAAACDTQIWCEEEMPVVTRSRLSAARGDGAGALPWGSASAAPALRHDAGAPREGVASKNHHHHHGLKEKLRALTQDYEQQKQKLAASQLRRSIRCLNAWEAINDENAEEEEDGGRVAKFRYDAFAQVPESAVLRENVAPPQARAPSNDGAVLARTTEPQAKENAVGRGANAMSCPTKKAVPALPVLPVPPARKLSLGGAVGGKLKAAGEVGAGTAEAAESRILVFVRLRPMSRKEKEAGSRSCVKIVNRKEVFLTESASENDYLRLKRGRDSHFCFDSVFPDSTTQAEVYSTSTADLVEGVLQGRNGTVFCYGATGAGKTYTMLGTMENPGVMVLAINDLFSKVTQKNHSIKLSYLEIYNETVRDLLSPGSPLNLREDKQGIVAAGLTQRSVYSTDEVMELLQKGNKNRTTEPTRVNETSSRSHAVLQVVVEYRSLDGVNVKRAGKLSLIDLAGSERALATDQRTQRSIEGANINRSLLALSSCINALVEGKKHIPYRNSKLTQLLKDSLGGACNTVMIANISPSNLSFGETQNTLHWADRAKEIKTKTQQTTVNEEVLDQPDSETMLVLELQKENRVLREQLAKQQQKLLTAEAQLLTSKTSPQRSPAPPSHVSTPGSTQRKTRRSILAAGGGNYFSKLDSKRHAADNAQVRELQRKVSTLESEIEKMKKEHLLQLKRKDEFIRDLINRKDPNNNSEETATGDRRVVTRASVRKAQRDASAAGELKSPSRVFTSPAPTAKKRTFWDIGGNSPSVLAANGRKTRSHVATETPKKASSKLLQPGFARQTSPHQRFT

SEQ ID NO: 59709 - protein, 637 aa, Zea mays
  Clone ID: LIB3689-257-G5_FLI.pep
GIARFLTHTLSPIGWGGAHLYPDLIDSNPSQLNVGQMAQIPNLDNAPLNLAALREQSQKDLFGILKNIRGKKCLVIDPKLAGTLSLVVQTSLLKEYGAEVRILSPEPLQTECPKIVYLVRSQLRFMKFIASQIKNDEPKGLQREYFLYFVPRRTVACEKILEEEKVHQKLTFGEYPLYLVPLDDDVLSLELDHSLQECLIEGDTSSIWHVAKAIHKLEFAFGVIPNVRAKGVASTKAAELLNSMQLEDPVNMDDMGIPEINTVILLDREVDMVTPMCSQLTYEGLLDEMLQINNGSVEVDASIIGAQQDGKKVKVPLNSSDKLYKEIRDLNFEVVVQVLRQKATSIQQDYAEVKSTNTQSVSELKDFVRRLHSLPEIARHVHLAQHLQSFTGKPSFHARLDIEQTILEVQNFEICFEYIEEMIHKQEVIENVLRLLVLLSLTNAGLPKKNFDYMRREILHSYGFEHMHLLYNLEKAGLLKRQESRSNWVGITRALQLIVDVNDTANPTDISYIFSGYAPLSIRLVQHAVRSGWRSIEELLKLLPGPHLDLKRGGLTINSSPEVHPGLGAQQSIDRVGHRSLVLVVFIGGVTFAEIAALRFLSAQEGMGYDFLVATTKVVNGNTILRPIIANSKEGMM

SEQ ID NO: 59710 - protein, 404 aa, Zea mays
  Clone ID: LIB3689-258-A10_FLI.pep
VPLLRRRPRLGHGRPLPPQRLQHLRRGPRVQDHPLNSKVVSQYSTLLSPLAVDAALSVVDPAHPDLLDLRDIRIIKKLGGTVDDTELVTGLIFDKKASHAAGGPTRVENAKIAVIQFQISPPKTDIEQSVIVSDYAQMDRILREERNYILGMVKKIKAAGCNVLLIQKSILRDAVTDLSLHYLAKAKILVVKDVERDEMEFITKTLNCLPIANIEHFRTDKLGYADVVEEISVGEGKVVKITGIRDMGRTATVVVRGSNQLVIDEAERSLHDALCVIRCLVNKRFLIAGGGAPEIEMSMQLAAWAKELRGMESYCIKEFADALEVIPYTLAENAGLNPISIVTELRNRHARGEKNAGINVRKGQITNILEENVVQPLLVSTSAITLACECVRMILKIDDIVTVR

SEQ ID NO: 59711 - protein, 516 aa, Zea mays
  Clone ID: LIB3689-262-B11_FLI.pep
VCHQLQLETRKRKKKTHPPRRPPLRLLRCRRWSGRPTQSMGNMTRSNSPVSRRIVLSFLDFLNSVELAPGVDPEALEVAKDCLESIFSVNSTATGDAIQPGLLFELFASLEANERDQARAALLSQSVSNKPSQTAGTSNVEEDSNKCTTSNSDSQVEDTFELDHSGDELFAKFYAALDEINFFKTSPAGAEDPGLLSKATQYFDDALLAMQKLGKKRASLVDIAESFKSRGNEFMRSNQHLKAVELYTCAIALNQQNAIYYCNRAAAYTLLNMNNKAIEDCLKSIEIDPHYSKAYSRLGSAYFAMGNYHDALYKGYLKAAELDPSNENVRQNIEVTKKKLAEQRVPPEEQNTHAGQAQGPHPIFTSGGVPFNLFPPGSSPVQEFFAGWSSDVGAPPPGHSISINLNDIFGQANVNASGQGSSQTGNSNNHTPSASFSTGAAVPPPFAFSGSGNEGTQARQASNGLEGEHGEPGIHRDDDVHINLAGPEQAAEALRAVMQMLGPQMGQHEGAPRGPG

SEQ ID NO: 59712 - protein, 401 aa, Zea mays
  Clone ID: LIB3732-002-C6_FLI.pep
WYRRLRPPQAGVCFRSIASQSQPKQDAARQDGLGGDEPGAVVASAVASTDPRRRLLRAEPVPRLARRRDDQGGHVCALHPRAEPHGVAAPLALPLPLVHGQGLLLQPILGPRPQQAQGRQGRQQQGRAGRQGVAGDRRHRGGRAHGRGGPHADRAPQVLLLPRLPARLRRALLLLRARALGRQQVPEAAHRHGHHPLRQLHHPGRHRRVARAHRHGHHQLHRQIHLPQQGHLLRDPRHRRPVPALLQPAHARVRRPPQLLPASQQQPHRQRRRGRQQGAAVRRRTHADGGAGGRGQGAAAGQRQGGIGAHGAEDHAALAGLRAGRAGQAQVHARRRVQGAHEPKQAEQAHLARERLPLLMIYLASHTSCSTSPCPCIHLLPTSQLYCNGVFIDLFMLCFVF

SEQ ID NO: 59713 - protein, 323 aa, Zea mays; identical to SEQ ID NO: 58994
  Clone ID: LIB3732-010-F10_FLI.pep

SEQ ID NO: 59714 - protein, 477 aa, Zea mays
  Clone ID: LIB3732-013-E2_FLI.pep
GKGSTDTMEADSGKLFVGGISWETDEDRLREYFGRFGDVTEAVIMRDRNTGRARGFGFVVFADSGIAERVTMEKHMIDGRMVEAKKAVPRDDQSIASKNNSSIGSPGPGRTRKIFVGGLASNVTEVEFRRYFEQFGVITDVVVMYDHNTQRPRGFGFITYDSEDAVDKALHKNFHELNGKMVEVKRAVPKEQSPGPIARSPAGGQNYAMSRVHNFLNGFNQGYNPNPLGGYGMRVDARYGLLAGARNGFSSFGPGYGMGMSVEGGMRGYFGASSGFVNSSNGRQIGSYFNGSSNRLGSPIGYVGLNDDSGSILSSMSRNVWGNGNLNYIGNHTNMNSFPQPGSGGGISGDEISWGSLTSAHGMSNISSLGSGNLGRGTGDNNFGLPSGNYVRSNSTGTIGEPFSASANAYESNNPGAYGSSSIYGDSTWRFNSSEVDMPPFGHDLGNDDPDIKSEISASYMGNYTVNNNQTSRGITS

SEQ ID NO: 59715 - protein, 156 aa, Zea mays; identical to SEQ ID NO: 41108
  Clone ID: LIB3912-057-C6_FLI.pep

SEQ ID NO: 59716 - protein, 301 aa, Zea mays
  Clone ID: LIB3732-023-B2_FLI.pep
EGRIGSDDEVVCSCLSVGGRGLAGAGGHRAGRQLLPGHRDDLGRWPRQGSGRRARAGPDAGPHVRLRVPVQERVPVRQDRHADQAGARQLRGTVTTFYLSSQGDAHDEIDFEFLGNVSGEPYTLHTNVFTRGQGQREQQFRLWFDPTTAFHTYSILWNPQHVIFAVDGTPVRDFKNHEARGVAFPRTQPMRLYASLWNADDWATQGGRVKADWSKAPFVASFRGFSADACVWDGGRQRCPEGTMEAAAVAGAGSGRGWWNQQLSDMSYRRMRWVQRKFMIYNYCADAKRFPQGVPAECKLR

SEQ ID NO: 59717 - protein, 469 aa, Zea mays; identical to SEQ ID NO: 58898
  Clone ID: LIB3732-023-C8_FLI.pep

SEQ ID NO: 59718 - protein, 248 aa, Zea mays
  Clone ID: LIB3732-047-G6_FLI.pep
QDSPCDCTTPHPNPPTASAPLSSESGARTGPDDQAMGKYMRKGKVSGEVAVMEVPGGALLGVRTRSRTLALQRAQRPLDKGDAEDAAAEYLELRSRRLEKPHKEHPSPPATATKRGAGRKAAAAAAVQHVLMQDEVEVEVSFGDNVLDLDTMERSTRETTPCSLIRNPEMISTPGSTTKSKTSSNSTTSRRRTEETPSCRFIPSSLEMEEFFSAAEQQEQHSFREKYNFCPVNDCPLPGRYEWARLDC

SEQ ID NO: 59719 - protein, 444 aa, Zea mays
  Clone ID: LIB3732-060-E12_FLI.pep
KSPYPRRRRPSDSILLASRLHLIGGAGAPATMWAASCLASCCAACACEACRTAVGSIGRRSARIAYCGLFALSLFASWALREVAAPLLQSIPWINHFHKTPDREWFETDAVLRVSLGNFLFFTILAVIMAGIKDQKDPRDKVHHGGWMAKIFCWVVIVFLMFFVPNGVVSFYESISKFGSGLFLLVQVVLLLDFVHGWNENWVAKDEQFWYMALLVVSVVCYIATFCFSGLLFHWFTPSGHDCGLNLFFIVFTLILVFGFAIVALHPKINGSLLPASVIGMYCTYLCYSGLSSEPRDYECNGLHNHSKAVSTGSLTLGLLTTVLSVVYSAVRAGSSATVLSPPDSPRGTDKPLLPFSKADEQEDKKDVPRPVTYSYSFFHLIFSLASMYSAMLLTGWSTSVGESGKLVDVGWPSVWVRIATQWATAGLFIWSLVAPILFPDREF

SEQ ID NO: 59720 - protein, 211 aa, Zea mays
  Clone ID: LIB3732-061-F2_FLI.pep
HGATLFHESMGSLDADFHDMASEALDAHDNFGIEIAMREFRDLFEGIQSMTYCCGNFGDDKGARAIVKAFPHIKCTVLAPPKIIATKPADGAKINYVEGDMFSFIPPAQTVVLKLVLHHLTDEECVKLLAQCRKAIPPRKDGGKVIIGDIMIDHSGLMLETHLLMDIGMMTMTKGRQRDEKEWSELFTKAGFSEYKILKEFGARVAFEVYP

SEQ ID NO: 59721 - protein, 152 aa, Zea mays
  Clone ID: LIB3802-013-B5_FLI.pep
TIKAQQLQQLVLPVINQVALANLSPYYQQQQFLPFNQLSTLNPAAYLQQQLLPFSQLATAYSHQQQLLPFNQLAALNPAAYLQQQILLPFSQLAAASRASFLTQQQLLPFYQQFAANPATLLQLQQLLPFVQLALTNPAASYQQHIIGGALF

SEQ ID NO: 59722 - protein, 473 aa, Zea mays
  Clone ID: LIB3898-004-E8_FLI.pep
VASHPTTTHLVVRRFDPVLPTQGESPDPSPSGIRVLSSPSPSPPSDCPPRLPRRRVSGAAAAAAAAACRAVMATKRSVGTLGEADLKGKKVFVRADLNVPLDDAQKITDDTRIRASVPTIKFLLEKGAKVILASHLGRPKGVTPKYSLKPLVPRLSELLGVEVVMANDCIGEEVEKLAAALPEGGVLLLENVRFYKEEEKNEPEFAKKLASVADLYVNDAFGTAHRAHASTEGVTKYLKPAVAGFLMQKELDYLVGAVANPKKPFAAIVGGSKVSSKIGVIESLLAKVDILILGGGMIYTFYKAQGYSVGKSLVEEDKLELATSLIEKAKAKGVSLLLPTDIVVADKFAADAESKIVPATAIPDDWMGLDVGPDATKTFNEALDTTKTVIWNGPMGVFEFEKFAAGTEAIAKKLAELTTTKGVTTIIGGGDSVAAVEKAGLADKMSHISTGGGASLELLEGKTLPGVLALDDA

SEQ ID NO: 59723 - protein, 180 aa, Zea mays
  Clone ID: LIB3898-004-F6_FLI.pep
KREKTSLSSRRPRSPTSRLLPACLPACKKEFVMASKRILKELKDLQKDPPTSCSAGPAGEDMFHWQATIMGPPDSPYAGGVFLVNIHFPPDYPFKPPKVSFKTKVFHPNINSNGSICLDILKEQWSPALTISKVLLSICSLLTDPNPDDPLVPEIAHMYKTDRPKYESTARSWTQKYAMG

SEQ ID NO: 59724 - protein, 280 aa, Zea mays
  Clone ID: LIB3898-018-G4_FLI.pep
SGWTDGRGHTSRGAVAGDVAGLAAVVAGAVAATPAAAAEPPSATAATAGAVPGHVAGLAAVVAAASTAAAATAVAAAAAGAVPGHVARLATLEAATAAAASSSVAASAVAASAVGARAVPCHVAGLAALVARAGTAPAAGSPAAAPATTVAATAAARSATAAGAVAAAASSSASAAPDEGSVGAGHVDGLSAAVVTLRDGKLHLLALRERAEALRLDRRLVHEEIFAAVLGGDEPEALGVVEPLHRPPLSRRRRHRNPRTLALRMLGLDFFFPLPCPSLA

SEQ ID NO: 59725 - protein, 694 aa, Zea mays
  Clone ID: LIB3912-011-C4_FLI.pep
PAPPLTPKFEILLPVSSFERSNSRRAMEKISVAVRFRPPNLVAANTSPASSGGGGDREWRIDDTRVSLLHRAAGPITGASFAFDHVFDGAANNERIYGTVVRELIGAVVGGFNGTAFAYGQTSSGKTFTMNGSDADPGIIPRAVRDVFDTVRQADDREFLIRVSYMEIYNEEINDLLTLEGQKLKIHESLDRGVYVSGLREEIVNSAEQVFELLQLGEANRHFGETNMNMRSSRSHTIFRMVIESSGKDQTDGGDAIRVSVLNLVDLAGSERIIKTGAEGVRLNEGKYINKSLMILGNVINKLSENGKQRGHIPYRDSKLTRILQPALGGNAKTSIICTAAPEEIHIEETRGTLQFASRAKCVSNCAQVNEILTDAALLKRQKLEIEELRKKLQGSHSEGLEQVVLKLRNDMHKSELERDRLAMELEDERKLRMTLEQHLTEQQKLEAISSDHFTDSIQLDLLKTPDSKSVPDGFVACRSRYSQDVEFSPIPENLDNIAEEDLWTRLNKGCVTDLDMLEMTPNLKRESSFLQEKSSAAPLEEPTNAICQRLAKECIYDQQQLEESKARCANLEKDCDVLRDENLSLQQELSESKLEADSLVAEKQAQLDDLRMRCVALERDLSSSRQEAHRLATEKQELAGQLGTERQKMDELKQDIRVICGDLLQREGQLTSIYTKSKAIIESCKASQVATLL

SEQ ID NO: 59726 - protein, 186 aa, Zea mays; identical to SEQ ID NO: 44856
  Clone ID: LIB3912-011-E10_FLI.pep

SEQ ID NO: 59727 - protein, 423 aa, Zea mays
  Clone ID: LIB3912-016-B2_FLI.pep
AGRFRCTATGMGCGASSHKDAGARRRRPGSVGDVVVFLPGLRVPRAVDFAQALGGCLARAIVERLSALRSRVVEMAMQESAAALKPRRKAAARHGSSTANLLQALEDYLPVLLGLAQQGSVLRHKVQFTWSNQEDNAEETAISDVWYEVLSVLHLMAMVCLLQANTLLLPRSYGDGYAPRVSEESRRATVDVFLKAAGYLDCAIRHVLPKMPLELRRQLPVDLAEGNLKALSLQALGQGVDMQLGLAIDSPKATLAVKRRLACEMVKYWQQVQESIPELPVSDGWGKKHRLFVKWKYVEAKAAAYYFHGLILDEGNTEKSHGMAIAALQASEEFLKESKMVSEAFHATPPTSRSPNAFGTAKYLFDKIPRDASSKVRIKQDLYTQEKVIGAPPPLPDFALALTPEDYDLPPLDPLWNKEDTHH

SEQ ID NO: 59728 - protein, 121 aa, Zea mays
  Clone ID: LIB3912-024-D8_FLI.pep
FQSKNCHLNLSVPRAIFLLQPFLFFLAPFFPELCPQREVDTAATTKCCSRRLPPPRAADVNVPFVSTNSNNALLRSALCPSSSSMAPVLPPRYVGTVAPLTRPTVLEYPFRVLGLAHCNYS

SEQ ID NO: 59729 - protein, 179 aa, Zea mays
  Clone ID: LIB3912-048-B5_FLI.pep
LAQDIYSVMEHKEAGCQQPEGPILCINNCGFFGSAATMNMCSKCHKEMIMKQEQAQLAASSIDSIVNGGDNGKGPAIAATVGVAVPQVEEKTIAVQPMHVAETSEAAAVIAKAKEGPNRCATCRKRVGLTGFNCRCGNTYCSMHRYSDKHDCQFDYRTAARDAIAKANPVVKAEKLDKI

SEQ ID NO: 59730 - protein, 261 aa, Zea mays
  Clone ID: LIB3912-049-F3_FLI.pep
ETRRDGGKNTAQAQAGRDVKPPLRARRRHLAAGARLAAGSLRAPFRRRTGRSPDGSGSDDLRGLAGMAGKKRKAEAARLEETDRALYGAFRGAANSLSQLYTLGMGAQKASFHAGERHAMEKLYEWILRQHENGLRLTVADVASHIQHEIQYGGDNASASPRSQYPSQSTAPTMHIPNTSNQQPSPSLFASGNPGLTQSKNSMVFSSALSSPIRRSLQPYHLEQDGDAGYFANGASRDVNPTASNDSSMDMHSDSPAHDSY

SEQ ID NO: 59731 - protein, 306 aa, Zea mays
  Clone ID: LIB3957-001-A2_FLI.pep
MATPLDVPLDDLIKSRAGRGTGRGRGQGGGRGRGDGQRLARGSWRGRGTGNFRERGLGVSSRRPLGVNTWSSSFAIAKSFNKAKDFVWRHDLFEDSMVAAGLSGIESGTKLYISNLHYGVTSEDLQELFSEMGHLKHCAVHYDSYRHPTGSAEVIFTRRSEALAALKRYNNMRLDGKAMKIEVIGAELGLSAAAVPQISVVPGASRRGQREVVMMPGGSGFGQGASGPSSSLPGWKRGGFVRRGQGRVSFPQRGRGQVRSRGRGRGRSSFVQSRGRGYVRRGNAEKSAKQLDNELDNYNSGAMNVD

SEQ ID NO: 59732 - protein, 246 aa, Zea mays
  Clone ID: LIB3957-006-C3_FLI.pep
AHMEQDKRTKVLCLHGFRTSGAFLKKQISKWHPSILQQFEMVFPDGVFPAGGKSEIEGIFPPPYFEWYQFNMEFTDYTNLDECISYLCDYMVKNGPFDGLLGFSQGATLLALLVGYQAQGKVLSDHPPIKFVVSISGCKFKDPSICDVTYKDPIKVKSVHFIGEKDWLKVPSEELASAFDEPLIIRHPHGHTVPRLDDVSVKQLSEWSSCILEDLETAIVPEALDSGNPSDKEAISAEFAENLVTA

SEQ ID NO: 59733 - protein, 73 aa, Zea mays
  Clone ID: LIB3957-007-F5_FLI.pep
RIVRDDFVWCVAGVKCLCCPNIPTVLGVVACSRPRLSHELVTVVVVVLDTVPKQKYCCQQSATAGKTVENLCK

SEQ ID NO: 59734 - protein, 231 aa, Zea mays
  Clone ID: LIB3958-003-D11_FLI.pep
ASIPQFLPPVTSMGFEHPAVQAYRLQLALAASALQQPIAQLQQQSLAHLTLQTIATQQQQQQFLPSLSHLAVVNPVTYLQQQLLASNPLALANVAAYQQQQQLQQFMPVLSQLAMVNPAVYLQLLSSSPLAVGNAPTYLQQQLLQQIVPALTQLAVANPAAYLQQLLPFNQLAVSNSAAYLQQRQQLLNPLAVANPLVATFLQQQQQLLPYNQFSLMNPALQQPIVGGAIF

SEQ ID NO: 59735 - protein, 326 aa, Zea mays
  Clone ID: LIB3958-004-H10_FLI.pep
LADYNIQKESTLHLVLRLRGGMQIFVKTLTGKTITLEVESSDTIDNVKAKIQDKEGIPPDQQRLIFAGKQLEDGRTLADYNIQKESTLHLVLRLRGGMQIFVKTLTGKTITLEVESSDTIDNVKAKIQDKEGIPPDQQRLIFAGKQLEDGRTLADYNIQKESTLHLVLRLRGGMQIFVKTLTGKTITLEVESSDTIDNVKAKIQDKEGIPPDQQRLIFAGKQLEDGRTLADYNIQKESTLHLVLRLRGGMQIFVKTLTGKTITLEVESSDTIDNVKAKIQDKEGIPPDQQRLIFAGKQLEDGRTLADYNIQKESTLHLVLRLRGGQ

SEQ ID NO: 59736 - protein, 125 aa, Zea mays
  Clone ID: LIB3958-009-A2_FLI.pep
LSGSSHLEQKTKQKIFGPNLQDLMLVLLNRNFGAPMLSMISFLGLKQSSCIGGFPKIALSRLLRRQLLQLHLVQMGEYLHLHSSGDHTVKIIDWQTGKCLNVLLGHHRTPWVEEELEARIRLLEV

SEQ ID NO: 59737 - protein, 81 aa, Zea mays
  Clone ID: LIB3958-011-A3_FLI.pep
LVLHNDRSTSHKPSTSITTKSFAKPTHVIMFCTYLQTLYKIIHKSTNASSDSQKPSQKHSNFLYPLVLRHKLVGVVMSPFT

SEQ ID NO: 59738 - protein, 166 aa, Zea mays; identical to SEQ ID NO: 45035
  Clone ID: LIB3959-017-D4_FLI.pep

SEQ ID NO: 59739 - protein, 474 aa, Zea mays
  Clone ID: LIB3959-019-E6_FLI.pep
RRGEGIEYDTFSSPSIPFLCPNHAILERRRDLIPRSNSKQKPPELEQEPLAACWTLPLLAPEPPAMAKHKQRRVYQVWKGKNIILCGGRLIFGPDAKATLISFALIAIPVLVFCVFVARHLIHIFPAYNAGYAILAATIGLTIYVLLLLFLTSSQDPGIVPRNSHPPVEEFSYDASAPHALQFPRVKEVMVNGVHVKMKYCETCMIYRPPRCSHCSKCDNCVERFDHHCPWVGQCIGERNYRYFFCFVASAAVLCIYVCAMCGLYIRLLMNRGHYSVGKAIKESPASLAVMAYCFICFWFVGGLTGFHSYLIVTNKTTYENIKYKYSNQPNVYDHGCVLNCHEVLCKKRKPSKINLRAIVQEEQEVARPQTSSSNIREDEAPHRPRAKVEDDLEMGLDILKTTGRRTDKFSDEELEPATGSNGIEYRTPDSETEIPVTRTKTEIFNEVRDLDLSVSNGAQSSSPEQEQHPDKLC

SEQ ID NO: 59740 - protein, 410 aa, Zea mays
  Clone ID: LIB3959-023-E4_FLI.pep
TPAMDAFRKQLDVLMGANRNGDVEEVSRNYYDRDVCRLFLAGLCPHDLFQLTKMDLGPCSKIHSLQLRKDYEEAKAKGTENFDRELEDMIERLIVECDRKIQRALKRLADDDANAAIAISVSEVTLTDDILQLSKQIKEKMAEVDAFDFEGRTDDKIKAQEVVEELRAKRADMQATLLLDAFNKDRASLTQPAPPQVAAVPPPAPPDARTQEIINEKLKKAEELGEQGMVDEAQKALEEAEALKKLAPRSEPPSDPSKYTAADVRITDQKLRLCDICGAFLSVYDNDRRLADHFGGKLHLGYMLIREKQKELQEQRNKRRPGKAEDDRRSREHSKDRNGRSSRDREPERRDRVESRDGRRDYERDRDRRHDRDRRHDRDRDRDYDRSRGHDSRRRERSRSRERSRRHERY

SEQ ID NO: 59741 - protein, 253 aa, Zea mays
  Clone ID: LIB3960-002-G3_FLI.pep
LTSACGGGMRRCATRTTYGASKLTLLRGRRRKRRSSSAWRTGRSSARTATSPSTSRARSPGTTSATWPPASASASPRLPPAATPATPTTPTTTPRPRPPSSHRTPPSPPRCSRCPRRRSSCRRAGPSTSSCSSPTTSPATRQDDSASSGPCPRAPTGSRLTFLLCLMCFAAAQGADARVQGAGVVRRHRPLPRAGAQSQQDVGGGAGAFRIPGGERRGVLQAGQSRRRRRRWGSPEQEGPDRGHRRRGLPHSP

SEQ ID NO: 59742 - protein, 238 aa, Zea mays
  Clone ID: LIB3960-003-F12_FLI.pep
INKCRRGGGTAPCQMMNSQKLQLPVQDLMSLRGRSFIISKVMMHQCTAAASSSSSPAPAARGLQVAAHPSPSRRRRPRGLVAAAGSDDDECASDGGESESSSSGGKDDGGGLSREDLERLVGSDDDAKFNGLDLANLIRKKYGRSYDVTLIKKEFMGRNLLAMNVMWKYREQRSFPLSEEEYLLRLDDVANTLKCWGAVAHVRNTLEKLKERPRIGKAVSIFIDMDQTGGRSNEWIYK

SEQ ID NO: 59743 - protein, 258 aa, Zea mays
  Clone ID: LIB3960-004-B8_FLI.pep
SPSAGDASTMARYDRAITVFSPDGHLFQVEYALEAVRKGNAAVGVRGTDTVVLGVEKKSTPKLQDSRSVRKIACLDTHIALACAGLKADARVLINRARVECQSHRLAVEDPVTVEYITRYIAGLQQKYTQSGGVRPFGLSTLIVGFDPYTDKPALYQTDPSGTFSAWKANATGRNSNSMREFLEKNYKETSGKETIKLAIRALLEVVESGGKNIEVAVMTKKDGLRELEESEIDEYVAEIEAEKAAAEAAKKGASKNA

SEQ ID NO: 59744 - protein, 420 aa, Zea mays
  Clone ID: LIB83-014-E5_FLI.pep
GTGAQSTHGNMDAIRKQLDQLMGANRNGDVREVSRKYYDRDVCRLYLAGLCPHDLFQLTKMDMGPCPKLHSLQLRKEYEEAKAKGTDNYDRELEETIERLIVECERKIQRALKRLEEEDAKAAIAISVTEVTQTKEVMELSKQIRQKMKDIDAFDLEGNTEGKIRATEELDKLKEQRAEEQAKMLLEAFNKDRASLINSLQNATQTTTPVPPAAPDARTQEMINEKLKKAEELGENGMVDEAQKLLDEAEALKKLATRPQAVPDSTKMSAHVQITDQKLRLCDICGAFLSVYDSDRRLADHFGGKLHMGYMLIRERLSELQEEKNKKRKLDRAEYDRRSRERSGERARDSSRDRYIDRSSSRDREYDRRRSHDRYHDRERERDSRQSRSYDSRSHRRSYSPRGSSRDYDRSGRHERRDRY

SEQ ID NO: 59745 - protein, 223 aa, Zea mays
  Clone ID: LIB3960-014-B8_FLI.pep
SIANEHALRVYYCVRSHRVCASETDKTGKSRDAFFYRSADRLGVHCLWAHIVRVFLLRCRRVQAASATSKWIPGRHPKRLVLLSACAVDASCNNRGCLPALAQHEDVQARMKQSCSFLPVSESWSKSRSVAPISSSDVSLPTSSLDLPDVADLFAPPADNASRKRESNGSALHDSRNKFPRMQSQSQGIGSAAGNALIPPQLRGRSNVVTEDMSKLFVAKRKE

SEQ ID NO: 59746 - protein, 452 aa, Zea mays; identical to SEQ ID NO: 52903
  Clone ID: LIB3960-014-G3_FLI.pep

SEQ ID NO: 59747 - protein, 459 aa, Zea mays
  Clone ID: LIB3960-018-D8_FLI.pep
KPRGSNPSSFCAVAAQFPHPIPTLRSTDPYMMGEAKENDVYEEELLDYEEDDDKTVDGSAAKPTGEVAKKGYVGIHSSGFRDFLLKPELLRAIQDCGFEHPSEVQHECIPQAILGMDVICQAKSGMGKTAVFVLSSLQQIDPVAGQVAALVLCHTRELAYQICHEFERFSKYLTEVKVAVFYGGVHIRKHKDLLKNECPHIVVGTPGRILALARDKDLSLKNVRHFILDECDKMLESLDMRRDVQEIFKMTPHDKQVMMFSATLSKEIRPVCKKFMQDPMEIYVDDEAKLTLHGLVQHYIKLSEAEKNRKLNDLLDALDFNQVVIFVKSVSRAAELNKLLCECNFPSICIHSGMTQEERLTRYKNFKEGHKRILVATDLVGRGIDIERVNIVINYDMPDSADTYLHRVGRAGRFGTKGLAITFVSSASDSDVLNQVQERFEVDIKELPEQIDTSTYMPS

SEQ ID NO: 59748 - protein, 282 aa, Zea mays
  Clone ID: LIB3960-018-H9_FLI.pep
ATGPSPGDEHTGPVTMAAMNTGMGGLGGRPIHPQANPFGPALQGAGPGLIRTGLETYGGRILDSSSEFMQSNITQYLSDPQYYFQVNSQYVRNKLKVILFPFLHRGHWTRITEPVGGRLSYKPPVQDINAPDLYIPLMAFGTYIVAAGYALGVLGRFTPEALTLQFSKGILGWFLQVVLIKGLLYSLGSGEAPLLDIVAYAGYGFAGTSLAMVARIFWSYLYYFIMPWFCLCTGVFLVKTMKRVLLGGPRSYERHPGRNHYFLIFLAVVQFPMLFWLGNICG

SEQ ID NO: 59749 - protein, 149 aa, Zea mays
  Clone ID: LIB3960-021-D12_FLI.pep
PSLPFHFPISQIQFASSPSSAAMALSVEKTSSGREYKVKDLSQADFGRLEIELAEVEMPGLMACRAEFGPSKPFAGARISGSLHMTIQTAVLIENPTSRPGSHPAAKGSYTLAGGRPAAANRLSPNSRTAAAEANSKPPPPPQPQPRRA

SEQ ID NO: 59750 - protein, 342 aa, Zea mays
  Clone ID: LIB3960-022-F12_FLI.pep
TLESLELSVPDPLDLDILGRLGPEVGVGRLHALEDADDLAGLRVALGDAQRDVAGGGGGVLDVLLLELLLVTSAPGGERDGVVVAGGAAAALGVEEGGATVAGHEEGPAEALGLAGGDELLDGEEERHALAPRELHGDGGVVDAVLLLELERAVGADLERALDLVQRVREAGHELGLLELGRGVLGDALRLDGEGRRLQAQLLHLVLAGLERERLHAAVDGRALVRRARALHLHVRFALDLVVGQPLGRALRARARDEERRGGEREAGELRGVDAPAGDVLQGARDPGGAGVDAERPAGELRRRAGRQRGKGRPAADLGRLHQGGRGLERGCHRRRGGDAFW

SEQ ID NO: 59751 - protein, 210 aa, Zea mays
  Clone ID: LIB3960-022-H2_FLI.pep
AGARGGMHCGEAWRRRLNPSEKARGEAADAAVGPRGPAPPPAQGAHRPRHASRINKQQPPLNPNPPSPLLCCRIPTHSHRLQQPTQRHQQRHQQERDRRSHDKGRRRRHEVLLPSAEDARRRCCRRHYQAHWWRLQEGGGAPPQEGRARHQRPPSPRSRRWQPPEAEAEQRERAGREFDMDTRYGPCLDVTRAQRWRRADEQPCLWEGRV

SEQ ID NO: 59752 - protein, 471 aa, Zea mays
  Clone ID: LIB4071-018-A4_FLI.pep
AAAPLLPSHHTPQPQQDRAEAMAKPKPSSAGAKPTAPAPPVTVHSALVTYTSMLALLSLCPPFVILLWYTMVHADGSVVRTYEHLRDHGVLEGLKAIWPMPTLVAWKIIFGFGLFEAVLQLLLPGKRFEGPISPAGNVPVYKANGLQAYAVTLITYLGLWWFGIFNPAIVYDHLGEIYSALVFGSFVFCIFLYIKGHVFPSSSDSGSSGNVIIDFYWGMELYPRIGKYFDIKVFTNCRFGMMSWAVLAVTYCIKQYEMNGRVADSMLVNTALMLIYITKFFWWESGYWCTMDIAHDRAGFYICWGCLVWVPSIYTSPGMYLVNHPLNLGPQLALSILLAGMLCIYINYDCDRQRQEFRRTNGKCSVWGKAPSKIVASYQTTKGETKTSLLLTSGWWGLSRHFHYVPEILSAFFWTVPALFNHFLPYFYVIFLTILLFDRAKRDDDRCSSKYGKYWKIYCNKVPYRVIPGIY

SEQ ID NO: 59753 - protein, 112 aa, Zea mays
  Clone ID: LIB4073-001-E6_FLI.pep
GGTQHGRGGSGRLVVVELEPHPVVDLVVLEGDVVLVDVVPLLDADLLGARPRLRRHQLLEVADGVVLVALHPHLLPQAVVQHHLDHLLLPLRSRSRVRFPPTQTLARLRFGP

SEQ ID NO: 59754 - protein, 312 aa, Zea mays
  Clone ID: LIB4073-003-F12_FLI.pep
KKMGSEQKKPAYIKYLFGGLSGMGATLFVQPLDLVKNRMQLSGAGGGKKEYKNTFDALSKILRTEGITGIYKGLGAGFLRQATYTTTRLGVYTGLNDSYKIKFGGSPNLLASMLMGVIAGASGAFVGTPAEVALIRMTADGRLPLNERRNYASVFNALTRITREEGVLTLWRGCIPTMGRAMVVNAAQLASYSQAKQYLIRSGYFTEGIKLHFVASMMSGFITTVASMPVDIAKTRLQNMKVSADGKAEYRGTVDVLSRVIRQEGLFALWKGFTPYFCRLGPHTVLTFIFLEQMNSMYNKFVLGDSGSGSGL

SEQ ID NO: 59755 - protein, 247 aa, Zea mays
  Clone ID: LIB4073-005-G3_FLI.pep
PTRSAAAQADQEEAEEKQRSQATAATMGISRDSMHKRRATGGKQKAWRKKRKYELGRQPANTKLSSNKTVRRVRVRGGNVKWRALRLDTGNYSWGSEAVTRKTRILDVVYNASNNELVRTQTLVKSAIVQVDAAPFKQWYLTHYGVDIGRKKKAPAAKKEAAEGQEGEAAAEEAKKSNHVKRKLEKRQEGRELDAHIEEQFGSGRLLACISSRPGQCGRADGYILEGKELEFYMKKLQRKKGKGAAA

SEQ ID NO: 59756 - protein, 248 aa, Zea mays
  Clone ID: LIB4073-012-F1_FLI.pep
DSKYSNHLSDHRQYAILFRARKGKGIEQEHGRRRGEDDEPMTNDGGRRRQARHLSDLAAVGDLDLLSGGPTARPNLLNRLDDIHPLHNLPKHDVFPVEPGRRHGADEELGAVGVGPSVGHGQHPGPRVLAHELLVGELLAVDRLPSRPVAPGEVAALAHEVRDHAVERRPLVVERLARLPHALLARAQRAEVLGRAGNLVGVELHHDTTGRCAADRHVEEDARVRHRRRVGARVLGIWSGWGDLLIEE

SEQ ID NO: 59757 - protein, 139 aa, Zea mays
  Clone ID: LIB4073-012-G2_FLI.pep
TTHGLLTTAETEHQMEGALLLDIVVCKGAAILQLLAGEDQTLLVRGDPLLVLDLSFHIVDGVRALNLQGNGLASQGLHKDLHTTPQAEHQVEGALLLDVVVSEGTAILQLLAGKDQTLLVWGNALLVLDLGLHIVNSVR

SEQ ID NO: 59758 - protein, 92 aa, Zea mays
  Clone ID: LIB4073-014-H7_FLI.pep
TQDMIQVPKLFGFKRLAGLGKLLQLLINLCFCQAIQVHTSLHAHIVASPELGLDTGALADKEGEGGVAGLDVTIVLLHELPGSGAGRGGLAE

SEQ ID NO: 59759 - protein, 110 aa, Zea mays
  Clone ID: LIB4073-018-C12_FLI.pep
KCPTFASTEYTSILCLHTKPPIAGQIHMAGTGLSRANSRCDREGSSPAERRCADWFVSGTTDASPVARVWPEEAVAADLDLRRVGAGDVGVVAAGVVGDAPARARRRLHG

SEQ ID NO: 59760 - protein, 215 aa, Zea mays
  Clone ID: LIB4073-020-H11_FLI.pep
PAPPLRFLTPSPLRVRRRRREGKMYTARKKIQKEKGLEPSEFEDSVAQAFFDLENGNQELKSDLKDLYINNAIQMDVAGSRKAVVIHVPYRLRKAFRKIHVRLVRELEKKFSGKDVVIVATRRIVRPPKKGSAVQRPRTRTLTAVHDGILEDVVYPAEIVGKRVRYRLDGAKIIKIFLDPKERNNTEYKLETYTAVYRRLCGKEVVFEYPMTENA

SEQ ID NO: 59761 - protein, 319 aa, Zea mays
  Clone ID: LIB4073-022-D5_FLI.pep
NPNAETSLLTKKGQLRTWCSSKSHTALRETVTFVTMRDFASCLSQSAVQVAHSSSSSGQNLVQCAYLARLRGKPCVVTVTWSKVASGQAFAVAIHDYSNRCLCKTEVKPWLFSKRKGSKVVELDSGNVEIIWDLSAAKFAAGPEPLEGFRVALLYDLEVVLVLGDLSKEEDRRVLSDALHSDAVMIARKEHIYAKKVYSAKARFLDIGQIHHISIECDTAGARDPSLEIRIDKKKVLQVKRLAWKFRGNQTIYVDGLPVEVLWDVHDWLFSSSNGCAVFLFQSGHSMEKSLFRTCSQNEKEAQAHRFGFTLILKAWKTE

SEQ ID NO: 59762 - protein, 285 aa, Zea mays
  Clone ID: LIB4073-023-H6_FLI.pep
DMGQALGLVQVDQSTVAIKENFGKFSEVLEPGCHFLPWCIGQQIAGYLSLRVRQLDVRCETKTKDNVFVTVVASVQYRALAEKASDAFYKLSNTREQIQSYVFDVIRATVPKLDLDDAFEQKNDIAKAVEEELEKAMSMYGYEIVQTLIVDIEPDDRVKRAMNEINAAARMRVAASEKAEAEKILQIKKAEGEAESKYLAGVGIARQRQAIVDGLRDSVLAFSENVPGTTAKDIMDMVLVTQYFDTMKEIGASSKSSSVFIPHGPGAVKDVAAQIRDGLLQAKLQ

SEQ ID NO: 59763 - protein, 269 aa, Zea mays
  Clone ID: LIB4074-001-F3_FLI.pep
WLSKLYNATIKPSRRGSIRSDVETADEQLDERLRELEVAEGNGNEGFGIDARAVVDDLAVERHPKPLQVERLRGLLLDVDGVVEDGHVTADGEAVVPEEPRHLQLRALHELAVAHGLVALVGEGGRAGPALGPVVRRPAGAAQQREPELDHHDLAVVVVVGAAADGVVVVQLEEEGDVARGVPAVAVGEEEDLPCAASHLEPAGVDAPALAVHGLDPLVAVDLEHVALGAGRGGHGGGHDHVLCSRRRRHAPGAAGGIGGGYDHLRCSR

SEQ ID NO: 59764 - protein, 158 aa, Zea mays
  Clone ID: LIB4074-005-E5_FLI.pep
ANSCSDHELAEVDDGGCAEQQEDAAGGGGRAGGGGAAGFVRFGGDHLRAGGVVAGAVHPVRDGEGQRAPRVVLQRRQEPQQRGADQRGPPGGVPLPQEPRQQRQERQHGHRRHHPRQVRRLRRIPHQHVHRLQQDQLSYDDQANKPTERTRTPRALHE

SEQ ID NO: 59765 - protein, 68 aa, Zea mays; identical to SEQ ID NO: 59321
  Clone ID: LIB4074-021-A12_FLI.pep

SEQ ID NO: 59766 - protein, 178 aa, Zea mays; identical to SEQ ID NO: 41250
  Clone ID: LIB4148-020-F8_FLI.pep

SEQ ID NO: 59767 - protein, 144 aa, Zea mays
  Clone ID: LIB4148-023-A8_FLI.pep
RLRAVGRGGGGGHEQREREHYRQQVARAGHAARAGARRRGAASAAAGRHVGVGVVAVARARGPPPRPRQDGQGDAPAALGTQVKRREATVPPGSPAGVARFALPAIRPARTVLYLYIHLHTTTCTCTTTCCCTILNTSALLLPC

SEQ ID NO: 59768 - protein, 309 aa, Zea mays
  Clone ID: LIB83-014-H11_FLI.pep
FIYRVQTGICGSLQRQWQCRGGSQRKGLAVDVEHLRARQVRFLHAAEVDDLAGGCAGALQLLVAAAGVGHDGFHGGEQAAVGDPLGLAFHRLDEAVGHGPHRRAGLRRHAELAFAVAVAADKHRLAAARALADARRWTVILPLPVPGPGHVAEEGEVEDGIAVARVDDGVELGAGHQRPDDGLVDLVVQDGALLERVHRADGLVVPVLLVAVRVGDLRAQPREVEHQGVAAAAPLHQPLHRHPDVVLGGHPERVLLVVSEHDDAVAGEGEALAEELPHALDVVDGAPQLAAAPARAAVRDADQDGALLA

SEQ ID NO: 59769 - protein, 233 aa, Zea mays
  Clone ID: LIB83-015-D2_FLI.pep
EGRGEAAMSGVFGRVFGKSKEQSQATALASLDKLNETLEMLEKKENLLVKKANLEVEKAKNFTKAKNKRAAIQCLKRKRLYEQQIEQLGNFQLRIHDQMIMLEAAKATTETVDALRTGASAMKAMHKSTNIDDVDKTMDEINDNMENMRQIQDLLSAPMGAAADFDEDELEAELADLEGEELEAELLAPTTTAPSTAPVRVRVPTAQQSTRPSGQSSKAEDDELAALQAEMAM

SEQ ID NO: 59770 - protein, 182 aa, Zea mays
  Clone ID: LIB84-011-F9_FLI.pep
AFNGPVLTQEVNNTMFTYSPTQKVLEPNIVVGAPSSARLPEAGSQLNCVVLPDGQAKSSTIGKGFVRILDSISAPPAFAGEFPSNHRKSLARISGARPNTLHVSAEVIHIGSLAVPSGADKWALQKDQGMELLFSADFEPDARIHCGCNTITAVLRGGFCLFFVSAIMLLVSYEVGMCIYGK

SEQ ID NO: 59771 - protein, 444 aa, Zea mays
  Clone ID: LIB3591-083-F10_FLI.pep
SLPVPPGNSNGTRDEVPYTARAVPDYLDQKRIQKLLLLGPPGAGTSTIFKQAKYLYGTRFTQEELEGIKLMIQSNMFKYLGILLEGRERFEEEALSRLNYTISQGEETQHDENKANGSNSCIYSINARLKKFSDWLLDIIAMGDLDAFFPAATREYAPFVDEMWKDPAIQATFKRKEELHFLPDVAEHFLSRAVEVSSNEYEPSEKDVIFAEGVTQGNGLAFIEFTLDDRSPMSEPYIDNSEAHSQPLTKYQLIRVSAKGMNDGCKWVEMFEDVRMVIFCVALSDYDQLGPPVSGSSRPLVNKMMQSKELFEATIRQPCFCDTPFVLVLNKYDLFEEKINRAPLSSCEWFNDFCPVRTHHNNQSLAHQAYYYVAMKFKDLYSAQTNRKLFVWQARARERQTVDEAFKYIREVLKWEEEKDDNCYQEESFYSTTEMSSSPFIRAE

SEQ ID NO: 59772 - protein, 419 aa, Zea mays
  Clone ID: LIB3356-008-A3_FLI.pep
LFGPKKNTKAAASWTTWCWYEHYFKQAKYLYGTRFTQEELEGIKLMIQSNMFKYLGILLEGRERFEEEALSRLNYTISQGEETQHDENKANGSNSCIYSINARLKKFSDWLLDIIAMGDLDAFFPAATREYAPFVDEMWKDPAIQATFKRKEELHFLPDVAEHFLSRAVEVSSNEYEPSEKDVIFAEGVTQGNGLAFIEFTLDDRSPMSEPYIDNSEAHSQPLTKYQLIRVSAKGMNDGCKWVEMFEDVRMVIFCVALSDYDQLGPPVSGSSRPLVNKMMQSKELFEATIRQPCFCDTPFVLVLNKYDLFEEKINRAPLSSCEWFNDFCPVRTHHNNQSLAHQAYYYVAMKFKDLYSAQTNRKLFVWQARARERQTVDEAFKYIREVLKWEEEKDDNCYQEESFYSTTEMSSSPFIRAE

SEQ ID NO: 59773 - protein, 468 aa, Zea mays
  Clone ID: LIB3150-014-F1_FLI.pep
TKTVIEKYWDWELSNETQPIWLRNPKEVSTEEYNDFFKKTFNEYLGPLASSHFTTEGEVEFRSILFVPATRKEDVTADSRKTKNIRLYVKRVFISDDFDGELFPRYLSFVKGVVDSNDLPLNVSREILQESRIVRIMRKRLVRKAFDMILGISCSENRDDYERFWENFGKFLKLGAMEDKENHKRIAPLLRFFSSQSNNELISLDEYVENMKPEQKDIYFIAADSMSSAINAPFLERLTEKDYEVLLLVDPMDELAIQNLSSYKDKKFVDISKEDLDLGDNNEEREKEIKQEFSQACDWIKNRLGDKVARVDISNRLRSSPCVLVAAKFGWSANMERLMRAQSMGDTASLDFMRSRKVFEINPEHEIIKALNVACRNNPDDPEALKALDVLFETAMISSGFSPDNPAELSGKIYEMMTSAIAGKWSSQPQAQAQPADPIPQHDAPVRSDEPLEAQVVEAEPVEAGQQK

SEQ ID NO: 59774 - protein, 494 aa, Zea mays
  Clone ID: LIB3357-041-G10_FLI.pep
QAMAAEGEAAALEFTPTWIVAAVCSLIVLLSLVAERCLHYLGKTLKRKNQKPLFEALLKVKEELMLLGFISLLLTVFQGMIRRTCIPERWTFHMLPCEKPDEKAGEAATMEHFVGTLGRIGRRLLQEGTAGAEQCQKKGKVPLLSLEAIHQLHIFIFVLAITHVIFSVTTMLLGGAQIHQWKQWENGIKKDAPGNGPKVTNVHHHEFIKKRFKGIGKDSIILSWLHSFGKQFYRSVSKSDYTTMRLGFIMTHCPGNPKFDFHRYMVRVLEADFKKVVGISWYLWVFVVIFLLLNVNGWHTYFWIAFLPLILLLAIGTKLEHVIAQLAHDVAEKHTAVEGDVIVKPSDEHFWFGKPRVILYLIHFILFQNAFEIAFFFWILSTYGFDSCIMGQVRFIVPRLVIGVVIQLLCSYSTLPLYAIVTQMGSCYKKEIFNEHVQQGVLGWAQKVKMKKGLKGAASASKDESITNADSAGPSVKIEMAKAGEDVEIVGNTG

SEQ ID NO: 59775 - protein, 198 aa, Zea mays
  Clone ID: LIB3150-049-C9_FLI.pep
GSHALRSYGTPPFVQWKNEEHVNLIKEYRGKIEAELSNICDGILKLLDSHLVPSSTAAESKVFYLKMKGDYHRYLAEFKTGAERKESAESTMVAYKAAQDIALAELAPTHPIRLGLALNFSVFYYEILNSPDKACNLAKQAFDEAISELDSLGEESYKDSTLIMQLLRDNLTLWTSDLTEDGADEGKDAPKGDAGEGQ

SEQ ID NO: 59776 - protein, 111 aa, Zea mays
  Clone ID: LIB3245-079-B2_FLI.pep
SVCLIKNSGKGNGNGRQLQRTRTGAVTKRTTRGVLEDKLSEIKNGTVLVNSPTSADTHQVGRSDPSYWPSGADSLGAAAASLISSPPSSLVSEVHKVKLSRRSCMIRVLSL

SEQ ID NO: 59777 - protein, 292 aa, Zea mays; identical to SEQ ID NO: 41040
  Clone ID: LIB3592-001-H4_FLI.pep

SEQ ID NO: 59778 - protein, 166 aa, Zea mays
  Clone ID: LIB3957-025-B7_FLI.pep
ETELTKICDGILKLLESHLVPSSTAPESKVFYLKMKGDYYRYLAEFKTGAERKDAAENTMVAYKAAQDIALAELAPTHPIRLGLALNFSVFYYEILNSPDRACSLAKQAFDEAISELDTLSEESYKDSTLIMQLLRDNLTLWTSDISEDPAEEIREAPKHDSSEGQ

SEQ ID NO: 59779 - protein, 164 aa, Zea mays
  Clone ID: LIB3068-008-A1_FLI.pep
LARICDGILALLDSHLVPSAGGAESKVFYLKMKGDYHRYLAEFKSGAERKDAAESTMNAYKAAQDIALADLAPTHPIRLGLALNFSVFYYEILNSPDRACNLAKQAFDEAISELDSLGEESYKDSTLIMQLLRDNLTLWTSDTNEDGGDEIKDAAAPKESAEGQ

SEQ ID NO: 59780 - protein, 461 aa, Zea mays
  Clone ID: LIB3353-001-F5_FLI.pep
QIPKALARGAMAERLAASLLPAASPSPSARRATVAAAAAASFPSPCSARAGLRLRSRPPLFSQKAAGRGCGLRVVRCMAASDAAQLKAAREDIKELLKSTYCHPIMVRLGWHDSGTYDKDIKDWPQRGGANGSLRFDAELSHGANAGLINALKLIQPIKDKYPGITYADLFQLASATAIEEAGGPKLPMKYGRVDVTAAEQCPPEGRLPDAGPRDPAEHLREVFYRMGLDDKEIVALSGAHTLGRARPDRSGWGKLETKYTKDGPGEPGGQSWTVEWLKFDNSYFKDMKFLSQLPWKEQKEQDLLVLPTDAALFEDPSFKVYAEKYADDQEAFFKDYGEAHAKLSDLGAKFDPPEGFSLDDDTSSSPSDEKTEEPTLVAVGAAVATATADDNNGAAPQPEPFVAAKYSYGKRELSDAMKQKIRAEYEGFGGSPDKPMQSNYFLNIMILIAGLAFLTSLLGN

SEQ ID NO: 59781 - protein, 367 aa, Zea mays
  Clone ID: LIB3969-012-E5_FLI.pep
HASVSGTQAAARTEGRPELAARPRARARARTAMARAGGGGPFFPVRGAALVVVLLGIVAGAARAQLRLNYYGSSCPSAESTVRSVISQRLQQSFAVGPGTLRLFFHDCFVRGCDASVMLMAPNGDDESHSGADATLSPDAVDAINKAKAAVEALPGCAGKVSCADILAMAARDVVSLLGGPSYGVELGRLDGKTFNRAIVKHVLPGPGFNLDQLDALFAQNGLTQTDMIALSGAHTIGVTHCDKFVRRIYTFKQRLAWNPPMNLDFLRSLRRVCPLSYSPTAFAMLDVTTPRVFDNAYFNNLRYNKGLLASDQVLFTDRRSRPTVNLFAANATAFHEAFVAAMAKLGRIGLKTGADGEIRRVCTAVN

SEQ ID NO: 59782 - protein, 367 aa, Zea mays
  Clone ID: LIB3227-015-B5_FLI.pep
HASVSGTQAAARTEGRPELAARPRARARARTAMARAGGGGPFFPVRGAALVVVLLGIVAGAARAQLRLNYYGSSCPSAESTVRSVISQRLQQSFAVGPGTLRLFFHDCFVRGCDASVMLMAPNGDDESHSGADATLSPDAVDAINKAKAAVEALPGCAGKVSCADILAMAARDVVSLLGGPSYGVELGRLDGKTFNRAIVKHVLPGPGFNLDQLNALFAQNGLTQTDMIALSGAHTIGVTHCDKFVRRIYTFKQRLAWNPPMNLDFLRSLRRVCPLSYSPTAFAMLDVTTPRVFDNAYFNNLRYNKGLLASDQVLFTDRRSRPTVNLFAANATAFYEAFVAAMAKLGRIGLKTGADGEIRRVCTAVN

SEQ ID NO: 59783 - protein, 347 aa, Zea mays
  Clone ID: LIB3595-012-D10_FLI.pep
LTVHAMPMTPLECDMAPAASRQSWPLPRCGLLVLALALATTAAVGSAQLSSESYYDASCPAALLTIRTAVSTAVLLEPRMGASLLRLHFHDCFVQGCDASVLLDDTASFTGEKGAGPNAGSLRGFDVIDNIKMLLELLCPQTVSCADILAVAARDSVAQLGGPSWAVPLGRRDATTASASLANSDLPGPTSSLNGLLNAFSNKGLSSTDMVALSGAHTVGRAQCKNCRARIYNDTDIDASFAASLRASCPAQAGAGDGALEPLDGSTPDAFDNAYFGNLLSQRGLLHSDQALFGGGGGGATDGLVSAYASNAGQWGADFAAAMVKMGSISPLTGTDGEIRVNCRRVN

SEQ ID NO: 59784 - protein, 165 aa, Zea mays
  Clone ID: LIB3587-197-B12_FLI.pep
FQLDTAPEIKNLGKRKMGSDSTIDKVPRTDKFITKKTLDNLMVHPESHESIQAAVCVPLQDMDHLSISIPQFGELEVGLFVVIKECLLICSIFLHKRAEDRVAQQGFVTWELKKALLVATQKFLEVRVVKDQRVRSPGPLKTRPLFVAPSLIKPQRKLNQYRHTH

SEQ ID NO: 59785 - protein, 165 aa, Zea mays; identical to SEQ ID NO: 59784
  Clone ID: LIB3912-015-F5_FLI.pep

SEQ ID NO: 59786 - protein, 329 aa, Zea mays
  Clone ID: LIB3900-004-H1_FLI.pep
SATPLNPSSPSGAGADMAVHYLLRRGVSGGSLLHPIHGLFLASKELGRRPFGSAAAGDAAAELRGAREDVRQLLKATSCHPILVRLGWHDAGTYDKNISEWPKCGGANGSLRFEVELKHGANAGLVNALKLIQPIKDKFSGVTYADLFQLASATAIEEAGGPKIPMIYGRVDVIAPEQCPPEGRLPAAGPPSPAEHLREVFYRMGLNDKEIVALSGAHTLGRARPERSGWGKSETKYTKDGPGAPGGQSWTSQWLKFDNSYFKAIEERRDEDLLVLPTDAVLFEDSSFKIYATKYAKDQDAFFEDYAEAHAKLSNLGAKFDPPKGISLE

SEQ ID NO: 59787 - protein, 365 aa, Zea mays
  Clone ID: LIB3607-005-C2_FLI.pep
WIGAWSVNSSRGGDAVGVWAEAVTADLADVPLGSPELAHLDHGGPELVEEPPVVVGEALDEPARARVAHQPLVRRQHHPLVLPQRQLHEVEVVEHGGRQEVQVPQRVAAPGGRARRRHAPRHVVGGRARHVAKRAAPRLPHRVRARQRHQVRRVRQVLAPERRQQLVHRRRRRRQREHVVAGRRRRAVQPPQRHREGRPAGQAHGVAGGQHRDVGARHGGPARRVHLPADVLHQLHGLLLQPHVGREAALAVVQEDGRVAALREAVVEQEAEETRRQTDVLLERRVHAGPHDRLQLRARVRVEVHGQVAGSRAASTQRSQDGPRGHGGCGEQHAEGSGQDEHTAAHCRRPTDHHCLCDKRIKTAT

SEQ ID NO: 59788 - protein, 343 aa, Zea mays; identical to SEQ ID NO: 58242
  Clone ID: LIB3960-019-D7_FLI.pep

SEQ ID NO: 59789 - protein, 572 aa, Sorghum bicolor
  Clone ID: LIB3476-051-E4_FLI.pep
ESPAAYDADVFLTSELHQHPVNDSAVRFHVDQDRKAKIVCHFNKQVLQSYKNFMSSAPPKRILLRKGAVWKDVPEKIVKLAQADFRAKKTITETGYQNHLFLLDFAHMTFIDTKTGLQRPIAWIDENGKRYFPESFMQDQKLFIKKDFGNGNPEYISVEPNGTREMNDQLGASESSAESSNFDSSTEDISSPKRSRAEKNSIIKKYCDMGEAIGENEPCALLPTACNLLPHQANLGEVSRAQRTIEAVEKLLLQGMGSVIESKDIIGIFRTPLLDDHRQVRYHIHQKQVQVTGCHRGNANVRYAWLPCSKSTVHEMMLNGVLQVHKPPINFAAYGEGILLTPANRSDACVKYSDVDENGIVHMMLCRVIMGNVEIVHPGSNQHRPSSDHVDSGVDDLKNPQHYIVWDMNMNRHIYSEFVVIVKLPSKTKDSFVSQEECQNSSDLSLVLNSSSPDCISEEMNLEAPPALGGGCAAPMLGDSMEKAPSSPWMPFSMLFAAISTKVSPENMDMVISCYEEFKSKKISRGELVKKLRHVVGDRVLISTIMRLQDKLPPVERREAPDASAAKMVAKP

SEQ ID NO: 59790 - protein, 618 aa, Zea mays
  Clone ID: LIB3689-229-B5_FLI.pep
TCSSLAWLEELVSGPCLYLLAIMAAMNGEVLGECGRNINSLKRKRESPAAYAAGVFCTSELHQHTVNDSAVRFHLDKDRKAKIVCHFNKQVLQSYKKFMSSAPPKRILLRQGAVWKDFPEKIVKLAQADFRAKKMITETGYQNQLFLLDFAHMTFIDTKTGFQRPIAWIDENEKCYFPESFIQDQKLFMKKDFGNGNHEYISEERNGTRETNHQFGASESSAESSNFESSIGDVSSPKRARAEKNFIVKKYCDMGEAIGENEPCTLLPTACNLLPHQANLGEVSRAQRTIEAVEKLLLQGMGSVIESKDIIGIYRTPLLDDHGQVRYHIHQKQVQVTGCHRGNANVRYAWLPCSKSTVHVMMLNGVLQVDKPPNKCAAYGEGTLLTPANRSDACVKYSDVDENGIVRMMLCRVIMGNVEIVHPGSKQCQPSNKYFDSGVDDLKNPRHYVVWDMNLNSHIYSEFVVTVKLPSKTKDSFVSQENCQNSSDLSLVLNSSSPDCISQEMNLEAPPALGGGCAAPMLGDSMEKAPSSPWMPFSMLFAAISTKVSPENMDVIIGCYEEFKSKKISRGELVKKLRHVVGDRVLISTIMRLQDKQLPPVDKREEPDTSASKVVAEP

SEQ ID NO: 59791 - protein, 516 aa, Zea mays
  Clone ID: LIB3593-003-F2_FLI.pep
TCSSLAWLEELVSGPCLYLLAIMAAMNGEVLGECGRNINSLKRKRESPAAYAAGVFCTSELHQHTVNDSAVRFHLDKDRKAKIVCHFNKQVLQSYKKFMSSAPPKRILLRQGAVWKDFPEKIVKLAQADFRAKKMITETGYQNQLFLLDFAHMTFIDTKTGFQRPIAWIDENEKCYFPESFIQDQKLFMKKDFGNGNHEYISEERNGTRETNHQFGASESSAESSNFESSIGDVSSPKRARAEKNFIVKKYCDMGEAIGENEPCTLLPTACNLLPHQANLGEVSRAQRTIEAVEKLLLQGMGSVIESKDIIGIYRTPLLDDHGQVRYHIHQKQVQVTGCHRGNANVRYAWLPCSKSTVHVMMLNGVLQVDKPPNKCAAYGEGTLLTPANRSDACVKYSDVDENGIVRMMLCRVIMGNVEIVHPGSKQCQPSNKYFDSGVDDLKNPRHYVVWDMNLNSHIYSEFVVTVKLPSKTKDSFVSQENCQNSSDLSLVLNSSSPDCISQVRCFTWGINKIVL

SEQ ID NO: 59792 - protein, 188 aa, Oryza sativa nipponbare
  Clone ID: LIB3477-010-D12_FLI.pep
FATLVGVGGLSPALFSPSRPLSCSSSTSVSAPFILRAGGGGDARRHGLRRLVTPLRGSACRGESTNSRVLQCANEANVVTEDDIVNDGIDDETASDAEMDEDAEANGDESSGTDEDASVSWIEQQPLPYPSVSTQIPICGFAQSSSDNCVMGNVGCPRAIHQQGDGGTALGSSSEHSRREAQWHDWWQ

SEQ ID NO: 59793 - protein, 102 aa, Zea mays
  Clone ID: LIB3587-271-B7_FLI.pep
ISSWLPALCMYIHSGRSDKRSPQQWSRIITFSGNRCNQKVVAYLREVCYSRLKRILACLLILGKSLFVQPYNYWGMVGFGLLVSFFLFSLKYRHHRFKLPIS

SEQ ID NO: 59794 - protein, 240 aa, Zea mays
  Clone ID: LIB3689-215-D8_FLI.pep
LDALEPYMSKRTVELHWGKHHQDYVDDLNKQLATSPLYGYTLEDLIKEAYNNGNPLPEYNNAAQVWNNHFFWESMQLEGGGLPEGGVLQQIEKDFGSFTNFREEFIRSALQLLGSGWVWLVLKRNETKLSVVHTQNAIFPLAFGDIICLLVSFFPFMCFLQCLEYKLCNDIPYFLIAVNHQSRLMRACLLLRLQGILWIRRVKSCWRNQRHAYHSNAIHAKISCMLGFHHCPWILLQGNH

SEQ ID NO: 59795 - protein, 311 aa, Zea mays
  Clone ID: LIB3354-095-C11_FLI.pep
MASTALVAVGGAISLGLVASSGVASCSLRAGGDSRRFGPRLVLLRRGGAEGEGTRTRNCPIFRCANKVDVVTEDDSVDGDVTDDGEDLEAAADDAIDADVGTEDELESSLPEDVEWIKQQPLPYPLDALEPYISKETVEQHWGVHQQIHVDRLNGMIGGSEWEGMSLGQMMLASFNEGREQPHPPFFHAAQVWNHDFYWRSMKPGGGGKPPERLLKFINRDFGSYEGMIRQFMDAALTQFGSGWVWLSYKGSGLPYVKSRSPIPSDNHGRLVISKTPNAINPLVWGHSPLLAIDVWEVYFLHCTFPFLCFS

SEQ ID NO: 59796 - protein, 386 aa, Zea mays
  Clone ID: LIB3180-024-C10_FLI.pep
MASTALVAVAVGGAISLGLVASSGVASCSLRAGGDSRRFGPRLVLLRRGGAEGEGTRTRNCPIFRCANKVDVVTEDDSVDGDVTDDGEDLEDAADDAIDADVGTEDELESSLPEDVEWIKQQPLPYPLDALEPYISKETVEQHWGVHQQIHVDRLNGMIGGSEWEGMSLGQMMLASFNEGREQPHPPFFHAAQVWNHDFYWRSMKPGGGGKPPERLLKFINRDFGSHEGMIRQFMDAALTQFGSGWVWLSYKGSGLPYVKSRSPIPSDNHGRLVISKTPNAINPLVWGHSPLLAIDVWEHAYYLDYEDRRADYVSAILEKLVSWETVESRLAKAVARAVERDEHLRRRILRKQRLAQANGQSRARSRARQGRQGDQEVARSRPVEA

SEQ ID NO: 59797 - protein, 225 aa, Zea mays
  Clone ID: LIB3912-005-H7_FLI.pep
RGAGKMAASALHLRLHPSPPAGVKLQQRQLRSKIQRQGGLSRRFSKVVSYYGLTTPPYKLDALEPYMSKRTVELHWGKHHQDYVDGLNNQLATSPLYGYTLEDLIKEAYNNGNPLPEYNNAAQVWNHHFFWESMQPEGGGLPEGGVLQQIEKDFGSFTNFREEFIRSALQLLGSGWVWLVCEFLSIFSEVQAPLIQATDFLNCSFYSKFISSVYIPLNICCSEEK

SEQ ID NO: 59798 - protein, 433 aa, Zea mays
  Clone ID: LIB3608-050-E11_FLI.pep
RDKRGESSPPTILPPVMSVPPPAGGGAIINEVLTDDELRAVLRRLGPEAERDAFGLVCRRWLRIQSSERRRLRARAGPDMLRRLAARFPGVLDLDLSQSPSRSFYPGVIDDDLNVIASSFRNLRVLALQNCKGISDVGVAKLGDGLPSLQSLDVSRCIKLSDKGLKAVALGCKKLSQLQIMGCKLVTDNLLTALSKSCLQLVELGAAGCNSITDAGISALADGCHHIKSLDISKCNKVSDPGVCKIAEVSSSCLVSIKLLDCSKVGDKSIYSLAKFCSNLETLVIGGCRNISDGSIQALALACSSSLRSLRMDWCLKITDTSLQSLLSNCKLLVAIDVGCCDQITDNAFMDGEGYGFQSELRVLKISSCVRLTVAGVGRVIESFKALEYLDVRSCPQVTRDSCEQAGVQFPAGCKVNFDGSLLESDPSAEMFF

SEQ ID NO: 59799 - protein, 442 aa, Sorghum bicolor
  Clone ID: LIB3478-020-C3_FLI.pep
DVRDSFGSLSRRSFEVTIAGLSGLTVHHRGKSQSTVHEVCDTDLIIQESRWANLPPELLRDVIRRLEASESTWPNRKHVVSCAAVCRAWREMCREIVLSPEFCGKLTFPVSLKQPGPRDGMIQCFIKRDKSKSTYHLYLCLSTAVLMENGKFLLSAKRNRKTTCTEYVISMDAENISRSSSTYIGKLRSNFLGTKFMISDTQPPYNGAVVPHAGRTSRRFNSKKVSPKVPTGSYNIAQVTYELNVLGTRGPRRMHCVMHSIPASAVEPGGIVPGQPEQILPRALEESFRSTTSFSKSSIMDRSMDFSSSRDFSSARFSDIAGGAAIAGDEEGQNKERPLVLRNKAPRWHEQLQCWCLNFRGRVTIASVKNFQLIAAPSPAPAPAARAPTPSSQPVPQDQDKIILQFGKVAKDMFTMDYRYPLSAFQAFAICLSSFDTKLACE

SEQ ID NO: 59800 - protein, 436 aa, Zea mays
  Clone ID: LIB3591-111-H3_FLI.pep
MSFRSIVRDVRDGFGSLSRRGFEVKFLGHRRGRSHGAVHELRDPAPVIQSSCWANLPPELLRDVIERLEASEATWPNRKSVVSCAAVCRTWREICKEIVKNPEFSGKITFPVSLKQPGPRDVTIQCFIKRDKSTQTYYLYLCLSTAVLVESGKFLLCAKRTSRPTCTEYTIFMNSENLSRSSKMYIGKLRSNLLGTKFAIYDTQPPCNAAEPGKTSRRFYSRKVSPKVSSSTYNIAQVSYELNVLGTRGPRRMNCVMHSIPTSCLEAGGTVPSQLDSILARSTDESFGSISFSKSSVVDRSMRFSSSRFSDISMSSSRRIGDTASGDNDECKERPLILRNKAPRWHEQLQCWCLNFRGRVTVASVKNFQLVAATQPAAGAPTPSQATPVPPEHEKVILQFGKVAKDMFTMDYRYPLSAFQAFAICLSSFDTKLACE

SEQ ID NO: 59801 - protein, 527 aa, Zea mays
  Clone ID: LIB3060-032-H8_FLI.pep
SDRQLLAAAHSSPLWLFLAPRAPTHLHALSQLDRPHWQSRRLPYPFLFLQKDWTGSSQSSRSESRRIFFDEASICCSPSACWGLAPYPKMSFRSMVRDIRESFGNISRRNFEVRIHHRGKSLGSSGDLQDRPAEVQQSRWASLPPELLCDVMKRLEEDDSSWPDRKDVVSCASVCTTWRDMCKDIVRSPEHCAKLTFPVSLKQPGPRDGVIQCFIKRDKSKLTYRLYLSLSSGVLDENGKFLLAAKRSRRMAHTEYAIFMDSRNFSRSSTGYIGKLRSNFLGTKFIIYDTQAPYNGGRVCTQERAPSRRLSSRKVSPRVPSGSYPVAQVNYELNVLGTRGPRRMQCAMHSIPASAVEPGGVVPGQPKELLPRLFDESFRSTATSSFSKYSVADSSMDLGSCPFSEVEVGGGSLREGDESEKERPLVLRNKAPRWHEQLQCWCLNFRGRVTVASVKNFQLIAPAKTQPQPQASGPPPPPPSSSYHDPVILQFGKVGRDMFTMDYRYPLSAFQAFAICLTSFDTKLACE

SEQ ID NO: 59802 - protein, 204 aa, Zea mays; identical to SEQ ID NO: 37223
  Clone ID: LIB3732-041-D3_FLI.pep

SEQ ID NO: 59803 - protein, 257 aa, Zea mays
  Clone ID: LIB3600-028-D12_FLI.pep
AASALHLRLHPSPPAGVKLQQRQLRSKIQRQGGLSRRFSKVVSYYGLTTPPYKLDALEPYMSKRTVELHWGKHHQDYVDGLNNQLATSPLYGYTLEDLIKEAYNNGNPLPEYNNAAQVWNHHFFWESMQPEGGGLPEGGVLQQIEKDFGSFTNFREEFIRSALQLLGSGWVWLVLKRNERKLSVVHTRNAISPLAFGDIPIISLDLWEHAYYLDYKDDKLTYVTNFMDHLVSWHTVTLRMMRAESFVNLGEPNIPEA

SEQ ID NO: 59804 - protein, 227 aa, Zea mays
  Clone ID: LIB3912-031-C7_FLI.pep
AHGREGGAHHAGERARGSTSMLARPSAPPLVTAQTPEVGIFITARNVSGALVAKLPGNKNNCGGRSNVRQQNSRREWRALSAADQAQASTPDVDEECKRVLTPLGFSSEDAEKMLKKAFGWTHSPYWSEEREKEVPTAEAVAGVLDYIRSLGLSDEDLGRLLKKFPEVLGCDLDGEVRPNVGKLDSDWGINGKTLRSLLLRNPKVLGYNVDCRGDCMAQCTRCWVRF

SEQ ID NO: 59805 - protein, 236 aa, Zea mays
  Clone ID: LIB3912-031-F6_FLI.pep
HMACTFLRRAFSLTAAGTHATPRVAAAFASTSSSSSVVVPLRSPLDHRLLRHLRSEITYLAERRPPHVPPSSFKSFAVEDRPGEQWVRLRASAGGGGEEVKVEATMFDGAAEPVPDDAPLFRRVESLERGPRLHLSLIVEVARGDRVLGFVCSAWPDDLAVRHVLTLAAGGGSSGGRRGGRDFEKLGGEEREAVTKFLKEREVDAELAGFLHDYMANKEKMELLRWLKTVESFLNK

SEQ ID NO: 59806 - protein, 172 aa, Zea mays
  Clone ID: LIB3912-031-F8_FLI.pep
NPSLPSPNQGALCPSHPSSSGHAGRCELRRRAAGPDHRPGWRRGGPRGARGAVGPREPRGDLRLARVLHVPRDAAAAGGRGRARDGDRAGGGRRGGRGVGRRRRRRAGAVRGRRARGRAGRAHGAPPQRPPSPAAPGGRRALRLGRAGAASSLAGGLVSLSIHGYGTLRYVI

SEQ ID NO: 59807 - protein, 170 aa, Zea mays; identical to SEQ ID NO: 50578
  Clone ID: LIB3912-032-D2_FLI.pep

SEQ ID NO: 59808 - protein, 176 aa, Zea mays
  Clone ID: LIB3912-033-F11_FLI.pep
SQLLSRENERSLESAMESTALMTARLPLLTSGSRSKPLPFASFTRAACRLASAPFSGSGSVVLLSRRSRDYAGVGSLVSAAADPGDTADAGSESILLSVQGMMCDGCAASVKRILESQPEVTSATVDFKEASAVVWTTDEAKGTQGWQKQYGEKLAKHLGTCGFESRLQDDQRTIT

SEQ ID NO: 59809 - protein, 158 aa, Zea mays
  Clone ID: LIB3912-033-G3_FLI.pep
ASIPGALLCSCLVLGFLYFQDLLDNLLLLNQESTDNSLPNSNSREYSTIRTVNSPVVPRQPGPLVLGRSQVGDPLDLLPGDGALGTARPLLGVLVHKLPTWGLHDPGLIGFCRVAVTLSVGEALHHLVAAAGRPLVRLCGLGEGRARREERCGAAESG

SEQ ID NO: 59810 - protein, 292 aa, Zea mays
  Clone ID: LIB3912-036-D10_FLI.pep
RSRLRSDCAILSGGAGPLLAVRVAVVGAAGGVEEVEQAAHEHAAGQHRYGAERPEEEREGDVEGAQAERPGVAAAVHRPRHVRRELLARLVAGPGRQAAQEEAGVRVQADGLHVADEGEHEAERHGQVLGREHLPGLAPVHQPRRLGGRRGRGGGRRRDADEDADDGDQRDGRGRQHRRRHDVVPQRLHREHAVLLRVGHHGGDPALACDGVEADDGPGGMAQDRPEEPQVVAGHRRQGQRHQHQVQLLLPEHRTVPLMPIPLTAPAYMLSLRPMPVDGFGRNRTGPVYFRV

SEQ ID NO: 59811 - protein, 493 aa, Zea mays
  Clone ID: LIB3912-039-A4_FLI.pep
AMTTSPVPSQADHVAIFPLMAKGHTMPLLDLACVLRGRGLAAVTFVTTPGNAAFVRAALRQGGAGDAAVLELAYPASSAPAGGEGAEGVASAASFAAFAEATSALRPRFQEALAALRPPASLLVADGFLYWAHASAAALGVPSVSFLGTSAVAHVVREACVRDRPGAGADVGASAGATTCYTVPEFPHLQFSLRDLVPPPPQMIHLDAKMAAAVAASRGLIINTFRQLEGRYIEHWNQHIGPRVWPIGPLCLARQSYSPGGTGSQQRHDAKPSWMQWLDDMAAAGKPAVYVSLGTLASISQAQLKEVSDGLDSAGVNFLWAVRRPDNADDLGTGYEDRVVGRGKVVREWVDQRRVLRHPSIRGFLSHCGWNSVLESVAAGVPLVAWPCDFEQPMNAKFVVDELRIGVRVHTSDGAVGGLVKSEEIATAVKELMFGEAGKAMALRAKGIAAQARLAVSDGGSSWKEVEEMISELRLRGVDMNGKANGGTCASIL

SEQ ID NO: 59812 - protein, 488 aa, Zea mays
  Clone ID: LIB3912-040-A11_FLI.pep
PRAADAALAPGLLRPHPRSRSLARSPPVVQQLESSHTSAKMREILHIQGGQCGNQIGAKFWEVVCDEHGIDTTGRYTGTSDLQLERVNVYYNEASCGRFVPRAVLMDLEPGTMDSVRTGPYGQIFRPDNFVFGQSGAGNNWAKGHYTEGAELIDSVLDVVRKEAENCDCLQGFQVCHSLGGGTGSGMGTLLISKIREEYPDRMMLTFSVFPSPKVSDTVVEPYNATLSVHQLVENADECMVLDNEALYDICFRTLKLTTPSFGDLNHLISATMSGVTCCLRFPGQLNSDLRKLAVNLIPFPRLHFFMVGFAPLTSRGSQQYRALTVPELTQQMWDAKNMMCAADPRHGRYLTASAMFRGKMSTKEVDEQMINVQNKNSSYFVEWIPNNVKSSVCDIPPRGLSMASTFVGNSTSIQEMFRRVSEQFTAMFRRKAFLHWYTGEGMDEMEFTEAESNMNDLVSEYQQYQDATADDDEEAEYEDEEEPADGM

SEQ ID NO: 59813 - protein, 602 aa, Zea mays
  Clone ID: LIB3912-040-A5_FLI.pep
PAPAPPRILLAGDAHGRLHQLFKRVKSVNQSTGPFHALLCVGQFFSPEGAAEGSPEDVTDYLEGRASVPIPTYFTGDYGPAAPRLLSKAAAGARGFAPGGIEICPNVFWLRGSNRFTLHGLSVVYLSGRKGLGGPGCYSQDDVDALRALAEEPGIDDLFLTNEWPTGVVSGSDTSNVPNQVLDPNGYDPIVAELVAEIKPRYHIAGTKGVFYSREPYVNDSAAHVTRFIGLANVGNKEKQKFIHAISPTPASVMSSADINAKPPNATLSPYVGSAKSVPIEEAPKRAAENIDSQYWRYDVKRQRHGEAGGGGLCFKFVSSGSCQRGSRCSYRHDEEAVEHYQRNVCFDFLNKGKCERGPECKFVHSLSGETALRDARPPSERRRVESSCWFCLSSPDVESHLVISIGEGYYCTLAKGPLVPNHVLMIPVEHCPSTLMMPPEAEAELGRYKIALSKYFEKQGKTAVYFEWVSPRSHHANLQAVPVPLSKADAVNKIFHLAAKKLGFEFSMVNPDGAKTARESLMSQCESKSGLFYVELPEGRILLHMVDSNEKFPVQFGREVLAGLLSMADRADWRNCKISKEEEIKLVDDFKQGFREFDPAE

SEQ ID NO: 59814 - protein, 290 aa, Zea mays
  Clone ID: LIB3912-040-B11_FLI.pep
RTVRSLGLGFRGFALGFGRTMGRSRGVLSSGDDDTGHRSKRRRVSSGGDATDSISASIGGAGEGGGKKALYHCNYCNKDISGKIRIKCSKCPDFDLCVECFSVGAEVTPHRSNHPYKVMDNLSFPLICPDWNADEEILLLEGIEMYGLGNWLEVAEHVGTKSKLQCIDHYTSAYMNSPCYPLPDMSHVNGKNRKELLAMAKVQGESKKGTLLLPGELTPKVESQFSPSRVKVEDALGEGPAGRSPSHMAVGANKKASNVGHIKDGATVSKVEEICFLKNVFFCNLSSIKK

SEQ ID NO: 59815 - protein, 216 aa, Zea mays
  Clone ID: LIB3912-041-C1_FLI.pep
WGKKKKKEEIDMNVVGPSVVVRPSSLSRRSQACGFRSLHDPQLPAGASEHLERHVSDEHEVAVLVLVGDGELRQVVVVVGAAGGDEHGLQGLPELPVPLVHPQVELPVRPHRWPSDHGRHVTYVRETHVRFTLNVSVLRSISYSLGRRGCCLRVALVCLLLLGGGALLAPSRVGRRRGHLQLGLLLVLAAVVHGARQAKPQLGRHEVSHDGFHVPS

SEQ ID NO: 59816 - protein, 580 aa, Zea mays
  Clone ID: LIB3912-041-E6_FLI.pep
SYLLPHLVVRPFHLPFAQRVLPLVRQLGDRRRRSTPGAQAFVRTFSGLHRVLRRRRSPTRMERTINSLMYKGSIPDAINQSRREKKLFVVYISGEDEASSSLEQSSLIDENVVEVIGRCCILLHLKQGNVDASQFSAIYPQKSVPSISVIGLNGVLLWNHDGYINSENLKESIEKAWADLHLQETAATLLTASLATRNSEPVNSATTVLPAQGGSSTLENPSDLSSQSPDVSGASEVAHSTDLISQVPNSTALYEPLEINEKEGSKSNSDDKTVEKLGSTSTEFDCDLLDISRKSNTVSSADSKGEDITPSAKRKNKDDGSHTSIPLEDTPSTLTNKGVSSQSRVEQDKATSFVSVKSDDIQLSIRMPSGNRLEIKLTKQDVLRKVKNFVDENQGNGLGSYDLSLVYPKRVFSEQDMEATLSELGIQNRHAMIVVPHRQSGQVSRRHSSASYDMGVNSGADDVGGNSGAGGYFGYLRTVLSYVNPLSYLRGNTNSSNTELQSNEGLRQLRHGSGPWSEPRPLGNRGHEVTDADSANTLRRRPRPFGANIHTLGSEDHGPSDERNVFWNGNSTEFGGDDRK

SEQ ID NO: 59817 - protein, 611 aa, Zea mays
  Clone ID: LIB3912-041-F8_FLI.pep
ASGCGVAEMGCAPVVWAAVWLLAAAVAGFADPGGLERAFPIVKPDYGHTKLQLAKEGLEAIQRIRTPIAAVSVIGPYRSGKSFLLNQLLSLSCDNGFGVGHMRDTKTKGIWVWGSPVEVDIGGSKVSVLYLDTEGFESVGKSNVYDDRIFALATVLSSVLIYNLPETIREADISRLSFAVEIAEEFYGRVKGQDVAFEPAKLLWLIQRDFLQGKSVQQMVDEALQRVPNNNGDTNIDELNQIRDSLAVMGDNSTAFSLPQPHLQRTKLCDMEDQELDPLYVKKRDQLKEVVASMIKPKIVQGRTLNGTEFVSFLGQIVDALNKGEIPSAGSLVEIFNKAILERCLKVYSEIMGRAGLPVSVDELREFHDLAKDEARRLFNKQHFGKHHAARSILKLDEEIKKVYRNLGQANEYQSSKLCEARFSECEDKMERLQVLKLPSMAKFDAGFLLCNRSFETDCVGPAKESYRHRMSKMLARSRALFIKEYNNKLFNWLAIFSLAMVVVGRFLVKFFLLEVAAWVMFAFLETYTRLFWSSESLYYNPAWHAIVSSWETVVYSPVLDLDRWAFPICAVLLFLAFYWRCLGGRRGIARSLLPLYNGAYYRSSSRTRTD

SEQ ID NO: 59818 - protein, 337 aa, Zea mays
  Clone ID: LIB3912-042-A1_FLI.pep
GLTLRSRSFPGEAMDEAAIDDLIRRLLEARGGRTPRNAQVTDAEIRRLCATAKDVFLSQPNLLELEAPIKICGDVHGQYSDLLRLFEYGGYPPDANYLFLGDYVDRGKQSIETICLLLAYKIKYPENFFLLRGNHECASINRIYGFFDECKRRFNVRIWKIFTECFNCLPVAALIDDKIFCMHGGLSPELKNMDQIRNISRPVDVPDVGLLCDLLWSDPDKEIVGWGENDRGVSYTFGADIVAEFLQKHDLDLICRAHQVVEDGYEFFANRQLVTIFSAPNYCGEFDNAGALMSIDDSLVCSFQILKPSEKKRKAGAENMPKPGTPPRKIKISVTRI

SEQ ID NO: 59819 - protein, 220 aa, Zea mays
  Clone ID: LIB3912-044-F6_FLI.pep
SPPSLCPHSLPQHRDARMTAQTAEELATQIEQQKLEEQKTEAEEVVVEDEEDDDDEDDEDDDELDGQEGDASGKSKQSRSEKKSRKAMLKLGMKPITGVSRVTVKKSKNILFVISKPDVFKSPNSDTYVIFGEAKIEDLSSQLQTQAAEQFKAPDLSQITSPETSGPGQEDNDEEVDETGVEAKDIELVMTQASVSRPKAVRALKASNGDIVTAIMDLTT

SEQ ID NO: 59820 - protein, 332 aa, Zea mays
  Clone ID: LIB3912-044-H8_FLI.pep
CQCCRCCPQSHPLPARPLGPVVSGRRPKNSRVGGERPDRRQGRSRHEGPGVVLQRARRADLRRGLLRLRSRQCGGGRPGGRRRRAGASGERGDHRVPVAAVGVREGAAHRRDLVMVSGARRARALRRRPRGGRRLAPPRRQRRRGAAAPAQEEGERDVHGGQLRGGRVLGLRRGAVRRWLGARADVRVLRRAAGRRRGGVGHRGRPQGRAAPAAAVELPRLPHHLPRRRSASRRDVGPARLALPRGRRVAPTVLHFPLCRVHVPGARRVGDKAVDGRRLLRRRRGGGQAAGDAERSATEGGRRWGVGVGAGVLPADPRLQELFHEHLTCTCR

SEQ ID NO: 59821 - protein, 204 aa, Zea mays
  Clone ID: LIB3912-046-G5_FLI.pep
GRRRLGASSLRSVRAKATLPPSLLPRRLPAVAAMVKYSQEPGNPTKSAKAMGRDLRVHFKNTRETAFALRKLSLTKAKRYLEDVIAHKQAIPFRRYCGGVGRTAQAKSRHSNGQGRWPVKSARFILDLLKNAESNADVKGLDVDNLYVSHIQVNQAQKQRRRTYRAHGRINPYMSSPCHIELILSEKEEPVKKEADNIVAARKQ

SEQ ID NO: 59822 - protein, 349 aa, Zea mays
  Clone ID: LIB3912-049-F6_FLI.pep
HNIANMQIILELTRCRGRNSRGGLHKCAPCTAMPNNKIVAANMEEKGAGGKAAVPHDELPRFTIFLIPNRREPPLDLVELVCLHHRISLGNGVPGSSPVVELAVVLVGVAVECAVQVPTPAVESRKSNPLPAGAAPVRPYLPPFGDRRHPLAGSGNISGLLHVHCLQLNLGNSYYRVAASNNRLHDGVAAVHDAVDRGGSQLGLILLRYHLLVALGAHVHGRRAAEEATVIDAEDGSLGGLAPSLLVLHGFLNSDETALFAIPLRRSPRGRRGGEGRGIAGNSVGFEMGGETWGRGERDKGKEEGAGNDEAAPLAGPRGDFSMPEAGGGPRRWIAAYYLFFSLFFPWEW

SEQ ID NO: 59823 - protein, 164 aa, Zea mays
  Clone ID: LIB3912-049-F8_FLI.pep
SRLSRLSLSPWIPPATGRPHSPATATPAPTPSTTAAPAPGRHSRRRGRPSPHPPWESGAQIGRDGVGRVHERARVLPSGAGVQVARGEMDAFLQRLKRLDAYPKVNEDFYKWTLFGGIVTLVAAVVMLLLFISETRSYFYSATETKLVVDTSRRERLRVNVSTF

SEQ ID NO: 59824 - protein, 199 aa, Zea mays
  Clone ID: LIB3912-056-E7_FLI.pep
SVVSSRPPPQRRVKLEAIPALSSPAQPVRFHGQQQSPAPNHQGDAAASQRTRCLTSSARALSEFCHFAPGISASPSEENMRYFNVMILGPAQSPYEGGVFKLELFLPEEYPMAAPKVRFLTKIYHPNIDKLGRICLDILKDKWSPALQIRTVLLSIQALLSAPNPDDPLSDNIAKHWKSNEAEAVETAKEWTRLYTSGA

SEQ ID NO: 59825 - protein, 277 aa, Zea mays
  Clone ID: LIB3912-056-F10_FLI.pep
LISGRPKSKRSEKKKLGSEEVGMGRGRVELKRIENKINRQVTFSKRRNGLLKKAYELSVLCDAGVALIIFSGRGKLYEFGSAGVTKTLERYQHFCYNAQDSNNGALSESQSWYQEISKLRAKFEALQRTQRHLLGEDLGPLSVKELQQLEKQLECALSQARQRKTQLMMEQVEELRRTERHLGEMNRQLKHKLEAEGCSNYTTLQHAACWPAPGGTIVEHDGATYQVHPPAHSVAMDCEPTLQIGYPHHQFPPPEAANNIPRSAATGENNFMLGWVL

SEQ ID NO: 59826 - protein, 327 aa, Zea mays
  Clone ID: LIB3912-057-E8_FLI.pep
GKCGKMDCMLKTLPDPAHRPTQCWNTLISGYARYGYFKEAEDTFKHMVSVGQKPDYVTFVALLSACSHAGLIDKGMDYYNSMAPTFGVSPGIKHCVCIVDLLGRLGKFAEAEKFIDEMPVLPNDLIWRSLLSSSRTHKNLDIGRKAAKNLLELDPFDDSAYVLLSNLYATNARWVDVDKLRSHMKTIKLNKRPACSWLKLKNEVSTFGIGDRSHMHAEKIYVKLDEILLKLREVGYVADTSSALHDTDEEQKEHNLWNHSEKLALAYGLLVVPEGSTIRIFKNLRVCADCHLVFKLVSMVFHREIVLRDPYRFHQFKHGSCSCSDFW

SEQ ID NO: 59827 - protein, 243 aa, Zea mays
  Clone ID: LIB3912-058-E10_FLI.pep
PSSRAILGFLSPSAPPQIWPPPPLTQVVLMAPAVEAVKETGTFQKVPALNERILSSMSRRSVAAHPWHDLEIGPGAPTIFNCVIEIPRGSKVKYELDKKTGLIKVDRVLYSSVVYPHNYGFIPRTLCEDSDPLDVLVIMQEPVIPGCFLRAKAIGLMPMIDQGEADDKIIAVCADDPEYRHYNDIKELPPHRLAEIRRFFEDYKKNENKEVAVNDFLPASAAYEAIQHSMDLYATYIVEGLRR

SEQ ID NO: 59828 - protein, 372 aa, Zea mays
  Clone ID: LIB3911-002-C10_FLI.pep
AMRRALCHRITCYGRTGPRILSTPLIPAIWPGSVANVPSQKTPSYHRKSTSFATKVTPSTTAMESGADEVAFESPAHFRIYKSGRIERLNRPPVLPAGLDEATGVTSKDVVLDAGTGLSVRIYLPKLQEPSKKLPVLVYFHGGAFLLESAGSATYHTYVNPLAAAAGVLVVSVDYRLAPEHPVPAAYEDSWAALQWVTSAQDEWIVEHGDTARLFLAGDSAGANIVHDMLMRASGAGGPRVEGAILLHPWFGGNAPIEGEPEGAAAATAGLWTYACPGAVGGADDPRMNPLAPGAPPLERLGCARMLVCAGKKDALYVRDRAYYEAVAASAWPGDVAWLESEGEEHVFFLPKPECENAKLLMDRVVAFIAGA

SEQ ID NO: 59829 - protein, 117 aa, Zea mays
  Clone ID: LIB3900-005-C4_FLI.pep
PSAPPTGVPPQGNTDRRSAGLANMYIRVKRNKSTYFIQCEPTETALSIKQKLHSLIDQPPSSQQLVLWPSSDVLEDSKTLADQKVDNDSIVALALRKDDGEFEEVFIARPEDFMSSS

SEQ ID NO: 59830 - protein, 328 aa, Zea mays
  Clone ID: LIB3900-005-C7_FLI.pep
RDPMGEASPSIAKDVTELIGNTPLVYLNKVTDGCVGRVAAKLESMEPCSSVKDRIGYSMITDAEEKGLITPGVSVLIEPTSGNTGIGLAFMAAAKGYKLTLTMPASMSMERRIILKAFGAELVLTDPLLGMKGAVKKAEEIQAKTPNSYILQQFENPANPKIHYETTGPEIWKATAGKIDGLVSGIGTGGTITGTGRYLREQNPNVKLYGVEPVESAVLNGGKPGPHKIQGIGAGFIPGVLDVDLLDETLQVSSDEAIETAKALALKEGLLVGISSGAAAAAAVRLAKRPENAGKLFVVVFPSFGERYLSSVLFQSIKKEAESMVVEP

SEQ ID NO: 59831 - protein, 500 aa, Zea mays
  Clone ID: LIB3900-005-E1_FLI.pep
KPANVLLDAAMEPRITDFGLSRLIGEGNTRIVNTHTPGPIGYMAPEYRYMGEVSRKVDIFSLGILILEIVTGQDNSTKVDFIDHVCEHCMEGPQIKFMYPSLEPELHDQVELCIKIGLECVQTDRKKRPTAGDIIRKLEEGTKLGPTPSRENITTEIGKPQMFSFELLNDITESFSPGRLRGTGGFGYVYEGIPHGNEGAMAVKRLKEKIGISPKQFENEVHNLSRIEHRNIVRLIGYCDEIREILSHGKNKNDPPIREHIQERLLCYEYMPKGSLDKIIYDNLDWHTRYKIIEGICHGLHCLHEGQQDIQIAHLDLKPANILLDSDMVPKLADFGMSRLFSLEQVYILASKPMGTIGYIAPEYLDHKKVSTKADIYSFGIVVLEIVTRKQCPRSYADINAQHFIHHLRQNLTKDNYVKSMYPALEADCLQQVKLCIEIGLNCVEKEPTKRPTAREIISMFNQKKDSSRSGVSNCIVNVIEAWLSRLPWHPWPLTLLRQT

SEQ ID NO: 59832 - protein, 200 aa, Zea mays
  Clone ID: LIB3900-007-A3_FLI.pep
RSLRRLPDPAAMARNPGCTVFIGNLDDKVPERVLYEILIQVGRVVDLHIPRDKETSRPKGYAFAEYETEEIAQYAVKLFSGLVRLHNKTLRFAISGQDKPSLNGNIPVTPRLNSVPQPKPHQPMRSSDTPLPQHTAVNGRSAGYGIPPNHSYDTHTQALSSGLPNRGLSNAQAFVIRPIGSQGDQVIPFLLPTCCLVFAS

SEQ ID NO: 59833 - protein, 503 aa, Zea mays
  Clone ID: LIB3900-008-H6_FLI.pep
AMATGRPVRLVLDASLLLDPSSTREAAAVALRPGVEELLRRLRYSNLSVAICYAEGMPTNESDFLEKVASSHLFGSIVLLAKSGNLSPIELMIEWSRTSFCFYATSRVDKGLISELQNQNWRVLSVANECSIEVPGVLNVQRLQELLLTLATLMKKELCGSSVLVIGYIMKKSREEDFAKRGAFPIYPSKGSLIFVPLSFEIPLSLQLQEVDMVLHKITDEIVKIDPNCSIDFPKGISFSAGMSEIIRFVEEHPDFCIMDPFKNIYPLLDRLQIQKILVRLQELGTEGKPKLRAPYSCKVDSFHNGELDKHLVEANLSFPLIVKPQVACGVADAHNMALVFQIEEFSNLSVPLPAVLQEYVDHGSKIFKFYVIGDKVFYAVRDSMPNARFLKPSSGGEALTFNSLKTLPVATNEQRPQTGAEDGKLLDADLVEEAAKFLKGLLGLTVFGFDVVVQEGTGDHVIVDLNYLPSFKEVPDSEAVPAFWDAVRQAYESTRGNANAQG

SEQ ID NO: 59834 - protein, 252 aa, Zea mays
  Clone ID: LIB3900-012-C1_FLI.pep
PFMHGMGLISDELYEAAKQGCGGDFYVAPDPTNARCASAMMAINMVTFAVNPVHILEPFCGAAVRAGGGSIFQGYGGGARRSMLVRDDVRHPGFFAKQRLGLPVECRDNGYRLSYIWADDPEVREALGILEGSIGSWSRCTMLSHYRHDVTTVIPYHVNLTKAGYRALVYNGDHDLDMTFVGTQEWIRSIGYPIVSDWRPWFANRQVAGFTRTYAHNLTFATVKGGGHTAPEYRPKECQAMLDRWTSAAGQL

SEQ ID NO: 59835 - protein, 207 aa, Zea mays
  Clone ID: LIB3899-002-D11_FLI.pep
KGTDAGGVDDDGGRAAGQTRDLELATVSDLHLLGGGAAAGAHLLDGLDDLHALDDLAEDDVLAIQPGGLHGADEELRAVGVGAGVGHGEHPGAGVLADELLVGELLAVDGLAAGAVAAGEVAALAHELGDDAVEGRALVVERLPGLAHALLARAQRAEVLRGLGHLVGVQLHHDPAGWGTADGHVEEDAGVRHRDPKLGFGEIFPSL

SEQ ID NO: 59836 - protein, 152 aa, Zea mays
  Clone ID: LIB3898-002-G7_FLI.pep
NQSRRGRIVVLGLHRRCFLEVDLVHLHLAVNQLVDVYHHTESFDVHQHKAWVHVVSDAAVGARGRARVDHHASLVLICLELMAVPGHQDVHVQLPLEHRQGVQVAPWNNLDAEVARADDVLDLAGHEHGLEFGGQVGHPVRDVQIPQRKHKH

SEQ ID NO: 59837 - protein, 178 aa, Zea mays; identical to SEQ ID NO: 41250
  Clone ID: LIB3898-004-E7_FLI.pep

SEQ ID NO: 59838 - protein, 204 aa, Zea mays
  Clone ID: LIB3898-005-H2_FLI.pep
EVGGLARDSLCPAVGSVEEREAGMCDLVARTGRHLQRYENGHRLVAGCIPFRYRDINDGASDDEQKKLVEVLMISSQSGPGLLFPKGGWENDETVEEAAAREAIEEAGVRGDLVQLLGFYDFKSKQPEATCRAAIFALHVKEELASWPEQSTRQRSWLTVPEAAERSRYPWMQEALVTGFSAWLENWRNGGGGGGGGCVDRTER

SEQ ID NO: 59839 - protein, 98 aa, Zea mays
  Clone ID: LIB3898-007-E1_FLI.pep
CCCRFAKFIQCILLCWLTLSWIIYLRIHLSLVRLFPIHMDWMGLEKVFKKFDLFGIQTHPISLNPHGLRANRTSPYLVGLQFTGIATIFWDKEGVEVD

SEQ ID NO: 59840 - protein, 171 aa, Zea mays
  Clone ID: LIB3898-008-B11_FLI.pep
KSQLLSRGNERSLESAMESTALMTARLPLLTSGSRSKPLPFASFTTAACRLASAPCSGSGSVVLLSRRSRDYAGVGSLVSAAAAPGDTADAGSESILLSVQGMMCDGCAASVKRILESQPEVTSATVDFKEASAVVWTTDEAKGTQGWQKQYGEKLAKHLGTCGFESRLQE

SEQ ID NO: 59841 - protein, 136 aa, Zea mays
  Clone ID: LIB3898-015-H4_FLI.pep
PNKSQTVKWSFWTRMSLAGARPSLQTTLVGLYQGSLRPIIGSLIQNAVRPTSLSSRTDDDGKRMMRGVGGPLLTIGDLLSDLAVDDPLVGVGDASVPSSPSAAQQAGKANPSDLSRLFEVRARFPHPPHMFRCSRI

SEQ ID NO: 59842 - protein, 271 aa, Zea mays
  Clone ID: LIB3898-018-A8_FLI.pep
LHCTALHAMATTATEAAKAAPAQEQQANGNGNGEQKTRHSEVGHKSLLKSDDLYQYILDTSVYPREPESMKELREITAKHPWNLMTTSADEGQFLNMLIKLIGAKKTMEIGVYTGYSLLATALALPEDGTILAMDINRENYELGLPCINKAGVGHKIDFREGPALPVLDDLVADKEQHGSFDFAFVDADKDNYLSYHERLLKLVRPGGLIGYDNTLWNGSVVLPDDAPMRKYIRFYRDFVLALNSALAADDRVEICQLPVGDGVTLCRRVK

SEQ ID NO: 59843 - protein, 212 aa, Zea mays
  Clone ID: LIB3898-018-H1_FLI.pep
VRKRERGGKMLRHAARRLVSRAVAPPTARRALATAEVPAEAVEDSTFVEAWKKVAPNIEPPATPLSLMQPRPPTPATIPTKLTVNFVLPYKSEIANKEVDMVIVPATTGQMGVLPGHVATIAELKPGVLSVHEGNDVSKYFVSSGFAFVHANSIADIVAVEAIPVDQIDPALVQKGLAEFTAKLGAASTDLEKAEAQIGVDVHSALNAALTG

SEQ ID NO: 59844 - protein, 217 aa, Zea mays
  Clone ID: LIB3898-019-C11_FLI.pep
RSRRKFEDEEQLHCGRTSGMEGQFQVGKEEVIQAWYMDDSEEDQRLPHHREPKEFIPLDKLSELGILSWRLNADDWENDENLKKIREARGYSYMDICDVCPEKLPNYEAKIKNFFEEHLHTDEEIRYCLEGSGYFDVRDQDDQWIRVAVKKGGMIVLPAGMYHRFTLDSDNYIKAMRLFVGEPVWTPYNRPHDHLPARKEYVEKIINRGGNQAVEAR

SEQ ID NO: 59845 - protein, 250 aa, Zea mays
  Clone ID: LIB3898-021-E5_FLI.pep
LPRSPPVRPIPRLPSHGCAARSTATPRRAAPLSCPAPALPRRARDRRLPHLLRARSGLRIRPLPRPQPHSAAGDQHNISNPPPRIRLAVAPPPRPATLRTHKFTMSGMASDDSPAQVNVEGDVSEKKVEVQDQNEVGGMPSRQEEEAAIKKKYGGILPRKTPLISKDHERAYFDSADWALGKQGGVPNKPKGPLEALRPKLQPTQQNARARRTSYASADSDDTLNLSPEDLVPQGEPSQQGEPVEDKNKE

SEQ ID NO: 59846 - protein, 250 aa, Zea mays
  Clone ID: LIB3801-010-F10_FLI.pep
YTQGKELGADRRLGGFTCCISLPSASGCPLIEKEELRAMATEKPILYNAWISSCSHRVRIALNLKGVDYEYKSVNPRTDPDYEKINPIKYIPALVDGDIVVSDSLAISLYLEDKYPEHPLLPKDLKRKALNLQIANIVCSSIQPLQGYAVIGLHEGRMSPDEGLHIVQSYIDKGFRAIEKLLEGCESKYATGDDVQLADVFLEPQIHAGINRFQIDMSMYPILERLHDAYMQIPAFQAALPKNQPDAPSS

SEQ ID NO: 59847 - protein, 282 aa, Zea mays
  Clone ID: LIB3732-002-C10_FLI.pep
VAISISSIEDAIQLKDSAPHPHASQTGPNRSSSSVQKITPYCRAALHNGHLRVVRRGGRGRRDGGAGGAPQRRAPGVRATGHRRGGAASGGRGLVVAPLRRRRDGVRGPRRSRGGRAGVRAPGGADLLRAPRRDAAPPPRPRRGRRARGPSQLGARQGRGARPAIVALPPPPPARRGGAARVPGPRGGVRGGGPGRVEARGCGGGASETEGGVPRREREGVQVLPRPDRYPGERVVDGACHVSPVATARSALGRTVWPSSRAPEIDGAGSVVDAELGDEKCE

SEQ ID NO: 59848 - protein, 325 aa, Zea mays
  Clone ID: LIB3732-002-F8_FLI.pep
IHNTEHQKELRSDRHGCRHHGYHLPRAHRQAGGWHEGRLRQGPHHHAQDRRQAQAGGVRQPLVRCRPRPVPGPAVRLAPELPDRRVPRRLRVGHRGAVGGPGDLRQEPRAGGDPLPLGHARRARVRVPGAARPQRRQVRRGGVVQGGLPDLQRGRARLPRQPEPGPRAEHPGHLGVPGGAHGRRRGVPRRRRAARRGGRPAVPWRQLRPARARRRPGGVRRAQGEGDQERPPRHVLHVRLLRAGYRHRQGPPREPRRPHRRPRQQQRLGLRHQLRPRQVSEGMMLACVYRRRTYSYVLQVAPVFVKGALGARDCTASVFVCMLWS

SEQ ID NO: 59849 - protein, 253 aa, Zea mays
  Clone ID: LIB3732-002-G3_FLI.pep
VSRPIVCERVCWSAKRRKGRREMACPAQSMLSASGCIFLRSKPQAASQVRGGIIGGGRSSRPFLLTCNASSSPSPSSPAPAQEDPDCNEEECAPEKEVGSLSAEWLAEERTQVVGTFPPKKRGWTGLVEKDTAGQTNIYSVEPMVYVAESAISSGTAGTSAEGAENTAAIAAGLVLITVAAASSILIQVNKSQVPQVPEAAYSGPPLSYYVTKFQPAVAAPAQTLEAPAPNETQDGAAATVAAPEVPAPQLSS

SEQ ID NO: 59850 - protein, 210 aa, Zea mays
  Clone ID: LIB3732-003-G10_FLI.pep
PHSTILRHYDHIDKRHNSCNPILFHRTTEANCRSSNHAGTTTADRGLAGDLNGLHFRLLGVLLRHSDCKHAVLHGGRDLLRLSVLGQSEPAQEPPAAPLHAVPGVRLLLLLLVAFAADLKDVAVLDLHLDLLLLQPRYVGLEHVRLWSLLPVDPRASEGRGLRAGPRERGEETAAAAGAEGEALKGVPEVEGEGIEHVAAADQRHGQVRF

SEQ ID NO: 59851 - protein, 325 aa, Zea mays
  Clone ID: LIB3732-004-F11_FLI.pep
AGTLIYGSFVSLWDLLVYHASDNKSAAMAVCTTTEAQFWCCRQLAFTSADGAGPDTSSRSAGDGAAGAGGLSGCGASAGASFLPCCFLLLLCLFLPLDGASAGGSSAGASATGGGVVAGGSDAGASAGGVAVGGGAAAGGSTAGGSTAGGVAGGGVAGGGVTGGGVTGGGLAGATAGATGGGFAGATGVAVGAGVVGAGGGFAGATGVAAGVVGAAGVVGAIGVVGAAGVVGAAGVVGAAGVVGAAGVVGVAGVVGAAGVVGAAGVVGAAGVVGVVGGDCATAAMRWSPRRAPSTARLRHCRSSGAAMLPAVVVCLERRRADAEP

SEQ ID NO: 59852 - protein, 392 aa, Zea mays
  Clone ID: LIB3732-006-E7_FLI.pep
HKLLHGSMQIKREISTMKLIKHPNVVRIYEVMGSKTKVYIVLEYVTGGELFDTIANQGRMREGEARSYFQQLINAVDYCHSRGVYHRDLKPENLLLDSYGNLNVSDFGLSALSQQIKDDGLLHTTCGTPNYVAPEVLEDQGYDGAMADLWSCGVILFVLLAGYLPFEDSNLMTLYKKISNAEYTFPPWTSFPAKRLLTRILDPNPMTRITIPEILEDEWFKKGYKRPEFDEKYDTPLDDVDAVFNDSEEHHVTEKKEEEPVALNAFELISRSAGLNLGNLFDSEQEFKRETRFTSKCPPKEIIRKIEEAAKPLGFGVQKKNYKLRLEKVKAGRKGNLNVATEILQVAPSLHMVQVRKAKGDTLEFQKFYKNLSKTLKDVVWKSEDLQMRAAS

SEQ ID NO: 59853 - protein, 177 aa, Zea mays
  Clone ID: LIB3732-007-A5_FLI.pep
ELNRIVATCGGTLGGCKLGNRLGPFGDGVLGEFAGEDEAHRGLDLPGGDGGLLVVAGELGCLGSELLEDVVDEGVHDGHGLGRDANVRVHLLEHLEDVDLVRLNALLRLLLSLLLAALLTRHALLRPWLLLGLLLRRLLLRGLLLGLGRHQESIKWVAKEMGEGAAWEFAGEWRRVL

SEQ ID NO: 59854 - protein, 475 aa, Zea mays
  Clone ID: LIB3732-007-H7_FLI.pep
IVLLASLADPPLPSPRFKMQIFVKTLTGKTITLEVESSDTIDNVKAKIQDKEGIPPDQQRLIFAGKQLEDGRTLADYNIQKESTLHLVLRLRGGMQIFVKTLTGKTITLEVESSDTIDNVKAKIQDKEGIPPDQQRLIFAGKQLEDGRTLADYNIQKESTLHLVLRLRGGMQIFVKTLTGKTITLEVESSDTIDNVKAKIQDKEGIPPDQQRLIFAGKQLEDGRTLADYNIQKESTLHLVLRLRGGMQIFVKTLTGKTITLEVESSDTIDNVKAKIQDKEGIPPDQQRLIFAGKQLEDGRTLADYNIQKESTLHLVLRLRGGMQIFVKTLTGKTITLEVESSDTIDNVKAKIQDKEGIPPDQQRLIFAGKQLEDGRTLADYNIQKESTLHLVLRLRGGMQIFVKTLTGKTITLEVESSDTIDNVKAKIQDKEGIPPDQQRLIFAGKQLEDGRTLADYNIQKESTLHLVLRLRGGY

SEQ ID NO: 59855 - protein, 424 aa, Zea mays
  Clone ID: LIB3732-011-B6_FLI.pep
IANVHQIARRMVDAGFGRECAEAYAAARRGFVDESVARLGVRSRTAEEVHASPWEELEFDIARWIPAFNMVFRILIPSERRLCDRVFDGLAPFGDLAFIAAVRTQALQLISFGDAISSSSRAPERLFRVVDMYEAVRDILPDLDPVFSDPYSAALRAEVSSMCNTLGSSIKGIFMELENLIRRDPARIAAQGGVIHPITRYVMNYLRAACGSRQTLEEVMEGDFGANGGAPVAVDPDRPTSSLAVHIAWIMDVLQKNLDMKSKIYRDPSLASIFLMNNGKYIIHKVNDSELGVLLGDEWIKQMTNRVRRWSMDYQRATWGKVTTVLQSGTPGIGGLPAKAMLQKLRMFNTYFEEIYAAQSEWVIADDQLKVDIRAAVEETVMPVYASLIAKLKSSPETGRDLYIKYTPEDVVAHIQHLFEGAAK

SEQ ID NO: 59856 - protein, 323 aa, Zea mays
  Clone ID: LIB3732-012-E4_FLI.pep
NRDSKGRTEQGRRREGSVRLFPVSPREQGEDRRVRWRSTTSPRSRSSASRTAGSWAAAALTLSRRRRRRPRRRTRGSGRAGCSRCFRRASSRTAGRTATRTAAASATCSAWTAPPRVRARARAPCAHCAWRRPTATTTPSRSGAPPTTTSSGCPTSSASWTSPACRPTSSTAPASSSSTSGPSSRGLDARPRRRPPTSARCAPVASSTTSASAPSDARSWAAHPTPPRPGAGSSGRPSVAAAAATTTPRRPRRCATPRRGRASPRPRRSRRSAARASRTARRSAASSSSTSSLSIRLHGGGGCIGSGTTQHTRGKAGKIYIYS

SEQ ID NO: 59857 - protein, 101 aa, Zea mays
  Clone ID: LIB3732-012-F1_FLI.pep
VFFHVLFSNIECGSNFLLHQSRVVDTIMQRSVGMQLVTSVPVGLGPSTARSGVAVWERCAWLVAGPGGEGEESGVCGRPILAAVGSRRWHVGDVARSGERA

SEQ ID NO: 59858 - protein, 257 aa, Zea mays
  Clone ID: LIB3732-013-C1_FLI.pep
VSETAKVLIDSSQPPKKPGANHNLASCPLPGSSFPSRRSPPRRDRGGANSERVSSSLHGSNEPPAPPPQIPRARLAAAPAMDVDLWISKVKEGQHLAEHELQSLCEYVKEILIEESNVQPVNSPVTVCGDIHGQFHDLMKLFATGGHVPETNYIFMGDFVDRGFNSLEVFTILLLLKARYPAHITLLRGNHESRQLTQVYGFYDECQRKYGNANAWRYCTDVFDYLTLSAIINGQVLCVHGGLSPDVRTIDQNAYHQ

SEQ ID NO: 59859 - protein, 485 aa, Zea mays
  Clone ID: LIB3732-015-E4_FLI.pep
LFRGAWRGPMGKKGKWFGAVKKVFSPESKEKKEERLRRKSAASNPAPVDLTPSTSLEVNVSVPPPPAPPPVPRQTDEVRVPEAEQEQSKHVTLEEAPAAAAAPAQASVLPPGAPTEELAAIKIQTAFRGYLARRALRALRGLVRLKSLVEGNSVKRQSASTLRCMQTLSRVQSQIRSRRAKMSEENQALQRQLLLKQELENFRMGENWDDSTQSKEQIEASLISRQEAAIRRERALAYAFSHQWKSTSRSANPMFVDPNNLQWGWSWLERWMAAKPWEGRNGTDKESNIDRGSVKNMSLNLGVGEGEITKAFNRRDSKPEKPSPPTPKPARPASRQSPSTPSARVAPIPARRKSSTPKNGLSQVDDDVRSVLSVQSERPRRHSIATTSTMRDDESLASSPSLPSYMVPTESARAKSRTATANGAETPEKGGSAGPVKKRLSFQGGAAAASPMRRHSGPPKVESAVKDIAAPPQPEALVANGGGSK

SEQ ID NO: 59860 - protein, 337 aa, Zea mays
  Clone ID: LIB3732-016-B12_FLI.pep
GVETKGARVSPGAVSRAEGEGLKEATMQVKQKVYEFYKGTVERVTAPRTVSAFLEKGVLSVPEFILAGDNLVAKCPTWSWEAGDPSKRKPYLPANKQFLVTRNVPCLRRAISVEEEYDAAGAEVVLDEDGEGWLATHGVQASKTEEEEDIPSMDTLDIGRSDGIKSIPSYFSGGKDEEEEDIPDMDTYEDTGDNLAAAEPSYFIAEEPEDDNILHTRTYDVSITYDKYYQTPRVWLTGYDESRMPLMPELVFEDISQDHARKTVTIEDHPHLLAGKHASVHPCKHAAVMKKIIDVPMSGGVEPEVDKYLFIFLKFIATVIPTIEYDYTMDVDLGSTS

SEQ ID NO: 59861 - protein, 207 aa, Zea mays
  Clone ID: LIB3732-016-F3_FLI.pep
LCAKLLHKGITMNHHTGTYLYCISTKKNKLSSIIASLHTTNGRERLSISKLFFHHPCYLHDFSKCYRVHSSCRITPRCRIPFNTRFRTQCFEINPHYTHNCVNCRNSSHPDLRDILAGCVMSVMLGVIFAQTGTVAFSLIQPQTSSSKSQSCPTAAPIFLSGMPCGHEKLISRASTPDSSTRSISSCHAALLYSSIIEPISILSGYS

SEQ ID NO: 59862 - protein, 295 aa, Zea mays; identical to SEQ ID NO: 43367
  Clone ID: LIB3732-018-E7_FLI.pep

SEQ ID NO: 59863 - protein, 283 aa, Zea mays
  Clone ID: LIB3732-021-B5_FLI.pep
AASPAEPRTFSRSRPLPFRQEKTMSRRNSRTIYVGNLPGDIREREVEDLFYKYGRILDIDLKIPPRPPGYAFVEFEDPRDADDAIYGRDGYNFDGYRLRVELAHGGRGQSYSYDRSSSYSSACRGGVSRRSDFRVMVTGLPSSASWQDLKDHMRRAGDVCFSDVYREAGETIGIVDYTNYDDMKYAIRKLDDSQFRNAFSRAYIRVREYDARSRSRSRSHSYSRSPSYSRSRSPKSVSQSPSSVDERSLSRSRSPISSPSHARYATSPRSRSASRSRSPVRSD

SEQ ID NO: 59864 - protein, 786 aa, Zea mays
  Clone ID: LIB3732-022-G10_FLI.pep
TSGGPDAHSLMDSSRSWIFTELGQPTYCPETFPEVPFERPTPPIIFFDEEHIFEEESSSSTTATPRNPSDPKQAGGDLDSIATAALSASEEIPQSLLVIDLERATSKCIRTHAVNDVPAVHSIIKGLQLERIGLAGSAPDLDTLTTARHCGSELSCQLGSNKRDVSLRVGCDQSYEWVDPETLDRSFVVLDNACATHEVFEVLPLSFPAAWVNVGKLPTTLCWKIPWPPPVLWVNLHAGGRYITSLLEECQLVFTIFFGGVCSLAKIQWPYMVLEYLANLHVIHGKIHMHPVQVCVRSYAVMPSAKGLVAETHLHFIGTYRGVVSTAFCTEIVESADAYIFAGSIFKDYSSVGYSFLLKKAKAIIVQPERVGVGNGLSFRCLMMKEYWTEIAKKVKKNTTTYENYKRNFVPEGQALESEPNEPLRVNVLFKYIQKMMTVNSVVMAETDDSWFNCHKLKLPESCGYQFQMQYGLIGWSMGALLGYAQGANHKILSPLTALHPLVAVCYDHDIIMDAAGFGDELVVISLGADCQIIASYHRWPFGQTGTGHFSPIGGYQVRQDMVLILDVARFIPLQFFWEAMNTTNDSTLRGSMLISRKVAESSLLYTVSCRDENWKIMPKFCVEDLPSLLKAGIGACVGLVTSGLSVVSSGQGNFSVFVWDPGDSGLVTSSLSAVSSDQGKFSVFVWDPGDRGLVTYGLRVVSIARVTAIMSGTYARGAATTSSPKMRQTQFRWRAEERHDAFNNDANPQIKLILHRQRLGGKPYFKEWGMLDILGVVDELWVMWA

SEQ ID NO: 59865 - protein, 432 aa, Zea mays
  Clone ID: LIB3732-023-C2_FLI.pep
LKEKERRSGSLTLTPSLILLLLPGSDLSSAPAAFHPDPVCHWSHPLHRFLPPTTPSRSPFATGQMEAIRKQASKFREQVARQQQAVMKQFGGGYGADGVFANEAEAQQHSKLEKLYISTRAAKHFQRDIVRGVEGYIVTGSKQVEIGNKLCEDGKKYGTENTCSSGSTLSKAALSFAKARSMMEKERGNLLKALGTQVAEPLRAMVMGAPLEDARHLAQRYDRMRQEAEAQAIEVSKRQMKLREASGNSDMVSRLEAAESKLQELKSNMGVLGKEAVAAMTAVEAQQQRLTLQRLIALVESERNYHQKVLQILDQLEREMVSERQRIEGAPPVVESSMPPPPAYEEVNGIFMRNTVAELVETVEYFLAEAIQSYQAESDTELNLSTGDYIVVRKVSNNGWAEGECRGKAGWFPYDYIEKRERVLASKVGQVF

SEQ ID NO: 59866 - protein, 415 aa, Zea mays
  Clone ID: LIB3732-023-C5_FLI.pep
GSTTHWSQQTTTSPFRLLPVAPRFRRRYPAISATATRCRRRRSRREDRYRCRRQINWTCKTRACATCGVPEALFCQDSASLVAHMATSTSQHALSSIKLLSTGCLHPDKRNCRVLSVSVGRRCPSARNLGLLCASNSQSSVIEPVQLPRSPKSGVTPKKSGESALILIRHGESLWNEKNLFTGCVDVPLTPKGVDEAIEAGKRICNIPVDVIYTSSLIRAQMTAMLAMMQHRRKKVPIILHNESEQAHMWSQIYSEETKKQSIPVITAWQLNERMYGELQGLNKQETADRFGKEQVHEWRRSYDIPPPNGESLEMCAERAVAYFKDQIIPKLVDGKHVMIAAHGNSLRSIIMHLDKLTSQEVISLELSTGIPMLYIFKEGKFIRRGSPAGPSEAGVYAYTKNLAQYRQKLDGIVQ

SEQ ID NO: 59867 - protein, 271 aa, Zea mays
  Clone ID: LIB3732-023-E3_FLI.pep
DMEAAGGGGEVHKASNDKEEHFVLVHGAGHGAWCWFKLACLLRGSGRHRVSCVDLAGAAGSLVDPDDVRSFDEYDAPLLDLMAALPDDGRKVVLVGHSAGGLSVTHAMHLFRDKIKQAIFVAATMLPFGYQSEQDIKDGAPDLSEFGDDVYDLKFSLGDDRPPTSVALREEHQRAILYQQCTHEDSTLASILLRPWPAALGAARFGRADDGAVNTVRRVYVKTANDRMLKPEQQEAMVRRWPPSEVAAMDTDHSPFFSAPERLFELIIKSL

SEQ ID NO: 59868 - protein, 240 aa, Zea mays
  Clone ID: LIB3732-024-H1_FLI.pep
QNRYTKGYYYTRMPSSPIRRHRFRREEILHSRQHRVVRWIIWMVLGWDLQNSRDWLVVAIHQKSYHVGNILTDEHNSNILPCSKFFERVLDLFNCRLVVDEEVIGFLAQINIANAGHQKASDGVLVGDDCDEGGVVSGDVSPPRHGLWLWMLLPCLLVFAVLHIHLGWEEGSSPPASPRASAGPSSCPATAAPPSSTPRAAAAPPATTTPSRSPPGAEVTRRSSRRRTSRTPPPPPATSR

SEQ ID NO: 59869 - protein, 446 aa, Zea mays
  Clone ID: LIB3732-025-A8_FLI.pep
FTRTNMTLQVLGYITISQNKHRPGYTAGAGQQYEHCFVFMCGIALSGTDGDPSLLHLGRGGILVGGLRRRPLSEHRQVSLLLEVLHRVVKRLADRPELQPQVPELLVGELVRLLPRIHLVGAPGWDGVLGEELGEDADDVLAVEDALGAEVAAGRAGALEDAEVRVGHVAHVHVRLHGVGEGAGRAVQVLEDVRDAGVHRRLQQGAHHQHGVHHHQVHAPPPGRLPRRLLRHRLAVAVPVPGFLAELEVAPARLVDHDVGPALGVHGHGADGRREHHPPHRAGLRRRVDHVLGAAHRRLHHLLRVVGDGGGGVEDALAALHGAADGVVVQQIGLAEDQPLGGAVQRLEVRVLRVIWVPDGALHSVSLLEQQLHQPRGDVPSRAGHAHGLPVPRRYRGGGGSRGAGIGGGDDGVDDGHPGDDDDDDGSTCSCSSSSRPLVLIYPLDL

SEQ ID NO: 59870 - protein, 438 aa, Zea mays
  Clone ID: LIB3732-025-C7_FLI.pep
PPEKRRSLRRTAMAPEPEDDIMNEKNPRPLDEDDIALLKTYGLGPYSTSIKKVEKEIKEMAKKINDLCGIKESDTGLAPPSQWDLVSDKQMMQEEQPLQVARCTKIISPNTDDAKYVINVKQIAKFVVGLGDKVSPTDIEEGMRVGVDRNKYQIQIPLPPKIDPSVTMMTVEEKPDVTYNDVGGCKEQIEKMREVVELPMLHPEKFVKLGIDPPKGVLCYGPPGTGKTLLARAVANRTDACFIRVIGSELVQKYVGEGARMVRELFQMARSKKACIVFFDEVDAIGGARFDDGVGGDNEVQRTMLEIVNQLDGFDARGNIKVLMATNRPDTLDPALLRPGRLDRKVEFGLPDLEGRTQIFKIHTRTMNCERDIRFELLARLCPNSTGADIRSVCTEAGMYAIRARRKTVTEKDFLDAVNKVIKGYQKFSATPKYMVYN

SEQ ID NO: 59871 - protein, 606 aa, Zea mays
  Clone ID: LIB3732-028-H1_FLI.pep
EEMAERLTRIAIVSEDKCKPKKCRQECKKSCPVVKTGKLCIEVTSASKLAFISEELCIGCGICVKKCPFDAIEIINLPKDLEKDTTHRYGPNTFKLHRLPVPRPGQVLGLVGTNGIGKSTALKVLAGKLKPNLGRFKNPPDWQEILTYFRGSELQNYFTRILEDNLKAIIKPQYVDHIPKAVQGNVGQVLEQKDERDMKAELCVDLELNQVIDRNVGDLSGGELQRFAIAVVAVQNAEIYMFDEPSSYLDVKQRLKAAQVIRSLLRPNSYVIVVEHDLSVLDYLSDFICCLYGKPGAYGVVTLPFSVREGINIFLAGFVPTENLRFRDESLTFKIAETQESAEEIETYQRYKYPTMSKTQGNFKLTVVEGEFTDSQIVVMLGENGTGKTTFIRMLAGLLKPDTVEGTDIEIPEFNVSYKPQKISPKFKNTVRHLLHQKIRDSYMHPQFVSDVMKPLQIEQLMDQEVVNLSGGELQRVAICLCLGKPADIYLIDEPSAYLDSEQRIVASKVIKRFILHAKKTAFIVEHDFIMATYLADKVIVYEGRPSIDCSANAPQSLVSGMNKFLSHLDITFRRDPTNYRPRINKLDSTKDREQKSAGSYYYLDD

SEQ ID NO: 59872 - protein, 304 aa, Zea mays
  Clone ID: LIB3732-032-G8_FLI.pep
SKPPHRHRLRAPPRRATSAPLFAPAGVEAEAKASMHHDPNPFDEGSAEDNPFSNGGAGGGKQQYGFRPTEPVGFGGASRGDAVVDVPLETMGDSRSKVKELSSWESDLKRREADIKRREEALKNAGVPMEEKNWPPFFPIIHHDIANEIPANVQKLQYLAFASWLGIVLCLSWNFVAVIVCWIKEGDSKLFFLATIYALLGIPLSYLIWYRPLYRAMRTNSAFSFGWFFLCYLIHIGFCIIAAIAPPIVFHGKSLTGILAAIDTFSEHVIIGIFYFVGFALFCLETLLSIGVLQKVYMYFRGNK

SEQ ID NO: 59873 - protein, 233 aa, Zea mays
  Clone ID: LIB3732-032-H1_FLI.pep
VFVLTLTGDGEHRLGHALISSLRSAVASAAAGAAKAGPGAALVTVGEGRFFSNGLDIGWAGTSRARLGELVDALRPLVADLLALPMPTVAAVTGHASAGGCLLALCHDYRIMRGDRGVLYMSEVDIGLPLPPYFMAVLRAKITAANALRDVVLRGKKVRAAEGKDMGIVDAVYPSALETADQAFKFAEQLAARKWDGGVYASIRMSMYPEACRSVGIVEESDEEKRKHFASKL

SEQ ID NO: 59874 - protein, 244 aa, Zea mays
  Clone ID: LIB3732-033-C5_FLI.pep
HVAKRCAPKISDSGDDDTPVTKPVVKRRASIFDSDSDEDDNVPISLALGKKDNAKVAEETEHQNGQANGITKKRIIDVKKRKQSSISEDPASSMDMTDANAPSVSKQVDEIKKKSKKKMRNQSGENNEKQSNIRTLDDGLVVEYLSMGNNDAKVASDGCKVYIKYVGMLKDGKIVESNVSEKPYKFKLGAGKVIRGWDVGIHGMRVGEKRKLTVPPSMLSGGKSVGEVPENSSVIYEIELVKVK

SEQ ID NO: 59875 - protein, 365 aa, Zea mays
  Clone ID: LIB3732-034-D10_FLI.pep
LMFREDDFALGNGNEDGDSDRFVYFVITFLSLHDGPILKFEMNARRVHMFSPGGHIHRWMLMLSRNGIKEIQIKTRIWRNYKIPSSFFSCVELEYACLQGCIFQLPPLFAGFKRMRTLHFVEFCATENNIGELVASCPNLEELILSRLLSFADITIHSTKLKVLRVDGMFKHLNLVTPHVSSAVINLQVNTGYVKRAGSNFNLSQFIGSLLDIENISLLGHAFECAAHGIVPGKLPRSLNRLTEITLELDLGNLKEANAAHCLFQIAPNLRRMELQLMHRGYSAPTSSFWDSVDRQDCLFKNLYTVVMNNFTGSCAESGFLKLLLDDAPVLRSARIEDNNKLDKESLKRLLKMRRASKDAEIILL

SEQ ID NO: 59876 - protein, 334 aa, Zea mays
  Clone ID: LIB3732-034-G6_FLI.pep
SAPQRAYKNTLAVQSLAPTHSSLHKYWCNLQYVGIRYVYGTRMQASCPRSLAGDEVGGVSPGVVVDGVGDVVGEVLEGALAGDDSLHEEAEHGEHGEAAVLDLLHLELGERLRVVGEPERVEAAARVQRVDHLPERAAGDAVPLDGAHEHHLARPDGQDALRVDQARVAEVVEPALAEDLGARLEPHRLAELDAVAGEQLREHAPERAEHGPAAVDHLQLAVLGEGLRVRRQPRGVPPVVAGELAGQVARGRAGQRAQVQDAVGTVPWAAGRRRLGLGGGLAHGDAALAEDVPRASRRLADERAGGDSHGGGSHVDQIAAASDALPISWSDISY

SEQ ID NO: 59877 - protein, 827 aa, Zea mays
  Clone ID: LIB3732-035-C10_FLI.pep
PARRPRRAPASPRLAVGDRPHVCPAMSSSVSIAAEWDLLSDRFYRRLTLYSPLPWSTPAAAGATSSSSGVSGAVIGRLDLSTHIVAAAPFGGPIAAVRDDSKIVQLHSEPSRRRVLLFSSSGHPIASAPWPPLLPRLHSLGFSSSLSLLALLSDGSLLRFRLPDLQPSPCSSPVPLLPPASGGVADALFWGGGVAILTEDNRVVVATDIEVDDPHPRHLADPGIGDEEHVLCMAVVEAQFVMSGSPEVLLAVGDRVIAVDEDGVQVLGEELEIGPVQKMAVSPNGKLLAAFAHDGRLLVIPTDFSRIIFEYECESALPPEQIAWCGLDSVLVYWPEVLLMVGPNGDPVQYNYDEPIKLIPECDGVRILSNSSMEFLHRVSDSTTSIFGIGSMSPAALLYDARDHYDRQSAKAYDNYQLISSSLPEAIEACIDAAGHEFDVSRQRTLLRAATYGLAFCSRFPHERFQEMCKMLRVLNAVRDPEIGMPLTIHQYKLLTTSVLIGRLINANQHLLALRISEYLNLNPEVVIMHWACEKITASTTLPDTVLLDGLLDKLRLCKGISYAAVAAHADNSGRRRLAAMLVDHESQSSKQIPLLLSIDEQDKALSKAIESGDTDLVYLVLFHIWQKVAVEKKAPLDFFGVINARPVARDLFMAYARHSKHEELKDFFLSTGRLQDAAFLLLKESWELEKNPMASKGSPLHGPQVRLIEQAHRLFAETKEHVFESKASEEHAKLLRSQHELEVSTKQPIFVGSSVSDTIKTCIAMGNERAALRVKSEFKVPDKRWYWLKTCALATVGNWDGLEKFSREKRPPGGYKPFVEACIDAG

SEQ ID NO: 59878 - protein, 411 aa, Zea mays
  Clone ID: LIB3732-035-F9_FLI.pep
RRNVLVAARSNGLGSDSHVCAAAAPGCLARLLVLVHRSGRHQRRRAEAGADGGEAQGGHKRVRPHRAQLPAVLARARRRLAPRRHRHQRHRGRQAGVAPAQVRLHARHLRRRRRARRRQRHLRGRQGHQSRVRPQPQQPAVGRAWRRPRHRGHRHLHRPRGRGQAGAKKVLITAPGKGDIPTYVVGINADQYNPDEPIISNASCTTNCLTPFVKVLDQKFGIIKGTMTTTHSYTGGQRLLDASHRDLRRARAAALNIVPTSTGAAKAVVLVLPNLNGKLNGITLRVPTPNVSVVDLVVQVSRKTLAEEVNQAFRDAAANELQGILEVCDVPLVSVDFRCSDVSSTIDASLTIVMGDDMVKVISWYDNEWGYSESRRGSSTSLIFAPTSGSEALHCIVISCKQSTRMDTLSQ

SEQ ID NO: 59879 - protein, 162 aa, Zea mays
  Clone ID: LIB3732-036-C3_FLI.pep
FIHRRLLHSSFPRQRFFLGGEAPRNSFSVLSGRHAAEQLVRDVVGGPVGLRRRPEPEGAARRRRGGEDQGGRGHRHEEGERGHVAGVPVDQGQVPAEERRRQQEAAGLRGPWVLTPPVLVTSVLLLGRQQNFLNFFSVLAVGTNSILRIGCDLISVLVAVVE

SEQ ID NO: 59880 - protein, 152 aa, Zea mays
  Clone ID: LIB3732-036-H5_FLI.pep
TQRLRRRDKGMAGIGPIRQDWEPVVVRKKAPTAAAKKDEKAVNAARRAGAEIDTMKKYNAGTNKAASSGTSLNTKRLDDDTENLAHERVPSDLKKNLMQARLDKKLTQAQLAQMINEKPQVIQEYESGKAIPNQQIISKLERALGTKLRGKK

SEQ ID NO: 59881 - protein, 394 aa, Zea mays
  Clone ID: LIB3732-038-D9_FLI.pep
GFRWSLRRRRAPTSSVEMADGEDIQPLVCDNGTGMVKAGFAGDDAPRAVFPSIVGRPRHTGVMVGMGQKDAYVGDEAQSKRGILTLKYPIEHGIVSNWDDMEKIWHHTFYNELRVAPEEHPVLLTEAPLNPKANREKMTQIMFETFNVPAMYVAIQAVLSLYASGRTTGIVLDSGDGVSHTVPIYEGYALPHAILRLDLAGRDLTDSLMKILTERGYSFTTSAEREIVRDIKEKLAYIALDYEQELETAKNSSSVEKSYELPDGQVITIGAERFRCPEVLFQPSMIGMEAAGIHETTYNSIMKCDVDIRKDLYGNIVLSGGSTMFPGIADRMSKEITSLAPSSMKIKVVAPPERKYSVWIGGSILASLSTFQQMWISKEEYDESGPAIVHRKCF

SEQ ID NO: 59882 - protein, 205 aa, Zea mays
  Clone ID: LIB3732-038-H3_FLI.pep
NNTQQPIALDQEKQRLHLWSPTPIIPFPSFKALRRFRFFPSISRYTHRSSTDKNSPDMASKRIQKELMDLQKDPPTSCSAGPAGEDLFHWQATIMGPSDSPYAGGVFFINIHFPPDYPFKPPKVNFQTKVYHPNINSNGSICLDILKEQWSPALTISKVLLSISSLLTDPNPDDPLVPEIAHMYKNQRQRYEETARAWTQKYAMG

SEQ ID NO: 59883 - protein, 179 aa, Zea mays; identical to SEQ ID NO: 44883
  Clone ID: LIB3732-040-B6_FLI.pep

SEQ ID NO: 59884 - protein, 185 aa, Zea mays
  Clone ID: LIB3732-042-B1_FLI.pep
TEATGHHHSFLVPSPAPQAAHRPPSAPPIQIQIQGLVMASKRILKELKDLQKDPPTSCSAGPAGEDMFHWQATIMGPPDSPYAGGVFLVNIHFPPDYPFKPPKVSFKTKVFHPNINSNGSICLDILKEQWSPALTISKVLLSICSLLTDPNPDDPLVPEIAHMYKTDRPKYEATARSWTQKYAMG

SEQ ID NO: 59885 - protein, 543 aa, Zea mays
  Clone ID: LIB3732-043-G4_FLI.pep
FRMTPLSHCSVGNVSLFHIGSYRTTREIQIRRFQGSARYSRVASPSPRRLLQPQTAFHLISLYKRRSWSSPQRPRTLSAATVGTDVTVEDLNPSPSEEASDGNSEAAPDAIDASEQAEASTGQASSARKLGRNIRKSEMPPLNEEDLVPGASFTGKVMSIKPFGVFVDIGAFTEGLVHISRVSDGFVKDISSLFTVGQEVSVRLLEANKETKRISLTMREGDDYVKPQKETPKAANGGRSATATPKSSPRQTRERQELKETLESKYVPGQSLNGTVKSTTRAGTFVTLPDGSEGFLPREEEALALFTLIGQSAMEIGKQIRVKVLNVAQGQATLTMKGVEDDEDDLKTLNMELKRDWSRGTNAFELAFRRNKEISAFLDQRERTKVPADTSVSAPEAESYQEEAAPEDEGSSEELSSVSEVATDVSPPVSDASSQVGIQDSTSVANAAEDQTVGSESSPTISVELSSNGTPDSSIVSSVSETADKPTEPEESSAVEEVLVTASSEAGKEPAADTEAVPALTEKTGAEVAAAAGVAQASTTTGL

SEQ ID NO: 59886 - protein, 288 aa, Zea mays; identical to SEQ ID NO: 47549
  Clone ID: LIB3732-045-C10_FLI.pep

SEQ ID NO: 59887 - protein, 247 aa, Zea mays
  Clone ID: LIB3732-045-G1_FLI.pep
LLCHTHTSPAPQPSPQSQSAREREHGPAEPRADLRVPGGVRVLRQGRRRVHHGGGAGDGDGVAAGAAAQRGGAARDDPRRRRRRQRRHRLRRVPGPHGTQDRGGRRRRRRRPRRGAARGVQGVRQGPERVHLRHRAPPRHDQPRREAHGRGGGADDPRGRPRRRRPGQLRRVRQDDDALRRRRRRRRSHGPPPMNPSPPFISLALPITSLADGVADHSIRLCFPFLFHPLKKKKKISVRLSNVTYVM

SEQ ID NO: 59888 - protein, 59 aa, Zea mays
  Clone ID: LIB3732-048-G9_FLI.pep
LNSFNIETDGGDGGDDLAELELVEDGGFTGGVEANHEDPHLLLGEEPAEELPEREPHLP

SEQ ID NO: 59889 - protein, 208 aa, Zea mays
  Clone ID: LIB3732-054-E1_FLI.pep
VNVSSFPRSLRRLPDPAAMARNPGCTVFIGNLDDKVPERVLYEILIQVGRVVDLHIPRDKETSRPKGYAFAEYETEEIAQYAVKLFSGLVRLHNKTLRFAISGQDKPSLNGNIPVTPRLNSVPQPKPHQPMRSSDTPLPQHTAVNGRSAGYGIPPNHSYDTHTQALSSGLPNRGLSNGTYEYSRRVFGSVLNDVSRRATREPIPYPSY

SEQ ID NO: 59890 - protein, 156 aa, Zea mays
  Clone ID: LIB3732-058-H7_FLI.pep
PRANQADPSRRSEVVAGAGGRARSNMSWQAYVDDHLLCDIEGQHLSAAAIVGHDGSVWAQSENFPELKPEEVAGMIKDFDEPGTLAPTGLFVGGTKYMVIQGEPGVVIRGKKGTGGITIKKTGMSLIIGIYDEPMTPGQCNMVVERLGDYLIEQGF

SEQ ID NO: 59891 - protein, 187 aa, Zea mays
  Clone ID: LIB3732-060-E3_FLI.pep
TIPIGLKQFRLQALLYEVVAEPLDHHVALPGGHGLVVDADHQRLPGLLHGYASRSLEINRKKKEDLLPADDGAGLALDDHVLGGAEEEAGRSQEPGLVEVLHDVGHLLRLEQRECGALGPDGAVVADDGGGGEVVVALDLAHEVLVDVGLPRHPFRPCCCSAATCKRRKRRRMTGGGSSIDLTGGRS

SEQ ID NO: 59892 - protein, 300 aa, Zea mays
  Clone ID: LIB3689-001-D10_FLI.pep
SHRRVTHSRRRRARVPERPRGSSAPSQRRLVRAKMLGFSTGQLLVVLGACSVMMKPSDMVKIARTAGRMTGRAVGRLIVARRQLDEILGQSAATQVHKELKDAMTQLDSIRYEVQNLSRLSPGQFMLKQHNAGMAEAGKSDSSDGPTTNQEEFRQEIRSIIRDEFEKYCRTQPIQNSVSTTEHRKLHVADEPTALKSKDMKMANSGLTNLHNQAMTYARLSEAPGLKMDSSLSGNYKDQSKEMDGLLTVLPISAESAGLLPSRPDKPTGSDLVLEAVLEAEVAENAKLFVSQPHDQLPKE

SEQ ID NO: 59893 - protein, 370 aa, Zea mays
  Clone ID: LIB3689-001-G9_FLI.pep
GSRTHTGSQYICTYASTNVCSGSNTSTNACYDTYTVFNSDTCPDPYPSSDVCPYTSTGTYTYASTSSDSGACSHASTNTCPYLGSDTYPYAMSGLYSQGFSPARNLSPQIRSNPDVDSQYLAELLAEHQKLGPFMQVLPICNKLLSQEIMRVSSIVHNHGFGDHDRHRFRSPSPMSSPNPRANLPGNGFSTWSGLQERLGFPQRASMDWQGAPPSPSTQVVKKILRLEVPVDSYPNFNFVGRILGPRGNSLKRVEASTGCRVFIRGNGSIKDPGKEDKLRGKPGYEHLSDPLHILIEAEFPASIIDARLRHAQEIIEELLKPVDESQDFYKRQQLRELALLNSTLREDSPHPGSVSPFSNGGMKRAKTGQ

SEQ ID NO: 59894 - protein, 239 aa, Zea mays; identical to SEQ ID NO: 41895
  Clone ID: LIB3689-001-H8_FLI.pep

SEQ ID NO: 59895 - protein, 48 aa, Zea mays
  Clone ID: LIB3689-001-D8_FLI.pep
RTSKPGTLDCLVLMVIWYCYSVFLPSISELVQELSRVAHWDLSVVLVP

SEQ ID NO: 59896 - protein, 377 aa, Zea mays
  Clone ID: LIB3689-001-G8_FLI.pep
NPSLPGRFRSTHIRIPLSSVSSPTTNPQIAAISAASSSDSDSSVQDLLALVYFGSLFDVKQQSDFVSLVYTRELERSSCLTYDYVGDDPEDSLAETDLNAVSALASLAALRPPAAAGVSHRDALQACAHHARLWLCRADEPIHPDSTITYAGVRAKLDRIMASGYFTAQLEMRTPLDLAAAVASFGAGGVQVQESMVVSPQAPEAVEESQAVEGHKNEKEDSQATEIYNDHPVVDSEHVEDEVLVHPTDEVPPAETEQEQETFDADVKDQEQKDQQFIQRRSYQNQRGGGRGGSRRGYPNGRGGRGGRGGGYQNGRGGYQNGRGGAGGYYYESGYYQPRNYNRGRGGRSGGGNSYYNSHGGGAQGHHPGSVELGANA

SEQ ID NO: 59897 - protein, 381 aa, Zea mays
  Clone ID: LIB3689-001-H3_FLI.pep
LARGHDTMALQVTGGVGCCCPPGSARRLPQAAALCRPPRAVVSGATRVVEEDEGKVRLGGSGVAVTKLGIGAWSWGDTTYWNDSEWDDRRLREAQDAFDASIDNGMTFFDTAEVYGTALMGAVNSETLLGGFIKERQQKDQIEVSVATKFAALPWRFGRGSVLSALKKSLDRLGLASVELYQLHWPGIWGNEGYLDGLADAYEQVLVKAVGVSNYNEKRLRDAHARLKKRGVPLAANQVNYSLIYRTPELNGVKAACDELGITLIAYSPIAQGVLTGKYTPENPPTGPRANTYTPEFLAKLQPLMNRIKEIGASYGKSPTQVSLNWLTCQGNVVPIPGAKNASQAKEFAGALGWSLTGDEVEELRTLAREIKGIRMPIEES

SEQ ID NO: 59898 - protein, 288 aa, Zea mays; identical to SEQ ID NO: 47549
  Clone ID: LIB3689-204-C5_FLI.pep

SEQ ID NO: 59899 - protein, 413 aa, Zea mays; identical to SEQ ID NO: 56774
  Clone ID: LIB3689-204-H9_FLI.pep

SEQ ID NO: 59900 - protein, 608 aa, Zea mays
  Clone ID: LIB3689-205-D1_FLI.pep
QAAAGDARREPQSEQATMCGILAVLGVAEVSLAKRSRIIELSRRLRHRGPDWSGLHCHEDCYLAHQRLAIIDPTSGDQPLYNEDKTVVVTVNGEIYNHEELKAKLKTHEFQTGSDCEVIAHLYEEYGEEFVDMLDGMFSFVLLDTRDKSFIAARDAIGICPLYMGWGLDGSVWFSSEMKALSDDCERFITFPPGHLYSSKTGGLRRWYNPPWFSETVPSTPYNALFLREMFEKAVIKRLMTDVPFGVLLSGGLDSSLVASVASRHLNETKVDRQWGNKLHTFCIGLKGSPDLKAAREVADYLSTVHHEFHFTVQEGIDALEEVIYHIETYDVTTIRASTPMFLMSRKIKSLGVKMVISGEGSDEIFGGYLYFHKAPNKKEFHEETCRKIKALHLYDCLRANKATSAWGVEARVPFLDKSFISVAMDIDPEWKMIKRDLGRIEKWVIRNAFDDEERPYLPKHILYRQKEQFSDGVGYSWIDGLKDHASQHVSDSMMMNAGFVYPENTPTTKEGYYYRMIFEKFFPKPAARSTVPGGPSVACSTAKAVEWDASWSKNLDPSGRAALGVHDAVYEDTAGKTPASADPVSDKGLRPAIGESLGTPVASATAV

SEQ ID NO: 59901 - protein, 301 aa, Zea mays
  Clone ID: LIB3689-206-B2_FLI.pep
KLYCQQQKHIEGYFEFPNCYPIFGGQNSPVNFAYGVQGCLVGNPFTDQSNFDGPSKIPFAHRMALISDQMYKSYKKSCRGGDNRHQSIQCRNSLDAIDECVKDISEFHVLEPRCAYASPHQYNVLKLKTSLGVQKMQQLPDFTAEGLHLSEISTECRTMLYTLSRIWANNATVREALGIHKGTVPLWLRCNTDIPYLKDIKSSVKYHLDVTTKGYKSLVYSGDHDMGVPYIGTQSWIRSLNFSIVDDWRPWYVDGQVAGYTVLYSNNLTFATVKGAGHTAPEYMPRQCLAMLSRWLAGDTL

SEQ ID NO: 59902 - protein, 521 aa, Zea mays
  Clone ID: LIB3689-207-B2_FLI.pep
CRFHRESGAMQSSVKLAVLALLLAAAAHHGLLPLPTARCYWLNPEIYDAGGLSRRAFPDGFVFGTAASAYQVEGMAKHGGRGPSIWDAFIEVPGTIPNNATADVTVDEYHRYKEDVNIMKNMGFDAYRFSISWSRIFPDGTGKVNQEGVDYYNRLIDYMLQQGIAPYANLYHYDLPLALHEQYLGWLSPKIVEAFADYAEFCFHAFGDRVKNWFTFNEPRCVAALGYDNGLHAPGRCSGCPAGGNSTTEPYLVAHHLILSHAAAVRRYRDKYQLHQKGKIGILLDFVWYEPFSDSNADQAAAQRARDFHLGWFLDPIVHGRYPYSMQEIAKDRLPLFSDEEARMVKGSIDYVGINHYTSFYMKDPGTWNLTPVSYQDDWHVGFVYERNGVPIGAHANSYWLYIVPWGINKAVSYVKETYKNPTMILAENGMDQPGDVSITQGVHDTVRIRYYRDYITELKKAIDDGARVIGYFAWSLLDNFEWRLGYTSRFGLVYVDYKTLKRYPKDSAFWFKHMLSKKRS

SEQ ID NO: 59903 - protein, 739 aa, Zea mays
  Clone ID: LIB3689-207-B7_FLI.pep
SPPGRHATVGKARDPAASAGCSSPRPRFHERSAVSITHTNCSLHSFPLPSVLPARAAPLPTRKRCAPTPSPFRIRRPSAGAVMDPSDSNSAAGGKTQNVSVPPVEGVAGGGTSYGWVDGGLRGTNLGAGVIDPTKVHSDDLLHVWSMPSTANVSQQEAPRPLEKVNLLAARNERESFQIALRPKVSWATSGIAGSVQIQCTDLCSSSGDRLVVGQSITLRRVVPILGVPDALVPIDPLSPQISIQPGETAAVWVSVNVPCGQPPGLYEGEIFITAVKTELDSRTESLPKSEKCRLYRELKSCLDLTGPRDYSSPEEMVQRLTSASTVLRRVLDNPALQDCQENNGFGDMMDEDVINNISVRLKLSLTVWDFTLPVTPSLPAVFGISETVIEDRFCLEHGTEGWYSALDHHFRWLLQYRISPFFCRWGDSMRILAYTCPWPADHPKANEYYSDPRLAAYAVPYAPILSCTDAAKNSLRREVEILKSKPHWSKAYFYLWDEPLNVEQYDMICNISNELRSYAPDVRILTTYYCGPSGSELAPSTFEAFAKVPNVLRPHTQIFCTSEWVLGTREDLVKDIVAELRPDLGEEWWTYVCMGPSDPQPNWHLGMRGTQHRAVMWRVWKEGGTGFLYWGSNCYEKAMIPSAEICFRRGLPPGDGVLFYPGEVFSSSHEPVASTRLERILSGMQDIEYLKLYSSRYGREEGLALIEKTGMYLGPDRYTLDHGPVDVMRGEVYRTCRS

SEQ ID NO: 59904 - protein, 548 aa, Zea mays
  Clone ID: LIB3689-208-C7_FLI.pep
THSPVPDLRSPRRSKMQIFVKTLTGKTITLEVESSDTIDNVKAKIQDKEGIPPDQQRLIFAGKQLEDGRTLADYNIQKESTLHLVLRLRGGMQIFVKTLTGKTITLEVESSDTIDNVKAKIQDKEGIPPDQQRLIFAGKQLEDGRTLADYNIQKESTLHLVLRLRGGMQIFVKTLTGKTITLEVESSDTIDNVKAKIQDKEGIPPDQQRLIFAGKQLEDGRTLADYNIQKESTLHLVLRLRGGMQIFVKTLTGKTITLEVESSDTIDNVKAKIQDKEGIPPDQQRLIFAGKQLEDGRTLADYNIQKESTLHLVLRLRGGMQIFVKTLTGKTITLEVESSDTIDNVKAKIQDKEGIPPDQQRLIFAGKQLEDGRTLADYNIQKESTLHLVLRLRGGMQIFVKTLTGKTITLEVESSDTIDNVKAKIQDKEGIPPDQQRLIFAGKQLEDGRTLADYNIQKESTLHLVLRLRGGMQIFVKTLTGKTITLEVESSDTIDNVKAKIQDKEGIPPDQQRLIFAGKQLEDGRTLADYNIQKESTLHLVLRLRGGQ

SEQ ID NO: 59905 - protein, 426 aa, Zea mays
  Clone ID: LIB3689-208-E11_FLI.pep
VTTAMVRGSLGKLASRALSVAGRWQHQQLRRLNIHEYQGAELMGKYGINVPRGAAAGSVQEVNDALKNMFPSEKEIVVKSQILAGGRGLGTFKSGLQGGVHIVKAEEAESIARKMLGQILVTKQTGPEGKIVSKVYLCEKLSLTNEMYFAITLDRKTAGPLIIACSKGGTSIEDLAEKYPDMIIKVPVDVFKGITDEDAAKVVDGLALKSADRQSSIEQIKKLYELFCKSDCTLLEINPLAETADNKLVAADAKLNFDDNAAFRQKEIFALRDTTQEDPREVAAAKADLNYIGLDGEIGCMVNGAGLAMATMDIIKLHGGTPANFLDVGGSASEGQVVEAFKILTSDDRVKAILVNIFGGIMKCDVIASGIVNAAKQVDLKVPVVVRLEGTNVDQGKRILKESGMTLITAEDLDDAAEKAVKASVK

SEQ ID NO: 59906 - protein, 342 aa, Zea mays; identical to SEQ ID NO: 59750
  Clone ID: LIB3689-208-H9_FLI.pep

SEQ ID NO: 59907 - protein, 198 aa, Zea mays
  Clone ID: LIB3689-209-F2_FLI.pep
CMFIRLKPLTTFPTRYGFYDECLRKYGNANVWKYFTDLFDYLPLTALIENQIFCLHGGLSPSLDTLDNVRSLDRIQEVPHEGPMCDLLWSDPDDRCGWGISPRGAGYTFGQDIAQQFNHTNGLSLISRAHQLVMEGFNWCQDKNVVTVFSAPNYCYRCGNMAAILEIGENMDQNFLQFDPAPRQIEPDMTRKTPDYFL

SEQ ID NO: 59908 - protein, 556 aa, Zea mays
  Clone ID: LIB3689-209-G3_FLI.pep
PPPPSPPFRPLDLAGVCSASLRCDPTLGFETVLRCVRVSRRFATRVGFEVSAAVRAQMKDPAHRTKVVLRRLPPAIAQQDVVDQVDARFAGRYDWACFRPGNASQKNHRYSRLYLNFKRPEDVVEFAEVFNGHIFVNEKGAQFKAFVEYAPSQQVPKSNVKKDGREGTVTKDPEYLEFLEFISKPTEHLPSAEIQLERKEAERAAAGKEAPVVTPLMMYVRQQRAAKSMAQRPGSRLSRKVAGVVTSSSSPKRSFEKRRSSTYVVRDSIKEKPTYIMVPKREEHTQRGKIVSGNSDATSGGASGSGQSSDKIVILKGRGRVDSNTPDGAAQQSSTPVKNIPPSSSRLDKRSEANGRIIKTVLSNKEVRSSNPSQHEQEGHMFNTEKDKRPPRALNPRTIVKDQVVENAERSHFDEKNNYVHSSAPIGEKVERHARNRDRPDRSVWAPRRYDKSPPGGVSHALSSDFSQMQSHSGDNVSQLTDGHGDRKTDTRGHGGSRGVPVENGHRHANRRGTPCDPKETKISASVPDGKNSKRGSASYGAHERQVWVQKSSSGS

SEQ ID NO: 59909 - protein, 479 aa, Zea mays
  Clone ID: LIB3689-210-B5_FLI.pep
LSFCSERTHRPSPISDPLVDPKMQIFVKTLTGKTITLEVESSDTIDNVKAKIQDKEGIPPDQQRLIFAGKQLEDGRTLADYNIQKESTLHLVLRLRGGMQIFVKTLTGKTITLEVESSDTIDNVKAKIQDKEGIPPDQQRLIFAGKQLEDGRTLADYNIQKESTLHLVLRLRGGMQIFVKTLTGKTITLEVESSDTIDNVKAKIQDKEGIPPDQQRLIFAGKQLEDGRTLADYNIQKESTLHLVLRLRGGMQIFVKTLTGKTITLEVESSDTIDNVKAKIQDKEGIPPDQQRLIFAGKQLEDGRTLADYNIQKESTLHLVLRLRGGMQIFVKTLTGKTITLEVESSDTIDNVKAKIQDKEGIPPDQQRLIFAGKQLEDGRTLADYNIQKESTLHLVLRLRGGMQIFVKTLTGKTITLEVESSDTIDNVKAKIQDKEGIPPDQQRLIFAGKQLEDGRTLADYNIQKESTLHLVLRLRGGQ

SEQ ID NO: 59910 - protein, 485 aa, Zea mays
  Clone ID: LIB3689-210-E4_FLI.pep
KILRTMKLRLRSMKARGGSAAVETHRVDLPPTATLADVKTLLASKLSAAQPVPAESVRLSLNRSEELVSPDPAATLPSLGLASGDLVFFTLSPLTALAPPAQALPRNPSPSSGAAASIAEAADRGKGSKQSGTGDFSSSSLAQAVVVSPSFPVASGTRDVVMEEEAVDATKGWSSFVLRDLKREMDNVGAAEGTAAGRLVAALHAALLDAGFLTAKLTGSHLSLPQGWPSGALKPLTIKYTIPELSSMVSVTEEGKVVVLNYSLMANFVMVYGYVPGAQSEVCRLCLELPGLEPLLYLDGDQLNGVHEKGVHDLWRVLKDEICLPLMISLCQLNGLRLPPCLMALPADLKTKVLGFLPGVDLAKVECTCKEMMNLASDDSIWKKLVSKFENYGEGSRLAGKNAKAIFVEAWQANKRRQKRPNPTFWNYGWGNSPYSRPLRLPLIGGDSDRLPFIGNHGSVGRHFGNQRRNISPNCILDGHRHNFL

SEQ ID NO: 59911 - protein, 610 aa, Zea mays
  Clone ID: LIB3689-211-H10_FLI.pep
AGCGAYPSSWSSWIGLGESRFLQAAASVPEDVNFLNSVGGNGALAVSGLSISLLEFDISCGLQSMEDLGLWKQAWMWVLSQKHILAWAHTAACGSRERLAFLVDRHWPAVSRACATSSRLALAALRQWRGCTARGVLAVASLGPAAVFVILWSFFVCMTSPACALYALLSLGAAAAVVHYMGYTPGLFIVGLFGILIMWMYGYFWITGMLLVAGGCMCSLKHARYVIPVLTSYGVYSVAVRVGWLGVFLTLNLSFLTNDLLNKLVQGYEGSTEESQFEDMKDSDPVMDEFYRSCEFPSVPDSEPETVSCAKPYCSAPIQDVLHVQKEEPPSKVVKSDSTSLDEIKRIMDGSNHYEVLGVPRNRSIDQKTLKKEYHRMVLLVHPDKNMGNQLACESFKKLQTAYEVLSDFTKKNSYDEQLRKEESQKMTPRSCVVSQQSGGVEFLSEESRRIQCTKCGNFHIWICTKRSKTRARFCQGCDQFHQAKDGDGWVETRFSTSIKMEIPRAFVCAESKIFDVSEWATCQGMECKPNTHGPTFMVNMVGADRMPQRSYSSRYPFSLDAEMIPEDEFELWLQQALASGVFADSPKRRKSWSPFKLPQKGIKSWRRSS

SEQ ID NO: 59912 - protein, 608 aa, Zea mays
  Clone ID: LIB3689-212-F11_FLI.pep
QAAAGDARREPQSEQATMCGILAVLGVAEVSLAKRSRIIELSRRLRHRGPDWSGLHCHEDCYLAHQRLAIIDPTSGDQPLYNEDKTVVVTVNGEIYNHEELKAKLKTHEFQTGSDCEVIAHLYEEYGEEFVDMLDGMFSFVLLDTRDKSFIAARDAIGICPLYMGWGLDGSVWFSSEMKALSDDCERFITFPPGHLYSSKTGGLRRWYNPPWFSETVPSTPYNALFLREMFEKAVIKRLMTDVPFGVLLSGGLDSSLVASVASRHLNETKVDRQWGNKLHTFCIGLKGSPDLKAAREVADYLSTVHHEFHFTVQEGIDALEEVIYHIETYDVTTIRASTPMFLMSRKIKSLGVKMVISGEGSDEIFGGYLYFHKAPNKKEFHEETCRKIKALHLYDCLRANKATSAWGVEARVPFLDKSFISVAMDIDPEWKMIKRDLGRIEKWVIRNAFDDDERPYLPKHILYRQKEQFSDGVGYSWIDGLKDHASQHVSDSMMMNAGFVYPENTPTTKEGYYYRMIFEKFFPKPAARSTVPGGPSVACSTAKAVEWDASWSKNLDPSGRAALGVHDAAYEDTAGKTPASADPVSDKGLRPAIGESLGTPVASATAV

SEQ ID NO: 59913 - protein, 485 aa, Zea mays
  Clone ID: LIB3689-212-F6_FLI.pep
RDRRLRTRLPPRLKPFPLLPIPSVGRRSIPYDDTMRECISIHIGQAGIQVGNACWELYCLEHGIQADGQMPGDKTIGGGDDAFNTFFSETGAGKHVPRAVFVDLEPTVIDEVRTGTYRQLFHPEQLISGKEDAANNFARGHYTIGKEIVDLCLDRIRKLADNCTGLQGFLVFNAVGGGTGSGLGSLLLERLSVDYGKKSKLGFTVYPSPQVSTSVVEPYNSVLSTHSLLEHTDVAILLDNEAIYDICRRSLDIERPTYTNLNRLVSQVISSLTASLRFDGALNVDVNEFQTNLVPYPRIHFMLSSYAPVISAEKAYHEQLSVAEITNSAFEPSSMMAKCDPRHGKYMACCLMYRGDVVPKDVNAAVATIKTKRTIQFVDWCPTGFKCGINYQPPSVVPGGDLAKVQRAVCMISNSTSVVEVFSRIDHKFDLMYAKRAFVHWYVGEGMEEGEFSEAREDLAALEKDYEEVGAEFDEGEDGDEGDEY

SEQ ID NO: 59914 - protein, 206 aa, Zea mays
  Clone ID: LIB3689-212-F7_FLI.pep
PVKSMPTPKHAVPASVRPISTAGGRRTFLPVSAVGSGQGSSVTEADRKSDLSLENVKTSVVSRDGEKINVRVQLPGKATQKVFDEALTFLARDAPPVPGFRKSKGGKTSNIPSSILLQMLGKSRVTKFVLQEILSITIEEFVKKENLKVKPEIQTTQSEGEMESAFAPGSAFGFNVVLQLETPDSDDPEEKPGSDDDLQEESGSSE

SEQ ID NO: 59915 - protein, 550 aa, Zea mays
  Clone ID: LIB3689-213-H5_FLI.pep
ELQPVPDAHVPVMKFKFHGISIDLLYASVSLLVVPADLDISQGSVLYDVDEATVRSLNGCRVADQIIRLVPNFENFRTALRCLKYWAKRRGVYSNVTGFLGGVNWALLVARVCQLYPNAVPSMLVSRFFRVFTQWQWPNPVMLCSIEEEELGFPVWDPRKNPRDRCHHMPIITPAYPCMNSSYNVSTSTLRVMLEQFQFGNRICQEIEMNKTSWPALFEPFQFFEAYKNYLQVDIIAEDDEDLRLWKGWVESRLRQLTLKIERDTYGMLQCHPYPHEYADPSRQCAHCAFFMGLSRKEGVKIQEGQQFDIRGTVDEFRHEINMYMFWKPGMELAVSHVRRKQVPAYVFPEGYKRPRPSRHVNHQSDKNDTEDGTATRSPDSQLKRKHDSVGTDDIRYAKRSSTSPVHPKNSPQSGSTGDETRCNNQIKRAPSDASGGSPASPQASERSPDTILSAPRCTTTGAVCSGDAISKHSSVPLVENCTTPTVAVCTTLKRVAEKVVSELVGSERLGSNNSAELLESMEKEDVLAENVRFGGNGVAQGGLPEELEV

SEQ ID NO: 59916 - protein, 375 aa, Zea mays
  Clone ID: LIB3689-214-H2_FLI.pep
DSGDRTCSSHWQPHVLATSTGIHLPSRRGHVTTWSGRRTRKQKRIPYHPLPVAVGGGPVGPARHEDLAAPDLAARGGVVQRRAPGADGRHGGRRAGQRRRGDVGALVHQQVHAVRVPVQRRQVQRRHAAAGRPVHELVPAGAGAGQQQAHARGVASRCRQVQRRLAAQAVHLGHVASENQQRLNHLPVAEPARLHQRRLAGKVPSIHLCSVLQQQRGDPLKIPRKIIRVPEAGSSRFCVTVQVINCACHCRRGGRPALQGRKRMTRDSNKRLPIVVVVAHLVVAFGGGEVERRVEAAADGGAAREPRVFLQQAAHLRRVAVPRAGRQPLAEPRAPQGVAHAFPPSRLPARARPAAAPADPPTLSRLPAAGQLASW

SEQ ID NO: 59917 - protein, 479 aa, Zea mays
  Clone ID: LIB3689-216-D2_FLI.pep
GRVVYYSAPCGRRTAKEMDRLPESTRSMRKYASEAGGLRAARQGPHGRSLTARTAHSMSTTALRTKSKSAASLLRRVPFAPLRPVLANLQEVFLGTKLAVLFPAVPLAIAAQCAHFGQVWVFSLSLLGLIPLAERVSFLTEQIAIYTGPTVGGLLNATCGNATELIIALFALMGGQIEVVKCSLLGSVLSNLLLVLGTSLFCGGVVNLGSDQPYDRTQADVSTGLLILGVLCQSLPLMLRYAVGAGEHSVAAATTVLDLSRACSVVMLLAYVAYLFFQLKTHAQLFEPQEVDDGCEAEEDEQAVIGFASGFFWLAFNTVLIAILSEYVVGTIEPTSKSWGLSVSFISIILLPIVGNAAEHAGAIIFALKNKLDITLGVALGSATQISMFVVPLSVIVAWIAGIQMDLDFKLIETGSLFVSVIVTAFTLQDGSSHYLKGILLLLCYIVIGACFFVTRQPASNNNGAGLSLPTGTLSAQAA

SEQ ID NO: 59918 - protein, 318 aa, Zea mays
  Clone ID: LIB3689-218-B4_FLI.pep
RAGCSLTSMLSTVKVSNVSLKAAQRDIKEFFSFSGDIVHVEMQSFDELSQVAYITFKDKQGAETAMLLTGATIVDMAVIVTPANDYELPSSVLAALEPKDTKPSALQKAEDIVGTMLAKGFILGRDALDKAKALDEKHQLTSTATARVSSFDKRIGLSEKISVGTSVVNDKVKEMDQKYQVSEKTKSALAAAEHSVSTAGSAIMKNRYVLTGAAWVTGAFSKVTSAANEAGAKAKEKIAVEQEHKNAEGGPAQANISETHEAHRGLDGGFSRLHDSETPEDIPISTASVPAVTDEEPSKASPPAGVPEKPEAAHELVL

SEQ ID NO: 59919 - protein, 416 aa, Zea mays
  Clone ID: LIB3689-218-C5_FLI.pep
IASPGDYWWAALVLVVQPVCVCSRPAAMGQDLVEIHPRELQFTFEVKKQSSCVVCLTNKSNEYVAFKVKTTSPKRYCVRPNTGVILPRKTCEFTVTMQALRTAPPDMQLKDKFLVQTTVVPYGTSDEELVPAVFSKETGRYIEESKLRVVLVSSYQSLEEQPTNGIHDTEPAVEVPLLKEMPNLGSEVPDVAKEIPAPLVQGPAIVTGIPSPVKEVPGLREIPVPLNEAPTLLAEFPSPQKDPSAITVEHASNVTIEHAPAISIESPPLKQSVPVFKESPLKQSVAVFKESPPLKQSISVFKESPPLEETTPKEAVMLSDRGLFNVQNHQLSHVTEDVQNMKSKLNNLESKLEEAEKMIIRLREESRNTTQERDELQQEMVFLRKKGTARSQMGFPLLFVVYVALLGTCIGYLLRI

SEQ ID NO: 59920 - protein, 450 aa, Zea mays
  Clone ID: LIB3689-218-F3_FLI.pep
AGSFMSGLERSRMDDSGGGGRSGGDGDAVEHDGLDGEARAEAEEDAPVEPLAGGGLAVLGGALAHLVEDEEHAGAGHVAVLGEDVAGGAHPGLVQPDPGLHLVQDGGPAGVRHPEDGVPVGDAERLERVLQRALDVLGDEPGHVLEQVERQPHLAEVAVDGALRVGQDGLRRRHELEQRALDAVVRVGAHHDGRRAVAEQRLPHERVQVRLGGAPERHGRDLRAHHQDPRPAVVLRQVLGHAQHRAAREAPLLVHHQAVHGRAQPQRLGQLVVGARHVHPRRGAENQVRDPRLGLPPLLDRLLRRRLPQLRHLRHHHVLPRVQRRRHVRAHARVLRQELLRQVHVPLPDHRLVAHPLELLLEVGEVVALGDPEVVVRVVGLVHAVGGRRRPDGQHGGGAGRALALPHLVHGHGGAGHRSSLFLSYVVPEAAGRGRRSKRELVVVGGALSR

SEQ ID NO: 59921 - protein, 902 aa, Zea mays
  Clone ID: LIB3689-219-E8_FLI.pep
SSPFCRLLSYSSPLPPQDPPGLSTAMEPQLTPGAVAAVSAHADGNGTLQPVLQVVDVRMVNNAKNPSAERFRMVLSDGEHTMQSMLATAENARVRDGSIQKGSIVHLLECTCSTIQSRRIIIVIKLDVLQSECAIIGNPRPYEMRNQPNEQGTNIPANAAQANTGTYSSGPGLLGSPAASRPAQVANNVPYSGSYGGYHGTVVPPIAPAVESVPNVASGVTYGTTSAHNTMNAGMTQSNLQQRSLNSHQNQRFAVPSMAGGSGAPGNTYGQPAQSFYQQPPPGHMNRTPVSKNDAYRLVPLAQLNPYLDKWTIKVRVTAKTDLRFYNNARGAGKVFSFDLLDEQRGEIRATCFNTQADQFFNLIEVDKVYLISKGSLKPAQKKFNSLNHEYEISLDSRTSIEVCADDDSNIPRQQYNFRKISEIENIEKDAILDLIGIVTSVGPSVTFIRKDGVETQRRTLELKDMSGRSVQLTLWGKLCVAEGNQLQSLCDSGLNPVLALKGARVTDYSGRSVSSAGSTQLKIDPEIPEAESLRRWYATGGKTAACVSLSVVSMGGTCVRKSIAQIKDENLGQLEKPDFITVKAAISHLIADNFCYPACTIDVNGRMCNKKVTDNGDGTWRCDKCDQSLPNCEYRYVLNGQIQDHSGVTNFTAFEDAAKVMIGHSGHELNNISVEDSERFAEILQAARWQQFLFTLKVKEEIYNDAPQVKCNITKAEKLDPAIESSYLLGVINGLLQDDTGSSSGAQGAMAYNAGISNTGAGRSVPTSNSAYTTNLSGPRYGESANQLAQQESTYTGATTPVSAARNVQQTCVSCGSSGHNVQNCPAGTYRQQAAASAASSYGSSQPRNGLCFKCNQPGHFANSCPLLAPAPQQQQQQYRSGGAPSGGYGRQQPYVGATNY

SEQ ID NO: 59922 - protein, 274 aa, Zea mays
  Clone ID: LIB3689-219-G9_FLI.pep
TELIRDEPSREREKKMHAFLSTSIPATSYSRSYFLPWPPQAPVKLVVPSSAPRVAAGRRTASEAGRSGRCVVAVSASSSPATAAMATEVPGVMKAWVYDAYGDAGVLKLDEAAAVPAVGEDQVLVKVVAAALNPVDAKRRAGKFQATDSPLPTVPGYDLSGVVVKVGSQVKKLKEGDEVYGMVSENPLQGPKQSGSLAEYTAVEEKLLALKPKGLDFAQAASLPLAVETANEGLERAGISAGKSVLILGGAGGVGSLAIQVLFACWCGYVRTED

SEQ ID NO: 59923 - protein, 322 aa, Zea mays
  Clone ID: LIB3689-220-H4_FLI.pep
LNMDQAAEESCVPPGFRFHPTEEELVGYYLARKVASQRIDLDIIQEVDLYRIEPWDLQERCKPQHAGGGHDEQTQEWYFFSYKDRKYPSGTRTNRATAAGFWKATGRDKPVLSSSTRTTRCSRVIGMRKTLVFYKGRAPNGRKSDWIMHEYRLQSNEHAPAQEEGWVVCRAFQKPIPNQRPFFPTSYAGYYDHNLSTTARLHVDGDRHFLAGSSAAAAALLQQPPGLAGSSFPQLYSDDDLESKKQLLSIPPLESPTAMACCSDAGGYAQRSSYDEHEMMMMMIQQGGGGGEQAAAAIDWNFLDSLLSATSQLHGPSGSLLQ

SEQ ID NO: 59924 - protein, 253 aa, Zea mays
  Clone ID: LIB3689-221-B2_FLI.pep
THGLGLGHHHSQPHPHGRAPLAGGAWSSAHATFYGGGDASGTMGGACGYGNLYSQGYGTNTAALSTALFNNGLSCGACFEVRCDAAGGGSHSCLPGSVVVTATNFCPPNNALPSDDGGWCNPPRAHFDMSQPVFQRIALYRAGIVPVSYRRVACNKKGGIRFTINGHSYFNLVLVTNVGGAGDVHAVAVKAERSPGWQALSRNWGQNWQSNTLLDGQALSFRVTTSDGRSVLSNNAAPRGWSFGQTFSGAQFN

SEQ ID NO: 59925 - protein, 173 aa, Zea mays
  Clone ID: LIB3689-222-H2_FLI.pep
QVLRGHARRPLLRRQRRHRRDRDDLSGTDVARKVIILARESGLRLELSDIPVKSLVPETLAACSSADEFMQKLPSFDEDWARQRSDADAADEVLRYVGVVDTVNKRGQVELRRYKRDHPFAQLSGSDNIIAFTTSRYKEQPLIVRGPGAGAEVTAGGVFCDILRLASYLGAPS

SEQ ID NO: 59926 - protein, 390 aa, Zea mays
  Clone ID: LIB3689-223-C8_FLI.pep
HLVLRLRGGMQIFVKTLTGKTITLEVESSDTIDNVKAKIQDKEGIPPDQQRLIFAGKQLEDGRTLADYNIQKESTLHLVLRLRGGMQIFVKTLTGKTITLEVESSDTIDNVKAKIQDKEGIPPDQQRLIFAGKQLEDGRTLADYNIQKESTLHLVLRLRGGMQIFVKTLTGKTITLEVESSDTIDNVKAKIQDKEGIPPDQQRLIFAGKQLEDGRTLADYNIQKESTLHLVLRLRGGMQIFVKTLTGKTITLEVESSDTIDNVKAKIQDKEGIPPDQQRLIFAGKQLEDGRTLADYNIQKESTLHLVLRLRGGMQIFVKTLTGKTITLEVESSDTIDNVKAKIQDKEGIPPDQQRLIFAGKQLEDGRTLADYNIQKESTLHLVLRLRGGQ

SEQ ID NO: 59927 - protein, 270 aa, Zea mays
  Clone ID: LIB3689-223-D10_FLI.pep
TARSSTAVTSPLTRPSPVAPRAFFSSSPPHAPSLPASGYIPRREYGLVPMVIEHTSRGERAYDIFSRLLKERIVCIHGPITDDTASLVVAQLLFLESENPAKPVHLYINSPGGVVTAGLAIYDTMQYIRSPVTTLCIGQAASMASLLLAAGASGERRALPNARVMIHQPSGGASGQASDIAIHAKEILKVRDRLNKIYAKHTGQAIDRIEQCMERDMFMDPEEAHEWGLIDEVIEHRPVSLVSDAVGSDPPNLGGGGTEVNKGTDEPSPA

SEQ ID NO: 59928 - protein, 148 aa, Zea mays
  Clone ID: LIB3689-223-E9_FLI.pep
ENGQRVPIQASTKYQCTNNSLRAQHRQIYYEKDNTTICLFTLTPDAKDHMIPYRQQNVSLQDRVYLSISKPQFGELEVGLFVVIKESLLIRSIFLDKRAENRVAQQGFVTWELKKALLITTQKFLEVRVVKDQRVCRNRRKRGLGTPP

SEQ ID NO: 59929 - protein, 691 aa, Zea mays
  Clone ID: LIB3689-223-H2_FLI.pep
NVSKRRGGTRRAEAAEKLSSTELRLPTRERERERGSTAAAGRAAPCFLRARPAAMKFMKLGSKPDAFQTDGGGGDARYVLSDLPSDIVVHVDDARFYLHKFPLLSKSGLLQRLIVEASQNGSDEVAIQDVPGGAKTFEICAKFCYGMVVTLNAYNVVAARCAAEYLGMTEDVEKSNLVFKIEVFLSSGIFRSWKDSIIALQTTDALLPWSEELKLVGRCVDSVAAKATVSASNVVWSYTYNRKSASSDEIVEARRSSQAVPKDWWVEDLCELDVDLYRRVMVAVKSRGRIPSDAIGEALKAYAARWLPECCDALVDDAYSGAYKHLLETIVWLLPSDKGSSGISCRFFLKLLKFTVLVGAGELLKEELMDRTVLQLHKASVSDLLIPSRPPAQTVYDVQLVQTLIGRYMSHAGVSQGGIFLNDLDQEMFETNVDGESLLALCKLVDRYLAEVASDPNLSVSSFVDLATSMPETARPTHDGLYTAIDVYLKLHPGLPKMEKRKISNLMDVRKLSKGACIHAAQNDRLPLRVVVQVLFFEQLRAAGAAAAAGTPSASVARCIARLAEQEEEEERWNDGRALPEPPTPGALKRQLGSLKLQGDHHQGAGDDGRRLVARSNSVANQSSRMSLSSRSRRIFDRLWVGGAKLPGEAAAAGKGSSDTSGSSQSPRSSAKPPESKSSSSSSRNRRYSVS

SEQ ID NO: 59930 - protein, 280 aa, Zea mays; identical to SEQ ID NO: 46474
  Clone ID: LIB3689-224-E1_FLI.pep

SEQ ID NO: 59931 - protein, 309 aa, Zea mays
  Clone ID: LIB3689-227-A7_FLI.pep
QLFCPKLSLPRPSGSYRSSPSPVELMASSMAAAATATALPLPSGTTQRPSAQGRLLFTAAPARSLRLRPAGRRSARSSPRATKAVVAALADPLKVMISGAPASGKGTQCELIKTKYQLAHISAGDLLRAEIAAGSENGKRAKEFMEKGQLVPDEIVVNMVKERLRQPDAQENGWLLDGYPRSYSQAMALETLEIRPDTFILLDVPDELLVERVVGRRLDPVTGKIYHLKYSPPENEEIASRLTQRFDDTEEKVKLRLETYYQNIESLLSTYENIIVKVQGDATVDAVFAKIDELLGSILEKKNEMVSST

SEQ ID NO: 59932 - protein, 201 aa, Zea mays
  Clone ID: LIB3689-227-B4_FLI.pep
LLSQERSRACLAMYSSSCHVMSEKPNGSKAVTLLLRLSTLVLSLISAVVMATATSDCTIYGHGGAAKVTIMFKNYRPFVFLVVLNIAAAVLEAAAIYLQVVKGDDGDEAPKLPRIILVVLDVVVLALVNAATGAVVAAVIAYGPEIDACTVAGGGRFREQVRRSELLSIAASISAVSAAVAKDVPLPFSVWPLSSESGDYY

SEQ ID NO: 59933 - protein, 509 aa, Zea mays
  Clone ID: LIB3689-227-G11_FLI.pep
GSGMSFRDQESGGEDGGRTSSASDLRKPLINTGSWYRMPPAGGVMGSRQSSLMERLGSSAFSLRDVAISATLCTLIVALGPIQFGFTCGYSSPTQDAIIADLGLSLSEFSLFGSLSNVGAMVGAISSGQLAEYIGRKGSLMIAAIPNIIGWLAISFAKDSSFLFMGRLLEGFGVGVISYTVPVYIAEIAPQDQRGALGSVNQLSVTIGILLAYLFGMFVPWRILAVLGILPCSILIPGLFFVPESPRWLAKMGKMEDFEYSLQVLRGFQTDITAEVNEIKRSLASSRRRTTIRFADIKQKRYSVPLVIGIGLLVLQQLSGVNGILFYAASIFKAAGITNSNLATFGLGAVQVIATGVTTWLTDKAGRRLLLIISTTGMVITLVIVSVSFFVKDNIAAGSHLYSVMSMLSLAGLVAFVIAFSLGLGAIPWIIMSEILPVNIKSLAGSVATLANWLTAWAITMTASLMLNWSSGGTFAIYAVVSTMALIFVCLWVPETKGRTLEEIAFSFR

SEQ ID NO: 59934 - protein, 697 aa, Zea mays
  Clone ID: LIB3689-229-A2_FLI.pep
RRESAPALAFALVCSLNGYFLRRRGAGFGRLGEADCRKSWCVVRWSPKSAGTGAAMGCCQSRLERLEAVSRCKARRRYTKHLVQARRDMAAAHALYLRALRATGASLLHFASAEADHPHPHSSAAHHEPPPSPPPPPPPPPLSPSTTARSWTTNSSSISASAILPPPPPPPLPPLPSSWDFWDPFAPSSSRSAADDADWDDAATTVVDAPIAAPPPVVTAAAAVAAPPSIVTATTTSTTPSELTVVAVPRGGAGKKDLAEIATELDEYFLKAADAGARVAALLEAPVCEPPEPTTNSSLPGKVLSYSKSLKPMGWAWGGGGYGKGNDGFTRFGRGDGGMPMGNGGGGGMLSHSSTVEKLYAWEKKLFLEVKSYEGYKQEHDKKVSLLRKQEVKGVDYLKMEKNKMEIESLESKMLVANQSIETTTSEIIRLRESELFPQLLELIAGLMSMWRGMYECHQVQTHIVQQLEYLNNARNTNPTSNVHRQAALQLEIEVDRWYSAFCSLVKSQRDYVYSLTGWLRLSLFCHHDPLTKAQNSDIYGLCEEWQLAIDRIPDKVASEGIKTLLTVIHAVVIQQAEEHKQKKRAESAFKEFEKKAEELRALESKYVGAEGYREMSRKSSVADKRAKVEALRSRADEEKIKYEKSIGVTRAMTLNNLQTGFPNVFQAMTGFASVCMEAFESVYNFKRSSDPKRLLT

SEQ ID NO: 59935 - protein, 485 aa, Zea mays; identical to SEQ ID NO: 59913
  Clone ID: LIB3689-229-B3_FLI.pep

SEQ ID NO: 59936 - protein, 306 aa, Zea mays; identical to SEQ ID NO: 59731
  Clone ID: LIB3689-229-C3_FLI.pep

SEQ ID NO: 59937 - protein, 329 aa, Zea mays
  Clone ID: LIB3689-230-E12_FLI.pep
PAFNPAFHSEQRAQPPLLRSRRLPPPRRLGLPPMAGYPPPGSGYPYGPGGGYGAPPPPYGSSPAPSAPPYGEKPPKEGKTSTSSAPPYYGAPPPSYGAPPPSQPYGGGGGGGGGYGYGASQPPPYGGAPQQQPPYGGGAPAGFGSPFASLVPSAFPPGTDPNVVACFQAADRDGSGMIDDKELQSALSGYNQSFSLRTVHLLMYLFTNTNVRKIGPKEFTSVFYSLQNWRAIFERFDRDRSGRIDMSELRDALLSLGYSVSPTVLDLLVSKFDKTGGKSKAIEYDNFIECCLTVKGLTEKFKEKDTAYSGSATFTYEAFMLTVLPFLIA

SEQ ID NO: 59938 - protein, 186 aa, Zea mays
  Clone ID: LIB3689-230-E2_FLI.pep
NPSAPSSSLSTCTSLARPSLAAAMGRGKFKGKPTGRRNFSTPEEIAAGTSGRPRTFKKKEEEEEEEEEREESEEEESEDESDDKPKHKGTEGIIQIENPNLVKVKNIKAKEVDLGKTTELSRREREELEKQKAHERYMKLQEQGKTEQARKDLERLALIRQQRADAAKKRDEEKAAKEQRKSEARK

SEQ ID NO: 59939 - protein, 229 aa, Zea mays
  Clone ID: LIB3689-231-F7_FLI.pep
LPTAHADALWLQGPRFHPPRQATAPPPPLSLVATMVVSYTEEHVYRHPWHRVTAAAMRKFTDPAARAASGALSHILDVHTLSRDVDARSGRLRAVRAIAGRTPPLPFPIRAAVAGAGGDVVVLCVERTDVDAPARDMRVASRNATLRGLVDVRERCSYEPHPARPDEWTLFRQETTIRCCAPLAAVAAKVAELVERRCAERFAQNAGRGKEVVERICEDLAAEQDSLAS

SEQ ID NO: 59940 - protein, 136 aa, Zea mays
  Clone ID: LIB3689-232-C12_FLI.pep
PSPPPSHHSLLAHSHLPAPSSTATKMNKERLMKMAGAVRTGGKGTMRRKKKAVHKTVTTDDKRLQGTLKRVGVNTIPAIEEVNIFKDDLVIQFLNPKVQASIAANTWVVSGSPQTKKLQDVLPGIINQLGMLQSVP

SEQ ID NO: 59941 - protein, 344 aa, Zea mays; identical to SEQ ID NO: 50354
  Clone ID: LIB3689-232-D2_FLI.pep

SEQ ID NO: 59942 - protein, 171 aa, Zea mays; identical to SEQ ID NO: 48228
  Clone ID: LIB3689-232-G4_FLI.pep

SEQ ID NO: 59943 - protein, 398 aa, Zea mays
  Clone ID: LIB3689-233-B11_FLI.pep
YIYINWTRTSCSLLSPADKKTLEFPAAALLSLDPFLQARTHPHASAPPPNDLRAAMANSAAPGGVRSFLQAVSTVTEETRTPLRVVQMEGLAVLKIIKHCEEFAPALVTGQLLGLDVGSVLEVTNCFPFPMREEDDEADADGANYQLEMMRCLREVNVDNNTIGWYQSCLLGSFQTVELIETFMNYQESIRRCVCIVYDPSRSSQGVLALKALKLTDSFMDLYRNNGLTGEKLREKKLSWVDIFEEIPIKVSNSALVSAFMKELEPESPVTQCDLDRLKLSTAPFMERNLEFLIGCMDDLSSEQNKFQYYNRNLSRQQSQQQAWLQKRRQENMARKAAGEEPLPEEDPSNPIFKPIPEPSRLEGYLVTNQISSYCNHINGVAGQNFDRLYLMKALHED

SEQ ID NO: 59944 - protein, 500 aa, Zea mays
  Clone ID: LIB3689-233-B2_FLI.pep
DRNLKTLACPSCSQISSTRPLPSTSNPSSAQPPTMSAMMQPQIILLKEGTDTSQGRAQVVSNINACTAVGDTVRTTLGPRGMDKLIHDDKGGVTISNDGATIMRLLDIVHPAAKILVDIAKSQDSEVGDGTTTVVLLAAEFLKEAKPYIEDGVHPHSLIRSYRTAGNMAIQRVKELAVSIEGKSLEEKKSLLAKCAATTLSSKLIGGEKEFFASMVVDAVLAIGNDDRLNLIGIKKVPGGTMRDSFLVNGVAFKKTFSYAGFEQQPKKFLNPKILLLNIELELKSEKENAEIRLSDPLQYQSIVDAEWNIIYDKLDKCVKSGAKIVLSRLAIGDLGTQYFADRDIFCAGRVTEEDLQRVAAATGGTVQTSVNNVINDVLGSCEVFEEKQVGNERFNIFSGCPSGQTATIVLRGGADQFIEEAERSLHDAIMIVRRALKNSTVVPGGGAIDMEISKYLRQHARTIAGKSQFFVNSFAKALEVFHANFAIMLDLMPLTFSIS

SEQ ID NO: 59945 - protein, 457 aa, Zea mays
  Clone ID: LIB3689-233-D1_FLI.pep
MVIVGDDCALPPPRGIAGRRGLAGTILVHKVAGAAADAGLSLAEVAAEAKHASEVVGTMGVALSVCTLPGQITSDRLGPRQMELGLGIHGEPGVAVVELQPVDVVVEHVLKQILSQETQYLPVTRGCNAVLLVNGLGATPIMELMIAARKAVPELQLVYGIAVDRVYTGTLMTSLDMAGLSITIMKSGESILKRLDAPTKAPAWPVGSEGNRPPAKFPVPLPPSPSMKDDEILAPSQELSKQGCILEAVIEASATEIINLMDSLNEWDSKVGDGDCGSTMYRGATAILEDMKKRYPMNDAAGTINEIGATIRRVMGGTSGILYAILCKAAYASLKQSSTVTANKWADALEASIAAVSKYGGASAGYRTMLDALIPASAVLKQRLEAGDDPVTAFIASSEAASAGAESTKQMQAKAGRSSYIAPDLLASIPDPGAMAAAAWYRAAALAVKNKVHGSKS

SEQ ID NO: 59946 - protein, 328 aa, Zea mays
  Clone ID: LIB3689-233-G3_FLI.pep
REMTLERKDVFSQPTIVQLLLGYLPTDRSLWTYELEKKRSQYSAYREEFLLNPSEKLRMIEETKLSRKKDTSIERIGFLSRFEVTNEEHPLSSGKSSLWNQYFQDSELLEQIDRDVKRTHPDISFFSSKSNQESLRRILIIFSKLNPSIRYVQGMNEVLAPLFYVFKNDPDPSNSASAEADAYFCFVELLSGFRDNYCKHLDNSSVGIRSTLSKLSQLLKRHDEELWRHMEVTTKVYPQYYAFRWITLLLTMEFSFNVCIHIWDAILGDPEGPSDTLMRICCAMLILVRKRLLAGDFTANVQLLQHYPATNIDHLLHIANRLRGTVPG

SEQ ID NO: 59947 - protein, 428 aa, Zea mays; identical to SEQ ID NO: 47785
  Clone ID: LIB3689-233-H6_FLI.pep

SEQ ID NO: 59948 - protein, 461 aa, Zea mays
  Clone ID: LIB3689-238-B3_FLI.pep
RNQVQMGSILSATSTTAKSMDQHEASGTDPNKRVKISTYEYGSNPRIIPTLPDELSLQILARSPRIHYLNLKLVCRAWKAAIIGYELSQLRRELGVSEEWVYVLTKAEAYKLHWYALDPVFQKWQRLPPMPSFVNQEESNRTASSAFWMWNVVGSSIRIADYVRGLFWRRNSLDQMPFCGCSVGVADGYLYVIGGFSKAVALNRVCRYDPFLNLWQEVSPMMTGRAFCKAAFLNGKLYVVGGVSRGRNGLLPLRSAEAFDPKTGLWSDLPEMPFARAQVLPTAFLVDVLKPIATGMAPYKGKLYVPQSLYSWPFFFDIGGEIYDPDLNAWSTMPDGLGDGWPARQAGTKLGVVIDDRLYTLEPSSSLDSGKIKRYDSEEDAWVTITPQVPVNDFTGAEAPYLLAGLGGRLHVITKAANNTLQVMQAVVQNNSVSEENVVWTTVASRNFGTAELVSCQVLDV

SEQ ID NO: 59949 - protein, 372 aa, Zea mays
  Clone ID: LIB3689-238-F7_FLI.pep
DLANKIGGAQVSGHHLVSEFSGLELKKSIMLGGQSETVKYRVFAGTWNVGGLAPPDDLDLEDWLDTKNDSYDIYVLGFQEIVPLNARNVLGPKQRRAAMKWQLLIGDALNSTRHGAAGMHGQGQGGAFRCLMSKQMVGIFVSVWTRSSLCRHVRHPGVCSVGAGVLGRLGNKGAVSVRFLLHGTSFCFVCCHLASGGEKGDALRRNADAAGILSRTSFLGFGGVAAAPGEVPKKILGHDRVVLLGDLNYRIAMDDDEARQLVRARKWGMLLEGDELLLELSSGRQFHGWHEGHVTFAPTYKYRRNSDHLHWCADGVAAGREKQHRAPAWCDRILWRGKGMKQVRYERCGCYRLSDHRPVRALFHAVCELADG

SEQ ID NO: 59950 - protein, 300 aa, Zea mays
  Clone ID: LIB3689-238-G12_FLI.pep
QSTTASRAAPSLYVPPFPVLAAMARHFVLNTGAKIPSVGLGTWQSDPGVVGNAVYAAVKAGYRHIDCARVYGNEKEIGLALKKLFEEGVVKREDMFITSKLWNDHHAPEDVPEALNDSLNDLQLEYLDLYLIHWPFRVKKGTNTSPENFVTPDFPATWGAMEKLYDAGKARAIGQTKLHSFCQSTGVHLTAYSPLGSPGTTWMNGNVLKEPIIISIAEKLGKTSAQVALRWNIQMGHSVLPKSTNEERIKQNLDVYDWSIPDDLLAKFSEIKQARLLRGNFIVNPESVYKTHEELWDGEL

SEQ ID NO: 59951 - protein, 209 aa, Zea mays
  Clone ID: LIB3689-238-H1_FLI.pep
EAATAGTAKVTPASSGGVSLSDVLWPSAGAFLAMAVLGKMDQMVAFKGVSLTIAPLGAVCCVLFSAPDSPAAKKYNMFVAQIACAAFGVLALSLFGPGWLARGAALSACIAFMTLADYNIQKESTLHLVLRLRGGMQIFVKTLTGKTITLEVESSSCELAPLVYRWPQVSQFAALVRAFPWSCRLHRPLLDSRGGGLPEEELQVLTQAA

SEQ ID NO: 59952 - protein, 510 aa, Zea mays
  Clone ID: LIB3689-239-A4_FLI.pep
KEPRPVPHLRRRQVRTIIYILLLKEKRREEKIDKRLAVMDSSELHILALQRVKQVEPENASKILGCILLEEPDNQDMLQLAYGNDAEVHAKISHAKAMLDAIVACCSSSPAFGYHYWPPVPNKAQAEEYALQPQHYSGGGCYYASENALIYNGGGPPRSRLSSTRRPCHYFIKGICKNGQSCHYSHHRQEAQVCSGALEKLELEIIELLKSRHGQPLSIASLPTLYGDRYGKSLKADGYLTESKRHGKAGYSLSRLISRLSKITTIERPHGQHYVVLAEDAGRYKELMSRGERGGDMGSSSHQVYLTFPSESTFMEEDVANYFGLYGSVRDVRIPWQEKRMFGFVSFHNPETVNTILTMRIPHFIGESRVLVKRYIEKSKCIERYRPRALRRFVGMDMDMDMNDDDDDYDDQPPARMVMRNQQRLLATEKRLIELERKRFFAMPPQQYQHVYFDCSIGDDDGQGQPPPRHLPLIITQPARASSSSSYDDDDDDIQLPESPFTSSAVPMLM

SEQ ID NO: 59953 - protein, 207 aa, Zea mays
  Clone ID: LIB3689-239-A7_FLI.pep
AAAPRRTPPPPPALRSPPPTSARDATSMPLLRSPVPAMAVTPTPRDAAMPALALPSSLRLALVTLPPSPTCSAPSAWTSSPVVLASPIPCSVPPGIPGVRTQDASPLSSLPPSNACCLSHSTAWIWNGGSLTEALNPATNVAFFSPLPSARHCLPSRRLRCSAKWPSVPSTRSRYPATPTAHQRPGSFRGGGAREKQADQPPMLKVG

SEQ ID NO: 59954 - protein, 177 aa, Zea mays
  Clone ID: LIB3689-239-B6_FLI.pep
VSQWILCSLYFLVEIRLLKARRGGRTNGLGAIGAVEKHNVHPLELPLIKHVEGPDTDRLSDVLRNDKFDWIIVTSPEAAAVFLQGWKTAGSPKVRVAVVGEGTARVFHEVSESDDQSLELAFSPSKALGKVLASELPRSNGNSCKVLYPASAKAGHEIGFMILDYLQCRGCAIRTRI

SEQ ID NO: 59955 - protein, 364 aa, Zea mays
  Clone ID: LIB3689-239-B8_FLI.pep
IQLKHTLNVHELISFKKLSISQAQSEAAVISEIRMRRFLPPLDNVHAWAWHVLHFRPSHTALSPVKSRTAAAHDLASLPACGASSQAGRPLGGAGDDGEQVVAEGVAEVLGEVLDGAFAGDVGLDEEGEHGEHGEPAVLDLLHLEDGGLVGVAGQAQGVEGATGVQLVLEVQSVDDPVVLGAADEDDLRDHGDHQVDGDAVAEIAEGVAVQEQGAGLEPDGLGAAVSAELVARLWDDSASGTEHGPSGMDQLVGLVLGEVLWLLAQAKRVVAIVSRDLSGEVLRYLRAVQEPIRQVDPPVRTVPLGELVADVRRRGRHRRGLGLLGRLLAEEGDDLLSPRGGRCRGVAGGAGEVELGAQNLGWS

SEQ ID NO: 59956 - protein, 545 aa, Zea mays
  Clone ID: LIB3689-239-H8_FLI.pep
GSVLPLISTPMVQLPSSGKRHAEPAEQTMAPARRAAAVKLEVEELGANERGPLSKRARPAQPMPPTPPQPQQDMYHNVLDEPSPLGLRLKKSPSLLDLIQMRLSQASNAGESSMDNSGSEPSKKKDSKSGVSSAGERLKASNFPANILKIGSWEYVSRYEGDLVAKCYFAKHKLVWEVLEGGLKSKIEIQWSDIAALKAICPENGQGTLDVVLARPPLFFKETDPQPRKHTLWQAASDFTGGQASMHRRHFLQCPSTLLSKNFEKLIQCDQRLYQLSQQPEITLDPTLFEPRCTIFEDPVESKCAGFTNLKDEHRALPGYSDSVSPCAGSSISAKKENNDSIRMPAEYPPQTVGIGVGAVGAQAVSRNVNGAAPEFNIPNWWSQLKVPGLRPSMSVDDLVNHLGNCISEQITSGDPALANNEVPTKETLEGIAQYLLGDTQGPPVTAAVERSLMARVDSLCCLIQKDTAPVAKPKPEPNDGDSIGVEASDGSDEEFTSAPTGKPTDATNPPAMSRKDSFGELLTNLPRIASLPQFLFKIPEGTEN

SEQ ID NO: 59957 - protein, 300 aa, Zea mays
  Clone ID: LIB3689-240-F10_FLI.pep
IMAEHLASIFGTEKDRVNCPFYFKIGACRHGDRCSRLHNRPTISPTLVLANMYQRPDMITPGVDAQGQPIDPEKMQEHFEDFYEDIYEELGKFGEIENLNVCDNLADHMIGNVYVQFREEEQAAAAYNALQGRFYSGRPIIVEYSPVTDFREATCRQFEENSCNRGGYCNFMHVKQIGRDLRRKLYGRSASRRYHGRSRSRSPPPQRRGHRDRDDYRGGGGGGRGRGSRYDRYDDGAGRGGRHDRYDDGAGRGGRHDRYDDGGRRRHGSPPRRARSPVRESSEERRAKIEQWNREREGKQ

SEQ ID NO: 59958 - protein, 266 aa, Zea mays
  Clone ID: LIB3689-240-G12_FLI.pep
SNKAGVKLSATIASMATNENLPPNVIKQLAKELKNLDESPPEGINVIVNDDDFTTIFADIEGPAGTPYENGVFRMKLLLSRDFPQSPPKGFFLTKIFHPNIATSGEICVNTLKKDWNPGLGLRHVLLVVRCLLIEPFPESALNEQAGKMLLENYEEYARHARLYTGIHALKPKNTSKTGAISESTTALNVDKSSTASSKNTPSMPPAVSTSSASRAFGTSLQDQNPTVSDPAVGAAAARKKDGPMASKVPVDKKRLDARKKSLKRL

SEQ ID NO: 59959 - protein, 904 aa, Zea mays
  Clone ID: LIB3689-240-G7_FLI.pep
KSGSVEIWEVFSLLCSMRSSFLSESPCDEQRIHGYGFNPQSWLQVERGKLPKSSYSPSSIESLIKIAEPHVVPLYKPLDYVEVLSRIHEELEQCRPSELPGLYLVQSQVFRGLGEAKLRQRSLHSAWRCASSVHEKVIFGAWLRYEKQGEEIISDVLASCQKCCREFGLLDVASEMPVRNFEVIGSWETGSSSQVSSMVTFQVQDGRVTCDRCKIASLSIPFCSMLNGPFNESQLELVDLSENGISLEGMRAVSEFSSTCSLGDLPVEILLEILVFANTFCCDRLKDACDRKLASFVSTRQDAVELMPLAFEENAPVLAASCLQIFLQELPDCLADDLVISLFLGATAQQQLIMVGHASFLLYCLLSEVAMNIDPRTETTVLLLEKLVQLAVTPTQKQIAFHQLACIRLLRKEYSEAEHQFEVAFSAGHVYSIAGIARVAGIQGQKALAYEKLSSVITSNLPLGWMYLERSLYSEGDRKLADLDKASELDPTLTYPYMYRAASLMRKKDAKHALEEINRLLGFKLALECLELRICLYLALEDYKSAICDIHAILTLSPDYRMLEGRVAASKIGTLLGAHVEQWNTAECWLQLYERWSSVDDIGSLSVIYRMLESDAAKGVLYFRQSLLLLRLNCPEAAMRSLQLARHHAATEHERLVYEGWLLYDTGHYGEALQKAEESISIQRSFEAFFLKAYVLADSGVDPSYSATVISLLEDALKCPSDRLRKGQALNNLGGVYVDCGKLDSAADCYTSALKIRHTRAHQGLARVHFLRNNREAAYEEMTKLIEKAKNNASAYEKRSEYCEREQTMTDLQTVTQLDPLRVYPYRYRAAVLMDSHKENDAIAELSRAISFKADLHLLHLRAAFHEHIGDVPSALRDCRAALSLDPNHQEMLELQKRVNSQEP

SEQ ID NO: 59960 - protein, 368 aa, Zea mays
  Clone ID: LIB3689-241-G6_FLI.pep
LDRLTGEELPSTTSGRAACPVVLLAPVVASRAPGAAMGRSPCCEKEAGLKKGPWTSEEDQKLLAFIEQHGHGCWRSLPAKAGLRRCGKSCRLRWTNYLRPDIKRGKFTLQEEQTIIQLHALLGNRWSSIATHLPKRTDNEIKNYWNTHLKKRLAKMGIDPVTHKARADVVGGSSGAGNNSGARYRAAAHLSHTAQWESARLEAEARLAREARLRALASPPPPPGPGPGPAFSGLESPTSTLSFSESVLFASAAHDTHALTSRAYAEAFGAEQQQRFADTAAAADAAPGFLAGVLLGCSVAGAEKGFAASSTDASVCEQQQEEEDKGYWSSILNMVNSSMSSSTSSLTSDAVTDPAAAYLPPATAAAEF

SEQ ID NO: 59961 - protein, 136 aa, Zea mays
  Clone ID: LIB3689-243-D10_FLI.pep
VLSGDESYAEDSRVRHALTPYLEYIAYLYQKMDPLPEQERIEINYRDFLQSPLQPLMDNLEAQTYETFEKDVVKYTQPENFQSKMFGEQDAEKVKSCNDKAKKMFPKVPSKISFNIVLSQLLKTMMISRNCCLPSL

SEQ ID NO: 59962 - protein, 562 aa, Zea mays; identical to SEQ ID NO: 59046
  Clone ID: LIB3689-243-E3_FLI.pep

SEQ ID NO: 59963 - protein, 142 aa, Zea mays
  Clone ID: LIB3689-244-E2_FLI.pep
NRILLSYISKYDPGLLLHNILLNALKTLFSRIELIELHLCSLKIELKTWNYDVKGKPFINRKTNQNSLNNEILQNKPKYHIPMLSTTLYLCPPLYIFFGHQSSNHHPSLRQGNHRCSFLIKVFTTKLRYFIYKGYKQRWNPN

SEQ ID NO: 59964 - protein, 404 aa, Zea mays
  Clone ID: LIB3689-244-F10_FLI.pep
SPEPNKPHRIATTARTSKRARVSGDNQERGHAKRRSAKEAATMGLDYYKILGVDKGATDDDLKKAYRKLAMKWHPDKNPNNKKEAENKFKQISEAYEVLSDPQKRAVYDQYGEEGLKGQVPPPGAGGAGPGGATFFSTGGDGPTVFRFNPRNAEDIFAEFFGGSSPFGGMGGGGMGGSGMGGGMPGMRSGGTRFSSSIFGDDIFGSAFGSGPDGHGMHAGGRAVKAPAIERKLPCSLEELYKGTTKKMKISREISDASGKTIPVEEILTIDVKPGWKKGTKITFPEKGNETPNTIPADLVFIIDEKPHPVFTRDGNDLVVTQKIPLAEALTGYTAHVTTLDGRSLTVPISSVIHPGYEEVVRGEGMPIPKDPSRKGNLRIKFDIKFPARLTADQKSGVKRLLGQ

SEQ ID NO: 59965 - protein, 431 aa, Zea mays; identical to SEQ ID NO: 56362
  Clone ID: LIB3689-244-G12_FLI.pep

SEQ ID NO: 59966 - protein, 339 aa, Zea mays
  Clone ID: LIB3689-245-C12_FLI.pep
RERDCQRGEAAGQSSISARGLRAERQGAMAASVALSSGHRMPAVGLGVWRMEKADIRGLIHTALRVGYRHLDCAADYQNEAEVGDALAEAFQTGLVKREDLFITTKLWNSDHGHVLEACKDSLKKLQLDYLDLYLIHFPVATRHTGVGTTSSALGDDGVLDIDTTISLETTWHAMEELVSMGLVRSIGISNYDIFLTRDCLAYAKIKPAVNQIETHPYFQRDSLVKFCQKHGICVTAHTPLGGSTANAEWFGTVSCLDDPVIKSLADKYGKTPAQLVLRWGLQRDTVVIPKTSKVERLQENFDVFGFDISGEDMERMKAIDRKYRTNQPAKFWGIDLYA

SEQ ID NO: 59967 - protein, 378 aa, Zea mays; identical to SEQ ID NO: 59265
  Clone ID: LIB3689-245-E10_FLI.pep

SEQ ID NO: 59968 - protein, 345 aa, Zea mays
  Clone ID: LIB3689-245-F3_FLI.pep
TLESLELSVPDPLDLDILGRLGPEVGVGRLHALEDADDLAGLRVALGDAQRDVAGGGGGVLDVLLLELLLVTSAPGGERDGVVVAGGAAAALGVEEGGAAVAGHEEGPAEALGLAGGDELLDGEEERHALAPRELHGDGGVVDAVLLLELERAVGADLERALDLVQRVREAGHELGLLELGRGVLGDALRLDGEGRRLQAQLLHLVLAGLERERLHAAVDGRALVRRARALHLHVRFALDLVVGQPLGRALRARARDEERRGGEREAGELRGVDAPAGDVLQGARDPGGAGVDAERPAGELRRRAGRQRGKGRPAADLGRLHQGGRGLERGCHRRRGGDAFWLLP

SEQ ID NO: 59969 - protein, 412 aa, Zea mays
  Clone ID: LIB3689-246-B12_FLI.pep
ATNKSASISLSSLLVTQPRTEAPPSMALQAALLPSTLSSVPKKCSLAVAAKDTAFLSVSQKKVQAASLSVRTRVATTAPVATPGSSTAAKDGKKTVRQGVVVITGASSGLGLAAAKALAETGKWHVVMACRDFLKAAKAAKGAGMADGSYTIMHLDLASLDSVRQFVDSFRRAGMPLDSLVCNAAIYRPTARTPTFTADGYEMSVGVNHLGHFLLARLLLDDMQKSDYPSRRLVILGSITGNTNTLAGNIPPKAGLGDLRGLAAGLRGQNGSAMIDGSESFDGAKAYKDSKICNMLTMQELHRRYHEETGITFASLYPGCIATTGLFREHIPLFRLLFPPFQKFVTKGFVSEAESGKRLAQVVSDPSLTKSGVYWSWNKDSASFENQLSQEASDPEKAKKLWEISEKLVGLA

SEQ ID NO: 59970 - protein, 496 aa, Zea mays
  Clone ID: LIB3689-246-C11_FLI.pep
RCCSSSRMSKEDVLKVQTLMLRVNIHCDGCEKKVKKTLHKIDGVYQSSIDAEQGKVTVSGLLDPDTIIRKLNKAGKPAQLWGSKPGITQNAYHGGGKAHSKDAGGGKSHSKDSGGGKGHSKDAGGGKAQKGGAGGGGHKGPGGGGGGGGGVGNPKMVMPQPTPQQLQQLQQQLQMKGLKLPPHLLGGNMPAFPAAAPMKDPKSVKFALPEDNFDDYGSEFDDDFDDGFDDDEDDYDDDGLDDDVYGDPKMMMKPMAVPPPAGGGDKKGGGGKKGGGGGNEIPVQIKGNNHGGAGGQPHNAKGGAPGGGAHLGQGKKGGGSAAAVGVGGPMGGMLPQQGMMRPPNILGGAGAGFPSTAQMGGGPMGMPVGHPHMGIMQQGGGGGGGGMPGLGFHPGLGGGGMHSGADMLQAAAASGNPVAQQQYMALMQQQQQQMMMMQQQQQQHGNGGLGYPAAMGYGYGRPPMHYPMGYPVLPPHSHAEPYNIFSDENANSCSLM

SEQ ID NO: 59971 - protein, 287 aa, Zea mays
  Clone ID: LIB3689-246-D10_FLI.pep
PPGTWRRRPTGRPGRAARPAPAPALVPPSSRAASTCPCATGPAADTGPASSCAAGSGRSRWISSRARRARARGGSGTGPRSACRSPSTAIACSTSAACAGSSAAPRSWTSAPATASSSPGTFTTGSSPRATPRHPPPRLRPRAPSSSSASSSPAATARSVTRPTPGRRRWSKSEAAWRGTSTVGGGGEGTGARAAAAVRSGGRGARRAGWQRRAPPRRRQWLPPPRRGRAAPPSWTGAAPRRPSCRAATASPSSSTPGRTSVLGPWASGGQRGLPGIVSIDDWFTVQ

SEQ ID NO: 59972 - protein, 344 aa, Zea mays; identical to SEQ ID NO: 50354
  Clone ID: LIB3689-246-F12_FLI.pep

SEQ ID NO: 59973 - protein, 211 aa, Zea mays
  Clone ID: LIB3689-246-G10_FLI.pep
VGSKMVSLKLQKRLAASYLKCGKGKVWLDPNEVSEISMANSRQNIRKLVKDGFIIKKPHKIHSRSRARRAHDAKQKGRHSGYGKRRGTREARLPTKVLWMRRMRVLRRLLRKYREAKKIDKHMYHDMYMKVKGNAFKNKRVLMESIHKSKAEKAREKTLSDQFEAKRAKSKASRERKIARREERLAQGPREITPPVSSTAPATGAPKKAKK

SEQ ID NO: 59974 - protein, 166 aa, Zea mays
  Clone ID: LIB3689-246-G7_FLI.pep
GICEAVEGDFLDAHSLQLLNPYMPNLSASWLFQRAMSVRPHVNVSPTFINELLFANFQSMQKLGDSVLRPFLQDVIQFGPLVKTLGLVMITRPQILPSIFKQVGLGVILEWSGHFMMLGYYTFLSTYIDPILRSWVESLPPRDKYQWKRYLEAWRYGAGLDYRQGE

SEQ ID NO: 59975 - protein, 198 aa, Zea mays
  Clone ID: LIB3689-246-H7_FLI.pep
ENPNPNVAANRAIPRPKAPPFMSFLAGRLAAKEGAYFLQESKTAVGRLAEKLPPSASAPGGASAQPSPDVLPEILRHSVPIKGTPPPAEASLSASSRWALPPGGGEAAGLHPDALNPLRSYVSLPQATFGPKRWQLPNEQPNYLASTANERRRDRAPPPLDPENLKALGRHSLLQLLWCLEEQQLCCCTQQISYSCIQ

SEQ ID NO: 59976 - protein, 428 aa, Zea mays; identical to SEQ ID NO: 53337
  Clone ID: LIB3689-247-D1_FLI.pep

SEQ ID NO: 59977 - protein, 488 aa, Zea mays
  Clone ID: LIB3689-247-H9_FLI.pep
LCSWAYADTAPIRIVLLASLVDPPLPSPRFKMQIFVKTLTGKTITLEVESSDTIDNVKAKIQDKEGIPPDQQRLIFAGKQLEDGRTLADYNIQKESTLHLVLRLRGGMQIFVKTLTGKTITLEVESSDTIDNVKAKIQDKEGIPPDQQRLIFAGKQLEDGRTLADYNIQKESTLHLVLRLRGGMQIFVKTLTGKTITLEVESSDTIDNVKAKIQDKEGIPPDQQRLIFAGKQLEDGRTLADYNIQKESTLHLVLRLRGGMQIFVKTLTGKTITLEVESSDTIDNVKAKIQDKEGIPPDQQRLIFAGKQLEDGRTLADYNIQKESTLHLVLRLRGGMQIFVKTLTGKTITLEVESSDTIDNVKAKIQDKEGIPPDQQRLIFAGKQLEDGRTLADYNIQKESTLHLVLRLRGGMQIFVKTLTGKTITLEVESSDTIDNVKAKIQDKEGIPPDQQRLIFAGKQLEDGRTLADYNIQKESTLHLVLRLRGGY

SEQ ID NO: 59978 - protein, 581 aa, Zea mays
  Clone ID: LIB3689-249-D11_FLI.pep
PNSRPRVFALLAWVWIRSRARPGGCCRGMAEAVASAGRLAMDSSTSVSPGQVSAILGFLWVFAAWAYAEVLFHRKNTASIKTRHSDVNLAVMDDSSVKAEDQTMLLEEGGQAMAAKPAYTSLTSQILRLIFMDQLLLLENRLTLRAISEFGGYLLYFYICDRTNLLGESAKNYSRDLFLFLYFLLIIVAAMTSFKVHQDKSSFTGKSVLYLNRHQTEEWKGWMQVLFLMYHYFNAKEIYNAIRVFIAAYVWMTGFGNFSYYYVRKDFSLGRFAQMMWRLNFFVIFCCIVLNNDYTLYYICPMHTLFTLMVYGALGILNKYNEIRSVMAMKFVACFLVVVLVWEVPGVFDIVWSPFTFLLGYTDPSKPDLPRLHEWQFRSGLDRYIWIVGMIYAYYHPTVEKWLEKLEETEMRTKLYIKTSIVTVSMMAGYLWYEYIYKLDKITYNKLHPYTSWIPITVYICLRNFTQEFRGFSLTLFAWLGKITLETYISQFHIWLRSSVPNGQPKWLLSIIPNYPLLNFMLTTAIYVAVSHRLFELTNTLKMVFVPNRDNKRLSYNFVAGTAISAALYFVSFVLIGIAGY

SEQ ID NO: 59979 - protein, 230 aa, Zea mays
  Clone ID: LIB3689-250-E7_FLI.pep
AEEELCQATMGISRDSMHKRRATGGKQKAWRKKRKYELGRQPANTKLSSNKTVRRVRVRGGNVKWRALRLDTGNYSWGSEAVTRKTRILDVVYNASNNELVRTQTLVKSAIVQVDAAPFKQWYLTHYGVDIGRKKKTPAAKKDNAEGQEVEAAAEETKKSNHVTRKLEKRKEGRTLDPHIEEQFGSGRLLACISSRPGQCGRADGYILEGKELEFYMKKLQRKKGKSAVA

SEQ ID NO: 59980 - protein, 184 aa, Zea mays
  Clone ID: LIB3689-250-H11_FLI.pep
LTKEEAAFSPSHPAMQRHVASGRPSGTDGSDFSYRMVVESRYQRVAEGRSRLARLILVQALHLVAGGLLLLLSLSKGAAVNKFAVLSMAAGFLAIVVGELGRMRTMSVLLRLYTSLSSIAVAFSVTCIIRSELFLKVMKQNTEAITSYEMLDAVRVALGILLQMVVIATTTRLLQNMSPPKRAS

SEQ ID NO: 59981 - protein, 244 aa, Zea mays
  Clone ID: LIB3689-251-A7_FLI.pep
VFDFSRRRCSSHIPREDACSSPIDTMAVFSDLHTADGLKSLEAHLAGKTYVSGDSITKDDIKVFAAVPSKPGAEFPNAARWYETVSAAVASRFPGKAVGVNLPAGSAPAAAAPADEAEDDDDLDLFGDETEEDKKAADERAAAAKASSKKKESGKSSVLMDVKPWDDETDMKKLEEAVRSVQMEGLTWGASKLVPVGYGIKKMTIMLTIVDDLVSIDTLIEDHLTQEPINEYVQSCDIVAFNKI

SEQ ID NO: 59982 - protein, 280 aa, Zea mays; identical to SEQ ID NO: 46474
  Clone ID: LIB3689-251-G6_FLI.pep

SEQ ID NO: 59983 - protein, 594 aa, Zea mays
  Clone ID: LIB3689-252-B7_FLI.pep
EEEGRMRVGGGRDDDDEVSRKLKSMDVDKLENGGGEESPRPAVKYHGWKAMPFIIGNETFEKLGTLGTSANLLVYLTQVFHMRSVDAATLLNGLNGTTSLAPIIGAFLSDAYLGRYLALAIASVASLIGMFLLTMTAGANSLHPPECSVGETCEKATSYQFAVLFVAFAFLVLGSAGIRPCSMPFGADQFDPNTESGKRGINSFFNWYYFTFTAAMMISATVIIYVQSNVSWPIGLGIPTALMFLACVLFFMGTRLYVRVTPEGSPFTSVVQVLSAALKKRSLKQPKDPKQDLFDPPHTSAIVTKLAHTDQFRCLDKAAIVASPDEVRSGGGAPADPWRLCSVQQVEEVKCLIRIVPVWSTGIIYYVAVVQQSTYVVLSALQSDRHLGRAGFQIPAASFTVFAMLAQTLWIPFYDRLLLPKLRKITGKEEGFTLLQRQGIGIALSTVAMVISAIVEDRRRAIALSQPTLGTTITGGAISAMSSLWMVPQLMILGLSEAFNLISQIEFYYKEIPEHMRSVAGALAFCNLALGNYLSGFLVTIVHRTTGSGQNWLAQDLNKGRLDLFYWTIAGIGVFNFIYFVICARWYRFKGASN

SEQ ID NO: 59984 - protein, 258 aa, Zea mays
  Clone ID: LIB3689-253-F11_FLI.pep
HFVESAVRSARLSLRSGALGRAKAPPSSDKMAGKGAKATAAKSADKDKGKKTGGPVSRSSRAAPHEKSAPKKDVYQLFAEKVRDNKQLESRWAIMQETRVEYFRGKDFNTFVKNHPEVREILGPDKDLEVEDIVNTLLTKNLVIRCDRVMKTVRPGKKKLSSWPAHLEIHNEQVFTENDGFFAWMFLKRRTLWQTILSFVWPLFALAVCLFPVYPYQCKIVVLYSCAGALLFIVSILLRKISPPLLNVFSFTTYIILK

SEQ ID NO: 59985 - protein, 412 aa, Zea mays
  Clone ID: LIB3689-254-A11_FLI.pep
WRPNPSGEAASACIYYLHQVLRDPTEVFPAAAAMATLNPFELLGADDNDDPSLLIAAAAAAAQKAEAKKSAVAPAGKAAQPAATTKFPTKPAPPSQTVRDARGGGSSARGGFGRGERGRGRGGRGYGQNRGFSGDNGNEFQGGYGGGGYGDGAVTGGSEGERERDTRPPYRGGGRRGGYRNVEFGDDSERPPRRNYERHSGTGHGYEMKRDGAGRGNWGTATDELIAQDAEDSPKMEDAAPVAEKQGEQIDAPAADENKDNKDATANEEEEKEEDKEMTLEEFEKIREEKRKALLALKAEERKVEVDKDLRSLQPLSNKKENDEVFIKLGSDKDKKKENAERDERAKKSVSINEFLKPAEGERYYGGRGRGRGGRGDRGGFRGGYGGGYSRGPAAAAPSIEDQAQFPSLGGK

SEQ ID NO: 59986 - protein, 184 aa, Zea mays
  Clone ID: LIB3689-254-B2_FLI.pep
CKTKIQRWNMGQLNNRTEIHSHTIGIPFHTKERIAREATDTRQLLTLAPPTDPHRGQGTSDDARAESGGARALRARKVDEGVRRHAIVLWRRRGGGGDGGEKEVGIGVRRSPGGLEAAAPDRARIQLEEVGEIERLDGGIKSTKANLRGHQVARARRRGGGCRAPERSHGWSVAADPLGGCWRR

SEQ ID NO: 59987 - protein, 349 aa, Zea mays
  Clone ID: LIB3689-255-E1_FLI.pep
ATASPNSLSSARFAEFPVLRPLRRISSPPRPPPVTAASSALVPPVPRSTCFSPRRSPAAAATGSSPAMSSQVDSRSQSAGKRARTDGSRREDDWVCPSCKNVNFAFRTTCNMRNCNQSRPADHTAMQTPPRYPTSGGYMSPGTPPSMYLGGGAPPYGSSMFNGPAMTRYGITQFPGGSAYPYGYGGRISMGSPYGPMQMAGPTAYSGGSMMGAGGMYGMPMDRYGLIPAGSGPMGTRAGSYSDEDSQKKSAGAGRDNDWECPNCHNINFGFRTVCNMRKCNTPRPENQGSKPDGLRGSKPKTPEGSWKCEQCNNINYPFRTKCNRPQCGAEKPSQTNNANESAEDQDNQ

SEQ ID NO: 59988 - protein, 171 aa, Zea mays
  Clone ID: LIB3689-256-F4_FLI.pep
CSSSPGRVTNHQRSHSLKSAAGPHTIVDGKEVVNFASANYLSLIGNEKIIDSCISSLEKYGVGSCGPCGFYGTTDVHLDCESKIAKFLGTPDSILYSYGISTIFNVIPAFCKKGDIIVADEGVHWAVKMVSIYQEALWCTSSTMIWLHLQALWKNLLVEINVLKRLDATLL

SEQ ID NO: 59989 - protein, 209 aa, Zea mays
  Clone ID: LIB3689-258-H2_FLI.pep
ATPRPKRTAIMDANHSPPAQPERHHGSFNYDIESTDGTWRGAGAWQEQDPSSEALLRYDDDGPREPLLRRRTMNTTSQIAIVGANICPIESLDYEIVENDLFKQDWRSRKKQQIFQYIVLKWSLVLLIGLCTGLVGFFNNLAVENIAGFKLLLTSDLMLKQRYFTAFLAYGGCNLVLAAAAAAICAYIAPAAAGSGIPEVKAYLNGVEC

SEQ ID NO: 59990 - protein, 612 aa, Zea mays
  Clone ID: LIB3689-260-B5_FLI.pep
KKPYQASEDSAAGEEVESPAMAAALECWSGRPSTDEEMVEQVLMKPHGRSDDSLPTCADSASAGEPTSAPAPPNPKKWQRLGRNFAGAIAAFKNTLSLDGGGLPRDPSPRAEKPPPLLLRGLAQLYSRGAAANQQLPEKLVADLRRHFDALPNSYAQAGFDMKDVLLHARLVEQATGEDQPAVNIEEVHGRGAGDEGTVFQLTFACTAPLSWQSMSGSLDSPSFCCKKIQIFEKRGLTLGVVMILVQTGNETLFKNRVESALKSVAKKQRKNSGGGVKLPFGLCGCQEEGSRNFDEESMFDPDDGQVLDNEPARRPQLPTRLPQSSVFVSVDEWQTIRSGGEELGRWMLRSEEIEFIDWVGANSFRGVYRGKKVWVNKLRGCDMGSAYEVEIRQDLLQLMSCGQRNILQFHGICFNGNHGLCIVTRMMEGGSVHDILTQRNKRLSLRDTVRIALDVADALAFMNSYGIAYRDLNARKILLDRQGNACLGDMGIVTPCSNVGEVTEYETSGYRWLAPEIIAGDPETVSETWMSNVYSYGMVLWEMITGEEAYSAYSPVQAAVGIAACGLRPEIPRECPPFLRSLMNRCWDNSPLKRPQFSEIISILQRQQNVR

SEQ ID NO: 59991 - protein, 574 aa, Zea mays
  Clone ID: LIB3689-260-E10_FLI.pep
RSRFHSGGEGAVARRVTREAEPRGEEPGCTRAGRVGSSDCTGRERAERSGGVDHSGCTGRVGSSGCTGRERAERSGGVDHSGCAGRNREAVRSRVGDEGRTSAGGGGGGGGGCSHGGLQGRDGVDGGVHQAQAAAAARSYPTSASGGGTAGGKGKMFGRAPKKSDNTKYYEILGVPKSASQDDLKKAYRKAAIKNHPDKGGDPEKFKELAQAYEVLSDPEKREIYDQYGEDALKEGMGGGGSHVDPFDIFSSFFGPSFGGGGGSSRGRRQRRGEDVVHPLKVSLEDLYNGTSKKLSLSRNVICSKCKGKGSKSGASMRCPGCQGSGMKVTIRQLGPSMIQQMQQPCNECKGTGESINEKDRCPGCKGEKVIQEKKVLEVHVEKGMQHNQKITFPGEADEAPDTVTGDIVFVLQQKDHSKFKRKGEDLFYEHTLSLTEALCGFQFVLTHLDNRQLLIKSDPGEVVKPDQFKAINDEGMPIYQRPFMKGKLYIHFTVEFPDSLAPEQCKALETVLPPRPSSKLTDMEIDECEETTMHDVNNIEEEMRRKQAHAAQEAYEEDDEMPGGAQRVQCAQQ

SEQ ID NO: 59992 - protein, 220 aa, Zea mays
  Clone ID: LIB3689-261-A11_FLI.pep
EHSRSRRKFEDEEQLHCGRTSGMEGQFQVGKEEVIQAWYMDDSEEDQRLPHHREPKEFIPLDKLSELGILSWRLNADDWENDENLKKIREARGYSYMDICDVCPEKLPNYEAKIKNFFEEHLHTDEEIRYCLEGSGYFDVRDQDDQWIRVAVKKGGMIVLPAGMYHRFTLDSDNYIKAMRLFVGEPVWTPYNRPHDHLPARKEYVEKIINRGGNQAVEAR

SEQ ID NO: 59993 - protein, 485 aa, Zea mays; identical to SEQ ID NO: 46975
  Clone ID: LIB3689-261-A4_FLI.pep

SEQ ID NO: 59994 - protein, 487 aa, Zea mays; identical to SEQ ID NO: 47714
  Clone ID: LIB3689-261-C11_FLI.pep

SEQ ID NO: 59995 - protein, 329 aa, Zea mays
  Clone ID: LIB3689-261-E10_FLI.pep
YIASPAMTWCNSFNDVRAVENNLATAAAVAAAAAKKQQQQQASSHVNLIRTCPSCGHRAQYEQVQAAATIQDLPGLPAGVKFDPTDQELLEHLEGKARPDARKLHHPLIDEFIPTIEGENGICYTHPERLPGVGKDGLIRHFFHRPSKAYTTGTRKRRKVHTDEQGGETRWHKTGKTRPVFTGGKLKGYKKILVLYTNYGKQRKPEKTNWVMHQYHLGSDEEEKDGELVVSKVFYQTQPRQCGSGSATAKDAIPLAANAATDHHHHHHHDGGNGGGNNMLKEAGIVDFYSPAALISYNQAASNSRVAASAHLVPNFEVHTTSGAAGFGP

SEQ ID NO: 59996 - protein, 400 aa, Zea mays
  Clone ID: LIB3689-261-E2_FLI.pep
GMLAAVMDYFSSCWGPRSGDGHRGKGPDAAGRQDGLLWYKDAGQLVTGEFSMAVVQANQLLEDQSQVESGSLSLADPGPQGTFVGVYDGHGGPETSRFINDHLFNHLRRFATEHKFMSADVIRKAFQATEEGFLSLVSKEWSLKPQIASVGSCCLVGVICAGTLYVANLGDSRAVLGRLVKATGEVVAMQLSSEHNACYEEVRQELQSSHPDDPHIVVLKHNVWRVKGLIQISRSIGDVYLKKPEYNREPLHSKFRLRETFQRPILSSEPQITEHRIQPNDQFVIFASDGLWEHLSNKEAVDLVQSSPHNGIARRLVKAAMQEAAKKREMRYSDLKKIDRGVRRHFHDDITVVVVFLDLNAMSKASWSKSPSVSLRGGGVTVPAKSLAPFSAPARLNSTY

SEQ ID NO: 59997 - protein, 302 aa, Zea mays
  Clone ID: LIB3689-262-A7_FLI.pep
KVIRPIVAPRQRPPTAYPRQPAGESRTRPARRDGRPRRRRPAASRRLHGLRHSGRRLPHSTFACDQQEYAVVFITHSAHRSLSAHLAASSVRYMPVSSPPVLAAEQLENISSDSIQSNHERESFSMRKKAIQAEHRKECLSFVEEVFGNDPSISGDFIVINFFALEGWHLAELFQVKCVIAAPYFVPYSAPTSFKRQFKQTFPLLYKYFQEAPANTVCWTDIIHWMWALFMESWGSWRNDCLNLSPIPFTDPVTNLPLWHVREESPLLLYGFSKEIVECPGELWCPPHLSKIILDIYIYLQI

SEQ ID NO: 59998 - protein, 592 aa, Zea mays
  Clone ID: LIB3689-262-B3_FLI.pep
SLRPRLSMDSGIWASVWSFIKFLPFFFALLLLGIIKGALFGPWAWLVMTIGISALILGLWPMHVIWTYYCIIRTKMVGPVVKLLLLIVATAVLVIWLIIGVVGSILAGLAYGFLAPVMATFDAIGEGKENPLVHCFLDGTWSTITGSCTVVRDMKDMLVHSYFSIMDEVRLHAPPDGKPYEIRLLQIPGAIFAAACGLVVDAIMFTLIALYKFPVMLFKGWKRLIEDLIGREGPFLETACMPFAGLAILLWPFAVIGAFIASVICSVPFGVYAAVVVYQESSLFLGLSYAISSVSIFDEYTNDVLDMAPGSCFPRFKYRTNEASSHGGSLSRPASFKDKHDGKKAPQRVTSFKSSFDEFNPFKLLDHLFIECKHHGKDLVAEGVITSKDIEGTKAGKASTGVLNVGLPAYVILKALLRSAKANSDGLVLSNGSEITSDNRPTSKIFECFFDPLMVIKDQIKAENFTEEEEAYLEKQVLLISDPKRIKENLIRLPPLSERKQAEIEAFARRLQGITKSISRYPTSKRRFDALVKALSEELARTMGGNQSANGSQVRKMRSGIVRMLSQRSLGKATGIPGDDHEAQLTSDGFTS

SEQ ID NO: 59999 - protein, 519 aa, Zea mays
  Clone ID: LIB3689-262-D12_FLI.pep
EEHQQHSSHYGHHFLVVAYGMQGHVNPARALAHRLAKLSDVVGGCPILATLSVHVAAHRRMFPAPLDPDAAGEEHEEEASDGVISYVPHSDGFDDGSLPRTPEDWARRRRASRESLSAMLARFAGGGRPVTCVVCTLLVPAAVDAATRHGVPFAVYWIQPATVLAAAYHYFHGYGETVAAADPAHEVSLPGLRRPLRVRDFPSYLVDTTGSPLARSVVGMFRELFESVDRWRPKVLVNTFDELEAGVLSETKRHLDVFAVGPMVAGAGGGSGSSVASNDEGRIHLYRHDDADRKRYMEWLGAQPESSVVYVSFGSIATHTEQQMEEVVQGLLQAGRPYLLAARSWHGLEDDGARHVLDKAAQSSGGRGTVVDWCDQPEVLAHPAVGCFVSHCGWNSTLEAVAAGVPLVGVPSLFDQPTNTYLVVEEWGVGVRGERDGEGVLAATELARCVELVMGQGAKATAIRERVKALREMAQQAARAGGPAERNLEDFVNSVGDSFRPVGISVAEKTDESRTCSSE

SEQ ID NO: 60000 - protein, 546 aa, Zea mays
  Clone ID: LIB3689-262-E12_FLI.pep
RPEAQTAWARGRADRAGPRPTRSSAPAAMEEPAAASALEARGDLRSALPFLPVVLRGGALFWPPAAQESLRALALGPDVSRVASGDVLADALTDLRLALALPALPPRAADGLALFFDDLLSRAQARGWFSEVVPNLARLLLRLPTLLEDHYAKAGHGASGLRVMASQDAGVVLLSQELVAALLTCALFCLFPTAGRAQACLPTINFDGLFAPLIHNARQSQEQKVRCLVHYFERVTDSMPTGLVSFERKVLPRRALSDGVPYPDIHAWVASSAPLCQFTVFSSGFIEDEEQEALQVDFANKYLGGGALSWGCVQEEIRFMINPELIVGMLFLSCMEDNEAIEIFGAERFSQYMGYGSSFRFVGDYLDTKPFDSMGRRRTRIVAIDALDCPARLHYESGCLLREVNKAFCGFFDQSKHHLYAKLFQDLHNKDDFSSINSSEYVGVSTGNWGCGAFGGNPEIKSMIQWIAASQALRPFVNYYTFEDVSLQRLEEVIQWIRLHGWTVGELWHMLMEYSSQRLGGETHKGFLVWLLPSDRPKNQVHYMSE

SEQ ID NO: 60001 - protein, 502 aa, Zea mays
  Clone ID: LIB3689-262-F9_FLI.pep
FDATGVAAAAAGGVIRHPLLPPPYASGQSELRSPARRHASVVFATMNSIEPFNRLVRLAARAFYDDVSMKGDNQPKTSRGDNRGMAVVVLDALTRRPWVREEDLAKALKLHSKQLRRILRFFEEEKLVTRDHRKESAKNAKAHNAAAANDGQPIAKEGEEKVKLHTHSYCCLDYAQICDVVRYRIHRMKKKLKDELDSRNTIQHYICPSCNKRYSAFDALQLVSYTDEYFHCETCNGELVAESDKLASEEMGDGDDNVRKRRREKLKDMQQRIEEQLKPLVAQLDRVKNIPAPEFGSLQTWERANIGAFAIGDPAAADSSRNSQGQYGTPMPYIGETKVEVDLLSDGVKEGAESGKTDSELKVLPPWMIKDGMNLTKEQRGEIIAPQKLEKSDAKDDKKHDLKDDHSVQEEYIKAYYEALRKKQEEEEAKRRMQQEGKVFLPDFQTERQVGKKYKRDGDDEGIEWEEHQPTGYATETYKLADLNAEAQESGDDEDDNVWEEG

SEQ ID NO: 60002 - protein, 121 aa, Zea mays
  Clone ID: LIB3637-195-D12_FLI.pep
GQIGNDLLDYSTTVHTTPLLLALATVTRVASARLGTILSAAAAVPVGAGHGHANPGSHNAKYPATVGFIPLLLSTVTATTGRFAIARLSVVPAAANANIYSIILTCWNTNANMAFMIRQLK

SEQ ID NO: 60003 - protein, 150 aa, Zea mays
  Clone ID: LIB3637-196-A7_FLI.pep
MAVSWSHGPHIDAEMKHSWLVDIRKLEAYTGGRFVQYLLRFIRSIHSYIVREQQILVVVDAGEEVGVVPGEPQPRPSAGLRAGGGAELGRPEVEEALLGGAPTDVLLHRLQQTPVHLRRSRHRSVRLLQIQLERRPPTGVGNSGGTVAAD

SEQ ID NO: 60004 - protein, 129 aa, Zea mays
  Clone ID: LIB3637-196-D8_FLI.pep
FLCLSLIQVTFSQSYQVAEDLARAFTERTILQIFLEDEMNVPSGSLKEVLGLLRSLYVMVNIDESTSFLRYGHLSRDNVALVRKEVLKLCSELRPHALAVVSSFGIPDAFLSPLAFDWIEANALSTGSH

SEQ ID NO: 60005 - protein, 104 aa, Zea mays
  Clone ID: LIB3637-196-G8_FLI.pep
CQVSLVSRMTHENFVDMLGDRIKRNLRIVSYEFATMGSLHDVLHGRKVFQGARPGPTFGWMQRVQIVVDATKGLDIFMGKFISPLSIGIIEQLISSCLKASRQR

SEQ ID NO: 60006 - protein, 91 aa, Zea mays
  Clone ID: LIB3637-197-D5_FLI.pep
KELMSIRQLIATGHLIKIIIGAEVDDFMHEECLGKLKGAPFSPTVNSVEFDFSSRATHSATKTRPTACPWFLAGEWMSRQLMKPYSHFRVD

SEQ ID NO: 60007 - protein, 198 aa, Zea mays
  Clone ID: LIB3637-198-B7_FLI.pep
LERDREREREQGAAPERRKMSGSSNSSLETRTFLDEVRGLEKNWMVDLGHPLLNRVAESFVKAAGIGAVQAVARESYFMAMEGEGGGTGAVSDSTGARKRSFPDLNGGNSSKSAEAMVKSVSKESLQWGLAAGLHSGLTYGLTEARGTHDWKNSVVAGALTGAAVALTSDRASHERVVQCAIAGAALSTAANVLSGIL

SEQ ID NO: 60008 - protein, 119 aa, Zea mays
  Clone ID: LIB3637-203-E7_FLI.pep
VPCRVDSPEECAKIIYANKNLRLGSGILIAVPIPKQHATSGKIIESAIQTALKEAGDKRIIGNAITPFMLERVKELTGGSSLEANIALVKNNALIGANIAVALSNLQQREISRMGRSAL

SEQ ID NO: 60009 - protein, 119 aa, Zea mays
  Clone ID: LIB3637-203-G1_FLI.pep
RRRRHACAAAPTMDEEEFRRMLDLFPVVRSRDYCCSDLGTSSRGTRQRSRVQEATKGDNKDSSGGRDMFMQKLKMAAENKIGATKAEFFCKTFEEVHEKLVHRELNLDAAKKFLSAYES

SEQ ID NO: 60010 - protein, 159 aa, Zea mays
  Clone ID: LIB3637-205-D12_FLI.pep
RCYFNISEMGFSAYLCYMAMYLIFVEFGIYWMHRELHDIKPLYKHLHATHHIYNKENTLSPFAGLAFHPLDGILQAIPHVLALFLLPTHFRTHIALVFLEGVWTTNIHDCIHGKVWPVMGAGYHTIHHTTYRHNYGHYTVWMDWMFGTLREPDDILKKA

SEQ ID NO: 60011 - protein, 84 aa, Zea mays
  Clone ID: LIB3637-206-B7_FLI.pep
RRNCQCPEVPWTGERGRLPPNALIMVKPSFLYRVQNSFALDTGDVLYASKDMAWDIFREIWIHTIKRSPLWIHTITISLTCGST

SEQ ID NO: 60012 - protein, 172 aa, Zea mays; identical to SEQ ID NO: 36903
  Clone ID: LIB3637-207-F5_FLI.pep

SEQ ID NO: 60013 - protein, 333 aa, Zea mays
  Clone ID: LIB3637-209-A3_FLI.pep
LADSPSRPARRRARKPHLALPAEERASTTVPAARRSVHSIHAASGERGVRTLRPMDLKDSLSKFKQQQERCQSSLASIAASTSKPKHRAQPAHAPNVPARPSQPIKFSNDTERLQHINSIRKSPVGAQIKLVIELLYKTRQAFTAEQINEATYVDIHGNKAVFDSLRNNPKVSYDGRRFSYKSKHDLKGKDQLLVLIRKFPEGLAVVEVKDAYSNVLEDLQALKAAGEVWLLSNMDSQEDIVYPNDPKAKIKVDDDLKQLFREIELPRDMVDIEKELQKNGFKPMTNTAKRRAAAQINGVKPKAKPKKKQREITKRTKLTNAHLPELFQNLNT

SEQ ID NO: 60014 - protein, 351 aa, Zea mays
  Clone ID: LIB3637-213-E2_FLI.pep
KEMAVPQVDKKMLGELEAMGFPTARSVRALHFSGNSNLESAVNWLLEHESDPDIDRLPLVPREISIECGDTSDEVRNDVEGMRDTVQEQKPKEHTETGRQNETSQLEREPNADGQEEEDRKRILALYKQKRDEEGRARGRIRSQLQEDQRERIRAAKDLMEAKRSLEENQRKRVMESRVADQEEEKRARERIRQRIADDKAERRRRLGLPQDDPRDPAATMTPAKVKPAGRAVVASEQLRDCLRTVKKNHRDDPAAVARAYQVLLKIVGNVAKNPGEEKFRRIRLSNPVFKDRVGSVRGGVEFLELCGFRRLSGIGYLVMPRDKVDVALLTAAGVEIASALENPYFGLLSK

SEQ ID NO: 60015 - protein, 239 aa, Zea mays
  Clone ID: LIB3637-214-D2_FLI.pep
AAARADKEQAEEELLQATMGISRDSMHKRRATGGKQKAWRKKRKYELGRQPANTKLSSNKTVRRVRVRGGNVKWRALRLDTGNYSWGSEAVTRKTRILDVVYNASNNELVRTQTLVKSAIVQVDAAPFKQWYLTHYGVDIGRKKKTPAAKKDNAEGQEVEAAAEETKKSNHVTRKLEKRKEGRTLDPHIEEQFGSGRLLACISSRPGQCGRADGYILEGKELEFYMKKLQRKKGKSAVA

SEQ ID NO: 60016 - protein, 98 aa, Zea mays
  Clone ID: LIB3637-214-F9_FLI.pep
APDTSPRSSHQLKLLGSTYHRTVLLWRHKRKKNCHGQSLFAGFMPMVKRPACLQIHLTLSPLLMCTSDNRIGEGSIQGPSPRRNNRLNRQFAEVKYLR

SEQ ID NO: 60017 - protein, 263 aa, Zea mays
  Clone ID: LIB3637-215-A11_FLI.pep
HFPSPAALFTPTSPSVSRHRRHLHRPPISPRASAPIRGSAAVGSGRPAMAHRVDNEYDYLFKIVLIGDSGVGKSNILSRFTRNEFCLESKSTIGVEFATRTLQIEGKTIKAQIWDTAGQERYRAITSAYYRGAVGALLVYDITKKQTFENIQRWLRELRDHADSNIVIMMVGNKSDLNHLRSVPEEDGQALAEKEGLSFLETSALEALNVEKAFQTVLSDIHQIISKKALAAQEAAGSGPPGQGTTINVADSSANMKGGCCSS

SEQ ID NO: 60018 - protein, 231 aa, Zea mays; identical to SEQ ID NO: 53471
  Clone ID: LIB3637-217-E10_FLI.pep

SEQ ID NO: 60019 - protein, 183 aa, Zea mays
  Clone ID: LIB3637-222-B11_FLI.pep
FCPYEKSIISIEMVQKNINLSNIFNTSRAQSKLPNISLVLLAAEPGKLVGDHDVHLRSTLDNLLALAGGHVVGNLSAVSPVVHQQQLQLGDIVNNKLFELVGKVVPGLLVGAISNVGHQGASLELTPDAGVDTLGPAPAWLKALVAVKMGPLELLDPLLHDLLRQQRHRHLCEPSVMRRCLAR

SEQ ID NO: 60020 - protein, 156 aa, Zea mays
  Clone ID: LIB3637-222-E12_FLI.pep
SSATVTSIFATEPLLANCKNNRTAATTARRGRPSLAAEAIEGAALALERVDDVHGCDGLAARVLGVSDGVADHVLQEDLEDAAALLVDEPGDALHAAPARQPPDRRLRDPLDVIAEHLPVALRAALAQALPALAAPRHLRRGDQRGSGDFRLLLVG

SEQ ID NO: 60021 - protein, 308 aa, Zea mays
  Clone ID: LIB3637-223-A10_FLI.pep
GEPLTLLLFAAKFGRVCIAYHLLVQEQSKSVEQKLLAEISSLVSKHITRQRELVGVRLSSLGDAARGNKAFLDEHTSAMEFVTKDAKRKWETFAEQAENDCKAGSSFSAAKHSRMETMLQECACTVDSAVQQWKKSHAAVNDLSRKQVAEVEALVRTAIENNEQHELEVASSRAVAEEDASNNSKDIAQGVENLLEEARNSSSRVVSTVEAHFGELQMLQESHSSQAAGINMHADKALQTSYKDYEPSGETPVRSEPNVPSKGSIESLRAMPVETMMNEFRENHPYEHESSKESKLSQIPRLPLATIN

SEQ ID NO: 60022 - protein, 231 aa, Zea mays
  Clone ID: LIB3637-226-A10_FLI.pep
GQAMEVAAAASYSYYGLEAADDDVDNLRATELRLGLPGTEAAAAEEEEPRQAQKVAPPPSTPRGKKRDGVSAAPPAAKAQVVGWPPVRSYRKSCFQQQQQAAAASAKGKPAAADEGAPGPAGGGVFVKVSMDGAPYLRKVDLGTCGGYRQLREALEAMFLCFSGPGSGSGDASGGGGGSPSDFAVTYEDKDGDLMLVGDVPFSMFIGTCKRLRIMKGSEARLGLGSAKNND

SEQ ID NO: 60023 - protein, 172 aa, Zea mays
  Clone ID: LIB3637-226-G2_FLI.pep
CPQPKADQTLDLVPVPPILMDSSSSSSSLSQQPEFDYLFKLLLIGDSGVGKSSLLLRFTADSFEDLSPTIGVDFKVKMVTIGGKKLKLAIWDTGEMAGGTSSMATWRPAWLVRGAITRETSVGSILSWLAQLPGIWGGALGLQWRVVRAVAVRCGTARSLVVQHEWMLHFLF

SEQ ID NO: 60024 - protein, 164 aa, Zea mays
  Clone ID: LIB3637-227-B2_FLI.pep
KLGGEHDGAAGGFDLLLGDLGDELGLDDDGLGRQHPLPEHLEVAELRDVDLRGLVADGFRRLFGGHHRPEALDVDRGAVELVAELVEVAHADLTEVAGMVLVEEDAVVVHATGVTATSGMLPVLADAAVPGGHVAALLAVLLEARRHRRRRRTCAAPGSGVVEA

SEQ ID NO: 60025 - protein, 161 aa, Zea mays
  Clone ID: LIB3637-227-D12_FLI.pep
GEASSYLGEYYITASLIYEAMCSSSFLASSSFAAPTTLSLTSPSLMNRNVGMASTLNCSAMVFISSTSTFRKTTFGDFLAISAKIGAMARHGGHHVAVKSITTSFLALLASSIWMLHSSRLWIAITVPSVGATGVAAAAAEAAIYVSRAHATARTEGERTH

SEQ ID NO: 60026 - protein, 195 aa, Zea mays
  Clone ID: LIB3637-228-B5_FLI.pep
AALVRLRLGGLLLAALPLRDGVLHAQKEEQSSDQRQILGELRKEACKFCLLHIVVVEVMDDRSDQSKVQQQEISTERAAQNKKEASKTLKTNCSSNHMLQLNVWHSYSQMSRYIFDKHVEFGPKGLSCWSTISTEFIKLLVGGEEESGDEEHPPDEGHEPHLGNGGEATTGRGRGGASAAAMGTWPVELSRMLGS

SEQ ID NO: 60027 - protein, 243 aa, Zea mays; identical to SEQ ID NO: 58204
  Clone ID: LIB3637-230-H11_FLI.pep

SEQ ID NO: 60028 - protein, 160 aa, Zea mays
  Clone ID: LIB3637-232-A2_FLI.pep
NPTKMKIIFVFALLAIVACNASARFDALSQSYRQYQLQSHLLLQQQVLSPCSEFVRQQHSIVATPFWQPATFQLINNQVMQQQCCQQLRLVAQQSHYQAISSVQAIVQQLQLQQVGVVYFDQTQAQAQALLALNLPSICGIYPNYYIAPRSIPTVGGVWY

SEQ ID NO: 60029 - protein, 401 aa, Zea mays
  Clone ID: LIB3637-232-B12_FLI.pep
GCSPLSSLKIFERGFDPETAKGPPRKCMAVNFLANELSDLCIGKPAVKSLPLSAATGDLAATLRRVTRSGAAACVAVTGPSRAVVGRVGLADVLCFLCTDPEALARPAAVFSKPVSALLPKDGAGEVRRVDPRSSILEALDAVLSGAQVLAVPLRAGGRKKQLVGAADDGDFCWLTQEDLVRYFLNYICLVYNVAARSVSSLGLVRADFLSVRPGEAALSAVPLIRRAVATETAVAVVAEDGHLVGEISPALLAACDETAAAAIATLSAADLMAYIDHYVSPPEHILRAVKAGLKDKGLDALLALVEDETLSSFSSLSASSSSDEEAGRAQLRRPSSGSYGRRAADEPVVCSPASSLVAVLVQALAHRVSYVWVLDEDNDCRLAGIVTFADVLRVFREQLL

SEQ ID NO: 60030 - protein, 137 aa, Zea mays
  Clone ID: LIB3637-232-E8_FLI.pep
GLAVQRACESQAEPLKFLYPLESSIKEKIESIAKFYGASGVEYSEQAEKQIEMYTKQGFSSLPICMAKTQYSFSHVPSMKGAPTGFVLPIRDVRASIGAGFIYPLVGTMSTMPGLPTRPCFYQIDVDTATGKVMGLS

SEQ ID NO: 60031 - protein, 309 aa, Zea mays
  Clone ID: LIB3637-233-B5_FLI.pep
VPSPSSDGDELPRPRPPPPPWRARLRLRLPSPGPPPPNHHHLLGLSLARGSVDRRPGPHPPPPLPWPCSRSAARFPFPSHEGVASSSSSMVDGGGLRRRAGAASRSSPTSRPRRQTAEGEGSGGERGVGGGAGGGRRADEEGGRRRRRQGAAEGARAAVLLQDDERRRRARRRLQVAQVRPEGRQEHAAPKELLPVHAGQLPGEEAGGAARRGPPHGHHHLRGPPRPLPVPRRRRRRRSRQRRDELHLVACRSGSDRRLSFSACNVVYSAASGLSFASHQQQLNILNLAIISIHASKNSLIDRVCMWHV

SEQ ID NO: 60032 - protein, 244 aa, Zea mays; identical to SEQ ID NO: 38206
  Clone ID: LIB3637-234-H9_FLI.pep

SEQ ID NO: 60033 - protein, 332 aa, Zea mays
  Clone ID: LIB3637-235-H5_FLI.pep
GSGKMGERKVLNKYYPPDFDPSKIPRRRQPKNQQIKVRMMLPMSIQCGTCGTYIYKGTKFNSRKEDVVGETYLGIQIFRFYFKCTKCSAEITFKTDPQNSDYTVESGASRNFEPWRAQDEAADKEKIKRDAEEMGDAMKALENRAMDSKQDMDILAALEEMRSMKSRHAGVSVDQMLEILKRSAHEKEEKAIAELDEEDEELIKSITFRNSGFYVKRIEDDDDDDDEDLAPGQSSRTIKINESSESVTKPTDVLSKNNGSEVANKEGSKSWMPKFIVKPKSASADPHKRQKIESTAVQDTGKGQDDEQKSEPAKQTNVLQSLCQNYDSDDSE

SEQ ID NO: 60034 - protein, 295 aa, Zea mays
  Clone ID: LIB3637-239-D10_FLI.pep
RPSRTANVKYHVNYYSHSRGSFICIFQCMELVLISFTLYLGPFTPLTFGCFSAKDCYLLSPAYNIFSFCFVCLNVHLWKQAAANAGGNSAVAVARQPIQLFGATPVATHAATSITTIQSPGLHYLLPSQASSVSGMPADAHGSIGRSTNLVNPSLFSPLTSSQTTMVCTNSVVAIAPPQHPQTAQQPQSAPLLQPFLLPTASPSPPYGTPLLQPFPPPNPSPSLASAPVLSPTLSRDKVRDALLRLVEVYCSVYFISMYDLNALFFFLIMRMCNYFIVGFEYIACSSLFLSLVSS

SEQ ID NO: 60035 - protein, 260 aa, Zea mays
  Clone ID: LIB3637-240-B1_FLI.pep
SFRPSRSRALRAAVGWGGDNTGEWRGAGSRWRGHIMVQCLDGVRQLLAVLLKCCDVELKQPPGLEDPQVLARETVFSVSEVEALYELFKKISSAVIDDGLINKEEFQLALFKTSKKESLFADRVFDLFDTKHNGILGFEEFARALSVFHPNAPLDEKIDFSFRLYDLKQQGYIERQEVKQMVVATLAESGMNLSDEIVESIIDKTFEEADTKHDGRIDKEEWRSLVSRHPSLLKNMTLQYLKDITTTFPSFVFHSQVDDN

SEQ ID NO: 60036 - protein, 409 aa, Zea mays
  Clone ID: LIB3637-240-C12_FLI.pep
SRDGRTHRRAPPMDDAGRPPPHAPVAVTASASASATAAPAPPQPSATAAVDRSSPDPDALYEEGMWQQMAMDSGATMQPGSYPERPGEPDCTYYLRTGLCRFGMSCRFNHPPDRNLAIASARMKGEYPERAGQPECQYYLKTGTCKFGPTCKFHHPREKAGIAGRVQLNTSGYPLRPNEKECAYYLKTGHCKYANTCKFHHPELFNVVPSSRGSPIYTSVHSSASAGPQSYTGTMPSWAFPRASFIPSPRWQSPSNYAPMIVPQGLVQMPSWNSYTGQLQSPGAQQTYGSSQQGEASTGNQGMLSPYRSSSFPVPQYALQRENVFPERPDEPECQYYMKTGDCKFGAVCKFHHPRVRSLPPPDCVLSPMGLPLRPGEELCKFYSRYGICKFGANCKFDHPTVVAPMVYA

SEQ ID NO: 60037 - protein, 136 aa, Zea mays
  Clone ID: LIB3637-240-F9_FLI.pep
VTSDGSFGSTTSLLRFATTFTGRCCSWWNVHLSSAENFSNNPVLVSAQGPRRIQPNPVANVAGVVIVVCHELGGALDVAVVYLVVEEAVHCNHHRLLHLVRHHDPHNRLHLRSPGASDSLSSTTDRIPRAAPLLGG

SEQ ID NO: 60038 - protein, 157 aa, Zea mays
  Clone ID: LIB3637-240-G6_FLI.pep
YSSSPPFPPQHPNPDLQGSAAMPQGDHIELHQKRHGKRLDHDERKRKREAREVHRRSKDARNLIGAKGKRFAKKRYAEKAQMKKTLKMHDESNKRQKVDDDVQEGALPPYLLDRDQTQRAKVLSNTIKQKRKEKAGKWDVPLPKVILKSEHSKPISG

SEQ ID NO: 60039 - protein, 152 aa, Zea mays
  Clone ID: LIB3637-241-G6_FLI.pep
RGRGAEDSRGPEAQKAVADRRKRKKKRQRARMPCLNVSTNVNLEGVDTSAILAEASKSVANIIGKPEAYVMVVLKGSVPMAFGGTQEPAAYGELVSIGGLNPDVNKKLSAGIASILESKLSVPKSRFYLKFYDSKAHPAQENAQCLHALHQE

SEQ ID NO: 60040 - protein, 199 aa, Zea mays
  Clone ID: LIB3637-243-F2_FLI.pep
EYRSSAMSKRQGPPKHQNRYAWKPNLGQKINETEPGGRFRPLSEITGVCQRCRDQIDWKRRYGKYKPIVEPAKCQKCNKRNVRQAYHNVCRDCSKDLGICAKCCTCVNELVGRDANEEESERKSLEEAVRGARERERRTLLRIMNKGKGGESGPSVPKIADRSREGDIFPAASLDEYAEQTREQEEDDSDVEAGDFVED

SEQ ID NO: 60041 - protein, 220 aa, Zea mays
  Clone ID: LIB3637-244-C1_FLI.pep
SAAAMSKLQSESVKEAISQIVGDAKEKNRKFTETVELQIGLKNYDPQKDKRFSGSVKLPHIPRPKMKVCMLGDAQHVEEAEKMGLDYMDVEALKKMNKNKKLVKRLAKKYHAFLASEAIIKQIPRLLGPGLNKAGKFPTLVTHQESLESKVNETKATVKFQLKKVLCMGVAVGNLAMEEKQIQQNIQMSVNFLVSLLKKNWQNVRCLYVKSTMGKPYRVF

SEQ ID NO: 60042 - protein, 172 aa, Zea mays; identical to SEQ ID NO: 41503
  Clone ID: LIB3637-244-E11_FLI.pep

SEQ ID NO: 60043 - protein, 93 aa, Zea mays
  Clone ID: LIB3637-245-B10_FLI.pep
QLSTNFSSSCTVETDALQFQNIFTSSDINPSLNIHQKGSHMCKWENEVKNYYGGRNVPFCFPHKWPTTLDVGNTFKFVELFENTCVTCNICLL

SEQ ID NO: 60044 - protein, 177 aa, Zea mays
  Clone ID: LIB3637-246-A10_FLI.pep
SPKLRNRYIPQHPRSSRPTETPRANQADPSRRSEVVAGAGGRASSKMSWQAYVDDHLLCDIEGQHLSAAAIVGHDGSVWAQSENFPELKPEEVAGMIKDFDEPGTLAPTGLFVGGTKYMVIQGEPGVVIRGKKGTGGITIKKTGMSLIIGIYDEPMTPGQCNMVVERLGDYLIEQGF

SEQ ID NO: 60045 - protein, 85 aa, Zea mays
  Clone ID: LIB3637-247-G7_FLI.pep
MLHHSLSNARITLQLHRDPNVLFAGYKLPHPLQYKIIVRIHTTSQSSPTQAYTQAINDLDKELEYLKQAFEDEKNRYEDRMKQGF

SEQ ID NO: 60046 - protein, 227 aa, Zea mays
  Clone ID: LIB3637-248-D8_FLI.pep
HATIRRGQDREGTCLVTNSHLDAASCGLGELERRHGVVDAGVARGEHGGAADEEVVAAGDPAADLPLDAAVHLDLQRDEARGDVLLHGVGDVGGNGHGLGRQHGGPDGEVAVALVLRRQRHGHRHGLVAVGDEHVQALVEDAHAVVGVAGGQRHLRRRRQRRVAQRDGPAQLQVLQVEGRLRGAQRQVHHQRDEGHDEDQRQEARRHAPAATPQVVLVLVVLVLAHG

SEQ ID NO: 60047 - protein, 132 aa, Zea mays
  Clone ID: LIB3637-249-C1_FLI.pep
TIPSSQEYRLSLAIVQAEHVILGELDGVLLGAGAYGTGDEDEHASLGTRWLAVDGDDLMLAGLERERSELAGNGGRALELLALEGEHGGLLVQPNQRRAVGVERSVVMLHEGLRYRVRVHRHHLAAAGQARS

SEQ ID NO: 60048 - protein, 296 aa, Zea mays
  Clone ID: LIB3637-250-C11_FLI.pep
VFGCSEFLAWFSARPRKGGHFTSVFFFLLPPQTSAPVPYRHSILNLGAEEERTGARSGRRIVADWGRGERRRRRRRPVGMIQLLFLVLFAEGAVALLLMVKVGPLRELAMRGVDQVKTGKGPATVKTLACTLSVILMSSVASILKIQNRGLKLGTVSPMDQVLWRTHLLEASLIGYTLFLAFVIDRLHHYLRKLMTLRKTSSTSREEVEKLQMENRSLREKEEKSSSETKRLQREIARLNEGMKKLKSETEEHERKASVAEAHVDALQKQSEELLLEYDRLLEDNQILQTQLLSRG

SEQ ID NO: 60049 - protein, 137 aa, Zea mays
  Clone ID: LIB3637-250-F8_FLI.pep
IPRFAFALSFYHFLVFFYIACISFLVFPLDEPISLLVVGEETTNMPFCFQTRKFISENVEEQTEQVMKNMGEILKASGASYSSVVKTTIMLADLQDFNKVNEIYGKYFPAPAPARSTYQVAALPLNARIEIECIAAL

SEQ ID NO: 60050 - protein, 280 aa, Zea mays; identical to SEQ ID NO: 46474
  Clone ID: LIB3637-252-E8_FLI.pep

SEQ ID NO: 60051 - protein, 297 aa, Zea mays
  Clone ID: LIB3637-252-G6_FLI.pep
RGDNGWNSEGWNRMVKEFHVRNKYVSFTKSQIQDKEGQLKRDYKMLKAAKQQSGSTWNEKRNMVEGPPALWENLMVTFPKIKKFNNNKATFPLFDALGELYDGHLAEGTWNCTSLEAPQEEEPNEQLQDAEDGPQDFDLNVVHDVDDEVDDALTERNEDMLEGRANTLSRDEESGQRRPAASRNKQEKEPKKPRKTDNIENMMNKYLEMRSKQVEDEAAREKEAREKETREKEAAQSEDFSIKRCISVLNTMEEVTKLEKAKAYSVFTKSKENRETFICACEADQESALIWLRNEMA

SEQ ID NO: 60052 - protein, 202 aa, Zea mays
  Clone ID: LIB3637-254-C10_FLI.pep
GVRKMSGNPVGVDNTSRRKFDKEEYLERARQREKDEARKGKERGPPVQRQPLKHRDYEVDLDSRLGKTQVVTPIAPLNQQAGYYCSVCECVVKDSANYLDHINGKKHQRALGMSMRVERASLEQVQKRFEALKKRKDPSAFTEEDLDERIMKQQQEEEERKRQRKEKKKEKKREQATQHEPEDVDPDIAAMMGFGGFGSSKK

SEQ ID NO: 60053 - protein, 239 aa, Zea mays
  Clone ID: LIB3637-258-F12_FLI.pep
LGKMVVQEFTVDLNKPLVFQVGHLEERYQEWVHQPIVSKEGPRFFGNDVLEFLTRTKWWAVPTIWLPVVCCLLVKSILMGHTVQDVAMMALFGIFIWTLIEYTLHRFLFHIETKTYWWNTAHYLLHGCHHKHPMDSLRLVFPPTATAILCFPFWNLVAFFATPSTTPALFGGGLLGYVMYDCTHYYLHHGQPSKDPAKHLKRYHLNHHFRIQDKGFGITSSLWDAVFGTLPPSMTSGKN

SEQ ID NO: 60054 - protein, 145 aa, Zea mays
  Clone ID: LIB3636-001-D3_FLI.pep
TNGEAARCACSAFRDRRCGAWRGGVRESLRRQGGAKDGAMHLGCRRPAVHADQQLLLRCAHHRAEPQLPVRRHAVRHRQGCRDQAGGRHYHPQALQHGRPPRRLQVRRLHAALADEDVVNETVRVNQCMNECHYAMQLCCVALLE

SEQ ID NO: 60055 - protein, 99 aa, Zea mays
  Clone ID: LIB3636-002-F3_FLI.pep
SPSLNLSNLSETSQSRSHGGGSRCGNGVSTTSNGALARLAIPDAGSLSLDGDLSAESAGVLGVLGNFHLLDLLSQGSTVTGTVFTGNTDLLCSLGHLEG

SEQ ID NO: 60056 - protein, 401 aa, Zea mays
  Clone ID: LIB3635-001-A9_FLI.pep
ERRGRRRTQPNPQSSGCSQLVPSTLPRGSLLRSLLDMALQAATSFLPSALSARKERVSRSADIRAQTAAVSSPSVTPASPSGKKTLRKGTAVITGASSGLGLATAKALAETGKWHVIMACRDFLKASRAAKAAGMDKDSFTVVHLDLASLDSVRQFVRNVRQLEMPIDVVVCNAAVYQPTAKEPSYTADGFEMSVGVNHLGHFLLARELLSDLQSSDYPSKRLIIVGSITGNTNTLAGNVPPKANLGDLRGLAGGLNGVGSSVMIDGGEFDGAKAYKDSKVCNMLTMQEFHRRYHEETGVTFASLYPGCIATTGLFREHIPLFRLLFPPFQKYITKGYVSEEEAGKRLAQVVSDPSLTKSGVYWSWNKNSASFENQLSEEASDADKAKKLWEISEKLVGLA

SEQ ID NO: 60057 - protein, 229 aa, Zea mays
  Clone ID: LIB3634-001-E8_FLI.pep
HGHAGDVAGAVPGPDPGRRRRRVRDGRRWRLRLSLHQGHLQLPQRDAPVRRRADRAHERAARGGQLRRLGRPLLHLRLRHGVRAPEGGPLELHRCGRSHGRVPLYAPGHGGRGPVRAHGRHPAGPHRGRRTHAQPRPRQPAAARRRSQPYSGHGRQPFPGPAAGAAGRGTSGSDDLQRRGWLVRGTVWQEGGGEETQRRRGQVGDLRELRYAQQSDTIVRVQVRKRCDV

SEQ ID NO: 60058 - protein, 672 aa, Zea mays
  Clone ID: LIB3634-002-C6_FLI.pep
ISSYHNPTLFIISRMDLNRTNLWFHGKEHIATASFSQAQPSAINCRNEELSMSAVNLGYIRSSEIAQNSRKSFQHGDQSLTAPDDSCRLALGLGPTPNLYSADSHSFGGNKAYQSATLLSQHCATTDPGLMLGLSRCSSRNLQSTRASGSKNYSPARKTGIILPLIDEGSTSAKRKKGGYLLPLLFVPRSEDLCLNGTSTDTDAQQHIGTECDTESGHNRSLNLHEIQPSADLSITAGCSFAATSDVVADTSDEQRSHQRHPKKCRFNGCSKGARDASGLCISHGGGQRCQKPGCNKGAESRTAFCKAHGGGRRCQELGCTKSAEGKTEFCIAHGGGRRCGIEECPRAARGKSGFCIKHGGGKRCRIEGCTRSAEGHPGLCISHGGGRRCQYPNCDKGAQGSTIFCKSHGGGKRCMFDGCTRGAEGSTSFCKGHGGGKRCLFEGGGMCPKSVHGGTSFCVAHGGGKRCSVPGCTKSARGRSDCCVKHGGGKRCRFDGCDKSAQGSTDFCKAHGGGKRCAWSTGCDKFARGRSGLCAAHTTLMASKVVHHPGHARSMVGPCHFSGGVSGSSAADSNMDHAISSSGHGAWSDCVDSSRDMQSAGRLLIPRQVLVPGSLKDAPSCGLAGNGQDDGGSRNQSCGLVVPEGRVHGGGLMSMLGVGGNLGSNPDGSKA

SEQ ID NO: 60059 - protein, 288 aa, Zea mays; identical to SEQ ID NO: 47549
  Clone ID: LIB3634-002-C7_FLI.pep

SEQ ID NO: 60060 - protein, 280 aa, Zea mays; identical to SEQ ID NO: 46474
  Clone ID: LIB3634-002-F12_FLI.pep

SEQ ID NO: 60061 - protein, 337 aa, Zea mays
  Clone ID: LIB3633-002-A2_FLI.pep
GHCGRAMASVEGKRETVLVTGASGFIGSTLVGLLLDRGYNVHASVLNPDDKAETEHLVALGAGAGEGRLRVFPGDLLDGAALMAAARGCSGVFHLATPCTVYPVSDPQGQMVVPAVEGTLNVLRAAKEARTVRRVVVTSSSSAIIPSPAWPAGEPRDERCWADVDYCKKNEVWYPVSKTLAEKAAWRFAEENGVDVVVVNPVTAMGPMIPPTINCSMIVLLRLLQGCTEEYRDIWMGAVHVHDAAMAHILVFESPAASGRHICAQSISHWSDFAAKVAELYPEYKVPKFPKDTQPGLVRQGAEEGSKKLVALGLHFSPLEKIIRDAVEALKSRGYIS

SEQ ID NO: 60062 - protein, 231 aa, Zea mays; identical to SEQ ID NO: 41034
  Clone ID: LIB3633-002-F10_FLI.pep

SEQ ID NO: 60063 - protein, 192 aa, Zea mays
  Clone ID: LIB3632-001-C11_FLI.pep
QPHGIEPGSRRTALPSAAAPAVSKFVLLRSITRIPDLSVPSSSLPVAVDLAKEQRNMQTVRSAVLQHLRLRAAAPIAARGGGGGFARRMSAPAGQEDSSGSSSELERDIRTRVVNLVKKFDKIDADKVTETADFQKDLSLDSLDRVELVMAFEQEFSVEIPDDKADKLTCCADVAKYIISESQTSDTNAGGS

SEQ ID NO: 60064 - protein, 273 aa, Zea mays
  Clone ID: LIB3632-001-D12_FLI.pep
QAPSASPRLLPAAGAAAIRSGRGRRGEGGGSVSRFDWSSRPRRSRMVRGKTQMKRIENPASRQVTFSKRRNGLLKKAFELSVLCDAEVALVVFSPRGKLYEFASGSAQKTIERYRTYTKDNVSNKTAHQDIEQVKADAEGLAKKLEALEAYKRKLLGERLEECSFEELHSLEVKLEKSLHCIRGRKTQLLEEQLHKLKEKEMNLRKSNEDLREKCKKQPPPPPPMLMAPPPPPAPAAIDHTGPKDVGMDVETELYIGLPGRDYRSNNKDMTAQ

SEQ ID NO: 60065 - protein, 271 aa, Zea mays
  Clone ID: LIB3632-001-H3_FLI.pep
PKGKPHKTSVAPLGPCHPRSYRQFATSFALASRALPPAHRAVRHRTAPMEVAAVPRSAAACRAAPLLPAVRAAACHLALPRRAFSASVAAAPAPRRLAARRAADGDSVETAPEAVPIEKRFPPFPSVMDINQIREILPHRFPFLLVDRVIEYKAGEYAVGIKNVTINDNFFPGHFPERPIMPGVLMVEAMAQVGGLVMLQPEVGGSRDNFFFAGIDKVRFRKPVIAGDTLIMRMTLTKYQKRFGLAKMEGKAYVGGDLVCEGEFLLVSATE

SEQ ID NO: 60066 - protein, 537 aa, Zea mays
  Clone ID: LIB3632-002-B4_FLI.pep
QEVNSSHQLLLVVELIGGAGLLLPLGLLRQRVLLSLLQCLDKRGEARVGVLAGCLGRQVLGDVRRRHVHLPQERRHGVEARVVVHVEVDLGQELEGLDAAVGHLDVLVHAAPPDERRVQLLHVVGGEHDDALTAARGPQPVDEVEHAGERHLAAARLLVLLLLVLLLLLRRSTVLLVLAVLLLLVLLLALASEVERAVDVLDDDDGLAGGLDEELAKVGVGAHGRELDVVHVVVEVVGHGGDHGGLAGPRRPVQEVAALPRLADARVVVLAVAERVQVVHHLLLLVRVHGQRRERLGVLEHHVAPNTVRVPGAVAGDVGEELALAVLDHDGAPLAADVGEVVSQDEVPVALGEEEAVEPAVGARGAAPEVGRRAVLARRRRAGPPRDGGAPELVGDLLVVVHAEQEAVGVLVGLGLEVAHPAAGLPRGALQVRLGLLERVAAAHAPAVVLGDGDGEVRVQDGREAARQAAGVAPEVLLQLEALQRLPQHGPHHGQEAQHDAGVEAAPQRRCRRRLHDGYISVPDGSESLGAGTERML

SEQ ID NO: 60067 - protein, 317 aa, Zea mays
  Clone ID: LIB3632-002-D12_FLI.pep
PSPISDPLVDPKMQIFVKTLTGKTITLEVESSDTIDNVKAKIQDKEGIPPDQQRLIFAGKQLEDGRTLADYNIQKESTLHLVLRLRGGMQIFVKTLTGKTITLEVESSDTIDNVKAKIQDKEGIPPDQQRLIFAGKQLEDGRTLADYNIQKESTLHLVLRLRGGMQIFVKTLTGKTITLEVESSDTIDNVKAKIQDKEGIPPDQQRLIFAGKQLEDGRTLADYNIQKESTLHLVLRLRGGMQIFVKTLTGKTITLEVESSDTIDNVKAKIQDKEGIPPDQQRLIFAGKQLEDGRTLADYNIQKESTLHLVLRLRGGQ

SEQ ID NO: 60068 - protein, 338 aa, Zea mays
  Clone ID: LIB3632-002-H2_FLI.pep
LANSRSPVPAPAPHARPSSSAMAGGFFSMAHPAVTLSGIAGNIISFLVFLAPVATFLQVYRKKSTGGFSSVPYVVALFSSVLWIFYALVKTNSRPLLTINAFGCGVEAAYIVLYLAYAPRRARLRTLAYFFLLDVAAFALVVAVTLFAVREPHRVKFLGSVCLAFSMAVFVAPLSIIVKVVKTKSVEFLPISLSFCLTLSAVAWFCYGLFTKDPFVMLRPDGPLLLVPQAPPGGQEQRRAADDHGRRQRGAGAGAGHRAGAQHGGHPVGEPHPHRGRAQDRGGGAAAQGGRRGRRDPPDGRRKPGRRHAGGHRDRPRRRRGVTQRQSPCTVHTLLASY

SEQ ID NO: 60069 - protein, 714 aa, Zea mays
  Clone ID: LIB3632-003-H7_FLI.pep
PPPLPSDISCLCWELLQHLVSLILRRHPLPARPSRALCMDSKSNHTGAMARPYKPKNILITGAAGFIASHVAIRITKKYPDYKIIVLDKLDYCSNLKNLLPVSSSPNFKFVKGDIASVDLVNFLLVTENIDTIMHFAAQTHVDNSFGNSFEFTKNNIYGTHVLLEACRISGQIKRFIHVSTDEVYGETDEDAVVGNHEASQLLPTNPYAATKAGAEMLVMAYGRSYGLPVITTRGNNVYGPNQFPEKLIPKFILLAMRGEPLPIHGDGVNVRSYLYCEDVAEAFEVILHHGEVGHVYNIGTKRERTVLDVAKDVCRLFNLEPDKVIMFVENRPFNDQRYFLDDEKLKSLGWAERTPWEEGLKKTMEWYVANSDYWGDVSGALLPHPRTLMMPGCEGSEEIKGILSRFNNIQTKVGSTSDNAPEPHAFKFLIYGRTGWIGGLLGKICEKKGIPYEYGNGRLQERSSLVLDIQTIKPTHVFNAAGVTGRPNVDWCESHKPDTIRTNVVGTLNLADVCRKHGLLMMNYATGCIFEYDAHHPEGSGIGFKEEDTPNFTGSFYSKTKAMVEELLKEYENVCTLRVRMPISSDLSNPRNFVTKISRYNKVVNIPNSMTILDELLPISVEMAKRNLRGIYNFTNPGVVSHNEILEMYKQYIDPSFKWTNFTLEEQAKVIVAPRSNNEMDATKLKNEFPELLSIKDSLIKYVFEPNRKVPTD

SEQ ID NO: 60070 - protein, 464 aa, Zea mays
  Clone ID: LIB3632-004-C9_FLI.pep
LTERGSSRTGHSIFRSEGGVRRRGMSTTKVKRRVGKYELGRTIGEGTFAKVRFARDTVTGEAVAIKILDKEKVLKHKMVEQIKREISTMKLIKHPNVVRIYEVMGSKTKIYIVLEFATGGELFDTIVNHGRMREDEARRYFQQLINAVDYCHSRGVYHRDLKPENLLLDSYGNLKVSDFGLSALSQQIKDDGLLHTTCGTPNYVAPEVLEDQGYDGAMADLWSCGVILFVLLAGYLPFEDSNLMTLYKKISNAEFTFPPWTSFPAKRLLTRILDPNPMTRITIPEILEDEWFKKGYKRPEFDEQYDTTLDDVDAVFNDSEEHHVTEKKEEEPVALNAFELISMSAGLNLGNLFDSEQEFKRETRFTSKCPPKEIVRKIEEAAKPLGFDVQKKNYKLRLEKVKAGRKGNLNVATEILQVAPSLHMVEVRKAKGDTLEFHKFYKNLSKTLKDVVWKSDDLQTQHAS

SEQ ID NO: 60071 - protein, 159 aa, Zea mays
  Clone ID: LIB3632-005-C11_FLI.pep
NTADDMLSAASHSSDLGLDSILPHGEVLLTLLFPLGLQRELVLGQTAADGTGLLRAEVEGEQVLLLVRLPQRRLLLLRDHCEHARDRGAHHLDLGELVGCAAGDLGYAEEGELRLQLLELRLQVRLALPPELVHLDTGHSDGDNCCGGAASAVAGWTGL

SEQ ID NO: 60072 - protein, 252 aa, Zea mays
  Clone ID: LIB3632-005-E2_FLI.pep
PDSAVRWLGRDAGLRQRVRRAEQRGVLVAAGAGPVPADREREPDHEEGAPGQRQDLQGRQGDGAGVRVRVHLLHHRRGLRQVPAREAQDHQRRRPALGHDHARLRGLRRAAQALPAQVPRARGREGGHDERLLRPAAAAAQGDDAVVVNAQWRGRARRGIRHVRRRGRGKRYDHDDGAAHVRRLPAGRVVRVVPAPPDGHGRKRWRLWLRRRLVVVAVRARQVGQVVTVAVHACMAMAWLSPAAGFLLGVGN

SEQ ID NO: 60073 - protein, 161 aa, Zea mays
  Clone ID: LIB3632-005-H1_FLI.pep
NAYISGRGSAEILLSATNLCQRKPETWRRARNESSQPAAACFLVRRGHTLVKLGEPHADPHGVLQELLRAPADARLLLLVQVLAPERVHAVREAPLHQRIVHSQAVADLELVDHGGHPHLVLLGEAVQVAEHALVHGRRRRYGSSTWLATTIRTRQGRGTG

SEQ ID NO: 60074 - protein, 379 aa, Zea mays; identical to SEQ ID NO: 57492
  Clone ID: LIB3632-009-B9_FLI.pep

SEQ ID NO: 60075 - protein, 340 aa, Zea mays; identical to SEQ ID NO: 42119
  Clone ID: LIB3632-010-A12_FLI.pep

SEQ ID NO: 60076 - protein, 225 aa, Zea mays; identical to SEQ ID NO: 58890
  Clone ID: LIB3632-010-F4_FLI.pep

SEQ ID NO: 60077 - protein, 272 aa, Zea mays
  Clone ID: LIB3632-010-G7_FLI.pep
EAAPRMADHFALMTGRLLTESTLQSAIQEAFADAVASTAAGYDRTDPSAVPEDVQPGMGVGKGKGKSGVMVECRICQEEGDEAYMETPCCCKGSLKYAHHRCVQRWCNEKGDTICEICLQQFEPNYTAPLFRHGRSLINSRGAGEVRENVGASHGQTSDQADGASSVDSQNLHLKGVVYCRVVAIALMILLVLRDAILLMLRDDEMCSVELITLLLFRTAGIVIPVYIILVSVTALLHWCNQRRIFRIQVVHETTVSEPRGAGGLQHIINIR

SEQ ID NO: 60078 - protein, 296 aa, Zea mays
  Clone ID: LIB3632-011-G4_FLI.pep
AAAGPEVRAGRTPAWRPSPGWRSGASIPSAPAPTAGRTPLSSASGTGTCRWRRAAPSLCASSRSPAGWPRSSPLSRASCSASPGPARRDAPASPLATESSSVWPNEGMVQKIASKSALGCLSHMLADSIHADVTINTTDGVLKAHKAVLAACSPVFKSMFVHDLREKESSTVDIGDMCVESCSALLGFVYGTIEQGQFWKHRLPLLAAADKYGIGDIKDCCEESLLEDIGSGNVLERLHVAWLYRLERLKKGCLTYLFVFGKIYDVRDEMHGFFHHADRELMHDMFQEVLSVWKPM

SEQ ID NO: 60079 - protein, 270 aa, Zea mays
  Clone ID: LIB3632-013-B2_FLI.pep
QQLLLALGGRRERERERERDLVERLVGGPRTKMLAVFSGQVVEVPAELVAAGSRTPSPKTKASQLVGRFLAASEPAVSVQLGDHGHLAYSHTNQALLRPRSFAAKDEVFCLFEGVLDNLGRLSQQHGLSSKGANEVLLVIEAYKTLRDRAPYPASFMLAQLTGSYAFVLFDKSTNSLLVASDPEGRVPLFWGITADGCVAFSDDIDMLKGSCGKSLAPFPQGCFYSNALGGLKCYENPKHKVTAVPADEEEICGATFKVVEGSTVLTALH

SEQ ID NO: 60080 - protein, 241 aa, Zea mays
  Clone ID: LIB3632-014-C9_FLI.pep
CTPMSDMLNNSFMLDHTRSVICPLSRQMIPARIILRKATYTCTCTIILCHWRFILVLVQLINPPAAEPTPQSLPPIKQAASSVGSIGAAGPCGHLPALWRRRRRRGRRVEAAAEQPRHGRHEVVLRGRPPGARRARERDVAVERLGRGDGPLAPDLVAHRLGAEAADPAAQVLGAHSRDVRRRALLREPAALALGRLHLHAFPLSVPFSFPCSSSSSRQVADDDDDVVKLQPPYRSFSQTA

SEQ ID NO: 60081 - protein, 184 aa, Zea mays
  Clone ID: LIB3632-015-B4_FLI.pep
TKQQVAAAAAALVPWWWTGIGTRTCVVLLHSLSSPVRFRPFGTGSLFQTLVLFLVILYSSASCSYRWLVPLRWRSWIWMQRAPVSFSPPGTWQIRVMLAERSTPRARRRRLQARSGFIACRRPLVLPCHGSFVYLSDRHVMCSARTSAATLRDARTSFQQDDSSRGLGFLFLDSGTAVWSSGGK

SEQ ID NO: 60082 - protein, 442 aa, Zea mays
  Clone ID: LIB3632-015-C8_FLI.pep
NTEKMAEKENILMQRYEMGKLLGKGSFAKVYHARNVKTSESVAIKVIDKDKIKKCGLMDQIIQEISVMKLVKHPNIVQLYEVMATKTKIYFVIEYVKGGELFKKVQRGRLKEDVARTYFQQLISAVDFCHTRQVYHRDLKPENLLLDGSHNLKISDFGLSALPNCKRKDGLLHTICGTPAYVAPEVISQKGYDGAKADIWACGVILYVLLAGYLPFQDKNMMDMYKKICKAELKWPSWFSSDVRKLLRRILHPNPNRRISIEEIRTHPWFRIGLDARLFDSTTRDHVPSDMDLALNSLNSNMVECNSAAEKLTILNAFDIISLSNGFDLSGIFENSNKESKFMSTNTAMTIITKLMEVAKSLDLKVITKTGGLLNMEAAKSGIKGVMSINAEIFQITPNYHLVEIKKINGDILEYHNFMNQSMRPALEDIVWAWHGEQPDEK

SEQ ID NO: 60083 - protein, 455 aa, Zea mays; identical to SEQ ID NO: 40951
  Clone ID: LIB3632-015-C9_FLI.pep

SEQ ID NO: 60084 - protein, 94 aa, Zea mays
  Clone ID: LIB3632-015-E6_FLI.pep
FAPPPPPLRRLRRSDAVAQDLPDQEEAGEEDAPEPPHPLLDPHAHGQHHQVQRQAQALAPHQARLLSARIGRLLRRNSRVSTFPLVLSMSLVFL

SEQ ID NO: 60085 - protein, 374 aa, Zea mays
  Clone ID: LIB3632-015-F4_FLI.pep
PGPGARVLCLCLCSTSPAPAPQVHVHHSALTLLARSLVHAPASRREGTVGGKRTDMMHAKSESDVTSLAASSPPRSPKRGGGGAGNGGYYVQSPSRESHDGGYKSSSMQPTPVYNSPNESPSHPSYGRHSRSSSVSRFSGNLRKGAAGDRKVLNDKGWPECNVIEEEGPYEDLAGDSGLSRRCQIILGFLTFVLLFTVFCLIIWGAARPYEPEVIVKSLVMDDFYAGEGTDHSGVPTKLVTTNCSLHIAVYNPATMFGIHVTSGPIHLMYSEIPIAVGQVRRYYQPRKSHRMVTAVIHGEKVPLYGAGGSLMLSTSTGGAVPLTLDLDLTSRGYVIGKLVRVTHKVHVTCPVVVDAKKTKPVRFSKKACAVYRA

SEQ ID NO: 60086 - protein, 179 aa, Zea mays
  Clone ID: LIB3632-016-G10_FLI.pep
LASLSYSRRRRCCKRQLAVVRIVHSNAAMGRMHSRGKGISSSALPYKRTPPTWLKTAASDVEEMITKAAKKGQMPSQIGVLLRDQHGIPLVKSVTGSKILRILKAHGLAPEIPEDLYFLIKKAVAIRKHLERNRKDKDSKFRLILVESRIHRLARYYKRTKKLPPTWKYESTTASTLVA

SEQ ID NO: 60087 - protein, 339 aa, Zea mays
  Clone ID: LIB3632-017-G3_FLI.pep
GSHSRRSFAAAHNAIATVVARQSTDSTATGRTRTHRAASERESVRRRRLCRAGGRHGEVPVLRAGAHQQGRVDQGGGPAPHRLHQGPRRGLLEVATKSRRAAAVREELPAAVDQLPAPGPQARQLQRGGGRADHQVPRAVRQQVVAHRREAAGQDGQRDKKLLEHAHQAEAARPRHGPADPPPAGRSASRRAAAAALPLPDGATEAGGGGGPFRGRRCHQLAGGQQPQQRRRRGAGAGATAAAAAAPPRHRPEPVHQPRGLPAAGGNRQRHRATDGDDEAGGGNGGGGVPLPQQPRVPGRRRVRLWQRRLAVVPFAVGSGFFTGGALLQRLALISETVT

SEQ ID NO: 60088 - protein, 632 aa, Zea mays
  Clone ID: LIB3632-018-A12_FLI.pep
LISLRPKSLPCRVSTLHLSPQGRRLLPPLSSASTSVGEMVKRSKKSKSKRVTLRQKHKVQRKVKEHHRKKRKEAKKAGKAGQRRKVEKDPGIPNEWPFKEQELKALEARRAQALQELELKKQARKERAQKRKAGLLEDEDIASLASAASAQGSEFAAKENAPLLVAKINDHSERSFYKELVKVIEASDVIMEVLDARDPLGTRCIDMEKMVRKADPSKRIVLLLNKIDLVPKEAVEKWLTYLREELPTVAFKCNTQEQRTKLGWKSSKLDKTSNIPQSSDCLVAENLIKLLKNYSRSHELKLAITVGIVGLPNVGKSSLINSLKRSRVVNVGSTPGITRSMQEVQLDKKVKLLDCPGVVMLKSSNSGVSVALRNCKRVEKIEDPVAPVKEILSICPHEKLLSLYKVPNFGSVDDFLQKVATVRGKLKKGGVVDVEAAARIVLHDWNEGKIPYFTLPPKRDAGEDSDAVIISEDGKEFNIDEIYKAESSYIGGLKSIEEFHHIEIPPNAPLAIDEEMLEDGGKKPSEAIQESRDREEQMPDVKDSGGSKAASASTQNDKLYTADAILDPHKRKAEKKRRKASRPSALNDMDADYDFKVDYRMEDGGSEGAHADDEDGGDGSEDNEPMTGVDDA

SEQ ID NO: 60089 - protein, 260 aa, Zea mays
  Clone ID: LIB3632-019-B11_FLI.pep
EAEVQPAASPSAPIMADYEQEQDMEVEALQAILMDDIKEIDPSESGIATTARCFQILLSPQDDDFDESAYVPVQLALIFAHTEKYPDEPPLLNVKSVRGIKPHDLASLKEKLEQEAKENLGMAMVYTLVSSAKEWLSEIYGQNGGDEEPEETEAEEEVIIPHGEAVTVESFLAWRDRFEAELALQRAKLMPDSALTSSKEKKLTGRQYFESGRHAVKGASTVADEDEEEEEDIEFDDDFEDDEEDMLEHYLAQQSENSAA

SEQ ID NO: 60090 - protein, 177 aa, Zea mays
  Clone ID: LIB3632-019-E10_FLI.pep
TIPIGLKQFRLQALLYEVVAEPLDHHVALPGGHGLVVDADHQRLPGLLHGYASRSLLPADDGAGLALDDHVLGGAEEEAGRSQEPGLVEVLHDVGHLLRLEQRECGALGPDGAVVADDGGGGEVVVALDLAHEVLVDVGLPRHPFRPCCCSAATCKRRKRRRMTGGGSSIDLTGGRS

SEQ ID NO: 60091 - protein, 341 aa, Zea mays
  Clone ID: LIB3632-020-A9_FLI.pep
QRLIFAGKQLEDGRTLADYNIQKESTLHLVLRLRGGMQIFVKTLTGKTITLEVESSDTIDNVKAKIQDKEGIPPDQQRLIFAGKQLEDGRTLADYNIQKESTLHLVLRLRGGMQIFVKTLTGKTITLEVESSDTIDNVKAKIQDKEGIPPDQQRLIFAGKQLEDGRTLADYNIQKESTLHLVLRLRGGMQIFVKTLTGKTITLEVESSDTIDNVKAKIQDKEGIPPDQQRLIFAGKQLEDGRTLADYNIQKESTLHLVLRLRGGMQIFVKTLTGKTITLEVESSDTIDNVKAKIQDKEGIPPDQQRLIFAGKQLEDGRTLADYNIQKESTLHLVLRLRGGQ

SEQ ID NO: 60092 - protein, 405 aa, Zea mays
  Clone ID: LIB3632-020-F10_FLI.pep
HTTPPELQVSLLVATTGRDRRRRLSSVEMADGEDIQPLVCDNGTGMVKAGFAGDDAPRAVFPSIVGRPRHTGVMVGMGQKDAYVGDEAQSKRGILTLKYPIEHGIVSNWDDMEKIWHHTFYNELRVAPEEHPVLLTEAPLNPKANREKMTQIMFETFNVPAMYVAIQAVLSLYASGRTTGIVLDSGDGVSHTVPIYEGYALPHAILRLDLAGRDLTDSLMKILTERGYSFTTSAEREIVRDIKEKLAYIALDYEQELETAKNSSSVEKSYELPDGQVITIGAERFRCPEVLFQPSMIGMEAAGIHETTYNSIMKCDVDIRKDLYGNIVLSGGSTMFPGIADRMSKEITSLAPSSMKIKVVAPPERKYSVWIGGSILASLSTFQQMWISKEEYDESGPAIVHRKCF

SEQ ID NO: 60093 - protein, 253 aa, Zea mays
  Clone ID: LIB3632-020-G5_FLI.pep
QTEEATPGLCSADTRKMSSLHATRAELGLVVLYLNKAEARDKICRAIQYGSKFVSNGQPGTAQEVDRSTTLARKVFRLLKWVNDLHALISPPAKGTPLTLVLLGKSKNALLSTFLFLDQFVWLGRTGIVKNKEATDRVARLSLYCWMASSACAGLVELGELKRLSRSMRKLARELRDTDKYENEQYQDKMRQSDERLLALVKAAMDVVVAVGLLQLAPKKVTPRVTGAFGFVTSLISCYQQLPSRAPVAKVKV

SEQ ID NO: 60094 - protein, 664 aa, Zea mays
  Clone ID: LIB3632-025-F3_FLI.pep
VDHLAAERATARFDVEEMKVAWAGSRHAVHVADRMARLVASDPVFRKDNRTMLSRKELFKDTLRKAAHAWKRIVELRLTEEEADLLRQYVDQPGYVDLHWGMFVPAIKGQGTEEQQHKWLPLAYKFQIIGCYAQTELGHGSNVQGLETTATFDPKTDEFVIHSPTLTSSKWWPGGLGKASTHAVVYARLITEGKDYGIHGFIVQLRSLEDHSPLPGVTLGDIGGKFGSGAYNSMDNGVLRFDHVRIPRDQMLMRLSQVTREGKYVHSNVPKQLLYGTMVYVRQSIVADASKALSRAVCIAVRYSAVRKQFGSQDGGPETQVLNYKTQQSRLFPLLASAYAFRFVGDWLNWLYTDVTQKLEAKDFSTLQEAHACTAGLKAVTTSVTADAIEECRKLCGGHGYLNSSGLPELFAVYVPACTYEGDNVVLLLQVARILMKTVSQLASGKQPVGTMAYMGKVQYLMQCKSAVSSAEDWLNPDAIQEAFEARALRMAVNCAQNISQAASQEEAAGFYERSPDLLEAAVAHIQLIIVTKFIEKVHQEIPGHGVKEQLQALCNVYALYILHKHLGDFLATGCITPRQGALANEQLGKLYAQVRPNAVALVDAFNYTDHYLGSVLGRYDGDVYPALYEEAWKDPLNETVVPEGYHEYLRPLIKQQQLKLSRL

SEQ ID NO: 60095 - protein, 209 aa, Zea mays
  Clone ID: LIB3632-025-G1_FLI.pep
RNASTRPAACHSCHGDHSHDGAAEARRQGRGAVGAVHQQRQRLAARPDGAGRQEGCAVRVRVVHAGGRLPRGAGVVARRCAGGRGGGGRRRRQPRPAAARRGGARHRVGAVQHPAAGAEPAEPHAQQPGRGRRPGPRRRRRRRDGGPARSLRRRGAGPRGNRRRRARRRQPRPPPAHRRRARHRLGALQHPPAGAQPAQPHAVRLKLAS

SEQ ID NO: 60096 - protein, 622 aa, Zea mays
  Clone ID: LIB3632-026-F12_FLI.pep
LATMATNPGLFSEWPWKKLGNFKYLLLAPWVAHGGYLAATKGWRAADLGYVAILPSLLLRALHNQAWITASRLQSARGRRQVVDRGIEFEQVDRERNWDDQILLSGILLYLGSTYLPGGQHLPLWRADGAALIALLHAGPVELVYYWLHRALHHHFLYSRYHSHHHASIVTEPITSVIHPFAELVAYELLFSIPLIVCTLNGTASIIAFEIYVIYIDFMNNMGHCNFELVPNWLFKWFPPLKYLMYTPSFHSLHHTQFRTNYSLFMPFYDYIYNTMDKSSDTLYEKSLKGKEETADVVHLTHLTSLHSIYHMRPGFAEYASRPYTAKWYVRMMWPMSWLSMVLTWSYGSSFTVERNVMKKLKMQSWVIPRYSFHYGLSWEKEAINSLVEKAICEADKKGAKVVTLGLLNQAHNLNRNGELYLQKCPKLGVRLVDGTSLAAAVVVNSVPQGTDQVVLAGNISKVARAVAAALCRKNIKVVMTNKQDYHFLKPNMAEDAAENLLFSKTTTAKVWLIGDGLDASEQFKAQKGTQFIPYSQFPPRMARKDTCTYSTTPAMVVPKTLQNVHSCENWLPRRVMSAWRIAGMVHALEGWNEHECGDIVLDMEKMWSGALLHGFRPVAQV

SEQ ID NO: 60097 - protein, 227 aa, Zea mays
  Clone ID: LIB3632-026-H5_FLI.pep
HTRHNPTHPAGRPSSSAEAMVSLKPQKRLAAGVLKCGKGKVWLDPNEVYEISMANSRQNIRKLVKDGFIIKKPQKIHSRSRARRAHEAKQKGRHSGYGKRRGTREARLPTKILWMRRMRVLRRLLRKYREAKKIDKHMYHDMYMKVKGNMFKNKRVLMESIHKSKAEKAREKTLSDQFEAKRAKSKASRERKIARREERLAQGPREPAAAPVSATAPFAAAPKKAKK

SEQ ID NO: 60098 - protein, 205 aa, Zea mays
  Clone ID: LIB3632-027-C4_FLI.pep
NPTIAPRPRGKDGERPGEKKKKEKSGEEETQRPGPERETRTHVGKVMYQAIPYSSARAWLMPAAAAEAGVAAVKPEPVATVAEPAAEEERARPDAAAGDDDDGGRAEVGRAVAERPVLVVGRRGCCLSHVVKRLLQGLGVNPAVHEVADESALAGLVPAGAGAAAGALPAVFVGGRLLGGLDRLMAVHISGELVPILKKAGALWL

SEQ ID NO: 60099 - protein, 172 aa, Zea mays; identical to SEQ ID NO: 36903
  Clone ID: LIB3632-028-E2_FLI.pep

SEQ ID NO: 60100 - protein, 252 aa, Zea mays
  Clone ID: LIB3632-031-B7_FLI.pep
PHAIRSSRRPRHRRIPPPKKSSGHTKSACALRSAWNRWVELRRGSRTSAMASVGRAGRGGKGDGGKGEGSLARRAWRQYLLQLQQHPLRTKMITAGCLAGVSDSVAQKLSGFQKIEKRRLLLKMLFGFAYGGPFGHFLHKILDYIFQGKKDTKTIAKKVLLEQVTSSPWNNILFLFYYGYVVERRPLKEVTTRVKKQYPSVQLSAWMFWPIVGWINHQYMPLQFRVIFHSFVACCWGIFLNLRARAMSLKQA

SEQ ID NO: 60101 - protein, 628 aa, Zea mays
  Clone ID: LIB3632-031-B8_FLI.pep
VSLLLDREPHSLGVRVVARALKLESQQRNYTRFGTSEKGMSATIDRLATPSHEGRAHSDEKRECNSDEENSEGERKPKKDSFKKRAVTTGYRFRHSLRRKSKTKNDNHIASIEDIRDVQELEIVERFRQCLLDDGLLPEHHDDYHTMLRFLKARKFNIDKAKHMWSEMLRWRKEFGADNIEEFDYTELDEVVKYYPQFYHGVDKDGRPVYIELIGKVDTNKLVQITTIDRYLKYHVKEFERCLQMRFPACSIAAKRHIDSSTTILDVKGVSLKNFTKDARELIMRLQKINNDNYPETLYQLYIINAGQGFKILWGTIKSFLDPETASKIHVLGNKYQTKLLEIIDGSELPEFLGGKCRCEEYGGCPKSDKGPWKDPEIFKRVINGEANYGRQVLAVSSINQKEVGCTEHTTVEDVSSSTALVDPIISPNLTHVDELKFQGHASSSDAPPIIGDSIPAAGKVMDACSNPRNSSTPSSSGSFSLRNIPATLGGLKTRIVAWSTFVILTLSAFLCSVLSIVTKRLSNQAITCDHYSADFHQGYMGNGTLTSVLTRLGELEEKVQALEAKPPQVPFEKEELLHTAVYRVDVLEAELISMKKALYETLIRQDELLAYIDQQQTAKFCRQKFCF

SEQ ID NO: 60102 - protein, 328 aa, Zea mays
  Clone ID: LIB3632-031-C7_FLI.pep
VSSVPLLPAPSRSARRPELSVLFRAAMNSAFSEDILAGKLAKLNNTQQCIETLSHWCIYHRKNAEQIVQTWDKQFHSFGKEQKIPFLYLANDILQNSKRNGTEFVEEFWKVLPGALKDVSENGDDRGKKVASRLVDIWQERRVFGSRAGGIKDVMLGAAPLPVLDMTKKRSRSSAIRIVKRDSRSVKLRLGIGGTAERIISALHTVLSEQADEDDDLEKCKTSMRHVGKMEKDVDSACSKAEDPRREVLCTELKDEEANMKKCIEKLKAVEKNRAAIVFELKEALQEQESELEKVRTQLQLKQWYMKPRTCSGDSRMSQPFRCPDQHR

SEQ ID NO: 60103 - protein, 295 aa, Zea mays
  Clone ID: LIB3632-031-G9_FLI.pep
TLSSVPSPFVPRTKPNTLHKKRSVWTLDRENYIDFYSAASLLRSMHDKRRMGTEADAAAVDLLRSQIPFQTDGEFVLPPRGVGLVLVDLCNGFCTVGAGNLAPVAPNKQISKMVEEAARLSKLFCDRNLPIFAFLDTHYPDKPEPPYPPHCIIGTGEEDFVPDLEWLEKEPNVTIKRKSCIDGYISCIEKDGSSVFADWIGKYQIKTVLVLGICTDICVLDFASSTLAARNIDRVPPLQDVVIYSGGCATYDLPVEIATNIKGALAHPQDLMHHIGLYMAKGRGAKIVDRVVIEP

SEQ ID NO: 60104 - protein, 402 aa, Zea mays
  Clone ID: LIB3632-032-H2_FLI.pep
PMGCASSKANADVAVADVYCPPPTSVSLFDINAVEEPWLIAKQNKAADDDDDDDEEEEEETTDDDDEDHDDEKQPAAKTVVPLPLLDKLEGYELAPASWSEVSKALEDMKPVLDSKSPPAPAPAPKKKKTKKKKKKKTKTKQQQQPMQPVVPAATDDGDAAAGSKKAPATSSVDDLPDSSRPAPPELAGRRVVKDNPFLTRDRESNKGAGADGGPRWKRRDPFEGCPERRPPGAAGGGVVLYTTTLRGVRRTFEDCERAREAVEACAAAAGVEAVDERDVSLHGEYLRELRELLPGDGGAAPPPRLFVMGRYVGGAEECARLAESGTLREMMRWVKARGEACAAKDGRGCEGCGGARFVPCWECGGSCRVLVAPPDGGTPTTTTERCAKCNENGLMMCPICH

SEQ ID NO: 60105 - protein, 312 aa, Zea mays
  Clone ID: LIB3632-033-E12_FLI.pep
GSSSKTSRPTRNMGLALEVLHQRGLIDHGPSACVHKNSLLLHDGQPLGVYQMVGGLVQHRMQTYHVSLPEDILHGGGPLPGDRLLTVCFEELPICCDEILKTCGLIQVVVDEVHLETLNHHACIGGANATSSNDSNSLALEQVANEQVWEPSVIEASPHELVSLDDPPGCRQREGGGELSRRLRQNARRVADCDAIPVGSLDIDVVVADGHVAEDRASGALERREEHVPPVLGELSNDAVAAIADERQDVVHGEDGLVLGAYLKAAVVVGEQADPSCARHGLGAHHAVLAAGVPHLDGDGLRHGCTCREVLS

SEQ ID NO: 60106 - protein, 364 aa, Zea mays
  Clone ID: LIB3632-034-D2_FLI.pep
LPTSGARGMARRTSGPKKKLRRGLWSPEEDDKLVNHIAKYGHGCWSSVPKLAGLERCGKSCRLRWINYLRPDLKRGAFSQEEEDLIIHLHSMMGNKWSQIASQLPGRTDNEVKNFWNSYVKKKLRQRGIDPATHKPLPLAAEGISSRTAVFSDAELILSSPAAAAGRHMPPPPVAASAAESYVYSYSHSSGGASDGSLQSLSGYNSNSKQTAADHLGAAAAAGYLQQEQDPAAAAAAADALHCGPSGAPAVVLPSVSSSSTLNSMAGLSPAATTTDEQCTNNCSSCSFHSGLEPWLELGSTSGYYGASAAVDHYGAALDELKWSDYVFDGGYGGQPGQGIYGDSKDAVQFVDANALSSSSWCLN

SEQ ID NO: 60107 - protein, 416 aa, Zea mays
  Clone ID: LIB3632-035-G5_FLI.pep
VPAVRKRRASAAPMAKPPNSIGRSSSMPRSNEGLRLIFSAVIGIMLGYLFGISFPTVNITKLHFPSSIISYIEDRNSGITTQTLLNHAWASANNRKKNSSESNTDEIPKIYVPTNPKGAERLPPGIVVSETDLYPRRLWGDPSEDLTSEPRYLVTFTVGIGQKANIDAAVKKFSDKFTIMLFHYDGRTTEWDEFEWSKRAIHVSVRKQTKWWYAKRFLHPDVVARYDYIFIWDEDLGVEHFNAEKYIELVRKHGLEISQPGLQPDKGLTWQMTKRRGDQEVHKVTEERPGWCTDPHLPPCAAFVEIMATVFSRNAWRCVWHMIQNDLVHGWGLDFALRKCVEPAHEKIGVVDAQWIVHQAVPSLGNQGKSDNGRAPWEGVRARCRKEWGIFQTRLADAEKAYYLERGITPPNSTVV

SEQ ID NO: 60108 - protein, 531 aa, Zea mays
  Clone ID: LIB3632-036-D8_FLI.pep
GARTRDFLRRGLLSLLSSETRKPRPPPLPPPCAMAEKSPAADVEAGLLAHLNSAGEVPDSRSFASSLGVSHLELEGVIKSLSAFRIVDSTDIIKETWVLTEEAKGYAAKGSPEAQLVAAISPEGASKDALKAILGDAFDVGMKAAARNKWIGFEKGNKDLVLRKVESVKDELQEQLRRLENGEVVSDKVIDDLKRRKLITKEKSIWYSLKKGSEFVVKRKTLATDVTTEHLRSGDWKDLEFKDYNYGAQGQPIAKGYVQPLMEVREAIENIFIMMGFTEMPTNNFVESSFWNFDALFQPQQHPARDSHDTFFLKAPATTKQLPDDYLEKVKQVHQSGGYGSKGYGYDWKRDEAEKNLLRTHTTAVSTRMLYKLAQEKPFTPKRYYSIDRVFRNEAVDRTHLAEFHQIEGLICDYGLTLGDLIGVLEDFFSSLGMSKLRFKPAYNPYTEPSMEIFSYHDGLKKWVEVGNSGMFRPEMLLPMGLPEGVNVIAWGLSLERPTMILYGIDNIRDLFGPKVDFNLIKSNPLCRLGL

SEQ ID NO: 60109 - protein, 452 aa, Zea mays
  Clone ID: LIB3632-038-E12_FLI.pep
LRSRRQLPRRPSLKNRARHARYLLFFSPPPRVPPPPSLPRRVPGTGSPSPLVRSPSAGAREAPISSHPMGAVASTVAARFAFFPPTPPSYGVEPPPSPAAAAADTEVVELSGVPVSRGRGVEARRLPTKRGTEVVSMYVRQPGARLTLLYSHGNAADLGQMYELFVELSAHLNVNLMGYDYSGYGQSSGKPSEQNTYADIEAVYRCLLESYGASEENIILYGQSVGSGPTLDLASRLPHLRAVVLHSPISSGLRVMYPVKHTYWFDIYKNIDKIPLVRCPVLVIHGTADEVVDCSHGRALWELSKVKYEPLWIKGGNHCNLELYPEYIKHLKKFVTAIEKSQPVKDESPESSGPSDPSEIGSESAENSRRSTDVRDKPRSSIDHRPSIDRREKPRGSIDKRDKNRKSIDQLDKPRASVDQPDRARKSIDRFGGMMRSVKLCNIDCFTSASGS

SEQ ID NO: 60110 - protein, 469 aa, Zea mays
  Clone ID: LIB3632-039-A10_FLI.pep
RRLPSAPPFRPLSLASLISPPTMGKEKSHINIVVIGHVDSGKSTTTGHLIYKLGGIDKRVIERFEKEAAEMNKRSFKYAWVLDKLKAERERGITIDIALWKFETTKYYCTVIDAPGHRDFIKNMITGTSQADCAVLIIDSTTGGFEAGISKDGQTREHALLAFTLGVKQMICCCNKMDATTPKYSKARYEEIVKEVSSYLKKVGYNPDKIAFVPISGFEGDNMIERSTNLDWYKGPTLLEALDQITEPKRPSDKPLRLPLQDVYKIGGIGTVPVGRVETGVIKPGMVVTFGPTGLTTEVKSVEMHHEALQEALPGDNVGFNVKNVAVKDLKRGFVASNSKDDPAKEAASFTSQVIIMNHPGQIGNGYAPVLDCHTSHIAVKFAELITKIDRRSGKELEKEPKFLKNGDAGMVKMIPTKPMVVETFSAYPPLGRFAVRDMRQTVAVGVIKSVEKKDPTGAKVTKAAAKKK

SEQ ID NO: 60111 - protein, 262 aa, Zea mays
  Clone ID: LIB3632-039-E8_FLI.pep
QSVPNTGGGGQIGGGGDGGGGGGGGYVNAGVEVEDKACPCGVGSCLVLTSNTPKNPGRKFYKCPMRDGGCNFFEWCDAPSPAPANARNNMVVHSETSATDMLCPCSAGTCLILTTKTGKNVGRQFFCCPLNQGGGGGSCGFFKWCDELQPRVGAPLQASAQYQADSMPSIQNPSQRSSSSCFKCGQENHWARDCPNQPSDPYPDKGGRPVAPAGSPGACYNCGRSGHWSRDCPTSNSGGGGGTGTSRARSSSALSSWNSQRY

SEQ ID NO: 60112 - protein, 608 aa, Zea mays; identical to SEQ ID NO: 59912
  Clone ID: LIB3632-040-B4_FLI.pep

SEQ ID NO: 60113 - protein, 452 aa, Zea mays
  Clone ID: LIB3632-040-F10_FLI.pep
ASPPAMGKEKSHINIVVIGHVDSGKSTTTGHLIYKLGGIDKRVIERFEKEAAEMNKRSFKYAWVLDKLKAERERGITIDIALWKFETTKYYCTVIDAPGHRDFIKNMITGTSQADCAVLIIDSTTGGFEAGISKDGQTREHALLAFTLGVKQMICCCNKMDATTPKYSKARYDEIVKEVSSYLKKVGYNPDKIAFVPISGFEGDNMIERSTNLDWYKGPTLLEALDQITEPKRPSDKPLRLPLQDVYKIGGIGTVPVGRVETGVIKPGMVVTFGPTGLTTEVKSVEMHHEALQEALPGDNVGFNVKNVAVKDLKRGYVASNSKDDPAKEAASFTSQVIIMNHPGQIGNGYAPVLDCHTSHIAVKFAELITKIDRRSGKELEKEPKFLKNGDAGMVKMIPTKPMVVETFSQYPPLGRFAVRDMRQTVAVGVIKSVEKKDPTGAKVTKAAIKKK

SEQ ID NO: 60114 - protein, 511 aa, Zea mays
  Clone ID: LIB3632-041-D4_FLI.pep
HLHLHLPRSPTARPAAATCRNARCIGVTLCLRMPTTPEERRQKRGLAQFLDLSAAPTLTPPAPTPVHLTPAAKRRGALREMRRVWWVCGVGYWVQGFRCFPWLALNFHLTRGMGLSPAGLQLLQNAGSLPLVAKPLFGVLSDAVYIGRAHRIPYISLGVWLQLIAWGVLATIPVTGDAFPTLMACILIGNLGASVTEVVSDAVVTEFSRTQKAGVLQSYAFVALAAGSLLGNLSGGYILLKTQEPKIMFTAFSVLLGFQLALSLSTKETLPSSRGNSRNRLVKSSLAANFRKQFSNLMTAIREERILYPLAWIMTSFAVVPVLSGTMFCFQTQYLNLDPSVIGLSKVVGQVMVLSLTVLYNRYLKRIPLRCLTTGLQILYALAVLSDLILVKQVNLVLGIPNEIHVLCFSALAEALAQFKVLPFSVLLSSLCPPGCEGSLFAFFTSGLVLSAILSGVFGVGLSTLIGVSSVDYSSLPLGILLQSLAALLPLGWISFVPEKWTADDTVVIKR

SEQ ID NO: 60115 - protein, 237 aa, Zea mays
  Clone ID: LIB3632-042-C10_FLI.pep
LPRRVVHLHQHQHGDQPSPNPTSRTRSSAPSPGPSMEVAAASARPVLRVAAICGSLRKASFNRGLLRAAAEVCEDSIPGLRIDELDISDLPIINTDLETGSGSGTVFPPAVEAFRAKVCQADCFLFGAPEYNYSIATPLKNALDWASRGKNCWADKAAAIVSAGGGFGGGRSQYHLRQVGVFLDLHFINKPELCVQAFQQPPKFDSDGNLVDAEIRERLKKVLLSLQAFTLRLQKED

SEQ ID NO: 60116 - protein, 185 aa, Zea mays
  Clone ID: LIB3632-043-D8_FLI.pep
VRRRRSPLSPLLADCVEHQRRPAGRRSSLPKQRGVGYQCVRSWRRAWKSRAGGKQGFGRMVSLSTWFRYAAHKFDYCISLSLKKYNVGQISSTQLTDVIFKNFFHGKLTYVCQTKGEEAMAPIVSPTGGAVLVRKLANLSPTSSIAGQVNLLNAVSCSHGCHVQQFPCMRSSVDSVPCRWPPLKL

SEQ ID NO: 60117 - protein, 489 aa, Zea mays
  Clone ID: LIB3632-043-H3_FLI.pep
RRDRRLRTRLSPRPKAFPLLPFFSHFSPPPPLPPFDNTMRECISIHIGQAGIQVGNACWELYCLEHGIQADGQMPGDKTIGGGDDAFNTFFSETGAGKHVPRAVFVDLEPTVIDEVRTGTYRQLFHPEQLISGKEDAANNFARGHYTIGKEIVDLCLDRIRKLADNCTGLQGFLVFNAVGGGTGSGLGSLLLERLSVDYGKKSKLGFTVYPSPQVSTSVVEPYNSVLSTHSLLEHTDVAVLLDNEAIYDICRRSLDIERPTYTNLNRLVSQVISSLTASLRFDGALNVDVNEFQTNLVPYPRIHFMLSSYAPVISAEKAYHEQLSVAEITNSAFEPSSMMAKCDPRHGKYMACCLMYRGDVVPKDVNAAVATIKTKRTIQFVDWCPTGFKCGINYQPPSVVPGGDLAKVQRAVCMISNSTSVVEVFSRIDHKFDLMYAKRAFVHWYVGEGMEEGEFSEAREDLAALEKDYEEVGAEFDEGEDGDEGDEY

SEQ ID NO: 60118 - protein, 628 aa, Zea mays
  Clone ID: LIB3632-043-H8_FLI.pep
GSHVRRILVALTRHWHPLVLGLGVNSAMRKHGWQLPYHPLQVVAIAVFSALGFAFYVFFVPFVGTKPFQIVAMAIYTPLITCVVVLYIWCAATNPGDPGIFDSTKNLKLDKNEKHSYVNSDQGINHGGRPLSETFGTADNSEKLSSMLERNDSPSWPRFSGIISLVCLPFSCLCKRCLHSDSLSSEHKMCEEGMFFCSLCEAEVLKNSKHCRVCDKCVDGFDHHCRWLNNCIGKRNYKGFFVLMASAVILLVMQWLSGGLVLILCIVKRGEFSRQVVTKLGSSFSTVAFVIVVATCTILAMVATVPLAQLLCFHVLLVKKGISTYDYIIALREQEEQQEVPGHQSPQMSIVSSVTGFSTASSFGPLHRGSWCTPPRLFLEDQFDAIPPEIGISRNSGSKKTKEEEGARRKAGAVKISPWTLARLNAEEVSKAAAEARKKSKILKPVGKHGAPENSSKPDHLPSYKRRLDRRGFPAELSLDPLATLSASGTESNYSDAATEICGSLAPLQLEARSAFQPSTAASTRNVASSPESSFDSPNLHPFRTSSATADEMQGAMMHTAHRGIEFKRSSSDGYEASGGEDSDRIPSRIVHRSSNWASVFLNSGQGDPPADLLTTSAEGFVANDSGS

SEQ ID NO: 60119 - protein, 555 aa, Zea mays
  Clone ID: LIB3632-044-D6_FLI.pep
AGRREGTEMDIARAAAGVACCKEHQRIYAEWFALADPDGDGRVTGADATSFFAMSALSRADLKQVWAIADSRRQGYLGFAEFVTAMQLVSLAQAGNEITQDSLKREDLSTLDPPVMEGVDELLARSKAVVKRVHPDDNGTTQAQAPSIYHWFGSKSAQKVQMPLTAVTSVIDGLKRLYVEKLKPLEVAYRYNDFSHPLLTNSDFEAKPMVMLLGQYSTGKTTFIKHLLKTSYPGAHVGPEPTTDRFVVVMSGSDGRTIPGNTIAVQADMPFTGLTTFGGAFLSKFECSQMPHPLLEHITFVDTPGVLSGEKQRTQRSYDFTGVTSWFAAKCDLILLLFDPHKLDISDEFKRVISSLRGHDDKIRVVLNKADQVDTQQLMRVYGALMWSLGKVLNTPEVARVYIGSFNDKPVNDSAVGPIGKDLFEREQDDLLCDLKDIPKKACDRRVNEFVKRARAAKIHAYIIGHLKKEMPAVMGKAKAQQRLIDNLEEEFAKVQREYHLPAGDFPDVEHFKQVLGGYSIDKFEKLKPKMVQAVDDMLAHDIPELLKNLRNPYE

SEQ ID NO: 60120 - protein, 857 aa, Zea mays
  Clone ID: LIB3632-045-E9_FLI.pep
WSAAEGEPKMSVVGFDLGNESCIVAVARQRGIDVVLNDESKRETPAIVCFGDKQRFIGTAGAASSTMNPKNSISQIKRLLGRKFSDPELQSDLASFPFRVTEGPDGFPLVHVRFLGEERTFTPTQLLAMVLSNLKGIAEGNLKTAVVDCCIGIPVYFSDLQRRAVLDAATIAGLTPLQLFHETTATALAYGIYKTDLPEHDQLNVAFVDVGHASLQVSIVGYKKGQLKMLSHAYDRSLGGRDFDEALFKHFAAKFKEEYKIDVYQNARACLRLRVACEKLKKMLSANPEAPLNIECLMDEKDVRGFIKREEFEHISAPVLVRVKGPLEKALAEAGLTTENVHFVEVVGSGSRVPAIIKIITDFFGKEPRRTMNASECVARGCALQCAILSPTFKVREFQVNDGFPFSIALSWKQDSQNSAPQQTLVFPKGNVIPSIKALTFYKSSTFEVDVLYVDTCDSQIPQKISTYTIGPFQPSKGERAKLKVKVRLNIHGIVTVDSAMMLEEDVAVPVSSANEAPKDTTKMDTDDAPSDPVSGTDVNVHEPDTTEAAPAAENGTQNPEEKSVPMETDAKVEPSKRKVKRTSVPVHALVYGALAAADLQKAVEKEYEMALQDRVMEETKEKKNAVEAYVYDMRNKLYDRYNDFVTPEEKEGLIGKLQEVEDWLYEDGEDETKGVYISKLEDLKKIGDPIEARYKESTERGSSVDQLVYCINSFREAALSSDQKFGHIDISEKQKVINECSEVENWLRERKQQQDALPKHTDPVLLVSDLKKKAEALDRFCKPIMTKPKPAPKPQTPPPHTPPPQPEAQASDPQTPEQQQSGTGAAGEPGSEGGVQQASGEQMDMDRPDDSADVAA

SEQ ID NO: 60121 - protein, 231 aa, Zea mays
  Clone ID: LIB3632-046-B3_FLI.pep
GTLTANSPPPIAPLSLAPHKSLLPRSPSLHWAPPSPRRIERTRSGVAAGGAGGMCDLVARTGRHQQRCIPFRYRANNDETSGDKTKKVVEVLMINSQSGPGLLFPKGGWENDETVEEAAAREAIEEAGVRGDIVHFLGSYDFKSKTHQDACCPEGMCRAAVFALHVKEELNSWPEQSTRQRTWLTVPEAASRCRYQWMEEALLTGFSDWHDKWSIGDGGGGGANCVTRPNC

SEQ ID NO: 60122 - protein, 94 aa, Zea mays; identical to SEQ ID NO: 45310
  Clone ID: LIB3632-046-F3_FLI.pep

SEQ ID NO: 60123 - protein, 665 aa, Zea mays; identical to SEQ ID NO: 59142
  Clone ID: LIB3632-047-G4_FLI.pep

SEQ ID NO: 60124 - protein, 495 aa, Zea mays
  Clone ID: LIB3632-048-B7_FLI.pep
TASAVLCAPQTRLVGSSIQLPPEPGGRSATYLTERGSSRTGHSIFRSEGGVRRRGMSTTKVKRRVGKYELGRTIGEGTFAKVRFARDTVTGEAVAIKILDKEKVLKHKMVEQIKREISTMKLIKHPNVVRIYEVMGSKTKIYIVLEFATGGELFDTIVNHGRMREDEARRYFQQLINAVDYCHSRGVYHRDLKPENLLLDSYGNLKVSDFGLSALSQQIKDDGLLHTTCGTPNYVAPEVLEDQGYDGAMADLWSCGVILFVLLAGYLPFEDSNLMTLYKKISNAEFTFPPWTSFPAKRLLTRILDPNPMTRITIPEILEDEWFKKGYKRPEFDEQYDTTLDDVDAVFNDSEEHHVTEKKEEEPVALNAFELISMSAGLNLGNLFDSEQEFKRETRFTSKCPPKEIVRKIEEAAKPLGFDVQKKNYKLRLEKVKAGRKGNLNVATEILQVAPSLHMVEVRKAKGDTLEFHKFYKNLSKTLKDVVWKSDDLQTQHAS

SEQ ID NO: 60125 - protein, 182 aa, Zea mays
  Clone ID: LIB3632-048-C8_FLI.pep
LQTLSPPPPPPPPDSSSALAVGCPAAVLPLRARHLLRRSSMGKTRGMGAGRKLKTHRRNQRWADKAYKKSHLGNEWKKPFAGSSHAKGIVLEKIGIEAKQPNSAIRKCARVQLVKNGKKIAAFVPNDGCLNYIEENDEVLIAGFGRKGHAVGDIPGVRFKVVKVSGVSLLALFKEKKEKPRS

SEQ ID NO: 60126 - protein, 169 aa, Zea mays; identical to SEQ ID NO: 50724
  Clone ID: LIB3632-048-D2_FLI.pep

SEQ ID NO: 60127 - protein, 370 aa, Zea mays
  Clone ID: LIB3632-048-D9_FLI.pep
DLDYNICFSRWPRRFRLGMGPDSPRHGLGEPPHPCGHVRRQRRHRPPRLPRPQQRPQHLHHFLRAPPSTLQVPAAPVDSQRQRHHIHLAGAAGTLSRHHLLHLAEAPPAAPQHRGRLLKAGPQPLRRRAGRGGACGPRWDFQEPVPGRGGVRPELDPARGPAGDGVQAPARSGRRRAGRGRDRRGELAPERRAGRRLGGEGAEEEVGGVGARERDARVGHVEHRVAREAGRRRHVMPAAQRDEGRRRGPPRAPARGERQRRGDGRGDLLRGEAEEAQPRRGAVVRESVPRRQAQREELAEVGRQLDAAERGLREGELGGGEAREDGHSGRGEVSEKRRRGGRGGGGRRRSRAAGCRGTGGETAQAGGVGR

SEQ ID NO: 60128 - protein, 785 aa, Zea mays
  Clone ID: LIB3632-050-B11_FLI.pep
KFGVSLSSYKMMQRPPLRPEEYSLKETTPHLGGAAAGDKLTTTYDLVEQMQYLYVRVVKAKELPNKDITGSCDPYVEVKLGNYKGQTGHFEKKNNPEWNQVFAFAKERIQSSVVEILVKDKDLVKDDFIGRVIFDLNEVPKRVPPDSPLAPQWYRLEDRNGHKVKGELMLAVWMGTQADEAFPEAWHSDAASVPGDGLASIRSKVYLTPKLWYLRVNVIEAQDLIPNDKTRFPEVYVKAMLGNQVQRTRALASRTLNPLWNEDLMFVAAEPFEEHLVLSVEDRVAPGKDEVIGRTIIALQHVPRRLDHRLLTSQWYNLEKHVIIDGEQKKETKFSSRIHLRICLEGGYHVLDESTHYSSDLRPTAKPLWKPSIGILELGILTAQGLLPMKTKDGRGTTDAYCVAKYGQKWVRTRTIIDSFTPKWNEQYTWEVYDPCTVVTIGVFDNCHLNGGEKANGARDTRIGKVRIRLSTLETDRVYTHSYPLIVLTPGGVKKMGEVQLAVRFTCSSLLNMMHLYSQPLLPKMHYVHPLSVIQVDNLRRQATSIVSTRLGRAEPPLRKEIVEYMLDVDSHMWSMRKSKANFFRITGVLSPLFAVARWFDQICHWKNPLTTVLIHVLFMILVLYPELILPTIFLYLFLIGVWYYRWRPRQPPHMDTRLSHAETAHPDELDEEFDTFPTSRPPDLVRMRYDKLRSVAGRIQTVVGDLATQGERLQSLLSWRDPRATALFVVFCFVAAIVLYVTPFRVVVFLAGLYVLRHPRFRHKMPSVPLNFFRRLPARTDSML

SEQ ID NO: 60129 - protein, 274 aa, Zea mays
  Clone ID: LIB3632-050-H1_FLI.pep
LGLGCLLLGLGRLRHGRCRWSLSFCRGLRSGLLCSSCCISRRSSLGGGRCRGVFFLLLFLGLFLLLDGGGGGRGFLFLLVNRRFLRGCLLSGGRGRGLLGRLLGSDDREQRGDLLERGEDGAGQQGRAGLGDAVAHLLGSREFDLGQLLEELGDCGGVLLDPGHLAPLLDQDLEWCRGRLVDLDDLGLEISLLLLELAIDPLLGLVEGLDELGGGGGGLAGALDEDELDLGQHLGLPNVHGYAMGRQRQDSCGWQAGAARATLLMSGRDAVAVA

SEQ ID NO: 60130 - protein, 488 aa, Zea mays
  Clone ID: LIB3632-051-G11_FLI.pep
QTLTLAAVPQPPAFPAGEEAEPARMPPGSATQFRYTQTPSKVLHLRNMPWECTEEELVDLCKPFGRVVNTMCNVGANRNQAFVEFADQNQAISMVSYYASSSEPAQVRGKTVYIQYSNRQEITNNKGTGDSSGNVLLVTFEGVQPNDVTIEVIHLVFSAFGFVHKIATFEKAAGFQALIQYTDAPTALEAKNSLDGRSIPKYLLPEHIGACHMRITFSAHKDLNIKFQSHRSRDYTNPYLPVNQTAIEGIVQPTVGPDGKVKEPESNVLLASIENMQYAVTVDVLHTVFSAFGAVQKIAMFEKNGGMQALIQYPDITTAAVAKQALEGHCIYDGGYCKLHLSYSRHTDLNVKAHDERSRDYTLSDPNVQLQAAAQTPVLRSPGVAWQNTASVPAAPFYASTATSTPIGVGQVAAWNPNMQAGSFASASTAYPNQPLMANSMPHYPAIGSSSGAPPVSFQASQQMTQYSMPPGAPPHAPPAGQSIYFPK

SEQ ID NO: 60131 - protein, 217 aa, Zea mays
  Clone ID: LIB3632-051-G9_FLI.pep
KPRSTVSSAARGPSTLSSAAASPPILSYGGTRRSQAGYSLVPRPSGSCSRLWSTISSPWCATVSSSRWPSCSCGPTPPVSSTNLRFVVLLIFRSPPNIPEVKIPEDVSVNVALTLRYEINRGFATLREIGHGHDLKKFLIVIAGLWLFSVLGSCCNFLTLFYIVFVALYTIPVLYEKYEDKVDAFGEKAMIELKKYYAIFDEKCLSKIPKGLKDKKH

SEQ ID NO: 60132 - protein, 243 aa, Zea mays
  Clone ID: LIB3632-052-F12_FLI.pep
RTLYTRILLPPRQKHLLTFLIYELCIYNTSRTVDLRSGAATPSDRAPASNPSPLTTRDISLALRDRGQVGGEPGRPPAPARHPPLLVRLRRRDGRDRVRRRVLLLWDREHERRHRAAPEPAAGRGRLRGLDERRAGPDGERGDLLAGEAAAPHLGGEHEVDLPGLELLAGGDRRDGDGALERHPVGVAEEPGALAAGRLQRRPGRGRRGVLPELAAGEHHPRRRGALVRRVARHADAHCAAQQ

SEQ ID NO: 60133 - protein, 321 aa, Zea mays
  Clone ID: LIB3632-053-E11_FLI.pep
RPQAPNTATPHHDHGLPSPLLSSPATASDHPSTPIHPPARRRLDPLPCLPCPRPNPVAAATAIAAAAAGGRAVGAEMKEVVLHVYDVTNSDSEKTNNTILQINRIFKDRIGLGGIFHSAVQVYGEDEWSFGFCESGSGVFSCPIGKNPMYTYRERIVLGETECGIAAVNRILRELSREWPGHSYDLLSRNCNHFCDVLCERLGVPKLPGWVNRFANAGDTAVVVAENTAVKFRQAKTEIVNASRVAYRFMAGLTSKNQASPESPGNNQNRGSPSFQGAWFKNIVSAGAKPSSSGSTRTHFQDADDGTPLQHQSSTEQSTQL

SEQ ID NO: 60134 - protein, 250 aa, Zea mays
  Clone ID: LIB3632-054-G8_FLI.pep
ASRGQQPSAMSEVFEGYERQYCEASASLSRKCTAASALDGERKKQKLSEIQSGVEEAESLIRKMDLEARSLQPSIKAGLLAKLREYKSDLNNVKSELKRISAPNARQATREELLESGMADTLAVSTDQRGRLMMTTERLNQSTDRIKESRRTMLETEELGVSILQDLHQQRQSLLHAHTTVERTVPLANHPDPNNAKSCHAGCWATGVGAALRAEGEAVVDRGAWRAGAEHVGQGRTDSPMPRAAEPPRG

SEQ ID NO: 60135 - protein, 433 aa, Zea mays
  Clone ID: LIB3632-055-C8_FLI.pep
SRANCRSEAKEMLLEELLRCQIHEWYPAFRRHSIPTVIIPLPAAFLRYLAGQRAYPNADADAEDGADEEPLPFLLPAITSGRQPFAPIHAHHPDPDSLLNSDLFFGSSSEDVFDPDADHPLRPEFPELEVAIDAAIAELGGAALPKLNWSAPKDATFMSADGTSRCTCFAEVAMLLRSSDCVAHDLASARQSCKDFVRPEGARRNAQKVSAGSEEGARPNADGIRGCEGTNGAPSNSSKTGEEGGKTNDGDCDVEDATEEEHNENTWVDDGFQYYLALRKWYPGLRPESEFRCFVREQKLVAVSQRDPSAYYPSLPGWSSEVQPKIEAFFNEVIEPQFASNNYTFDVYVRTDGRVKLIDFNPWGGYTLPLLFTWEELEEKGRGSELEFRVVMQQGAVRPGLMTAVPYDMLDWGEGSGWDVFLKKADEELDRQI

SEQ ID NO: 60136 - protein, 372 aa, Zea mays
  Clone ID: LIB3632-055-H7_FLI.pep
ERSSTRLVGGCSFARDPSARSLAPVPLYLACVRREGSGWLVGSRKRLLVLFLLPRLMSMGHCSEQRTGFEVTKDWNGADQFAIRSPRGASVRVCLHGGQVVSWRNHRGEELLFSSSKAIFKPPRATRGGIPICFPQFGNCGTLEQHGFARNKIWTIDDEAPPLNYGDNNSNKASVDLLLKPSEDDLKCWPHCFELRLRVSLSMDGDLSLISRVRNVNGKPFSFAFAYHTYLSVSDISEVRIEGLETLDYLDNLSQRERFTEQGDAITFESEVDRVYVGCPGVIAVLDHGKKRTFIVRKEGLPDIVVWNPWEKKSKTMADFGDDEYKQMLCVDAAAVERAITLKPGEEWTGKLELSAVASTNCSDHLDRPGRL

SEQ ID NO: 60137 - protein, 177 aa, Zea mays; identical to SEQ ID NO: 58274
  Clone ID: LIB3632-056-H5_FLI.pep

SEQ ID NO: 60138 - protein, 486 aa, Zea mays
  Clone ID: LIB3632-059-A7_FLI.pep
GAMIEQFVNFVIRPPRSEYNPDQYLWEKEFILAGRKYKRLDLELTNARGYILKCSHYVPAFIPENTALPCVVYCHGNSGCRADANEAAVILLPSNITVFTLDFSGSGLSGGDYVSLGWHEKEDLKCAVSCLRDNKQVSTIGLWGRSMGAVTCLLYGAEDPSIGGMILDSAFTNLYDLMMELVDVYKIRVPKFTVKMAVQYMRRIIQKRAKFDIMDLNVLRLAPKMFIPVLFGHGLNDMFIQPHHCDRIHQAYGGDKNIIKFDGDHNSPRPQSYYDSVSIFFYKSLHPPLLPAARSKLHMGAFKVGNITNENFFFEIINGLRPANTAGCSSSTDAPNIPHDGTSVIELLSDSMNQLSIKNENHLDFLLDENHSLPEIDSDSVGSRLQDKRSRRNEESFSFTSSNRESWGRCSSLGAASDESFSGDNNDKQNLTVKALATPVRQNQRQSQRKPIEKAKQKKIQALWKMCLGQSPQHKRNRSSGTITTS

SEQ ID NO: 60139 - protein, 277 aa, Zea mays
  Clone ID: LIB3609-001-D8_FLI.pep
GKQTSPAAMASTVTAANSSHGSALRTRTASPRPVAGWSCRRTLSTPAHHHHGRSSPRARVVAVRAAGTQRATWLPGLDPPPYLDGTLPGDFGFDPLGLGEEPEALKWYVQAELVHCRFAMAGVAGILFTDLLRVSGIRDLPVWFEAGAAKFDFANTTALFFVQLFLMGFAETKRYMDFKNPGSQAEEGTFIGLEAALAGQQPGYPGGPLFNPLGLAKDIENAHDEKLKEIKNGRLAMVAMLGFMVQASVTHAGPIDNLLTHLSDPFNKNIIHTFSSS

SEQ ID NO: 60140 - protein, 445 aa, Zea mays
  Clone ID: LIB3608-002-A4_FLI.pep
SGGDSADLPAMDATARPAIVIDNGTGYSKLGFSGNSEPSFTLPTVVAANESFLDQTELLSSANWIAQYNAGIMADLDFFIGDEALSRLRSSGLYTLRRPIRHGQVHDWDTMERFWQQCIFNYLRCNPEEHYFLLTDSPVSTPESRECTGEIMFETFNVPGLYISVQSVLSLSAGYAYLKSISDDDSDTVSDMTGVVVDIGDGAPQIVPVVNGYVIGSSIKSFPFSGSDVTQFVSQLLQERGELLPPEDSLDISRKVKEMYCYTCSDIVKEFKKHDRKPDKYIKHWSAVKPKTGVPYTIDIGYERFLGPEIFFNPEIYSADFSTPLPELIDNCVQSAPIDTRRALYKNIVLSGGSTMFKDFHKRLQTDIKKIVDDRVAATNARHRVEVRPIEVNVVAHPIQSYAVWFGGSLAASNPDFFEFCHTKEDYEEHGASICRTSPVFKGMY

SEQ ID NO: 60141 - protein, 266 aa, Zea mays
  Clone ID: LIB3608-003-G3_FLI.pep
TTTASGEEAEAKMRKKLGTRFPAARIKKIMQADEDVGKIALAVPVLVSRSLELFLQDLIDRTYEITLQSGAKTLNSFHLKQCVKRYSSFDFLTEVVSKVPDLGGADSCGDERGLPRRRKSNGSDPENDESRSSKMAIRNANISPRGRGRGRGRGRGRPPTKRKEVGYVQFEDESSMFAEQGEPLPGEETVQEINGNETMPQSTQPPVEAPPTALAQATTSSKAEEANSDHQSDWPMPDAIGSIGVVPSGFGHLTVQVEDEDYDNED

SEQ ID NO: 60142 - protein, 222 aa, Zea mays
  Clone ID: LIB3608-003-H12_FLI.pep
SRLLPHPTCDPRVPQIRSARPIRNLELSRRRPQQRGGHSTTAPQGSYSRRSGSSEGKMSSVFSGDETAPFFGFLGAAAALVFSCMGAAYGTAKSGVGVASMGVMRPELVMKSIVPVVMAGVLGIYGLIIAVIISTGINPKAKPYYLFDGYAHLSSGLACGLAGLAAGMAIGIVGDAGVRANAQQPKLFVGMILILIFAEALALYGLIVGIILSSRAGQSRAD

SEQ ID NO: 60143 - protein, 388 aa, Zea mays
  Clone ID: LIB3608-006-C5_FLI.pep
DQHNSSPCFFFQIKKHELSAMAPAKAQHTSTNQQTLLDAQLQLWHHAFGYVKSMALKAALDLGIPDAIHQHGGSATLPQIVTELATLHPSKTPCLRRLMRVLTLTGVFGVVVQHSTTDGGSDLVYELTPASRLLVGSAPSNGPNVSPFLNMILGTAFVSSFLDLGEWFQHELPDPSPFKLAHGRHVWDMARHDASFAKLCDSGMVADSRFIMDVMVEECADDVFRGISSLVDVAGGLGGAAQAIAKAFPHIDCSVLDLPNVVAAAPTSTDVKYIAGDMFQSIPAADVVFLKWVLHDWGDAECVKILQNCKKAIPSEGGKVIIMDIVVGAGSSDRKHVETQVLFDLFIMAINGAEREEEEWKKIIFEAGFSSYNIIPVLGVRSIIEVYP

SEQ ID NO: 60144 - protein, 309 aa, Zea mays; identical to SEQ ID NO: 47054
  Clone ID: LIB3608-006-E1_FLI.pep

SEQ ID NO: 60145 - protein, 401 aa, Zea mays
  Clone ID: LIB3608-007-C4_FLI.pep
GRARPPSPDLTSAARPPRFWYYSSSVPGIERGRKERRCFNMKALILVGGFGTRLRPLTLSFPKPLVDFANKPMILHQIEALKEVGVTEVVLAINYRPEVMINFLKDFEDKLGITITCSQETEPLGTAGPLALARDKLADGSGEPFFVLNSDVISEYPFAELIKFHKSHGGEATIMVTKVDEPSKYGVVVMEEATGRVERFVEKPKIFVGNKINAGIYLLNPSVLDRIELRPTSIEKEVFPQIAADQQLYAMVLPGFWMDVGQPRDYITGLRLYLDSLRKKSAARLAAGAHVVGNVLVHESAKIGEGCLIGPDVAIGPGCVVEDGVRLSRCTVMRGVRIKKHACISNSIIGWHSTVGQWARIENMTILGEDVHVCDEVYSNGGVVLPHKEIKSSILKPEIVM

SEQ ID NO: 60146 - protein, 229 aa, Zea mays
  Clone ID: LIB3608-007-E4_FLI.pep
VSVASVAMSMFNRIFGKPKEQANSNALATLDKLNETLDMLEKKEKVLEKKAAAELERAKEFSKAKNKRAAIQSLKRKKLYEQQIEQLGNFQLRIHDQMIMLEAAKATTETVDALRTGAAAMKAMQKATNIDDVDKTMDEINEQTENMKQIQDALSAPLGASADFDEDELEAELEELEGAELESQLLEPVAAPPVHPVHAPANKQPARPAPQKATAEDDELAALQAEMAL

SEQ ID NO: 60147 - protein, 834 aa, Zea mays
  Clone ID: LIB3608-008-C10_FLI.pep
RLRRPRAGRPRRDDTIKETGSLELGTAKDTWLQSLCSGFLDQGTNASRIMAGKDGVSLKSVSYGARLRRSCDASLREAGSMRDPFLKHRVKKFDLSSLDWIDEIPDCPVFSPSTQEFEDPLVYLSKIAPVAAKYGICKIISPVSASVPAGTVLMKELGGIKFTTRVQPLRLAEWTKDDKFAFFMSGRKYTFREFEKMANKEFVRRYSSAACLPSRYMEEEFWHEIAFGKMESVEYACDIDGSAFSSSSHDQLGRSKWNLKRFSRLPNSTLRLLRAAVPGITDPMLYIGMLFSMFAWHVEDHYLYSINYHHCGAPKTWYGIPGSAASDFEKVVREHVYDHEILSGEGESAAFDVLLGKTTIFPPNILLDHHVPVYRAIQKPGEFVVTFPRAYHSGFSHGFNCGEAVNFATGEWFPLGAVASQHYALLKRIPVLPYEELLCKEATFCANEFSLFEHGNVTLTGGTHIQSYMKGPFVQLMRFQHRVRWLLVKMGARTCYKADIDATVLCGICKRDCYVAHIMCNCRADAICLCHEEEISKCSCNCDRVVFVRKDIFELEEISKKFEEIGILDEVGKQMSQNDGYNMHPYLSNGIDHNAKYFPYCKILIDTSPELRTFSEVDVLGYDLNKPYPTLSTITSAHGPHEYSTQSDECTSSKQRTYSSSCPENGTLSVYPLCTSDQAFSTDKLAAQDTDDSDCEVFRVKRRSSIVMEKRCSEDLTITLTENQALRRLKKACSDDRQENATESHCLDFISGNTDNFINRSKQKMNVDQLDAKNVEDEVAFGQKSIGCSYLSPSVDLGPKRLKIRGPSFPSTVSEVEISYRFQEDIDLASQHTQ

SEQ ID NO: 60148 - protein, 263 aa, Zea mays; identical to SEQ ID NO: 50588
  Clone ID: LIB3608-008-C4_FLI.pep

SEQ ID NO: 60149 - protein, 299 aa, Zea mays
  Clone ID: LIB3608-009-F10_FLI.pep
AATRGVEPSTEMGSFNGHILPGTLFLAVGLWRVWSAVARFAADPPAFRVRTWNPLPKGPRLLELYLVAGGAFLDMCLELGGGILAGGARVGPDSLIYLEHAGMLLMFFLFGALALLSQKTRYLPLTDGELSLVAATAFTSELLLFSYHSATHTGLEGYYHHLLVLLIGLCILSTVLGALSPASFPADLAAGVLLTLQGLWFYQTALTLYGPMLPAECGVDADGHVDCRSRAAEERAEQLANLQLFGVVFVAFVYVLGCYAVAAARYGHPDLAAMHDEHAAAYECRGGVGARTEVECVAV

SEQ ID NO: 60150 - protein, 232 aa, Zea mays
  Clone ID: LIB3608-011-C12_FLI.pep
QSRAVSCRAGQPRSVVVVVVSHEQGQAPQARAPPAALLRVHGVVPPGAGPHRGLRLAGGVPGAAPLEAVLLPAGPAAAQAHLAGRPVADGVGAGDAGLPQPQRPRGHLLQAPGRVRHLPRRGRDGARVSAAAVPGPPRLHRLVPRAVGRVRARCRLRRRRHEAGRRRGLRRAAGQGGRPRQVEGRQLGLRQLPPLRQLPRRALRGLPRRQQHRVVAQVRPAHRMQRRGVMSL

SEQ ID NO: 60151 - protein, 463 aa, Zea mays
  Clone ID: LIB3608-011-H4_FLI.pep
APVGENSVRTVHLVGMSHYHSADFEEMEDEYDMNEPVDDMEGEDEYQELVIRDSDAEDEDDADQLHKLSDTSAADARSGKDIQGIPWETIEVTRETYRQARLEQYKNYENIPNSGVAAMMACKSTEKGRTYYEFRRNTRSVKSTISHFQLRNLVWATSKHDVYLLLHYSVLHWSALNGVDTEIMDVHGHVAPSEKHPGSLLEGFLHTQISTMAVKDNLLVAGGFQGELICKHLDREGISFCCRTTYDDNAITNALEIFNTSSGALHFIASNNDCGVREYDMERYQLFKHFRFDWPVNHTSLSPDGKLVIIVGDDTDALLIDSNSGKTIHSMKGHLDFSFASAWSPDGLTFATGNQDKTCRIWDARNLTESVHVLRGNVGAIRSIRFTSDGHFLSMAEAADFVHIFDIKSDYNKRQELDFFGEVSGMSFSPDTDTLYVGISDRTYGSLLQFGRLYNYSYLDSLL

SEQ ID NO: 60152 - protein, 192 aa, Zea mays
  Clone ID: LIB3608-012-A7_FLI.pep
KQQSVHLSVQRARGSPSIHVSRESKTKLELVDGDAAPDDLVGVPAARPLDPGGEVDLGGVGLDGGDPGPDEHLGLDPFHLREAALAQRARHRGVEPQLGAVAVADLAGGRDVHRQAPRLWHELVVGRLAREQAHGEVVLLEQVRQRLLHLALQLVHQPFRSIPDAGRERLHAVRVRKHQRRDQQRRDDSFPL

SEQ ID NO: 60153 - protein, 111 aa, Zea mays
  Clone ID: LIB3608-013-D1_FLI.pep
GSSVSLLRLLSQAKTSLASSSQTWHETLGRPPPLRNLPLRSAMQASARLSYSVASRKVIAGVSIASPRSCYRTSRGKAHAAPLPAQEPPPKGQKRITKQERRVRIVEFVEK

SEQ ID NO: 60154 - protein, 133 aa, Zea mays
  Clone ID: LIB3608-015-F12_FLI.pep
GMRWEWEGDGGEAPREETPVDFDFIALLAKPKDYYKILEVDYYASEETIRSSYIRLALKWHPDKKQGQGEENSTSKFQEINEAYQVLSNPAKRQEYDKKGILYVQDQNVVDYLNRHKGLILTCNGLGIRYSVW

SEQ ID NO: 60155 - protein, 224 aa, Zea mays
  Clone ID: LIB3608-016-B8_FLI.pep
TCAAVPILPNGKMYSDQISTGRKRSIHDRLDGDLPAGTGAGGRVRHTVSKRQRQIDEKWKHDLYREDDEPASKSIDPKDLRLKLQRRSSQQSFTSTRRSGVRDLREKLSGIMHPQPSNADPKPKPKPVSEVVNISRRQTADEMPARQSKRAPKQTSLKKTSQPKAESPLGSFLSSLGLEKYSITFQAEEVDMAALRHMTESDLKALGIPMGPRKKIILALEPRA

SEQ ID NO: 60156 - protein, 372 aa, Zea mays
  Clone ID: LIB3608-018-F4_FLI.pep
QASSKKNEIMRDAVAKREAMKGGASSKGPVVVTGASGFVGSWLVMKLLQAGYTVRATVRDPENVGKTKPLLDLPGATERLSIWKADMADEDSFDEAIRGCTGVFHVATPTDFESKDPENEVIKPTVEGMIRILRACKEAGTVRRIVFTSSAGTVCVEERRRPVYDHDNWSDVDFCRRVKMTGWMYFVSKSLAEKAAMAYAAEHGLDLVSVIPTLVVGPFLSAAMPPSLVTALALVTGNEAHYSILKQVQFVHLDDLCDAEIFLFEHPAAAGRYVCSSHDATIHGLAAMLRDRYPEYDIPQKLRGIEDDLQPVHFSSKKLLDHGFTFRYTVEDMFDAGIRTCREKGLIPLATAGGVGSASLRTPGETDVTNGA

SEQ ID NO: 60157 - protein, 180 aa, Zea mays; identical to SEQ ID NO: 37897
  Clone ID: LIB3608-018-H3_FLI.pep

SEQ ID NO: 60158 - protein, 285 aa, Zea mays
  Clone ID: LIB3608-021-D12_FLI.pep
RQAGRRGGQEDRRPSRAGARDGNGTGPQNLRSFLPARPCPSTRRSCRPRLTSALSSSRGIGYATGCAMVLWVFGYGSLIWNPGFDFDDKILGFIKGYKRTFNLACIDHRGTPEHPARTCTLETDDEAICWGIAYCVKGGPEKELKAMQYLERRECEYDQKISIDFYKEGDPLKPAVTGVLVFVSTPDPIGNKYYLGPAPLQDMARQIATANGPTGYNRDYLFSMEKALASISHEDDSIIELANEVRKVLNRTKETKITGANASLKSHAPLVHLSALPEGTVVDSR

SEQ ID NO: 60159 - protein, 176 aa, Zea mays
  Clone ID: LIB3608-021-F8_FLI.pep
RITDMKYVVHHGTVSAEPGGGAYQEYYIRHVDGHAIRCEDEQQRLVRCLAAAIERRTADGLELEVRTGDRAGLLSDITRIFRENGLTIRRAEISSSDGEAVDTFYLSDPQGLPVETKTIEAIRAQIGEATLRVRNNSFGTGDHADVAGAGTTAFIFGNLFKFYRPFQSFSLIKLYS

SEQ ID NO: 60160 - protein, 334 aa, Zea mays; identical to SEQ ID NO: 41488
  Clone ID: LIB3608-025-B12_FLI.pep

SEQ ID NO: 60161 - protein, 342 aa, Zea mays
  Clone ID: LIB3608-025-E3_FLI.pep
AHSWQLLYSMALSSSGHPATTRLLFSLLLVGSAAGLPERAAIDRVNRRGPSLGLVMSYVDEATALQASGYFQPWRALPFVDLYGRRYHIGSIRGVNVIYALTGQRRLNAAVTVQTLIDVFSVSGIVHYGTAGSCNDSISFGDVSVPRLVAYTGAWTWKKFRSPRESSAELSFGEYNVPDGGGGENLLGSLKYRNEELYSAGKPMEEVFWLPVHSAWFRTAEQLTVELERCNDTFCLPTAPRIVYGLKGSSADMFLDNAEYRKFLFQEFGVSTMDEESAAVVMTATSPGIPVIVFRGVSDLAGGEPTWSSTSLMNLASINALKVAVEFIAAVGKHSSTASVKR

SEQ ID NO: 60162 - protein, 296 aa, Zea mays
  Clone ID: LIB3608-026-H3_FLI.pep
ARMKRPTSRGSSMVSGQATTDLQEDSCRSMEPHGVDGDATAAAERDDVDAGAYDEEEDEEEELAGSRGGLGEKKRRLAADQVRALERSFEVDNKLDPERKARIARDLSLHPRQVAVWFQNRRARWKTKQIERDFAALRVRHDALRVECDALRRDKDALAAEIKELRGMVEKQMEVKLESAAEELLPVATRSAAAAAVYNKDGSTDSDSSAVFNEEASPYPYSGAALDHQQQQETSHPLGFTGFTSFLTSSFPSVYHGDSHLDQEADGFFSAAAAGDGFFAEEQSAGIGSWYGGEGW

SEQ ID NO: 60163 - protein, 228 aa, Zea mays
  Clone ID: LIB3608-026-F8_FLI.pep
DSLGPPLPSSPFEGAAAGRRAISFDMNPEYDYLFKLLLIGDSGVGKSCLLLRFADDSYLDSYISTIGVDFKIRTVEQDGKTIKLQIWDTAGQERFRTITSSYYRGAHGIIIVYDVTDQESFNNVKQWLNEIDRYASDNVNKLLVGNKSDLTANKVVATETAKAFADEMGIPFMETSAKNAINVEQAFMAMAASIKDRMASQPAAANARPATVQIRGQPVNQKTSCCSS

SEQ ID NO: 60164 - protein, 440 aa, Zea mays
  Clone ID: LIB3608-027-D2_FLI.pep
PHSNSKHAAPLGFRCQAATPSPSRRLKPPSPPSHHSAHLSSRRRSRRVAAGTCLCGVPYWLSLPFAEEEHRSREVGMAEVHLGLPGPWAADYREMADHYTTKIGGVPDWPTGDMGFKPETLQCSLCGTKLCLVAQVHAPVAKLNIEERIIYVLVCPTPECGPKPQSWKVLRVQKCHNVMQTEGGGDELGQPNGPSSTSLPEEQNDKNKIPETNDDDFDLDALAEALEQAATLASNSKKKNKSKHANAPVKRPVLKEQACDLSIPVLPCFYIHYNKELYGGKGAVGSSSSELVLDKEIMDAANDEEEKWEGEKYEYDRAIGADRTFLKFKKRLDAYPQQCFRYSYGGKPLLATTKLQDPGTCRLCGSPRQYELQLMSPLSYFLHEAGDGSSNYAPSSWTWLTVIIYTCPKSCCPSSCGGKPQSCCWGAAEEEILIQEDEVL

SEQ ID NO: 60165 - protein, 119 aa, Zea mays
  Clone ID: LIB3608-028-F3_FLI.pep
SREHAARALSAAAKMVNVPKTKKTYCKNKECKKHTLHKVTQYKKGKDSLSAQGKRRYDRKQSGYGGQTKPVFHKKAKTTKKIVLKLQCQSCKHYSQHAIKRCKHFEIGGDKKGKGTSLF

SEQ ID NO: 60166 - protein, 152 aa, Zea mays
  Clone ID: LIB3608-029-E4_FLI.pep
SLVLMIPGSKSSSGRGAKQTLSKPRRTLRPARFPIQIRPRHLLLFSATPMVYVDSWDEFVERSVQLFRGDPNATRYVMKYRHCEGKLVLKVTDDRECLKFKTDQAQDAKKMEKLNNIFFALMTRGPDVDISEVSGKEQAEQQQAKKGRGRRQ

SEQ ID NO: 60167 - protein, 153 aa, Zea mays; identical to SEQ ID NO: 44873
  Clone ID: LIB3608-030-A11_FLI.pep

SEQ ID NO: 60168 - protein, 271 aa, Zea mays
  Clone ID: LIB3608-030-G2_FLI.pep
VGRLRLLVVGGGELLVGVGDEEQLVDDAGEAAADEGPDPVHPLVAPLPADEGGAEGHGGVHGRAVEGAAHQDVGPHDEADGNGGDGAQAALLRVHRRGVHRVHQPEGHHDLQHQRLPHRHARQPEGARGLPARREAEQEARHGGPQQLRHPVQEPPEQGDVAAHEGAEGHGRVHVPAGDVRAHRHRHEQRERVRHRRRDQARRGRRAAAGQLAEGHAGALAGEDEDEGGDELSERRLEGARVVHLLVAPQGDPIDRHFHGPLASSRALVTT

SEQ ID NO: 60169 - protein, 466 aa, Zea mays
  Clone ID: LIB3608-030-G3_FLI.pep
PSAPPFRPLSLASSISPPTMGKEKSHINIVVIGHVDSGKSTTTGHLIYKLGGIDKRVIERFEKEAAEMNKRSFKYAWVLDKLKAERERGITIDIALWKFETTKYYCTVIDAPGHRDFIKNMITGTSQADCAVLIIDPTTGGFEAGISKDGQTREHALLAFTLGVKQMICCCNKMDATTPKYSKARYDEIVKEVSSYLKKVGYNPDKIAFVPISGFEGDNMIERSTNLDWYKGPTLLEALDQITEPKRPSDKPLRLPLQDVYKIGGIGTVPVGRVETGVIKPGMVVTFGPTGLTTEVKSVEMHHEALQEALPGDNVGFNVKNVAVKDLKRGFVASNSKDDPAKEAASFTSQVIIMNHPGQIGNGYAPVLDCHTSHIAVKFAELITKIDRRSGKELEKEPKFLKNGDAGMVKMIPTKPMVVETFSAYPPLGRFAVRDMRQTVAVGVIKSVEKKDPTGAKVTKAAAKKK

SEQ ID NO: 60170 - protein, 121 aa, Zea mays
  Clone ID: LIB3608-030-H7_FLI.pep
NALANWLANPRRNPLARLHMHAVSSRLRKYGLRYDDLYDPYFDLDIKEALGRLPREVVDARIQRLKRAMDLSMKHQYLPEDLQAQQVPFRGYLSDMLALVKKESAERQSLGALPLYQRTLP

SEQ ID NO: 60171 - protein, 198 aa, Zea mays
  Clone ID: LIB3608-031-G8_FLI.pep
AKGAETLACWLGGVGMDEATKKNVEATVLEILRGSDMESVTEYKVRAAASDRLGIDLSIPDRKLFVRGVVEEYLLSLSSKEEAKAEEEGVTGRESKGKEHEEEDEEDDDEEEDEGKGGGKREYDDQGDLILCRLSSKRRVTLSEFKGRSLVSIREFYVKDGKEMPSAKGISMTLEQWEAFCNAVPAIEDAIKKLEDSD

SEQ ID NO: 60172 - protein, 48 aa, Zea mays
  Clone ID: LIB3608-031-B2_FLI.pep
KVLPSLGPSERSVLISGPGLLARQMRSSKGSSLSKFHLKWGLEKGVLS

SEQ ID NO: 60173 - protein, 464 aa, Zea mays
  Clone ID: LIB3608-032-H12_FLI.pep
LSPPHRVTKPNPNSRPPEMGQGSPGGMGKQPGLPGDRKQGDGKKEKKYEPPAAPSRVGRKQKRQKGSEAAARLPAVAPLSKCRLRLLKLERVKDYLLMEEEFVASQERLRPSEDKTEEDRSKVDDLRGTPMNVGSLEEIIDETHAIVSSSVGPEYYVGILSFVDKDQLEPGCAILMHNKVLSVVGILQDEVDPMVSVMKVEKAPLESYADIGGLDAQIQEIKEAVELPLTHPELYEDIGIRPPKGVILYGEPGTGKTLLAKAVANSTSATFLRVVGSELIQKYLGDGPKLVRELFRVADDLSPSIVFIDEIDAVGTKRYDAHSGGEREIQRTMLELLNQLDGFDSRGDVKVILATNRIESLDPALLRPGRIDRKIEFPLPDVKTRRRIFQIHTSKMTLADDVNLEEFIMSKDEFSGADIKAICTEAGLLALRERRMKVTHADFKKAKEKVMFKKKEGVPEGLYM

SEQ ID NO: 60174 - protein, 422 aa, Zea mays
  Clone ID: LIB3608-034-B12_FLI.pep
REANHRESASGGVRRTKQSNRTNRPRSSSARPLRRTGSPSRRDLAACPPRPITAMEALWKQASRLKDQVSRQGVFKQFGYGNSDNAFTDESEVKLHQRLEKLYLSTRAAKHFQRDIVRGVEGYIVTGSKQVEIGNKLSDDSQKYGVGNTCTSGDTLSKAATYFGKARSQMEKERGNMLKAFGTQVAEPLRAMVMGAPLEDARHMAQRYDRTRQEAEAQAVEVSRRQNRVRESTGNGDMVSKLEAAEYKLEELKSNMVGLGKEAIAAMSAVEAQQQRLTLQRLIALVEAERTYHQRVLEILDKLEEEMVSERQKIEAPPTPAAENYIPPPAPPSYDEINGAFASTSVNESVQSVDFFLGEALDSFNAESEFELTLSAGDIVIVRKISSNGWAEGECKGKAGWFPHAYIERQERVLASKVPHIF

SEQ ID NO: 60175 - protein, 373 aa, Zea mays
  Clone ID: LIB3608-034-D7_FLI.pep
EKVAVSAYHMELSPNNSTDQSLLDAQLELWHTTFAFMKSMALKSAIHLRIADAIHLHGGAASLSQILSKVHLHPSRVSSLRRLMRVLTTTNVFGTQQPAGGSDDDSEPVYTLTPVSRLLIASQSSQLAQTPLAAMVLDPTIVSPFFELAAWFQHELPDPCIFKHTHGRGIWELTKDDATFDALVNDGLASDSQLIVDVAIKQSAEVFQGISSLVDVGGGIGAAAQAISKAFPHVKCSVLDLAHVVAKAPTHTDVQFIAGDMFESIPPADAVLLKSVLHDWDHDDCVKILKNCKKAIPPREAGGKVIIINMVVGAGPSDMKHKEMQAIFDVYIMFINGMERDEQEWSKIFSEAGYSDYRIIPVLGVRSIIEVYP

SEQ ID NO: 60176 - protein, 571 aa, Zea mays
  Clone ID: LIB3608-036-A1_FLI.pep
KTLAAAGAKPLPAATSTSVSFPATHQPACLLSSPAPGSLRRRDVAAMVSAPPAVGTAMPSLDFDTSVFNKEKVSLAGHDEYIVRGGRNLFPLLSEAFKGVKQIGVIGWGSQGPAQAQNLRDSLADAKSDIVVKIGLRKGSKSFEEARAAGFTEESGTLGDIWETVSGSDLVLLLISDAAQADNYEKIFSHMKPNSILGLSHGFLLGHLQSLGLDFPKNISVIAVCPKGMGPSVRRLYVQGKEVNGAGINSSFAVHQDVDGRATDVALAWSVALGSPFTFATTLEQEYKSDIFGERGILLGAVHGIVEALFRRYTEQGMDEESAYKNTVEGITGIISKTISKKGMLEVYNSLSEEGKKEFNKAYSASFYPCMDILYECYEDVASGSEIRSVVLAGRRFYEKEGLPAFPMGNIDQTRMWKVGEKVRSTRPEGDLGPLHAFTAGVYIALMMAQIEILRKKGHSYSEIINESVIESVDSLNPFMHARGVAFMVDNCSTTARLGSRKWAPRFDYILTQQAFVAVDKDAPINQDLISNFLSDPVHGAIEVCAELRPTVDISVPANADFVRPELRQSS

SEQ ID NO: 60177 - protein, 385 aa, Zea mays
  Clone ID: LIB3608-036-C9_FLI.pep
PYWPAVYVGTMALMQESSSQDLLQAHDELLHHSLCFAKSLALAVALDLRIPDAIHHHGAGGATLLQILAETALHPSKLRALRRLMRVLTVTGIFSVVEQPPAGGGDDSTVHTSDDEAVVVYRLTAASRFLVSDDVSTATLAPFVSLALQPIAACPHALGISAWFRQEQHEPSPYGLAFRQTPTIWEHADDVNALLNKGMAADSRFLMPIVLRECGETFRGIDSLVDVGGGHGGAAATIAAAFPHLKCSVLDLPHVVAGAPSDGNVQFVAGNMFESIPPATAVFLKKTLHDWGDDECVKILKNCKQAISPRDAGGKVIILDVVVGYKQSNIKHQETQVMFDLYMMAVNGVERDEQEWKKIFTEAGFKDYKILPVIGDVSVIIEVYP

SEQ ID NO: 60178 - protein, 333 aa, Zea mays
  Clone ID: LIB3608-037-G3_FLI.pep
HEFDVCPSVLLQGLESGTLSLISPTADIRPGFLPVFRSGSFADIGPKSFMEDEHVCVDNLVEHLGLRGPGIPAPGAFYGVFDGHGGSDAACFVRKNILKFITEDCHFPNSIEKAIRSAFVKADHAIADSQSLDRNSGTTALTVLISGRTLLVANAGDCRAVLGKRGRAFELSRDHKPSCSVEKLRIENLGGTVFDGYLNGQLAVARAIGDWHMKGSKGSACPLTPEPEFREVRLTEEDEFLIIGCDGLWDVMSSQFAVSMVRKELMEHNDPQRCSRELVQEALRRDCCDNLTVVVVCFSDDPPPQIEVPRFRVRRSISMEGLHTLRGALDSNV

SEQ ID NO: 60179 - protein, 380 aa, Zea mays
  Clone ID: LIB3608-040-B5_FLI.pep
SRKSPGLPPTSLPCCLGPLVKRKHMTNQDVVVSEMGIAAGTALPGSSPALLACRGAAAGAMSLRYLDLAAAAARSASCTWVEAMRASSPTRSRAAADVDELTAWMRKHPSALGKFEQIASASQGKKVVMFLDYDGTLAPIVADPDAAYMSDVMRAAVRDVAKHFPTAIVSGRCRDKVRSFVDLSELYYAGSHGMDIEGPSSNPESVLCQPASEFLPVIDEVYKALVEKTKSTPGAKVENNKFCLSVHFRCVDEKRWNALAEQVKAVIKDYPKLKLTQGRKVLEIRPSIMWDKGKALEFLLESLGFASCSDALPVYIGDDRTDEDAFKVLRKRGQGVGILVSKCPKETNASYSLQDPGEVMDFLLRLVEWKRKSTTTRPPV

SEQ ID NO: 60180 - protein, 432 aa, Zea mays
  Clone ID: LIB3608-040-B8_FLI.pep
QQSQRKVVLMSTVTLPTLSRCLVELEGLHHLPGEVGVVTAEVAVGGGLDEPVAALLQVEVDADHPGPEVEVLLHDLEDLLVGDRAGAVRVDEHGQGLRHADGVRHLHEAAAGEAAGHDALGGLPGHVGAAAVHLGGVLAGEGATAVGSPAAVRVDDDLAAGEAGVTVGPADDEAPGRVEVEDGLLVEVLLRDHGLDDVLLEVGGDLVVGDGLVVLGGDEHGVHADGHHGAALVHVLHRHLGLAVGPQPGAGAVLAHLGEARAQLGGQHVAQRHQLGGLVGGVPEHVALVARADLLGPLREVPVHALRDVGGLLLDVHQHLAAVGVEAHVVGGEPDLAAGVAHDLLVVHGRLGRDLAEHHHHVGLGAGLAGHLAVGVLREACVKHGVRHLVAQLVGVPLVHGLRGEKEALGRHCLLLALPTSCAAALYSGPAR

SEQ ID NO: 60181 - protein, 162 aa, Zea mays
  Clone ID: LIB3608-040-B9_FLI.pep
KRPRSHRSKAAAAMGSDTETEKKASVALMSIAKPLAGKKLCKRTLKLVRRASEAKCLKRGVKEVVKSIRRGNKGLCVIAGNISPIDVITHVPILCEEANVPYVYVPSKEDLATAGTTKRPTCCVLVLTKPNKGELSGEVKDKLKSDYDQVVTEVAEATSAMF

SEQ ID NO: 60182 - protein, 325 aa, Zea mays
  Clone ID: LIB3608-040-C2_FLI.pep
SSTTSVQILSIPPTFSNEGFGCSGLCSCVSLEVCSKWTDFFTVRCDATGLAGLGPLQKVSAALRVLAYGLPTDAVDEYIQIGQTTARDCLIRFCHAIISCYSQRYLRIPNRNDVARILRVNADRGFPGMLGSIDCMHWEWRNCPTVWRGQFCGRNSRPTMILEAVASYDLWIWHAFFGMPGSNNDLNVLHRSPIFDPLHNDAMPPVHYTINGTQFNFGYYLADGIYLNWPTFVKAIRHPFEEKKIHFTMMQESARKDIERTFGVLQSRWAVLRGPAYGWVRNHLTEMMIACIIMHNMIVEDEGEGAENVDFVGATPPPDLSTAIP

SEQ ID NO: 60183 - protein, 229 aa, Zea mays
  Clone ID: LIB3608-040-D6_FLI.pep
PSHTRHNPTHPAGRPSSSAEAMVSLKPQKRLAAGVLKCGKGKVWLDPNEVYEISMANSRQNIRKLVKDGFIIKKPQKIHSRSRARRAHEAKQKGRHSGYGKRRGTREARLPTKILWMRRMRVLRRLLRKYREAKKIDKHMYHDMYMKVKGNMFKNKRVLMESIHKSKAEKAREKTLSDQFEAKRAKSKASRERKIARREERLAQGPREPAAAPVSATAPFAAAPKKAKK

SEQ ID NO: 60184 - protein, 197 aa, Zea mays
  Clone ID: LIB3608-040-E1_FLI.pep
LDNPVALSVSLELFLCAAAAAAFRSSSSYARAKPRNPLPPVLRPTHPGAMTLGSSGAGSSVVVPRNFRLLEELERGEKGIGDGTVSYGMDDADDIYMRSWTGTIIGPHNTVHEGRIYQLKLFCDKDYPEKPPSVRFHSRINMTCVNHETGMVDPRKFGLLANWQRDYTMENILTQLKKEMAASQNRKLVQPPEGTFF

SEQ ID NO: 60185 - protein, 264 aa, Zea mays
  Clone ID: LIB3608-040-F3_FLI.pep
SHLLPPLHDLICSPLYMLHPFLLSEILGPAMAGFSSSVRPPDLAREREWYAIVPVLDVEKVGLTVHRRIRERGLRGDRGLHGDALGVEHVLRLLGLLPQPRQRLPDVVDALQRVVRAFHPLRLAHQHCVKADLLPGLDVAYAVVEENRLVRVDVGDPERLLHGVDVGLAQDGGLGKLGGGAGAGEVAGDVEDLGLPVSLRRARRVQGLEADDPLEAVLQAQPLQGSHGVDLVAVGEYLKHHTTPQVSYGSATRSLSEGGEIRVV

SEQ ID NO: 60186 - protein, 177 aa, Zea mays
  Clone ID: LIB3608-040-G3_FLI.pep
KSSRAPRIFFLPASSAEAPSPSSLTVAPAPPVLPYGALLAPCAAVPPLSSLHFSFTRPGSPWSFSRAAPSAPYSALVSARIPALMDASSGAPLMRALQSSPRARLCRSYGVRPALLLFSVACVPSVARMLPGPQHQLPVLLARVCAPLLPSSDPPRCALSSSLLSVRAPLVDLSAHV

SEQ ID NO: 60187 - protein, 193 aa, Zea mays
  Clone ID: LIB3608-040-G7_FLI.pep
QRVAPGPRTAPTRLANSSTTLVAAGCSTPATAMGKFRKLGRDYSQRICMLRTMVSQLVKHERIETTVAKAKEVRRKADQMVQLGKEGTQHAARRAAAFVRGDDVVHKLFTELAFRYRDRAGGYTRMLRTRIRVGDAAPMAYIEFVDRENELREAKPATPPPPQRVPLDPWAKSRASQQWAGPKITKSSETDGL

SEQ ID NO: 60188 - protein, 409 aa, Zea mays
  Clone ID: LIB3608-040-H4_FLI.pep
PDRVGPCAAAAWVHLGRPPARLDRPGTAAARSAMEGNKDDAAKCLRIGKGALEAGDRARAIKFLSKAKRLDPSLPIDDLLTSLLNAQDDSPASSSSSPPPPPQTAAAGASEAAEADGLRERKHKGKKREEEEATPAAREYTAEQLEVVRQVKKHTRDYYQILGLEKDCSVEDVRKAYRKLSLKVHPDKNKAPGAEDAFKAVSKAFQCLSDAESRKRYDLVGSDEPVAHHRRASTARAYNGFYEDDFDPDEIFRNFFFGGMAPATTRQFGQFGTFHFRTGGMHAHAHAHAQQNSGGSTVRMLIQLLPVLLLLLLNFLPSSEPVYSLSRSYPYEHKFQTPRGVAYYVKMSNFEEQYPHQSTERATLERHVERDYYSIITQNCRAELQRRQWGLSYQTPHCDMLKNFEAAAK

SEQ ID NO: 60189 - protein, 537 aa, Zea mays
  Clone ID: LIB3608-041-E4_FLI.pep
LTKINRQVPAGNLITDWSSQHRACHPLSSSSVVGDVARNLEPLGVERARHVDPLVGVSPEVVPLGLHQVGRQPVPAVGVEVGQASGHSRGADAVVDGEAHHPAPRRLPVHDLLRELGVYEQAGEARVPVVGLLDAVQEDGADDAPALPDPGQLAEVEPPAFLRALGLDDVHALRVAADLGRVQGLPHVLHQLRLVHRRAGGVVVTLEDLGGLHPLVLQPAQEPRVQGRLDRRSGHRQLGGLLHRPLPCPFHPGLVKDLVHQVAIAMLVLDAKDVGRDLDQEAQELALVPLGEHLVQLTVGELTDRLENVVCLGNQLHIAILDSVVNHLDKVARSTFANVRDTRATVRDLSSHLEDNVFDVLVSLERASGHQGRAVAGTLLSSRDTHAKIQEAALLHGLLPPLRVLVPLVPPIDDAVALLQVSCERRDGLVNWRAGLDEHDHHPWLLNGLHKGRGVMEAVDGKVSFCLGTLHGLVHLGGCPVVHRDGEPFLCNVEGKVLPHDRKASKTDSCERHLLLHYGAGALPSADSDAELNWRCH

SEQ ID NO: 60190 - protein, 105 aa, Zea mays
  Clone ID: LIB3608-043-B2_FLI.pep
NKINRITSKATRASAQPPGLPLRLEQGEDVTLTNRALDVPHDETVLVIQELHSDLGHLTPGPGPAHNLHHNSKLHLGVHALASRGDGGRRALGDAKRTGTAAVES

SEQ ID NO: 60191 - protein, 321 aa, Zea mays
  Clone ID: LIB3608-043-E6_FLI.pep
KPNESELQAELAVAGLDLDETGDVHEPVHDEVAAHPGRDLPELEGAELDAHGHVGAEHERHGARPLRVLHPRHDGGAAQLRLAGHGQRQHRRVPVALVEGRQRAPRQAVRLVPHAQAGPALVVDADARVGVRRRHRHVEPGPRRQRRRVDLERRHGEAVHRVPRRLGVQRQVQRARRRRGEHRQHCRADHGAAEEPAAAAPAPPLRRRQRRRWRDAARRRRQGPGNVALLLLLLRALRRVALVRPERASRHQRPVAGLQVRWVDPLVISHCQPPTRCSCPAALLLLSTQAKRRRQRKVTLAPLVLPALPSLGTWSLRAPSS

SEQ ID NO: 60192 - protein, 183 aa, Zea mays
  Clone ID: LIB3608-043-H8_FLI.pep
YNHEKDPEFLETTDPMKTRRLVVHHILGCCTELLVALDDLVDSIEKILFCHRFPAGTNGVHPGFCANAPYISSFAICFTFITYLASSVLGLIIFEHLATFAICFTFITYLASSVLGLIIFVHLATCNGCSSCIICLSETKSHWLGGASPVSDSFIPQRSLIFLAISLISFSTFLMLVEYGPSP

SEQ ID NO: 60193 - protein, 195 aa, Zea mays
  Clone ID: LIB3608-044-F1_FLI.pep
LVEVNHQNGEAARCACSAFRDRRCGAWRGGVRESLRRQGGAKDGAMHLGCRRPAVHADQQLLLRCAHHRAEPQLPVRRHAVRHRQGCRDQAGGRHYHPQALQHGRPPRRLQVRRLHAALADEDVINETVRVNLHERMPLCHATMLCCVVGIIIESARINMYVHDGLLLVSLDFACVLYVKYVPFLSYKKNLQCLL

SEQ ID NO: 60194 - protein, 285 aa, Zea mays; identical to SEQ ID NO: 53470
  Clone ID: LIB3608-047-C2_FLI.pep

SEQ ID NO: 60195 - protein, 273 aa, Zea mays
  Clone ID: LIB3608-048-H7_FLI.pep
HSTPVSSDRTTGPAAGRIVTSAGMVKAYPTVNEDYLKAVDKAKRKLRGLIAEKNCAPLMLRLAWHSAGTFDVATKTWGPFGTMKNPAEQAHGANAGLEIAIRLLEPIKEQFPILSYADFYQLAGVVAVEVTGGPDVPFHPGRQDKPEAPPEGRLPDATQGSDHLRQVFSTQMGLSDQDIVALSGGHTLGRCHKDRSGFEGAWTSNPLIFDNSYFKELLSGEKEGLLQLPSDKALLSDPSFRPLVDKYAADEDAFFADYAEAHLKLSELGFAEA

SEQ ID NO: 60196 - protein, 152 aa, Zea mays
  Clone ID: LIB3608-049-H6_FLI.pep
PRSFASPMGAPASAQPALSYGLNRLGHTHRSCPWCSKLWRMSPSTAITCFLNARAVRFVLYFTWNLPTGLLALLTEPSGIISSKNSSATSPSSSILSCLVYHLKPLFWLGCARSGQQSAIAVAGRRMRAPKGKPPAMDPLPQKNKFNIEVGT

SEQ ID NO: 60197 - protein, 89 aa, Zea mays
  Clone ID: LIB3608-050-A7_FLI.pep
RVLGHERDPGEPRCREPHVREMTPVPVGCGIYYCTSYLPSPGQLYIRAHLYGPLTAREEGHCRYLQCNILSLKGFLPCLGSLWNKKEIS

SEQ ID NO: 60198 - protein, 397 aa, Zea mays
  Clone ID: LIB3608-050-C10_FLI.pep
SELLQARPTAMAASSSIQRGERRGRWGSPERTVVWTEPKPKPARKVAVVYYLCHRDGHLDHPHFLEMELSQHQQSHSSRPAPGLYLRDFKARLNALRGDGMPGMYSWSSKRSYKNGYVWQDLTEDDLIHPAHGNDEYVLKGSPLLLFPQPPPQQEDADKWAGRHRKNWSSFDLGDCDSKLVVVAQHQQSAATRVDRDDADPSSTELAIDEISPPPSSSSPDEPESCGREVGVVAGGRMWASAVLMQIFSCGSTAAVRRGRHARTRSDLVMSSASNRRAKKEADADADADASARAAECLSVSGVVERDYFSGSLIESGKKRGGDDALLLKRSSSCNADRGAAKLKLPPVPATAKEVRAGRLTSRGSPAPKKSMTKSTVAQSRDGGECNGATADAAGST

SEQ ID NO: 60199 - protein, 111 aa, Zea mays
  Clone ID: LIB3608-051-E3_FLI.pep
QGLCHYGTRALFIGFCADSGLLLFAIRPLGDGEMDLLAGRGLGLEGLLEAVPYQRSADVGVADVGHPGRPPEGHRRRGRRHRVDSSSLPLCRRRWLVGRWRMAECEWGRSY

SEQ ID NO: 60200 - protein, 111 aa, Zea mays
  Clone ID: LIB3608-052-F1_FLI.pep
AGVEMLVYQDLLSGDELLSDSFTYKELENGVLWEVEGKWVTQGPVDVDIGANPSAEGGEDESVDDTAVKVVDIVDTFRLQEQPPFDKKSFVSYIKKIHQESHCCVGARESG

SEQ ID NO: 60201 - protein, 355 aa, Zea mays
  Clone ID: LIB3608-053-B3_FLI.pep
TRPALSSHLYQLISILHRPPSIVVVVDPSMAEQLDLPGFRFHPTEEELLEFYLKQVAHGRKLKFDIIPTVHLYRHDPWELPGLARIGEREWYFFVPRDGGRPAKQHHHQSSGARPSRTTERGFWKATGSDRAVRCAHDPKRLIGLKKTLVYYEGRAPRGTKTDWVMNEYRLPDACNNNSNNNNAVPGDSSAAAASSTTTTNNSPKEDIVLCKVYRKAVSLKELEQRVAMEELARATPSASHNAGSPADSMSSSDQDQQTQLVGQGVEIMMTMPVGGISPPPPLPPPVMMSMKQEEEVAEPEAPLPAVLMRPSTLSLPQLEVAKQQQEWMQDPFLTQLRSPWMESWSPYYPSVLNF

SEQ ID NO: 60202 - protein, 173 aa, Zea mays
  Clone ID: LIB3608-055-E4_FLI.pep
LGLSGPHRSVPPVPVVVAVAAAAVCTTVSPTAAVASTTTAVASTATAVAASITAPATVSATAASTAAAGLGLVNGDVAAVELLAVHALDGAAHRVLRGEGDEAEAAGPLRLPIQDDLRLEDLAVGAEGVVEGVVVGGPGEAANEATVLNVRRRHLFPLAHEPEPEHEPVGEEK

SEQ ID NO: 60203 - protein, 177 aa, Zea mays
  Clone ID: LIB3608-055-G11_FLI.pep
RAKLSTSSSSEQAPQPNRLGALAADAARELDVLGHDGDALGVDGTEVGVLEEAHQVGLGGLLQRGDGGGLEAEVRLEVLRDLADQALERELADQQLRALLVLADLAQRDGARAEAVRLLHAARRRRRLARRLRRQLLPRRLAARRLARRLLRAGHRGRLGTGRSRRLCSALGFGRGV

SEQ ID NO: 60204 - protein, 501 aa, Zea mays
  Clone ID: LIB3608-056-C8_FLI.pep
KKEKMVTATKKGAAVLDQHIPDHIKVNYHVLQVGDEIYDATLNQTNVGDNNNKFYIIQVLESDAGGSFMVYNRWGRVGVRGQDKLHGPFPTRDQAIYEFEGKFHNKTNNHWSDRKNFKCYAKKYTWLEMDYGETEKEIEKGSITDQIKETKLETRIAQFISLICNISMMKQRMVEIGYNAEKLPLGKLRKATILKGYHVLKRISDVISKADRRHLEQLTGEFYTVIPHDFGFRKMREFIIDTPQKLKAKLEMVEALGEIEIATKLLEDDSSDQDDPLYARYKQLHCDFTPLEADSDEYSMIKSYLRNTHGKTHSGYTVDIVQIFKVSRHGETERFQKFASTRNRMLLWHGSRLSNWAGILSQGLRIAPPEAPVTGYMFGKGVYFADMFSKSANYCYASEACRSGVLLLCEVALGDMNELLNADYDANNLPKGKLSTKGVGQTAPNMVESKVADDGVVVPLGEPKQEPSKRGGLLYNEYIVYNVDQIRMRYVLHVNFNFKRR

SEQ ID NO: 60205 - protein, 334 aa, Zea mays; identical to SEQ ID NO: 41488
  Clone ID: LIB3608-056-D5_FLI.pep

SEQ ID NO: 60206 - protein, 140 aa, Zea mays
  Clone ID: LIB3608-059-G10_FLI.pep
VQNSKLCTKEYRATSVCVDSPWKGRSESENDEACTDPFCSLGGSIDRLGEGAIGDAELNELVRVRDGVDHGRVGTQTISSSSLFLPTTSSTNSNSTPFSFRAIRTRITNGLGHRPITRTAASDIFFPSSESSTGSTTVSV

SEQ ID NO: 60207 - protein, 248 aa, Zea mays
  Clone ID: LIB3608-059-G2_FLI.pep
SRRLLPLAQVPPPPPYRRERKRKAWKEKRMAGRRAEEEYDYLFKVVLIGDSGVGKSNLLSRFTRNEFCLESKSTIGVEFATRTLHVEGKIIKAQIWDTAGQERYRAITSAYYRGALGAVLVYDVSKPTTFENISRWLKELRDHADSNTRIMLVGNKTDLRHLRAVATDDARSFAEAEGLSYIETSALEATNVEEAFQLILGDIYRAVSKKPVASDEVGAGQGGVKEGKTIDVATGADAAAHKKQCCSA

SEQ ID NO: 60208 - protein, 195 aa, Zea mays; identical to SEQ ID NO: 60193
  Clone ID: LIB3608-061-F10_FLI.pep

SEQ ID NO: 60209 - protein, 522 aa, Zea mays; identical to SEQ ID NO: 47320
  Clone ID: LIB3607-002-H2_FLI.pep

SEQ ID NO: 60210 - protein, 330 aa, Zea mays
  Clone ID: LIB3607-003-E1_FLI.pep
VTAMAGDWQELGQAAAIGLLFAFLVAKLISTVIAFKEDNLRITRSPPTSPTAAAAAAPPVPSHYGSTDGGSGSDSDWEGVESTELDEEFSAASAFIAASAASGTSVPEEAQLRLYGLYKIATEGPCTAPQPSALKLKARAKWNAWHKLGAMPTEEAMQGYITIVQELFPNWDAGASAKRKDEDSIASASASKGPMGPVFSSLMYEEDEGNESELGDIHVSAREGATDDIVKLLAAGVEVNVRDTEGRSPLHWAVDRGHLSAVEVLANANADLNAKDNEGQTALHYAAVCEREDIAELLVKHHADLRIKDEDGNTAHDLCPSSWSFMNQAN

SEQ ID NO: 60211 - protein, 484 aa, Zea mays
  Clone ID: LIB3607-004-E11_FLI.pep
SSYSPISATQSFPQFPPFSHFSPPPPLPPFNNTMRECISIHIGQAGIQVGNACWELYCLEHGIQADGQMPGDKTIGGGDDAFNTFFSETGAGKHVPRAVFVDLEPTVIDEVRTGTYRQLFHPEQLISGKEDAANNFARGHYTIGKEIVDLCLDRIRKLADNCTGLQGFLVFNAVGGGTGSGLGSLLLERLSVDYGKKPKLGFTVYPSPQVSTSVVEPYNSVLSTHSLLEHTDVAVLLDNEAIYDICRRSLDIERPTYTNLNRLVSQVISSLTASLRFDGALNVDVNEFQTNLVPYPRIHFMLSSYAPVISAEKAYHEQLSVAEITNSAFEPSSMMAKCDPRHGKYMACCLMYRGDVVPKDVNAAVATIKTKRTIQFVDWCPTGFKCGINYQPPSVVPGGDLAKVQRAVCMISNSTSVVEVFSRIDHKFDLMYAKRAFVHWYVGEGMEEGEFSEAREDLAALEKDYEEVGAEFDEGEDGDEGDEY

SEQ ID NO: 60212 - protein, 486 aa, Zea mays; identical to SEQ ID NO: 58612
  Clone ID: LIB3607-005-G11_FLI.pep

SEQ ID NO: 60213 - protein, 771 aa, Zea mays
  Clone ID: LIB3607-006-D5_FLI.pep
RTTMATIQDIGLSAAINIMGAVVFLVAFAFLRLQPINDRVYFPKWYLKGARESPSHGGTFVRKFVNLDMRSYLKFLSWVPAALKMPEDELISHAGLDSAVYLRIYLVGLKIFAPISVLAFIVLVPVNWTNDTLQFSKLEHSNVDKLSISNIPVGSKRFIAHLAMAYVFTFWTCYVLLREYEVVAKMRLRFLSSEKRRPDQFTVLVRNIPPDPDESISELVEHFFLVNHPGHYLTHQVVYNANKLAKLVKEKAKMHNWLDYYQLRFERNASKRPTTKTGFLGCFGTKVDAIEYYTSEIERIENEEAEEREKIVKDPKSIVPAAFVSFRSRWGAAVCAQTQQTSNPTVWLTEWAPEPRDVYWDNLSIPFVSLTVRRLIIAVAFFFLNFFYVFPIAFVQSLANLEGIEKAAPFLKPLIEEHTIKSFIQGFLPGIALKIFLILLPSILMFMSKVEGLTSISSLERRSASKYYIFIFFNVFLASIIAGSALEQLKSYIHQSANEIPRTIGEAIPMKATFFITYTMVDGWAGVAGEILRLKPLVIFHLKNFFLVKTEKDREEAMDPGSIGFDSSEPQIQLYFLLGLVYAAVTPFMLPFVLVFFGFAYVVYRHQIINVYNQEYESAAAFWPSVHGRIITALIVSQLLLLGLLSTKGAGQSTPVLLVLPVVTFYFHKYCNNRYKPTFVKCPLQEAMKKDTLERAREPGFDLKGYLMNAYIHPVFKGDGDDDKFSVADEPEAEQVLVATKRQSRRNTPVPSKYNGSESPSLPEIVNEQRL

SEQ ID NO: 60214 - protein, 261 aa, Zea mays
  Clone ID: LIB3607-007-F7_FLI.pep
VGRLRLLVVGGGELLVGVGDEEQLVDDAGEAAADEGPDPVHPLVAPLPAEGAGPKDTAGFMDAPSKAPPTRMLAPTMKPMAMGAMVPRLPFFGSTAVAYTVYTSPKVITISSTSASHTDTPVSPKVPVACPPVEKRSRKHATVDPSSCATQYRSPRNRVMLPPTKAPKVTAGFTCPPEMFAPTDTATNSANACATAAAIRPAGVVGPPPVSLLKAMPEPWPAKTKMRVEMNSANAALRAPGWYTSWWLPRAILLIGIFTAL

SEQ ID NO: 60215 - protein, 481 aa, Zea mays
  Clone ID: LIB3607-007-H9_FLI.pep
LRTRLPPRLKPFPLLPIPSVGRRSIPYDDTMRECISIHIGQAGIQVGNACWELYCLEHGIQADGQMPGDKTIGGGDDAFNTFFSETGAGKHVPRAVFVDLEPTVIDEVRTGTYRQLFHPEQLISGKEDAANNFARGHYTIGKEIVDLCLDRIRKLADNCTGLQGFLVFNAVGGGTGSGLGSLLLERLSVDYGKKSKLGFTVYPSPQVSTSVVEPYNSVLSTHSLLEHTDVAILLDNEAIYDICRRSLDIERPTYTNLNRLVSQVISSLTASLRFDGALNVDVNEFQTNLVPYPRIHFMLSSYAPVISAEKAYHEQLSVAEITNSAFEPSSMMAKCDPRHGKYMACCLMYRGDVVPKDVNAAVATIKTKRTIQFVDWCPTGFKCGINYQPPSVVPGGDLAKVQRAVCMISNSTSVVEVFSRIDHKFDLMYAKRAFVHWYVGEGMEEGEFSEAREDLAALEKDYEEVGAEFDEGEDGDEGDEY

SEQ ID NO: 60216 - protein, 166 aa, Zea mays
  Clone ID: LIB3607-008-F5_FLI.pep
LAIIEHACVLDNHKDQQTWPLHCPSISPDLAVVAPGLVAVEPVVDGGGVGLRPVEEVGAHALGGQVAPRVEDAAPHVAGAARRRRRRRRRRRHRRRRGRRHRLRPLVAAAVRVFVDDERTGGGGLAELLEARLRARPGHHVVPQLVQHLLIRSPLSTSQNHQDERI

SEQ ID NO: 60217 - protein, 177 aa, Zea mays; identical to SEQ ID NO: 58274
  Clone ID: LIB3607-009-C1_FLI.pep

SEQ ID NO: 60218 - protein, 184 aa, Zea mays; identical to SEQ ID NO: 46167
  Clone ID: LIB3607-009-E5_FLI.pep

SEQ ID NO: 60219 - protein, 138 aa, Zea mays
  Clone ID: LIB3607-011-C8_FLI.pep
YIAPPLGFSGIPPHTAARTRDGRSNGGSNYAAAMVNVPKTKKTYCKNKECRKHTLHKVTQYKKGKDSLSAQGKRRYDRKQSGYGGQTKPVFHKKAKTTKKIVLKLQCQSCKHYSQHPIKRCKHFEIGGDKKGKGTSLF

SEQ ID NO: 60220 - protein, 353 aa, Zea mays
  Clone ID: LIB3607-034-G4_FLI.pep
PHGFRRLLTLESSRSTRRRARCHGAFRKLLGERERERDGPAAAEAEMGASDLDRQIEQLKRCEPLTEAEVKALCLKAMEILIEESNVQRVDAPVTICGDIHGQFYDMKELFKVGGDCPKTNYLFLGDFVDRGFYSVETFLLLLALKVRYPDRITLIRGNHESRQITQVYGFYDECLRKYGSVNVWRYCTDIFDYLSLSALIENKIFSVHGGLSPAITTLDQIRVIDRKQEVPHDGAMCDLLWSDPEDTVDGWGLSPRGAGFLFGGNVVSSFNHSNNIDYICRAHQLVMEGYKWMFNSKIVTVWSAPNYCYRCGNIAAILELDENLNKQFRVFEAAPHESRGVPAKRPAPDYFL

SEQ ID NO: 60221 - protein, 136 aa, Zea mays
  Clone ID: LIB3607-035-H1_FLI.pep
EPKAKFILKKSTGMLISEQFKVSLQASMLTHRHSTFVIEDTSLNKQTTQNRLGLFHSPIDRATVSSRWLHQGSDLLDRRPLHQTRPPGLHMRVGVEHRCVGRSKQAESDRHMVQVGEAEEVSSKVLALGQACLVHL

SEQ ID NO: 60222 - protein, 402 aa, Zea mays
  Clone ID: LIB3607-036-A5_FLI.pep
RQGGRQQELVRPSTLHRGVGMPVLEPPAGAPAPGAMAERVVVELRHGVGARGGRGVAAPEAGEDVAEEAADGAPVRGRGLPGPPRDPPGRAAAVEPGAVHLRVHDGELPLLGRPPAGESTDREPTAGEPPDGEPDRGLLLLLKGDGVGGHLVAADGAGVAEREPGEDAVGVVDVGAGHFPGLGAQVEGLLADGAVRVGGGDGDNGHGLDGGLGRRRRGVAGAGRQPAGGLDLRQLVQQALEARAHEEVGHGLRERAEARPRAVVVQELEAGGGGRGATEHDDGVEGRGRAGVGGVVRAGAAEVGRSWRRRAHLLEEAAAAGGAGGGGERGGGAHEAVALVAPVGGGGRWKACGGRGGRHRHRKAGSDLGYFQLQAAAAEAEEGLVVGDETKGPCILLPARSD

SEQ ID NO: 60223 - protein, 120 aa, Zea mays
  Clone ID: LIB3607-036-B5_FLI.pep
TNQPIPFVLGGSLNVMEANIKLLAKDSPYGDNLDYIYTELPAALSHVHKLSITSGLFVYDQLQGFSKTSARFINLRHLTMYLPLYGEPKSISGILRLAYLLELAPALEELELHVSGLLTL

SEQ ID NO: 60224 - protein, 334 aa, Zea mays; identical to SEQ ID NO: 41488
  Clone ID: LIB3607-037-E6_FLI.pep

SEQ ID NO: 60225 - protein, 420 aa, Zea mays
  Clone ID: LIB3607-037-H5_FLI.pep
DEASEENGNGISYISDERIAELEDELQEARQQIEALEVKNMHCQCEKLEESLKQVSNEKEDLVAAILASKNEVEDLKGDMVSAAKHFEAQLVHRDHEIEKCKQEAEQVSEKYFHEKSTLESEIQRLQEVVKSFEENLTKVADEKLQLEAQLKELEQTSNDLDDSSAEIIKLQEIIKDLQERLENDSNEKSVLEERAMELEQVRRQLEDSRAEASMELQTTIKNLNQVLQEKAELENRMKDAEQATSDLNSLVASLDGKLKATEAQLEQLHAERAEAILESEKQVSELNQAIARLKTQLELLSSEKAAVENKASALLTDVAVRDEKLKETDRHLHQLHLEHVELIGAADAAREDASGLRSRVRELEVEVERQRLMVADSAEGKREAIRQLCFSLDHYRHGYQQLRLLLQGHRRPRPMVMTA

SEQ ID NO: 60226 - protein, 264 aa, Zea mays
  Clone ID: LIB3597-051-E7_FLI.pep
RRQQASEQLAMAAVSTAPALEGRIALVTGGSRGIGREVSSHLAALGARVVVNYATNPAKAEELVAELASRGLRAVAVRADVSDPDAVRALFDRAEEAFGSPPHVVVACAGIMDAKYPALVDTAVEDFDATFAVNTRGKFLVCREAARRIPPNSGGRIVTFSSTTVAVLPPGYAAYAASNAAVEAMTKVLAKEVAPKGITANVVAPGPVRTELFLAGKDEAFLERVKNSMRIAETTDIAPVVAFLASEASGWVNGQVIRVNGGVA

SEQ ID NO: 60227 - protein, 131 aa, Zea mays
  Clone ID: LIB3600-015-D10_FLI.pep
AWPFRVHLYSNKNLTLDAARVHEHSDLAPHGLRREVGLELGADDARVAVRAGDLAPDAPVAGLAALGLSLVDVRHALASVPRDVLLGVHPLDLNERRGLVLVRLGPLVSEDGAPDVEPDALSRASLHHGGR

SEQ ID NO: 60228 - protein, 162 aa, Zea mays; identical to SEQ ID NO: 59134
  Clone ID: LIB3600-044-F6_FLI.pep

SEQ ID NO: 60229 - protein, 239 aa, Zea mays; identical to SEQ ID NO: 41895
  Clone ID: LIB3601-003-B5_FLI.pep

SEQ ID NO: 60230 - protein, 283 aa, Zea mays
  Clone ID: LIB3601-006-C12_FLI.pep
RPHRDQSSLSLPAFLLRLALAGGQAHRRRAMDASYRRAGTGSGSAPRSVEDIYKDYRSRRSAILRALTHDVEEFYALCDPEKENLCLYGYANEAWEVALPAEEVPTELPEPALGINFARDGMNRGDWLALVAVHSDSWLVSVAFYYAARLNRSDRKRLFGMMNDLPTVFEVVSSGVKQSKERDRSGTDNGGRNKLSVKQTSEPRLENNAREPDEGYDEDDSNHSETLCGTCGGIYSADEFWIGCDVCEKWYHGKCVKITPAKAESIKQYKCPSCCNSKRPRPI

SEQ ID NO: 60231 - protein, 230 aa, Zea mays
  Clone ID: LIB3601-006-D3_FLI.pep
RHLLPCSALRRWKGRYRRCPRPRSPCPSMEGSLQPLPSPPQSMDAPAPRRAHPESRAARSPCYPTPVLFSSSSRRSYYSPPWRTAFRCQVHSDIKVSPTLDLKDDSKSETWRIKMLYDGDCALCMREVNMLRERNKSYGAIKFADISSKDYSPDDNEGLDYEIMWHPKRSRRRTWLRLLVLDAVLHVWPLLLRRCAVCAPGENYLSRCFQGFFRVSSGSYWSPAGECAGF

SEQ ID NO: 60232 - protein, 194 aa, Zea mays
  Clone ID: LIB3601-006-H6_FLI.pep
SEDFIASFPPPMTTIWAAAHKEQGHPLLPSCCGLEENSLSMPTEIAADSLGSGKSWIRSYILQDLCSLPSSMVHLVPIDTVIVRDLLMLAVATCKEQGAPVPVLLGVQNVVALATKLHGAHGCSSSVFLKPRVQGSKMLPPWWSSGCWLPLPSRRAQRCRRGRAPLTIHRRREEKGKHAGSPAGVQRTGAEGAR

SEQ ID NO: 60233 - protein, 550 aa, Zea mays
  Clone ID: LIB3601-007-A9_FLI.pep
PAATCLPSCTHRCRPAQIPLAGGAPLPPRRWRRRSEGDCPNPSGSWRLGGRARDPAAATPMGDFNVALVIVAAVVSVLVLLVSVYLLVNYQHPDDVNQAYFPKLVVVLGLTVAVLSILMLPADVANRQACRKAVYNGACSLTLPMRTLWLVVYIVDAVLVFLVIPFAMFYYEGDQDKSVGKRLRTALIWVVASAVVCGLVLGILYGLVGKVDFTVRHLSSSVQTFPNSFSGFSSGQPCFSPLTRQCAASTAPANSQTTWTMRATFPEYVVALTTIVGSVLFTIFGGVGIACLPLGLIFSFVRRPKAVITRSQYIKEATELGKKARELKKAAEALHQEERSGNKGRKWRKNVKALEKELLLLEDDMKALEEMYPQGEQAEATWAFTVLGYIGKLLFGVVGLIVSIAWVAHIVIYLLIDPPLSSFLNEVFIKLDGVWGLLGTAAFAFFCFYLLIAVIAGEMMLGLKLVFITIHPMKWGGTLMNSFLFNVGLILLCSISVIQFCATAFAYYAQATAAQEIFGHTLQSLRGIKYLYKLVSQMKSRFSCSVLQVL

SEQ ID NO: 60234 - protein, 216 aa, Zea mays
  Clone ID: LIB3601-008-C10_FLI.pep
ATPPSLPLIPKARSGAERRALLLVSPLCKMSSPSKRREMDLMKLMMSDYKVEMVNDGMQEFFVEFKGPAESIYQGGVWKVRVELPDAYPYKSPSIGFINKIYHPNVDEMSGSVCLDVINQTWSPMFDLVNVFEVFLPQLLLYPNPSDPLNGEAAALMMRDRPVYEQKVKEYCEKYAKPEDAGITPEDKSSDEELSDDDDDDDNDSGDEAILGNPDP

SEQ ID NO: 60235 - protein, 460 aa, Zea mays
  Clone ID: LIB3601-011-A12_FLI.pep
EVIWGDGSISKVGPHEIYVVGREDDDASLDDGTASDGASWETVDDNEMDVLDDSAKDDSQSIPENSIEREDGSFNSQNGSSVATGPLSVAFGFVTRLASDLFARGRRHLDRSSNSDAMDEVESHQSNEVSETSDDIDKINENNVESPEDAAVIENDSSVEKSVDVVMADNLVDLECFKHFDILQCPPDHHYLENIAQGTGGRKWVKKVQQEWSILEKNLPDYIYVRVFEDRMDLLRAVIVGASGTPYQDGLFFFDFYLPPEYPQVPPSAYYHSGGLRVNPNLYVDGKVCLSLLNTWTGRGNEVWDPSSSSILQVLVSLQGLVLNEKPYFNEAGYEKQVGTVEGEKNAVPYNENTYLLSVKSMLYILRRPPLHFEDFVKSHFRKRGHYILKACEAYLQGNVVGTLTDDACTTNRSTEHSSSVGFKLALAKILPRLITALKEHGADCDQYEHLGKTDPVRES

SEQ ID NO: 60236 - protein, 192 aa, Zea mays
  Clone ID: LIB3601-012-H10_FLI.pep
GLEVNMLKCILSQSWKRGAHMLHAGNSAPAVLTCWSQFHSGQVWSSSRSFFGVEDFVDEDNSRPYTYKKEKRSKNPHKHISFKQRTIAHMEPFTLDVFISKRFVSASLTHRSTCRQVAVAGTNSKDIKAALRSRSDVPACLAVGRFLAERAKEADVYTCTYTPRERDKFEGKIRAVVQSLIDNGINVKLYLD

SEQ ID NO: 60237 - protein, 237 aa, Zea mays
  Clone ID: LIB36-011-D6_FLI.pep
RLLRGAAYLPLPAPLLPRAAMNTAMATTSLSLQGRPSHAPTRKLSSPFLGAPASFLRPLAPTPAAGPSSRRTLAVRAMAPPKPGGKPKKVVGLIKLALEAGKATPAPPVGPALGAKGVNIMAFCKEYNAKTADKPGYIIPVEITVFDDKSFTFVLKTPPASVLLLKAAGVEKGSKEPQRQKVGKVTVDQVRAIAQEKLPDLNCKSIDSAMRIIAGTAANMGIDVDPPILVKKEKVLL

SEQ ID NO: 60238 - protein, 158 aa, Zea mays
  Clone ID: LIB36-015-F2_FLI.pep
FILLNHLWLLIYHLSKLCLCQLLIEPCLHEILLQITWNSLMGEVFGVVVEALGVEGCTAGCRLVRTSVVLLHGIDLRTGAARGVDGLLILLGGGGGCLLPHNDRLPVLPDRSDPGHPLIPPSQSLSLRSLHGSLSRVSHSSLSLSLLSLFSLSLSPFK

SEQ ID NO: 60239 - protein, 116 aa, Zea mays
  Clone ID: LIB3597-056-A12_FLI.pep
RTVFLFFFFFFRRSKSSRACELRELPHAAHVPVRGSVREVRGLQFCDIGWSKYSKHPFQKRMQLTNNVFCCRRLPLFRCYSYCKTTCVSHEKQKTNRRVSLYSDLTWCRAEAQQLS

SEQ ID NO: 60240 - protein, 129 aa, Zea mays; identical to SEQ ID NO: 41596
  Clone ID: LIB3597-061-D7_FLI.pep

SEQ ID NO: 60241 - protein, 370 aa, Zea mays
  Clone ID: LIB3600-002-E5_FLI.pep
TRPTVSASAYRPRRSPLSLSLSLQAHQAMAAPKKTMRALRYDKYGGGAEGLKHVEVPVPSPSKGEVLLKLEAASINPIDWKIQKGMVRPFLPRKFPFIPVGDMSGEVVELGSGVTDFKPGDKVISITFPNGGGLAEYAVAPASLTVARPPEVSAAEGASLPTAASTALQQLKAAGVSSFDGGSGSGADSDGPKNVLVTAASGGVGHYAVQLAKLAGLRVTATCGARNLGLVAGLGADEVLDYKTPEGARLLSPSGTRYDAVAHCATGTPWSVFAPVLADRATVVDVTPGVAAAAKSFLQKVTFSRKRLVPLVLIPKKEEMEWLVEMTRQGKLRTVVDSRYSLSRAQEAWAKSIDGHATGKIVVEMGGAAE

SEQ ID NO: 60242 - protein, 504 aa, Zea mays
  Clone ID: LIB3600-004-F4_FLI.pep
PSSSPPATAAMSRYDGRAADAGSYRDRRSEGAFGGGSRAFSAPSKADASAAASELDGLPRFEKNFYVESPAVAGMTEEEVEAYRRRREITVDGRDVPKPVLEFRDVGFPEYVLQEITKAGFVEPTPIQSQGWPMALRGRDLIGIAETGSGKTLAYLLPAIVHVNAQPILSPGDGPIVLVLAPTRELAVQIQQEATKFGASSKIKSTCIYGGVPKGPQVRDLQKGVEIVIATPGRLIDMIESHHTNLRRVTYLVLDEADRMLDMGFEPQIKKIVSQIRPDRQTLYWSATWPKEVEQLARNFLFDPYKVTIGSEDLKANHAIVQHVEILSESQKYNKLVNLLEDIMDGSRILIFMDTKKGCDQTTRQLRMDGWPALSIHGDKSQAERDWVLSEFKSGKSPIMTATDVAARGLDVKDVKYVINYDFPGSLEDYVHRIGRTGRAGAKGTAYTFFTAANARFAKELINILEEAGQKVSSELAAMGRGAPPPSSGYRDRYRGYGGGRSWS

SEQ ID NO: 60243 - protein, 300 aa, Zea mays
  Clone ID: LIB3600-006-A11_FLI.pep
TQRARRELLKHAPKLVETSKKTLILHGTKTSAVLNSVLSDIYHLKRDNAVKYTKKNDNIRPFESGGESSLEFFSLKADCSLIVYGSHSKKRPNNLILGRTYDHHIYDLVEVGVENYKSMESYVYDKKLAPLLGSKPFFAFIGEHFESAEELKHLKEVLLDLFRGEVVENLNLAGVDRIYVCTAISPTTVYMMHCALRLKRSGTSIPRMELVEVGPSMDLVVRRHRLPAESLKKEAMKTAEHAKKMKNVTKDPVQGKLVKVYMPDQQVGKLTLSNDIKGLKRERREAKKNQDSKKQKVNPE

SEQ ID NO: 60244 - protein, 237 aa, Zea mays
  Clone ID: LIB3600-006-B8_FLI.pep
ARSKARSARRAEGPPERRGAMAAGYRAEDDYDYLFKVVLIGDSGVGKSNLLSRFTRNEFSLESKSTIGVEFATRSLQVDGKVVKAQIWDTAGQERYRAITSAYYRGAVGALLVYDVTRHSTFENVERWLKELRDHTDPNIVVMLVGNKSDLRHLVAVQTDEGKAFAERESLYFMETSALESTNVENAFAEVLTQIYRIVSKRAVEAGEDAASGPGKGEKINIKDDVSAVKKGGCCSS

SEQ ID NO: 60245 - protein, 147 aa, Zea mays
  Clone ID: LIB3600-008-B6_FLI.pep
EAETSSDQANQLEHRVTRNTRGSIVSQPHIVKRNTDTKQLPYRSPRCFRDGWVGGPGSFLSTFLETRASNCALLCLGLQLLQCLFLIFLLLQISKITLVVLLLVDLGRLQRLGLPSLLRHGRRGDGSAGEGRNPRLNSTGARHRDGE

SEQ ID NO: 60246 - protein, 582 aa, Zea mays
  Clone ID: LIB3600-011-E12_FLI.pep
TPEHITVTDTMVSARIVVLLATLLCAAAAVASSWEDDNHHHHGGHKSGQCVRRCEDRPWHQRPRCLEQCREEEREKRQERSRHEADDRSGEGSSEDEREQEKEKQKDRRPYVFDRRSFRRVVRSEQGSLRVLRPFDEVSRLLRGIRDYRVAVLEANPRSFVVPSHTDAHCICYVAEGEGVVTTIENGERRSYTIKQGHVFVAPAGAVTYLANTDGRKKLVIAKILHTISVPGEFQFFFGPGGRNPESFLSSFSKSIQRAAYKTSSDRLERLFGRHGQDKGIIVRATEEQTRELRRHASEGGHGPHWPLPPFGESRGPYSLLDQRPSIANQHGQLYEADARSFHDLAEHDVSVSFANITAGSMSAPLFNTRSFKIAYVPNGKGYAEIVCPHRQSQGGESERERDKGRRSEEEEEESSEEQEEAGQGYHTIRARLSPGTAFVVPAGHPFVAVASRDSNLQIVCFEVHADRNEKVFLAGADNVLQKLDRVAKALSFASKAEEVDEVLGSRREKGFLPGPKESGGHEEREQEEEEEREERHGGRGERERHGREEREKEEEEREGRHGRGRREEVAETLMRMVTARM

SEQ ID NO: 60247 - protein, 246 aa, Zea mays; identical to SEQ ID NO: 55068
  Clone ID: LIB3600-012-A10_FLI.pep

SEQ ID NO: 60248 - protein, 147 aa, Zea mays
  Clone ID: LIB3600-015-A10_FLI.pep
SDLLSSNSIKFIDHLEEILQAYIDRREQVRLIKELYGNQIGELFHSLPYNMIEFVLEDFECKVTISIRYSDLLQTLPSQARVLAWPLRSAKKISTRSSSASAAQPVPFHLSYAEEALKTLCLPEAYADIVLELPHALKRILSSRDSD

SEQ ID NO: 60249 - protein, 183 aa, Zea mays; identical to SEQ ID NO: 44872
  Clone ID: LIB3600-018-D9_FLI.pep

SEQ ID NO: 60250 - protein, 202 aa, Zea mays
  Clone ID: LIB3600-018-G6_FLI.pep
AMVRLTADLIWKSPHFFNAVKERELDLRGNKIAVIENVGATEDQFDTIDLSDNEIVKLENFPYLNRLGTLLVNNNRITRINPNLGEFLPKLHTLVLTNNRLTNLAEIDPLASLPKLQFLSLLDNTVTKQPDYRLYVIHKLKHLRLLDFKKVKQQVCSFPLEWLQNMFWDGPQKCWQQKRQTSNSFDFGFSRIRCINTMECFG

SEQ ID NO: 60251 - protein, 171 aa, Zea mays
  Clone ID: LIB3600-019-G3_FLI.pep
LTPPTASENLPIPSSLRGEDVGARQGREGPGQGRSEAPPEGAPRQHPGDHEAGDPAAGAQGRREAHLRAHLRGDPRRPQDLPGERDPRRRHLHRARAPQDRHSHGRRLRAQAPGPHPLRLRRLGYAGRARASLSSLRFLFLQFARCGLTGKMLVNVALDQACCACLKKCQL

SEQ ID NO: 60252 - protein, 237 aa, Zea mays; identical to SEQ ID NO: 44890
  Clone ID: LIB3600-020-B7_FLI.pep

SEQ ID NO: 60253 - protein, 124 aa, Zea mays
  Clone ID: LIB3600-021-C11_FLI.pep
TSVATEETAMVAAMELEILGMNFGCVLAALSDAKIPDKGCLLPLISKLLGYAIVAASTTVKLPQILKILKHGSVRGLSVASFELEVVGYTIALAYCIHKGLPFSAYGELAFLLIQGLYLTSCLE

SEQ ID NO: 60254 - protein, 286 aa, Zea mays; identical to SEQ ID NO: 47877
  Clone ID: LIB3600-023-C7_FLI.pep

SEQ ID NO: 60255 - protein, 299 aa, Zea mays
  Clone ID: LIB3600-024-H1_FLI.pep
GVVSEAAASERFQAVRHPHIPSLSFRGKTDFFSPKHGWPEDIAWHPAGETIFAVYTADNGDSQVSMTNLISGQRKVTFLPEKPHTKGIINNISFMPWSDACFVTGGSDHAVILWEDKDDSWKPKRVHKDFHSAAVMGVAGLQQKRTILSVGCDKRIIGFDLSAGRTEFKNLLDSKCMSVLANPCDFNLYMVQTGDPGRQLRLFDVRLRQTEVHAFGWKQESSESQSALINQSWSPDGWYVSSGSADPVIHIFDIRHHGQNPCQSVEAHQKRVFKAVWHQTLPYLTSISSDLNIGIHKYS

SEQ ID NO: 60256 - protein, 196 aa, Zea mays
  Clone ID: LIB3600-025-G12_FLI.pep
WCKCTSTNGRKCQTQWPSGSFKFELPPIYCSRNLQRALVSCLVWLLLNQGVHPCDKRRSITEYRPLFPAIDFSLIENDEDVLWEPDVREPNEAVALRGMKFMDWLWTREEKEIAIVSHSGFLFHTLSMYSKECHPTIRDEVSKHFANCELRSMVLVDRSMLGSYSSRFNYAGKNPTGLDVPSDIADKKQVDEAQKN

SEQ ID NO: 60257 - protein, 513 aa, Zea mays
  Clone ID: LIB3600-026-B7_FLI.pep
GSCALLTLSTSVSGSRFQLRSNPASVPRRASTSGAGAAGEIREHSSPATPHRPWPQLAADRERRRRGRADPDPVGGKDLIAPTTMAGAVSALFLLDMKGRVLVWRDYRGDVSALQAERFFTKLLDKEGDSEVHSPVVYDDAGVTYMFIQHNNVFLLTAARQNCNAASILLFLHRVIDVFKHYFEELEEESLRDNFVVVYELLDEMMDFGYPQYTEAKILSEFIKTDAYRMEVTQRPPMAVTNAVSWRSEGIRYKKNEVFLDVVESVNILVNSNGQIVRSDVVGALKMRTYLSGMPECKLGLNDRVLLEAQGRATKGKAIDLDDIKFHQCVRLARFENDRTISFIPPDGSFDLMTYRLSTQVKPLIWVEAQIEKHSRSRIELMVKARSQFKERSTATNVEIEVPVPSDATNPNIRTSMGSAAYAPERDAMVWKIKSFPGGKEYMCRAEFSLPSITAEEGAPEKKAPIRVKFEIPYFTVSGIQVRYLKIIEKSGYQALPWVRYITMAGEYELRLI

SEQ ID NO: 60258 - protein, 233 aa, Zea mays; identical to SEQ ID NO: 59451
  Clone ID: LIB3600-026-E12_FLI.pep

SEQ ID NO: 60259 - protein, 305 aa, Zea mays
  Clone ID: LIB3600-026-G1_FLI.pep
RYMVQRLQARQRLLHVIAEAQKNGGYCAFVDAEHALDPALAESIGVDTNNLLLSQPDCAEQALSLVDTLIRSGSVDVVVVDSVAALVPKTELDGEMGDAHIALQARLMSQALRKLSHSLSLSQTILLFINQIRAKVATFGFGGPTEVTSGGNALKFYASVRLNIRRIGLVKKGEETIGSQIAVKIVKNKHAPPFKTAQFELEFGKGICRSSELFELGLKHKLIRKSGGSYYSFNGKAFNGKSNLKSYLTENKSVANDLEMELKRLMGTDASKEQEAGDSSQSDFPEESVTPEASSEEDLGAIIEG

SEQ ID NO: 60260 - protein, 294 aa, Zea mays
  Clone ID: LIB3600-028-A7_FLI.pep
NLYCSFRDLMLSLTRHSDIQVQQIARSFRDRWIPPNNARSEPTEYPHTSTFVHDIQGTNTVWSSARRKRKSRWDYQPDEHYKMPGLKIQKVCSGHGEFDVQFGFMKNKLKRNQGANNYHNDVLGMGSSTEGEDDEAPPPGFESQLDRRPAQLSIGSEVAPGLCMERYQSSLSISYGVPVTLVQHFGTPESEGGQCHKKWKVAPGVPFSPFPPLPPYPRGNPCPSTSSSQMFQHDGIPQVKHNNSGQRGRIMGRDGRVHRSWRNESRTKWQYHHQGRRFSSTHHRFERSEPARPQ

SEQ ID NO: 60261 - protein, 371 aa, Zea mays
  Clone ID: LIB3600-028-G5_FLI.pep
QISSYPNAGTPPKNPCGVALTLATNPQPQTFLSGGGRRARAREMDRPSGTSYQRFPRVRIRELKDDYAKFELRDTDASMANALRRVMIAEVPTVAIDLVEIEVNSSVLNDEFIAHRLGLIPLTSAAAMQMRFSRDCDACDGDGSCEYCSVEFHLSVHATDSDQTLEVTSNDLRSMDPKVCPVDQARAYQHALGGTDPFGANASNENRGILIVKLRRGQELRLRAIARKGIGKDHAKWSPAATVTFMYEPDIRINEELMETLTVEERISLIESSPTKVFELDSANQVVVKNAEAYTYDDEVIKHAEAIGKPGLVEITAKEDSFVFTVETTGAITAYELIMNAITVLRQKLDAVRLQDDDGDLGELGAHLGGP

SEQ ID NO: 60262 - protein, 241 aa, Zea mays
  Clone ID: LIB3600-029-A5_FLI.pep
PTTLSRPKTRSPRQGPRAPEGRVAMAAGYRAEDDYDYLFKVVLIGDSGVGKSNLLSRFTRNEFSLESKSTIGVEFATRSLQVDGKVVKAQIWDTAGQERYRAITSAYYRGAVGALLVYDVTRHSTFENVERWLKELRDHTDPNIVVMLVGNKSDLRHLVAVQTDEGKAFAERESLYFMETSALESTNVENAFAEVLAQIYRIVNKRAVEAGEDAASGPGRGEKINIKDDVSAVKKGGCCSS

SEQ ID NO: 60263 - protein, 190 aa, Zea mays
  Clone ID: LIB3600-030-H3_FLI.pep
RHHMLGRLSSIIAKELLNGQKVVVVRCEEICMSGGLVRQKMKYLRFLRKRMNTKPSHGPIHFRAPSKILWRTIRGMIPHKTKRGEAALARLKTYEGVPPPYDKTKRLVIPDALKVLRLQPGHKYCLLGELSKEVGWNYHDTIRELEEKRKEKAKVAYERRKQLAKLRLKAEATAEEKLGSQLDILTPIKY

SEQ ID NO: 60264 - protein, 115 aa, Zea mays
  Clone ID: LIB3600-032-B11_FLI.pep
VEKLQMPLCFAFHLVIFFLFYDSKTPHPQMKHIFKIAAILVAISAIWIALLETSTVPRSYTWLLPIYLVVALGCYGLFMVGFGLMFFPTCPREAVLLQQVSYFNVRLNCRTLETS

SEQ ID NO: 60265 - protein, 479 aa, Zea mays
  Clone ID: LIB3600-033-E11_FLI.pep
SSLLSPLSPAPFVSGELGFAPPPRHPTAPAILGSPAMYGGDEVSAIVIDVGSYSCKAGYAGDDTPKAVFPSVVGSIEQTEDTDDPKPEKEADSASDSKNGAKPMDVDKAKTKRRLYVGQELEFRRDHMEVISSMKDGTVTDWDIVDNIWNHAFRRRLLINPEEHPMLIAEPSTNTAQQREKAAELMFENYKVPALFLAKNAVLTSFASGRATSLVVDSGGGSTVVSAVHDGFVLQKSVSTSPVGGEFLTDCMMKSLESKGIVIRPRYSFKKKEISPGEYKIVDLDLPNTTESYRLYCMRAIASDVKESVCRVPDTAFDEVAYANVPTTSYELPDGQTIEVGADRFKVPDILFNPSLSQTIPGIDGFADSIPVRGLQRMVIDSVNKCDVDIRKELFSNILLSGGSSSILQLKERLEKEVLEESPQAARVKVMASGNSVERRFSVWIGGSILASLGSFQQMWFSKAEYEEHGVSYIQRKCP

SEQ ID NO: 60266 - protein, 358 aa, Zea mays
  Clone ID: LIB3600-035-C12_FLI.pep
IRDTSRRRRAESCRTVEEAQASAGFWSGAMEAASNGGLLYHEVQEGKLCAVHCVNTTLQGPFFSEFDLAALAADLDQRERLVMLEGSRSPGADNATAGDFFAEGEGSHNVSLGGDFSIQVLQKALEVWDLQVIPLDSPAAGSSQFDPEQEVAFICHLQDHWFCIRKVNGEWYNFNSLYPAPEHLSKFYLSAFIDTLKGSGWSIFAVRGNFPKECPMATEGSNGFGQWLTPDDARRITASCNQVQAPTQQVQPPLLGDRSGGMSEMDMIVAQQEEADLNAAIAASLMDTGGPFASYDADQEYSNSQDAPAAGPARSKEEADKSEPSAPPCEEETQELASGSDTKREVSSVEEKGTAREE

SEQ ID NO: 60267 - protein, 137 aa, Zea mays
  Clone ID: LIB3600-039-A1_FLI.pep
AVRTSPSSLPRAERSLLQSHVAAAVWLLRQVHLLLAELLLQLRQRKKRRWKRRKKAMMIWASASSTRLHSHHSIVSGSEIKGKPESCLDFNLILCWKVLQRLLIVSVFGNSAVDCYDGWDLLVNQSFSILYPELVIP

SEQ ID NO: 60268 - protein, 179 aa, Zea mays
  Clone ID: LIB3600-041-B4_FLI.pep
VQSKPALTTFLQTNTACAAYRTAVLQYLAFFRPHKQLANCSNTRTAATAKRGAAGLAAEAVEGAALALKRVDDVHGGDGLTARVLGVGDGVADDVLQEDLEHAAGLLVDEPRDALHAAPPRQPPDRRLRDPLDVVAQHLPVTLRAALAQALAALAAPRHLRRGDERIGEFLLVGWCGEP

SEQ ID NO: 60269 - protein, 184 aa, Zea mays
  Clone ID: LIB3600-043-D4_FLI.pep
TGSPSPHVYSISFFLSVPRYLHAQVVQNASHRDVRLANLNSDCGDLRELEQCGLCDRVSYRLQEVAWRALDNILCNAVDIGVADSVSDAVGLAGSGEVHPDVDVNHEHLSQRLLLLKDTVEAMELKAAQNELVAAAPHSRRLLLRHGSVIERAEQQRFRTVADLETDQRGLPSYYDKANFFRQN

SEQ ID NO: 60270 - protein, 200 aa, Zea mays; identical to SEQ ID NO: 53827
  Clone ID: LIB3600-046-F12_FLI.pep

SEQ ID NO: 60271 - protein, 288 aa, Zea mays; identical to SEQ ID NO: 47549
  Clone ID: LIB3600-050-E4_FLI.pep

SEQ ID NO: 60272 - protein, 298 aa, Zea mays
  Clone ID: LIB3600-053-C3_FLI.pep
EKEKKRLCPPRDQSIRGPAACHGEAGDGQGGAAVRAGAGGKAVGVHQRGNIRVRGAAPGPGGGAVHVRVRGQAGARRRRRGAGGRGGRQRARPRRAPGWRRLPRGTGEVRCPARARGVPRAGRARSRVRARRRRPGAAGLPPLPVPAAARGDHAARRGAAVGAGLRAQLLPGVRARRRPRAAAAVGRAGASAAGEPAVPGRRGAKPPPQRRRAGVAVPGRERAVAGGSAAQRAEGVRHAPERRAAAGEAPRRRAGVAQPRPRGPRAAQLGGGSQETGAAHRAPVIIARARRHPSFPVP

SEQ ID NO: 60273 - protein, 137 aa, Zea mays
  Clone ID: LIB3600-055-G9_FLI.pep
PPSPPPPPPLFLEMGGKCPHRKVKKRRLSHKTARRGKFLLKADDAVYDELVKLADQGKDAETKELPVDEDLPGLGQFYCLHCDRYFASESVKDDHYRSKRHKKRVKVMSGPAPHTQLDAELAAGMGKPDNGLKLMSM

SEQ ID NO: 60274 - protein, 93 aa, Zea mays
  Clone ID: LIB3600-058-G12_FLI.pep
FTPVLCLKLRSPRQATRGSKSEVSLIHFILTQRGSLHLGAAYSFRRHGCSSRYDCHLAVSVPHEVGAVSEQDLDRLHSPIERSPADDWLQMQR

SEQ ID NO: 60275 - protein, 173 aa, Zea mays
  Clone ID: LIB3600-059-H2_FLI.pep
ALLTRTGILPWLQAKIVDPVLQVIRRGAEPKQLAFSAALGVTIGIFPICGTTVILGAVVVAMLGSRCNAVTLMVLNLAATPIELSLIVPFLRLGEAVTGSGHFPLTADALKNVLTGHASKDVLMSIVHAMLGWLIAAPIVLVVLYAVSFPCFKVLVNRFGGIPSSPRTPIKAV

SEQ ID NO: 60276 - protein, 143 aa, Zea mays
  Clone ID: LIB36-001-D8_FLI.pep
SKAAAAAMGSDLETEKKKTPVALMPIAKPLAGKKLCKRTLKLVRRASEAKCLKRGVKEVVKSIRRGNKGLCVIAGNISPIDVITHVPILCEESNVPYIYVPSKEDLATAGTTKRPTCCVLVLTKPNKGELSDEVKDKLKSDYD

SEQ ID NO: 60277 - protein, 183 aa, Zea mays
  Clone ID: LIB36-001-F6_FLI.pep
KIKPRVQASIWQVGTTQATVRQERAAERSTVGLLEPGAGATTTELLRLAAPGVGDEKGAVVPGEDVLDLLLGGLVDVLLVVGDEPLGDGLADGVDLQRLPAASDADPHVDVLEPGAPRQQDGLEGLEAEHLRPDELNRDAVHLDQPAPRLGVGDGHSRLLAAEALDRAGGRALEHGRHVCDLA

SEQ ID NO: 60278 - protein, 149 aa, Zea mays
  Clone ID: LIB36-005-E9_FLI.pep
VIKNKNLSVKQHDDEIEVEIDSMDAETLWELDRFVSNYKKNLSKQKRKAERAMLARQDAELRAQHPIQQPQPTPVPQEPFGEKSPKQVVKDSLEGEQLPASAPEQNGENRQNASSSSNSSSSSSGSGSSSSGSDSDSSSSDGSDAGNSS

SEQ ID NO: 60279 - protein, 379 aa, Zea mays; identical to SEQ ID NO: 42214
  Clone ID: LIB36-012-C9_FLI.pep

SEQ ID NO: 60280 - protein, 166 aa, Zea mays
  Clone ID: LIB36-019-C8_FLI.pep
LWFSVLTRHKQSSFLQKGMATSSSSLRQETRLLVLLAAEPSKLVRDHNVELRSTLHDLLALLSGHVVSNFSAVGPVVHHEQLQLRNVVDHKLLELVGEVVPGRLVRTITNVGHQGASLELPPDTGVNTLWPAPAWLKALVAVEVGPLELLDPLLHDLLRQQRHRHL

SEQ ID NO: 60281 - protein, 240 aa, Zea mays
  Clone ID: LIB3603-001-C9_FLI.pep
PLPFSPSSPSPHGSKGTGEMAILYALVARGTVVLAEHSAAATNAGAIARQVLERLPDGGADSHVSYTQDRYVFHAKRTDGITALCMADDAAGRRIPFAFLEDIHGRFVKTYGRAALTALAYAMNDEFSRVLSQQMDYYSNDPSADRINRMRGEINQVRSVMIDNIDKVLERGDRLELLVDKTANMQGNTVRFKRQARRFRNTVWWRNVKLTAALILLLLVIIYVVLVFVCHGFTLPTCIR

SEQ ID NO: 60282 - protein, 310 aa, Zea mays; identical to SEQ ID NO: 50324
  Clone ID: LIB3603-001-E1_FLI.pep

SEQ ID NO: 60283 - protein, 239 aa, Zea mays
  Clone ID: LIB3603-002-D7_FLI.pep
ATANPSSDSSPARGSPPQLFVPGGPRPPPEMSYAYLFKYIIIGDTGVGKSCLLLQFTDKRFQPVHDLTIGVEFGARMINIDNKPIKLQIWDTAGQESFRSITRSYYRGAAGALLVYDITRRETFNHLASWLEDARQHANANMTIMLVGNKCDLSHRRAVSYEEGEQFAKEHGLIFMEASAKTAQNVEEAFVKTAGAIYKKIQDGVFDVSNESYGIKVGYVVPGQSGGAGSSSQGGGCCS

SEQ ID NO: 60284 - protein, 175 aa, Zea mays
  Clone ID: LIB3604-002-F12_FLI.pep
ERRTHKTSAEFFLPSTDSRPLATDPSCQLNVLGHDGHALGMDRAQIGIFEETNQVGLCCLLQSKHGMALEAQIRLEILSNLPHKPLERQLPNQQLSALLVLADLTKSNSPWAVTVRLLHSSSCGCRLPGCLCSELLPRSLSSSGLASGLLGTRHLANDVLQQARAASLPTSRETT

SEQ ID NO: 60285 - protein, 470 aa, Zea mays
  Clone ID: LIB3606-002-H9_FLI.pep
TRRLPSAPPFRPLSLASSISPPTMGKEKPHINIVVIGHVDSGKSTTTGHLIYKLGGIDKRVIERFEKEAAEMNKRSFKYAWVLDKLKAERERGITIDIALWKFETTKYYCTVIDAPGHRDFIKNMITGTSQADCAVLIIDSTTGGFEAGISKDGQTREHALLAFTLGVKQMICCCNKMDATTPKYSKARYEEIVKEVSSYLKKVGYNPDKIAFVPISGFEGDNMIERSTNLDWYKGPTLLEALDQITEPKRPSDKPLRLPLQDVYKIGGIGTVPVGRVETGVIKPGMVVTFGPTGLTTEVKSVEMHHEALQEALPGDNVGFNVKNVAVKDLKRGFVASNSKDDPAKEAASFTSQVIIMNHPGQIGNGYAPVLDCHTSHIAVKFAELITKIDRRSGKELEKEPKFLKNGDAGMVKMIPTKPMVVETFSAYPPLGRFAVRDMRQTVAVGVIKSVEKKDPTGAKVTKAAAKKK

SEQ ID NO: 60286 - protein, 389 aa, Zea mays
  Clone ID: LIB3606-004-C11_FLI.pep
ELPTPKPSRLPRVKVAPPPPRSARDRQGLSPPLDMSRTLVQPVGQKRLTNVAVVRLRKHGQRFEIACFPNKVLSWRSRVEKDIDEVLQSHTVYSNVSKGILANSKELAKAFGTDDLTQICIEILEKGELQVSGKEREAQLSSQFRDIATIVMEKTINPETRRPYTITMIERLMHEIHFAVDPNLTSKEQALKVIKKLTEHFPIKRAPLRVRFTAPKPNFPGLMEKIGGWNATIISKDELSTQPSIVCEIEPSLLRSCEERLKDVQGRVEVLSVSTHVESGPSVEQHDSVEVPQAAPVKEPDAVAQISETMQKQSISTESQGNAQGKQQRRCKECDVLVEDKLYREHCKSGWHKHNYTRHKNGLPPLSQEECMVEMELADSKKDLKDYDF

SEQ ID NO: 60287 - protein, 378 aa, Zea mays
  Clone ID: LIB3606-004-E5_FLI.pep
GDPDDVKADEISLVRNLYSLVLSYYLRFVRGGWHQLDDTANYFLLKTDQGQLSCSDLLRDILDDIAGSLLHKSVEDNIFLLQPCCDNVLHFLNLIQELLISQMGIRLLFLSPSISEESSHDNIWKEDIKSTVNDILNTESHGQFTRFSDVNEVSDDWWIFFDKVWSIIRHLNGKGPSKFIPKDPNVEVASLGQRARGLVESMNVPAAEKVAVVSGGGGIGTALGIKVNRFAEKATTSREEIIPRIFFHLVILYLCKAGLENASKCVIQFMSLLPILLISEDDQSKNKLHFLIWSLLIVRSQYGQLDDSARFHVFSHLILETIIYGKSMLVTNILERDDSVDVNNKETGFILSFIQKNRVLAAVCIFAPSPYLCLELFC

SEQ ID NO: 60288 - protein, 241 aa, Zea mays; identical to SEQ ID NO: 47787
  Clone ID: LIB3606-007-B7_FLI.pep

SEQ ID NO: 60289 - protein, 289 aa, Zea mays
  Clone ID: LIB3606-009-E2_FLI.pep
LQTLSVCNFRYGCLIHHRLLGRPACLPAAQCAGPFHFIPGCDPSFKRRHTFSSLVLERWYRTAGRVEALQDLRLAPDCAGFLILLLPAKQSPEQATHAAGGRRFRRCHDRRRLRQARERVAAHSRCKVGIVGGQRRVGEDAVEHESGALNEGQQDAAHERGPARGPHALAHREEPARGCARNDGVPRVLLLARVHHGAVEGGEEAAPDGEAAPHARRVHAHGLRASGQAHPVGGVVDALDEVIGGAANGAHPERAADVVQDPVRARLPRRLRRPHVPLPALLRLLLCPL

SEQ ID NO: 60290 - protein, 396 aa, Zea mays
  Clone ID: LIB3606-011-A8_FLI.pep
TNQTTASSPDRRGASPPAPMATRYLIVSLPVQSPGATASSLWSRLQDSISRHSFDTPLYRFNVPDLRVGTLDSLLALSDDLVKSNVFVEGVSHKIRRQIEDLERAGGVETGTLTVDGVPVDTYLTRFVWDEGKYPTMSPLKEIVGSIQSQVAKIEDDMKVRASEYNNVRSQLSAINRKQSGSLAVRDLSNLVKPEDMITSEHLVTLLAIVPKYSQKDWLSSYEKIDTFVVPRSSKKLYEDNEYALYTVTLFAKVVDNFKVRAREKGFQVRDFEYSPEAQESRKQEMEKLLQDQEAMRTTLLQWCYASYSEVFSSWMHFCAVRVFVESILRYGLPPSFLSAVLAPSTKSEKKVRSILEELCGNAHSIYWKSEDDVGVAGLGGETEAHPYVSFTINFV

SEQ ID NO: 60291 - protein, 328 aa, Zea mays
  Clone ID: LIB3606-011-B8_FLI.pep
TYPDIGHAAFGTAGRIIISIILYMELYACCIEYLILESDNLSKLFPNAHLTMGNLTLDSHMLFAILTALVVMPTTWLRDLSCLSFISAGGVIASIVIVSCLFWVGLVDHVGTVESEGTALNLPGIPIAIGLYGYCYSGHGVFPNIYSSLKKSNQFPAVLFTCIALSTVLFAAAAIMGYIMFGESTESQFTLNLPPNLVASKIAVWTTVTNPITKYALTMTPLALSLEELLPPNKQTYPNIMMLRSALVVSSLIIALSVPFFGLVMSLVGSFLTMFVAYILPCACFLSILRSKVTWYQVVLCVFIIVVGLCCVGVGTYSSLSKIIQKYQ

SEQ ID NO: 60292 - protein, 96 aa, Zea mays
  Clone ID: LIB3606-011-E7_FLI.pep
LNIPPLQEMGRDSLISFLLPDDENRTRDVHLHCTAARKRFTGPFQFEVRTFSEVEGASRGRIDVGWNSRRRRGGLRPPPLSLCSLSLSTPVKHGPR

SEQ ID NO: 60293 - protein, 202 aa, Zea mays
  Clone ID: LIB3606-012-A6_FLI.pep
KKKNTRKIKSGDGDSREPLSGREGKERRSGGEMGAAESVPETSIHEFTVKDCNGKEVSLETYKGKVLLVVNVASKCGFTETNYTQLTELYQKYRDKDFEILAFPCNQFLRQEPGTDQQIQDFACTRFKAEYPVFQKVRVNGPDAAPVYKFLKASKPGLFGSSRIKWNFTKFLVGKDGKVIERYGTSTAPMAIEKDIQKALEE

SEQ ID NO: 60294 - protein, 531 aa, Zea mays
  Clone ID: LIB3606-013-E6_FLI.pep
NPSLAASRSRRNKYTYMASDSGETESHSDLPSIKMSSTRTDFENESYLQHPVYFSEEQTSDFIEKQITESSERECSESETEDDAELLQNASVILRTESHAPCPYSIPVSDKFKHVDYEDNEVIYSTYMPQLNEYEEEDGSSELGVSQWHMKGKRNNRNAVKRLVDMRDGNTWLNKYNGSLKGSLHNTNGGNPRKEGMHTSGEQFFEESFYQIKEEPNYDSDETNLFENMSHSETNLYYGKKYPSYLRTTRDLSRGYSYFNDSSNVSPLNKDTERIYHVDRNAYWDRPSFYQRKLTSSFGGMGPMLFNVNLKVQASYQGEHVPLVSLMSRLNGKAIVGHPIQIEIVEDGSTAVFCGDSGMQETTAAPPAWPTGRRTAMQRVPRSNPSGALLDGDNEGGLVYSDYETKPTLRKYSSSSNHQVKVNNKISSNARRSSAKPPKKSSKKTNLSSQKLRALSSISTAKNHHGEGGQAKANWHNDIFGGLMGSEGAVPLVTCVPTKVVFTRILEAVGRPPLSAARRVRMASPPVRDPP

SEQ ID NO: 60295 - protein, 124 aa, Zea mays; identical to SEQ ID NO: 47585
  Clone ID: LIB3606-014-B12_FLI.pep

SEQ ID NO: 60296 - protein, 79 aa, Zea mays
  Clone ID: LIB3606-014-G10_FLI.pep
ANRRDESQNVFLLLPYSLRSHDVGIESALIAVALRARHRCRTRACDPRGSWRSAAHSCCTRRTLPGPVPGQSPSLQDEV

SEQ ID NO: 60297 - protein, 135 aa, Zea mays; identical to SEQ ID NO: 36896
  Clone ID: LIB3606-015-F5_FLI.pep

SEQ ID NO: 60298 - protein, 390 aa, Zea mays
  Clone ID: LIB3606-019-H7_FLI.pep
AMANRTDPLAKSIHGTNPQNLVEKIVRSKIYQSTYWKEQCFGLTAETLVDKAMELDHTGGTYGGNRKPTPFLCLALKMLQIQPDKDIVVEFIKNEDYKYVRVLGAFYLRLTGTIADVYQYLEPLYNDYRKIRHKLSDGQFTLTHVDEFIDELLTKDYSCDTAMPRIQKRWVLEASGTLEPRRSALEDDFEEEEEDKEEQPMEIDEPNGRENDNHRGRSLARERDRDWDHDRKHERHNRDKDYDRDRDYDRDYGRGRERHRDRDRERDRNRDRDRDRHRLRDDDYNRNRDRDRERDGRERERRDRDRGRHRSRSRSRDRRDRDREDGEYRRRRGRGSVSPRGRGEDGGPREEPKRKKEKKEKGEGNAPDPNDPEIIEMNKLRASLGLKPLK

SEQ ID NO: 60299 - protein, 136 aa, Zea mays
  Clone ID: LIB3606-020-A1_FLI.pep
GTSRSCGCTLPPPPSAQISACGLAMASFSEAPPGNPKAGEKIFKTKCAQCHTVDKGAGHKQGPNLNGLFGRQSGTTAGYSYSAGNKNKAVVWEENTLYDYLLNPKKYIPGTKMVFPGLKKPQERADLIAYLKEATA

SEQ ID NO: 60300 - protein, 150 aa, Zea mays
  Clone ID: LIB3606-022-C12_FLI.pep
VILAPSIPSIMLTLLLPNNQYEQPAAFTTLLLVDQTPELTNQTYSAKGRHTQQTEHPHVHFTSTDCMLEAVAAQPSRIIHRWKTPASKQLKRSHGISYAHIATSPTNHHHQTRGKEGRLPTATHPKVRTATHHLSCSCPTQPPIPHHSIT

SEQ ID NO: 60301 - protein, 180 aa, Zea mays
  Clone ID: LIB3606-023-G9_FLI.pep
KNPVPAAETSLMKIEARFAFPISDYEFVAEGTGSQAAEVEQICSRCRRDRAALQQGPSTGAARSTGAAEHQEDEPGTVGRGSDGGLEEEWMTSARPEEDEQGTAGRGSAGRSPSSSTRRWTASPARRARFSRRTSRSAARARSEEDERPRKTTSRGQGTAGRSTDGAHCAAHQSSRHPPG

SEQ ID NO: 60302 - protein, 365 aa, Zea mays
  Clone ID: LIB3606-025-G7_FLI.pep
AEKVHLIELRRANNTEIMLTKVKMPLSDLVSAALALDQSTLDVDQVENLIKFCPTKEEMELLKNYTGDKQILGKCEQFFLELMKVPRMESKLRVFSFKIQFGSQVADLRRNLDIIDSSCNEIRTSLKLKEIMKKILLLGNTLNQGTARGAAVGFRLDSLLKLTDTRATNNKMTLMHYLCKVLAARSPQLLNFYADLVSLDAASKIQLKMLAEEMQAVSKGLEKVQLEYDASERDGPVSKNFREKLKEFTDNAGSDVQSLSSLFSEVGKKADALIKYFGEDPVRCPFEQVISTLLTFVTTFRKAHEENLKQAELEKKKAEKEAEAEKAKIAQLTGKNHSKSSNPSRQAKQAIERTRSVSRRGRDAG

SEQ ID NO: 60303 - protein, 223 aa, Zea mays
  Clone ID: LIB3606-025-H12_FLI.pep
VAVRAMSAAAAASSVTKFIKCVTVGDGAVGKTCMLICYTCNKFPTDYIPTVFDNFSANVSVGGSIVNLGLWDTAGQEDYSRLRPLSYRGADVFILSFSLVSRASYENVLKKWMPELRRFSPTVPVVLVGTKLDLREDRSYLADHSAASIISTEQGEELRKQIGAVAYIECSSKTQRNVKAVFDTAIKVVLQPPRRREVTRKKMKARSNQSLRRYLCGSGCFTS

SEQ ID NO: 60304 - protein, 209 aa, Zea mays
  Clone ID: LIB3606-026-F3_FLI.pep
SKATPYPIQPSGCSSVRPASAVQDGSEDVGELSRQCAQALGGRRRSPGCCLLYLQVLLHCSRWVEVHSVSRMGQDDGRRRHRWHHGPCSGPPGRGGVRGAAGTRHEGGRGRILRQRGECQGHQRRQLPDLRRGRRGQCQTVRDARPDQHEPVRGRVDDQGEAEQPGGGGRPAGRRQVHQALRGGRRSLDPGPPSQQAWMLTTTVRVWWC

SEQ ID NO: 60305 - protein, 336 aa, Zea mays
  Clone ID: LIB3606-028-E11_FLI.pep
KSRARSPAPRDSVTATARMGGEAKKLPRIDFSEVDPSAPGGQAWGTARGEVMDALATFGCFEAHCPALTPRLRAELFDGAVRPLFALPADAKRRNCYGADRPFHGYLGDVPGFPGYESLAIVDGTKDESVRGFARLMWPDGGDNSDSFCGTVVEAAQRIFQLEEAVRRMVMEGLGVAKHHDALSASMWHLFRMAEYKAPNAAEKVVRYGAHQDTNWLSVVCQHEVAGLEVQSRDGEWIVVQPSPTSLVFMVGNELRAWTNDRLYAPFHRITVAGDVPRYSAMLFSVPSFQVQVADELVDDEHPPRFKPHDNNDFVCFCVSEEGALHQDKLKAFCGV

SEQ ID NO: 60306 - protein, 208 aa, Zea mays; identical to SEQ ID NO: 47551
  Clone ID: LIB3606-029-B9_FLI.pep

SEQ ID NO: 60307 - protein, 136 aa, Zea mays
  Clone ID: LIB3606-030-C7_FLI.pep
PFNKNDYYDDQVLQLSAADVAAIWSSSFHYRGTLRPVSCDTARSTSAPSRDVSRAAETALCSGCRDRARAMRRPVAEALGTGARVRGREAEGLRLAVDRRKAAAAGRVKERKRDAMACRRQGWDEHAAEAGGAVRP

SEQ ID NO: 60308 - protein, 168 aa, Zea mays
  Clone ID: LIB3606-030-H9_FLI.pep
LTSHGRLPLPQASTSLLTPAVAPDPRASMAHSLAASFSPAAARRQMTNVIPSWSSVSFQSHRRASVSIRSRPNSLGFKICCSAKKETVDKVCSIVKEQLALPDGTAITGESKFAELGADSLDTVEIVMGLEEAFNITVDETSAQDIATVQDAADLIEKLMLEAPPKVV

SEQ ID NO: 60309 - protein, 330 aa, Zea mays; identical to SEQ ID NO: 51950
  Clone ID: LIB3606-032-A1_FLI.pep

SEQ ID NO: 60310 - protein, 151 aa, Zea mays
  Clone ID: LIB3606-033-F12_FLI.pep
VPAQVRFGAQSLAISRLRARKMADPELEAIRKRRMEELMAKHGGGGANQQNASQQKAQEDAKQEAEERRQMMLAQILSSEARERISRIALVKPDKARGVEDVLLRAAQTGGISEKVSEERLISLLEQINTHTSKQTKVTIQRRRSVLDDDD

SEQ ID NO: 60311 - protein, 263 aa, Zea mays
  Clone ID: LIB3606-036-B4_FLI.pep
LIFAGKQLEDGRTLADYNIQKESTLHLVLRLRGGMQIFVKTLTGKTITLEVESSDTIDNVKAKIQDKEGIPPDQQRLIFAGKQLEDGRTLADYNIQKESTLHLVLRLRGGMQIFVKTLTGKTITLEVESSDTIDNVKAKIQDKEGIPPDQQRLIFAGKQLEDGRTLADYNIQKESTLHLVLRLRGGMQIFVKTLTGKTITLEVESSDTIDNVKAKIQDKEGIPPDQQRLIFAGKQLEDGRTLADYNIQKESTLHLVLRLRGGY

SEQ ID NO: 60312 - protein, 186 aa, Zea mays
  Clone ID: LIB3606-037-A10_FLI.pep
WLLIAKREECLWFSVLTRHKQSSSLQKGMATSSSSLRQETRLLVLLAAEPSKLVGDHNVELCSTLHDLLALLGGHVVSNFSAVGPVVHHEQLQLRNVVDHKLLELAGEVVPGRLVRTITNVGHQGASLELPPDTGINTLWPAPAWLKALVAVEVGPLELLDPLLHDLLRQQRHRHLFADEEEAGTF

SEQ ID NO: 60313 - protein, 315 aa, Zea mays; identical to SEQ ID NO: 38959
  Clone ID: LIB3606-041-E5_FLI.pep

SEQ ID NO: 60314 - protein, 133 aa, Zea mays
  Clone ID: LIB3606-042-A9_FLI.pep
SSTRERRGVEEVGAARMACSTNLCFSALIPPLPASSSSGSSPFLTMKRVSSVPSLSRWTIRYKQLGHALYQRSHVLAFASADASQGKRSSGENVVMVDPLEAKRLAAKQMQEIRAKEKLKVHCCCIGVYHSLD

SEQ ID NO: 60315 - protein, 184 aa, Zea mays
  Clone ID: LIB3606-043-D1_FLI.pep
LHTQSRPDQTRSEHPVEEQSSGGGGGAITAPATAVAAASTATTVPAAAAASTAAAGLGLVDGDVAAVQLLAVHALDGVPHRLLRGEGDEAEAAGPLRLPIEDDLGLEDLAVGAEGVVEGVVVRGPGEAADEAAVLNIRRRHLDPLTHETEPRRTSRTRTRTGGGGRVVVRGGGGGVRSGRGRGG

SEQ ID NO: 60316 - protein, 452 aa, Zea mays; identical to SEQ ID NO: 52903
  Clone ID: LIB3606-046-D3_FLI.pep

SEQ ID NO: 60317 - protein, 71 aa, Zea mays
  Clone ID: LIB3606-047-A12_FLI.pep
SSLLAPRHPPPRRLEAQTAPPPPVPEPVQVGEITEEELRQYDGSDPEKPLLMAIKGQIYDVSESRLLPLNP

SEQ ID NO: 60318 - protein, 164 aa, Zea mays
  Clone ID: LIB3606-047-D4_FLI.pep
YDLIAKEQQEAGRQTDRRDDPANVNAKLVPPHTSLAAHRMGSLLAHFLLRSMPALRATASRPCFSMVLRALVERRSLTKRLPASHHSFLYCRFTNCCFFVLWLENDTLFARFVFLSVNGHTRRATVGWSCCLLGRGRGRGRRAATWRSSMRRRKGRRPYGRRRA

SEQ ID NO: 60319 - protein, 227 aa, Zea mays
  Clone ID: LIB3606-048-B11_FLI.pep
SRSPGRSTDPKSQISGRELAREGKYALDPPLLLATRPARLDFLLRFGLIREEFGFSRWSLVPLRLGVDFGDFFVQIVSLLQAELMARVYVGNLDPRVTAREIEDEFRTFGVLRSVWVARKPPGFAFIDFDDRRDAQDAIRELDGKNGWRVELSTKVGGGRGRDRNGSDMKCYECGEAGHFARECRLRIGSGGLGSGRRRSRSPRYRSRSRSRSRSPRYRRSPSYSRR

SEQ ID NO: 60320 - protein, 479 aa, Zea mays
  Clone ID: LIB3606-048-E7_FLI.pep
RDWREAPAQGKRNRGARRGRKGRRRRANKMREIISIHIGQAGIQVGNACWELYCLEHGIEHDGTMPSDSSVGVAHDAFNTFFSETGSGKHVPRAIFVDLEPTVIDEVRTGSYRQLFHPEQLISGKEDAANNFARGHYTVGKEIVDLCLDRVRKLADNCTGLQGFLVFNAVGGGTGSGLGSLLLERLSVDYGKKSKLGFTIYPSPQVSTAVVEPYNSVLSTHSLLEHTDVAVLLDNEAIYDICRRSLDIERPTYTNLNRLISQIISSLTTSLRFDGAINVDVTEFQTNLVPYPRIHFMLSSYAPVISAEKAYHEQLSVPEITNAVFEPSSMMAKCDPRHGKYMACCLMYRGDVVPKDVNAAVATIKTKRTVQFVDWCPTGFKCGINYQPPSVVPGGDLAKVQRAVCMISNNTAVAEVFSRIDHKFDLMYAKRAFVHWYVGEGMEEGEFSEAREDLAALEKDYEEVGAEGADDEGDEGDDY

SEQ ID NO: 60321 - protein, 203 aa, Zea mays
  Clone ID: LIB3606-049-C3_FLI.pep
RPIRNLELSRRRPQQRGGHSTTAPQGSYSRRSGSSEGKMSSVFSGDETAPFFGFLGAAAALVFSCMGAAYGTAKSGVGVASMGVMRPELVMKSIVPVVMAGVLGIYGLIIAVIISTGINPKAKPYYLFDGYAHLSSGLACGLAGLAAGMAIGIVGDAGVRANAQQPKLFVGMILILIFAEALALYGLIVGIILSSRAGQSRAD

SEQ ID NO: 60322 - protein, 209 aa, Zea mays
  Clone ID: LIB3606-049-E3_FLI.pep
WYWNPNPSKLVQKFNPNTPDISRFQCWVLNFHLCYWPLISLAYPLYASVRAIETKNPVDDQQWLTYWVLYSFITLFELTFAPIIEWLPFWSYAKLFFNCWLVLPWFNGAAYVYDHFVRPMFVNRQIVNIWYIPRNEKLGKSDDVLSAAERYIEQNGPEAFEKLISKSTKSSKSRNTKRLNLEDGEAENRAKAERESWGENPFYDKNYRY

SEQ ID NO: 60323 - protein, 235 aa, Zea mays
  Clone ID: LIB3606-049-F1_FLI.pep
CPDTNYLFMGDYVDRGYYSVETVTLLVALKVRYPQRITILRGNHESRQITQVYGFYDECLRKYGSANVWKIFTDLFDYFPLTALVESEIFCLHGGLSPSIENLDNVRSLDRVQEVPHEGPMCDLLWSDPDDRCGWGISPRGAGYTFGQDISEQFNHTNNLKLVARAHQLVMEGYNWAHEQKVVTIFSAPNYCYRCGNMASILEVDDCRNHTFIQFEPAPRRGEPDVTRRTPDYFL

SEQ ID NO: 60324 - protein, 538 aa, Zea mays
  Clone ID: LIB3606-049-H8_FLI.pep
QIFRPKFETLVSLAYGSCNNEQNSKWQPVEATLFCIQAIARSVSIEEREILPQIMSLLPCLPQHEQLLQTVCLTIGAFSKWIDAAPAELSILPPLVDILNKGMSTSEDTAAAASMAFKYICEDCRTKFSGSLDGLFQIYHIAISGVGGYKVSSEDSLHLVEALSVIITTLPPESASRALELICQPVINPLQEFIQQGDQVLQRVPARHLTVHIDRLSSIFSNVKQPEVVAEAVYRYWPTLKSIFDQRAWDTRTMESICRSCKFAVRTCGRFMGMTIGAMLEEIQTLYQQHKQSCFLYLSSEVIKIFGSDPSCAGYLTSLIQILFSHTVQLLRTIQDFTARPDIADDCYLLASRCIRYCPDLFIPTETFQRLVDCAMAGITIHHREACKSILSFLSDVIDLPNSSGGGQYREVINTIILQRGTTLTRIMIAALTGALPSGRLEEVSYVLLSLSRAFGEDMLNWARESINLIPPQALTDAERLRFFNIISDATSGSSLHNITDRFGEISDICRRNKTVQDLVQSALRPQDLTVTVVRQQM

SEQ ID NO: 60325 - protein, 334 aa, Zea mays
  Clone ID: LIB3606-050-A3_FLI.pep
KDFSSDDSSDERMESIAKEFGIKRYNWLVYMDKKNKEQEKRQKEIVKGDPSIKKMSRRERRKASQIEREKEREAARSVGRVSYRDPYREQRRSPSYEAYSRGRRSRSRSRSRSPSHSRRHGRGIHAESNYWSKQKAPRVEYITEFGGSDDTSEPKVSGISPPSSPIRIDIPNRLSGGQILEALHSDPASSLSVEQERTAKLLKPSPSTSSALAKLSKVASGGTGKTPQTEKKETPQERLKRIMSKQLNKQIKKDTAAEIAKKREQERQRQEKLAEVGRYKRRSRSRSLSRSPPRRRRYSRSRSRSRSPRRYRSRSLSSSRSPSRSPRYRSRSRH

SEQ ID NO: 60326 - protein, 333 aa, Zea mays
  Clone ID: LIB3606-051-H10_FLI.pep
APMARRRVLLFLKPFDVYPPRPYVGAAASSPTSAPSSLPQPRAANPKVLSYLDDRCRVHKDTIDLCQSVLQRKSLDWIAVQRNHLCQPIRDVDLVVAVGGDGTLLRASHFLDDSVPILGVNSDPTCTKEVEELSDEFDARRSTGYLCAATAGNFEQILDVTLDGSRRPLELSRISVKLNGIQLPTYALNDILVSHPCPASVSRFSFRKRNNTGENSRLINCRSSGLRVSTAAGSTAAMLSAGGFTMPLSSRELQYMIREPISPMDADKAMLHDVLKQEQHMHVVWYNQEGAVYVDGSHVVHSIQHGDSLEISSGAPTLKVVLPEHLLKMGPEW

SEQ ID NO: 60327 - protein, 626 aa, Zea mays
  Clone ID: LIB3606-052-A8_FLI.pep
SSPPILGSFPSHSLFASSAAVGSSLGTRYRELVGGFVMAGAKADVDAETGDGSGVGSGGGGLFSEQMLIDKLNRLNNSATSIETLSQWCIFHRKRAKRVVDTWEKQFTSSREEKKIPFLYLSNDILQNSKRKGADYVDEFWRVLPRSLKHVYENGGEEGRKQVARLILIWDQRKVFGTRIGSMKNSILGDNPPILDNNVNSLNPSSNPTSNSKAARKDSGTVVKKLTVGGMPEKIVSAYQSVFDQHFDEDTALNKCKSTVGLLERINKDINDASINGNQPASSLISDLQEQEMTLKQCIEQLESAGRVRISLINQLKEALSEQESKSIILRDQLQVARAEAEHAIQLRQQLGRVLVTNDTQSTSSPLMITPPDQTAAMMHGSGVRSTPPHSQPLNPAVSLPPTVSAVGDESKRTAAAMADKLASLSAPVQVLTSILSSFAAEQAASINGGSPSGELSGVPPGFHIDKRPRLEKTGQAEAGAPPFFGQASQVQQQVGAVPTSFGGTHPPTPGPFPPPPPPLPPLLPPLMQQFGQNTGGMMGMRGPFGMMAGSMPPPPPLSNILPAGFPGLSGPPPPPPLPPAQSQPQQQQTSQAPQQSPTSAGFFQSSGMGFFPPVQVQQSQPAQRQ

SEQ ID NO: 60328 - protein, 105 aa, Zea mays
  Clone ID: LIB3606-052-F10_FLI.pep
ILMSTDKRHPCRICKGCIACKSLGHTSPNKSIGDFSGNGVLVSVSLVLMLLLHQVKKKEQAQGRGKAGLMCSACSYIPFHYRFRPGFPFGSTYKDVWSSVQNCGV

SEQ ID NO: 60329 - protein, 474 aa, Zea mays
  Clone ID: LIB3606-058-B11_FLI.pep
AFPLLPFFSHFSPPPPLPPFDNTMRECISIHIGQAGIQVGNACWELYCLEHGIQADGQMPGDKTIGGGDDAFNTFFSETGAGKHVPRAVFVDLEPTVIDEVRTGTYRQLFHPEQLISGKEDAANNFARGHYTIGKEIVDLCLDRIRKLADNCTGLQGFLVFNAVGGGTGSGLGSLLLERLSVDYGKKSKLGFTVYPSPQVSTSVVEPYNSVLSTHSLLEHTDVAVLLDNEAIYDICRRSLDIERPTYTNLNRLVSQVISSLTASLRFDGALNVDVNEFQTNLVPYPRIHFMLSSYAPVISAEKAYHEQLSVAEITNSAFEPSSMMAKCDPRHGKYMACCLMYRGDVVPKDVNAAVATIKTKRTIQFVDWCPTGFKCGINYQPPSVVPGGDLAKVQRAVCMISNSTSVVEVFSRIDHKFDLMYAKRAFVHWYVGEGMEEGEFSEAREDLAALEKDYEEVGAEFDEGEDGDEGDEY

SEQ ID NO: 60330 - protein, 132 aa, Zea mays
  Clone ID: LIB3606-058-C12_FLI.pep
VVFLGRSSSSERARAADLLVLLEERARRAGDAVQRRVEEEGERPVDPRPAVPCSSSSGRALVIHSSSSPPSDPRTTVPCSSSWCSAAPVLGPCCSAARSRRHLLQICSTSAARLPGNLVPAEVLILESAAYV

SEQ ID NO: 60331 - protein, 397 aa, Zea mays
  Clone ID: LIB3606-060-G12_FLI.pep
RGSMVRETGYYDVLEVSPTASEAEIKKAYYVKARQVHPDKNPDDPLAAARFQELGEAYQVLSNPKQREDYDLHGKPGISTEAIIDPAAIFAMLFGSELFEDYIGQLAMASMASLDGFTENEQIDPRRLQEQMRVVQKEREEKLAEALKDRLHLYVQGNKEEFIQYADAEVTRLSNAAYGVDMLSTIGYVYSRQASKELGKQAKYLGVPFIAEWFRNKGHSIKSQITAATGALALMQLQEDWRKHLSDECHYNEEELEAYMLTHKSVMVDSLWKLNVADIEETLSHVCQMVLHDSSARKEELRVRAKGLKTLGKIFHQAKLSTAEGDPATMNNTINNLDENDDSSPESSPRSPRDQMFDTNPPYSQSPYVEAPELGGYFSFDFPMPIAPPGAQRDPIP

SEQ ID NO: 60332 - protein, 209 aa, Zea mays
  Clone ID: LIB3607-012-A3_FLI.pep
RKEVEIIIISTAIPGAAASVLVVLEPAREGLKGQEHLLEALPGVGVDEVPVAVEKLGRLEEGEYEQFRLVDEMDVQEHPDLAQMVAGPAAAEVASRADDGGRLVCPAVHSSRSPVKRVLQWAGDGVVVFGRGEEEAVGMADLGAERLDGGREARTTVRLEVGVEHRQVGDVEVVDAQPRDAVLAHLRGGADEPAVPGGLANGAADGGHA

SEQ ID NO: 60333 - protein, 253 aa, Zea mays
  Clone ID: LIB3607-013-F11_FLI.pep
GNDKAGALQLSAPYGDPLHHHVLEFAEVNAAVAVAVDAADHLLHSGQVPSLGQAELPEHGLQLGGRDEAVTVLVEHAERLLHVPLDVLLRHRLRDGAEQRVPERAVEGLEVVEAEPRGAGRDVRAHRGLQAGAVGAEAERVERRGHLVEGDLAVAIAVEEVEHAAQAQNVEAAVPEAERRRGLLGQRRPGDNGSGALHRPRELARRRPFSSSLQCFVGVGRQQVRMRGLADCLWSWSSVAGDGWGFYYRPGRN

SEQ ID NO: 60334 - protein, 361 aa, Zea mays
  Clone ID: LIB3607-015-E6_FLI.pep
PGARRTKGFDRIGAGGGEMWESVALTLAGTAGNNIGKVLQKKGTLILPPLSLKLKVVKAYASNQLWISGFLMDMCGAALMLTALSQAPVSVVQPIAGCGLAILCVFSHFYLKEVMNGLDWIAITLAGLGTIGVGVGGEEQKVDQIPLLNIPWLVLSIVILFVLLNTWLHMYKKQRREQELTGPEVIEEIIYGLESGILFGISSVISKMGFVMSEMGFPKIVVPAAISCSVCCSAVGFVYQTRGLKHGRAIVVSTCTSVASIVSGVVAGMIALDEHLPKAPTARFFLLLGWFFIITGVILLVSSTRLIARLPRSVQKYLKSNIERTHSIRRPGSARGKDPIPTTTIHTSSLHLLASPTKEKA

SEQ ID NO: 60335 - protein, 403 aa, Zea mays
  Clone ID: LIB3607-015-H6_FLI.pep
GKMYVVKDIGGAIGLMAVALVLLGTWPVVLAVLERRGRLPQHTFLDFSATNFMAAVLIALTFGQIGPASSTPNFLTQLTQNNWASVLFAMAGGVTLSLGTLATQYGWAFVGLSVTEVMASSLKVVIGTTVNYFLDGRMNKAEILFPGVGCFLIAAILGSLVHASNAADNQEKLANNNASNAAAAADEEKDLTKHLLELEIPSQEAEPDAGTAGFLVGLEEKRSIKVLGSHTLLGLGIVVFAGIFYALFAPAFNLATNDQWHTLPAGVPHLAVYTAYFYFSLACLAVSAALNVWLLYRPMVGVPSSTLAAYVLDGDGRGLAMLAGMLCGLGNALTFMAGQAAGYAAADSVQALPLVSTFWAVALFGEYRRSSRRTYTLLASMLLMFTVAMVLLMASSGSRSIIH

SEQ ID NO: 60336 - protein, 485 aa, Zea mays; identical to SEQ ID NO: 59913
  Clone ID: LIB3607-016-A3_FLI.pep

SEQ ID NO: 60337 - protein, 274 aa, Zea mays
  Clone ID: LIB3607-018-H1_FLI.pep
KQVRSRVLIGIGFCCWSNSIHFFRCIGPSLPSLVPFPYSINYDDGGGCWCWCWRRRRRRDMCRRRIRSLGRAAVAPGPRRRERLPAGGHRLLLAALVRRLHLGVPRLQRAAPAPHRALPVGQSGAPPEQAAASRPGAARSAAGRGRGGGAAALCSGRRLGRLPGHRAGQGLAALLQSLPLPVERVHRRQRYRFPDRLLRKCGGCSDHPGAVPQAPRVHRHLHELRLHEPPDVRDGVREAVHEMLPQGQGLDNGATQGSMIPWLFASECFRYRVD

SEQ ID NO: 60338 - protein, 377 aa, Zea mays
  Clone ID: LIB3607-019-D6_FLI.pep
TVLASSHSKHRHDSAVLNASPVTTGPGASPKPASPSRAVNLATLSPTNKQTRGVAVMAAAVNGSLDVHERKAQKSYWEEHSGELNLEAIMLDSRAAELDKEERPEVLSLLPSYEGKSILELGAGIGRFTGELAKTSGHVFAVDFVESVIKKNGSINDHYGNTSFMCADVTSPDLMIEANSIDLIFSNWLLMYLSDEEIDKLVERMVKWLKVGGYIFFRESCFHQSGDTERKFNPTHYREPRFYTKVFKECQTFNQDGTSFKLSLITFKCIGAYVNIKKDQNQICWLWKKVNSSEDGGFQSFLDNVQYKATGILRYERIFGDGYVSTGGAETTKEFVEKLNLKPGQKVLDVGCGLGEVTFIWLRSMVHMLLVLTFPLT

SEQ ID NO: 60339 - protein, 251 aa, Zea mays
  Clone ID: LIB3607-021-F5_FLI.pep
PSFPFGLDNPTRPQVPNAEDRTESSAIRRRRDRPTRSYRSRMSYAYLFKYIIIGDTGVGKSCLLLQFTDKRFQPVHDLTIGVEFGARMITIENKPIKLQIWDTAGQESFRSITRSYYRGAAGALLVYDITRRETFNHLASWLEDARQHANANMTVMLIGNKCDLSHRRAVSYEEGEQFAKEHGLVFMEASAKTAQNVEEAFIKTAGTIYKKIQDGIFDVSNESNGIKVGYAVPNSSGGGAGSSSQAGGCCS

SEQ ID NO: 60340 - protein, 152 aa, Zea mays; identical to SEQ ID NO: 56992
  Clone ID: LIB3607-022-G7_FLI.pep

SEQ ID NO: 60341 - protein, 486 aa, Zea mays
  Clone ID: LIB3607-023-D3_FLI.pep
SWAYADTAPIRIVLLASLVDPPLPSPRFKMQIFVKTLTGKTITLEVESSDTIDNVKAKIQDKEGIPPDQQRLIFAGKQLEDGRTLADYNIQKESTLHLVLRLRGGMQIFVKTLTGKTITLEVESSDTIDNVKAKIQDKEGIPPDQQRLIFAGKQLEDGRTLADYNIQKESTLHLVLRLRGGMQIFVKTLTGKTITLEVESSDTIDNVKAKIQDKEGIPPDQQRLIFAGKQLEDGRTLADYNIQKESTLHLVLRLRGGMQIFVKTLTGKTITLEVESSDTIDNVKAKIQDKEGIPPDQQRLIFAGKQLEDGRTLADYNIQKESTLHLVLRLRGGMQIFVKTLTGKTITLEVESSDTIDNVKAKIQDKEGIPPDQQRLIFAGKQLEDGRTLADYNIQKESTLHLVLRLRGGMQIFVKTLTGKTITLEVESSDTIDNVKAKIQDKEGIPPDQQRLIFAGKQLEDGRTLADYNIQKESTLHLVLRLRGGY

SEQ ID NO: 60342 - protein, 347 aa, Zea mays
  Clone ID: LIB3607-023-D9_FLI.pep
SFSHGHPQSSQAPMVGLRPSMAEVDRGFVTLVASDHPGIEVCNPNGHWYPADVGSSPDVLLLLTGRALSHVTAGLRLNSQYRIINNENRASLMFRLMPRANAILDCSPISAAGHCTPQIHRPISASQFMDDLRAEENVYHHLEAPPESQGNFVNEPSLRSVLSDPLSGAFLEDAMVLPCGHSFGGLMLKKVLELARCSICNGDVDEASLFPNLALRAVATVVKMEDDRRLFHNAALRKRRKEVTEHMDAQRRNGSSKDSIELGLEAESPRAFKGVQYPFVVGERVLIMGNKRTPDKFVGKEAVVTSQCLNGWYLVKAVDSGESIRLQYRSLRKAGELQVQALLQSRR

SEQ ID NO: 60343 - protein, 153 aa, Zea mays; identical to SEQ ID NO: 44881
  Clone ID: LIB3607-026-B7_FLI.pep

SEQ ID NO: 60344 - protein, 230 aa, Zea mays
  Clone ID: LIB3607-027-B8_FLI.pep
QRGSINSTNSNSLRREVPSSAQASASTRTKTGLSPSLSRPFSSANSMTQAHSTTFAPTRSISLTAAQSVPPVAIRSSTTRARSLACTAPTCISILSVPYSREYSSEITSPGNFLGFLKGTNFALMARAIGGPKMNPLASTPATTVIPWSLYRSTKTSMVSRNALGSSSSVVMSWNMIPGLGKSGMTRMEEAIPAKRASADAIATTACPRLPPVTRTPSGAATPTRGRKGG

SEQ ID NO: 60345 - protein, 299 aa, Zea mays
  Clone ID: LIB3607-027-G1_FLI.pep
THTAISPSVPAQLSNPSLYLQAGELIDGGQGGGRSPGRQPLLGAPANRHGGAGHGGEGADVVVLLPGRDRRVRGHLPVPVHQHPDCDGREQVVQQVRHRGHPGHRVVLRRHDIRAGVLHGGHLRRPHQPGRHLRPLPGAEAVAHARALLHGHAVPGRHLRRRRRQGLPGGPLHGRRRRRQRRQPRVHQGRRARGGDRRHLRARLHRLLRHRRQAQRPRLPRAHPRAAPHRLRRLPRAPGDHPHHRHRHQPRAQPRRRHRLQQVPRMERPLDLLGWPLHRCCSCRHLPRGHHQGPPLQEP

SEQ ID NO: 60346 - protein, 336 aa, Zea mays
  Clone ID: LIB3607-030-G10_FLI.pep
YQWRHHQEPAAAASHRGPVPGTDARVAAARGLPGRARRVQREGGREGVPGLRRHPLRPVRGGVPGRGAVDRGPRRAPRGELAGRQHPPQLRPAAPAPAPHRRGGAAPRAPLPAGAARGAKECLTRVISHPQALAQCEHTLTAMGLNVVREAFDDTAGAAEYVAANGLRDTAAIASSRAAELYGMEVLADGIQDDSGNVTRFVMLAREPVVPRTDRPFKTSIVFAHDREGTSVLFKVLSAFAFRDISLTKIESRPHRHRPIRLVDDANVGTAKHFEYMFYVDFQASLAEPRAQNALAEVQEYTSFLRVLGSYPMDMTPMTAGSSSTVVSSSDDPSSS

SEQ ID NO: 60347 - protein, 440 aa, Zea mays
  Clone ID: LIB3607-031-C6_FLI.pep
LASLAMGTIVDADVGFAVKRTSRSLVPPASATPRETLRLSVIDRVAGLRHLVRSLHVFAAGGDKKRQQATATPAKALREALGKALVDYYPFAGRFVVDDAEGGGETRVACTGEGAWFVEANAACSLEEARHLDHPMLIPKEQLLPEPSPDVNPLDMPLMMQVTEFSCGGFVVGLISVHTIADGLGAGQFINTVATYARGATSATPKPVWARDVIPDPPKMPAPPPRLDLLDLRYFTADLSPDHIGKVKARYLESTGQRCSAFDVCVARTWQARVRALRLPDPAAPVHVCFFANTRHLLPAAATAGFYGNCFYTVKATRASGEVAAADVVDVVRAIRDAKARLGADFARWAAGGFDRDPYELTFTYDSLFVSDWTRLGFLEADYGWGTPTHVLPFSYHPFMAVAVIGAPPKPKPGARIMTMCVQEQHLPEFQEQMMSQQAA

SEQ ID NO: 60348 - protein, 164 aa, Zea mays
  Clone ID: LIB3607-032-A6_FLI.pep
DEGGKARREIWGSSHSQDARLLLHHPLRVRRAGRRRAGLPPPRQHRLPGGGRRRRRAPPPRGLRQPQGLPEAPQLLRRPRARDALCISLNFRYGAKIPRDFEDYASWCRCWSQCRDVRILSVQNCNGRQPHPTTKERVNQALTCKLCLIDVEEDYERLCCLVAW

SEQ ID NO: 60349 - protein, 53 aa, Zea mays
  Clone ID: LIB3607-032-D12_FLI.pep
QPYLYIHFIRFFFSTTKNNSYCRFLSTKKHGSCRLGLGRVKPVHSHTSVDRNR

SEQ ID NO: 60350 - protein, 218 aa, Zea mays
  Clone ID: LIB3607-032-F11_FLI.pep
LNVLHTHVLVVIDHMNRKYLYNADNDTGTSQAHTSPACSYYRHEHDVARTLPPGRRPCISSVGWQRRVAWAWRGSGDGGRLLDVLERAEPHLLVQNRASCCCSVSGDAQLVGVHRRRAEHAGLGVGAPVLVGAPRAAADHIVRHERRAHLLLRVLVVRRGVHGPPRGGGLAGQDAADEAPSDRPPLGASRRCCHAKDRPFGGSGGNPPHPTVEGREVE

SEQ ID NO: 60351 - protein, 246 aa, Zea mays
  Clone ID: LIB3607-035-A9_FLI.pep
SPPFQFREQGRRSQPGTMCSVARLAFVLALAIAASSITVAESRDFNIFAQGSLPDATKGSSGLAATSGKLCQLCEQYSSEALLYLTQNETQTEILSILHHECASLAPLKQQCITLVDYYVPLFFLEVSMVTLEKFCESMHLCKKGMKISLPTREGTCGLCHHVVVEILIMLKDPNMQLEVIDLLTKTCSKAQNYEQQCKRLVLKYIPLILVKGQKFLETTDVCSVIHACKAGTQASMEAMPLSAML

SEQ ID NO: 60352 - protein, 166 aa, Zea mays
  Clone ID: LIB3607-039-D12_FLI.pep
TSPIDCIRGMPAFLVTVLGGVVLWSNHQTTAFPGAPVYGLHNVDELLLVLQGPVDLVVVSSPEINHDVLVPEEEHHCRRVVQLIHGVEIRDLCDVNKVDDRKVLYGLSYCCQHFIHLHAGLVPVMAEADDDEALLLGEDGLVHRPPRVQMRQQVRHLLPRTAAACS

SEQ ID NO: 60353 - protein, 347 aa, Zea mays
  Clone ID: LIB3607-039-D7_FLI.pep
GIPPDQQRLIFAGKQLEDGRTLADYNIQKESTLHLVLRLRGGMQIFVKTLTGKTITLEVESSDTIDNVKAKIQDKEGIPPDQQRLIFAGKQLEDGRTLADYNIQKESTLHLVLRLRGGMQIFVKTLTGKTITLEVESSDTIDNVKAKIQDKEGIPPDQQRLIFAGKQLEDGRTLADYNIQKESTLHLVLRLRGGMQIFVKTLTGKTITLEVESSDTIDNVKAKIQDKEGIPPDQQRLIFAGKQLEDGRTLADYNIQKESTLHLVLRLRGGMQIFVKTLTGKTITLEVESSDTIDNVKAKIQDKEGIPPDQQRLIFAGKQLEDGRTLADYNIQKESTLHLVLRLRGGY

SEQ ID NO: 60354 - protein, 610 aa, Zea mays
  Clone ID: LIB3607-041-D6_FLI.pep
RSSSRTAPGPPDAMSIRKALGAVKDHATIGIARVTGAVAPDLDVAIVRATSHDDAPPDERHAREVLRLASATGAAPACIASLARRLSRTRDYVVAAKCLSLLQRLASAEGDVEGGAGTRPFLHELLRPAVSGRRAGEPVLALLLDFRDDAHPGSWDHSAFVRAYATYLLDRVRFLVLLLPAPPRFSDGRVAPGPPQAPADDMDAEALLGRARHLRHLLDRLLACRPAGAAGASRVVRAALHPMLRDSFRVYEDVALLLALLLDRFFDMDYSDCVKAFETYVGTAKQIDALRAFYAWCEDAGIARSSDFPDVKRVDDKLLETMEQFLRERGRAGRAWASPPAPSRLAHQPDANAQGDDGHVDGMNSIKVLPAPSTRSIGAEPATPRPAEEASQSDLVDLRETAATADEEGNKLALALFSAPPATNGSWVTFPSGPDAAPEPAVTSAWHTPAAEPRNADWELALVETASNLSKQAASLGGGMDTLLLGGMYDHGAVRRQVAAPGSASSMALLPGHQVAPVLMLLGPDGSTARQVAGGDPFAASLAVPPPSYVQMAEMERKQQLLVQEQQMWAQYRHGGMQGQPAGFNNGLAGGSVFAPNAAMAVPYGGYGYY

SEQ ID NO: 60355 - protein, 259 aa, Zea mays
  Clone ID: LIB3607-041-E3_FLI.pep
GIVVALIFSPGAADYSRSTPESSCLIWLSHRAMNIRQSMLQLNESSSDDDEEISFAEYHIFHQPSHSKRKHGGSIPGHLVKFRDRQAGHARMYQDYLADNSTFSLTDFRRRYRMSRDLFKRIMVAVEDHDDYFKFKFNAASTPGLSCFQKVTAVFRMITYGVAADATDEYVRIGESTVIESLKKFVKAIIKVFGDEYLRAPNEMDTSRLLAIGQERGFPGMLGSIDCMHWKWKNCPSSWHGMYSGHLHEPTIILEAVAS

SEQ ID NO: 60356 - protein, 289 aa, Zea mays
  Clone ID: LIB3607-042-B10_FLI.pep
SPDFTRLSRRARFLLSISTNPIACHKVCTDASHCFNQRSIQTLHPRKLVRSRGDMKRLQCFKQSSGGGNGGGPGKRLERRLSLGEYKKAVSWSKYLVAPPGARIRSGGEELWSADLSKLEIRGKFASGRHSRVYSGRYTGREVAIKMVSQPEEDAALAAELERQFASEVALLLRLHHPNIISFVAACKKPPVFCIITEFMAGGSLRKYLHQQEPHSVPLNLVLKLALDIARGMSYLHSQGILHRDLKSENILLGEDMSVKSQISGFHAWNHSVEVARGLQEPTGGWLRR

SEQ ID NO: 60357 - protein, 603 aa, Zea mays
  Clone ID: LIB3607-044-A7_FLI.pep
DSDGAGMMSHEQQIVPPSKGSVNGFPHRKLDKEGSGTQSRINLVRSSSGGFTNSGHGSHSRDRLIYVLTQLIGHHVDVHVNNGSIISGIFHATNPDKDFGVVLKMAQVIKDGSARGQRYPAVLVKKPETMIIPARELVQVFAKDIELGGELPKVPGNDKRKDLLIDSAITRYHYLEERELERWAPDGGDSECIELEKYDRKGNRSWDQFETNAALFGVKTTFNEEIYTTKLERGPHMRELEKHASRIAREIEGEDTRDIHLAEERGLFLGDDLDHDEEIKYSAVRRDTDNSKYKPPFTKVPSSTCHVDSFNRTVNIDPNDSLACSSTMDKESSSHIFDDTDASATIHTNSVSQPTSDYLSDRPLSNDENRLDRKLNKESNENMDNRKLQHEDNLPDGARPLISEALDGRSSSSHAYEPSFSGQGFKSPETPDSTVPVKHPSAMEPVTSSQRPGSSTSSTSERIGANSATGAPGLSPSSSIGSLTAEKSTLNPNAKEFKLNPNAKSFTPSASLRPPHPTSSDASYYYPNNMPAVPLGPGLPVGMGFPPAYGAQPVMYNTQPGASPHGYMHPAGPQYGQQMTIGGQTRPVYYYAPEMQQYRGRNF

SEQ ID NO: 60358 - protein, 330 aa, Zea mays
  Clone ID: LIB3607-045-G8_FLI.pep
LHRRSRTLGGSSDRPARRAVAVKSGRGSNGAATDLLVCFPSRAHLALMPPKAICSPSRPSASEPVKRRHSTSRPPSGLYKSAAGAARNPSRRGADVPVDDEPTSPKVTCVGQIKARQAKPKGPGPGGGGGGGKKTKKATWLQALGIKKDALALLDALHGAFRFNVAGCFGSFPGAVGVGYTSGEDDEDEEHDAPRTEKETEHGAALARWFMVLEEGKKVSAKKLQGQKPEQSHQEEDREEDAAPPANALMLMRCRSAPAKGLARRLETEEERNDVKGAAKKTPDQEEKENEGLVLMTYSPDFFKVSLDIAKETWIVGGDDAVLRCRSWKR

SEQ ID NO: 60359 - protein, 181 aa, Zea mays
  Clone ID: LIB3607-047-A6_FLI.pep
ARGSNAIVWRVETSRPKTQGSLIIILLNCNESLLMPRGYGAVAAAPSAAAAAGFRAGGGGWWWETTSGGLGARLSASACLRALYISSVSTATRRFTWVSIPSSDGVVRCSTVRWQRRRRMASSVRRWRRRVPGRPRTSVMYSRGLHATGTRDLNALNALPLISAPPPSSGDLLPLVVWRLR

SEQ ID NO: 60360 - protein, 183 aa, Zea mays
  Clone ID: LIB3607-048-C9_FLI.pep
SPRREFSCACMSPCARPALWISGSRAPLAPLLVARLFPASCARELAIYFARLCFCSEFPWPELSPSPDLTQSPSSALSILQLAPSVCSRCWVGSARPPSPIRSSARSSPQLQSVVVASRRSCSDSISPARSRLDLVVIPCVIKKSQESGEDEASNAIFLKRSTNGLDQKIATDLADSCHLLKR

SEQ ID NO: 60361 - protein, 285 aa, Zea mays
  Clone ID: LIB3607-048-G2_FLI.pep
QGPSAAPWADMDTDCLVHVFGRLDLEDLAAAAPLVCRGWRRAAAEPSLWRALDLRRDHVARFMPWGALAAAFARRYAVRGFSLAGFLRICVWRARGSAEDVALPPLLAEPAHEIDHISLRCPRLRRLALPHLTVGDEARLPDLVPRWPLLEHLELETKPSSSSFPALAAQVALHCPAFASLKTSGAFKREDAAALARSLPRLRSLCVDRSYLPKEQLLAILAACRDLREFSARSCVGFDDEDEEVLRHGARILRFDVGGSKLVDELDDEFPGGGGFCDSSYVDVM

SEQ ID NO: 60362 - protein, 308 aa, Zea mays; identical to SEQ ID NO: 37032
  Clone ID: LIB3607-052-B8_FLI.pep

SEQ ID NO: 60363 - protein, 204 aa, Zea mays; identical to SEQ ID NO: 43658
  Clone ID: LIB3607-054-A4_FLI.pep

SEQ ID NO: 60364 - protein, 257 aa, Zea mays
  Clone ID: LIB3607-056-H8_FLI.pep
RSSLVRQATTRFLPPFLLLVSFIGDSDLLCRRRRRQEIDPTPSARPDPPIQPPTAGARGRFRFGPSPVREKARMGAWMSRVWFLMFPAREYKLVVVGLDNAGKTTTLYKLHLGEAVTAAPTIGSNVEEVVFKNLRFEVWDLGGQESLRTSWATYYRGTHAVIVVIDSTDRARINIIKDELFRLLQHADLEGAVVLVFANKQDLKDAMAPAEITDALSLHSIKDHDWHIQASCAITGDGLYDGLGWIAQKVAGKATAS

SEQ ID NO: 60365 - protein, 109 aa, Zea mays
  Clone ID: LIB3607-057-A2_FLI.pep
EPPRMDEYQECSSCCLHFLSNKQLQVMIHQDYQVYSDISSTKIVWSQTGQVSFRSIHSRMQQRWKWCSHLVTERGFSSSYYIYQLVLYRLQMFSTNSNNSHPLYTNLKT

SEQ ID NO: 60366 - protein, 332 aa, Zea mays; identical to SEQ ID NO: 52151
  Clone ID: LIB3607-057-D10_FLI.pep

SEQ ID NO: 60367 - protein, 225 aa, Zea mays; identical to SEQ ID NO: 47497
  Clone ID: LIB3607-057-D11_FLI.pep

SEQ ID NO: 60368 - protein, 122 aa, Zea mays
  Clone ID: LIB3607-058-C10_FLI.pep
FDSRGDVKVILATNRIESLDPALLRPGRIDRKIEFPLPDIKTRRRIFQIHTSKMTLADDVNLEEFVMTKDEFSGADIKAICTEAGLLALRERRMKVTHADFKKAKEKVMYKKKEGVPDGLYM

SEQ ID NO: 60369 - protein, 265 aa, Zea mays
  Clone ID: LIB3607-059-C6_FLI.pep
DREIGFLESGRSMAQRGELGRQLPLRGPLKALEADIHHANAMADAIQRNYGGACVQMRLSFSSLAPLFLYFIQWLDCGCCYALPSYLGLFHILICKVYADGDSSVSTYERRASLREFYAIIYPILQQLESSLIERDLKGKGRCKDIVSRRRMEDWKKVSGRDVEREDECGICMEACTKMVLPNCSHAMCIKCYRDWYKRSESCPFCRGSLKRIRSTDLWVLTNSNDVIDPAHLEKENVRHFYSYIDSLPLILPDSIFFFYYEYLL

SEQ ID NO: 60370 - protein, 191 aa, Zea mays
  Clone ID: LIB3607-061-A11_FLI.pep
ARSRRGRRHQTSRWWSDPIRSGWLDGRGHTSRGTVAGDVAGLAAVVAGAVASTPAAAEPPSATAATAWAVPGHVAGLAAVVAAATTTAAATAVAAAAAGAVPGHVARVVTLRDGKLHLLALRERAEALRLDRRLVHEEILAAVLGGDEPEALGVVEPLHRPPLPRRRRHRNPRTLALRMLGLDFFPPLPVS

SEQ ID NO: 60371 - protein, 272 aa, Zea mays
  Clone ID: LIB3594-051-A4_FLI.pep
DIHFARMKKECAYYLKTGQCKYANTCKFHHPELFNVVPSSRGSPIYTSVHSSASAGPQSYTGTMSSWTFPRASFIPSPRWQSPSNYAPMIVPHGLVQVPSWNSYPGQLQSPGAQQTYGSSQQGEASAGNQGMLSPYRSSSFPVPQYVLQRDNVFPERPDEPECQYYMKTGDCKFGAVCKFHHPRVRSQPPPDCVLSPMGLPIRPGEELCKFYSRYGICKFGANCKFDHPTMAAPMGVYAYGFSGSASVAPASTNAPMTRHLLGSPSGSGYMS

SEQ ID NO: 60372 - protein, 124 aa, Zea mays
  Clone ID: LIB3594-051-A5_FLI.pep
REGERGGGSVVVELEAHAVVDLVVLEGDVVLVDVVPLLDADLLGARPRLRRHQLLEVADGVVLVALDPHLLPQAVVEHHLDHLRLPTAPSPDGRTDVPRTLGRRRRRERNFPTSRESRWFGCLG

SEQ ID NO: 60373 - protein, 123 aa, Zea mays
  Clone ID: LIB3597-063-C11_FLI.pep
MDPMKVTRPPALPARDGAADLVLPTGPLHLLEVGEVGALPGQIDEVGEDHPSDADVVERVRRARVDVLLDVAVDGLVGALLDVVPGQARLQVSRHVADLHAPDLVVQGTQRHGWLVSRLRALS

SEQ ID NO: 60374 - protein, 230 aa, Zea mays
  Clone ID: LIB3596-046-C12_FLI.pep
SPEARGSAEMYHPTRGGVRGGRDQFKWDDVKVDKHRENYLGHSVKAPVGRWQKGKDLYWYTRDKKSDTEDALKEEIRRVKEEEEQAMREALGLAPKRSNRTQGNRLDKHEYAELIKRGSTAEDLGAGHAEAAQVQGLGLYKAPRDEGGSSSLSLDPPQMEPEQAEPLPAPKGKRPRERDERGGEKERKRDRHGDGKERRRDKHERRHDLEDRSKRHRKDKQKRRHDSDSG

SEQ ID NO: 60375 - protein, 172 aa, Zea mays; identical to SEQ ID NO: 36903
  Clone ID: LIB3595-016-F11_FLI.pep

SEQ ID NO: 60376 - protein, 152 aa, Zea mays
  Clone ID: LIB3595-017-C12_FLI.pep
HSQSAVSSEPREMADQETVAVVEAPTPVLGEPMDLMTALQLVMKKSGAHDGLVKGLREAAKAIEKHAAQLCVLAEDCDQPDYVKLVKALCAEHNVHLVTVPSAKTLGEWAGLCKIDSEGKARKVVGCSCVVVKDYGEESEGLNIVQEYVKSH

SEQ ID NO: 60377 - protein, 166 aa, Zea mays
  Clone ID: LIB3595-017-G10_FLI.pep
PSSSALPLLTPSRYSHRYRPGPRAREMADQETPVAVEAPTPVLGEPMDLMTALQLVMKKSGAHDGLVKGLREAAKAIEKHAAQLCVLAEDCDQPDYVKLVKALCSEHNVHLVTVPSAKTLGEWSGLCKIDSEGKARKVVGCSCVVVKDYGEESEGLNIVQEYVKSH

SEQ ID NO: 60378 - protein, 393 aa, Zea mays
  Clone ID: LIB3595-022-E11_FLI.pep
LRVREFTLAEIEHFVDPEDKSHPKFVDVADLEFLMFPRELQLSGESAKLMKLGEAVSKGTVNNETLGYFIGRVYLFLTSLGIDKGRLRFRQHLPNEMAHYAADCWDAEIECSYGWIECVGIADRSAYDLKAHTDKSGVPLVAHEKFSKPREVEKLVIVPSKKDLGLAFKGNQKMVLEALEAMSEKEAFEMKAELETKGETNFKVCTLGKDVVITKKMVSISMEKKLEHQRVFTPSVVEPSFGIGRIIYCLFEHSFYTRPSKSEEEQLNVFRFPPLVAPIKCTVFPLVKNQEFDDAAKVIAKALTTAGISHIIDTTAISIGRRYARTDEIGVPFAVTVDSATNVTIRERDSKEQVRVDIDEVAPVVKQLTEGQSTWTDVSAKYPAHVGPQSEQE

SEQ ID NO: 60379 - protein, 282 aa, Zea mays
  Clone ID: LIB3592-088-D9_FLI.pep
RISGSSNGDGVVERAEELQRRGRAQPAGAVVPVRPPGAVLRQRHHLWPRHHVRGVDARPATPCPPRRLLSRGLRLRSAGPRDRAGELRAVQGVRGVPLPLGHACRPRDPGAGSSGPGQLGEGAGVGGRPRRAGHVPGRPGAVGHAADHPGDRVRGHRLRRAPAHHGEGPREEEVPRRRLRPARLLQGPRQVRGVQAQGDQERPPRHAGLRRLLRPAVGVPRHRPAGEPRLPPRRPVAQQHRRHHHPQINLPLSSAQLLVAVSCVRLGPACTTSDDGDFPPGN

SEQ ID NO: 60380 - protein, 95 aa, Zea mays
  Clone ID: LIB3592-089-G6_FLI.pep
KQKKSAQSYLLAPQRPKHTHILAPQIILYPCNARQNFMGHAASNLLAVSVQCTQLNSLIQASSQLAVKIALHILRIQRLGYHASSWLDYIKTKYS

SEQ ID NO: 60381 - protein, 389 aa, Zea mays
  Clone ID: LIB3591-002-A5_FLI.pep
RLLHSTVHSTLPPHFPLSSPVFAPLETPKAPKGGGAEGDRESGGVQERRGHPEPGFSRYTPSFPVLQWRRFGVPETAMGSGSLLKVFANNFDVLAGPLVALAYPLYASIKAIETKSPVDDQQWLTYWVLYSLITLFELTFASIIQWLPFWPSMKLIFICWLVLPYFNGAAYVYQNYVRPAFIKNQMVNIWYVPQKKGLLGKSDDFLTALDKFIEENGTDALKKLANKAGKPFKQSGKSSKDQKETKSSKDSKEPKPSKDAKQPKPSKDTKEPKPPKDSKSSPKDSKEQKKAALKDPKKAPKDSKGLKKALKDPKEQESLEDPKEHTAKKAGKRVTFAEVEPEKEFKASNSDWHPSSDFHAAYPEQNPWASGFMIFEDENSYWNRGPLDC

SEQ ID NO: 60382 - protein, 653 aa, Zea mays; identical to SEQ ID NO: 56213
  Clone ID: LIB3591-002-D10_FLI.pep

SEQ ID NO: 60383 - protein, 95 aa, Zea mays
  Clone ID: LIB3591-002-D6_FLI.pep
ASTGATAMPTPPSATPSSTAKSAAPPDNKTHSTRPCHVKSSEPSVALCRLVTELFVCSSSVRRDGGHGIALCHLYTTPRTKITASVYLNCRVNGS

SEQ ID NO: 60384 - protein, 326 aa, Zea mays; identical to SEQ ID NO: 56303
  Clone ID: LIB3591-003-B7_FLI.pep

SEQ ID NO: 60385 - protein, 291 aa, Zea mays
  Clone ID: LIB3591-003-C6_FLI.pep
AGGSGEAAMSPPSSSASGKRGRDPEEDVYVDNLHSHKRYLSEIMASSLNGLSVGDSLPDNIMESPARSETASCYRDEILSQYSPMSEDSDDYRCYDTQLNPSGNHPDAMISPSTSPMSSPHRHQRPQSSLLPSNPYPLPSCSLSSVVCSHARRGSDNEGRFPSSPNDMCHVADLRRTALLRSVQMRVQGPHSYDLSFGIRQGQDHAHEHEGEHDHEHEHLEDLEGTEGSSCNKSIVNEVTYNQRRDHDFGRSEHEIDYINNSTSDDCVSDLKFKQEDKSHSKFDIPMHKNS

SEQ ID NO: 60386 - protein, 332 aa, Zea mays
  Clone ID: LIB3592-001-C3_FLI.pep
RWCPPGLPPSPAPPPPLPGRRSTAPADLLSPTPHQAVSGCSWASLALPDGPELALHLRPSSRHLGASSSSSSLLWSPPGSMRRRPGIAGLQNAAATRDQFRLVGENVAKVRTDVMKEQLATFRSQLEEFARKHKSDIRKNPVFRQQFHEMCAKVGVDPLASNKGVWAELLGIGDFYYELGVQIVDICIGTRSHNGGLIDLLDLRKLLGQKRKTTLESLSEDDCLRAISKLKVLGSGFEVISVGRRKLVRSVPTELNKDHSGILGLAQADGYVTVEQVEKEFSWSTGRAIDALETLLKEGLAMIDDGHRDGKRRYWFPCVTVSSDTAAVEVKS

SEQ ID NO: 60387 - protein, 87 aa, Zea mays
  Clone ID: LIB3592-004-H5_FLI.pep
IPGYFYKHRPLVILERPALHSCLLLPQFPLLGLLHLQYHFQSHCLAIATVLCSISTTNTHFSNYEFGHISTLTPPRERKAQMPYKQT

SEQ ID NO: 60388 - protein, 220 aa, Zea mays
  Clone ID: LIB3592-005-H2_FLI.pep
KHKRYTYVRTIVQRYAQKKHATHVQRVLTNNDITLAYIGHRKPAGAHASLRRWRRCRERHGHVHGRDRRHWRQGHHLGDDGWNDSGHRWQRQLGQHGRDGGHWRQRHGHLGSRWHGRQRHLGHGDRGHGRHGWQRHLWHWLHRWQGRHGGEARDGTSSSGSRGRVGQVARRVAVVAGQECARHDHGHGQEARSGSHTASSSLKLSLETACCTLVMLLLLL

SEQ ID NO: 60389 - protein, 519 aa, Zea mays
  Clone ID: LIB3592-006-G3_FLI.pep
ASRGETEPLEVMVSVLRVVVEHPLPRRQHPPAVLRPHHALVLRLVPHGRHHVVLPEEVGGLVHQRGVPPAGLEPRAGAAEAVQQVQVRLQVVVAREVQGLLEERRHLVVQLQQHAQVRVHAAEAQPVRRPQDELRERRLVEEHAGHLGHAVVHVHDAQRPHAQLPLEPPPEGDVPDARAGEGEHAHRRHPVARRHVRARLRDVEGAQHRQRAAQAVARDRHAHLLAPPVVQIHQLAHLGQHLLPRRVPAEAAAGALVRVQRREPSLHLHVGVRAGDARLAQGDLVGRQIGHPLEAGDGAAPRHGDVPAAEPRRLLVGGHGHVPDERAGLAPHLGVGGRLDAEVGELEVVAGGVEVAGDLVADAAEADVVEEGLRRVLAAAAVGGEAVVVEAVVGGLGELAIADELLEEHAVDGVQQTLPVVAAVDLPPPRGELPVVGRGLMRAEVHVLDRHRGGLLFGSRRRGDDKIAARTTTALKRVRQCHTGEPAGPVVHGGDEAQAGRYGGRHQLLGVFVLNASVF

SEQ ID NO: 60390 - protein, 127 aa, Zea mays
  Clone ID: LIB3592-011-H6_FLI.pep
AGAASNHGRSSERPPPPVYKFPSFSSSIYRGHQIQEEGRAPRTFGARSGSTSSRASSWLTSSSSDHLQGSWCSLPLSPIKFSCLISTFRSQLPSIPSLRPMLGTLVRQQGQRTTYTCASSSVMVARA

SEQ ID NO: 60391 - protein, 110 aa, Zea mays
  Clone ID: LIB3592-013-B10_FLI.pep
YIYAGFEILAFPCNQFGGQEPGTNEEIAQFACTRFKADYPIFDKVDVNGNNAAPIYKFLKSSKGGLFGDSIKWNFSKFLVDKEGRVVDRYAPTTSPLSIEKDIKKLLGSS

SEQ ID NO: 60392 - protein, 205 aa, Zea mays
  Clone ID: LIB3592-013-B2_FLI.pep
RATTPMVFFLPRHPQPASSARAAGGIPLPRAPDNSARAATAFTNPGETLLEIKKSFRDGGNALYDWSGDGASPGYCSWRGVLCDNVTFAVAALNLSGLNLEGEISAAIGSLQRLVSIDLKSNGLSGQIPDEIGDCSLLETLDLSSNNLEGDIPFSMSKLKHLENLILKNNKLVGVIPSTLSQLPNLKILCEDQVGEQLMGCKQIF

SEQ ID NO: 60393 - protein, 220 aa, Zea mays
  Clone ID: LIB3592-013-H2_FLI.pep
ATTAMVLYFKARPDAGDYTIYMGADKNENEELIKYGLPEDVWFHVDKVSSAHVYLRLKKGETIHTISEALLEDCAQLVKAHSIQGNKMNNVEVIYTPWANLKKSPSMDVGQVGFHNPRMVHVLIVEKRVNEIINRLNKTRVERRAPDLKAEKEASNAAEKAERKMQLKEKKRKEEMERLEKEKWAEIRSYKGLMVAEKMTSNRQIASAGKSMQEMEDEFV

SEQ ID NO: 60394 - protein, 193 aa, Zea mays
  Clone ID: LIB3592-014-D5_FLI.pep
PVQTSSLASATHPRLRSTTRSIVASQPAKPTPHMAGIVVVFDFDKTIIDVDSDNWVVDSLGLTDLFERLLPTTPWNTLGCDLRVLSDANAFFIHTVLDHHGLLACFSQVNTNPSRVDAHGRLRIGPCHDPRATPRCRRRRRRRSTASSSPCPSPRRTVCPSCRWAARTDTVSGSELRSPVRAPTNSGRGTAYR

SEQ ID NO: 60395 - protein, 381 aa, Zea mays
  Clone ID: LIB3592-053-D6_FLI.pep
ANKQTGRNAMLEEYKPCAAMVVTQCIYAALALLSKAAFTGGMSPLVFVVYRQAVATIVLVPVVIAANRKKMKEMTTGLGLTGFSLVFVASLVGATVNQCMYYQGVNLGSSSMATAMTNLIPAITFVMAASVGLERVEARRPRSLAKIFGTAVCVSGAMAMAFFKGPKLLGDGPNALQLLLHAGGGRWVAGALFLVGSSSCWSLWLILQVPICKSYVEPLALSAWMCVLSTLQSALLVSFLLPDPSAWRIHSLFELSCCVFSGVFGSGVTFYLQSWCISVRGPLYSAMFNPLCTVITTVFAAAVLREELHVGSLLGAIAVIAGLYVVLWGKAGDANKGGVEPEHHSDDLEKTSSARSDHNSTADVGSGIAEPLLAGGDPTEK

SEQ ID NO: 60396 - protein, 236 aa, Zea mays
  Clone ID: LIB3592-054-B12_FLI.pep
PSVATNKWTPTPRRAPTSTRLKPALPSERNRAPPVQVVRSRTPSTHALMEPLVFVLLLVAMPLRGSDGAWCVCRPDVSDAALQKTLDYACGHGADCAAVLPTGPCYSPTTVRAHCSYAANSYFQQNSQANGGATCDFGGTANLTDTDPSSGTCKYPATPSEAGTSGNATGTGTAPPGSTSNPATTPSMGGSVTTTPVGAFGPAPSTFSAATATAAAFGGRRALLLAVVSVLSFLAR

SEQ ID NO: 60397 - protein, 406 aa, Zea mays
  Clone ID: LIB3592-057-C5_FLI.pep
ARARLGGPRVASELGAAGCRPSARRWGGGWTCCWGGRRSRRRGSSRCWGWRRRASAWCGATARCGAGRRAGTWSSFSASATRTARWPAPSTSCGSRTRSTSSPSSRPAATSSPSGPRSSTTRTGGSAPRSCGRRRRGWYTPPPGAGTFRSCKRSGPSSPPSSAGSSSPPRPTSAAGAGSTPRSCRSCRPSSRAWRADSWCYRRSPPTKGSPCASTSRLLPTRTRGAPTTAIGRRSTMARGSVGRHQLMAATKTSPATRRRGTRTWKRQLRPRSSRPPRQPPPRRRPWSSRVGSPGGPVTGGGQGGRKWMILRSRNKMRCFMETNPRRLGMAGITVQMLRSRRRTTRQTTATLQWTNRNSGSLPGESRHRSEQSGDFSGIQIATEEMVSSSCQYIGMEVVFFHCSSM

SEQ ID NO: 60398 - protein, 347 aa, Zea mays
  Clone ID: LIB3592-058-C3_FLI.pep
TLESLELSVPDPLDLDILGRLGPEVGVGRLHALEDADDLAGLRVALGDAQRDVAGGGGGVLDVLLLELLLVTSAPGGERDGVVVAGGAAAALGVEEGGAAVAGHEEGPAEALGLAGGDELLDGEEERHALAPRELHGDGGVVDAVLLLELERAVGADLERALDLVQRVREAGHELGLLELGRGVLGDALRLDGEGRRLQAQLLHLVLAGLERERLHAAVDGRALVRRARALHLHVRFALDLVVGQPLGRALRARARDEERRGGEREAGELRGVDAPAGDVLQGARDPGGAGVDAERPAGELRRRAGRQRGKGRPAADLGRLHQGGRGLERGCHRRRGGDAFWLLPFS

SEQ ID NO: 60399 - protein, 240 aa, Zea mays
  Clone ID: LIB3592-059-H3_FLI.pep
QKRDDGRRRAAMAAGAALYYYHPGAGKVSLEAVAPSSPSLALRPSQSKVLCVSSSRWWMRRRWEGKASSVSSRARASARPALFSPVAMDWQECTTELEVDVPCSVAYQCYSERESIPQWMPFISSVKILEDKPDLSRWTLKYEVLGRDVEFSWLARNMTPIKNQKIHWRSLEGLANRGAVRFFPKSSSSCRVQLTVAYEVPEILAPVASALKPFLESLLLKGLERFATFAKERNSKIPQA

SEQ ID NO: 60400 - protein, 143 aa, Zea mays
  Clone ID: LIB3592-061-A12_FLI.pep
YGLIAKEQQEAGRQTDRRDDPANVNAKLVPPHTSLAAHRMGSLLAHFLLRSMPALRATASRPCFSMVLRALVERRSLTKRLPASHHSFLYCRFTNCCFFVLWLENDTLFARFVFLSVNGHTRPEQSHSTLHHHLVNQSDGNLS

SEQ ID NO: 60401 - protein, 422 aa, Zea mays
  Clone ID: LIB3592-061-C9_FLI.pep
RRRTCARRRGTRCRRCSRTTPAPTGRRRSRCMVGPDKVRVSWITAADAPATIDYGTAPGQYPFSATGNTTAYSYVLYRSGSIHDAVIGPLQPSTTYYYRCSGSASRELSFRTPPAALPFRFVVAGDLGQTGWTESTLKHVAAADYDALLLPGDLSYADLVQPRWDSYGRLVEPLASARPWMVTQGNHEVERLPLLEPRPFKAYNARWRMPYDYAAADSVAAAPPSDDNLFYSFDVAGGAVHVLMLGSYADYAAGSAQLRWLRADLAALRRRGTPPAFVLALVHAPWYSSNKAHQGEGDAMRDAMEALLYHGARVDAVFAGHVHAYERFQRVYAGKEDPCGPVYVTIGDGGNREGLANKFIDPQPSISAFREASFGHGRLEVVNATHALWTWHRNDDDQPVVADQVWINSLAANPACNRSDKM

SEQ ID NO: 60402 - protein, 186 aa, Zea mays
  Clone ID: LIB3592-064-H10_FLI.pep
RSITTAAAELGPNIQILRGAATAVGEMEAAVPSRVALSAASRLPNPHAVTGDRSFIYKGRCQSLAIPMALSAAAPGKGGGVLDWPVEKTTPGRQSEFDVKKSRKMSPPYRVILHNDNYNRREYVVKVLMKVIPGMTVDNAVNIMQEAHVNGLSVVIVCSQSEAEEHCTSLRGNGLRSSIEPASGGC

SEQ ID NO: 60403 - protein, 306 aa, Zea mays
  Clone ID: LIB3592-065-B12_FLI.pep
QQGAGPVSVARHPSHPTHLLTTTGQHDTEGGSSQATSPRLYSPAVPPHTMSDYNRYGHSYSYGGGYGQGPAPSAPPAPHMPTATSAAPPSSSSYGAYAGYPPAYPPPPSQAAGGFGPAGSGYGFVPVAFPPGTHPDVERAFRAADRDCSGAIDERELQGALSSAYHRFSVRTVRLLMFLFNDPSSSTPSRMGPTQFVSLWDCLGQWRGIFDRYDRDRSGKIDSRELTEALRSLGYAVPPSVIELLIANYSNGVPSNGALDFDNFVECGMIVKGLTEKFKEKDTRYTGSATLTYDGFLSMVIPFIVP

SEQ ID NO: 60404 - protein, 245 aa, Zea mays
  Clone ID: LIB3592-066-B4_FLI.pep
RFFDFSRRRCSSHIPREDACSSPIDTMAVFSDLHTADGLKSLEAHLAGKTYVSGDSITKDDIKVFAAVPSKPGAEFPNAARWYETVSAAVASRFPGKAVGVNLPAGSAPAAAAPADEAEDDDDLDLFGDETEEDKKAADERAAAAKASSKKKESGKSSVLMDVKPWDDETDMKKLEEAVRSVQMEGLTWGASKLVPVGYGIKKMTIMLTIVDDLVSIDTLIEDHLTQEPINEYVQSCDIVAFNKI

SEQ ID NO: 60405 - protein, 343 aa, Zea mays; identical to SEQ ID NO: 48353
  Clone ID: LIB3592-067-G11_FLI.pep

SEQ ID NO: 60406 - protein, 439 aa, Zea mays
  Clone ID: LIB3592-068-A9_FLI.pep
LKHHSSLPRSTRQRRRQRRGTRSCAMGPTAGSGEDKAMLELRKKHRVDLERLTITSRPFKTLSFFVLAIAQNLERTCSSVLKKGYQLKTAMLLVVATWVLLMFTDGLNEKHLQELLWYVRFGLWWIILGVASSIGLGSGLHTFIMYLAPHVALFTIKAVQCGRVDLKSAPYDTILLERRPSWLEKDCLQFGPPIYHETIPFSKILQEVYLEAILWGIGTALGELPPYFLSRTASMSGRIIDELEDLDASISEGFLSSALRQAKRWLMSHSQYLSFTLILLLASVPNPLFDLAGILCGQFNIPFWKFFLATLIGKAIVKVCIQTTLVITLCNNQLLDLVEKRLIWAFSNVPGVASVLPSFVSKLKMAKNKFLSAHVAASASTSVKGKKWNLSFSLVWNTLVWLMVANFIIQIVTSTAQGYLRTQQEREISKKLETELSAS

SEQ ID NO: 60407 - protein, 339 aa, Zea mays
  Clone ID: LIB3592-068-F11_FLI.pep
ESLETKNRSFATSIAFLHQATNKTTTGEQAKASLPSSLPQIRKPSNLSIGLACLGTPASAMVQIKEFRIVMPMSMEEYEIGLSYTIMKMEQQNTNSKEGVEVLQQAPFHEDAKLGKGHFTSKVYHLQSKIPSWMKGFAPASALAVHEDSWCAFPKSRTVIKCPLFSKCSLTIDTVTRPDNGCSENAHGLSGEQLAAREVEIIDIASVSRDYWSKAIGAPSVDLTAFKSQRTDRGPLLKGWMDSCHPVMTTYKLVTMDAPIWGLGERLEDCIIAGERALFLACHRLCFAWIDEWYGMTVEQIREMERQTDMLLKKTLKKAGSKHEGNRKTLKDELVAVGS

SEQ ID NO: 60408 - protein, 487 aa, Zea mays
  Clone ID: LIB3592-070-G1_FLI.pep
RQASSYSPISATQSFPQFPPFSHFSPPPPLPPFNNTMRECISIHIGQAGIQVGNACWELYCLEHGIQADGQMPGDKTIGGGDDAFNTFFSETGAGKHVPRAVFVDLEPTVIDEVRTGTYRQLFHPEQLISGKEDAANNFARGHYTIGKEIVDLCLDRIRKLADNCTGLQGFLVFNAVGGGTGSGLGSLLLERLSVDYGKKSKLGFTVYPSPQVSTSVVEPYNSVLSTHSLLEHTDVAVLLDNEAIYDICRRSLDIERPTYTNLNRLVSQVISSLTASLRFDGALNVDVNEFQTNLVPYPRIHFMLSSYAPVISAEKAYHEQLSVAEITNSAFEPSSMMAKCDPRHGKYMACCLMYRGDVVPKDVNAAVATIKTKRTIQFVDWCPTGFKCGINYQPPSVVPGGDLAKVQRAVCMISNSTSVVEVFSRIDHKFDLMYAKRAFVHWYVGEGMEEGEFSEAREDLAALEKDYEEVGAEFDEGEDGDEGDEY

SEQ ID NO: 60409 - protein, 353 aa, Zea mays
  Clone ID: LIB3592-070-G12_FLI.pep
TSHLNLIPCFAVGKEIVDLCLDRIRKLADNCTGLQGFLVFNAVGGGTGSGLGSLLLERLSVDYGKKSKLGFTVYPSPQVSTSVVEPYNSVLSTHSLLEHTDVAILLDNEAIYDICRRSLDIERPTYTNLNRLVSQVISSLTASLRFDGALNVDVNEFQTNLVPYPRIHFMLSSYAPVISAEKAYHEQLSVAEITNSAFEPSSMMAKCDPRHGKYMACCLMYRGDVVPKDVNAAVATIKTKRTIQFVDWCPTGFKCGINYQPPSVVPGGDLAKVQRAVCMISNSTSVVEVFSRIDHKFDLMYAKRAFVHWYVGEGMEEGEFSEAREDLAALEKDYEEVGAEFDEGEDGDEGDEY

SEQ ID NO: 60410 - protein, 488 aa, Zea mays
  Clone ID: LIB3592-070-G5_FLI.pep
LCSCAYAYTAPIRIVLLASLADPPLPSPRFKMQIFVKTLTGKTITLEVESSDTIDNVKAKIQDKEGIPPDQQRLIFAGKQLEDGRTLADYNIQKESTLHLVLRLRGGMQIFVKTLTGKTITLEVESSDTIDNVKAKIQDKEGIPPDQQRLIFAGKQLEDGRTLADYNIQKESTLHLVLRLRGGMQIFVKTLTGKTITLEVESSDTIDNVKAKIQDKEGIPPDQQRLIFAGKQLEDGRTLADYNIQKESTLHLVLRLRGGMQIFVKTLTGKTITLEVESSDTIDNVKAKIQDKEGIPPDQQRLIFAGKQLEDGRTLADYNIQKESTLHLVLRLRGGMQIFVKTLTGKTITLEVESSDTIDNVKAKIQDKEGIPPDQQRLIFAGKQLEDGRTLADYNIQKESTLHLVLRLRGGMQIFVKTLTGKTITLEVESSDTIDNVKAKIQDKEGIPPDQQRLIFAGKQLEDGRTLADYNIQKESTLHLVLRLRGGY

SEQ ID NO: 60411 - protein, 264 aa, Zea mays
  Clone ID: LIB3592-070-H10_FLI.pep
QRSSPRTLAFPSVTSVLPPSSSSADCPHPLHSQVPTTPNPVSPLRRRLRFGSARLEQKKMQRAVQTVRSHGNVLKYAVLQHISAPKPAMLPAAFSRFMSVSSARLEDRGFETATVADVLKSKGKSADGSWLWCTTEDSVYDAVKSMTQHNVGALVVVKPGQNKSIAGIVTERDYLRKIIVQGRSSKSTKVGDIMTEENKLITVNPDTKVLQAMQLMTENRVRHIPVIDGTGMLGMVSIGDVVRAVVAEHREELNRLNDYIQGGY

SEQ ID NO: 60412 - protein, 288 aa, Zea mays
  Clone ID: LIB3592-071-H3_FLI.pep
GRSSQKRMKNGLAVAGDERKRLAAGTDRPDKHHIARRPIKRAAARVVWFGLACVVDRRLHQAKRLSSTGSLSPPAVVVTDSSELMDGVPGRRRGSLLPAAAGGDPGLLLRHSPRSQHAAAAAASAAGGAPAPAFRARFAVEKVDQPPARLSVAAGGPYRWPVPVPSSGSGPMAPPRSTVSTAAWQRCQFPVPSSPTAPCTGLMVRPAASYSSDWNRAGRCASGTAEMKESRPARPKNLATNTVAWPCASAASIHWRQGRSTQASLQPLRSTRHPLQLMLLPSSRPPPS

SEQ ID NO: 60413 - protein, 256 aa, Zea mays
  Clone ID: LIB3592-073-B9_FLI.pep
AVAMAKMVLLCVLVSFLLMPLASLALTQDFCVADLTCSDTPAGYPCKSSVTANDFYFHGLAGQGKINPPGGLRAPLRDPGHRRRRLHQLRLQHRLHQDTVRRRHHGVPPGPAPLPVQRRHRRCRGPRRLQQPQPRPADHRLCALCQQPPVRRRGEGHLLGRRAGEEAQECARRQRLTCFSRQYSAGWVCIVVVVVLVRRHRMERVCLLLLLHACVHLSSRVKVLVVYFILPLFIHLLFIYSGMNSVSILHFVAMKE

SEQ ID NO: 60414 - protein, 382 aa, Zea mays
  Clone ID: LIB3592-074-C7_FLI.pep
LIPPNPVIPSLFSTSTGTSQRLPEGSSDPRRFRATRGEIQELPAMVKDSAYYDVLGLSVDASPAEIKKAYYIKAKLVHPDKNPGNPDAALKFQELGEAYQVLSDPGKKEAYDNYGKEGIPQDNMVDPAAVFGMLFGSDYFEDYVGQLALASIASVEVEENSNSQEARAKVQEKIKELQREREQKLTQSLKDRLQSYVDGRNDEFVSYASAEARRLSEAAFGEAMLHTIGYIYVRQAARELGKSRIYMGVPFIAEWVRDKGHHIKSQVNAASGAISLIQLQEGMKKMEGSEDSEEQLMKSFEEKKDAMLSSLWKINVVDIESTLSRVCQAVLRDSMVSKDVLKLRAKALKKLGTIFQGAESMYHRESSLRVETSTDQQAAPSH

SEQ ID NO: 60415 - protein, 193 aa, Zea mays
  Clone ID: LIB3592-074-D2_FLI.pep
ARCSSPARPSRRGSRRSPCAPAAAPPPTPPPRRSPPCPATPAPAQFRRPRHESDHYSIRAAARERTTRGGDGIGSRQEWVWSINYLQPDDVVLLLLEEEGVELVELGVEERDESGLLRGHRRRRGSAAPVPHPLALAPPLARAGADLLQPLLEVLVGQELVAPVRERLHDLVVEALAELHCCDWIGAWRISWR

SEQ ID NO: 60416 - protein, 196 aa, Zea mays
  Clone ID: LIB3592-075-H12_FLI.pep
GSAGRGCGLDFRSLAAGAREPDAAKLRVALLLGAPLRRLRWSSGCFGCAQPTPIIAVDEPTKGLRIQGRSVKRHNLSDDFWSSSPHEMENSALQSRHSMSSISTAAQPNDQHASGSSSSPNEFVNQGLLLWHQTRQQWIGKRRHNSQGQQSQGPKISCNATYESLLGSSKPFPQPIPLGEMVGFLVISWEQEGLYD

SEQ ID NO: 60417 - protein, 113 aa, Zea mays
  Clone ID: LIB3592-076-A4_FLI.pep
YVSCRLRLQMTEFGGGRWKMSGGGGRPDHPTPRIRDTRATAGGRARSRKGRRRKCAAPQACEGRGCELRRPTVRNYGGARRQWNGRTVTSEQANGRRPTCTCAAAGAAVPVAA

SEQ ID NO: 60418 - protein, 344 aa, Zea mays
  Clone ID: LIB3592-076-D6_FLI.pep
TLESLELSVPDPLDLDILGRLGPEVGVGRLHALEDADDLAGLRVALGDAQRDVAGGGGGVLDVLLLELLLVTSAPGGERDGVVVAGGAAAALGVEEGGATVAGHEEGPAEALGLAGGDELLDGEEERHALAPRELHGDGGVVDAVLLLELERAVGADLERALDLVQRVREAGHELGLLELGRGVLGDALRLDGEGRRLQAQLLHLVLAGLERERLHAAVDGRALVRRARALHLHVRFALDLVVGQPLGRALRARARDEERRGGEREAGELRGVDAPAGDVLQGARDPGGAGVDAERPAGELRRRAGRQRGKGRPAADLGRLHQGGRGLERGCHRRRGGDAFWLS

SEQ ID NO: 60419 - protein, 121 aa, Zea mays; identical to SEQ ID NO: 48209
  Clone ID: LIB3592-077-A11_FLI.pep

SEQ ID NO: 60420 - protein, 295 aa, Zea mays
  Clone ID: LIB3592-077-A6_FLI.pep
IPILQVTKDGCPIIFHDNFIFTQDDGKISQKRVADIQLEDFLQYGLQNEQGKVGKPLLRRLKDGRMVNWDVQSEDALCTLEEAFDKVNPRLGFNVELKFDDSLEYTEEELTRILQAILKVVFEYAKDRPILFSSFQPDAAQLMRKLQGTYPVYFLTNGGTELYADVRRNSLEEAVKLCLAGGLQGIVSEARGIFRHPAAVPKIKEANLSLLTYGTLNNVPEAVYMQHLMGVNGVIVDLVPEITEAVSELIALPLPEPDLEVGSLSNQAAARGATTPNFSQREISFLLRLIPELVQ

SEQ ID NO: 60421 - protein, 291 aa, Zea mays
  Clone ID: LIB3592-077-C10_FLI.pep
PVQTSSLASATHPRLRSTTRSIVASQPAKPTPHMAGIVVVFDFDKTIIDVDSDNWVVDSLGLTDLFERLLPTARARRRQGRARARLRPARAQRRQRLLHPHRPGPPRPARLLLPGQHQPQPRRRPRPTPHRALPRPARGAARLRRRHLPAQHVQGPRAGPHPPRGRGRGRDRILREAARHLPGRRPRRLLPGAAAGAHRLRDAPQGLPRLGPHLRGPRAPAGGGAPLDRRRRAGGDAAAPRAEGGRGGRRAAAAAAAAARLQARVHARRRAGRYAHRAAGRQELILSLVQN

SEQ ID NO: 60422 - protein, 186 aa, Zea mays; identical to SEQ ID NO: 59938
  Clone ID: LIB3592-080-G4_FLI.pep

SEQ ID NO: 60423 - protein, 173 aa, Zea mays
  Clone ID: LIB3592-081-A11_FLI.pep
RCNALHWSRPTALAFGWEYSRSRSASAPPLLADPYRSKHPPGLRARLRLEIWPTGAPWWWRWCCSCCSLRACCCSCRPRAPAASSSSATSRPAAPPSSSTPSSSSPSPPSSSSPSACTSLRTSLGILLHQSACTPLCRPSKWFIWLWASCLYSCVDASTVIQLFSGAARNPDY

SEQ ID NO: 60424 - protein, 283 aa, Zea mays
  Clone ID: LIB3592-091-C9_FLI.pep
LPSQLFGYIKRTFRYRLTLTRIEPPQIFNKSHQQGPCITYLFDQVIIVIGEGLRSGSCKLSFMLLLQGHINLHFWWLQSNSFNKVKVLIPCQLPSEVKEGLLKVVIALGRNLIVLQVLLPVECNLLGLDLPVLDINLVTTKNNGDVLTDPAQIPVPCRNILVCQPRSDIKHNDGTLTMNVVAIPKATELFLPSSVPAIKANFATVSAKIQRVNFNTNGGLIFLLKLASKMPFHKCGFTSSTVANDDELEAGVIHALLIRQRHFYGAKRSMVRGGGEQRDRGSV

SEQ ID NO: 60425 - protein, 197 aa, Zea mays
  Clone ID: LIB3592-093-C6_FLI.pep
VTCLVCLPCHSVSVKPIHSNACKTMRAAMHILELRETGEAILYPDGFHFHPFGRSRTQSSYIYYGTISLTRLQHGVIRLCRKLKTLAASLHVHLIGKSWLPILHKSLNQHLVRDLIRLNALRLHPVEPLEGVPTRTAPRARADYRVEGDDGRRDPLRQHVVKNSVRHGVVALADVDRRQDRVRVEVGFDAEPAHVFP

SEQ ID NO: 60426 - protein, 169 aa, Zea mays
  Clone ID: LIB3592-096-E12_FLI.pep
LGENIAKSIFGCCEVFLGLRGALDLRGMVKIVDGAEELAGELLEALLLLLGLGSDDGLEVVAQVGGPEAEVVLDVRPRLLVDERLEVDDVLRRRLYPRRRLRRRQRLQVEPLLQGEVEVPRLVRVESPGCAIANVRCFFLCVCKAANIWGFRSELVYLYLSFADVFNLN

SEQ ID NO: 60427 - protein, 147 aa, Zea mays
  Clone ID: LIB3592-096-G9_FLI.pep
MADIRAAVGGRVFFTKMKIAFSALSLIRFRTTYTNCPTVRSAGTRYFFLSMSGMSLLSAFSTMTGILSGYFSLMRLASACLLSKGCSNLNELLAILLLLLIYSIARGTERSDEMDGWMDGWMEARLDRRLIGRGITGVGELGKTRGN

SEQ ID NO: 60428 - protein, 420 aa, Zea mays
  Clone ID: LIB3592-097-G11_FLI.pep
PRHPNSSSSTRSQFDSSSSIQRLPPVRIEERRKNRHRTSSPVQIMALLKAARVADVPTLDVVVAPGLVAVAKARSAAAVGGRFSVIGHRGKGMNALASEDPRLRDVRENTVRSFNDAGRFPVDYVEFDVQVTKDGCPIIFHDNFIFTQDDGKISQKRVADIQLEDFLQYGLQNEQGKVGKPLLRRLKDGRMVNWNVQSEDALCTLEEAFEKVNPRLGFNVELKFDDSLEYTEEELTRILQAILKVVFEYAKDRPILFSSFQPDAAQLMRKLQGTYPVYFLTNGGTELYADVRRNSLEEAVKLCLAGGLQGIVSEARGIFRHPAAVPKIKEANLSLLTYGTLNNVPEAVYMQHLMGVNGVIVDLVPEITEAVSELIALPEPDLDLEVGSLSNQAAARGATTPNFSQREISFLLRLIPELVQ

SEQ ID NO: 60429 - protein, 328 aa, Zea mays
  Clone ID: LIB3592-097-G8_FLI.pep
RYAVPRPEFVGALTGDLNSEPETVSVLDAQRHDGHTVLRGDGHGLELAVERRRRRRRQRGVLHDRPPHEAQQRLLQLGAVGPGVHLRLQARGVLADEVPDGVTPAGHHEVCARQPQRRAVVAAAVAQVDDARLRGGCGLGLGLGLAEDAVQHEALAHVGRAGADAAAVRRRARVVAGPDAESAVGVDAAGVGVDLGEAGEQAVVVQDGVDEEGVGVAEHAQVAAERVRGPDGGGHARVDGRRPERLGHLGQRPAPRVQLPHHRVHERVPGRGGEEALEQVGEAEAVHHPVVAVHVDDRLVEVEHHHDPGHVWCGFSWLAGYDASCGRP

SEQ ID NO: 60430 - protein, 245 aa, Zea mays; identical to SEQ ID NO: 60404
  Clone ID: LIB3592-098-B2_FLI.pep

SEQ ID NO: 60431 - protein, 334 aa, Zea mays; identical to SEQ ID NO: 41488
  Clone ID: LIB3592-101-C8_FLI.pep

SEQ ID NO: 60432 - protein, 473 aa, Zea mays
  Clone ID: LIB3592-102-B6_FLI.pep
RTHRPSPISDPLVDPKMQIFVKTLTGKTITLEVESSDTIDNVKAKIQDKEGIPPDQQRLIFAGKQLEDGRTLADYNIQKESTLHLVLRLRGGMQIFVKTLTGKTITLEVESSDTIDNVKAKIQDKEGIPPDQQRLIFAGKQLEDGRTLADYNIQKESTLHLVLRLRGGMQIFVKTLTGKTITLEVESSDTIDNVKAKIQDKEGIPPDQQRLIFAGKQLEDGRTLADYNIQKESTLHLVLRLRGGMQIFVKTLTGKTITLEVESSDTIDNVKAKIQDKEGIPPDQQRLIFAGKQLEDGRTLADYNIQKESTLHLVLRLRGGMQIFVKTLTGKTITLEVESSDTIDNVKAKIQDKEGIPPDQQRLIFAGKQLEDGRTLADYNIQKESTLHLVLRLRGGMQIFVKTLTGKTITLEVESSDTIDNVKAKIQDKEGIPPDQQRLIFAGKQLEDGRTLADYNIQKESTLHLVLRLRGGQ

SEQ ID NO: 60433 - protein, 276 aa, Zea mays
  Clone ID: LIB3592-102-D10_FLI.pep
VSRRIRSVRVRSVCVCVCVCVCRWRDGHSLRSHGEPGDEEQPRRALEAEGPVRRCCAHEAARPVHRQGHPAREGNVPGGAAHQRRPLHRQPGDAGHLEPARGVVPLQPSGLPHRREPAAAGRRGRPRARLPPRGALRAHGPAPQHARARPGRRARRRRPRRHPQRLPHHVRRRLLQRGGPVHGALAHAHRQEEGGRQAADLRRLGQVHRGILLRRHLRRALGLLSPLRARPPLLLQVEIIKDAYIYSSGRSSSLAAWYVGGVVLVSFHSSGDQRRV

SEQ ID NO: 60434 - protein, 188 aa, Zea mays
  Clone ID: LIB3592-103-D3_FLI.pep
FRDHKHTDGKGIEEEHRLLVVCGVQSYQIQDNRNNNEELPITSKLFAIIHLLPPSQCVVHSLVISKRCSFLPMEKVVCDREVEEVDDGPRGARGAAEDGEDEEPGEEDNEDVGRPDARIHEPLGVLVQIRGRERLHIQLRHRGTPEKSLTARRPREPFRPRRREHDRTREDGSSSELCGYVLAARCGG

SEQ ID NO: 60435 - protein, 393 aa, Zea mays
  Clone ID: LIB3593-001-B3_FLI.pep
APQTSLYQTVWWCGDWRRSAQEQNKRARNIGRKEERNGELEKAGKTRLLTPSTLLRAMAATSEEAIKQFSALMEQLEEPLKSTFQNVHQGNLRGTLMRFLKAREWSVPKAYKMLMDCLNWRVQNEIDIVLAKPILPSDIYRVIRDTLLVGLTGYSKQGQPVYAFGVGLSTFDKASVNYYVQSHIQMNEYRDRVVLPAASKKFGRQINTCLKVMDMTGLKLSALSQIKMLTMITTVDDLNYPEKTETYYIVNAPYVFSACWKVVKPLLQERTKKKIQVLYGSGRDELLKVMDYESLPHFCKREGSGSSSDSLDGVDCYSYDHPFHQQLYNYMKQQQSLNQDSVGPRKQGSVHVDVPSPGLEEAKIAETIKAELQNLRGSGGLAHSFSSIQIEGP

SEQ ID NO: 60436 - protein, 548 aa, Zea mays
  Clone ID: LIB3593-002-A9_FLI.pep
ADSDRAAMPLDELADKGPSSSEEVQLAPSDSKFRSLSPAPIPLPTLPSIRSISTVSSLESERAAYEFLAQTPVRSTDAHLVEFSEAMRTVAKALRRVAEGKAAAQAEAAEWKRKYELETAHKHRSKIKGYSSCINNDLDKLVSQLTLETPTSDQLGCCGKHGICAHEILQDEVPGPIPRSNHKVVGRKASFKLSWGCNGDKNGQHKHDFVSFEKGDITTAERSNKQILLKWESPPQTVLFITKPNSNSVRVLCAEMIRWLREHKNINIFVEPRVSKELLTEDSYYNFIQTWDNDEEIKMLRTKVDLIITLGGDGTVLWAASLFKGPVPPVVAFALGSLGFMTPFPSEQYRELLDNVLNGPFSITLRNRIQCHVIRDEAKDEIVSEEPFLVLNEVTIDRGISSYLTNLEVYCDSSFVTCVQGDGLIISTTSGSTAYSLAAGGSMVHPQVPGILFTPICPHSLSFRPLILPEYVTLRVQVPFNSRGNAWASFDGKDRQQLSPGDALICSISPWPVPTACLVDSTTDFLRSIHEGLHWNLRKSQSFDGPRD

SEQ ID NO: 60437 - protein, 499 aa, Zea mays
  Clone ID: LIB3593-003-A6_FLI.pep
SSSSNTFQLLYLRVIYNMAGGAVVSGGSGGNPLRHGFIKREYLWAFILVTSLFFLWGFAYGLLDVLNAHFRAVLGITKTQSTGLQAAYFGIGYFAFSPVAGEVLKRRGYKFTIIMGLSLYSLGAILFWPCAKFSGKGNNAAVFGGFVICTAVIACGLATLEVSANSYVSVMPPHNVANFRLQFSQSFNGVASFTGPLIASKYFFSGEHNDNLDTVQWVYLAVALLGVAVAIAFFFTKLPEVSEEALQAEAELLADAAGADPQTLKPFYKQYRAISGAVAQFLYVGAQVTIGAFFLFLAEEAGINHEKGSQLLSYGLITFTVARFIGTALLSFIAAPVLLGVYAVACTIIAIMIGAVHGPTGVYLAIVIMFFESIMYPVIFVLSTHNLGRHTRRAAAMVVMGVSGGAVFPPIQGAISDKFDTRVSFFIVVPCFVYIALWAVYIWHKDGRKWGVASNDAVLNAQSAQLEATPAANLMFGGAQRTENYEGSIKEDLHQVEKV

SEQ ID NO: 60438 - protein, 482 aa, Zea mays
  Clone ID: LIB3593-003-H3_FLI.pep
KRGSACLVAEDDVGDLSEHDERVTLEQADAAQTLAVSVLLHHQLLGGLEDELGHVVGLDLGGVSHLLLAERLVHDPVDLHQLDGALGGTHAGHGAVADLERVGAVEHLRLHGELLGGLERLVRLDDHDVAALGHVLLGQTLDVDADVVTGHSLRDLLVVHLHGEHLADARGGVGVAGQEHHLIAILHLALLQAAGDHITHTLDLEAARQRHAQSGVLLALGRLRQLVERIHQRVDVDGVLLLDVDLAVHSLPPSHVLRLGQQIVALPAGHGDHGHARLHELLLPADLDQHVAHLIAHLLEASLAPVHSAVVHLVDAHNELLHAQQVEQARMLAGLSLHLLRRVVTGGDGGGETSLSRHHEHGHIGLRGASEHVLDEVAVAGRIDDGVVEVGSEELLGRARDGDTAGALILLLVHHEGVDERLLAQRSSLHFELLQLALRHTAQQRQQATRHSRLAGVDVAGDGHGQMLLLHISSGSHGEKRM

SEQ ID NO: 60439 - protein, 179 aa, Zea mays
  Clone ID: LIB3593-004-H11_FLI.pep
SRPQDSESPRRGEATAVGDMMASVPSRVALSAASRLPNLHAVAGDRSFIYKRRCPSLSIPMALSAAAPGKGGGVLDRPVEKITPGRQSEFDVKKSRKMTPPFRVILHNDNHNRREYVVQVLMKVIPGMTVDNALNIMQEAHVNGLSVVIVCSQSEAEEHCTSLRGNGLRSSIEPASGGC

SEQ ID NO: 60440 - protein, 317 aa, Zea mays
  Clone ID: LIB3593-005-H7_FLI.pep
KFVTETCERGSIIVQFGNMSSKKIELDHKDMVHDSAIDYYGKRLATASSDFTVKIVNIGAANAPSQVLATLSGHYGPVWRVAWAHPKYGAILASCSYDGRVIIWKEDARGNWSQVHVFSDNKSSVNSIAWAPYEVGLCLACASSGGRISILTMQADGGWDTATIERAHPVGATAISWAPATASLAGAGELVYKLVSGGFDSVVKVWGFNNGSWKLESALISDMHTDCVRDVAWAPVLGLSKSTIASGSQDGKVVIWTKGKDGDKWEGKLMRDFGSPVWRVSWSLTGNILCIAAGENNITLWKEGSDGQWEEAMKVEP

SEQ ID NO: 60441 - protein, 421 aa, Zea mays
  Clone ID: LIB3593-006-F4_FLI.pep
TSGSNTTMVTGKKRTFVLYPSLGVGHLIPMVELAKHLLRHGHGALIAVVNPPDTDAVSAAAVERLAAANPAIAFRLLPVPAYFFFASAAGDLAVFLNLPYLYPTLPSFRDMGEAPVRCPGMPPVRAMDMPLTVQDRDSDRTKVRMYQFRRIPEGKGVLVNSFAWLEPRALRALGDGVCVPGRPTPRVFCVGPLVNDGSSTAGGGGRHECLAWLDAQPKRSVVFLCFGSKGAFPAAQLQEIAHGLESSGHRFLWAVRSPPEEPDTDLGKLLPEGFLDRNRDRGMVVKDWVPQAEVVRHEAVGAFVTHCGWNSTLEAIMSGLPMICWPLYAEQGLNKVFMVEEWRIGVELRGYEKFVKAEELEAKVRLVMEAEEGRILRERLAVAREKALGATKEGGSSEVAFTEFFGDLDKTRSPSVNGECD

SEQ ID NO: 60442 - protein, 162 aa, Zea mays; identical to SEQ ID NO: 59134
  Clone ID: LIB3593-008-D11_FLI.pep

SEQ ID NO: 60443 - protein, 280 aa, Zea mays
  Clone ID: LIB3593-009-E12_FLI.pep
LGGGRRLAGSLDGEHDLVGAQRRERERRVVPRQHERALDGVPVLLQGGLKSLRLLPHRPVRGHPAEPRHAELPLRHLADHHPLVRRPRRLLHPGVLGRQQELHCHLARRLLVVRDHRRGHRDGLGLAAAGGDDGGRHGDLLAVAAAAAAGGDDGGRHGDLLAVAAAAAAGGDDGSRHGDLLGLGVLRLSEDPDVVGEDGEPAIRVSFHLLGIVGQLRGDAGRVLADLIAGAGVEDLVLGRLHRDLPQHHPQHHRHGGLSAEDGGELWRSGSLDVSVTVCE

SEQ ID NO: 60444 - protein, 152 aa, Zea mays
  Clone ID: LIB3593-010-B8_FLI.pep
SRGLGRALALELARRGHAVVGCGRSAEQLRSLEAEITSPSRHFLTVADVRSDSSMSELAKAVLEKKQVPDIIVNNAGTINKNNKTWNLPVEDFDMVVDTNIKGTANVLRHFVPLMIARRHGIIINLTSGWGRSAAAEVIPKATKCIIVDPFC

SEQ ID NO: 60445 - protein, 223 aa, Zea mays
  Clone ID: LIB3593-012-B3_FLI.pep
TEGHRCAPRASSLSTSSRTQRERPMASSLARLGAALPRARPRSAALGIGASRRAAPNAFRCQVHSDIKVAPTSDLKDDSKSETWRIKMLYDGDCPLCMREVNMLRERNKSYGAIKFVDISSKDYSPDDNEGLDYETVMGKIHVILSDGTVVTDVEAFRKLYEEVGLGWVYAVTKYEPVATMANAIYGVWAKYRMQITGRPPLEEIIASRKAAGECKDDKVCKM

SEQ ID NO: 60446 - protein, 383 aa, Zea mays
  Clone ID: LIB3594-001-B5_FLI.pep
LIIPIPASTPSLSQPHNQFLFQSIAVSMATTQSCQSRSSACSKAAACFPAAVAVDEEHGHHSHQLKGGAQEEAENDNNKPELRRGPWTVDEDLTLVNYIADNGEGRWNNLARAAGLKRTGKSCRLRWLNYLRPDVKRGNFSADEQLLILDLHTRWGNRWSKIAQHLPGRTDNEIKNYWRTRVQKHAKQLNCDANSKRFKDAMRYLWMPHLADDVDTIAAANDDDEDHHHHLRLLVLHHHQAQHLQQAAAAAGGAANDLAAGAYDVRQLHALPSSGMAAVPTTATTSSSDSLASESYDDGGLLFANLRAGEMLMDGGDWAAQQEADQGLWPPPPPTSDLDQSVVQAAGAGAGQFQDMELSGWVQGFSESITDNFWALEEIWKMQ

SEQ ID NO: 60447 - protein, 139 aa, Zea mays
  Clone ID: LIB3594-002-C5_FLI.pep
EVDKNNMGFSEAQEELVLRSWKAMKSDSESTALKFFLRIFEIAPGAKQMFSFLRDAGDAPLEKHPKLKAHAVPDMWTPEMKAAWEEAYDQLAAVIKEEMKNAAAAEEQTKNAATAEEEIKNAAAAEEETTNAAAAVDGS

SEQ ID NO: 60448 - protein, 359 aa, Zea mays
  Clone ID: LIB3594-003-D5_FLI.pep
NRWPTNDSLPRSQGAAIGIRNFSHAANTAEMMSSRAGSILLRHAGSRLFTAAAISPAAASRPLLAGGNGVPAVMLRLMSTSSPAAPTEAKDEAAKASKVGGDKKAVVINSYWGIEQNNKLARDDGTEWKWTCFRPWETYTADTSIDLTRHHEPKTLMDKVAYWTVKSLRFPTDIFFQRRYGCRAMMLETVAAVPGMVGGMLLHLRSLRRFEQSGGWIRALLEEAENERMHLMTFMEVAKPRWYERALVITVQGVFFNAYFLGYLLSPKFAHRVVGYLEEEAIHSYTEYLKDLEAGKIENVPAPAIAIDYWRLPANATLKDVVTVVRADEAHHRDVNHFASDIHCQGMQLKQSPAPIGYH

SEQ ID NO: 60449 - protein, 153 aa, Zea mays; identical to SEQ ID NO: 44873
  Clone ID: LIB3594-006-A1_FLI.pep

SEQ ID NO: 60450 - protein, 101 aa, Zea mays
  Clone ID: LIB3594-006-D5_FLI.pep
PIHAHETSNVVRMVMMSREPNNMMTRLVTAGTTPAAAMDTFYHLLLPQMLGDPADTSRCKVVVTCLYAPKAAKALVTWLFPLCDQVTICIALVQAELIKLP

SEQ ID NO: 60451 - protein, 200 aa, Zea mays
  Clone ID: LIB3594-007-H10_FLI.pep
QHQTLQQSSTRSSRARRPTMIIPKKNRNEICKYLFKEGVLYAKKDYNLAKHPQIDVPNLQVIKLMQSFKSKEYVRETFSWQYYYWYLTNDGIEHLRNYLNLPSEIVPATLKKSARPLGRPFGSGPPGDRPRGPGRFEDRPRFGDRDEYRGGPRGAPGDFGGDKSGAPAEFQPSFRSSGARPGFGRGGGSGFGAGPTSSME

SEQ ID NO: 60452 - protein, 73 aa, Zea mays
  Clone ID: LIB3594-010-E1_FLI.pep
FNKTSLPEPSRLHKRAYLEHPVWLPHGALDVQASHILPVLLQKGNKEVDAHLDVLLDLLLLHRQVADGDTHAK

SEQ ID NO: 60453 - protein, 90 aa, Zea mays
  Clone ID: LIB3594-011-C8_FLI.pep
IRSSWWFCEVESGERIRRCWTSCGTTWWPGLARRRASRSSARPPPPHRLRLALQRRDQEQPPLDRARWMDSEEAMFAGPCGYLKRTHALL

SEQ ID NO: 60454 - protein, 159 aa, Zea mays
  Clone ID: LIB3594-012-E6_FLI.pep
PDGLLEAPVLPFLTVPHQARLPALPHQRHRPHRSQVSPLRHHLHVRGWHAVALGSPGVWHVGLRLGPCEVELKAPAAAAAAAEGLWHHGGVGLARDGGGGQLADLAHPHALVAQARVRGPGVARRAEEGSTNARAAVHRRRGPLAAAAPPAPHAPVLVQ

SEQ ID NO: 60455 - protein, 260 aa, Zea mays
  Clone ID: LIB3594-013-B12_FLI.pep
LGGGRRLAGSLDGEHDLVGAQRRERERRVVPRQHERALDGVPVLLQGGLKSLRLLPHRPVRGHPAEPRHAELPLWHLADHHPLVRRPRRLLHPGVLGRQQELHCHLARRLLVVRNHRRGHRDGLGLAAAGGDDGGRHGDLLAVAAAAAAGGDDGSRHGDLLGLGVLRLSEDPDVVGEDGEPAIRVSSHLLGIVGQLRGDAGRVLADLVAGAGVEDLVLGRLHRDLPQHHPQHHRHGGLSAEDGGELWRSGSLDVYVTVCE

SEQ ID NO: 60456 - protein, 180 aa, Zea mays
  Clone ID: LIB3594-014-D12_FLI.pep
ELAPSSSGCYSSFSTHIARCQHHPSSFLADEQCLHIYKRTPATLHISLASSLSLCSGRASPHLCCCVRACLYGFLGAHHHNALQESMHHLRPAEGRRRRRQEVAATKPSDDGTARRRRRREGQAARGGDGVRLRRRAGHVVHARPDNKDWGSQWQLVTAGNCPFMHFPRATKVEMQTWCT

SEQ ID NO: 60457 - protein, 246 aa, Zea mays
  Clone ID: LIB3594-014-H1_FLI.pep
GIMSETGHTVQVTNLSSRVSESDLHEFFSFSGPIEHIELIRSEGYGATAYVTFKERFALETAVLLSGATIVDQPVCITYWGQPEGTFNFWDRPTWEVEEEIEYRNYQTCQYNTTPQEAFTVAQDIMKTMLEKGYVLSKDALAKARAFDESYGLTAAAAARAAELSKRIGLTDRVNAGVGAMRSVDETYRVRETTKTVATATGRTAAKVVNGIVTSSYFSAGAMILSDALTRAAKAAADLAAHGRQN

SEQ ID NO: 60458 - protein, 217 aa, Zea mays; identical to SEQ ID NO: 48281
  Clone ID: LIB3594-021-F6_FLI.pep

SEQ ID NO: 60459 - protein, 104 aa, Zea mays; identical to SEQ ID NO: 44964
  Clone ID: LIB3594-022-E8_FLI.pep

SEQ ID NO: 60460 - protein, 300 aa, Zea mays
  Clone ID: LIB3594-024-F8_FLI.pep
ISATSNQHRLLFASFGKGFSCGRSTGGAPRIEDAGEGVRIADVGGGRPRPGLPVREGRRVPAHPRRLLPRHQAPAPVPQAPAARRGAHLRGRQRHPRRVEEDPAPHRRQVQEPGVQGPVRPGRAGAGLHRAVAADGGAELRRPQRRHGLQPRLPAARHAARRQGRRRPPGGDGDDEPGAPAEGGGDAAAVREEPQAAGQAAGHLRAAPWRGGLPGRRQVHARRPVPPAQRRPPRRRPAVRAPHRVAQERQQVVGHRLPPRLLGQGQGVAAPAVRGGALLISIDRKLRRWPLLKPTCSVSA

SEQ ID NO: 60461 - protein, 489 aa, Zea mays
  Clone ID: LIB3594-028-G11_FLI.pep
NPRTIMSLSTHSHPAAAAAGSGKSLFPAGPAAQSVHFPKARPPVPAAVSAATAAVHAEDRVSSLTQVSGVLGSQWGDEGKGKLVDVLAPRFDIVARCQGGANAGHTIYNSEGKKFALHLVPSGILHEGTLCVVGNGAVIHVPGFFGEIDGLESNGVRCDGRILVSDRAHLLFDLHQAVDGLREAELENSFIGTTKRGIGPCYSSKVTRNGLRVCDLRHMDTFGDKLDILFKDAASRFQGFQYSKSLLKEEVERYKKFADRLEPFIADTVHVLNESIKQKKKILVEGGQATMLDIDFGTYPFVTSSSPSAGGICTGLGIAPRAIGDLIGVVKAYTSRVGSGPFPTELFGEEGDRLRKAGMEFGTTTGRPRRCGWLDIVALKHSCQINGFSSLNLTKLDVLSGLSEIKVGVSYTQTDGQKLQSFPGDLDTLEQVQVNYEVLPGWQSDISSVRRYDELPQAARLYVERIEELVGVPVHYIGVGPGRDALIYK

SEQ ID NO: 60462 - protein, 270 aa, Zea mays
  Clone ID: LIB3594-033-E10_FLI.pep
VSSCERQLVELRRSHLHRRRAFTSIGTGYDLSVTTFSPDGRVFQVEYATKAVDNSGTVVGIKCKDGIVLGVEKLVTSKMMLEGSNRRIHSVHRHSGLVVAGLAADGRQIVSRAKSEAASYEKVYGEPIPVKDLADRVASYVHLCTLYWWLRPFGCGVILGGYDRDGPQLYMIEPSGVSYKYFGAALGKGRQAAKTEIEKLKLSELTCREGIVEVAKIIYGVHDESKDKAFELELSWICDESNRQHQKVPNELLEQAKAAAQAALEEMDAD

SEQ ID NO: 60463 - protein, 96 aa, Zea mays; identical to SEQ ID NO: 41063
  Clone ID: LIB3594-034-G8_FLI.pep

SEQ ID NO: 60464 - protein, 186 aa, Zea mays
  Clone ID: LIB3594-035-C10_FLI.pep
GASLHRHMMWQPAGCSGSHRNIGGDGPRQQAPEHGGGGYGYGQSFFLSSSSSFFFLASSSAFFFFSSSSFFFFSSSSFFLSLTSSTTTMSARQTFLRSRLIMQVMSTLSPTTSSRSLASPAIPTEFTPTNLDAICMALDRFLSFGTPSLITDFCLDIASPAAAAAANDGFNVLRCRLPAAGATRAA

SEQ ID NO: 60465 - protein, 101 aa, Zea mays
  Clone ID: LIB3594-040-D7_FLI.pep
GGILLGSVVPLFGLGWPLAGVARPSAAGLWADLAFATGSAYIKSKCHPLSSDPRCISSITSMRRGTRSTPPRRSHLLGCRRSLLTQLASHQMTSTLASGTC

SEQ ID NO: 60466 - protein, 187 aa, Zea mays
  Clone ID: LIB3594-041-B4_FLI.pep
RTEKYTNTELAVTSLQLQRSVTRRWSPFSQKPPVVLQQPSGVRHHLLHGVHRQEALRPRRQGREPGLVQKLYAGRLVHHPDPHHEAPERDVHEPDGVAAKEGFPFGALPECLLQRLHHGDDDAERLRRLLRCRRPEQPVPLLVELVVDVGCPEASHGAVVGVGGEERGPGACPGLVDVLQDDERLAH

SEQ ID NO: 60467 - protein, 123 aa, Zea mays
  Clone ID: LIB3594-043-C4_FLI.pep
PRSPPPAIPALSSSFPLSPPAICPQSHARAVDDSPQEISPPQPPPRTVNGRSTPTSSMEGRAVNGRWQVLAIEGARVPNLHTQLEGGFESVFDFTARSKTFTVLFSSSTKSDFTFCLCVLFLF

SEQ ID NO: 60468 - protein, 170 aa, Zea mays
  Clone ID: LIB3594-046-B3_FLI.pep
HSQGSSDAPKFINVICFSCCITIGRALYADFTPSRGSTPVYQPRAQTVMSSIFQPDTRSSKSPEPSPTGRRKLAELLQEAMQDGPEESADEQQQQQQSRSAGAAADGKPPVSESTSSSACSTVPTPVAVAKSRKEKAWYTGRCCLPSFVHSLTLDESERGQKMSSRPCAV

SEQ ID NO: 60469 - protein, 340 aa, Zea mays
  Clone ID: LIB3594-049-A3_FLI.pep
GGRKETVDQSLRRRPIHHRSDEREEMKIIIDTDPGIDDSVAILMAFQMPGVQVLGLTTIFGNCTTEHATRNALILCEKASHLEVPVAEGSHEPLKGGKPHVADFVHGPDGLGNVDLPDPTIKKVEESATDFLVDKVSRFPGEVSVLALGPLTNIALAIKKDPSFVKNVKKIVVLGGAFFAAGNATPSAEANIHSDPEAADMVFTSGADIYVVGLNITTQVSFTDKDLLELRNSQGKYAQFLCDVCKFYLDWHTESYGAPVIFLHDPVSFAALVRPELFTFKKGVVRVETQGICVGHTSMDMLLKKWNSENPWTGYSPISVAWTVDVPKVVAFVKELVTKP

SEQ ID NO: 60470 - protein, 188 aa, Zea mays
  Clone ID: LIB3594-051-C10_FLI.pep
ESAIHSARRKTLAHPPILVMAATTSQASLLLQKQLRDLAKHPVDGFSAGLVDDSNVFEWQVTIIGPPDTLYDGGYFNAIMSFPENYPNSPPSVRFTSEMWHPNVYSDGLVCISILHPPGEDPSGYELASERWTPVHTVESIVLSIISMLSSPNDESAANIEAAKEWRDKREDFKKRVRRIVRKSQEML

SEQ ID NO: 60471 - protein, 419 aa, Zea mays; identical to SEQ ID NO: 48395
  Clone ID: LIB3594-051-C11_FLI.pep

SEQ ID NO: 60472 - protein, 444 aa, Zea mays
  Clone ID: LIB3594-052-D10_FLI.pep
SRDPHDHTDPPPSASAMDAAPPTITKSPPSLVPPAGPTPGGSLPLSSIDKTAAVRVSVDFIQVFPAPTSGKEDWSPSSAIAAMREGFARALVPYYPIAGRIAEPVPGEPEIECTGEGVWFVEAEASCSLEEARNLERPLCIPKEELLPRPPAGVRVEDTLLLAQVTKFTCGGFSVGICFSHLVFDGQGAAQFLKAVGEMARGLPEPSIKPIWARDAIPNPPKPPLGPPPSFTAFNFEKSVVEIALDSIKRVKDQVASETNQKCSTFDVVTAMIFKCRALAVDFAPDAEVRLGFAASTRHLLSNVLPSVDGYYGNCVYPGGLTKTSQEVKEASLVEIVTAIREAKEALSSRFLDWLSGGAKENHYNVSLDYGTLVVTDWSHVGFNDVDYGFGEPSYVFTLNDDVNIVPSVVYLKPPKPKQGIRLVLQCVEGRHSAVFSEELQKHA

SEQ ID NO: 60473 - protein, 194 aa, Zea mays
  Clone ID: LIB3594-052-G7_FLI.pep
YVVANTQKIKRRARTRDTSSLGRLRLRLRLAVGFDLGGDPSGLVLGCLEQEAPALVVHGDLERLGAEPVGDGEHDAAHLVVELGAVDGAAVVGVELLEDGVVERGDLGGERRRLGGPEAAAVEEAEGLERAPELGAGQHAVAVGVQRGEARVQAAREGRLVRHEAAHRGAVQDHHAHGGPFVPWTRLRLARAGD

SEQ ID NO: 60474 - protein, 236 aa, Zea mays
  Clone ID: LIB3594-052-E11_FLI.pep
LNRRLPLPQGPPRSLASRHPLTETERPMASSLARLGAALPRARPRAATRTLPPPRWDAAALGASRRAAPNVCRCLVHSDVKVAPTSDFKDSSKSETWRIKMLYDGDCPLCMREVNMLRERNKSYGAIKFVDISSKDYSPDDNQGLDYETSMGRIHAVLSDGTVVTDVEAFRKLYEEVGLGWVYAVTKYEPVASMANAVYGVWAKYRMQITGRPPLEEIMASRRAAGECKDDKVCKM

SEQ ID NO: 60475 - protein, 137 aa, Zea mays; identical to SEQ ID NO: 37029
  Clone ID: LIB3594-053-B12_FLI.pep

SEQ ID NO: 60476 - protein, 332 aa, Zea mays
  Clone ID: LIB3594-053-E12_FLI.pep
EGCPTLAPVGGGGEDRGLPEEAVMAATIQYNRSNPAVKRILQEVKEMQSNPSPDFMSLPLEEDIFEWQFAILGPRDSEFEGGIYHGRIQLPSDYPFKPPSFMLLTPSGRFEIQKKICLSISNYHPEHWQPSWSVRTALVALIAFMPTNPGGALGSLDYKPEDRRALAIKSREVPPKFGSPQRQKLIDEIHEQMLSKAPPIPQTLPNVPNEELAPDSCDEHADKVDEGGNTSKSMSGSSSGHPVPEAESLAAENTGEASAVEVANHQVPEASRRESIPRVPSSLQNAAIATQKPKHDRLLTLAAFGLTLAIMALVIKKFLKINGLGGFIEGKF

SEQ ID NO: 60477 - protein, 200 aa, Zea mays; identical to SEQ ID NO: 46069
  Clone ID: LIB3594-053-H9_FLI.pep

SEQ ID NO: 60478 - protein, 602 aa, Zea mays
  Clone ID: LIB3594-054-C12_FLI.pep
LLGSCIPHTLESSKDPAAQQPPFSPLRSQSYRRLPRSRRCLHSTMALHAPVHVMKDSLKRESGAKVHQANIQAAKAVADIIHTTLGPRSMLKMLLDAGGGIVVTNDGNSILREIDIAHPAAKSMIELSRTQDEEVGDGTTSVIVLAGEMLHVAQAFIDKNYHPTVICRAYTKALDDAIAVLDKIAMPVDVNDRGAMLGLVKSSIGTKFTGQFGDLIADLAIDATTTAGVDLGQGMREVDIKKYIKVEKVPGGQLEDSRVLKGVMINKDVVAPGKMRRKIVNPRIILLDCPVEYKKGENQTNAELMKEEDWQVLLEMEEEYIKNLCAQILKFKPDLVITEKGLSDLAIHYLSKAGVTAIRRLRKTDNNRIAKACGAVIVNRPEELQESDVGTGAGLFEVKKIGDEFFAFIVDCKDPKACTVLLRGASKDVLNEVERNLQDAMSVARNILKNPKLLPGGGATELTVSATLKQKSSSVEGVEKWPYEAAALAFEAIPRTLAQNCGLNVIRIMTQLQGKHANGENAWVGIDGRSGDIVDMKERKIWDSYSVKAQTFKTAIEAACMLLRIDDIVSGIKKKQAPGASAPKQPQIETEGDADNEQMIPE

SEQ ID NO: 60479 - protein, 423 aa, Zea mays
  Clone ID: LIB3594-054-E10_FLI.pep
EETKNIVCNEIVSAYELDGHPDYDYCYGDIVVRLPPVSPVIESTNNKDQMELDRTVDASEGFAASNDAPSNTSASEQLLQKESCSQFTSLSWAGNIVGFQDGEIEVIWGDGSISKVGPHEIYVVGREDDDASLDDGTASDGASWETVDDNEMDVLDDSAKGTGGRKWVKKVQQEWSILEKNLPDYIYVRVFEDRMDLLRAVIVGASGTPYQDGLFFFDFYLPPEYPQVPPSAYYHSGGLRVNPNLYVDGKVCLSLLNTWTGRGNEVWDPSSSSILQVLVSLQGLVLNEKPYFNEAGYEKQVGTVEGEKNAVPYNENTYLLSVKSMLYILRRPPLHFEDFVKSHFRKRGHYILKACEAYLQGNVVGTLTDDACTTNRSTEHSSSVGFKLALAKILPRLITALKEHGADCDQYEHLGKTDPVRES

SEQ ID NO: 60480 - protein, 312 aa, Zea mays
  Clone ID: LIB3594-054-G6_FLI.pep
KPIPPARQVPRDLSQPPQIRLPSPPARSRAFRTPAAMSHNHGDTIPLHPSSAQSDMDEIESLIHAAPSPATVLPARPPSPTRASIPVSSSPAPSPVPTKPPFPAASIPISVSVSPVPVPASVSVPIGADGFGSPPNTLTEPVWDTIKRDLARIVSNLKLVVFPNPYREDPGKALRDWDLWGPFFFIVFLGLTLSWSASVKKSEVFAVAFAVLAAGAIILTLNVLLLGGHIIFFQSLSLLGYCLFPLDVGALVCMLKDNVILKIVVVTITLAWSSWAAYPFMSAAVNPRRKALALYPVFLMYISVGFLIIAID

SEQ ID NO: 60481 - protein, 187 aa, Zea mays
  Clone ID: LIB3594-055-F11_FLI.pep
TQQPFCSPRERSLSLSTGDDSATAAALRETPRSSPTTSIRVREEEIATETMAADSGARRQPSFTKVDQLRPGTHGHNLILKVVDSKMVVQRGREGGPQGRQMRIAECLVGDETGIIVFTARNDQVDVIRPGTTVELRNAKIDMFKGSMRLAVDKWGIVKAAESSAEWTVKEDNNLSLIEFELVTVTE

SEQ ID NO: 60482 - protein, 116 aa, Zea mays
  Clone ID: LIB3594-057-F8_FLI.pep
YANPQDDGILVIPTALGCPPKLNAKLLTSEIYNSQTLRLLSLASMSGCCQVSIPLGTHDKCPISVSFIAKHGGDRFLLDTTQTMYTTIQEQVEILAKSSVSSKQAMNEEAAEASGV

SEQ ID NO: 60483 - protein, 342 aa, Zea mays
  Clone ID: LIB3594-059-E1_FLI.pep
GVAKQKRGRRGGRSYTERVEARSFHLEASEVEHGGPEPEEAAAAALAVRGPGESQAAAEAEPGLPLHRRSHSHRSLLHLLLLLLARRADAEVQVEVGALERPLPLAPLAGGVAVAVALALPVAADDHRRLVALLLLLVLQPEDGALLIITGSGGHLRLERYGDVGRVVLRDRAVRHRVDPPAQQLPPDVRVPVVLDLVVRPAGQPSGDQGPLVAEDAVQLDDELVLLLREVAALEVGAEVVDPAEAAALAAAQEAGGLGQRAPAPLAVRPDVRDQALVLLLGPRALVGVRLLAARRPPHGERAGDRRCCQQPWLLLYRPFAAAGLASRWVAAVEVVVVAAAV

SEQ ID NO: 60484 - protein, 302 aa, Zea mays
  Clone ID: LIB3594-059-E4_FLI.pep
FGLRMGAPKQRWTSEEEAALRAGIARHGVGKWRTILKDPEFSSTLCYRSNVDLKDKWRNMNVIVSTSSSRDKAKSALKRIRTIPKNNEHTMAITRVTSDIDDEIVDEKPIVSLPSEAKNTSSSKKSHRLDNIIMEAIKNLNEPTGSHRTTIANYIEEQYWPPSDFDHLLSAKLKDLSTSGKLIKVNRKYRIAPSSPNSERRSPKMPLLEDVQREPVKIWSDDTKTLTRSQVDAELARMATMTAEEASVAAARAVAEAEAIMAEAEAAAKEAEAAEAEAQAAQAFAEAAFLTLKNRNAGKLMA

SEQ ID NO: 60485 - protein, 218 aa, Zea mays
  Clone ID: LIB3595-002-F7_FLI.pep
LDKRNRWLALLEKGTSTACRTTTLQQHQWKSPSMSSLQADGISTSPSSISCCRSLGSLPSTVHPTLTQVPRISLTVPANSLAMDLFLMVLAISTTSSRPMLPLCLMFLTFFLSLSGSLSALMTSAAAEGTTETLAWRFWTVSLTVTRRPFQSLAVSLAMSSPIFFGERPSGPILGARDDAAPTSPPVTRTKTSTTCDGSSLGGMAAAAAGVWVGFGKW

SEQ ID NO: 60486 - protein, 180 aa, Zea mays; identical to SEQ ID NO: 52264
  Clone ID: LIB3595-002-H3_FLI.pep

SEQ ID NO: 60487 - protein, 157 aa, Zea mays
  Clone ID: LIB3595-003-C6_FLI.pep
FLSIAFYSVIDLVKKIQFYSKVEALLQPHYSRDLWKVRCDRGHGILAVRVWSPSGATATTLPAITWLLMITSWQGIWAALVADGAVGDGAALGDGHGHGRLDAGLPRGVGQHDGAQALGDAPDGAHLRAAARRHRGARVLRGRRARSKLERHLVHRD

SEQ ID NO: 60488 - protein, 277 aa, Zea mays
  Clone ID: LIB3595-006-G8_FLI.pep
GLHLNPILIQIFGAIAPSLCCHRDQLSGLPSWPPPSLCRRGHPLPSSCRQGPDRSRPAVRRQGSRPCSRQLGRAAFFIDPSSARGGSSSLTSPSAAKDLGRAVRRQGPWPAFFINPPSARGGSPSLRQPVVARLLPGVLCQGQSAVLPRGSAPPAARGRAPPATSICRQGRISISACAVPPLGQVLRIPASRRCAQGRGSAAPAGNLHQPSPLRTGLRICDVAAPASHCSTRLPRPGLPSTRPSRVALVCLVSGLLFSLIFDSIQYGDKCYCGKYHS

SEQ ID NO: 60489 - protein, 67 aa, Zea mays
  Clone ID: LIB3595-010-B8_FLI.pep
SSNTKQKKNGGVFCLDFPVVAFELRVHIPSRLIIRYTTPTQIRFNGVGPQEFKKKAKPKPVVELIQD

SEQ ID NO: 60490 - protein, 295 aa, Zea mays
  Clone ID: LIB3595-019-A6_FLI.pep
TVLLCFGATVQCAQPASSAAEQSPAVSPDQRGFSAMERPAQAPTQLPPGFRFHPTDEELVVLYLRRKALARPLPAAVIPVVHDVAGLDPWDLPGASEGEGYFFSLRRAPATGRGSRRRRAGSGYWKATGKEEPVFLQCGGGGVGGKRQLLVGGKTALAFHRSEPSPPSSSRTGWVMHEYRLAAASRGVAEQRKKNASHGCCDAEPGEWVVCRVFLKKGARRSRPGRDGNHSRALRHRASAAPPQLREGVGGRQPLLFPAPQSPSSSCVTGVTDLSDEEDEVSSGSITRVAPQREA

SEQ ID NO: 60491 - protein, 200 aa, Zea mays
  Clone ID: LIB3595-019-B2_FLI.pep
SVKKDVDSYTIRGTNKVVHVGDCVLMRASDSDKQPYVARVEKMEADGRGSVRVQVRWYYRPEESKGGRRQFHGAKELFLSDHFDLQSAHTIEGKCVVHSFKNYTKLDNVGPEDFFSRFEYKAATGSFTPDRVAVYCKCEMPYNPDDLMVQCEACKDWFHPSCMAMTIEQAKKLDHFVCSDCLKENGSKRLSNVYATSSNS

SEQ ID NO: 60492 - protein, 173 aa, Zea mays; identical to SEQ ID NO: 60202
  Clone ID: LIB3595-021-A9_FLI.pep

SEQ ID NO: 60493 - protein, 480 aa, Zea mays
  Clone ID: LIB3595-021-F5_FLI.pep
VFVLAYLRDSKLLPFPTAAAAAPPHSVDTMRECISIHIGQAGIQVGNACWELYCLEHGIQADGQMPGDKTIGGGDDAFNTFFSETGAGKHVPRAVFVDLEPTVIDEVRTGTYRQLFHPEQLISGKEDAANNFARGHYTIGKEIVDLCLDRIRKLADNCTGLQGFLVFNAVGGGTGSGLGSLLLERLSVDYGKKSKLGFTVYPSPQVSTSVVEPYNSVLSTHSLLEHTDVAILLDNEAIYDICRRSLDIERPTYTNLNRLVSQVISSLTASLRFDGALNVDVNEFQTNLVPYPRIHFMLSSYAPVISAEKAYHEQLSVAEITNSAFEPSSMMAKCDPRHGKYMACCLMYRGDVVPKDVNAAVATIKTKRTIQFVDWCPTGFKCGINYQPPSVVPGGDLAKVQRAVCMISNSTSVVEVFSRIDHKFDLMYAKRAFVHWYVGEGMEEGEFSEAREDLAALEKDYEEVGAEFDEGEEGDDGDEY

SEQ ID NO: 60494 - protein, 205 aa, Zea mays
  Clone ID: LIB3595-022-D8_FLI.pep
AQQPWRRPAMSRLLLARLVDDDAARGAPGVVRRPVRVPLLLGAQQRRRRRRGGGPGGAEAQRPEHVEVVPGQQRRLGVVGVVDVRRVEEVVGVEEVDGVVGEERGDVELGVGGGGEGGLVVLVLAEPVVPEPGGGVDELIPLGREFLHLPVRRRDEERRVGVQRRRRHGGHGAHPLLSCWLRSGTPKDRRFLGVAFGWFVAAKSR

SEQ ID NO: 60495 - protein, 284 aa, Zea mays
  Clone ID: LIB3595-022-G1_FLI.pep
LLEISRVRAHSRFWPPPPPSGEMAGLGKAMYAVGFWIRETGQALDRLGCRLQGKYFFHEQISRHRTIMNIFDKTPHVHKDAFVAPSASLIGDVQVGSGASIWYGCVLRGDANIIQIGSGTNIQDNSLIHVAKSNLSGKVFPTTIGNNVTVGHSAVLQGCTVEDEAFVGIGATLLDGVVVEKHGMVAAGALVRQNTRIPCGEVWGGNPAKFLRKLTDDEISFIAESAANYSNLSKVHAAENAKPLEKIEFEKVLGKKFAHQDEYDSSIGVAEGAPPELTSPNPAQ

SEQ ID NO: 60496 - protein, 220 aa, Zea mays; identical to SEQ ID NO: 47027
  Clone ID: LIB3595-025-B11_FLI.pep

SEQ ID NO: 60497 - protein, 156 aa, Zea mays; identical to SEQ ID NO: 60020
  Clone ID: LIB3595-025-G11_FLI.pep

SEQ ID NO: 60498 - protein, 91 aa, Zea mays
  Clone ID: LIB3595-027-B9_FLI.pep
QVFTIRWLKINRLLPEKGYSYCTRNLPQFVSSSKPPIICPGTSNDCQAQSLAAAADTFSFVCVTSPAWSSPALLASSCLCFAKARFASLRK

SEQ ID NO: 60499 - protein, 103 aa, Zea mays
  Clone ID: LIB3595-027-D3_FLI.pep
VHFCKRMIFHPLAIYMNHGPAYAQSFYCLQVIWQNSHKSRQGRFYPLHVCACTVKFSFWLFQGHKVNNGLGFRSQAAASLHVRFDYDINVSSRKQTRTPNQII

SEQ ID NO: 60500 - protein, 81 aa, Zea mays
  Clone ID: LIB3595-030-C8_FLI.pep
ETQPCFPSYSSASPLFLLPFLEYLRFLRNLGSIPLVEVCRWRLGFLMPFLCALYDWLCAVWFFDLAISSGSRSEDREQRIV

SEQ ID NO: 60501 - protein, 136 aa, Zea mays
  Clone ID: LIB3595-033-B6_FLI.pep
LSLSLSLSLSLSLSLSFLGAVLIALLLWSSRSRGGRRRRRREEMADGSSNSSASVAMGQEVQAFVENKYGGMVPKKPLISKDQERAYFDSADWVLGKQAANSGTARAATAIEFLKPKLKRTPHHQLPPRKPTCASS

SEQ ID NO: 60502 - protein, 230 aa, Zea mays
  Clone ID: LIB3595-034-D9_FLI.pep
RMQVAMAGETKDLVLLDFWVSPFGQRCRIALAEKGIAYEYSEQELLGGAKSDILLRSNPVHKKIPVLLHDGRPVCESLVILEYLEEAFPEASSPRLLPDAAYARAQARFWAAYSDKIYEAGTRLWKLRGDARAQARAEIVQVVRNLDGELGDKAFFGGEAFGFVDVALVPFVPWLPSYERYGDFSVAEIAPRLAAWARRCAQRESVARTLHPPEKVDEFINLLKKTYGIE

SEQ ID NO: 60503 - protein, 298 aa, Zea mays
  Clone ID: LIB3595-035-A4_FLI.pep
RRPPPPPRLCPPAAAAAYPGIRMRVKKRSKHRKAVKFYATCFGFREPYKVLIDGTFVHHLLTQRLLPADEALRDLLSASRTPALFTSKCILAELRRLGKSHAESFDAAQLLTTTKCEHDKVVGAVNCVQSLIGDKNPEHFFVATQDPGLRENLREIPGVPVIYGLKNSLCIERPSMQQRKFAQLDEEKRLNMDISEYKKLLKAASEGKTIASENGSGEEQHEMPISSLVKNALHVTDKTKFKRNKAKGPNPLSCKKKKPKLPTAIQKQAGTADGEAKRKRVRKRKRGQKDNKQLEAAN

SEQ ID NO: 60504 - protein, 171 aa, Zea mays
  Clone ID: LIB3595-037-H11_FLI.pep
YQDFSNNLDGSRNGSSHVQSKKHTTSMASQAMPSSLRTHGACMCIPDEKHQRNNSLRRSRDAEGGGGLLDALPGALEPPLVAGLRLADVELAVGDGGGDELVLAALVAVRRPGQHGDAVVLLAVHHGGGALQHVGGGHGVGLEPALGVGLAAVGLLAEQVVDLREELLGGA

SEQ ID NO: 60505 - protein, 127 aa, Zea mays
  Clone ID: LIB3595-039-B9_FLI.pep
RKKRSMASEQGVVIACHSKAEFDAHMTKAQEAGKLVVIDFTAAWCGPCRAIAPLFVEHAKKFTQVVFLKVDVDEVKEVTAAYEVEAMPTFHFVKNGKTVATIVGARKDELLAQIEKHAAPAPASASA

SEQ ID NO: 60506 - protein, 213 aa, Zea mays; identical to SEQ ID NO: 47712
  Clone ID: LIB3595-041-C4_FLI.pep

SEQ ID NO: 60507 - protein, 186 aa, Zea mays; identical to SEQ ID NO: 46040
  Clone ID: LIB3595-045-E6_FLI.pep

SEQ ID NO: 60508 - protein, 106 aa, Zea mays
  Clone ID: LIB3595-046-G4_FLI.pep
ARKVSRRSAAMGFPPPPPVCRRWATPPRSSRSPPIEEVISTGVVSRFIEFLTREDHPQLQFEAAWALTNIASGTSENTKVVVESGAVRLCPSLSSYSTPSSEDVRE

SEQ ID NO: 60509 - protein, 117 aa, Zea mays
  Clone ID: LIB3595-048-B9_FLI.pep
RAFLRAEARGRRPARPLLHRRHHHRQQGPPRHVLGSGDLYAVCAGDASGGVGVGVGGLYEVVYNNVVSLCVKAIGWRPERRFKWKLLDGSTGRRGAPTSLWSWSRCPCITSWRCISC

SEQ ID NO: 60510 - protein, 230 aa, Zea mays
  Clone ID: LIB3595-048-C11_FLI.pep
SKVDTIKKKNQVDTIQKKEPALSGELMVYPDRPSEPDCPFYVKTGSCKFGANCKFHHPKDITPNMQGPASPKRSVAAKEHHAAARATLQDQMYQQQKFPERPGQPDCRYYMQFGKCKFQSACIFNHSKDILSSGWHPAECPFYMKTRTCQFGSACEFYHPKDRCSGRGGVIDGTDYGHDFATKSRNVLQELAIYPERPDELECSHYMKHGYCKYKMNCKFHHPRDRLPKK

SEQ ID NO: 60511 - protein, 277 aa, Zea mays
  Clone ID: LIB3595-049-E4_FLI.pep
EEAKINNPSKNLKTSAVKCGEANDCFLTRRSADQSNDKKFSKKLCSSAVQATDSCQNISGMKLPTSVGVAVEQSTSTAFSEATKVYKEFEKQVKRTVYLDNLSCLATDGVITTALNQFGSVKHVSFLTNYTVPFDIPKSALVEMETEKDADSVVKILDEFPFMISGMPRPVRAKHATAEMFNDRPCKPGIKLEFRWVGPTDPDYHNVRKFKFLSKRHELENLALIKNELREEQLLARHQQDNLNFHYMKLETVDSMITSGCINRLTHIYNLRFADMY

SEQ ID NO: 60512 - protein, 60 aa, Zea mays
  Clone ID: LIB3595-049-H1_FLI.pep
CHTRKFSMVYHIRQTRYSCHAIYGVYIYADHIASSFISSFKGPGRTAPHRQETRATSEEL

SEQ ID NO: 60513 - protein, 341 aa, Zea mays
  Clone ID: LIB3595-049-H3_FLI.pep
YMQACACHFSPVLAPPRSRISASHSPGMATLKVPATVPPVADDCDQLRKAFQGWGTNEALIISILGHRDAAQRRAIRRAYAEAYGEELLRSITDEISGDFERAVILWTLDPAERDAVLANEAARKWKPGNRVLVEIACTRTSAQIFATRQAYHERFKRSLEEDIAAHVTGDFRKLLVPLVSTYRYDGPEVNTRLAYSEAKLLHEKIHHKAYSDDEIIRILTTRSKPQLIATFNHYNDAFGHRINKDLKADPQDEYLRTLRAIIRCFSCPDRYFEKVARQAIAGLGTDENSLTRVITTRAEVDLKLIKEAYQKRNSVPLERAVAGDTSGDYESMLLALLGQE

SEQ ID NO: 60514 - protein, 48 aa, Zea mays
  Clone ID: LIB3595-052-A9_FLI.pep
NSCHLCQEFANAMLDEFLTWLKRFREFALVWLAYYTLSGLSFFYGNLP

SEQ ID NO: 60515 - protein, 128 aa, Zea mays
  Clone ID: LIB3595-054-C11_FLI.pep
PNQHWLLSSGLSLLQMGEALVHVCLGMLGLGVLPALHFSRGTHECLHAHFALDAHGLLVGLELAPLGPLVLLQVALAGHLGLLAVATAHGGWIRRQSTAATRTSPGGRPAPLRVRFVVHGKERGNGRP

SEQ ID NO: 60516 - protein, 246 aa, Zea mays
  Clone ID: UC-ZMFLB73091G01_FLI.pep
ARKRCYTIGPATGALYYSLLPRANRSIYTLQRQRGNNKSMGAGQPQNTKRERESNSNSTTTAPILLFSFCYAHTEGHTELAAHSRGARRPPRPGSLELRVAEHRRLVGGEGHVGTSTPYSAGRKALRNRSARPRPGPDAARRSSSAPAPAPPGSCAACRSRNTSAARTSPASAAIDTTALYTRYPSRLSRGSGMLEIPIAGRAREGSSVWGIRPVDRVAISDYFGVAGARTGSGMDGWMDRQTHTG

SEQ ID NO: 60517 - protein, 111 aa, Zea mays
  Clone ID: UC-ZMFLB73187E12_FLI.pep
HLPHASSARANLPWSDQRYLRRLPDAHARQLLLRLLHLIPVGLALRVPFGHQTCIAADLPHLIGPYISSVSSRQARGHGSLMPRHPCSPSHLSSPLRVRMAPQRSHTSNHC

SEQ ID NO: 60518 - protein, 249 aa, Zea mays
  Clone ID: UC-ZMFLMO17242C01_FLI.pep
ISPAAYKDIYRGGRLLQNLDHKLNTFSCSLLTVPPSSPAKIARMAPKDIDATVTAMPAYIVPSVTLPSSSVRPPRASRTEQNSTSTHAVRNAGAMTGNMAPTTRRSCKIVSASTRAADTKHGSHDDVCCSEYCPLPCRSQLLVVAGQQPAQKQCKHSGDASSEQEAHRDFDVRKCCAEAICLVVDSKQNAAEPRERRRDQRQGELGCTLQFLLPNFALLWITDLPVNYLQIKTSVVLAIIEEVEAAKKE

SEQ ID NO: 60519 - protein, 179 aa, Zea mays
  Clone ID: UC-ZMFLMO17042F07_FLI.pep
PRRAALRRALPVLRVPARVPGRRRHGPRHHRQDRALLDPAEDREVSGGEVPRRGGGRQDAALAGNARVGRLRAGAGKQLGGGAGGGVAQEGARAGLPRREARRLARPALATRGAALRVRLEMLAPRCCSICHYLPLFKDPDICILDRIHKSAHALYNQMGVIWCMKCSLHSGIGCLFFL

SEQ ID NO: 60520 - protein, 277 aa, Zea mays
  Clone ID: UC-ZMFLMO17161D06_FLI.pep
LAVDDERQTLGEPWKPSVTKPTEVGMQSKNNKLANVVSLLQKLQQLSVSKDEDAPPVDHMAFLCETESPDHRYVSEILLASGLLMKELGSGQAGLQLQLHSSGYPINPDLFHVLEQRKAGWASIPDGIHQSSRSGAKSDPKRAHRKLVFDTANELLLQKFEKETTVYAVSSSTGAKDHPPAKALSGQQLLKFVSSEIEGMGTERSSTCQMEGGVIPDAEILQRLQGWTSFSRELPGMVLEIERSVFKELVDEVVHGESADGPEMKAAGRRRRRRLFA

SEQ ID NO: 60521 - protein, 302 aa, Zea mays subsp. mexicana
  Clone ID: UC-ZMROTEOSINTE041D10_FLI.pep
GAWSYCCHRVRPVSITHRDHFVNIARRRALEANKLAAAQRESSEKQTNGLTHVDSEMLDDKLAAMQRESNKMQNGGPAHVNTEISHCGRCDVNSDSKGGFFADQFENLANYRAHYECTGPEIWKQTKGNLHAFVAAAGTGGTIAGVSRYLKEKNRSIKCFLMDPPGSGLFNKVTRGVMYTKEEAEGKRLKNPFDTITEGIGINRVTKNFMMAELDGAYRGSDREAVEMSRFLLKNDGLFVGSSSAMNCVGAVRVAQDLGPGHTIVTILCDSGMRHLSKFFNEQYLADHGLTPTATGLEFLDK

SEQ ID NO: 60522 - protein, 442 aa, Zea mays
  Clone ID: UC-ZMFLMO17166G09_FLI.pep
EIGNYSSGSPQCARQPSSSGRFQIPAASSIYCSARHSGCPKNFAHPRFPPALVRALVWFPCQPGHSTSQPPRAARAGTRGLGFGCKFGNTMAGAAGESSGERQGTLERRMLRSRYHAVKNIISDERDEMSRADSDRFTAIIQQVDCLHELVQRPREQIADAEALLGITNTLVTSVRSHSSEGISPSDFITALLKKFGQQGNHDDESVSLRWGDLGLSVSHIFRPVPGCCTMLGPMNTEVKQRKVVAVGRKRTARPTENTCPEELAESSEEVKTDTDRNVLVMFDILRRKKSAKLENLVLNRLSFAQTVENVFALSFLVKDGRVEITVDDSGHIVRPRNAPAASAIASGEVSYSHFVFRFDFKDWKLMKEVVTEGEELLPHRTSQSNLCNEENDQPNLEARAQITPIRKLTRNRGLVLQDHVVEETPEENQASKRRRLFRNQD

SEQ ID NO: 60523 - protein, 622 aa, Zea mays
  Clone ID: UC-ZMFLB73114G09_FLI.pep
RSPAMDSDYGVPRELSEVQKKRTLYQPELPPCLQGTTVRVEYGDAAIAADPAGAHVISHAFPHTYAQPIAHFLRKTAVVPDAKVISEHQAVRVGIVFCGRQSPGGHNVVWGLYEAIKAHNQNSKLIGFLGGSDGLLAQRTLEITDKVIASYKNQGGYDMLGRTKDQIRTTEQVNGAMASCQALKLDALVIIGGVTSNTDAAQLAETFAEAKCATKVVGVPVTLNGDLKNQFVETTVGFDTICKVNAQLISNVCTDALSAEKYYYFIRLMGRKASHVALECALQSHPNMVILGEEVAASKLTIFDITKQICDAVQARAEKDKNHGVILIPEGLVESIPELYALLQEIHGLHGKGVSVENISSQLSPWASALFEFLPPFIRKQLLLHPESDDSAQLSQIETEKLLAQLVETEMNRRLKEGTYKGKKFNAICHFFGYQARGALPSKFDCDYAYVLGHVCYHIIAAGLNSYMATVTNLKNPVNKWRCGATPISSMMTVKRWSRGPSATQIGKPAVHMASVDLKGKAYDVLRQNSSSFLLEDVYRNPGPLQFEGPGADSKPISLCVEDQDYMGRIKKLQEYLEKVKRIVKPGCSQDVLKAALSAMSSVTETLNIMTSSSTGQTPLSH

SEQ ID NO: 60524 - protein, 928 aa, Zea mays
  Clone ID: UC-ZMFLMO17222H12_FLI.pep
VFWHAGALEGSVCALVVDRMGQSDPILEDEVKYRYYTIIQLYRRATLQDNAQRVSPVSFELEAALKLARYLCRRELAKEVSDLLMGAADGAKALIDASDRLILYIEIARLFGTLGYKRKAAFFSRQVAQLYLQQDNAYAAMSAMQVLTMTTNAYHVQSRKTMKMNHDPSKEPRAGNTDSGKVHPQSIVSLFESQWSTLQMVVLREILISSIRAADPLSSWSAAARLLRSFYPLITPAGQSGLASSLANAADKLPTGTRCADPCLPFIRLHSFPLHPSQRDIVKRNPHKKEWWAGAGPSGPFIYTPFSKAGASGTSKQEVSWIVGEPVQVMVELANPCSFDIVVESIYLSVHSGNFDAFPVSVSLPPNTSKLVLLSGIPTKVGQISIPGCIVHCFGVITEHLFKEVDCLLLGAAQGLVLSDPFRCCGSSKFKSVNFPSISVVPPLPLLIANVVGGDGSILLYEGEIRDVLITLTNAGTVPVEEANVALSGKNQDSVISIAHSTWKSALPIKPGGEVTFAVTLRAWHLSSADLEADGSRSPVNSRRIAREGINPFLDIHYAGPAANLENGDVSLLPGRRLVVPLNICVVQGMRLVRARLLSMEIPARFTETHLKPVSGKDMNLLKVDPYKGSWGLRLLELELFNPTDVVFYVDVAVHLDDTDVDQEVISDGDAACHKTRIDRDYSARVLIPLENFKLPVLDASFFVKASSSDEPLGSRAAAIAERNAKAELNASINNLISKIKVKWHSGRNSSGELNIKDAIQTALQASIMDILLPDPLMFSFKLVTNGIVVNVDSPKDSGNVLRCKDPISAHEMTHMEVQIRNNTKEIIRMNLSISCKDVAGENCFDENSATVLWAGVLSDIHLEVPPLQEVVHPFSMYFLVPGDYSLQAASVIIDATDVLRARAKAESPDEPILCRGSPFHIRVVGTA

SEQ ID NO: 60525 - protein, 331 aa, Zea mays
  Clone ID: UC-ZMFLMO17007E03_FLI.pep
HRLIKQRVYFGRLGEWRLSHGPPCAESRGSETPDPVRPRTKNPNLTAMAASRSEERDQNQPVVLVTGCSEGGIGHAMARAFAAAGCAVVATARSRGSMRGLDGDPRFLLLELDVRSDESARAAVAGALREHGRIDVLVNNAGVHLVAPLAEVPMESFHQVFDTNVYGAMRLIQAVIPHMMERRKGTIVNVGSITALAPGPWAGVYSASKAALHALSDSLRVELRSFGINVMTVAPGGTRSNLGNSSAAKYDQMHEWKYYKKYEEGLRARTGISQGPRSTPAEELAKAVVASVLRKNPPAWFAYGQYSAILSILYYAPLWFRDYLYKFVMKC

SEQ ID NO: 60526 - protein, 639 aa, Zea mays
  Clone ID: UC-ZMFLMO17062C07_FLI.pep
LRQAQRQHQHHLMVRGIGEEIDLEIGPVDDPSFSGASLVAVTSTHDTVVHADDHKSLLIPCSQPGAADGLAPQQHLSQGEEHDGMLRSPSGHTKKKKKVVKKWREEWADTYKWAYVAVHDTTTRIFCSVCKEYGRKHRRNPYGNEGSRNMQMSALEEHNNSLLHKEALRLQMASKEKLQPPEIEGPVYVKALSKTAASILECVLRRDPHEAEYIQSIQEVVHSLEPVLVKNAQYIQILERLLEPERCFIFRVPWIDDRGEAHVNRGFRVQFSQALGPCRGGLRFHPSMSLSVAKFLAFEHTLKNALSLYKLGGAAGGSDFDPKGKSDNEIMRFCQSFMDELYRYLGPDQDFPAEDIGVGPREMGYLFGQYRRLSGHFQGNFTGPKIFWSGSSFRTEATGYGLVFFARLLLAEMNKELKGLRCVISGSGKIAMHVLEKLLPCGAIPITVSDSKGYLLDEDGFDYMKYSLLRDIKAQQKSLKEYLKTYPHAKYIDDAKPWSQQCDVAFPCASHNEIDQGEAVAISNSGCRVLVECSNMSCTVQAVDILRKAKVIVAPAKATAAGGVALGEIELNPEFNLMQLSVEDFENRIQDAIKQTYERSVKAAQDYGIMKESPDFLVHGANICAFLNIAQAMTDQGCV

SEQ ID NO: 60527 - protein, 352 aa, Glycine max
  Clone ID: 700894771_FLI.pep
PSGLLPSIDLSYIEDRYAGRQAWSFMNNGNKRSSSQVQLSSDTSKIWVPSNPRGAERLPPGIVEAESDFYLRRLWGKPSEDLTSRPNYLVTFTVGYDQKNNIDAAVKKFSGNFTILLFHYDGRTTEWDEFEWSKKAIHVSVHKQTKWWYAKRFLHPDIVAPYDYIFIWDEDLGVEHFNAEEYIKLVRKHGLEISQPGLEPNKGLTWQMTKRRGDQEVHKVTEEKPGWCSDPHLPPCAAFVEIMAPVFSRDAWRCVWHMIQNDLVHGWGLDFALRRCVEPAHEKIGVVDSQWIVHQGLPSLGNQGESQTGKSRWQGVRERCRKEWTMFQSRLANAENAYYKSMGTDTSNSTAH

SEQ ID NO: 60528 - protein, 597 aa, Zea mays
  Clone ID: UC-ZMFLMO17045F09_FLI.pep
ELKSSENERPLCGVASKENPIQLAAGRAQQEPPPSNVEDKVENDQFFFEGIVQRNPSSRLVKGSESFAIVAFGIQILQHPQFSKLCWATSKLREGPCTDINGPWKGWPFNSCLLQSSTLPGKSLNGGDNVVKGKEKSVCVRGLVAVGLLAYRGVYGSVIEVCAEVRKVLGLLVGQIQTKILEKRNQFRYFRILSQVAYLDDIVNSWAYTYQRTHVDTRTGTSRMKSSSAKECQRTKYAAGTNVQVAPVAIPAEVQDIPAQHTQDHEVVPGPTEVQGNPVKHTAEQPGSYSMDCDLDNHVNSVSSKDAVEHDHVHSALPDVHRGNTHADTVTNDGEPIGANNNGKVSRLTYGEDKFRPGIQRSENHTESMEGLGCLQRAGDSVGSPASINNTELPKNNVSSEAHIDDNELRRNDLVNDVESNSIDGKHDTMMNLSVPKISCLYKCCSPCFQSIYKMVHGIISNTLRPNLHCLTADDMHDILSSWCLNLLGSVRKLYSSHDEASCTEDFVRMSNKETHLEHCACQSDIYLSRECVCHLESNGDVETANTDCHPLSGQSLSFFFKDGVWMPLDLTAETKLHCSFRRFCVCSILGTVSMLS

SEQ ID NO: 60529 - protein, 112 aa, Zea mays subsp. mexicana
  Clone ID: UC-ZMROTEOSINTE033C12_FLI.pep
PARCSCHVSLCSIYIVLLTPIVSTIHTQVYMSLYAVRVQVSKTMIINYTAKNWCLDHLWAYFWGGEHDDDEDRPENTLPSALSLLNAFSTSSFSSQKRILFTFCSSAVPLWR

SEQ ID NO: 60530 - protein, 355 aa, Zea mays
  Clone ID: UC-ZMFLB73245E08_FLI.pep
RSLSLVSRLLHSKRTGAGERREQRAAHSPPPDFLGVADRSPGQRGTAGPLGSPEMLPYATAAEAEAALGRPMTPAEALWFRYTAGVSDYHLYCCNILFLFVVFTVAPLPIALLELRAPAAVSPYKLQPRVRLSRAEFVRCYKDVLRIFFLVIGPLQLVSYPAVKFVGIHTKLPLPSLAELAAQLLVYFLVEDYLNYWIHRFLHGEWGYQNIHRVHHEFTAPIGFAAPYAHWAEVLILGIPSFVGPAIVPGHMITFWLWIILRQVEAIETHSGFDFPFTPTKYIPFYGGAEYHDYHHYVGGQSQSNFASVFTYCDYLYGTDKGYRFHKTYLAKLKDLGHNDGQKGDGSGPSYVKLD

SEQ ID NO: 60531 - protein, 350 aa, Zea mays
  Clone ID: UC-ZMFLB73242A01_FLI.pep
RRIRSSVVWESRGPILRVMKFGKDFRNHLEETLPAWRDKYLAYKALKKLIKNLVPREPAAAPPLPPPAPAAADAEGPGAPAAAHGNVNLANWFASILDAELHKLNEFYIEREEWYVIRLQVLKERIERVKAKKNDAFTSRSEFTEEMLEIRKDFVIIHGEMILLQTYSSLNFAGLVKILKKYDKRTGGVLSLPFTQRVRHQPFFTTEPLTRLVRECEANLELLFPVEAEVLEPSSSSNLEPHDVARCDPTSSRDVETVDVYRSTLAAMKAIQGLRRASSTYNPLSLSRFFHGEDGEPCSGAITSESSLSDSSTDSQIQDAGKDDKEVQSNSRDQNAAQGEQNAQGEPTDE

SEQ ID NO: 60532 - protein, 543 aa, Zea mays
  Clone ID: UC-ZMFLB73260G04_FLI.pep
NAHSSQLTHPSTSKVQKRNPRLPQRRNRRNPRSLSPALRNPRSAMHQPRARYPPGYGSGGGGGAGRGGGGGNGGGGGNHNYYGRNPQQHHYHQQQQSQHSHRNSSYQQQWLRRDQAPAVAGAASGNAVAKTASQLDAVGSSSQDWKAQLNIPAPDTRYRTEDVTATKGNEFEDYFLKRELLMGIYEKGFERPSPIQEESIPIALTGSDILARAKNGTGKTAAFCIPALEKIDPEKNAIQVVILVPTRELALQTSQVCKELGKYLNIQVMVSTGGTSLKDDIMRLYQPVHLLVGTPGRILDLTRKGICVLKDCSMLVMDEADKLLAPEFQPSVEALIHFLPPSRQLLMFSATFPVTVKEFKDKYLPRPYVINLMDELTLKGITQYYAFVEERQKVHCLNTLFSKLQINQSIIFCNSVNRVELLAKKITELGYSCFYIHAKMLQDHRNRVFHDFRNGACRNLVCTDLFTRGIDIQAVNVVINFDFPKTSETYLHRVGRSGRYGHLGLAVNLITYEDRFNLYRIEQELGTEIKTIPPQIDLSIYCQ

SEQ ID NO: 60533 - protein, 432 aa, Zea mays
  Clone ID: UC-ZMFLMO17283B08_FLI.pep
PFAAPARSVPMGYVLSAVARVLEQPTAWGAAREMALLAGPLWAAVLLGLLLGWAWRPRWAAGLVAAPAPAAAAQPPFATLGFWKAQLPARLRAPLGSAAAVRHGEEEEEDEVSVRGGRSSVAASEELAVGKRDLANLWRLVEGRDGGPAWIKMMDRSLPTMTYQAWRRDAQTGPPQYQSSSIFEDATPEEVRDFFGDDEFRVSNKWDDMLVYHKTLEECQTTGTMKVHWVRKFPFFCSDREYIIARRIWKLGGAYYCVTKGIPCSSIPRRNKPRRVDLYYSSWCIRAVESRRGNGGGSTACEVLLFHHEDMGIPYEIAKLGIRQGMWGCVKRIEPGLRAYQQARAAGEPVSRSALMAQINTKVGDSFVRSLESDSDGSETVEAEEKPARNRVARFLVLGGAVALACTLDQGLLTKALIFGVARKFVGQRKTL

SEQ ID NO: 60534 - protein, 195 aa, Zea mays
  Clone ID: UC-ZMFLB73161G05_FLI.pep
RPVPSSRERNGGRWCRRANGFVRERANRGKHLSSGSGKKWYSEVEEMTQNTSEAGISRRSHSHVLFLCSAAPKSLLPGAPVLGHRCSRRCAQPTQRQLPLRQREGAPKAPMLLLPVLQRVIDGSQKTTVALPIHKALMIVMMEPMLRPTTMMSLFPWDLNLQKTKRPWEEECDNEKVQLKTIGKDVALTVGQTPG

SEQ ID NO: 60535 - protein, 639 aa, Zea mays
  Clone ID: UC-ZMFLMO17271G11_FLI.pep
LRWASLPMRRSSHAMGAQGFRLLLLLLLAAAAAEARFVVEKNSLMVTSPTSLRGRHDSAIGNFGIPQYGGSMAGAVVYPKDNAKACDDFDGRHPFRAKPGAMPTFLLIDRGECLFAKKVWNAQNAGASAVLVVDDKDEPLITMDLPREDDEASKYIQNITIPSALIDEKFGDQLKKAVKDGEMVNVNLDWREAVPHPDDRVEYELWTNSNDECGPKCDMLMNFLKEFKGAAQLLEKGGYSQFTPHYITWYCPQAFVISKQCKSQCINHGRYCAPDPEQDFSIGYEGKDVVVENLRQLCVFKVANENKKPWVWWDYVTDFHIRCPMKEKKYNKKCAETVIKSLGLDVKKVDKCMGDPNADSDHPLLKMEQDAQIGKGSRGDVTILPTLVVNNRQYRGKLERKAVLKAICAGFEETTEPNVCLSDDIETNECLNDNGGCWQDKSANVTACRDTFRGRVCECPTFNGVQFKGDGYSNCEPAGPGKCLINHGGCWHETRNGKTFSACQESGDGKCLCPAGFRGDGVKKCEDIDECKEKKACQCPECNCKDTWGGYDCTCSGDLLYIREHDTCISKTAVQAKAAWAAVWGILIVVAVVAAGSYVVYKYRLRSYMDSEIRAIMAQYMPLDNQGEVPNHTHDEDRS

SEQ ID NO: 60536 - protein, 299 aa, Zea mays
  Clone ID: UC-ZMFLB73177F04_FLI.pep
RHHHQSVPFPTSPSSSLYSGYTCDHCSPVAAMTPASTSPLAAAVLPTNLSSFSRCPPRRLPRISCLAAPERGGNNASNASPAPQQPRWGAAVSAALAAAVVAASMPAYADLNKFEAEQRGEFGIGSAAQFGSADLKKAVHVNENFRRANFTSADMRESDFSGSTFNGAYLEKAVAYKANFTGADLSDTLMDRMVLNEANLTNAVLVRSVLTRSDLGGAIIEGADFSDAVIDLSQKQALCKYASGTNPMTGVSTRKSLGCGNSRRNAYGSPSSPLLSAPPQKILDRDGFCDPATGMCDAS

SEQ ID NO: 60537 - protein, 688 aa, Zea mays
  Clone ID: UC-ZMFLB73178A08_FLI.pep
NSERRMTFSMDMDLNASPVPDDDEQQPYNEPVEAEYAQEEHVESAVATLRREREERRKRLKREQQDDGSRLHSQQIRVDYAPQPKRHSRIKEAPQGWLDCPAFGEPIDKIIPSKVPLDETFNESVPPGKRYSSKQLVNKQRKAGREIGLVIDLTNTTRYYSPAEWTKQGTKYAKIACKGRDAVPDNESVNKFVYEAMIFLDRQKHSKNPKYILVHCTHGHNRTGFMIIHYLMRTHVSCVAEAINMFAQRRPPGIYKRDYIEALYSFYHEVPENMMIACPPTPEWKRPDDLDLNGEAKQDDDDDNGDPEPPRNESEDKIITNDDVLGDEVPYDQQEALRVLCYKLLEMPLIRGHSQFPGSHPVSLNSENLQLLRQRYYYATWKADGTRYMMLIMRDGCFLIDRNFCFRRVQMRFPHKSLEGLHDMTLIDGEMIIDTVPDSGLKRRYLAYDLMALGAVSKTKLPFSERWKMLEDEIIRPRYYEKNKFESGSKSNPLYKYDMELFSVRRKDFWLLSTVKKVLKVFIPSLCHDADGLIFQGWDDPYVTRTHEGLLKWKYPEMNSVDFLFELTNDNRQLVFLYERGKKKLMDGARIAFTDDVDPSSIAGRIVECSWNKEEQCWSCMRIRSDKSTPNDINTYRKVMRSITDNITEEKLLEEIDEISLLPMYADRMQQAHTKMAQQQRRRLPPQC

SEQ ID NO: 60538 - protein, 190 aa, Zea mays
  Clone ID: UC-ZMFLMO17022H09_FLI.pep
PTSLADRTGQVHATVTASYVPGYVRHTHTERDASNRSVLNSKIPCHTAMYARERLPRHARTPIPWALAAAAACARPHSLAFSGSSGAAASASAAGSWGPAGAGASGSSAASSSGAAASASATGSAAAGSSAPAGGAASSSAAASCSAAGVSSGPAGAAASASAAGSAAAGSSAPAGAAASGSAAACCSAA

SEQ ID NO: 60539 - protein, 535 aa, Zea mays
  Clone ID: UC-ZMFLMO17286A02_FLI.pep
HAFLDVASCDDSGTKWRLGMNSGQTFLLYASAPIRLAQTTTTQLSAPGFAGAIRVAYLPDASMEPVLDRYSRCFPTAGHAALSRPFCVDYAWRKDGPGELLMLAHPLHLRLLADDCPVRVLDDFRYRSIDGHMVGVVGDAWVLRTDPVSPTWHSTRGVSEDGVAEVVAALRADVAGLASTAITTTSSYFYGKAIARAARLALIAEEVGCPDVIPAVQQFLKASVTPWLDGSFQGNGFFYDAKWGGLVTLQGLKDSGADFGFGIYNDHHYHLGYFLYAIAVLSKIDPCWGRKYMPQAYSMVADFMTLSRNKAGASFTRLRMFDLWKLHSWAGGLTEFADGRNQESTSEAVNAYYSAALVGLSYGDAHLVSVGSTLTALEMLAAQTWWHVREGEGIYEDDFSGNNRVVGVLWANKRDSGLWFAPPEWKECRLGIQLLPVLPISEALFPDVAFVKDLVAWTLPALARDGVGEGWKGFVYALEGIYDREAALTKTRALKGHDDGNSLTNLLWWLHSRGSVVCDGDAGFGRCCWYRQYCH

SEQ ID NO: 60540 - protein, 603 aa, Zea mays
  Clone ID: UC-ZMFLMO17307E11_FLI.pep
IPSVSSHLPLLDLQLQARPELGNSDLKSPHQALPPIPRTPASDAATHPIRLLKPRPLWSIPVAGGMDSGANSIGESVGESPSLALAPEPQTRPAEPVTKGRGLRRWRRIPREQHHEGSPVSPGADTSVGVSAGEDLAAQLHKRRYGPAADEPKGKQDPAAAEEVESSVASVESSVVPLEASPPPAPTRLDPNLGHLIATAGFSVGAGGADSDNSDDRTSKLSTAASAPRHDFSSVGFGRERDRARSRAPGAAHGKGIRAARVRGATMRVASSPAEAGNSRSSVESNLRSSNAAHARRSSAGVTSNGVHKVLFPDGHQSDDEPPSGDMRYGTGRFYKENGSIEGRLGNCDSDSNHHTFDEASVGKFENGETHSGLDLYGESMALLQSAQEALENEIQKFVEIRKETDEDSTAHQSEIEWSSSPVEELNEKIKMLELKLEEATMLINERDSEILELDALSHVQPQNTVACNNYPLSLQSDVDRLFLEKMEAEIQCFILTRASQDWKLLTMDQFALNEAQKSLLSDHKSLETKLRHAENRAMMLEEMVDKLESQCKALSETSEVLKLQAGASRASLFCSIQFVLLCIAIGTLLVRFLSSSPEIVPT

SEQ ID NO: 60541 - protein, 249 aa, Zea mays
  Clone ID: UC-ZMFLMO17313G06_FLI.pep
QKKCFTLTRPTRGSSFDTVTVTDQSFLPSLPRARRGEDGRPEQPLHGRVAPAVHAGQPCGRRRPRRGARRGRRHLGRRRRRRRLPGVVLAVVVAVPVLRGRPVRAVAAGGRAVQAEAAWGGGRRSGAGVGARQHPGLVQDPGRRVRRERVGGARRPRGRRRGGLRRRRGPALGAAPRGAAGAGARGGVLLRARGRRPHAQGPRPPPRPQRHLGEDRLPGLTDRYCQRQRQRQPCACAAGNARLPWPGLV

SEQ ID NO: 60542 - protein, 816 aa, Zea mays
  Clone ID: UC-ZMFLB73167B08_FLI.pep
YLVRATFLYGNFDNSNVYPKFDISLGASPWSTIVVDDATTPVVEEAIILAAAPTLSVCLSNASTGQPFISTLELRQFNGSLYYTTDETRFFLGLSARINFGAGSNDSVRYPDDPFDRIWESDSVRRANYLVDVAPGTERISTTKPIFVGTNEEPPEKVMQTAVVGQDGSLNYRLDLEGFPANAWGVSYFAEIEDLAPNETRKFKLEVPGMPALSKPTVDVEENAQGKYRLYEPGYTNLSLPFVFSFGFRKTNDSSKGPILNALEIYKYVQITMGSQDANIMASMVSRYPQEGWAQEGGDPCLPASWSWVQCSSETSPRIFSITLSGKNITGSIPVELTKLSGLVELRLDGNSFSGQIPDFRECGNLQYIHLENNQLTGELPSSLGDLPNLKELYVQNNKLSGQVPKALFKRSIILNFSGNSGLHIVSNGISHTIIVICLVIGAVVLLGVAIGCYFITCRRKKKSHEDTVVIAAAPAKKLGSYFSEVATESAHRFSLSEIENATGKFERRIGSGGFGIVYYGKLADGREIAVKLLTNDSYQGIREFLNEVTLLSRIHHRHLVTFLGYSQQDGKNILVYEFMHNGTLKEHLRGADNEKITSWLKRLEIAEDSAKGIEYLHTGCSPTIIHRDLKSSNILLDKNMRAKVADFGLSKPAVDGSHVSSIVRGTVGYLDPEYYISQQLTEKSDIYSFGVILLELISGHEPISNDNFGLNCRNIVAWARSHIESGNIHAIIDESLDRGCYDLQSVWKIAEVAIMCVKPKGAQRPPISEVLKEIQDAIAMERVLVSNCSNRMGSGSVEQNGGASFDELLMQPGLR

SEQ ID NO: 60543 - protein, 405 aa, Zea mays
  Clone ID: UC-ZMFLB73174A09_FLI.pep
LQPPIHPRSLPPPRRSGGGRRGGLLLSTPPTRGLTRGSTRWPAGAMAEAEREQRPLPEVEQSVTSIPEDHEATCWGCGLRLVFASYSPIYKCGWCGAVTQSNNQTARKPDSIWFSHWRRLRDRLFVAVLVLFMLFVICGGVWAVYPVVFSVSKFCGVFHCTVAAVLAVCTVTSYCLASLKCAGAPTDIRWGSYPVVGKGDLENYTFCTYCSKPKPPRAHHCRSCKMCVVDMDHHCPFIGNCVGASNHQVFVVFLISVVISCSYVAGMTIYASYQIWPSIEFPDLASSSRHSMSSWKTVLEMITTVAGSAFFLSARGLVLVYLAFASSSVNAGIAVLLCQQLSYIYEGNTYLSRLSSPPNALQHGERGLQNIVRFFGCPYPVSRAVLRLRYSNAAKLQDDSGSKLL

SEQ ID NO: 60544 - protein, 357 aa, Zea mays
  Clone ID: UC-ZMFLB73185D02_FLI.pep
LAVVVWLLVYRRSKKRRRSREVLSASAAALVAPQWKVFTSEELRSITKNFSEGNRLPGNAKTGGTYSGILPDGSKVAIKRLKRSSLQRKKDFYSEIRRVAKLYHPNLVAVKGCCYDHGDRFIVYEFVANGPLDVWLHHIPRGGRSLDWAMRMRAATTLAQGIAFLHDKVKPQVVHRDIRASNVLLDEDFGSHLMGVGLSKFVPWEVMHERTVKAASYGYLAPEFIYRNELTTKSDVYSFGVLLLEIISGRRPAQSVESVGWQTIFEWATPLVQSHRYLDLLDPLIQESPDAGVVQKVVDLVYSCTQHVPSVRPRMSHVVHQLQQLELKSAASEQQLRSGTSTSATSPMLPLEVRTPR

SEQ ID NO: 60545 - protein, 768 aa, Zea mays
  Clone ID: UC-ZMFLB73226C06_FLI.pep
GFPMDGGEDRTFKANFTSEGVTMLQDRVKEKLSELMGDYSDDTLAEYVVVLLRNGRHKDEAAKELHVFLGDDNDAFVSWLWDHLSSNLHLYVQPKAASSKDDTRSSHNAARGLPVHSVISSTQVNHEPEAETQKTVITHKKKDWGHRKRDWGTIGRGQSETVPLRSVVDNVSLAKEKDLHESHADEKAFHKSHSVRRTRSPDMHNHRKRSREADVRSTKSATHPVNGAPRRLLQFAVRDAVRTVPPVTSGSESASKRLCSVVSTLASDSTLDITHIRLQKTNSDLRIPVATAALRAAAEAAEDALKDSFCGSVFSRLGRMPTINSSEQSPDRRSQDLEGKEYENIDNIQAENQVEFYGRNQHGGSDVYMRDRRTEEATGSLSNIDEYGHNSSVRYNGLGSLRSALPASGGKESLVLGYVRGASEVRSGRLIAQGPPAGSGPRSSEKILNVSGNTKTQKLRTHVTRDALAFDPQVPMEKVSGARKSIGQGPHAGSGPRPSERILNVSGNTNTQKLPTHVTRDDLAFDPQVPMEKVADARKSHVKIAHANDMSMTTDKSKDLIQSSSMLEAQKATSGAAGSNTTGQPEGGSDSRTVFVSNVHFGATKDALSRHFNKFGAILKTHIVTDGVTGQSTGSAYIEFLHKESAEQALTLNGASFMLRILKVVRKNSTEATRSPGLLRVSRGSPFASRLIRTAYPRPTFPGAIRGRLPLRGVAQSLQWKRSATDSSNAVKPSQAAPSAPGNQLVTPTPRSFTYTRTEPKPNDGAMA

SEQ ID NO: 60546 - protein, 423 aa, Zea mays
  Clone ID: UC-ZMFLB73067E10_FLI.pep
SSSTSKQNGEGKIVAQPLGPAMQRPAPYAEQTDTTRPRGASGLPDDGGLGDHGGDHVGVHVGRRPAVLEVALAVLLRLAAHAHRRATVGDSPAEGVDVGGLVPAGEPALVALAVGRDVLLVPQLQLLDGRLDHLVPALLPHGLGAVVGVGARAVPVARDRLRVERHHHAGDLGDPLKNVASNPHLIARRDADGRSDLELPLPRHDLPVDATDVDACVQAGLVVGVDYVTPERFLRADSTVVRTLRAREAANRPPEGPVGVLLKEGVLLLDTIPGLLGSDLKAAEDLGGAVPLVGGNWLASWGVAIAHDKDVVAPPEWVLEDGLRVQDDLAVLAGGLAGAGAVVVPLGQLAGIGHRAREGPGFAPEIHARSTDPYVLGDDLLCGVREVEVDEVGEAGHGRRLRCDCDRRAHGLGTQGGRRGGCG

SEQ ID NO: 60547 - protein, 77 aa, Zea mays
  Clone ID: UC-ZMFLB73264C07_FLI.pep
EVIGSRGYLGGFGNVFSDFNHSPSNAKEYPLALPSRLFCPLSVALASQDSTYAYFKIAGLMYAKNCTYLRSFDSVLC

SEQ ID NO: 60548 - protein, 174 aa, Glycine max
  Clone ID: 700893223_FLI.pep
IIVKVVAAALRNVPEANAYWNVETGEVVLNDSIDICIAVATEKGLMTPIIKNADQKTISAISSEVKELAAKARAGKLKPHEFQGGTFSISNLGMFPVDKFCAIINPPQACILAVGRGNKVVEPVIGTDGIEKPSIATKLSLTLSADHRVFDGKVGGAFLSALQSNFSDIRRLLL

SEQ ID NO: 60549 - protein, 863 aa, Zea mays
  Clone ID: UC-ZMFLB73019B04_FLI.pep
WRSAGIEEEEGKRRGRKSSGNPRTVRMTVVERRYGPCTSHGSFLLRLLLLPFFFFLCFIDVPPAGAAATTQSPPLDNTQKAIMNDVASLVNSGSANTRWNTAESNPCNWEGITCTSNTSSSAVTRIALSNYGLANSSIFAPLCRLGTLRYLDLSRNFLADLSAPFFASSSSSCSMKEGLQSLNLSTNRLASPLGELAGFPQLQVLDLSFNSFASRNLSAELGYFPKLRSFNTSSNDLNGDVPTSMVGSLEELVLSSNNLSGPIPLRLFEYENLTLLDLSQNNLTGAIPDNFTSLSKLETLLLSGNKLIGEIPSSLSNVTTLSRFAANQNGLTGPIHSWITKHIGMLDLSYNKLNGTIPSDFLSHQGLQSVDLTSNLLNGAIPATLSQSLYRLRLGGNQLGENIPGSVCDTMGLTYLELDDNQLTGVIPSELSKCKNLTLLNLASNRLHGLVPSITGELDKLVVLKLQNNTLTGQVPSTFSELKSLITLNLSKNSLSGAIPSGIFELPKLSNLYLQGNQFSGFIPFSISSSKDLIELNLGDNALTGNIPTMPTTVTTSLLNLSHNLLDGSIPSNINSLGELEILDLSHNALSGAVPSSLWSLQSLTLLDLSYNNLSGSIPRFGPSQTVDIVGNPGLVIVNGTGNNNDTPTTGKKKRHYLVVIIFTIAGTLVGLCVLALIIVMSLSKRVYRVEDEGLPAGESVPQIISGRLITMNSIHTSAVDFVKAIEAVSNHQNIFLKTRFCTYYKAVMPNGSTYSVKKLNSSDKIFQIGSQEKFSHEIEVLGKLTNSNVMVPLAYILTADCAYLIYEHAYNGTVSDLLHGGKSEVIDWPSRYSVALGVAQGLTFLHGCTQPVLLLDLSTRTI

SEQ ID NO: 60550 - protein, 475 aa, Glycine max
  Clone ID: 700787720_FLI.pep
RCFFYELSRRQFLLPTEPNHVHFHLASLFNPLFLRYRMAHNYIATDSPLSRRIVRAFLHFLNSVEPGPGVDAEGIEVARECLAEAFKLNQSPVAGDDVKSDSLIDIFKSLEAKKQCEPSKSDVGPQPDSVDASSSFSGENPARGKNHSEASKSTDEDSTQGPHAFVSKDELCGQFFAALEKNCYFWSNTDGSDDPVQLEKASCLFNEACMELERSGCHQFSLKNLAESLKTLGNKAMQSKKYSDAIELYNCAIAVHEKSAVYYCNRAAAYTQINKYTEAIQDCLRSIEIDPNYSKAYSRLGLVYYAQGNYRDAIHKGFRKALQLDPNNESVKENIRVAERKLLEEQHRAYQNQNSRSSQEFPNQSAQGGSRSHSVPPPFSSMSFNPRDIASMFMNITNPTNAQPQGSHSHQERQEDSNGSGTSEPEIRIGGNISVNMEDMPEDITGALQSMMEMLSGAAPPGQPQDQTNGRTAPN

SEQ ID NO: 60551 - protein, 254 aa, Glycine max
  Clone ID: 700892968_FLI.pep
KGVRMRKWGKWAAEIRDPFKGTRIWLGTFSTAEEASQAYETRRLEFEVMAKALSDEKSNNGSSNNNVVASAETETVAAPENNSSNYYVSSAAGSVSDSKSAFMDESESVLSHTSPSSVLELDTSASNLIGSGKVSSNEIVETKGLEAEVAETKSLAAEFAELEIQDLSMLNVPSPSAVAAATSEYELDLLAFDSFKYGFDYEHGFDDDFAALEDIHICSFDDNEPSELPDYDFDDFGADEFAGWIEEPLNIPCV

SEQ ID NO: 60552 - protein, 75 aa, Zea mays
  Clone ID: UC-ZMFLB73276H07_FLI.pep
DKSKKEIHRVDGEKEKKFWETLEVLPVSLRLSSEQMVYVFSPNSVVFGCLSPALHDEEHSQSLFFCKYFNSGSIR

SEQ ID NO: 60553 - protein, 266 aa, Zea mays; identical to SEQ ID NO: 60141
  Clone ID: UC-ZMFLMO17317H07_FLI.pep

SEQ ID NO: 60554 - protein, 304 aa, Zea mays
  Clone ID: UC-ZMROB73028H01_FLI.pep
AKPFFSPRPAARIPAPSPHPPPPPAGRRLPNTAAALAAAARRFRWPSAAASARGLCAPPHSGGEGMGSDAGAGARKRRDSAVNGLAKDVPPVNGMMMPKEEPATAPPRLLTLPTVLTIGRVAAVPLLISTFYMEGPWAATATTGIFLAAAVTDWLDGYIARKMQLGTPFGAFLDPVADKLMVAATLVLLCTKPLETSLLNDGPWLLTVPSIAIIGREITMSAVREWAASQNSEALEAVAVNNLGKWKTATQMTALTLLLASRDPSVPAQGALVAPGVALLYISAGLAIWSLVVYMRKIWRTLLK

SEQ ID NO: 60555 - protein, 170 aa, Zea mays
  Clone ID: UC-ZMROB73076C03_FLI.pep
VGACVLRLGRRSKETAPPPTQATPPQPNPTQPAIALLSLPVASWPEPPRPEPKGAAFPEPRPRQIDRLVVRFLGRESEEAAREEMCPLRVILIFLSATVAGFFLIRGLNAEPDQFDADADDSGSPRAPLPLHSKVGSAVKAGFWTMVDMASGRYLWRTLAAQAQPSKSAR

SEQ ID NO: 60556 - protein, 146 aa, Zea mays
  Clone ID: UC-ZMFLB73014D08_FLI.pep
SSFMIGGQRTSWKRRTWRFSSSCLFKNCSSNIIGPYNPSLKGCIAFLLSRKYISLGLKTSDRYQTRDSLIHCECYFYTIYLKHQFQRSSKHNVLIVYLVCSFWLLIVWFHIIILLDFINHDAYAHFKITLFLSQYFFPPHNYEMIC

SEQ ID NO: 60557 - protein, 324 aa, Zea mays
  Clone ID: UC-ZMFLB73294E08_FLI.pep
RGERLHINFDVTFPALPCSLVAVDTMDVSGEQHYDIRHDIIKKRIDHLGNVIESRKDGVGAPKIERPLQKHGGRLDHNEVYCGSCYGAEESDDQCCNSCEEVRDAYRKKGWAVNNVELIDQCKREGYVQRLKDEQGEGCTIHGFVNVNKVAGNFHFAPGKSLDQSFNFLQDLLNLQPETYNISHKINKLSFGEEFPGVVNPLDGVEWIQDNSNGLTGMYQYFVKVVPTIYTDIRGRKIHSNQFSVTEHFREAIGYPRPPPGVYFFYEFSPIKVDFTEENTSLLHFLTNICAIVGGIFTVAGIIDSFVYHGHRAIKKKMELGKLG

SEQ ID NO: 60558 - protein, 350 aa, Glycine max
  Clone ID: 700564066_FLI.pep
GTSLPFPSYHFFNPSPSSSPFFISSNPKQNPQKMQSFPPIPTLACLYLTFFTSLLFLLPFSRAGLLSEPVSDPNQPLEPGSNTVPAFPVQTQALTCRLDLSDELFGGVKDACGKDLDRSRCCPVLAAWLFAAHARTALDVSAAPPPSSADLPMMPDDSQKCVNSLQDSLLSRNIRIPQPNATCDAILCFCGIRLHQITSLTCNAAFNVSLSHRNATPTAAVRNLENNCRNSSYAGCTKCLGALQKVKGYKNETKGSDRVKKMFNRDCQLMGLTWLLAKNKTAYIPTVSAVLRAMMYSAHPHESKCSPDQENMPLAVDSLQFESGHAPSRPSKFCVTVLPLVVLLLFSAFV

SEQ ID NO: 60559 - protein, 609 aa, Glycine max
  Clone ID: 700566431_FLI.pep
HRTQCRQQVMTSKQTYSVCFCWRRRFKLALAEAPSEIKTLFNEYSENELMTPSHLKRFLVDVQRQEKATEEDAQAIIDSFRHFHRRGAGLNLETFFKYLFSDDNPPLLPSHGVHHDMTLPLSHYFIYTGHNSYLTGNQLSSDCSDVPIINALKKGVRVIELDIWPNASKDSIDVLHGRTLTTPVELIRCLRSIKDHAFVASEYPVVITLEDHLTPDLQAKVAEMVTQTFGDILFTPNSESVKEFPSPESLKKRIIISTKPPKEYLEAKEKEKGDDSQHEKEKGDDSEHGKASGEDEAWGKEVPSLKGGTIEDYKDNNVDEDLNDEEEFDESDKSHHNEAPEYRHLIAIHAGKPKGGLVECLKVDPEKVRRLSLSEQQLEKAAINYGQQIVRFTQRNILRVYPKGTRIDSSNYNPLIGWMHGAQMVAFNMQGYGRSLWLMHGMFRANGGCGYVKKPNFLLETGPDDEVFNPKAKLPVKTTLKVTVYMGEGWYYDFKHTHFDQYSPPDFYTRVGIAGVPNDTIMKRTKAIEDNWLPTWNEAFEFPLTVPELALLRVEVHEYDMSEKDDFGGQTCLPIWELRSGIRAIPLHSQKGDKYNTVKLLMRFEFINN

SEQ ID NO: 60560 - protein, 252 aa, Glycine max
  Clone ID: 700681809_FLI.pep
GMAVADPNAPHGLKLTIEDYPFANDGLLIWDAIKEWVSEYVNHYYPSSSTIEFDQELQAWWTEIRTVGHGDKSEEPWWPNLKTPKDLIEIITTIAWVSSAHHAAVNFAQYTYGGYFPNRPTIVRNNIPTEDPSKEELEKLINNPEKTFLESLPSQIQATLVMVVLNLLSNHSPDEEYIGQYVEQSWVENQTIKAAFERFSTKLKEIEGIIDSRNANCDLKNRNGAGVVPYELMKPFSGPGVTGKGVPYSISI

SEQ ID NO: 60561 - protein, 222 aa, Zea mays
  Clone ID: LIB3595-057-C6_FLI.pep
VYIYLGAPCQSYILLATSFIFLTIRSIWKMKKATKYLKHLFSAIVAAVKARSTAVGTKASSLQMRLIVLGIMRNKKLLLSAIQKKIHAIIGAGNGSGNAVASHGSGNRMAAVLQSLPSFAVEQETRALVLLSSLPSFVLERDAAGAGANEDKQDVVEATAGDKHVAVVDDDATAQAKAEGDFLLEDQIDHVADVFIRRFHEQMRLQKLESFKRFCEMLERGA

SEQ ID NO: 60562 - protein, 97 aa, Zea mays
  Clone ID: LIB3595-060-H5_FLI.pep
YSTRLPSAGGSVSVVVRVQRRAGCRDAGDDPRRGAQVHVRRGAPRRMRARGRGRGVHAAAGGGCDARRRGARRRRHTAVETRKRTKSDLINAKHCVN

SEQ ID NO: 60563 - protein, 50 aa, Zea mays
  Clone ID: LIB3595-060-H9_FLI.pep
KLRTTFKASRPTCSCDLAVVSVCDHKSHKCFCFFLSFDFLIVILNRFDDS

SEQ ID NO: 60564 - protein, 358 aa, Zea mays
  Clone ID: LIB3595-061-A11_FLI.pep
YPPHSAHAVRTHAPRRPEEPAAMAQQPPHRHAKTDSEATSSMAAAYYVQSPSHDDGENKTAASSFHSSPAASPPRSLGRASRDSSSSSRFSSAKAASSSVAVPVPGAGAGGRRRGSPWMKEAAIEEEGLLGMSDDDDGDGTSRGALSAIPKRARYALGFAGAFLALFFLFALVLWGASRAQRPVVTLRSVTFHRFVVQAGTDASLVPTEMASLNATVALAFRNAGTFFGVHVSADPVTLHYTQLQLASGDIKYFYQPRKSQRGLAVAVVGDKVPLYGGGSGLSSTATTLPPPRKRAPAVVVPPPPVPLQLAVRLRSRAFVLGRLVAPKFYTEARCRVTMDQTRLGRPVSLAKACTYTH

SEQ ID NO: 60565 - protein, 479 aa, Zea mays; identical to SEQ ID NO: 59909
  Clone ID: LIB3595-063-E4_FLI.pep

SEQ ID NO: 60566 - protein, 484 aa, Zea mays
  Clone ID: LIB3596-001-B5_FLI.pep
DRRLRTRLPPRLKPFPLLPIPSVGRRSIPYDDTMRECISIHIGQAGIQVGNACWELYCLEHGIQADGQMPGDKTIGGGDDAFNTFFSETGAGKHVPRAVFVDLEPTVIDEVRTGTYRQLFHPEQLISGKEDAANNFARGHYTIGKEIVDLCLDRIRKLADNCTGLQGFLVFNAVGGGTGSGLGSLLLERLSVDYGKKSKLGFTVYPSPQVSTSVVEPYNSVLSTHSLLEHTDVAILLDNEAIYDICRRSLDIERPTYTNLNRLVSQVISSLTASLRFDGALNVDVNEFQTNLVPYPRIHFMLSSYAPVISAEKAYHEQLSVAEITNSAFEPSSMMAKCDPRHGKYMACCLMYRGDVVPKDVNAAVATIKTKRTIQFVDWCPTGFKCGINYQPPSVVPGGDLAKVQRAVCMISNSTSVVEVFSRIDHKFDLMYAKRAFVHWYVGEGMEEGEFSEAREDLAALEKDYEEVGAEFDEGEDGDEGDEY

SEQ ID NO: 60567 - protein, 218 aa, Zea mays; identical to SEQ ID NO: 60485
  Clone ID: LIB3596-002-G3_FLI.pep

SEQ ID NO: 60568 - protein, 112 aa, Zea mays
  Clone ID: LIB3596-002-G8_FLI.pep
QAGGHRLHCRLVRSMPRHRPTVRRTRQEVHSGRLPEGGRGRSEGSHRGLRGRGDADLPLRQERQDGRDHRGCQEGRAPGPDREACRACACVCVCLKEIRSVVAVNKGQHVWL

SEQ ID NO: 60569 - protein, 213 aa, Zea mays
  Clone ID: LIB3596-004-A4_FLI.pep
GRYNCMVEHVVRCNLVTLEDRQSFKPFFFVLLHRKFVPLVSCFSVVRRSPQRLEDLGVRRDDGLLHHPPAVAGVGPPLELAHVGGLHEEHGELAHLLGAPAAARPQHQGVPPVVREDAVREPHDVARLERAALGAPQQEVRRRGLVRHKRQARLLPGAALSAGRRRRLVEHDERRVHRVGRGRDQVLELHRHDAGDGGGALARRGGLRQLGSS

SEQ ID NO: 60570 - protein, 182 aa, Zea mays
  Clone ID: LIB3596-005-H12_FLI.pep
RRCRTSKQTTTLTRSAGARRTPARLPPRCRRSTGAGAGTTAKTPTREPNPLQGSAYSWSRACASSVAAAPRSTAKRAASPSLERGRRAPPSQHGRASVRARARRRRLATEGECGHRAGRRCPAGEHPGRTADATASRHKRAGKDRRRYDRRAAAAVSQQAMRASRLRSRPNTSGYSSAPIRN

SEQ ID NO: 60571 - protein, 53 aa, Zea mays
  Clone ID: LIB3596-013-H10_FLI.pep
ELFRHLHKSSPATSCGGGGALWLGAVSATARYCGSAAAAAVQPQPYGPYLKQQ

SEQ ID NO: 60572 - protein, 121 aa, Zea mays
  Clone ID: LIB3596-017-D2_FLI.pep
YWSREHAARALSAAAKMVNVPKTKKTYCKNKECKKHTLHKVTQYKKGKDSLSAQGKRRYDRKQSGYGGQTKPVFHKKAKTTKKIVLKLQCQSCKHYSQHAIKRCKHFEIGGDKKGKGTSLF

SEQ ID NO: 60573 - protein, 202 aa, Zea mays
  Clone ID: LIB3596-019-C10_FLI.pep
AHSSLATTHQASGSKAEQRSPAGHDTSVAREREDGVHAVPRAAAGGANSGGVPGVAGAVRRGQRRADQQGGAAARAAEPQRAVRVVEGEGRRARRRRRPRRRRAAGGGRGGPPLRLRAEPPPRQDRPARVLLVLLIRRRPIDRPIWRHGAYGIDRWVCHYSIVTCLSQLGGLDVLLLLFFLSRPGGCVLLLIVTYCCLVKTH

SEQ ID NO: 60574 - protein, 65 aa, Zea mays
  Clone ID: LIB3596-020-C4_FLI.pep
KHLSFLLGRSVLPLEILSYRCVLVVQSLVVVMPAGFPNVVLNGFINSDIGAYVTDIAKSSCCLVC

SEQ ID NO: 60575 - protein, 147 aa, Zea mays
  Clone ID: LIB3596-022-C6_FLI.pep
IQENMPTNNCNFHQEHKKNCNPGLLNPKADIVWVTRQVRQTLNKINRITSKTTRASAQPPGLPLRLEQGQDVTLTNRALDVPHDETVLVIQELHSDLGHLTPGAGPAHHLYHNSKLHLGVHALASRGDGGRRALGDAKRTGTAAVES

SEQ ID NO: 60576 - protein, 149 aa, Zea mays
  Clone ID: LIB3596-022-G11_FLI.pep
ALSSSAGNGKSDEIVGIRAHCRLFGIGIVVVCFIFSSSLLCIRRSNNMLYPREDKETRTLLYACQTCEHEEIATDTCVYKRVIRKPGGEPKDVLKDAATDPSLPRTRSVRCYNCNHPEAAFFQAPTKGEQAMTLYFICCNPSCGHRWRD

SEQ ID NO: 60577 - protein, 71 aa, Zea mays
  Clone ID: LIB3596-023-F7_FLI.pep
RLASAHRGSVLLPKPLAFAAQITIEFLLAAQEEDTGEAGGGDAAPNDDCGREQRPVAVDHFRLPRVPLPSL

SEQ ID NO: 60578 - protein, 199 aa, Zea mays
  Clone ID: LIB3596-025-E7_FLI.pep
FYCRTPDLQEGLVRSANYTARNGHHGDRGGAGAGAAGQRQRRAEDAALRGRPQEPAQERRPLPVHPGHERVPAGAGEHEGAPRDHRQAPMEPDDDLRRRGAVPEHAHQAHRRQEDHGDRRLHRLLPPRHGARPPGGRHDLGHGHQPRELRAGPAPHPHSNHNRRPAALIIHRLFFWLFLAPVIFLLLFLLGNCRRRFDT

SEQ ID NO: 60579 - protein, 150 aa, Zea mays; identical to SEQ ID NO: 46166
  Clone ID: LIB3596-026-F10_FLI.pep

SEQ ID NO: 60580 - protein, 180 aa, Zea mays; identical to SEQ ID NO: 37897
  Clone ID: LIB3596-027-D2_FLI.pep

SEQ ID NO: 60581 - protein, 210 aa, Zea mays
  Clone ID: LIB3596-029-A5_FLI.pep
NTQHRSINTTSEEHYCESISDQHSNRTQKQEPKIRAVGESGHGGGSEGVVDGGDERRRGGGAQGPGRPLPLELRRRGRWRSGRGTRTAPARRALPGGAWRASSAPAPRGAVVVVVQVYVGAGVDEERGVDDGVLVVRQPLRRDGAVGAERHRRVGEHLGGQPVRSRGQHGDGLEATHPVAPGTMLPARGRRRATMRTTGSGRGRPRASCG

SEQ ID NO: 60582 - protein, 287 aa, Zea mays; identical to SEQ ID NO: 58142
  Clone ID: LIB3596-031-H11_FLI.pep

SEQ ID NO: 60583 - protein, 217 aa, Zea mays
  Clone ID: LIB3596-031-H6_FLI.pep
LIARKQVGRSVGVWVGLLHDGAGVGVLVAEGGGVADLGGGGPGERRGGGVGDDVADVAGGGLLVVGARRVGVLHHLVGHVGPGLHPLACLVGDAAHDLGGVHVARDRHLVLLGRHLHGAHALHALHRLLHLALAPFAVDAHLHLHRLELLPLLEMPASPRQGAELGDDVDDAHRSQQAFSSLPFPSLHLDPTPSYRNGETRKDLLSALVQQSELRLF

SEQ ID NO: 60584 - protein, 288 aa, Zea mays
  Clone ID: LIB3596-033-H9_FLI.pep
RIPRQAGRRGGQEDRRPSRAGARDGNGTGPQNLRSFLPARPCPSTRRSCRPRPTSALSSSRGIGYATGCAMVLWVFGYGSLIWNPGFDFDDKILGFIKGYKRTFNLACIDHRGTPEHPARTCTLETDDEAICWGIAYCVKGGPEKELKAIQYLERRECEYDQKISIDFYKEGDPLKPAVTGVLVFVSTPDPIGNKYYLGPAPLQDMARQIATANGPTGYNRDYLFSMEKALASISHEDDSIIELANEVRKVLNRTKETKITGANASLKSHAPLVHLSALPEGTVVDSR

SEQ ID NO: 60585 - protein, 362 aa, Zea mays
  Clone ID: LIB3596-038-G7_FLI.pep
RRSFAQFWSSGQQGRGGTRGSEARERASGGRRRMMHAKSESDVTSLAASSPPRSPKRGVAAAGTGGGGGGYYVQSPSRESHDGGGGGYKSSSMQATPVYNNSPSESPSHPSYGRHSRSSSVSRFSGGLRGGGGGGRKVLNDKGWPECSVIEEEGPYEGLGAGDSGLSRRCQIVLGFLTFVLLFTVFCLVIWGAARPYEPEVVVKSLVMDDFYAGEGTDHSGVPTKLVTTNCSLHVSVYNPATMFGIHVTSGPIRLIYSEISIAVGQVRRYYQPRKSHRTVTAVIHGEKVPLYGAGGGLTLSTSAGGGAVPLTLDFDLTSRGYVIGRLVRVTHRAHVTCPVVVDARRTKPVRFSKKACAVYKA

SEQ ID NO: 60586 - protein, 126 aa, Zea mays
  Clone ID: LIB3596-043-D10_FLI.pep
GSHVRHILVALTRHWHPLVLGLEVNSAMRKHGWQLSYHPLQVVAIAVFSALGFTFYVFFVPFVGTKPFQIVAMAIYTPLITCVVVLYIWCAATNPGDPGIFDSTKNLKLDKNEKHSYVNSDQGINH

SEQ ID NO: 60587 - protein, 163 aa, Zea mays
  Clone ID: LIB3596-043-D5_FLI.pep
NTADDMLSAASHSSDLGLDSILPHGEVLLTLLFPLGLQRELVLGQTAADGTGLLRAEVEGEQVLLLVRLPQRRLLLLRDHCEHARDRGAHHLDLGELVGCAAGDLGYAEEGELRLQLLELRLQVRLALPPELVHLDTGHSDGDNCCGGAASAVAGWTGLRSGA

SEQ ID NO: 60588 - protein, 128 aa, Zea mays; identical to SEQ ID NO: 58723
  Clone ID: LIB3596-044-F12_FLI.pep

SEQ ID NO: 60589 - protein, 154 aa, Zea mays
  Clone ID: LIB3596-044-B4_FLI.pep
LLLQSSSPPATATLDHAVRRGKVSMVRVSVLNDALKSMYNAEKIGKRQVMIRPSSKVIIKFLTVMQRHGYIGEFEYVDDHRSGKIVVELNGRLNKCGVISPRFDIGVKDIEGWTARLLPSRQFGYIVLTTSAGIMDHEEARRKSVGGKVLGFFY

SEQ ID NO: 60590 - protein, 178 aa, Zea mays; identical to SEQ ID NO: 41250
  Clone ID: LIB3596-046-F1_FLI.pep

SEQ ID NO: 60591 - protein, 164 aa, Zea mays
  Clone ID: LIB3596-047-D10_FLI.pep
RHLNPGTERGDAAAPLLRRREMATVPGDLIWQVVRKNNSFLVKQFGNGNAKVQFTKEPNNLYNIHSFKHSGLANKKTVTIQPAAKDSAVVLSTTKTKKQNAPAKLSHKSVMRKEFRKMAKAVKNQVSDNYYRPDLTKPALARLSSVYRSLQVAKSGVKKKNRQS

SEQ ID NO: 60592 - protein, 196 aa, Zea mays
  Clone ID: LIB3596-050-C11_FLI.pep
RTPNPVPFQSPRRAAKGRKKKEIYGGGRRREQRRWRGRGRVLPALLRGTQGQVRARVPRVRVPPRRQAPLRQQLQLQERHHDPQGGLRLALRPPRGQEDHPGVRHHEGGRQQLARARPHRPPGARDRHGQRAHFIHHFQDRLPRRCPVQQGPGGPPDLLLPCPGSEVFRVLAHQPSLQDQANPVLSSIPSLHVAGL

SEQ ID NO: 60593 - protein, 326 aa, Zea mays; identical to SEQ ID NO: 56572
  Clone ID: LIB3596-052-G11_FLI.pep

SEQ ID NO: 60594 - protein, 137 aa, Zea mays
  Clone ID: LIB3596-053-G3_FLI.pep
LECAMGGCAGKVRRDDEEKLDFKGGNVHIITSNEGWDQKIAEANRDGKTVVANFSASWCGPCRVIAPVYAEMSKTYPQLMFLTIDVDDLMDFSSSWDIRATPTFFFLKNGQQIDKLVGANKPELEKKVLAAADASTS

SEQ ID NO: 60595 - protein, 126 aa, Zea mays
  Clone ID: LIB3596-056-B12_FLI.pep
HGQKQPRTARVQGVGEMRIYQSSSRVALWKHSTVHTRMKKDVNSMNMAPVSIKPACLRIAGIARLPMADAPVKNFAALIHPPPSLLVKKCVDPPPKNRHGIGTRTYMRAANMGHQLLYKAHACTIK

SEQ ID NO: 60596 - protein, 109 aa, Zea mays
  Clone ID: LIB3596-057-A1_FLI.pep
RCSRGSTRRCHVSNQTSWTLKPGGRDCFNLFAFSASNTQRVYKYLEQRTLNLTTSLLLLIFTDRASFLLAVRRKSLISWICFGIFSRDLEVPELFFLRRRLGSHGKMET

SEQ ID NO: 60597 - protein, 140 aa, Zea mays
  Clone ID: LIB3596-057-A2_FLI.pep
NHNEQKLSISPTPRKKRSMASEQGVVIACHSKAEFDAHMTKAQEAGKLVVIDFTAAWCGPCRAIAPLFVEHAKKFTQVVFLKVDVDEVKEVTAAYEVEAMPTFHFVKNGKTVATIVGAKKDELLALIEKHAAPAPASASA

SEQ ID NO: 60598 - protein, 141 aa, Zea mays
  Clone ID: LIB3596-057-G4_FLI.pep
CNHNEQKLSISPTPRKKRSMASEQGVVIACHSKAEFDAHMTKAQEAGKLVVIDFTAAWCGPCRAIAPLFVEHAKKFTQVVFLKVDVDEVKEVTAAYEVEAMPTFHFVKNGKTVATIVGAKKDELLALIEKHAAPAPASASA

SEQ ID NO: 60599 - protein, 110 aa, Zea mays
  Clone ID: LIB3596-059-F11_FLI.pep
REGERGGGSVVVELEAHAVVDLVVLEGDVVLVDVVPLLDADLLGARPRLRRHQLLEVADGVVLVALDPHLLPQAVVEHHLDHLRLPTAPSPDGRTDVPRTLGRRRRRERN

SEQ ID NO: 60600 - protein, 277 aa, Zea mays
  Clone ID: LIB3597-065-D11_FLI.pep
AEGCSGGATADAAAAAGGVAAVHEPAGGRAAAADAGRRRDHSLQAGRRELRPEDTQIRPESHPEPMTEREGTGLDIYLKGWSGSEERSVSVDELRNHTARSIHPSIFGSLALRQRLFVCVQAAGLVLASFQQEQNRPVDQLQNRYQGIWQLLLTTVREEEGVPVAGRQREEGSDRESHDELGLEHTSWAQPSRKKGGLGSDSDGGWRSLTFSAVMFLSVQPWLTELQNTCTVRCTTAVSTAFPFFSKKKSRNNVTDCSPPQAVIWKTTTCMNEGFTL

SEQ ID NO: 60601 - protein, 189 aa, Zea mays
  Clone ID: LIB3597-065-F8_FLI.pep
LFFLPIPNSISTATARRFVAAHSPRPPRPPREGTSAQAALWGRPAGRANPGGGEPCLPADLAVGRPELGGRKKRCARVRGPRGDSQGEREDRGAEPPGGRKTSPGPTAPCLQLVRVPRSVPLAIGYFVGAPRREGGSRHWEGLVAPCLRLVRASCSRCLQRVCAPTRTPDPEALQAFGLLLLCEIQSST

SEQ ID NO: 60602 - protein, 234 aa, Zea mays
  Clone ID: LIB3597-066-D3_FLI.pep
QMARIKPKQLLIQSKTKKAPSRISYSTIITWNLIVILVVLSLYATYSHWHQRSAQDFEMELHEAELAVRPEDPKMISRPRYAVMNTAKGPITIEIYKDASADVVDRFINLCKSNHFKGMPFRHIIKNFVIQGGDFDFDGASQEWITKAKASGKNDLSPKHEAFMIGTAKNPNTKGFDLFITTAPIPDLNDKLVVFGRVIKGEDIVQEIEEVDTDEHYQPKAAIGIIDIVLKQEP

SEQ ID NO: 60603 - protein, 93 aa, Zea mays
  Clone ID: LIB3597-067-C6_FLI.pep
SRGLLMEFFHLFLVRHVVPCHITSILHTIARSRCVRFGLLHSFFSVVSSVCAVLYALALCNQELRPRHLPFFSLTLRLVLGKSTSSIKQHLKS

SEQ ID NO: 60604 - protein, 139 aa, Zea mays
  Clone ID: LIB3597-067-C9_FLI.pep
AVRTSPSSLPRAGRSLLQSHVVAVVSLLRQLHLLLAELLLQLRQRKKRRWKRRKKAMMIWASASSTRLHSHHSIVSGSETRGKPESCLDFNLVLCWKVLLLVFIFGNSAVGCYAGWDLLVNQSFSILYPEFVIPKFPGF

SEQ ID NO: 60605 - protein, 292 aa, Zea mays
  Clone ID: LIB3597-067-D5_FLI.pep
MAQIIDGKAIAADVRREVAADVAALSSAHGLVPGLAVVIVGSRKDSQTYVNMKRKACAEVGICSIDVDLPEDISETALVAEVHRLNADPAVHGILVQLPLPKHINEEKILSEISIEKDVDGFHPLNIGKLAMKGREPLFVPCTPKGCMELLSRSGVTVKGKRAVVVGRSNIVGLPVSLLLLKADATVSVVHSRTPDPESIVREADIVIAAAGQAMMIKGDWIKPGAAVIDVGTNSVDDPTRKSGYRLVGDVDFAAASKVAGYLTPVPGGVGPMTVAMLLKNTVDGAKRGIVE

SEQ ID NO: 60606 - protein, 328 aa, Zea mays
  Clone ID: LIB3597-067-G10_FLI.pep
RDPMGEASPSIAKDVTELIGNTPLVYLNKVTDGCVGHVAAKLESMEPCSSVKDRIGYSMITDAEEKGLITPGVSVLIEPTSGNTGIGLAFMAAAKGYKLTLTMPASMSMERRIILKAFGAELVLTDPLLGMKGAVKKAEEIQAKTPNSYILQQFENPANPKIHCETTGPEIWKATAGKIDGLVSGIGTGGTITGTGRYLREQNPNVKLYGVEPVESAVLNGGKPGPHKIQGIGAGFIPGVLDVDLLDETLQVSSDEAIETAKALALKEGLLVGISSGAAAAAAVRLAKRPENAGKLFVVVFPSFGERYLSSVLFQSIKKEAESMVVEP

SEQ ID NO: 60607 - protein, 155 aa, Zea mays
  Clone ID: LIB3597-068-A11_FLI.pep
VFFLLRKFVVDPASERADRRLTAEGEMAQGTLEVLLVGARGLENTDYLSNMDPYALLQCRSHEQKSSVASGKGCEPEWNETFVFTVSDGAAELFIKLLDSDGGTDDDFVGEATIPLEAVYTEGNIPPTVYNVVKDEEYRGEIKVGLTFTPEDQGF

SEQ ID NO: 60608 - protein, 162 aa, Zea mays
  Clone ID: LIB3597-069-C2_FLI.pep
RGRRSRRSTQRRRSPRRSTRRRRTGAAARPGRRTGWGRTRAGTRSWRAPSAAPRRPTSSPCRSTTRRATPSSPSSRRSSSTCTPPPPLLLPPPPPLPRPPPPSPSPASAAASRSKLAGLVGSPACMGHNSLRFQSHPPTRSIINQIAALRPGGCRSRPAVYC

SEQ ID NO: 60609 - protein, 321 aa, Zea mays
  Clone ID: LIB3597-069-C7_FLI.pep
VLMMAKANGAVHASTKEPLFSFGVIADVQYADIPDGRSFLGVPRYYRHSITVLQRAVNRWNEQGNIKFSINFGDIIDGYCPKDKSLWAVQKVLDEFDKFDGPTYHMIGNHCLYNLPRSQLVSLLKIATDSDRAYYDFSPCPGFRIVVLDAYDFSCLGWPHDHPVTIAAMKLLDEKNPNTDKNSPDGLVGVDRRFVKFNGAVGKEQVSWLNDVLQDASTQHQNVIICSHLPMDPGASSPAALMWNYDEVMAIVHQYNCVKACFAGHDHKGGHSVDSHGVHHRTLEAALECPPGTSAFGHVEVYPNRLLLVGFDRMADTEVRF

SEQ ID NO: 60610 - protein, 180 aa, Zea mays; identical to SEQ ID NO: 52264
  Clone ID: LIB3597-069-D4_FLI.pep

SEQ ID NO: 60611 - protein, 172 aa, Zea mays; identical to SEQ ID NO: 36903
  Clone ID: LIB3597-070-A6_FLI.pep

SEQ ID NO: 60612 - protein, 155 aa, Zea mays
  Clone ID: LIB3597-070-D2_FLI.pep
VNVSSFPRSLRRLPDPAAMARNPGCTVFIGNLDDKVPERVLYEILIQISGQDKPSLNGNIPVTPRLNSVPQPKPHQPMRSSDTPLPQHAAVNGRNAGYGIPPNHSYDTHTQALSSGLPNRGLSNGTYEYSRRVFGSVLNDVSRRATREPIPYPSY

SEQ ID NO: 60613 - protein, 180 aa, Zea mays; identical to SEQ ID NO: 52264
  Clone ID: LIB3597-070-H2_FLI.pep

SEQ ID NO: 60614 - protein, 185 aa, Zea mays
  Clone ID: LIB3597-071-E10_FLI.pep
NCYLMVQFLKGDRNRLPAYLRMLVKMLTMEATIPAQSQQTALGPQGIDDLDTLQKRGEEVLERLQHGADRRLPRADDQAQSSSCVELQRDRRKKRKAPDVQQMMETYLNFRMKQAHVKEQRAKDAGQFTISGCIKALHTMADVSDEVKVLASDVFKDAENREIFLSYEPRLRSLWLKREVGKLLS

SEQ ID NO: 60615 - protein, 323 aa, Zea mays
  Clone ID: LIB3597-071-E9_FLI.pep
THYLCLISVRTRLAIEEQPRPAMANNMPSSQIHSRLRCSCSWLLLLVLHFSSSASRAAGGKVPALIVFGDSTVDPGNNNFIPTVARANFPPYGRDFDRGVATGRFSNGRLVTDFLSEAFGLPSSVPAYLDPSYTIDQLATGVSFASGGTGLDDLTANIPSVIPMSQQLEYFSEYKARLKVAKGESAANEIIAEALYIFSIGTNDFIVNYLTFPLRRAQFTPPEYVAYLVGLAEAAVRDAYGLGARKMEFTGLAPFGCIPAARTLNYDDPDECNEEYNRLAVRFNAALQEALRRLNAELVGARVVYAETYSVLSDIVANPSDYG

SEQ ID NO: 60616 - protein, 169 aa, Zea mays
  Clone ID: LIB3597-072-B11_FLI.pep
RGPFRRGVARGETTGAGMGSVLLPTLRLKSEVDAAIRDTLDKVLVLRFGRATDATCLHLDDILAKSSWDISKFAMVALVDMDSEEIQVYIDYFDITLVPATIFFFNAHHMKMDSGTPDHTKWIGSFSSKQDFIDVVEAIFRGAMKGKLIVSCPLPPERIPRFQLLFKDV

SEQ ID NO: 60617 - protein, 111 aa, Zea mays
  Clone ID: LIB3597-073-C1_FLI.pep
LFGNTIKRLLRGGSLLLELLHLGDVVIHRLILRFAFNSLPGIPLGPVLLVEYARTIGIHISNRGLLVEPVEDQLVLIARALRQGLCLLSMLLKFLLQTHGLVSGLFSFGLV

SEQ ID NO: 60618 - protein, 163 aa, Zea mays
  Clone ID: LIB3597-073-E10_FLI.pep
QYGTHKWPASSIILLRSLTAGTCKSEWMEYNVPEILNASTKHRSCHKNFHLPLFIIKVMLSPLRSIRPSVFLVFFLTLISSASSRTKFMYSSNPMMRPSIRRSFCSKSQIWMRALLWRKRKMRLMGWVMIRCTLVDAMAAAAAAGASPPPPRTSRSFRRRARR

SEQ ID NO: 60619 - protein, 229 aa, Zea mays
  Clone ID: LIB3587-198-E4_FLI.pep
KSIRLTTAPRRRPKMTGLGSPCGACKFLRRKCVKGCVFAPYFCHEHGAAHFAAIHKVFGASNASKLLMHLPISDRCEAAVTMSYEAQARLQDPIYGCVAHIFSLQQQVVRLQAELESFKALAIQGCGDGSLTSNPQKENCERLAPYIQDGQLFYQPTMANNSSVKSERQLYFANDCFTSTSTQHSEGYEPDICMPDYYNNSNPSWTTQGSGYHDIDELQSVAFAYLDNA

SEQ ID NO: 60620 - protein, 379 aa, Zea mays
  Clone ID: LIB3591-101-G3_FLI.pep
DAAAVAEREETLLLTQESRLNSSRGDRALRAWGEPEKAAEEGGRERVDQARRSSMGAGIRVLAALLAALAAATAGVTAQLRQDYYAAVCPDLESIVRAAVSKKVQAQPVAVGATIRLFFHDCFVEGCDASVILVSTGNNTAEKDHPSNLSLAGDGFDTVIQAKAAVDAVPACANQVSCADILALATRDVIELAGGPSYAVELGRLDGLVSMSTNVDGKLPPPSFNLDQLTSIFALNNLSQADMIALSAAHTVGFAHCSTFSDRIQPQSVDPTMNATYAEDLQAACPAGVDPNIALQLDPVTPQAFDNQYFANLVDGRGLFASDQVLFSDARSQPTVVAWAQNATAFEQAFVDAITRLGRVGVKTDPSLGDVRRDCAFLN

SEQ ID NO: 60621 - protein, 291 aa, Zea mays
  Clone ID: LIB3357-024-A4_FLI.pep
YTGFQEQIVLVAANTSFQRRLAEKTGQIYSETGRIGPAAPLLPLLVLVHPEDAAQTFPLQEQVEGLVDVLQSKLMRDQRVQLQLLVHAFLGEDGDVGLGLQPAEERPHDAPPEQQLQRRQAHLVAVPPQPQHDRLALPHLGASEGVGHHRRHADALEAVVHAAAGHLNDHLYDGTLVQLRWIDEVCDAERSPYFLLVRVEINADDLGCATHFRALDHRQTDRSKAKDCNSGSWLHLGRPPRCSYPGAGAAAEEAGELGRHGGVDLDHLVHVHDGVLAEAGDGEEVVQRAPP

SEQ ID NO: 60622 - protein, 205 aa, Zea mays
  Clone ID: LIB3357-024-C11_FLI.pep
RSSYRSRAAPTEKPATSNYNTRRTSTQEKPTKGERASLGGGELGDGLGALRDGVLGELAGEHEAHGGLDLAGGDGGLLVVARELGGLAGQLLEDVVDEGVHDGHGLGGDADVRVHLLQHLEDVDLVRLHALLALLLATLALAALLAGGLASGDPLLRLGLLPGGRLLGRGLLLHRLLRRGLLLGLGRHRSLVGRGIGNRLQGKCE

SEQ ID NO: 60623 - protein, 135 aa, Zea mays
  Clone ID: LIB3357-027-E2_FLI.pep
THNRPRPSHQSIRRGGGLAAEAVERAALALERVDDIHGGDGLAAGVLGVGDGVADDVLEEDLEHAAGLLVDEPRNALDAAPPGQPTDRRLRDALDVVAQHLAVALGAALAQPLAALAAPRHRRNRELRGRRRRIV

SEQ ID NO: 60624 - protein, 233 aa, Zea mays; identical to SEQ ID NO: 59451
  Clone ID: LIB3357-028-G8_FLI.pep

SEQ ID NO: 60625 - protein, 341 aa, Zea mays
  Clone ID: LIB3357-037-H6_FLI.pep
REGRRARPGPPIPIRPSRGRPRETPIRIPSPAQSLDSTGGGDDSTGSVARQRQRKERMSFQDLEAGHVRGAPLGGGRRNGRGPAGAGGAGAGASQAVASGVFQINTAVATFQRLVNTLGTPKDTPDLRDRIHKTRQHITQLVKDTSDKLKQASEADHRVEVSATKKIADAKLAKDFQAVLKEFQKAQRLAVEREAAYAPFITQAGLPQSYNSSEVNNGADKLAEQRTQLLESRRQELVFLDNEIVFNEAIIEERDQGIQEIQHQITEVNEIFKDLAVLVHDQGAMIDDIDSHIENAVVATSQAKGQLSKAAKTQKSNSSLICLLLVIFGVVLLIVIIVLAA

SEQ ID NO: 60626 - protein, 195 aa, Zea mays
  Clone ID: LIB3357-044-D2_FLI.pep
TLWTRVNNTVANRITWPRGPHRSVPPVPVGVAVAAATVATAVAAATTTVAAAATTVAAATAVAAAAITAPATAVAAASTATTVPAAAAASTAAAGLGLVDGDVAAVQLLAVHALDGVPHRLLRGEGDEAEAAGPLRLPIEDDLGLEDLAVGAEGVVEGVVVRGPGEAADEAAVLNIRRRHLDPLTHETEPRRTSR

SEQ ID NO: 60627 - protein, 191 aa, Zea mays
  Clone ID: LIB3357-058-H12_FLI.pep
VPAAGRIAFRRPWNTPQPEALRLRLRLRARGVRREDGGGVRTEEQEQTAPRTFYDLLGISADGSPDDVRASYRRLALKYHPDVSPPGAAAENTRRFIEVQEAYETLSDPSRRSSYDRALARGVCRLAFSGRRSQSHHAYYHHQEQGERSGWRRSWEDQIAELKRRSVAKDSEENLSWGARMRRRAEASAAE

SEQ ID NO: 60628 - protein, 287 aa, Zea mays
  Clone ID: LIB3357-061-C11_FLI.pep
ERRNPSQLIPNPKPPIHPSPPHPLRAAMACSFAAATVVSSAPTPAARPLAVAPQSVSVSRSAAAAAARPLRLVASRSARATRLVARAGGVDDLPLVGNKAPDFEAEAVFDQEFINVKLSDYIGKKYVVLFFYPLDFTFVCPTEITAFSDRYEEFEKLNTEVLGVSIDSVFSHLAWVQTDRKSGGLGDLKYPLISDVTKSISKAFGVLIPDQGIALRGLFIIDKEGVIQHSTINNLAIGRSVDETMRTLQALQYVQENPDEVCPAGWKPGERSMKPDPKGSKEYFAAV

SEQ ID NO: 60629 - protein, 175 aa, Zea mays
  Clone ID: LIB3356-010-C3_FLI.pep
RRGGESARVGGGVGHDGEGEAEEAHGEGDRREDRRGDDEPGRRQGRAGGSARAGQGRAREAGVPALPHPGARHQVHADPPRGAPSQAPFRAGEARQPALLHPRRRRGHHLQAQARGPRQPQEVAGWLACLTAWGNSLRFQSHPPTRSTINQSTARPPACGVLLVCCCCFLSLLYC

SEQ ID NO: 60630 - protein, 183 aa, Zea mays; identical to SEQ ID NO: 44872
  Clone ID: LIB3356-011-E12_FLI.pep

SEQ ID NO: 60631 - protein, 339 aa, Zea mays
  Clone ID: LIB3356-011-F3_FLI.pep
QACACHFSPVLAPPRSRISASHSPGMATLKVPATVPPVADDCDQLRKAFQGWGTNEALIISILGHRDAAQRRAIRRAYAEAYGEELLRSITDEISGDFERAVILWTLDPAERDAVLANEAARKWKPGNRVLVEIACTRTSAQIFATRQAYHERFKRSLEEDIAAHVTGDFRKLLVPLVSTYRYDGPEVNTRLAHSEAKLLHEKIHHKAYSDDEIIRILTTRSKPQLIATFNHYNDAFGHRINKDLKADPQDEYLRTLRAIIRCFSCPDRYFEKVARQAIAGLGTDENSLTRVITTRAEVDLKLIKEAYQKRNSVPLERAVAGDTSGDYESMLLALLGQE

SEQ ID NO: 60632 - protein, 108 aa, Zea mays
  Clone ID: LIB3356-012-B9_FLI.pep
NSYICPGGPSREDERTHVFILQENQVRKHNTTRIHLKLDPIQTQIAKTVSARVWVLSFAQREGKRRGAHTCWLLFGEGPDEDLGTWRRAAGAGRSPSRRHEREREDAG

SEQ ID NO: 60633 - protein, 178 aa, Zea mays; identical to SEQ ID NO: 41250
  Clone ID: LIB3356-012-D5_FLI.pep

SEQ ID NO: 60634 - protein, 308 aa, Zea mays
  Clone ID: LIB3356-012-H5_FLI.pep
PSPSYSPIQALLAQWSRYASVVSSSAPPPPPPPPPSPPRGPSRSSGGGTTSSSLNPAEVAKFASIAETWWDSSGPFKPLHVMNPTRLSFIRSTLCRHFRRDPNSSKPLEGLKVIDVGCGGGILSEPLARMGATVTAIDAVDKNIKIASIHAASDPTTASIEYCCATAEGLVKEKRLFDAVISLEVIEHVANPLEFCESLSALTIPNGATVISTINRSMRAYATAIVAAEYILRWLPRGTHEWSKLVTPEELVLMLQKASVSVEEMAGFVYNPLSGEWSLSDDISVNYIAFGVKKGEASSTNGRDASLS

SEQ ID NO: 60635 - protein, 417 aa, Zea mays
  Clone ID: LIB3356-014-G4_FLI.pep
NGDHEDEHVSFNDDVGMNQDEEDPDDRINGMVEELYTAEDQDKRKSMFGDILEEMKQELYPGATYTRFSFVVKLLHIKSFYRISNVGFTAILKLLKSGFPNCSLPPSFGEAKKLIRALGLGYVSIHVCVNNCVLFRKNYAKHDQCPICGESRWKDTNKRIPQKVLRHFPLIPRLKRMFASKEIAKQAQWHKFKRKHVENELSHPADGEAWKDFDRKYGQFAEDARNIRLGLATDGFNPFGKMSSSYNMWPIFLIPYNFPPWECTEQSNFIMGLLIPGPKCPGKDFDVFMEPLIEELLELWKGVTTWDALSGNNFELHAAVIWCIHDYPALSTLSGRVTKGYYACVHCDKNPCSKRIRNKICYVYHRRFLPKDLIWRRNKSFDGHSEQREKPEEFSIDELMQQLERVKDVRPGKHTKS

SEQ ID NO: 60636 - protein, 365 aa, Zea mays
  Clone ID: LIB3356-001-A11_FLI.pep
VPRGLEFGSLPAHPSPSLPSCPAGSPARRLCPDPGDMPRYDDRYGGTRLYVGRLAPRTRSRDLEYLFGKYGRIREVELKRDYAFIEFSEHRDADEARYQLDGRDVDGSRIVVEFAKGVPRGPGGSREYMGRGPPPGTGRCFNCGMDGHWARDCKAGDWKNKCYRCGERGHIERNCQNSPRSVRRERSYSRSPSPRRGRGRSPSYSRSRSRSRSYSRSRSLSGSPRGGRRDRDDRRSRSLSYSRSPVRSPPAKEKERSPTPGGSRSPRSRSPQDQVMSPPPKDNGDRNGSDRGDSPRGREDSRSRSRSPSGGNRSPAANGRSPSPRGDRGPSPMADRSPSPKGNGNNDGGDDDTGRGGSPTGSKSP

SEQ ID NO: 60637 - protein, 530 aa, Zea mays
  Clone ID: LIB3356-008-B6_FLI.pep
NAMIDALCGHLAQIGGGGPEYDPVFAAIHRRRANWFPVLHMQKFYPVADVAAELRRVADARAAAGSCCYSEEAASTVIHEPMEEAEAEAEAEPEPEQEHEQDPAPAAELADGAVEYHEPDVEVDSSGDSSERKPPSTEDDTVADGHHTDQGSQGEHSLPESYPICSDHEECIARPERIKIQKGFVAKESVKGHMVNVVKGLKIYEDAFTTSEIMKVADFINEIRQAGRNGELSGETFIFFNKQIKGNKREIIQLGVPLFQPTTEDANCHTEPIPLVLQAVIDHLVLWRLIPESRKPNSVVINFFDEDEHSQPYFKPPHLDNPICTLLLSETTMAFGRSLVTDSNGNYKGPLTLSLKQGSLLVMRGNSADMARHVVCPSSNRRVSITFARVRPSTPVDMSPLPSPTKAMTPWQPQPVTASQVPSPVSMTQKPPVSGAIIGYAPTPQAVLAPAAWGMAMRAPVMMVAAAPARPMVMASSGTGGGNISKRMGRSGTGVFLPWTVGPKRYNKHLPPRIQKRRFSAMMSPIEAQG

SEQ ID NO: 60638 - protein, 178 aa, Zea mays; identical to SEQ ID NO: 41250
  Clone ID: LIB3356-008-E11_FLI.pep

SEQ ID NO: 60639 - protein, 269 aa, Zea mays
  Clone ID: LIB3356-010-G7_FLI.pep
SWCACGLVSHLPFAVVVDVMGHLEEQLRLQALRLLVLVLHRILHSCLTVPGICNRRSCRCPLLAARGRGGRAAGRREVAEPVLPCQNPKRDAQEHTEGIHMGLHRRHAQNHKGRRKEYESVLCVQLAARTSSSCSLGSCRTRRQGDPIWGAGSSGAGCARRRRRPTAGRRRCRGSAACAAAGASPPPGPAALPSLAACGGPAGRRPRRSRLLTIGRRRGCLVALPCLHAHGAAETIRGRRLAKPKLCSEAWPRRSKAKQASCSSARLSC

SEQ ID NO: 60640 - protein, 280 aa, Zea mays
  Clone ID: LIB3356-013-C3_FLI.pep
RGGQEDRRPSRAGARDGNGTGPQNLRSFLPARPCPSTRRSCRPRPTSALSSSRGIGYATGCAMVLWVFGYGSLIWNPGFDFDDKILGFIKGYKRTFNLACIDHRGTPEHPARTCTLETDDEAICWGIAYCVKGGPEKELKAIQYLERRECEYDQKISIDFYKEGDPLKPAVTGVLVFVSTPDPIGNKYYLGPAPLQDMARQIATANGPTGYNRDYLFSMEKALASISHEDDSIIELANEVRKVLNRTKETKITGANASMKSHAPLVHLSALPEGTVVDSR

SEQ ID NO: 60641 - protein, 294 aa, Zea mays
  Clone ID: LIB3356-013-D9_FLI.pep
LSRLAGSEWARLHCAVLCVQRERSEGKMDRYQRVEKQREEAPIKENEIRITTQGRMRNYITYATGLLQDKGSDEVVFKAMGRAINKTVMVVELIKRRIVGLHQNTTTGSTDITDMWEPLEEGLLPLETTRHVSMITITLSKKELDTSSIGYQSPLPADEVKPLVKYDNDEDAHSPGGRGRGRGGRGRGRGRDRGRGGRGNGFNDYADAGWEDDHAPAYMGNGYARGRGRSFRGRGRRGGYNNQPEYQQDGGYYEEAPVHAPALGRGRGRGRGPFRGRGRGGNANGVMHAAADSA

SEQ ID NO: 60642 - protein, 180 aa, Zea mays
  Clone ID: LIB3356-013-F8_FLI.pep
SQQTPRSRPRSQTRPSKAQSPPTADQSAASMAPKAEKKPAAKKPAEEEPATEKAEKAPAGKKPKAEKRLPAGKSGAGEGKKGKKKAKKSVETYKIYIFKVLKQVHPDIGISSKAMSIMNSFINDIFEKLAAEAAKLARYNKKPTITSREIQTSVRLVLPGELAKHAVSEGTKAVTKFTSS

SEQ ID NO: 60643 - protein, 279 aa, Zea mays
  Clone ID: LIB3356-014-C6_FLI.pep
TYRHELIIGRARHGTRSCDETLSLGVVHSAQGLQEREHLVEVVGHDALGHVGGAEPVLPRGQQRRPGRVDEPAPDDPADGPEPAEVPAENGVHEPDVVAAEERPPPGAVPERALQRVERLAGARHRRRPLLLVRAPEQHPQPRRLHLVVDVRAPEPRHRALVGVGRKHGRPRPRPHLVDVLQDDLGLVYGAAGVEEHRHALVHRVGSQEERALVAEVLLHVLVRQALQVEHDADPDHERARPHAEHLQVVASRHWKLQLSALFDEIHAQRIYAECLRFR

SEQ ID NO: 60644 - protein, 116 aa, Zea mays; identical to SEQ ID NO: 48140
  Clone ID: LIB3356-016-E9_FLI.pep

SEQ ID NO: 60645 - protein, 323 aa, Zea mays
  Clone ID: LIB3357-001-C12_FLI.pep
GARATSAPAASIHRSLGSPPVHALERTDGMAASPDHLFGLRNSFYVGAYHAVITSSQSLPAHALSPDDLVERDALMYRSYIAIGSYQLVIGEIGPSAATPLQAVKLLAVYLSGDGGNRESVVSRLRELLSDAAVGSNPILRVMAGTVFMHERDYAEALKHTNSGGSMELLALNVQIYLQMNRTDHAEKQLRVMQQLDEDHTLTQLANAWVDLVLGGSKIQEARLIFQDLSEKYPTTCTILNGKALCSMHMGNFEDAEGLLLESLNKDAKDTETLANLTVCSLNLGKPATRYLNQLKLAHPDHALVKRMSSAAESFDRACQAMA

SEQ ID NO: 60646 - protein, 529 aa, Zea mays; identical to SEQ ID NO: 41166
  Clone ID: LIB3357-003-G1_FLI.pep

SEQ ID NO: 60647 - protein, 240 aa, Zea mays
  Clone ID: LIB3357-008-A10_FLI.pep
LITNCRQVIVLHSIIQILNWNQTKCSTNRAPKTCTGRILISRALKTQNTGTIYLSHEKGGPGSLESGPELPGRRPDLAVHKRELDLGVVELLGVVPLAQLEVDRRCLDDLYAGGPHAVAGGHLVVHLLHCAVQGGVAVLLVHVVVTSPALVAQPDAIVLDGGRVALKDLVDGKHLAIALLHLLELSQEVPRWWPRASCGRSWGAHRLGSAARDPPPGTDGTCGRPFRRARVAGGTPKVSW

SEQ ID NO: 60648 - protein, 192 aa, Zea mays
  Clone ID: LIB3357-009-F4_FLI.pep
YNATMERSSFTASPVLRMGVGQPSAVAADGIAAALLGGLPALLEVLLVVLLGGVEPPRRQDLGDDGVLPLLLLCRQRLARQRLLLCRVVVDARSVLRPDVVALSVESGGVVLGPEDVEEDVVGAGVGVVVHADHLGVARAVAADVAVGGGVAVALRVPHLRARHAWEALVHQLHAPEAARGELGQGQAFARR

SEQ ID NO: 60649 - protein, 393 aa, Zea mays
  Clone ID: LIB3357-009-H9_FLI.pep
TNEAARARSRRSFPTSKPTPLPAAAMATVMQKIKDIEDEMARTQKNKATAHHLGLLKAKLAKLRRELLTPTSKGGGGAGEGFDVTKSGDARVGLVGFPSVGKSTLLNKLTGTFSEVASYEFTTLTCIPGVIMYKGAKIQLLDLPGIIEGAKDGKGRGRQVISTARTCNVILIVLDAIKPITHKRLIEKELEGFGIRLNKTPPNLTFRRKDKGGINFTSTVTNTHLDLDTVKAICSEYRIHNADVSLRYDATADDLIDVIEGSRIYTPCVYVVNKIDQITLEELEILDKLPHYCPVSAHLEWNLDGLLEKVWEYLDLVRIYTKPKGLNPDYEDPVIVSSKKKTVEDFCDRIHKDMVKQFKYALVWGSSVKHKPQRVGKEHELDDEDVVQIIKKI

SEQ ID NO: 60650 - protein, 251 aa, Zea mays
  Clone ID: LIB3357-013-A11_FLI.pep
RRRPLPANTHSTRHLRTGTATATACRSVRAMKLDVPARQQSSQDAEQSGKTVAAAVLGTEAWSHPELPLLLRDANTDDALVPPLNFAMVDDGIFRSGLPDAANFRFLLSLNLRSIVYLCPEPYPEENARFLRTNGIRLHQFAVEGSKSGPTVLDTMSAQEPFVHIPEETIREALKVVLDVRNQPVLIHCKRGKHRTGCVVGCLRKLQKWCLSSVFDEYLHFAAAKARTTDQRFMELFDASSLMHLTAASQY

SEQ ID NO: 60651 - protein, 177 aa, Zea mays
  Clone ID: LIB3357-013-A5_FLI.pep
QAHMTLPTATSMYKHVHSHTTMTPNFFFYSGKTTRQRGVRTCCYATPSSSLHPSWAWAWAWAWAGGVPCRRQSSRPGWRRGCSRTPSARAGPCRGPRPWSGTPAADGRRAPSPPPSPSYCRRRCLHHGAACRCSRRSSSAGAPAGGPRRRRHRRPSPSPRPRSGTARPRPGPRTRTF

SEQ ID NO: 60652 - protein, 153 aa, Zea mays; identical to SEQ ID NO: 44881
  Clone ID: LIB3357-013-H4_FLI.pep

SEQ ID NO: 60653 - protein, 379 aa, Zea mays
  Clone ID: LIB3357-014-C4_FLI.pep
LRDMKRRKCNPRQMDGWMEMTTERKGSLGSGGVSFHLWVVEVDADHGLPEPRADVGQDGGVAVVGDCLDDGAGAARGVAALEDARADEDAVASELHHERGVGGRGDTPRGELHDGEAAQLLGLHDEVVGRGDALGVGEDLVVVHAAERADVAHDGAHVAHGLDDVARAGLPLGADHGGALAHPAERLAEVAAAADEGDAEVVLVDVVRVVGGGQHLALVHVVDAHGLQDLGLHEVPDAGLGHDRDGDGALDVADEARVRHARHAALRADVGGDPLQRHHGARAGLLREPRLLRGHHVHDDPAPEHLRQTHLDGESRRLGLLGRLQQLRAVAAVHRHHAAAVGRHGFGSLVPSLVWNGMEWNGLVSSIRVPLYPLSGRFQ

SEQ ID NO: 60654 - protein, 183 aa, Zea mays
  Clone ID: LIB3357-017-A10_FLI.pep
APCLCPLVTSLPLPAPLRPPRHRPFARQETGPETMADQLTDDQIAEFKEAFSLFDKDGDGCITTKELGTVMRSLGQNPTEAELQDMINEVDADGNGTIDFPEFLNLMARKMKDTDSEEELKEAFRVFDKDQNGFISAAELRHVMTNLGEKLTDEEVDEMIREADVDGDGQINYEEFVKVMMAK

SEQ ID NO: 60655 - protein, 231 aa, Zea mays
  Clone ID: LIB3357-017-D11_FLI.pep
IKLRAIHDKLRPPLRSPPSYSDPKERTQGESTMTEGGRPNRPDQRDLGELSAVSDLDHLGGGAVAGAHLLDGLDDVHALDDLAEDDVLAVEPRGRDGADEELGAVGVGPGVGHGEHTGGGVLAHELLVGELLAVDGLAAGAVAAGEVAALAHELGDDAVEGGALVVERLPGLAHALLARAQRAEVLRGLGHLVGVQLHHDPARRGAADGHVEEDARVRHRDRELGFGDIFP

SEQ ID NO: 60656 - protein, 343 aa, Zea mays
  Clone ID: LIB3357-019-D3_FLI.pep
AHIGNKKASPSPLILSAQLSSAPRRSSPRPFIPDLGMGTATTNGSAEQASAPVPALKFLIYGRTGWIGGLLGGLCAARGIPFAYGAGRLENRAQLEADIDAAAPTHVFNAAGVTGRPNVDWCETHRAETIRANVVGTLTLADICRGRGVLLINYATGCIFEYDAGHPLGSGVGFKEEDTPNFVGSFYSKTKAMVEELLKNYENVCTLRVRMPISSDLSNPRNFITKITRYDKVVNIPNSMTVLDELLPISIEMAKRNLTGIWNFTNPGVVSHNEILEMYRDYIDPGFSWKNFNLEEQAKVIVAPRSNNELDQTKLKREFPELLSIKESLIKYVFEPNCKASKA

SEQ ID NO: 60657 - protein, 103 aa, Zea mays
  Clone ID: LIB3357-019-E11_FLI.pep
SWQQEQPNRTTSMEVGAAAAGKLNAELFQWLAFGRVIPFMEFAKRLAARWPRRHLPLHAEERSQTPARHGGPACPRAPSSRPTCRRRSTVSNNTRKTSEAHQH

SEQ ID NO: 60658 - protein, 273 aa, Zea mays
  Clone ID: LIB3357-022-B11_FLI.pep
CGARKERGAERAKGSAATDMAEQHKEESGVTVLDKISDKLHGRGGGSSSSSDSDDERSSATAAVKAKIYRIFGREKPVHSVLGGGKPADLFLWRNKRISGGVLAGATAFWLLFEVMDYHLLTLLCHCLILTLAILFLWSNATTFINKSPPNIPEVKIPDDLAVNVARSLRYEINRGFATLREIGQGHDLKKFLIVIAGLWILSVLGSCCNFLTLSYIVFMVLYTVPVLYEKHEDKVDAFGEKAMVELKRYYAIFDEKCLSKIPKGPLKDKKQH

SEQ ID NO: 60659 - protein, 172 aa, Zea mays
  Clone ID: LIB3357-024-B7_FLI.pep
PQDFMFLSRCLRWRLGPLAADPPCQLNVLWHDGHTLSMDGAQVGVLKQANKVCLSSLLEGKHRMALETQISFEVLCNFPDEPLEGQLPDQQLSALLILADLTEGNSSRAVAVRLLHSTSGGGRLTGSLGGKLLPGSLPSRGLASSLLGTSHLSRFFGLSARFESGGRRARNG

SEQ ID NO: 60660 - protein, 671 aa, Zea mays
  Clone ID: LIB3357-024-H9_FLI.pep
SLSPPKTSIARAHERPRRGLQLVCPCERAVFLSRTVAPVRGLRRWGGGGGFVGPEIPGQGEMKYVLVTGGVVSGLGKGVTASSIGVVLKACGLRITSIKIDPYLNTDAGTMSPFEHGEVFVLDDGGEVDLDLGNYERFLDIKLTRDNNITTGKIYQSVIDKERKGEYLGKTVQVVPHITNAIQEWIERVAKIPVDGKEGPADVCVIELGGTIGDIESMPFIEALGQFSYRVGPGNFCLVHVSLVPVLNVVGEQKTKPTQHSVRGLRGLGLTPNILACRSTKELEENVKEKLSQFCHVPAANIITLYDVSNIWRIPLLLHEQKAHEAILKVLNLERMDSIAREPKLDEWIARATIFDTLHDTVRIAMVGKYTGLSDSYLSVLKALLHASVDCHRKLVVDWVASMDLEDSTAIEAPDSYKTAWNLLKGAGGILVPGGFGDRGVQGKILAAKYAREKNVPYLGICLGMQIAVVEYARHVMNLTDANSTEFDPNTKTPCVIFMPEGSKTHMGATMRLGSRRTFFKIADCKSSKLYGNVTYVDERHRHRYEVNPDMVPEFENAGLQFVGKDDTGRRMEIIEIPNHRYFVGAQFHPEFKSRPSKPSPLFVGLIAAASGQLDRVLQDRCTGHAVSEKHVLSNGSYTPAIHQNGHPKKLPNGLSNGTYYGNGNGNGVHA

SEQ ID NO: 60661 - protein, 468 aa, Zea mays
  Clone ID: LIB3357-025-A11_FLI.pep
RLPSAPPFRPLSLASSVSPPTMGKEKSHINIVVIGHVDSGKSTTTGHLIYKLGGIDKRVIERFEKEAAEMNKRSFKYAWVLDKLKAERERGITIDIALWKFETTKYYCTVIDAPGHRDFIKNMITGTSQADCAVLIIDSTTGGFEAGISKDGQTREHALLAFTLGVKQMICCCNKMDATTPKYSKARYEEIVKEVSSYLKKVGYNPDKIAFVPISGFEGDNMIERSTNLDWYKGPTLLEALDQITEPKRPSDKPLRLPLQDVYKIGGIGTVPVGRVETGVIKPGMVVTFGPTGLTTEVKSVEMHHEALQEALPGDNVGFNVKNVAVKDLKRGFVASNSKDDPAKEAASFTSQVIIMNHPGQIGNGYAPVLDCHTSHIAVKFAELITKIDRRSGKELEKEPKFLKNGDAGMVKMIPTKPMVVETFSAYPPLGRFAVRDMRQTVAVGVIKSVEKKDPTGAKVTKAAAKKK

SEQ ID NO: 60662 - protein, 230 aa, Zea mays; identical to SEQ ID NO: 50035
  Clone ID: LIB3357-025-C6_FLI.pep

SEQ ID NO: 60663 - protein, 205 aa, Zea mays
  Clone ID: LIB3357-025-G6_FLI.pep
VFPSLKAATASAAPSVHPQCVRRRPFLLRSFAAAMVKYSQEPGNPTKSAKAMGRDLRVHFKNTRETAFALRKLPLTKAKRYLEDVIAHKQAIPFRRYCGGVGRTAQAKSRHSNGQGRWPVKSARFILDLLKNAESNADVKGLDVDNLYVSHIQVNQAQKQRRRTYRAHGRINPYMSSPCHIELILSEKEEPVKKEADNIVAARKQ

SEQ ID NO: 60664 - protein, 273 aa, Zea mays
  Clone ID: LIB3357-027-C2_FLI.pep
GRRLPFGTPSPPSGEMAPKRGGRAPVPAKKKTDKVTNPLFEKRPKQFGIGGALPPKKDLHRFVKWPKVVRIQRQRRILKQRLKVPPALNQFTRTLDKNLATNLFKMLLKYRPEDKAAKKERLLKRAQAENEGKTVESKKPIVVKYGLNHVTYLIEQNKAQLVVIAHDVDPIELVVWLPALCRKMEVPYCIVKGKARLGSIVHKKNASVLCLTTVKNEDKLEFSKILEAIKANFNDKFDEVRKKWGGGIMGSKSQAKTKAREKLLAKEAAQRMT

SEQ ID NO: 60665 - protein, 202 aa, Zea mays
  Clone ID: LIB3357-027-H3_FLI.pep
IYQSSFTHSNLPGRGQSFTGSKLYLSMKACCWRRCSAAKYSFISVELGMACTGGAFTLRWEEWLDLVVDPGVLIISELIKLQGVVSLVFLPMASDSSMFSPYDASASSIAAGAVAATFLPPHLLTDATCGGSFSSLRLLSSRYSPPQPSSCCTCCFSRRCSARARARVRTPSGAAATSMMATSLETFTLRMYLPMARRGWAS

SEQ ID NO: 60666 - protein, 480 aa, Zea mays; identical to SEQ ID NO: 60493
  Clone ID: LIB3357-028-E4_FLI.pep

SEQ ID NO: 60667 - protein, 175 aa, Zea mays
  Clone ID: LIB3357-029-H2_FLI.pep
TARRAPSSATRTRRRRAPARSARPGAASTPSWAASAPPTRRTEAAQSPIPSPRAPYASTSARSASTRPAPAASATRRRSAGSRSSCRARATAAAFTATRTSRRLHRPRAPPAELADRSTALSCALPFGRYDASQIELEHAHIFYVSFRARMHACAWRSVAMQLHAADPSTLPTCC

SEQ ID NO: 60668 - protein, 133 aa, Zea mays
  Clone ID: LIB3357-030-H5_FLI.pep
PVPDYEEAPSLASEAVEGASLALERVDDVHGGHGLAARVLGVGDGVADDVLEKDLEHAAGLLVDEPRDALHATPPSQPPDRRLGDALDVVAEHLPVALRAALAQTLAALAAPRHRRRLSDADQRTGNFSGVGE

SEQ ID NO: 60669 - protein, 134 aa, Zea mays
  Clone ID: LIB3357-032-F10_FLI.pep
SASSRRSASSGSPWAPSLWEVSSSTSAAPSTAQSLKPMGRPTSTSLVKLPVVEVQLNWLMYGTRRWTRLLGNLLCTLALVDGDPSTMSNMATEEARVEEDSFLKPLMCSYFSVSGLSMFCFKRKDAPSDRFISN

SEQ ID NO: 60670 - protein, 278 aa, Zea mays
  Clone ID: LIB3357-033-B9_FLI.pep
LGMDRYQRVEKPRNDTPISQNEIRITTQGRMRNYISYGMSLLEENGHDEISIKAMGRAINKTVMVVELIKRRVGGLHQNTATESVDITDTWEPLEEGLLPLETTRHVSMITVTLSKNPLDTSSPGYQPPIPAEEVKPAFDYDHEESYPTGRGRGRGGGRRGRGRGMSNGPPPPAYGYNEEWEEEGDYYNRGRGRGRLRGRGGRGRGGYYGGGRRGGYGYDYGYAPRGGYYEEQDEYYDEPEEYAPPPGRGRGRGRRGGMPWRGRGGRGPPRGGRGSYY

SEQ ID NO: 60671 - protein, 245 aa, Zea mays
  Clone ID: LIB3357-041-F5_FLI.pep
MGRGRGKVEVRRIENSVSRQVTFSKRRRGLAKKARELAVLCDADVALLVFSDKGRLHDFAAHGSMERILGRYERYLLCEDRDDVTQDYPEESQGNMSYDHIKLRSKLEAIKKSQRNLMGEQLESLTFREVQQLEHRIDSALRNVRSRKDHILLNSIQELRNKETFLMEQNGILEKEKAAVGASSSLHTTTSTAAASSTAAAAAALPNLNICPDDSDEPGMAAAAGIRLPWWMLQPSAVSQRQEQH

SEQ ID NO: 60672 - protein, 287 aa, Zea mays
  Clone ID: LIB3357-045-B12_FLI.pep
LISSPTRCPLPPGKPAAPPPAMTTARLVSTSPARLPSTSASPIPRTSLCVVGRAPAFSARALGFSLRLKPSPAMAAAGPPTAHGDSIGSSRIGEVKRVTKETNVHVKINLDGTGVAECSTGIPFLDHMLDQLASHGLFDVYVKAIGDTHIDDHHSNEDIALAIGTALLEALGDRKGINRFGHFTAPLDEAAVEVILDLSGRPHLSCGLDIPTQRVGTYDTQLVEHFFQSVVNTSGMTLHIRQLAGKNSHHIIEASFKAFARALRQATEYDLRRQGTVPSSKGVLSRS

SEQ ID NO: 60673 - protein, 274 aa, Zea mays
  Clone ID: LIB3357-047-A3_FLI.pep
DRGEKLTGQEYDHRRPQQEESMDFLTLPRRDLQALCKRNGIRANMTSAAMADALRALPKVEGIEEYVKVLQPVSVPQTAAKPVNEEQKQESPLPRGRRVTAQSSEPIEPEEDKENDAKRQSNKEDVQVPGVGRRGASRRARPVPAVPQPLGKAVAEEDGQGEQNLKREAKKDSAPAPVVGRLARPSTVVIARADESEVAGVEEEQSKEVVDDALALGVGRRGASRRARPAPSIAALAGNVVADEEQIVPIPRGRRVKAHGNSSEPIRLDTSYDD

SEQ ID NO: 60674 - protein, 95 aa, Zea mays
  Clone ID: LIB3357-048-G2_FLI.pep
APSSCGRFVKGACLLNRVMLWLVRAARGEDGIPHLMMRQAGRYMAEYQASAKGKLTFGHRVRGAPSCEVLRWDFDLKVQGDAYGVDVRHRDNKTG

SEQ ID NO: 60675 - protein, 549 aa, Zea mays
  Clone ID: LIB3357-049-H1_FLI.pep
RAREPMALDTGTVAAGAIDEAYEFSAPRFFDFITEETEEAVRAAESWFEAARSHAPSPFNPRIKESRAEAKVAVLCDFAEAEEPAPEAVPVEVAAGSVSVHGADAIDGAPCPEAISESPPASHPAQEEKDKSPQSFEFLSATDLSVKSDGGAASTPKMQTRPPSPSTKIAPPISTCDSSSVNTGARTPKTQANMCRAGTMAASTNAKGSVIKGGCDLVGTGKAATAGAEIAQANQAVKRQKLDDGRARQILNVKTKVLPHKRRTDLDVSNEVRRSREDMCSLKEATTYVSTAELVKKFESGTRKLSITHSRSRSRDDAALQGRPKLVLTRPKEPEFQTSQRIRAVKVKSSAEIEEEMLAKIPKFRARPFNKKIAEAPSFPPLPRKPPQISEFSEFHLKTMERASRYADTCSEVSCADTIRSRNKPLKSTQRKPPQLHTANRARPPSVKSSQELELEELEKAPKFRAKPLNKKILESKGDIGVFVHPKSQVTAPKEFRFCTDVRLGPPSVADLFDKLSLHSECLQTVTGKVCLDAPYQTLSVYKQRKEVN

SEQ ID NO: 60676 - protein, 401 aa, Zea mays
  Clone ID: LIB3357-050-B11_FLI.pep
GALSRSTESTGRGKMLAGAPTGDAGPSSGAGSNPPTRPRRFPGAAQPEIMRAAEKDDSYAAHVTEACRDAFRHLFGTRVAVAYQNEIKLLGQSLYYLLTTGSGQQTLGEEYCDISQVATLHGLPPTPARRILFILYQTTVPYLAERISSRIVARSIVLNESQFDDHPESDNSSSDIAQSTTNSDIPSRSLSVSALSGFRGRVHALWQWVLQKWPSMLPYAQDFIQLAIRTNLMFFYFEGLYYHLPKRAAGIRYVFIGKPMNQRPRYQILGIFLLIQLCILGAERLRRSNISSIASSINQISSGGYPSTTGRGIPVLNEDGNIISDIRSGKAADIASHSETSNGKSKCTLCLSIRQNPTATTCGHVFCWNCIMEWCNEKPECPLCRTPITHSSLICIYHSDF

SEQ ID NO: 60677 - protein, 307 aa, Zea mays
  Clone ID: LIB3357-051-E6_FLI.pep
DEVGITGCDGGKKLEKDGVGIRVFVLGKGMGGLCSKVSAVDKSPSDTALGRNQVADHEPGASLELEKPPVSRESAAPAKRLDEQLQSFSFLESVVPGVAFHAGANTGGEAGSRTSPQLTRSLSQRAGVGKAKAGAAKVSEVSSILGRASTAGLEKAVEVLDTLGSSMTSLNSSSGFVSSSAAKGNKISMLAFEVANTIVKGSNLMRSLSEPSIKHLKEVVLHSEGVENLISKDFDELLKMASADKREELEVFTREVVRFGNRCKDPQWHNLDRYFEKLASERTPQSYLKEKAESVMQKLVTCVQNTV

SEQ ID NO: 60678 - protein, 254 aa, Zea mays
  Clone ID: LIB3357-052-A10_FLI.pep
CRVFRRCTGNNLEPSPGMIKQAPSENHMARQPWSNNGHRNSPSNSSDGGVPGPMPLVPFQEELAVGCEEIRRIAADNTLVLEDILGLRQELAVIEDEIHILAKQTIPRLRVDNEMEYRDIIQGGMKLEEQMHALKLIKEEVLVLSSEKMELEALCKELSVKVQSLYRELEQIQSENKQIPAIREGLHDIQEEISRARMAYEHEKRAKVELLEESQAIESDFINIKMEAQRLRTELEKRRSGVFKHHAFGSYYKR

SEQ ID NO: 60679 - protein, 233 aa, Zea mays
  Clone ID: LIB3357-052-F12_FLI.pep
QLQTPPPIPPPQLFVPGGPSPPPEMSYAYLFKYIIIGDTGVGKSCLLLQFTDKRFQPVHDLTIGVEFGARMITIDNKPIKLQIWDTAGQESFRSITRSYYRGAAGALLVYDITRRETFNHLASWLEDARQHANANMTIMLVGNKCDLSHRRAVSYEEGEQFAKEHGLIFMEASAKTAQNVEEAFVKTAGAIYKKIQDGVFDVSNESYGIKVGYVVPGQSGGAGSSSQGGGCCS

SEQ ID NO: 60680 - protein, 310 aa, Zea mays
  Clone ID: LIB3357-055-B8_FLI.pep
KISSRHSLLLLSHAPSSSLRRAAAATSEPCSTRPSHGALLPQRRELGSLPPRALASLPWSALCSGARHPCSRRPSSSLAPTAASSQQGARPAPMAPFLLGSMVWPSSSLFSLFPMRAQGQKLHGRRAPFPQGAAPSMAPFLPADALIPPCAAPLFFYLLPAPRNSSSEQRTSCCPWRAANVELSSTSPHGCELPSLAARLPLPWKPAASSPLPNRCPFFSTSGSKLRTPFLHGRELFLAATVSQGQRAAASPWPWSATRSRALHVRCFAQQLRCLRAARCFVLRSEQHAVMPVGGLLFLRSPVVVVVHPR

SEQ ID NO: 60681 - protein, 296 aa, Zea mays
  Clone ID: LIB3357-058-B3_FLI.pep
PGPVNATIPVHCAAPAAALAVASPFRSRSHSQGVVLAGGSGAPSQDEEGGGEDTRMASRTASKDIIALRGSAAIVSEFFGYAANSILYNRAVYPGESFAKVKKYGLTMPLTQDEWVNFITSATSKNSEWLGAGKLQGIVMVIMSKATSEVIERWNFNIDTYPEVVEKGSIKEKSDKKIMREIRAIKRQIDSCITDLPCLDEPCVFDMLAYTDTDVDAPDTWIESDTKLIHNTQMVKLHSFDTKVHKVDTVVSYKKNEDDTSSSSSSVIREARIELLEAELGRFVMLANESAEEMYT

SEQ ID NO: 60682 - protein, 72 aa, Zea mays
  Clone ID: LIB3357-059-A4_FLI.pep
SAFIHAKKNSRLDKIEPKVRSSDTTIRTGLHESIKEEGNCLRTVAWFFNIVYFQNIDFQNKVVSYMTTRLAT

SEQ ID NO: 60683 - protein, 388 aa, Zea mays
  Clone ID: LIB3357-060-E1_FLI.pep
LTHYILPGKRSKRPDLPVFELERQLREHGLLGDHAPRAAHELEPLSLRVAAVVRAQAAARVGHDAPAVRAHVQAEQAVADAPGRRRGVDGDVQLGVRHEAPPCHGVAAAHGEARGPAGALGAEAQQRSVPQRQSLLLRAVLPRLRLVAGAQAQLKGLRQRRRRRPAHHAHPGHRVEQHGVRRRLREAGPPERALEGLDPAQRGVVARPAPGPVEDAVDLVEPQDALAEVVAPLQRPERPVQVQVGRGGGGAAVVAVVVGVDAAVVDPELAEDDGPAPVGVGGVGDQERGPREPDAVEPHGGHVRGDGADGPLAQPLRQHRLQVRRPVHARQLHPAPALVQHPPRRRRQRGRRAPVVVATRQRQGQKKQGQARGVGERRTRTPHGDGRQ

SEQ ID NO: 60684 - protein, 303 aa, Zea mays
  Clone ID: LIB3357-062-E6_FLI.pep
GSERGAKRKAAGASAMASEEVLHKVQNLIERCLQMYMNKKEVVDALSHHSRIEPCITELVWQQLEQQNPLFFKAYDMRLMLKNQIMVFNRLLQDQFEIMNKEFSSGIPSMSLPNDSNSNLLKQDSCFLPETAPGNAMPDGIMHNGSSSGIINDTPSGDQLLNASKDLHGLHSQIDASTSLQSDQNATAVLYGVDNETSATIKTESCYSSNADFAFCGNTFLESCQSIGDASGGGSFSSSELNGQPLNDSILDMESSSFSFLNQMPQSFMFSDLADDFNQNAEITPFLTPETNFSDSTGGDHTG

SEQ ID NO: 60685 - protein, 204 aa, Zea mays
  Clone ID: LIB3357-063-A5_FLI.pep
ARSSTPAMPETAAPIGLSWAPKLPSFATTSGGSKSDHAPNPSAAQGSLWNRASDLVDGLFVAPRDPRQLNKLARKNVKDTAGKGWFDMPAPTITPELKKDLEILQLRHVIDPKRHFKRAGKSKALPKYFQVGTVVEPASEFYSSRLKNRERKATLVDELLSDQSLKSYRMRKVREIQEIRTPGGNQKWKNKGKKTLKRAKDRRK

SEQ ID NO: 60686 - protein, 438 aa, Zea mays
  Clone ID: LIB3357-063-C9_FLI.pep
DSKVGRRGGRVLVGFIPGRRLHMSTTPRSRSQGSRTTRPWILSGMDFAGSRRKPNLTGKIAVAAALTVMCIIVLKQSPSFSGTSVFSRHETGVTHVLVTGGAGYIGSHATLRLLSDKYRVTIVDNLSRGNIGAVRVLQRLFPEPGRLQFIYADLGDAKAVNKIFSENAFDAVMHFAAVAYVGESTMEPLRYYHNITSNTLTVLEAMAAHNVNTLIYSSTCATYGEPDTMPIVETTPQNPINPYGKAKKMAEDIILDFTKSKKQSNMAVMILRYFNVIGSDPEGRLGEAPRPELREHGRISGACFDAALGIIPGLKVRGTDYSTADGTCVRDYIDVTDLVDAHVKALGKAQPGKVGIYNVGTGQGRSVTEFVEACKKATGASIKVEYLARRPGDYAEVYSDPSKIHMELNWTAQYTDLGQSLAQAWKWQKAHPNGYGPA

SEQ ID NO: 60687 - protein, 456 aa, Zea mays
  Clone ID: LIB3357-066-B5_FLI.pep
PHATPMGCAQGKCCLPRHPRRGSAAVGGRGGATLGRAAVPGAGLVLEYAALAVAGLYPDSPARESQDTHLVATRFAGDPDLHLFAVFDGHGAAGASCAGFARDALPRLLLASLAAGPAAAFRDAMLAANAEMHAAPGVDDSMSGTTAVAALVAGGALHVANVGDSRAVAGVWRAGRLVAEDLSWDQTPFRADERARVKACGARVMSVEQVEGMRDPEDVGWTPNEGDPPRVWARDALYPGTAFTRSLGDLAAEAVGVIAEPEVKSVEITPSHLFFVVASDGVFEFLSSQEVVDRVAMYQDPRDACSAIAAESYKLWLEHENRTDDITIIIVHIRDMENAGSDKADYGSIGASIAGQTIQSEIPVFVQPEASNMNRSAATGMRSPSFGSPTERSLSCVAPSPTDPLLIHGRVSDASKPGQSEQRAASQPPVQTWHQIDGVTTELERSMQQSILPTSC

SEQ ID NO: 60688 - protein, 213 aa, Zea mays
  Clone ID: LIB3587-198-A4_FLI.pep
WIMDGWMDACRVEEDPAPHRRQVQEPGVQGPVRPGRAGAGLHRAVAADGGAELRRPQRRHGLQPRLPAARHAARRQGRRRPPGGDGDDEPGAPAEGGGDAAAVREEPQAAGQAAGHLRAAPWRGGLPGRRQVHARRPVPPAQRRPPRRRPAVRAPHRVAQERQQVVGHRLPPRLLGQGQGVAAPAVRGGALLISIDRKLRRWPLLKPTCSVSA

SEQ ID NO: 60689 - protein, 486 aa, Zea mays; identical to SEQ ID NO: 58612
  Clone ID: LIB3587-198-C2_FLI.pep

SEQ ID NO: 60690 - protein, 149 aa, Zea mays
  Clone ID: LIB3587-198-H7_FLI.pep
EIPWSLLLAGTEESNMKQRNRSKEKTGSSRQQRGRRTDMLELRCVPTTCLCQQAKPRLLLAYLLAEALARGALRLALAAGEVLGLAHVGAVVAAHAQALEPVALRQAVPRLRHLGRPQLCGDEEEQEDEDGSRHASRQRHHPPWQLAPA

SEQ ID NO: 60691 - protein, 413 aa, Zea mays; identical to SEQ ID NO: 56774
  Clone ID: LIB3587-201-H11_FLI.pep

SEQ ID NO: 60692 - protein, 384 aa, Zea mays
  Clone ID: LIB3587-203-F11_FLI.pep
DSLLESEGSDRPLREALPARSLRPRPPPPPAPASEAPPAEHAAVDALIDDAWWLGVALARAGAPSKVRVCFPETREVMEFDAADVRPHLEWVDGEWRSPDNMEIPKTMPYAKGMQIEVSKLEDNSVVAWSPAVVAKTIWKNNLLVDYTLSKCYGTTLSEEIVDVKHVRPCPPQASEISFCINDEVEAFQGDCWWLGVITNVLPEFKYTFKSTHLGTEVEVNQKFLRLRYDWVGDQWEQESKNVPKAKFTQGVKVEVCSDDEGFRGAWFEATVVKAVGSKFLVEYATLKADDGTKPLKESVEARHIRPCPPDIPATDGFKLLDEVDAFCNDAWWVGVVSKVLGEKRCTVYFRPWKEEMEFEHAQLRLHCDWMGGRWMRASPALEM

SEQ ID NO: 60693 - protein, 255 aa, Zea mays
  Clone ID: LIB3587-204-F7_FLI.pep
SLHNIANMQIILELTRCRGRNSRGGLHKCAPCTAMPNNKIVAANMEEKGAGGKAAVPHDELPRFTIFLIPNRREPPLDLVELVCLHHRISLGNGVPGSSPVVELAVVLVGVAVECAVQVPTPAVESRKSNPLPAGAAPVRPYLPPFGDRRHPLAGSGNISGLLHVHCLQLNLGNSYYRVAASNNRLHDGVAAVHDAVDRGGSQLGLILLRYHLLVALGAHVHGRRAAEEATVIDAEDGSLGGLAPSLLVLHGFLG

SEQ ID NO: 60694 - protein, 282 aa, Zea mays
  Clone ID: LIB3587-206-G6_FLI.pep
VADKEIAPLVSFKRLDSLRYTSALSVALAVVFVVITAGIAIIKLFNGTVAMPKLFPELDGLNSIWNLFTAVPVLVTAYICHYNVHSIDNELEDRTQIKPIVRTSLFLCSSVYIATSFFAYLLFGEGTLDDVLANFDANLGIPFSSVFDDIVRVSYAAHVMLVFPIVFFALRLNLDGLLFPTSRHISRDNKRFAIITVSLLAVIYLAAILIPSIWDAFQFTGATAAVLIGFIFPAMVILRDSYGIASKRDKILAVTMIVLAVVSNSVALYSDAMNIFRKKEVA

SEQ ID NO: 60695 - protein, 221 aa, Zea mays
  Clone ID: LIB3587-212-H5_FLI.pep
ASGRNPIHPSQAKAEKKKRRKKKHRQHVGGDCQLRGHPDRHHPASAGGVPQVRVRPRVLDLPPPHLPRLHPRHHLRRSNMGKTRGMGAGRKLKTHRRNQRWADKAYKKSHLGNEWKKPFAGSSHAKGIVLEKIGIEAKQPNSAIRKCARVQLVKNGKKIAAFVPNDGCLNYIEENDEVLIAGFGRKGHAVGDIPGVRFKVVKVSGVSLLALFKEKKEKPRS

SEQ ID NO: 60696 - protein, 295 aa, Zea mays
  Clone ID: LIB3587-215-A9_FLI.pep
KLRVASLIRLSSHRNNNVTRRRMYTWTDGRGGPGDTYVLTFARATRETKRPGSIASADGARVWVLLHAHVAHVVVLRGRRGRRRVRVVRHGRRRRGAVVVLAHVVVGDHVHVLRRQLVQRRERQNRGHRGGGLLLLCAAAAAVLLVVLLAIAILLLALAVLLLAVAVLLLALAVFLAVATAAAVLLPVPFLLLALATAAVLLLAAAVLLLLLLLGLLGRPDGVDVRRPRLAAQLAHHLHRVHRPDHRHLVRRHVHRHGVDADEHGDGLQRLLLVLVVVQVQLHHDFLRHVSTRRG

SEQ ID NO: 60697 - protein, 282 aa, Zea mays; identical to SEQ ID NO: 48444
  Clone ID: LIB3587-220-G1_FLI.pep

SEQ ID NO: 60698 - protein, 392 aa, Zea mays
  Clone ID: LIB3587-221-H11_FLI.pep
TLHLVLRLRGGMQIFVKTLTGKTITLEVESSDTIDNVKAKIQDKEGIPPDQQRLIFAGKQLEDGRTLADYNIQKESTLHLVLRLRGGMQIFVKTLTGKTITLEVESSDTIDNVKAKIQDKEGIPPDQQRLIFAGKQLEDGRTLADYNIQKESTLHLVLRLRGGMQIFVKTLTGKTITLEVESSDTIDNVKAKIQDKEGIPPDQQRLIFAGKQLEDGRTLADYNIQKESTLHLVLRLRGGMQIFVKTLTGKTITLEVESSDTIDNVKAKIQDKEGIPPDQQRLIFAGKQLEDGRTLADYNIQKESTLHLVLRLRGGMQIFVKTLTGKTITLEVESSDTIDNVKAKIQDKEGIPPDQQRLIFAGKQLEDGRTLADYNIQKESTLHLVLRLRGGQ

SEQ ID NO: 60699 - protein, 170 aa, Zea mays
  Clone ID: LIB3587-222-A10_FLI.pep
SRVLKECLGVSSMRLGVPFIAPRQLGAVENKSGRPSLPSVVGRTGHCPVPDFFPEQAQPTVADRCRSGAPDSPVHTGQSGAPSRPLARPRVARRFRGRPLAHRTVRCTPDCPVNFSRTPSANSRERRLRVEAAWRTGHCPVHHRTVRCPRPKHPVGCTQPTFSFSSSLCF

SEQ ID NO: 60700 - protein, 166 aa, Zea mays
  Clone ID: LIB3587-226-A12_FLI.pep
TLAAARCSLSADLPSQPPRNPFTARKMAEQEAPVVVEAPTPVLGEPMDLMTALQLVMKKSSAHDGLVKGLREAAKAIEKHAAQLCVLAEDCDQPDYVKLVKALCAEHNVHLVTVPAAKTLGEWAGLCKIDSEGKARKVVGCSCVVVKDYGEESEGLNIVQEYVKSH

SEQ ID NO: 60701 - protein, 210 aa, Zea mays
  Clone ID: LIB3587-226-H2_FLI.pep
PLIGSRTPKTPYKTHTALLRIKPPLGKPQKSVRKRRESWGMDTHVGKLIDSVGSIFRGSDVLPWCDPDIIAGFESEVAEAANEEQKTESLMRLSWALVHSRQPEDVNRGIGMLEASLDRSSSPEETREKLYLLAVGRYRTGDYTRSRQLLERCLEIQHDWRQAITLQRLVEEKTKRDGMIGMAIITGAFGVVGLVAGGIIAAAASSSRKR

SEQ ID NO: 60702 - protein, 505 aa, Zea mays
  Clone ID: LIB3587-227-C1_FLI.pep
KIQDKEGIPPDQQRLIFAGKQLEDGRTLADYNIQKESTLHLVLRLRGGMQIFVKTLTGKTITLEVESSDTIDNVKAKIQDKEGIPPDQQRLIFAGKQLEDGRTLADYNIQKESTLHLVLRLRGGMQIFVKTLTGKTITLEVESSDTIDNVKAKIQDKEGIPPDQQRLIFAGKQLEDGRTLADYNIQKESTLHLVLRLRGGMQIFVKTLTGKTITLEVESSDTIDNVKAKIQDKEGIPPDQQRLIFAGKQLEDGRTLADYNIQKESTLHLVLRLRGGMQIFVKTLTGKTITLEVESSDTIDNVKAKIQDKEGIPPDQQRLIFAGKQLEDGRTLADYNIQKESTLHLVLRLRGGMQIFVKTLTGKTITLEVESSDTIDNVKAKIQDKEGIPPDQQRLIFAGKQLEDGRTLADYNIQKESTLHLVLRLRGGMQIFVKTLTGKTITLEVESSDTIDNVKAKIQDKEGIPPDQQRLIFAGKQLEDGRTLADYNIQKESTLHLVLRLRGGQ

SEQ ID NO: 60703 - protein, 334 aa, Zea mays
  Clone ID: LIB3587-227-H10_FLI.pep
LYMFTNTQAIPFCKRGQGFTQTAAAKQQINHPRLAHPFGRRHEIVGVVTDVGSGVTSFKPGDTVGVGYFVDSCRSCDSCSKGYESYCPQLVETSNGVSLDDDDGGATTKGGFSDALVVHQRYVVRVPASLPPAGAAPLLCAGVTVFSPMVQYGLNAPGKHLGVVGLGGLGHLAVRFGKAFGMKVTVISTSLGKRDEALGRLGADAFLVSRDPEQMRAAAGTLDGVIDTVSADHPVVPLLDLLKPMGQMVVVGLPTKPLQVPAFSLVAGGKRVAGSAGGGVGECQAMLDFAGEHGITADVEVVGMDYVNTAIQRLERNDVRYRFVVDVAGSKIGG

SEQ ID NO: 60704 - protein, 217 aa, Zea mays
  Clone ID: LIB3587-228-B7_FLI.pep
LLKAKLCYKQARSVSIWQIIERSSFLPEGNSVRLFRDLRHALLLLLHLLEQSLQLSLRQALQPFLHDLLLVVPELVRVGHVLVGHPEHVGGDPPHRHPEHHQQLHDVAGLQGVNSQELEPVLEADAEGGDAEADQQHVFPRVPERRLLLFRGLGVIRAALRGAAPCRQAPPLPGGLEEWKGCREATLAERTAPAGASAAAARETEATGAATGAGAIA

SEQ ID NO: 60705 - protein, 120 aa, Zea mays
  Clone ID: LIB3587-228-E2_FLI.pep
LCCLCIAGLSFFTALGFLIYGGRLFIMLKYFPIESKGRQQKLREVGRVATICFCCFSARCIMMCFNAFDEEADLDVLDHPVLNLFYYLLVEILPSSLVLYILRRIPAKLRLSQYHPVSSS

SEQ ID NO: 60706 - protein, 316 aa, Zea mays
  Clone ID: LIB3587-229-H7_FLI.pep
RDPMGEASPSIAKDVTEVTDGCVGRVAAKLESMEPCSSVKDRIGYSMITDAEEKGLITPGVSVLIEPTSGNTGIGLAFMAAAKGYKLTLTMPASMSMERRIILKAFGAELVLTDPLLGMKGAVKKAEEIQAKTPNSYILQQFENPANPKIHYETTGPEIWKATAGKIAGLVSGIGTGGTITGTGRYLREQNPNVKLYGVEPVESAVLNGGKPGPHKIQGIGAGFIPGVLDVDLLDETLQVSSDEAIETAKALALKEGLLVGISSGAAAAAAVRLAKRPENAGKLFVVVFPSFGERYLSSVLFQSIKKEAESMVVEP

SEQ ID NO: 60707 - protein, 464 aa, Zea mays
  Clone ID: LIB3587-231-C1_FLI.pep
APPFRPLSLASSISPPTMGKEKSHINIVVIGHVDSGKSTTTGHLIYKLGGIDKRVIERFEKEAAEMNKRSFKYAWVLDKLKAERERGITIDIALWKFETTKYYCTVIDAPGHRDFIKNMITGTSQADCAVLIIDSTTGGFEAGISKDGQTREHALLAFTLGVKQMICCCNKMDATTPKYSKARYEEIVKEVSSYLKKVGYNPDKIAFVPISGFEGDNMIERSTNLDWYKGPTLLEALDQITEPKRPSDKPLRLPLQDVYKIGGIGTVPVGRVETGVIKPGMVVTFGPTGLTTEVKSVEMHHEALQEALPGDNVGFNVKNVAVKDLKRGFVASNSKDDPAKEAASFTSQVIIMNHPGQIGNGYAPVLDCHTSHIAVKFAELITKIDRRSGKELEKEPKFLKNGDAGMVKMIPTKPMVVETFSAYPPLGRFAVRDMRQTVAVGVIKSVEKKDPTGAKVTKAAAKKK

SEQ ID NO: 60708 - protein, 304 aa, Zea mays
  Clone ID: LIB3587-232-D4_FLI.pep
VARHCSTAKPRSSRVAPEGAEGLDGASPEDVLVVEGRDGSAHERAHPEDPVVVPGLVLVVDDGGAQAPGRVDAGAGDGDGGQVHHEHGEADGEGSQNRDVGVAGVALGVGGGEDGVDEHEGADDLGAEAGAAGVAGGERVGAAAVPVEVGALERLDEADAADGAEALRHDVEQRAHQGDLARQEEAEGDGGVDVAPRDAGGAVDEDEDHAAEGPGDAQHPHAAARRVGTRRRRVRLVLVPDHGGHRDVQEQQRGDELGDHGAVQRPGPQLSRVDQRRRGRVRVVLGSELAAASAALDHVVLAHR

SEQ ID NO: 60709 - protein, 447 aa, Zea mays
  Clone ID: LIB3587-232-E2_FLI.pep
GRDLLASPSPRVDRSSPREEGKKLPARARKREEMATSNGSGVAQGEEGKTPPPAGSIGGYESLHRLLEANLSPDLFQEASRLLLGLNCARPLEAISLPDATTTLAETHSFDLQAFRFSADKEFLRQSRVVRVGLIQNSIAVPTTCHFADQKKAIMDKIKPLIDAAGASGVNIMCLQEAWTMPFAFCTREKRWCEFAEPVDGESTQFLQELAQKYNMVIVSPILERDINHGETIWNTAVVIGNNGNIIGIHRKNHIPRVGDFNESTYYMEGNTGHPVFETAYGKIGVNICYGRHHPLNWLAFGLNGAEIVFNPSATVGELSEPMWPIEARNAAIANSYFVGSINRVGTEVFPNPFTSGDGKPQHADFGHFYGSSHFSAPDASCTPSLSRYRDGLIISDMDLNLCRQIKDKWAFRMTARYEMYASLLSEYLKPDFKPQVIVDPLINKKA

SEQ ID NO: 60710 - protein, 481 aa, Zea mays
  Clone ID: LIB3587-267-C11_FLI.pep
IHYCRAPLPSLSLRRSVSRRQNPRSLSLLNPLNKCGRMSEPSKVIHIRNVGHEIAESDLLQLLQPFGMVSKIVMLRAKNQALLQMEDLHASVSALQYYTSVQPSIRGRNVYMQFSSHQELTTDQSSHGRNSDQGSEPNRILLVTIHHMIYPITVEILHQVFKAYGFVEKIVTFQKSAGFQALIQYHSRQEAVEAFGSLHGRNIYDGCCQLDIQYSNLSELQVHYNNDRSRDFTNPSLPTEQRPRASQQGYLDPANLYAFQQAGASYAQMGRVAMIAAAFGGTLPHGVTGTNERCTLIVSNLNTDKIDEDKLFNLFSLYGNIVRIKILRNKPDHALVEMADGLQAELAVHYLKGSILFGKKLEVNYSKYPNITPAPDAHDYLNSSINRFNSNVVKNYRHCCSPTKMIHISALPQDISEEAILNHVSEHGTVLNTKLFEVNGKRQALILFKSEEEATEALVSKHASTLEGNTIRISFSQMQSI

SEQ ID NO: 60711 - protein, 365 aa, Zea mays
  Clone ID: LIB3587-268-A7_FLI.pep
WRGGWCFDLCSLLADLVARSSAEGSESESESEKMMGGFLSRVLLLAFGYAYPAYECYKTVELNKPEIAQLIFWCQYWILVALLTVLERFGDFTISWLPFYSEAKLMFFVYLWYPKTKGTTYVYGTFFKPYISQHENEIDRNLLELRARATDTVVLYFQKAALAGQSTFFDVLKYVVAQSPSQKSRQRLHQESQQPPQQQQPQVQVQQAQPQKQAAPVMRRASSIAARQAAMAQQSQETKPVSSSPKIKRQTSARSGSVASTKPPVAASALKPGGSPKKGEVKPAADPVQTPTTGADSPKPEPSVPSLPGAEGVDKMAIDEASGDAPEGAEELDPALEEETPMEETIRVTRAKLRRRTTTEDPAGN

SEQ ID NO: 60712 - protein, 372 aa, Zea mays
  Clone ID: LIB3587-269-D7_FLI.pep
TARNQIRPPPDISPRRGISSNAPLTAPMGSLPVPASTECTPQGRATVSASDLAPLFSAQRRHLDHFFDRLDMSQAAAFAQVLLDAPGAVFFTGVGKSGIVARKTAQTLASLGFARAGFLAPVDALHGDIGALFPGDVLVLLSKSGASDELLALVPCARAKGGYLVSVTSAASGADCPLAAACDLNVHLPLQGEVCPFGLAPVTSTAIQMVFGDTVIAAIMEARRLSRDQYASNHPAGKIGKTLIFKVKDVMKKQNELPLCKEGDMIMDQLTELTSKGCGCLLVVDEEHHLIGTFTDGDLRRTLKASGPAIFSLTVGEMCNRNPRTITADAMAVEAMEKMESPPSPVQFLPVVNDNNVVCGIITLHGLVSAGL

SEQ ID NO: 60713 - protein, 127 aa, Zea mays
  Clone ID: LIB3587-270-A3_FLI.pep
VFVSPCLLSHLGGTVTLQAQKDYPPDMQCKDKFLIQSTKVAASTDMDEIPPDTFNKEADKVIEEMKLKVVYTLPSCGGSDDSSVSSLGSRSFKAASDDLMMLKNASLEEVIRSMPTILTIFFTLGLH

SEQ ID NO: 60714 - protein, 406 aa, Zea mays
  Clone ID: LIB3587-271-H8_FLI.pep
RACKRCALLAWCQSPEQGRKMTTLPRGGAAAADSEQLLVEAHGSTRTLILNRPKQLNALSSEMIKGLLWYFTAFEKDDGVRLLIMKGNRRVFCSGGDIAQCARCLYNGNWKWVDDFFQNEYLLNYIIATYIKPQVSILSGIVMGGGAGVSIHGRFRVATDNTIFAMPETALGLFPDVGASYFLSRLPGFYGEYVGLTGARLDGAEMLACGLATHFVPSKRLPLLEESLKKLDTSSTFAVSGIIDQFSQRPLVKDSSSLNRMETINKCFSKRTVEEIIDALEQEISNVSDKWVAATIKSLKKASPTSLKISLRSIREGRTQTLGECLRREYRVVCHVLRGTFSRDLSEGFRAVLLEKDNKPEWIPPRLEQVPDEAVEQYFLRIDDPQWEDLNLPARLPHRRNIESKI

SEQ ID NO: 60715 - protein, 287 aa, Zea mays; identical to SEQ ID NO: 58142
  Clone ID: LIB3587-272-C7_FLI.pep

SEQ ID NO: 60716 - protein, 477 aa, Zea mays
  Clone ID: LIB3587-273-H6_FLI.pep
SGSTVGEFDGHSKRVLSCDFKPTRPFRIVTCGEDFLANFYEGPPFKFKHSIRDHSNFVNCIRYAPDGSKFITVSSDKKGLIYDGKTGEKIGELSTEGNHTGSIYAVSWSPDSKQVLTVSADKSAKVWDIMEDASGKLNRTLSCPGIGGVDDMLVGCLWQNDHLVTVSLGGTFNVFSASNPDQEPVTFAGHLKTVSSLVFFPQSSPRTILSTSYDGVIMRWIQGVGFGGRLVRRNNTQIKCFAAVEEELVTSGYDNKVFRIPLNGNQCGDAESVDIGGQPNALNLAIQKPEFALITTDSGIVLLHNSKVISTTKVNYAITSSSVSPDGTEAVVGAQDGKLRIYSISGDTLTEEALLEKHRGAITSIHYSPDVSMFASADTNREAVVWDRASREVKLKNMLYHTARINSLAWSPDSRLVATGSLDTCAIVYEIDKPVASRVTIKGAHLGGVHGLTFLDNDILVTAGEDACIRVWKVVQQ

SEQ ID NO: 60717 - protein, 193 aa, Zea mays; identical to SEQ ID NO: 48053
  Clone ID: LIB3587-275-A8_FLI.pep

SEQ ID NO: 60718 - protein, 370 aa, Zea mays
  Clone ID: LIB3587-276-A2_FLI.pep
LRGSDRMELAGTWRKVMPYMAMVFLQFGFAGMFLISVASLRQGMSHYVLVVYRNVVAAIVMAPFALWFERKTRPKMSLPVFIKILALGLLEPVLDQNFIYMGVNSTSASFSSALTNILPALTFVNAIILRMERIVIKERRSQAKIAGTAITVCGALLMILFKGPIINFPWSKHASHAVSDSGVHNSGHWLMGTFMILLSCFCWSAFFILQSYTLRSYPSELSLTTLICAMGATESGAVALVMERDTKAWSIGFDMRLFTAIYSGIMCSGVAYYVQGIVIKDRGPVFVTAFSPLCMILVTVLGSFILSEVVTLGRLIGATVIVVGLYALIWGKNKDHVKSQNSFDKHDTFELPFSTSAVNNTTGPVLATSI

SEQ ID NO: 60719 - protein, 288 aa, Zea mays
  Clone ID: LIB3587-277-F2_FLI.pep
SLHNIANMQIILELTRCRGRNSRGGLHKCAPCTAMPNNKIVAANMEEKGAGGKAAVPHDELPRFTIFLIPNRKEPPLDLVELVCLHHRISLGNGVPGSSPVVELAVVLVGVAVECAVQVPTPAVESRKSNPLPAGAAPVRPYLPPFGDRRHPLAGSGNISGLLHVHCLQLNLGNSYYRVAASNNRLHDGVAAVHDAVDRGGSQLGLILLRYHLLVALGAHVHGRRAAEEATVIDAEDGSLGGLAPSLLVLHGFLNSDETALFAIPLRRSPRGRRGGEGRGIAGNSVGF

SEQ ID NO: 60720 - protein, 333 aa, Zea mays
  Clone ID: LIB3587-278-C11_FLI.pep
HRLGVWTVNVNPTHASSPPVQVPHRPLVAFPSRRAMDFCSHLRLAAVLALLTGCASAASRGAGSFDPSRVVQLSWRPRAFLHKGFLLDAECDHLIALAKDKLEKSMVADNKSGKSVQSEVRTSSGMFLEKKQDEVVTRIEERISAWTFLPPENGEAIQILHYQNGEKYEPHYDYFHDKNNQALGGHRIATVLMYLSNVEKGGETIFPNAEGKLLQPKDDTWSDCARNGYAVKPVKGDALLFFSLHPDSTTDSDSLHGSCPVIEGQKWSATKWIHVRSFDLTVKQPGPSDGCEDDNVLCPQWAAVGECAKNPNYMVGTKEAPGFCRKSCKVCAE

SEQ ID NO: 60721 - protein, 67 aa, Zea mays
  Clone ID: LIB3587-278-F1_FLI.pep
TFSYAFASNKTWLSTCSIPMTSWWRSLDTPSFCQIYVLINKQHHSCHYKPVKFNRKCEQLDYATYCS

SEQ ID NO: 60722 - protein, 320 aa, Zea mays
  Clone ID: LIB3587-278-F9_FLI.pep
FYGGYAYHGNSFEQTYRCYPASFFDKPHLEGGDKVIMPPSALDRLASLHIEYPMLFELHNDATQRISHCGVLEFVAEEGMIIMPYWMMQNMLLQEGDTVHVKNATLPKGTYVKLQPHTTDFLDISNPKAILEKTLRNFSCLTTGDSIMVAYNNKQYYIDIVETKPASAVSIIETDCEVDFAPPLDYKEPEKLRQPTVLASKAPAEDGNTAAEDEPKFKPFTGFGKRLDGKASKLQASEVPSTALSAPSDSNKRANQQISAPAASGASSYSRQKTGKLVFGSSASNNKEPQKAPAKEEQPAKKDDEPRFQAFSGKSYSLKR

SEQ ID NO: 60723 - protein, 267 aa, Zea mays
  Clone ID: LIB3587-279-A1_FLI.pep
ADQMAGLFTEQAAVYAAARPAYPKDLFAKLSALTAHHRRAWDVGTGNGQAAIGVAEHYDSVVATDVSAEQLRHATPHPKVRYLHTRDATPGEEDLVAMLGGGEASVDLITVAQAVHWFDLPAFYGAARRVLRRPGGVIAVWGYNYRVSPVEDMMARFFSTTLPYWDPRARYCTDGYRDLPFPFEDIGLGKEGEPASLDVEHEMSFEGLIGMLRSWSAVTTAKQQGVDLLGARVVKELEEGWGGAELVRKVTYKAFLLAGTPGPMADE

SEQ ID NO: 60724 - protein, 288 aa, Zea mays
  Clone ID: LIB3587-280-H10_FLI.pep
SLHNIANMQIILELTRCRGRNSRGGLHKCAPCTAMPNNKIVAANMEEKGAGGKAAVPHDELPRFTIFLIPNRREPPLDLVELVCLHHRISLGNGVPGSSPVVELAVVLVGVAVECAVQVPTPAVESRKSNPLPAGAAPVRPYLPPFGDRRHPLAGSGNISGLLHVHCLQLNLGNSYYRVAASNNRLHDGVAAVHDAVDRGGSQLGLILLRYHLLVALGAHVHGRRAAEEATVIDAEDGSLGGLAPSLLVLHGFLNSDETALFAIPLRRSPRGRRGGEGRGIAGNSVGS

SEQ ID NO: 60725 - protein, 135 aa, Zea mays
  Clone ID: LIB3587-280-H2_FLI.pep
EQQIKSVISSVPTKPQQPSFMSDLDVQLPSAFDPFAEANAEDSGAGPETKDYVHVRIQQRNGRKSLTTVQGLKKEFSYNKILKDLKKEFCCNGTVVQDPELGQVIQLQGDQRKNVATFLVQAGIAKKENIKIHGF

SEQ ID NO: 60726 - protein, 503 aa, Zea mays
  Clone ID: LIB3587-283-D9_FLI.pep
CFQFRIRRNCPDASQRLLNRLSESNVESITQEIATLFRSVPRSDGSQIIGDEVLASCSRGPRGNEQYAAVFAAFVAGMACLVGVDFSAKILASIAKSFEDEYSKEDGLSLRNLTLLFCYLCIFGVTSSDLVYDLLSILSKRLTELDVSTVLTILQCCGMKLRGDDPCAMKDFVLSIQNSVNDLKLHSGVGADGKTDIRSRRMEFMLETICDIKNNKKRPKEDPSHHTRIKKWLQKLKAEDVLLRGLTWSRLLDPDKKGQWWLSGDVPSTVAKIEDVAAVISKDVAETKKLLQLAAAQRMNTDIRRAIFCIIMSAEDYVDAFEKLLRLGLSGKQDREIIRVIVDCCLHEKMFNKYYTVLASKLCNHEKNHKFSLQYCIWDHFKELDNMESSRSMNLAKLVAEMLLNFTLSLATLKVVNLANPVEMTPARVSHFRMLFETLLQKDDARVWNVFTRVAGLPELEVLRDGIVMFIKQHVIAEDSGKDLASKFKIAKKALDNTAGVLM

SEQ ID NO: 60727 - protein, 187 aa, Zea mays
  Clone ID: LIB3587-284-D9_FLI.pep
STSAPVRVRWGRGRLRPQRPRLRAPSSCSASCSRRREALQRTSVNMGKTRGMGAGRKLKTHRRNQRWADKAYKKSHLGNEWKKPFAGSSHAKGIVLEKIGIEAKQPNSAIRKCARVQLVKNGKKIAAFVPNDGCLNYIEENDEVLIAGFGRKGHAVGDIPGVRFKVVKVSGVSLLALFKEKKEKPRS

SEQ ID NO: 60728 - protein, 203 aa, Zea mays
  Clone ID: LIB3587-284-F3_FLI.pep
SHRRKPATSLRGLTVISAWHPKAVKIREAGGTKRRASDPTSSSARAARRRREMGADYYKVLGVDRGASDDDLKKAYRKLAMRWHPDKNSTNKKEAETKFKEISVAYEVLSDPKKRAIYDQLGEEGLKGQPPPGAGGPGTSPFFPGGVHSTAHHFNPRSADDIFKEFFGSPGMGGMRTEPGFQSRPCRSLQGCDKKDENLKRDY

SEQ ID NO: 60729 - protein, 98 aa, Zea mays
  Clone ID: LIB3587-285-A7_FLI.pep
AAYSGGSGARRAKAQGGSRVAIQPTPSRTHADKSCSILEIEKRGTRRPSLGQPRELLCLILDETSEWSSAGFRHLQSLPILLRLPSITGLCCVAKCVL

SEQ ID NO: 60730 - protein, 80 aa, Zea mays
  Clone ID: LIB3587-285-C3_FLI.pep
IWCSVQVSSSPCEITAPSGLCLKSNGPSNTSSMLLNPSLFLFYFVLELHCFCCIDPLTFYPLYMNMSIVVLFGCSYLKEI

SEQ ID NO: 60731 - protein, 172 aa, Zea mays
  Clone ID: LIB3591-003-F7_FLI.pep
LREELEERERKHYSSKDKSYAEERDRRKSSSHLLLEGSKRETEDKIVPREIDADDSDVEPKSDDESDEDDDDDDTEALMAELERIKKERAEEKLRKERQQAEEEAKMKEAELMRGNPLININNAGSFSVKRRWDDDVVFKNQARGETKTPKRFINDTIRSDFHRKFLQRYMK

SEQ ID NO: 60732 - protein, 185 aa, Zea mays
  Clone ID: LIB3591-005-D8_FLI.pep
CMHPMADRSTPAAVRRPLLVVIRAASFRCWSEGERELDLSAVLLLLDDRVNRRGKAAFLKHGLQGDGCFADEIVVGEVAVHDLEVQLRGVVGDGEDEGLVPFGLASCSICDAAFLLLGAAGKDHEGVHVIEEIGVLESLGGDEEDLQLPVHHVYLLAPIDRRQFLGALQLQLQRENGSSAKCPRV

SEQ ID NO: 60733 - protein, 349 aa, Zea mays
  Clone ID: LIB3591-005-F7_FLI.pep
GLNKINTSLLLQAAGWPCMNHDRCNASGSFTTRMHLAFHSKQLAAAAAAAGMLMHHVLVELEAGEHVVVDGVGEVVEQVLERADAGDEPLDEVTEDGEHGEPAVLDLLELELIHLLLGLAEAERVEEGPAGVGRVAGAGEELLEAEEVLLAHGARVVPVLEAAVLGEAHERHVEDEERVGVGPVVVGARGRDDARLEPRQRGLRGDDAHLAEDLRGDGAHRAQHGVAAVDHLAIGQPLGLDEAPGALRVREAQRVEAIVAGQRAIEVGEGLLGREPQLPVGTLLGWRAGAGPDDEGRLPRRRPRDGRLHGAAQQLPAGEESLGRHRSGTGASSNLSFRQRTCLRSRSCR

SEQ ID NO: 60734 - protein, 180 aa, Zea mays; identical to SEQ ID NO: 52264
  Clone ID: LIB3591-005-G3_FLI.pep

SEQ ID NO: 60735 - protein, 211 aa, Zea mays
  Clone ID: LIB3591-005-H1_FLI.pep
INMRRGYSYSPSPPRGYRRRARSPSPHDHYGGRGRDLPTSLLVRNLRRDCRPEDLRRPFGQFGRVKDIYLPRDYYTGDPRGFGFVQYYDPADAADAKYYMDGQVVLGRQITVVFAEENRKKPQEMRARDRVRGHSYDDRRYSRSRSPRYYRGRSPSRSQSYSRSPPQNPRHRLRERSYSGSPVDSRSRSGSPYEDGYRKSSRRERSLSVSG

SEQ ID NO: 60736 - protein, 372 aa, Zea mays
  Clone ID: LIB3591-006-D10_FLI.pep
SLRTGPYGQIFRPDNFVFGQSGAGNNWAKGHYTEGAELIDSVLDVVRKEAENCDCLQGFQVCHSLGGGTGSGMGTLLISKIREEYPDRMMLTFSVFPSPKVSDTVVEPYNATLSVHQLVENADECMVLDNEALYDICFRTLKLTTPSFGDLNHLISATMSGVTCCLRFPGQLNSDLRKLAVNLIPFPRLHFFMVGFAPLTSRGSQQYRALTVPELTQQMWDAKNMMCAADPRHGRYLTASAMFRGKMSTKEVDEQMINVQNKNSSYFVEWIPNNVKSSVCDIPPRGLSMASTFIGNSTSIQEMFRRVSEQFTAMFRRKAFLHWYTGEGMDEMEFTEAESNMNDLVSEYQQYQDATADEEEYEDEEEVQADDM

SEQ ID NO: 60737 - protein, 181 aa, Zea mays
  Clone ID: LIB3591-006-F7_FLI.pep
KKREKTSLSSRRPRSPTSRLLPACLPACKKEFVMASKRILKELKDLQKDPPTSCSAGPAGEDMFHWQATIMGPPDSPYAGGVFLVNIHFPPDYPFKPPKVSFKTKVFHPNINSNGSICLDILKEQWSPALTISKVLLSICSLLTDPNPDDPLVPEIAHMYKTDRPKYESTARSWTQKYAMG

SEQ ID NO: 60738 - protein, 117 aa, Zea mays
  Clone ID: LIB3591-009-H1_FLI.pep
CMVQAFACSNRANQYTDRTSPAAMEHTQETRHLYCSTACANSSDFDRVKILTSFGFKQTKPQFESRHQMCKENHVRFPDNHHAQSLGSPSSKLLSHFQMKSSINCRNGVYMAGDDTT

SEQ ID NO: 60739 - protein, 206 aa, Zea mays
  Clone ID: LIB3591-010-C4_FLI.pep
SLTGYILLGCIVAPVAPNKQISKMVEEAARLSKLFCDRNLPIFAFLDTHYPDKPEPPYPPHCIIGTGEEDFVPDLEWLEKEPNVTIKRKSCIDGYISCIEKDGSSVFADWIGKYQIKTVLVLGICTDICVLDFASSTLAARNIDRVPPLQDVVIYSGGCATYDLPVEIATNIKGALAHPQDLMHHIGLYMAKGRGAKIVDRVVIEP

SEQ ID NO: 60740 - protein, 608 aa, Zea mays
  Clone ID: LIB3591-013-A7_FLI.pep
LRGDSFSNFLGAKYLPSSAVHGSASHTRESKLQSCSSPAIAAGFVREGRGSLYRGMVILDRTPAAAQGAACSPLPKSPRFSWEVASPPSDPILPYLRSISRAMDELGTGPQYDTTALDRLKHYLTECIAKYGDDYQYSTDPRLLKIWILYADAIEDFPSVYNQLEEKGMFQEHALLYDSYAQYLIAHGKLVEADKVYGIGISRKAEPLDNLKKMHLTFLKHLENILEEADAEEQCKSSNIQKNEPSVIDPWSPSTRNTLLEKINGGLRKFSGYYKSNKVYCGKVPLTSSLNVLRNKGIKLGGRKYQIKGSTGTGAFAKVYKATVDSNAEEMVALKIQNPSFTLEFYMYCQLDLRISDVERPSFGYAHEMHIFSDVSVLVCDYLPYGTLLDVINSHLVVGRYMDEVLCMYYTIEMLNMLETLHSVGIIHGDFKPDNILVCYPSGEITEDNFRSEKRVERNQGLCLVDWGRGIDLALFPSCTEFHGDCGTSGFRCIEMQEHRNWTYQVDTYGLCVVVHMMLHGSGMNVKKVPRIGGGYEWQPKQPFKRYWNVDLWQKLFSTLLNPPSNDSDVAALQSLRASFRQYMCSNRQLVGKLNQLLAKQKASLCSS

SEQ ID NO: 60741 - protein, 242 aa, Zea mays
  Clone ID: LIB3591-013-C5_FLI.pep
RFRQEGGRLGFGKRAPVMSTTTEAAKSGSAAPVRCQRIGCDAVFTDDDNREGSCQYHPSAPMFHDGMKEWSCCKQRSHDFSLFLQIPGCTTGKHTTEKPITKAVSSNRTKATPIQSSKQGVGVDVCARCRQGFFCSDHGSQPKPQKPAATDDSNKEPVEKSAVPPPKKRIDVNELRTCKNKGCGKSYKEKDNHDSACDYHPGPAVFHDRMRGWKCCDVHVKEFDEFMEIPPCTKGWHNADAV

SEQ ID NO: 60742 - protein, 243 aa, Zea mays
  Clone ID: LIB3591-067-G1_FLI.pep
HPSPTTSPPPPPARAPATTRRNQGWSRRATTRRRSRRGRRSPNPHCARVYARGSMVGGGGRRAALGRWCLVILAVASALGVSGPAFYWRYKKGFSSSSPSSTAAAVASSPSCPPCSCDCPAPLSLKSIAPGLANFSITDCGKNNPELAKEMEKQFVDLLNEELKLQQVVAEEHSHHMNATLVEAKRQATQYQREAEKCNAATETCEEAREQSEVAISKEKKLTAMWEQRARQLGWHDSRATSM

SEQ ID NO: 60743 - protein, 314 aa, Zea mays
  Clone ID: LIB3591-068-D7_FLI.pep
LHTQLKRKESSIDRQGGMGLREIESTLPPGFRFYPSDEELVCHYLYKKVANERAAQGTLVEVDLHAREPWELPDAAKLTASEWYFFSFRDRKYATGSRTNRATKTGYWKATGKDREVRSPATRAVVAMRKTLVFYQGRAPNGVKSCWVMHEFRLDSPHTPPKEDWVLCRVFQKRKDSEQDNGGGSSSPPTFAGASSQGVVLDLPDDQQPSMTMAGAYVAVDHHQPGSSAVGFALPPHAQDNGLGDGGLDALLMNGATMWQYSSSALADHFPPEEVTAAPMMGLGSRGGGDGCSFFYDSGFDDMANMGFPQGWMG

SEQ ID NO: 60744 - protein, 472 aa, Zea mays
  Clone ID: LIB3591-068-F4_FLI.pep
RRLLGLPVDGLNGTECNPNSNSTSSICVSADADLVVPDDPGHSFEDVLEQVFGNVSAAAAQPQPSMSGFVRSALSVNAVLSSAVMRAFRPSLLPAFSALAPQFAVFDRWFSSIPGPTQPNRLFLYSATSRGAVAHDKLDLLLGYPQRTIFESLAADGHDFAVYFKTIPTVLFYRRLRALRYAARAFHRYDAAFKEHARRGVLPALSVIEPRYFDLTGTPADDDHPAHDVANGQRLVKDVYEALRASPQWNQTLLIVTYDEHGGFYDHVATPTAGVPSPDGIRGPPPFFFKFDRLGVRVPTIMVSPWIKKGTVVGRALGPTDTSEFEHSSIPATIKKIFNLSSDFLTKRDAWAGTFDHIFTELDQPRTDCPETLPEVPFERPTPPKEHGWLSDFQRELVELASFLNGDYMLTSLAQENRKKKMTVKQADAYVRRAITSFLQASKQAVRLAANESAIVTMRSSLTSKSTRSSSP

SEQ ID NO: 60745 - protein, 202 aa, Zea mays
  Clone ID: LIB3591-069-B3_FLI.pep
LASSLVVRDNNARLCPAVITTGSTQARAPQQPQDPPPAIILPRSRRRRLSVEHVGRDSVQVVVDGLGQREAGPPRRRRGLRVGSGVGHLAPPRGLRVALVRLRRRRSRSQLGRVDDTVGGASPPPLRLRRFVRRCYCVAEVEGRGHDRRRPRAAAVAVVVVVPLPERRDARAPRGRHYWWWWSVFVSRGRSREGGEFCSRMD

SEQ ID NO: 60746 - protein, 167 aa, Zea mays; identical to SEQ ID NO: 41527
  Clone ID: LIB3591-071-C11_FLI.pep

SEQ ID NO: 60747 - protein, 575 aa, Zea mays
  Clone ID: LIB3591-071-D1_FLI.pep
IVVPESSTGITNWRSRRPIMATMKLGSKPEIFVLQDLTWRCTTELESDVVVEVGEMSFYLHKFPLLSRSGVLQRMISEYQAPADGGGMCTLQLDDIPGGAKAFELAAKFCYDVKIELNALNVVCLRCAAEYLRMTDDYAEGNLITQAECFLVDVLANWKDSIKALETCEGVLPTAEDLHLVSRCITALASKACGSDAAAPVVRNASVDKDALWNGIRSGDTTSSAAAAAAAAGMDWWYEDVSFLSLPMFKRLIQAMEAKGMRDESIAGAIMFYAGRFLPGLKRNTSFSNALASYGADGSGGAGGGMSSRNITPRAASVSAPSEGDQRYFLEEIVALLPTKKGVASTKFLLGMLRTAMLLHASPLCRENLERRIGAQLEDASLDDLLVPNLGYHARPVDDGIYRAIDIYLKSHPWLSESEREQLCRLLNCQKLSLEACTHAAQNERLPLRVVVQVLFFEQLRLRTSIAGWFFVSDNAAGGDGARPHAGGAIVPKGTAAIAGCPQADADSDVEGDAPDGKETITDVKARVSDLEKECKSMKQEIRRLGKPRRSWSLLTRKCGFGAKVQQAQTAMSGK

SEQ ID NO: 60748 - protein, 180 aa, Zea mays; identical to SEQ ID NO: 52264
  Clone ID: LIB3591-072-D11_FLI.pep

SEQ ID NO: 60749 - protein, 357 aa, Zea mays
  Clone ID: LIB3591-073-C8_FLI.pep
VMLRRSGLAACLTCPLCGRLLRDAATITECLHTFCRKCISEEFVNKEVCCCPVCSIDLGCAPLEKLRIDHSLQYVRSKVFPSKKRKVEDPEVTSPITSPIKTKVRSLSSLTKHAPQMSMQKCLRKRRTKASCLQNLPLHSTLRGSSNITKKSGGWRPLGCHFRAAKKKRSLRPKSDDIKTAGKRTDDPVDVTLASQAKTRKQITRRGNLEKRTGTKKVLILKGKQKNTKTKNTPNKRRLPALWFYLLAAFDQKGHPPLPQIPSKFLRIKDVNLPASFIQKYLAQKLNLSSETEVEIFCGGRPVSPGITLHDLADHWIGKRSKGRVRSSVGTPAAEFVLKVFYARSGAPLPKTESNQD

SEQ ID NO: 60750 - protein, 406 aa, Zea mays
  Clone ID: LIB3591-074-F3_FLI.pep
IRIYTSHLPVPVCKYTARLECTLHSTYTAMAVRPQHWHTYVRTGSSIEAVTSRGAIDARLGDSGAGVDEVAVDEVGGEDLQLVAEALGEGLGDEEPRVAVDPLRDGPHAQHRVVGLGRHRVLHPVEEPPAGHRRLLPQELEVALELGLRQVRVDPVVLEVAGAPQRVPGPGRRRLAGLPDADDPPREQLRDGPVEHRLVLRDQVLAQLVGQEPVEPRRVLVPELGADLQDDQLGLGLAQEPAHVVQHHVHGVRRQDAVADPALLLHAHVDDARAHGQLLVHGHGLALREGAGHQRHADLVGGRVVRAGPHHLVHAQLVGAQLRHPPLPVRRPVLRPRERVAGGGQPRGQRPLLGGHQLPPVHLLREEGAHGFQRVAAAVGIGGSHGWINYKGSPVPRAQTWTWTSL

SEQ ID NO: 60751 - protein, 212 aa, Zea mays
  Clone ID: LIB3591-074-G4_FLI.pep
EKACTLLVYFDKGSPSMANEHRHHFVRRHALSAISAIYSLQQGDQLIPDAPELVERALASEQDPAARRNAFLMLLAAGQDRAVGYLFNNADRVAEWPDLLQMAAVDLIRKVCRSKGRADKGRYIRVIISLLSASSAAVVYEGAGALVSLSSAPTAVRAAANTYCQLLSSQSDNNVKLIVLDRLHELCSSCPSTCPCRSRSYIGGRWRLWSRP

SEQ ID NO: 60752 - protein, 225 aa, Zea mays
  Clone ID: LIB3591-077-B11_FLI.pep
QIEGGHGCWWPHSVGGGARGAMACLHDHSCEDHNCAADWSLYNHIDVPKVVALNESVPGSVKSVFKPWEQRLDTSGGFLESNEGDPELLIFIPFTSDVKIKSISVVGGADGTSPSRMRAFINREGIDFSDAQNMQPVQEWELAENLQGALEYQTRYSRFQGVANLTLHFSDNFGGDTTKIYYIGLRGEATQNKRDVVATIVYEVMPNPSDHKTKSETGGGFSHVE

SEQ ID NO: 60753 - protein, 424 aa, Zea mays
  Clone ID: LIB3591-077-C5_FLI.pep
FLSCSPNQRKPCPDTGSDTSTGGAMVLEATMICIDNSEWMRNGDYAPSRFQAQADAVNLICGAKTQSNPENTVGVMTMAGKGVRVLVTPTSDLGKILACMHGLEVGAEANLAAAIQVAQLALKHRQNKRQQQRIIAFIGSPVKYDKKVLETIGKKLKKNNVALDIVDFGESDDEKPEKLEALIAAVNSSDSSHIVHIPPGENALSDVLLSTPIFTGEEGGSGFAASAAAAAATGASGFEFGVDPNVDPELALALRLSMEEERARQEAIAKKAAEDTSNTEHNNVPSSNSDSVMAEGEPASNAAAGDKEQPKDDDDLLQQALAMSMEGGASGSAAVTDSAMAEAGAVDPDLALALQMSVQDANMSSDTDMSKVFEDRTFVSSILNSLPGVDPNDPSVKDLLASLHSQGEQEKKEDTSDKTEDDKN

SEQ ID NO: 60754 - protein, 684 aa, Zea mays
  Clone ID: LIB3591-078-D3_FLI.pep
HQSTPPTAGLPGHLRLPTAASADAALITLSAFLSSGRLTTSSPSLLHRTLRAAADHRLPRLGLQLHAFLVKTRLLADPFSASALLHLYSTIAPLHRTRLLFDRIPKSTYPVPWNTMILRYAQDGFLDEAFDLMVAMEESGIPIGASTWNAVIAGCVRAENGELAIELLGKMVSVGGVVPSVATFNTVLHVISALRGVNVLRELHAFVLRNAEVVGLGPVDLDRLQESLAAGYMCSSCVQYAGRVFRDVRISTCFLGNLMISGFLDTGQRNQALGVLREMAFGCGHEAQHLPSASLTLVLPEVNLATKRGLEIHAYAYRHGFECDTSVCNALMAMYARGGKICRSDKVFQGLDAKDVVSWNTMISGYATVHDFDLSFELFREMQRNGTRPDDYTFTSVLNACSFACNHRTVMALHGQMIRMGLCHSYVDDMNSLMDAYGKCGFIAEAQKIFDETERKDTVSWNIIISCYGYSGFPQRAIRLFHQMQDQSYKPTRVTFIAVLAACSHAGLVDEALRYFEAMHGDYSITADEAHYACIVDCFGRAGQLQRAYEFIRGMPVVPNACVWGALLSSCRIHGNIGLAEIAAKKLVELDPQHSGYWMLLKDMYSKAKRWNDVSQLRAAMRDNGVKKCPGYSWIEGRDSEVHRFLTADKLHSQSHQIYEVLGGLTEQLMDEGYEIDVDLTYTE

SEQ ID NO: 60755 - protein, 177 aa, Zea mays; identical to SEQ ID NO: 56940
  Clone ID: LIB3591-080-A4_FLI.pep

SEQ ID NO: 60756 - protein, 434 aa, Zea mays
  Clone ID: LIB3591-081-A12_FLI.pep
PHLFLLSRFCLSLSSITAKSETSVLPMAKTSLPPGFRFHPTDVELTVYYLKRKLLGKHLRCNAITEIDLYKFAPWDLPERASLESNDLVWYFFCPRDRKYSSGLRTNRSTGVGYWKATGKDRPVVYNSRTVGMKRTLVFHLGKPPRGDRTDWVMYEYRLEDEEIAASGVKLDACVLCKIFQKSGPGPKIGAQYGAPFNEEDWNDASNVECSPCVPSVAPCAPESSRGGLNSAGQRLAVSYDVKVSLGSSAEGINRPAVNGVHPVRPSPDAPNDCIHIQLLAEVMRCSSTSMHVLRTAGDDGLLADSTADYSSDNRISLDAIETIFCEVDELGPQAMVNNTNHCDSCGEYLIHPTMVALGAEQYLELNDLSFSLTDGPDSCGVLFSNGVSVEQLPDLELRFEQFSPDHISNTAIASTSTTVGSSASVPLLEDHRT

SEQ ID NO: 60757 - protein, 157 aa, Zea mays
  Clone ID: LIB3591-082-A1_FLI.pep
QQPHHARLFTVAGAIALGRAEGVFTTVGHVKEAILVLVLFVDCRHQRGSWWQGVLHKDKDGLLWAQLDSLPHHIDKLADSEISRDKVLLLINLGDISFASFLNNHRNSVGILIPDPGRFGLPFLEVVLHFERGPGHRQPAQVNDKDEIDPRIASETN

SEQ ID NO: 60758 - protein, 224 aa, Zea mays
  Clone ID: LIB3591-082-H2_FLI.pep
HQNEKENHSCQDMAGNVSNDIIKYWAQRYSLFSLFDSGIKMDEVGWFSVTPEPIAKHHASRVGAGVMIDCFTGVGGNAIQFAKKCKHVIAVDIDPQKIDCAHHNASIYGVNDHIDFIVGDFIHIAPHLKGETAFMSPPWGGPDYAKVDVYDMKSMLIPCDGYSLFKLGTMIASRVVMFLPRNIDLNQLADMSLSVDPPWAVEVEKNFLNGKLKAITAYFEEQDR

SEQ ID NO: 60759 - protein, 84 aa, Zea mays
  Clone ID: LIB3591-083-G11_FLI.pep
CKIRYRVFHFFPPRPSVARFILEPKSVLFNEQEQKLNDSESAIASMQTSKDYLEKQQGEVENNIRELLQQDPGLARQILSMTVQ

SEQ ID NO: 60760 - protein, 342 aa, Zea mays
  Clone ID: LIB3591-084-G3_FLI.pep
PLAFLERETTAAGPQRARERNQGQGAQHPVRPQQESERQKGVRRKEEAVGEEGDMERPAPVRKSHTSTADLLIWPEGAPQESPAGATPPSNRRPHQPSEALRKVVFGGQVTEEEAESLNKRKPCSAPKWKEMTGSGIFAAGGEAEEDESANASATPIRTAPKNYQAISTISHISFSEEESISPKKPTSIAEVAKQRELSGTLLSEDDSKMKKQISDLKSKELSGHDIFAPPEDPRPRNSENGSTSQTPGKNAHVSNFKFGEADEDGMVKTAKKIPTKKFTDLAGNIFKGDETPPGTAEKHLSTAKLKEMTGSDIFADGKAPSRDYLGGIRKPPGGESSIALV

SEQ ID NO: 60761 - protein, 150 aa, Zea mays
  Clone ID: LIB3591-084-H10_FLI.pep
TDHHHRLRSRAATAMAAAAPHAYSSLVPVSAARPLSGSTVSFGASCHKWRKVPAWRLHCVAEDEAEEVKDFGVNMALSMLKFYKREISPLLPSSCRYVPTCSEYSMQAYKRYGVVKGSILTAWRLCRCNPLGGYGYDPPKWFGEEDVPLQ

SEQ ID NO: 60762 - protein, 399 aa, Zea mays
  Clone ID: LIB3591-085-C11_FLI.pep
GMLSALMDYLKSCWGPASPAGRPRKGSDATGRQDGLLWYKDGGQVVDGEFSMAVVQANNLLEDHSQVESGPLSTSEPGLQGTFVGVYDGHGGPETARYINDHLFNHLRRFASEHKCMSADVIRKAFRATEEGFISVVSNQWSLRPQLAAVGSCCLVGVVCSGTLYVANLGDSRAVLGRLVKGTGEVLAMQLSAEHNASYEEVRRELQASHPDDPHIVVLKHNVWRVKGIIQITRSIGDVYLKKPEFNREPLHSKFRLQETFRRPLLSSDPAITVHQIQPTDKFIIFASDGLWEHLSNQEVVDMVQSSPRNGIARKLVKSAVQEAAKKREMRYSDLKKVDRGVRRHFHDDITVIVVFFDSNAMTTAAWSRPSVSLRGGGFPIHSNTLAPFSVPTELNNSY

SEQ ID NO: 60763 - protein, 154 aa, Zea mays
  Clone ID: LIB3591-085-C7_FLI.pep
AFKLGFTPPAPRKQTSVSSAGGLALSPPPHLLYARTAKMKLVRFLMKLNNETVTIELKNGTVVHGTITGVDISMNTHLKTVKLTLKGKNPVTLDHLSVRGNNIRYYILPDSLNLETLLVEETPRVKPKKPTTGKPLGRGRGRGRGRGRGRGPPR

SEQ ID NO: 60764 - protein, 327 aa, Zea mays
  Clone ID: LIB3591-087-C9_FLI.pep
SLSPPLSLALGDDWATAAAAAAAPPLSRCPGLRRRLRQVFEDSGNISKMRPVFCGNLDYDVRISEVERLFGKYGRVERVDLKTGFAFVYMEDERDAEDAISRLDGIDFGRKGRRIRVEWTKEDRTVGRKSSSRRSPTNTKPTKTLFVINFDPINTRIRDLERHFDKYGRVANVRIKKNFAFIQFEVQEDATRALEGTNGSHFMDRVISVEYALRDDDEKGERGNGYSPDRRGRERSPGRRRSPSPYGRGRERGSPDYGRSKERGSPDYGRGGRSPDNGRGVSPAGGGRGDHARGGGRSPDYDRQRREASPPGYDRSPSRSPGREARE

SEQ ID NO: 60765 - protein, 200 aa, Zea mays
  Clone ID: LIB3591-087-F1_FLI.pep
ERGAARSCAPPRSPRSCGNMGLTFTKLFSRLFSKKEMRILMVGLDAAGKTTILYKLKLGEIVTTIPTIGFNVETVEYKNISFTVWDVGGQDKIRPLWRHYFQNTQGLIFVVDSNDRDRVVEAKDELHRMLNEDELRDAVLLVFANKQDLPNAMNAAEITDKLGLHSLRQRHWYIQSTCATTGEGLYEGLDWLSNNIANKA

SEQ ID NO: 60766 - protein, 229 aa, Zea mays
  Clone ID: LIB3591-087-F9_FLI.pep
IDKITRPKPGWAHTSVPPAAAATAAVAATATLAPTAVAATASVAAAATFAPTAVAATAAITAVTAPATITAAAAATAAVATAATATATGLGLVNGDVTAVELLAVHVLDSVEHGVLGGEGNEAEAAGPPRLPVGDDLHNHMKTSCSIRANADLYQNEADLLNHDPDLAPTAQTDREMKPSEDEADLGVEDLAVGGEGILQRLVAGGPGKPADEATVLHISRRHRPSTKP

SEQ ID NO: 60767 - protein, 174 aa, Zea mays
  Clone ID: LIB3591-088-H7_FLI.pep
CGPGDVEKVRLTVHRRHSGVLRGDRGLHRNAFGVEHVLRLLGLLPQLRQRFPDVVDAQVLENVLENGVRLDVVVRQPSMDEGVVLIVIEAVADGPESSHRGAVVLVQQIAQVLDLGLVNTQLLNHVIFNVLLDMACDPGAQRIQGVVEVEEQAVELGLLDLVAAVFELHVWGLW

SEQ ID NO: 60768 - protein, 263 aa, Zea mays; identical to SEQ ID NO: 50588
  Clone ID: LIB3591-089-D10_FLI.pep

SEQ ID NO: 60769 - protein, 183 aa, Zea mays; identical to SEQ ID NO: 44872
  Clone ID: LIB3591-091-C5_FLI.pep

SEQ ID NO: 60770 - protein, 356 aa, Zea mays
  Clone ID: LIB3591-093-E10_FLI.pep
RRLRRVPRHSSGAGRCRPTPGAPVFFRPFAGDDHRQDSIADGFVGAGAIGVGDRRGIVLFLSSLGRGVRHGLAVRRVQVPASQVPAGLRVRALLPTGQPAEVRARAPRLRREQRDQADERNPPVAARGRHELARLRGRHANSRPRLRLRGRHLHPPAQPTAAPAGPRPRQVRALQVPGGSGGSIRVDGADRAAGDGRVHRQRDAERRRAQLHQPWTLGGARLPRRLHRHVRAAGAVRQQRADAVQELRRRRAHREDRDEQRRLRVRLLERDDDGRVCRRCLWRPRDARHQQPAVLEVWNRRRRREAQRRSVGGSIRVTDPSIHPSIHQSCQVWFGFAFACCLHSVLVCCVLPCASD

SEQ ID NO: 60771 - protein, 120 aa, Zea mays
  Clone ID: LIB3591-094-G10_FLI.pep
RVALATAKVHYADSYERCVRTHAIGLLGELGLVDADALPGGALAAGLVRGAQTALLPHLAVPLLPQLLPASLASAAAPFGEVLLGLDALAAGPAGDDGLALASLAVQLLPALLTRRHIVA

SEQ ID NO: 60772 - protein, 119 aa, Zea mays
  Clone ID: LIB3591-098-A2_FLI.pep
STSLLCASLMHDTHVARTSLLRRRLHAADGHVRCHPTSELPPLWFHRSVDLGAVDGGADGHADGDAALGGDVGGVGHADAAAEPARHALEAVAGGLPVRRRRRAAVERAHPAAARRGGR

SEQ ID NO: 60773 - protein, 410 aa, Zea mays
  Clone ID: LIB3591-099-A7_FLI.pep
FPAPGAMDCAKGRAVADLYDEVMVEILSRVPVKDLRRCTCVCKSWRNLITDPLNRKKLPQTLEGFFHGVVGGPHSYGQFTSLSGSGERVAPVDPSFSFITAMLPGVERMVLLDSCNGLLLFGCTREDKFGYIVTNPATEELMTVPASSGSCPLPPPFERDMVGGERYAHTFLMFNPAVSSHFHLVQIWENKAAKEVETVHSYSSETKAWSDRSSKWGRGEEGGEWELWGESVIGFMCGWTLVDGLLHFLAFDLQKEETVIIAVDGEGETRRIIGWHGKDVRAIVFIGESQDHLHCIGVNVQLDQGSEVRFTRMSIWVLEDYDTQAWILKHNVSSLQFFELLSHPIKDFHIVAIHPYHNSFILIQHWNQKLVSYNMDTQELHGLGTLGKGYAVITPYIPCFLESSVLATKH

SEQ ID NO: 60774 - protein, 599 aa, Zea mays
  Clone ID: LIB3591-099-B3_FLI.pep
APLLLLAAVRLSADEQARRHPMAMEVRRRVPPPHGSAPRRQQATGGEGQRVRVQAGDALPLPIRHTNLIFSALFAASLVYLMRRWREKIRASTPLHVVSLAEIFAICGLVASLIYLLSFFGIAFVQSVVSNSDDEEDFIIDSRHGQARAPPPPAPAAPCALLGSPAAAPEKMPEEDEEIVAAVVAGKIPSYVLETRLGDCRRAAGIRREALRRITGREMDGLPLDGFDYASILGQCCELPVGFVQLPVGVAGPLLLDGRRLYVPMATTEGCLVASTNRGCKAIAESGGASSVVLKDGMTRAPAVRFPSARRAAELKAFLEDPANFDTLAMVFNRSSRFGRLQGVKCAIAGRNLYMRFSCSTGDAMGMNMVSKGVQNVLDYLQADFPDMDVISISGNFCSDKKSAAVNWIDGRGKSVVCEAVIKEEVVKKVLKTNVQALVELNVIKNLAGSAVAGALGGFNAHASNIVAAIFIATGQDPAQNVESSQCITMLEAINDGKDLHISVTMPSIEVGTVGGGTQLASQSACLDLLGVKGANRESPGSNARLLATVVAGAVLAGELSLISAQAAGHLVKSHMKYNRSSKDMSKTLAEETDKPKKC

SEQ ID NO: 60775 - protein, 162 aa, Zea mays
  Clone ID: LIB3591-099-B7_FLI.pep
DTPIKSFFRKESLALKEICPADHFFHVSDERFKLPNSLLLQSYPAGEDREHRVVWCRRLPTWLPRALPPWSRRQPAPRGPGGGGSERRRRRRRRVWDGKEEGAGSGGPSGFYPRRAPLFFIIMAGQVRPPQHRLLSSRRLPLALRPDRLGLLALPACLCLSV

SEQ ID NO: 60776 - protein, 122 aa, Zea mays
  Clone ID: LIB3591-100-E11_FLI.pep
YNKVSCKMQLRQTAKQVMQPGNSSNITNCKMQMRHVNGHYIAIFYMKYNSFNQFGHEKVSNKLSFLHFPEPTTPRFFLGIKSGIGIGFGSLAGGSCCQFSIFLLISSNKFCTTVLVGSSLRL

SEQ ID NO: 60777 - protein, 153 aa, Zea mays; identical to SEQ ID NO: 44881
  Clone ID: LIB3591-100-E8_FLI.pep

SEQ ID NO: 60778 - protein, 426 aa, Zea mays
  Clone ID: LIB3591-106-A7_FLI.pep
IAERRGAFGRCMMAEGPNFAGMIGGHDNGGDFCDMAYYRKLGEGSNMSVDNLNSMQTSTHGGSIAMSVDNSSVGSCDSHTRMLNHPGLKGPVVGNYSVGGHSIFRHGRVSHALSDDALAQALMDPRYPTETLKDYEEWTIDLAKLHMGMPFAQGAFGKLYRGTYNGEDVAIKLLERPEADPERAGLMEQQFVQEVMMLATLRHQNIVKFIGACRKPVVWCIVTEYAKGGSVRQFLAKRQNRSVPLKLAVKQALDVARGMAYVHGLGFIHRDLKSDNLLISGDKSIKIADFGVARIEVKTEGMTPETGTYRWMAPEMIQHRPYDQKVDVYSFGIVLWELITGMLPFANMTAVQAAFAVVNKGVRPAIPQDCLPTLAEIMTRCWDPNPDVRPPFTEVVRMLEHAEMEILSTVRKARFRCCMSQPMTTD

SEQ ID NO: 60779 - protein, 71 aa, Zea mays
  Clone ID: LIB3591-106-B6_FLI.pep
SSSRRRLPPLKSLLIVLPNSYLSDELCAISSLEVYHSIHWGSVNHVPVYVTFFFSKERRRTAHPYIKVEGK

SEQ ID NO: 60780 - protein, 198 aa, Zea mays
  Clone ID: LIB3591-107-G1_FLI.pep
LYHVVSGLFAAPPPPPPRPREEPEAEPLPPPVQMGEVSEEELSQYDGSDPKKPLLMAIKGQIYDVTQSRMFYGPGGPYALFAGKDASRALAKMSFEPQDLTGDITGLGPFELDALQDWEYKFMSKYVKVGTVTKNVTVEDRSSAASTAPGTSEAATEAEKAPTTTTTEEKPREVPAEAVKEKEAAAAAAAAGEGAQEN

SEQ ID NO: 60781 - protein, 256 aa, Zea mays
  Clone ID: LIB3591-110-D3_FLI.pep
PSCWLLLSTRARTNQRSNRAVATPLREACRHPPWAVAVAVAVRKKKQTILDSTGGEGDAPGEGGRDAATMSPIWVFGYGSLIWNPGFAYDDRVVGFVRDYRRVFYQGSTDHRGTPQFPGRTVTLEHQPGATCWGVAYRIKEEDKEIALEYLEVREKQYDEKVYLDLYTDSSPKVPAVENVMVYFATSNKENNQNYLGPAPLEEMTRQIYLAQGPSGPNKEYVFKLEDALHKLGVVDQHVQELANALREYSDTELSK

SEQ ID NO: 60782 - protein, 313 aa, Zea mays
  Clone ID: LIB3591-110-F10_FLI.pep
GDRRRPSPSRPGCALPATSAHRTPTILVTGGLLPLVRMSKGPVPFANIGKRAKDLLYKDYNFDQKFSLSTSSGSGLNLTATGVKINEDFIGDIRTQHKSSRTTIDVTVDSDSKVSTTVTVDEALTGLKTSFAFKVPDHKSGKLDLQYAHNRFSLNSTIGLTSAPLVELAATVGTSELSIGAEVGFDSTSAAVTKYNSGIGYNKSDFSASLLLADKGETLKASYVHLFNPTNGATVAAEVTHKLKTRENYFTVGSSHALDPSTLLKMRFSNSGKVGLLCQHEWRPKSLVTLSAEYDLKVVSAPSRIGMAISLKP

SEQ ID NO: 60783 - protein, 457 aa, Zea mays
  Clone ID: LIB3591-111-C9_FLI.pep
PSANPPGPRRVLTPRVTDRPTGMEMKLTIRRVPTVVSNYQEDADKPRAGCGRNCLGDCCLPASKLPLYAFKLTPAKGSQEDAASTKLLVDILLSEWEDRMTRGLFRYDVTACETKVIPGNLGFVAQLNEGRHLKKRPTEFRVDRVLQPFDPAKFNFTKVGQEEVLFQFENSGGDDSYFLNNAPIIAVDRAPNVIAINVSPIEYGHVLLIPRVLDRLPQRIDPESFLLALQMAAEGGSPYFRLGYNSLGAFATINHLHFQAYYLSVPFPVEKAATHKIPLSEDTKKNGVTVSKLINYPVRGLVFEGGNTLDDLATVVSNACIWLQDNNVPYNVLISDCGKRVFLFPQCYAEKQALGEVSQELLDTQVNPAVWEISGHMVLKRRMDYEEASETSAWKLLAEVSLSEERFEEVKAYIFSAAGLVQYDEEEEEASDGEGPTAYVPVKVTPLPVAEGCLVLP

SEQ ID NO: 60784 - protein, 342 aa, Zea mays
  Clone ID: LIB3591-111-G7_FLI.pep
IEAARKKSLFRSACEVCEKMIGSACFPNGEKVGRILIYLCEGKKVKMAHSLYLAVKEKKIPVPKLALDFLVGALARNDETIGTALELLEEYQGESLKHAGKSFATVVHALCRLNKMEDANNLLMRMVQLEEYKGESLKNAGKTFATVIHGLCRKKKLEDAKALLMRMVNVGPAPGNAVFNFVITALSKQGEMEDAKGLMRMMKSQGISPDIYTYSVLMSGYAKGGMIDEAHDLLREAKKIHPKLNRVAYHILIRGYCKMEDFEKANECLKEMKKDGLQPNVDEYDKLIQSLCLKAMDWRRAEKLLEEMEDSGLCLRGISRSLITAVKELEGEEMQSKASQEA

SEQ ID NO: 60785 - protein, 195 aa, Zea mays
  Clone ID: LIB3591-111-G8_FLI.pep
GRDAFTLEREIKIIKSWPPIEPVCPAVVVAGAADRPGASRGGDSDLHAGLAVAWEAADEVVGAALQRDAVVPGGERPHALGRAAGLVPRRAHGHHVVRLGVVPEREHVAGAEPLALGPVGGVEAPPAAVADRVHRRLGQLAVEEHAEEDQRKRGGGAAATSTATSLSRHGCCSTVRCRLSRTQGAGLALAWSEVM

SEQ ID NO: 60786 - protein, 165 aa, Zea mays
  Clone ID: LIB3591-111-H1_FLI.pep
LAIIEHACVLDNHKDQQTWPLHCPSISPDLAVVAPGLVAVEPVVDGGGVGLRPVEEVGAHALGGQVAPRVEDAAPHVAGAARRRRRRRRRRRHRRRRGRRHRLRPLVAAAVRVFVDDERAGGGGLAELLEARLRARPGHHVVPQLVQHLLIRSPLSTSQNHQDER

SEQ ID NO: 60787 - protein, 72 aa, Zea mays
  Clone ID: LIB3591-111-H10_FLI.pep
AVPNTILCSAQISFLLMMATKVALLQGGRITFDHLFGLLLIVVVLLSGSLLLLLLRAAGYETPAASASCPGT

SEQ ID NO: 60788 - protein, 174 aa, Zea mays
  Clone ID: LIB3591-112-D5_FLI.pep
LGLSGPHRSVPPVPVVVAVAAAAVCTTVSPTAAVASTTTAVASTATAVAASITAPATVSATAASTAAAGLGLVNGDVAAVELLAVHALDGAAHRVLRGEGDEAEAAGPLRLPIQDDLRLEDLAVGAEGVVEGVVVGGPGEAANEATVLNVRRRHLFPLAHEPEPEHEPVGEEKP

SEQ ID NO: 60789 - protein, 144 aa, Zea mays
  Clone ID: LIB3591-112-F2_FLI.pep
TTKDIKVSRNRNPPSYAKHTSLFDRTQKQSTDPPFHLTHRSSNHHTQQYRTADNTKSMDLAKLPGAGMSTNVDGLGARVPGRRRPCRSGQRRPQACARPFATTGRPRRSDLLPCPPSPPLLLGQRLETRKAGAGLGFGEKRSLR

SEQ ID NO: 60790 - protein, 151 aa, Zea mays
  Clone ID: LIB3591-112-G5_FLI.pep
DMVAFEIPTNHRDGQAFRDAFSQSVIQQLYTPRFSPFLSFFPLFSSPFLFPCKERDPAVCNTFWGGRWMGPRAQDLKDRSGEHRLRRRRKKDAAWQFLRHIRTSFKMISGMKGHRSCQLSVPLLSMGFIDLPSDPQIIEADVSQIIDTRMT

SEQ ID NO: 60791 - protein, 387 aa, Zea mays
  Clone ID: LIB3591-114-A12_FLI.pep
CVLTVIWAWHPKAVKIREAGRTKRRASATTSSSARAARRRKEAPQPPTPREMGADYYKVLGVDRGAGDDDLKKAYRKLAMRWHPDKNTTNKKEAETKFKDISVAYEVLSDPKKRAIYDQLGEEGLKGQPPPGAGGSGAFPFFPGGAHSTAPHFNHRSADDIFKEFFGSPGMGGMRAEPGFQRSMFGNDIFSSRFGAEGSTSMQQPPRKAAAIENPLPVSLADLYKGVTKKMKISREAIDASGRISNAEDILTIEVRPGWKKGTKITFPDKGNEAPNMKAADIVFILDEKPHDVFTRDGNDLVVTEKISLVEALIGYTARVTTLDGRSLSLPINSIIHPSYEEVVPREGMPIPKDPSKKGNLRIKFNIMFPSRLTSDQKAGLKRILGS

SEQ ID NO: 60792 - protein, 463 aa, Zea mays
  Clone ID: LIB3591-114-C12_FLI.pep
GRPRAAAATPPPVMASTVVLRNACSRRLFCYSTLRAAAILGPAAPPDAPAAASAQPPPMAGTLWARSMATFTRTKPHVNVGTIGHVDHGKTTLTAAITKVLAEAGKAKAVAFDEIDKAPEERARGITIATAHVEYETAKRHYAHVDCPGHADYVKNMITGAAQMDGGILVVSAPDGPMPQTKEHILLARQVGVPSLVCFLNKVDAVDDPELLELVEMELRELLSFYKFPGDEIPIIRGSALSALQGNNDEIGKNAILKLMDAVDEYIPDPVRQLDKAFLMPIEDVFSIQGRGTVVTGRVEQGTIKTGEDVEILGLTQSGPLKTTVTGVEMFKKILDHGEAGDNVGLLLRGLKRGDVERGQVVCKPGSLKTYKKFEAEIYVLTKDEGGRHTAFVTNYTPQFYFRTADVTGKVELLGETKMVLPGDNVTANFELISPVPLETGQRFAMREGGRTVGAGVVSKVIS

SEQ ID NO: 60793 - protein, 474 aa, Zea mays
  Clone ID: LIB3591-116-A11_FLI.pep
ERTHRPSPISDPLVDPKMQIFVKTLTGKTITLEVESSDTIDNVKAKIQDKEGIPPDQQRLIFAGKQLEDGRTLADYNIQKESTLHLVLRLRGGMQIFVKTLTGKTITLEVESSDTIDNVKAKIQDKEGIPPDQQRLIFAGKQLEDGRTLADYNIQKESTLHLVLRLRGGMQIFVKTLTGKTITLEVESSDTIDNVKAKIQDKEGIPPDQQRLIFAGKQLEDGRTLADYNIQKESTLHLVLRLRGGMQIFVKTLTGKTITLEVESSDTIDNVKAKIQDKEGIPPDQQRLIFAGKQLEDGRTLADYNIQKESTLHLVLRLRGGMQIFVKTLTGKTITLEVESSDTIDNVKAKIQDKEGIPPDQQRLIFAGKQLEDGRTLADYNIQKESTLHLVLRLRGGMQIFVKTLTGKTITLEVESSDTIDNVKAKIQDKEGIPPDQQRLIFAGKQLEDGRTLADYNIQKESTLHLVLRLRGGQ

SEQ ID NO: 60794 - protein, 242 aa, Zea mays; identical to SEQ ID NO: 46973
  Clone ID: LIB3591-117-E3_FLI.pep

SEQ ID NO: 60795 - protein, 235 aa, Zea mays
  Clone ID: LIB3591-118-F3_FLI.pep
NQLSHDSRHKPYKYFERQYHPWAMAETLDNPDTAAASTTDGLITTAKTEHQVEGALLLDIVVCKGATILQLLAGEDQTLLVWGNPLLVLDLSLHVVDGVRALNLQGYGLASQGLHKDLHTTPQAEHQMEGALLLDVVVSQGATILQLLAGEDQPLLVRGDTLLVLDFGLHIINGVGALNLQGDGLACQCLHEDLHSSPEAQHQVEGALLLNVVIRKGASILQLLAGKDKTLLVRR

SEQ ID NO: 60796 - protein, 478 aa, Zea mays
  Clone ID: LIB3591-119-E8_FLI.pep
DRAAASPPAVEEPVRATSVLDSLGAEVLAVMSPVSICMALVVLLISLLSPPSSGSAAGSPPPVTAATLVYLESPNDSPGQKLLGALLDAAVFVALVAAVTFVLVALYYYRCTGFLKNYMRFSAFFVIFSMGGAIVAAVLRRLGAPLDAATVLLLLFNGAAVGVLSVFASAVPILVRQGYMVALAAIVAAWLSRLPEWTTWIMLVALALYDLVAVLAPRGPLRMLVELASSRDDELPALVYESRPTVGPATSSSSYASVMGSVEMQTMSDSGQICGNRYDRVEQEEYASHASLEMRDLGRGRSSVGEMNRPRGPVLQMENLEREVPATSAELTANQGGGSQHAIIQIEQPDEEETSPLVSAPSTNTAALDVEEHRQSSSSEPLDFEMFESTRGIKLGLGDFVFYSVLVGRAAMYDLMTVYACYLAIIAGLGCTLILLSICRHALPALPISIMLGVTFYFLTRLLMEPFVVGASTNLVMF

SEQ ID NO: 60797 - protein, 550 aa, Zea mays
  Clone ID: LIB3591-119-H8_FLI.pep
KRAVPEPKCSAAAMGAAAAGGHALRAVGDVVSFPATVAAFVEALLQGWAEARAGLLVPLLRAAVLLCTAMSLIVLAEKVFLGAVSSVAKLRRRRPGRVCRCDPDEEAAAASQAYPMVLVQIPMYNEREVYQLSIEAACRLTWPVDRLIVQVLDDSTDSVIKELVKGECERWATEEGINVKYETRKDRAGYKAGNLKEGMRHAYVRACEFVAMFDADFQPPPDFLVRTVPFLVHNPSLALVQTRWKFVNANDCLLTRMQEMSMDYHFKVEQEAGSSLCNFFGYNGTAGVWRTQAIVESGGWEDRTTAEDMDLALRAGLMGWEFVYVGSIKVKSELPSTLKAYRSQQHRWSCGPALLFKKMFWQILAAERVSVWKKWYMVYDFFIARRIVGTFYTFFFFSVLIPLNILLPEAQIPVWELIYIPIAITLLNSVGTPRSIHLVILWVLFENVMALHRFKAILIGFLEADRANEWIVTQKLGNLQKLKSIARLTGSYRFKDRFHFLEVFIGLFLLASACFDYLYRDDYVYLFVLPQSIMYFAIGFQFIGLNVSED

SEQ ID NO: 60798 - protein, 411 aa, Zea mays
  Clone ID: LIB3591-121-H10_FLI.pep
QGQSHLPSTQAGSHTELSLRRIKSRSRGALAVAVGVAGLPQHGCLRDQRGHHVRVHVGRRPPVLEVAFAFLLGVAAHPHRRPAVRDAPDEGVDVGGLVAAGEAALVAVPVRGDVLPVPEAQLADRLLDHLVPAVAPHRLGAVVGVCTSAIPVPRNWLGVEGDNHAGDLGDPLKNVASHPELVAGRDADGRTDLELPLPRHDLPVDATDVDAGVEAGLVVRVHDVPPVGLVRSDGAVVRSLRARVAAQRPTERPLGVLLEKGVLLLNPEPWFLSLDVRVAKDLRGPVPLVARDRLPVRLVAVAHDQYVLPLPERVPEDGPRAKDDFAVVARSLAGAGAVEVPLRKLAGVINRSGQRPGFAPDVLGDDLPGAAREVEVDEVGEQSHGSDEKLVGRSPEKAEHARAGQWPRVSV

SEQ ID NO: 60799 - protein, 230 aa, Zea mays; identical to SEQ ID NO: 50035
  Clone ID: LIB3356-022-G1_FLI.pep

SEQ ID NO: 60800 - protein, 104 aa, Zea mays
  Clone ID: LIB3356-023-A5_FLI.pep
PQAQARSQTRQRNLVLHADDAADALPLGHQVERLVDLGERDAVRDELLHLQLLFHVQLHHIWQISAWLIVAKEGPLQGPFVQEVHRVGLELSVLMRHTHQHGNT

SEQ ID NO: 60801 - protein, 190 aa, Zea mays
  Clone ID: LIB3356-038-D6_FLI.pep
LSPPQTRLRTIRRRRRTAMAASATAARPLAGTAVPLPLSTRTRPARVALLSLIPPAPAQRLALRRGAWLSPPERSRSVRCLAAMSPEMRATLDKVVGSSKVVLFMKGTKDFPQCGFSHTVVQILRSLDVPFETLDVLANEALRQGLKEYSSWPTFPQLYIDGEFFGGCDITVEAYKSGELQETLEKAMCS

SEQ ID NO: 60802 - protein, 273 aa, Zea mays
  Clone ID: LIB3356-040-B2_FLI.pep
ELTRCRGRNSRGGLHKCAPCTAMPNNKIVAANMEEKGAGGKAAVPHDELPRFTIFLIPNRREPPLDLVELVCLHHRISLGNGVPGSSPVVELAVVLVGVAVECAVQVPTPAVESRKSNPLPAGAAPVRPYLPPFGDRRHPLAGSGNISGLLHVHCLQLNLGNSYYRVAASNNRLHDGVAAVHDAVDRGGSQLGLILLRYHLLVALGAHVHGRRAAEEATVIDAEDGSLGGLAPSLLVLHGFLNSDETALFAIPLRRSPRGRRGGEGRGIAGNS

SEQ ID NO: 60803 - protein, 81 aa, Zea mays; identical to SEQ ID NO: 54180
  Clone ID: LIB3356-047-G5_FLI.pep

SEQ ID NO: 60804 - protein, 124 aa, Zea mays
  Clone ID: LIB3356-048-C5_FLI.pep
TTPSTRQRGSTRARRMDQAEAQDAQLQDAPQEQLALLFSRPDGIVARPHVHGLHSQCSPQPQVVCSRCPPLPDVHLQSLPPGHGTAHPHLSSHPMPDRRLLISSTGLRLRSPHLNQLAAVVALG

SEQ ID NO: 60805 - protein, 124 aa, Zea mays
  Clone ID: LIB3356-048-F4_FLI.pep
SKMFFIKLQNNFSLHGKRHVNELCSCFLQVRDEISTLLRLLQPREDHLGSRNVLFRVKQVLIQSVFFPDYSLVFVSRRVGVACSGTRLSPKKTVQVWTLLVAGALVDRVALRALGLKDLLAGFR

SEQ ID NO: 60806 - protein, 161 aa, Zea mays
  Clone ID: LIB3356-053-H7_FLI.pep
AVHPLTRSLPSPSAAPERRLLPELRRQQWRLSPPRFPPSRACGCCRGPRPTSTPPARRSSSPRWPGWPTSSPPTRRSCRWRGATRSRKLRSTSRTPPSRAPDAPTRLSSGHDEIRYIYDTSVDLISHRAQPASQSVSTSTSTRDDAIHVCMYAFIKNKLLG

SEQ ID NO: 60807 - protein, 125 aa, Zea mays
  Clone ID: LIB3355-002-A12_FLI.pep
HTAYIYICSTCLLAEQIICFCCLLILEVGEALVEVVLGMPRLRMFFALGLGGGADEGLHADLALDVHGLLVGLQLAAFAALVLLGVPLARHLGLLAVAAAHGRRILRWKRRRKRREERGRGRVVV

SEQ ID NO: 60808 - protein, 164 aa, Zea mays
  Clone ID: LIB3355-008-C10_FLI.pep
LAIIEHACVLDNHKDQQTWPLHCPSISPDLAVVAPGLVAVEPVVDGGGVGLRPVEEVGAHALGGQVAPRVEDAAPHVAGAARRRRRRRRRRRHRRRRGRRHRLRPLVAAAVRVFVDDERTGGGGLAELLEARLRARPGHHVVPQLVQHLLIRSPLSTSQNHQDE

SEQ ID NO: 60809 - protein, 126 aa, Zea mays
  Clone ID: LIB3355-011-A5_FLI.pep
TQHAAKLNKRHNEHTYIADWQVVLCTSGGDVAIGHLYEATCLFVRSRGQLCSAAHSATPAEHTGTCMVAFLQFLGQPVWRLVTAFFLPLWLVTTSASTFFLLPPPFFFLLPLSFFLLASPCTLLLL

SEQ ID NO: 60810 - protein, 116 aa, Zea mays; identical to SEQ ID NO: 48140
  Clone ID: LIB3355-012-B1_FLI.pep

SEQ ID NO: 60811 - protein, 296 aa, Zea mays
  Clone ID: LIB3355-013-H11_FLI.pep
SNLLQLQMGKSSSPTSRIFPTNRRRLCRSCHVTLMVPRKGVLCGGGGGGGSDGPIWTCCWCSLCRAVEIFSSRSGARPPAFAAVSDEEGWLCFGGARARLGAVRPIPAEHRGSCRDSRLLGGSAAWSGLAGGLPTPSDRAGGSCAVVPVPGSAEPVAVAVVMASLSRRRSMPLMELVAALSAFSTTSKRLDLRFLCVRLLCRRKYFWAWLATCVGVRVVTKCREMPRQSPFPSFSRPARNRLCSSSVHGTPFFLSCAALPMSPSERYPWAIFSGASSTETSDEEEEADGEALLVAA

SEQ ID NO: 60812 - protein, 151 aa, Zea mays
  Clone ID: LIB3355-015-E10_FLI.pep
TPYPHLIKRPTKDQATSQLSMELSKLCLGQLLIEPCLHEIFLQVTWNSLMGEVLCVVVEALGVEGCAAGRRLVHTSVELLHGLDLRAGAARGVDGLLILLGSGGGCLLPHNHRLPVLPDRPDPGHPPLPPSLSLTLRSLVPTRQPLAGLPL

SEQ ID NO: 60813 - protein, 235 aa, Zea mays
  Clone ID: LIB3355-024-B4_FLI.pep
DQIKSDLSTPSPSMAIVYALVARGTVVLAEFAAVSGNAGAVARRILEKLPPDAESRLCFAQDRYIFHVLRSDAAGITFLCMANDTFGRRIPFLYLEDIQMRFMKNYGRVAHSALAYAMNDEFSRVLHQQMEFFSSNPSADTLNRLRGEVSEIHTVMVDNIEKILDRGDRISLLVDKTSTMQDSAFHFRKQSKRLRRALWMKNAKLLVVLTVVIVVLLYLIISAFCGGLSLSSCRS

SEQ ID NO: 60814 - protein, 95 aa, Zea mays
  Clone ID: LIB3355-032-H5_FLI.pep
RRATPWNCPSTCRRSAAAATVGGRRNTWLVAGGTPSLLRSGQRPLIDHRLWNKHKAGANGRRWGCSRWRCRPPRSVLTRSSSVPTAIAMCRLLIS

SEQ ID NO: 60815 - protein, 420 aa, Zea mays
  Clone ID: LIB3355-034-H11_FLI.pep
PDQQRLIFAGKQLEDGRTLADYNIQKESTLHLVLRLRGGMQIFVKTLTGKTITLEVESSDTIDNVKAKIQDKEGIPPDQQRLIFAGKQLEDGRTLADYNIQKESTLHLVLRLRGGMQIFVKTLTGKTITLEVESSDTIDNVKAKIQDKEGIPPDQQRLIFAGKQLEDGRTLADYNIQKESTLHLVLRLRGGMQIFVKTLTGKTITLEVESSDTIDNVKAKIQDKEGIPPDQQRLIFAGKQLEDGRTLADYNIQKESTLHLVLRLRGGMQIFVKTLTGKTITLEVESSDTIDNVKAKIQDKEGIPPDQQRLIFAGKQLEDGRTLADYNIQKESTLHLVLRLRGGMQIFVKTLTGKTITLEVESSDTIDNVKAKIQDKEGIPPDQQRLIFAGKQLEDGRTLADYNIQKESTLHLVLRLRGGQ

SEQ ID NO: 60816 - protein, 175 aa, Zea mays
  Clone ID: LIB3355-038-H3_FLI.pep
IDKITRPKPGWAHTSVPPAAAATAAVAATATLAPTAVAATASVAAAATFAPTAVAATAAITAVTAPATITAAAAATAAVATAATATATGLGLVNGDVTAVELLAVHVLDSVEHGVLGGEGNEAEAAGPPRLPVGDDLGVEDLAVGGEGILQRLVAGGPGKPADEATVLHISRRHR

SEQ ID NO: 60817 - protein, 184 aa, Zea mays
  Clone ID: LIB3355-039-H9_FLI.pep
IYYSWFVFIYSLAQHNILSQEAHRTAQSTDEDQETLNSTRTHQTYQSRATTQHTHTSRVAETQDPTPRRERDATIHLPSMSSSAGDLDALHLGLLDLGLGHGDREHAVLQRGPHLLRLGVLRQAEAPHELAAAALHAVPLVALVLLLPAALPADEQHVAVLHLHLDLLFLHAGEVGLEHVRLGR

SEQ ID NO: 60818 - protein, 268 aa, Zea mays
  Clone ID: LIB3355-053-G12_FLI.pep
TKTKTRLLVRHYYSRPATGRPMDALLDAQPLLHPADEVVDLLGRVEVLGDAGALGAALGPGGQPRALLLHADAAEAVVGEEPGREGHERDVDEAEGVAAEEGPVAERALQRAEDLDHLGARLRLAVPLELPQPGAAVVELLVDVVRPEAGLRARVGVGGEQRRRRRRERLVEVLHDDEGLADGAAVVQQHGDLLMHRVGAEEQLALVPQVLLQVLVGQALLVHRDAAALPEWAHPEVQQLQALLLLLGHVELFLVLASGVSYLAACVR

SEQ ID NO: 60819 - protein, 191 aa, Zea mays
  Clone ID: LIB3354-001-F10_FLI.pep
RVTAVYNLPDTNRREPPLDLVELVCLHHRISLGNGVPGSSPVVELAVVLVGVAVERAVQVPTPAVESREPNPLPAGAAPVRPYLPPFGDRRHPLAGSGNISGLLHVHCLQLDLGNSYYRVAASNNRLHDGVAAVHDAVDRGGSQLGLILLRYHLLVALRAHVHGRRAAEEATVIDAEDGSLGGLAPSLLVL

SEQ ID NO: 60820 - protein, 310 aa, Zea mays
  Clone ID: LIB3354-005-A12_FLI.pep
GSSRRLPQPLDSASLKAYQRDQAILLASRSVKPTMTLGSAAHKIPLEVAHTLVEIAEVARYAYHHRPGRPATHEGDPTAPPAGADSSGGTNEDAARLLEENAMLRARLADDLALLRELHGAPCVSKECPPDLYNRLMAAVNNVSFLAHLEKLQDESARQHNELTSGDMTEVEVADIPYKAGNGKKGLWVLVPCDTAGANLEEISGIDDENYVIVNEEDIVDGIAAFVARCILEDPKSKSLSPMQLQKAVAKALDSMKARWRWSTFWEAGQIIYILATWGITLAGLYKSRHVLKVAAKGAAVSARFVMKAI

SEQ ID NO: 60821 - protein, 120 aa, Zea mays
  Clone ID: LIB3354-012-E12_FLI.pep
TNQVFMSDLDIQIPTAFDPFAEANAGDSGAAAGSKDYVHVRIQQRNGRKSLTTVQGLKKEFSYSKILKDLKKEFCCNGTVVQDPELGQVIQLQGDQRKNVSNFLVQAGIVKKEHIKIHGF

SEQ ID NO: 60822 - protein, 231 aa, Zea mays
  Clone ID: LIB3354-015-E6_FLI.pep
AQSHTDMAEQPSRWPPRATSSLACLLSTQVAQAPTTRVTRARYFMFSRQAGRGSKQQPHAAPAPGSGTAAVLDDRFWSSARFSRRSALALSRSLSFSAMMHRFSRYSFRFTISMASAPPSRNLLSLNLLLLLTASVFFSCRSRLTTTRDGCSLPLPLLLQNQEPEHMLLWTADGVGGLLLARFFRARRLNLEMKCSKGFKAIYKDRSRLASPRLRAWVVALGFLFGGACTH

SEQ ID NO: 60823 - protein, 316 aa, Zea mays; identical to SEQ ID NO: 48083
  Clone ID: LIB3354-023-D4_FLI.pep

SEQ ID NO: 60824 - protein, 116 aa, Zea mays; identical to SEQ ID NO: 48140
  Clone ID: LIB3354-024-D8_FLI.pep

SEQ ID NO: 60825 - protein, 296 aa, Zea mays
  Clone ID: LIB3354-026-B1_FLI.pep
QKRPPVEEQDRSGKRRKGENEPDLSEHHVDKEKSLDSRGGDKFRSVDHEKSANEEQNLRAGKIKEKSDDKYDRDPREKLDRGERRRGEDAIERSTDRLSDRRERSIERMQERGTDKALEKGREDRNKDERNKVKYAEPSVDRTHSSDERFRGQSLPPPPPLPASFVPQSVGANRREEDADRRGGSSRHVQRSSPRHDEKERRQSEENISSFQDDGKHRREEDIRDRKREDRDTLSNKVDDRDREKGTSLKEDSDPSNVSKRRKIKREQTLEAGEYAPSAPQPPSHGSGSSQLSDIR

SEQ ID NO: 60826 - protein, 317 aa, Zea mays
  Clone ID: LIB3354-033-B3_FLI.pep
DTEIRTAVLFFPQSVPPLQVAITMGDQSGSRNGPQQKYVSGAQNAWDMFSDELSQKHITTGSGDLNDILGGGIHCKEVTEIGGVPGVGKTQLGIQLAINVQIPVECGGLGGKAVYIDTEGSFMVERVYQIAEGCIRDILEHFPHSHEKSSSVQKQLQPERFLADIYYFRICSYTEQIAVINYMEKFLREHKDVRIVIIDSVTFHFRQDFEDLALRTRVLSGLSLKLMKIAKTYNLAVVLLNQVTTKFTEGSFQLTLALGDSWSHSCTNRLILHWNGNERYAHLDKSPSLPVASAPYAVTGKGIRDAVSSNHKRARVT

SEQ ID NO: 60827 - protein, 298 aa, Zea mays
  Clone ID: LIB3354-034-H10_FLI.pep
TSHFMDGGSCGLEGASVVTSTTSTGIPLLPEKHCALFDEACGAMAGSNGPEGVPVVTSADDPPTRADIPFVCNSVDETCEATGGGSAPLEGQICTGFSKLISLEVKKGLQKCATFPPSSGQPQQEDCSCCHVGDELTCAPAYGRSVSLPQPTLKLVSAMKGGREKNGVASSPSENRHVKWAPDVYDPPVTSVCHSVTNSYQRRSKHRKKEKNKQKKRQKGKSKKNQQQSSAQNPSAPQVPGIGPKGVSTTGGQSPADDLSEHEAGIMDYSMGSQEANCGSSFLRESVAKMHFSTAEAS

SEQ ID NO: 60828 - protein, 116 aa, Zea mays; identical to SEQ ID NO: 48140
  Clone ID: LIB3354-037-A7_FLI.pep

SEQ ID NO: 60829 - protein, 177 aa, Zea mays
  Clone ID: LIB3354-041-B9_FLI.pep
RERRRLSPLGVPVPQPLVCCLPACKKEFVMASKRILKELKDLQKDPPTSCSAGPAGEDMFHWQATIMGPPDSPYAGGVFLVNIHFPPDYPFKPPKVSFKTKVFHPNINSNGSICLDILKEQWSPALTISKVLLSICSLLTDPNPDDPLVPEIAHMYKTDRPKYESTARSWTQKYAMG

SEQ ID NO: 60830 - protein, 246 aa, Zea mays
  Clone ID: LIB3354-053-E12_FLI.pep
RTQAWGRGAVARLMTPFNRRAAHASSPHLLRACSSASYTIALARLRRHFTSSASFSPAYSARQDTHTFMEVVQEVLRHGSADSVRAVIRANKKSYSLVQLIAASFDVYNILCSKNMTPNGMQDSSSKGRNGTGFLHGARVGIVAKPSPEFVAGVFGTWLSGGVAVPLALSYPEAELLHVMNDSDISMVLSTKEHHEIMENLSIKCSAYCSILPSVTSIPSEINPQEPSSNEAISSVSTLITETNSS

SEQ ID NO: 60831 - protein, 345 aa, Zea mays
  Clone ID: LIB3354-061-B12_FLI.pep
PSTSTTRATRYFSGFARMSWCTIESDPGVFTELIQQMQVKGVQVEELYSLDVGSLSQLRPVYGLIFLFKWIPGEKDERPVVRDPNPNLFFAHQVITNACATQAILSVLMNRPEIDIGPELSQLKEFTGAFTPDLKGLAISNSESIRTAHNSFARPEPFISDEQRAATKDDDVYHFISYLPFEGVLYELDGLKEGPVNLGQCDGADDLDWLRMVQPVIQERIERYSQSEIRFNLMAIIKNRKEVYSAELEELEKRREQILQEMNNASSTESLSSSLTEVISAIETVTEKVIMEEEKFKKWKKENIRRKHNYIPFLFNLLKMLAEKQQLKPLVEKAKQQKSASPSTS

SEQ ID NO: 60832 - protein, 155 aa, Zea mays
  Clone ID: LIB3354-064-D10_FLI.pep
ASPSRSSRFTAPPLASPTAARMPFKRFVEIGRVALVNYGKDYGRLVVIVDVVDQNRALVDAPDMVRCQINFKRLSLTDIKIDIKRVPKKSTLIKAMEEADVKTKWENSSWGKKLIVQKRRAALSDFDRFKVMLARIKRGGAIRQELAKLKKASTA

SEQ ID NO: 60833 - protein, 150 aa, Zea mays
  Clone ID: LIB3354-105-E8_FLI.pep
AFHTDTIRTKIMRRGCTLFKQGDPNCLKCFFIKLQNNFSLHGKRHVNELCSCFLQVRDEISTLLRLLQPREDHLGSRNVLLRVKQVLIQSVFFPDYSLVFVTRRVGVACSGTRLSPKKTVQVWTLLVAGALVDRVALRALGLKDLLAGFR

SEQ ID NO: 60834 - protein, 287 aa, Zea mays
  Clone ID: LIB3354-107-A3_FLI.pep
HVHFLYCWPQFPAPSFVIYQNLPSFTCHVKIKMARVYILSTKSLYPNLPSARYISCSTDYYEPNLIISVSPSSSQLRRRSRRRCRQVEHHVRPLLPGGRVLVRHGQAQLLEDEPDDAARDAAQRQLVHRHRDGEAVLHVAEPGRAAHPGVPKAPQPAAAAAGVVVPPEPEPELDVPVRHALVLADAHERVEDPVAAEHPAASAAAAPRLAVGVAGAQLAVPVPVAAAAAYILDLEVSHGAAAGALLLSGALLLLLERRGRELGGVHVAAEGRHGARRVRRGNRTAGR

SEQ ID NO: 60835 - protein, 415 aa, Zea mays
  Clone ID: LIB3354-003-A5_FLI.pep
QMENHNPLHSQIAEVKMDISASASVASGNKFCKGGACDFSDSSNSSKDAKERSTSMRKLIIAVILCIIFMTVEVVGGIKANSLAILTDAAHLLSDVAAFAISLFSLWAAGWEATPQQSYGFFRIEILGALVSIQLIWLLAGILVYEAIVRLINESGDVQGSLMFAVSAFGLFVNIIMAVLLGHDHGHGHGHSHGHPHDHGHGDSDDGHSHHEEPEQGHVHHHEHSHGSSITVTTHHHHHSGTGQHHDAEEPLIKHEADCEGTQSAAKKPRRNINVHSAYLHVLGDSIQSIGVMIGGAIIWYKPEWKIIDLICTLIFSVVVLFTTIRMLRNILEVLMESTPREIDATRLERGLCEMEGVVAVHELHIWAITVGKVLLACHVTVAREADADEILDKVIGYIKTEYNISHVTIQVERE

SEQ ID NO: 60836 - protein, 292 aa, Zea mays
  Clone ID: LIB3354-003-C4_FLI.pep
EASIGHGVRRQELTSEVTNAPSTDIRPSPDARSRRGQLNHEARMARYDRAITVFSPDGHLFQVEYALEAVRKGNAAVGVRGVDTVVLGVEKKSTPKLQDSRSVRKIASLDTHIALACAGLKADARVLINRARVECQSHRLTVEDPVTVEYITRYIAGLQQKYTQSGGVRPFGLSTLIVGFDPYTQKPALYQTDPSGTFSAWKANATGRNSNSMREFLEKNYKETSGKETIKLAIRALLEVVESGGKNIEIAVMTHEDGLHELEEAEIDEYVAEIEAEKAAAEAAKKGAPKGN

SEQ ID NO: 60837 - protein, 157 aa, Zea mays
  Clone ID: LIB3354-003-G5_FLI.pep
VTSRRASKREPVWRTRGCRSRRCCSGQHRHGGADGAELRADGAQGGQLRRGDRRHGRHPLRALDAPRLVQGGRRPPTTPPGPLVHLHISWPGDLSVPTDLLWAYCCRNCKRSLPLLCILLVDRYMELDVASYTSFRCLCLLAHYLWLIAKYMELHIV

SEQ ID NO: 60838 - protein, 210 aa, Zea mays
  Clone ID: LIB3354-003-H7_FLI.pep
LLPTRPVPCACVLRRDSRRGASSPPQLGSPLPARPKLLSARPGLPLPVPCPSVAAPCSFFLALGLEAPMAACVAPCSLCLFAARSLLLCARLLPRRAPLLNLVPSASLCPGVSCSLPWMPRRCLLCSVLPMALGPIRISPSSSLRAGDPPMEPLTLAISPWWPSPFSCSCPLSFHLYAHRLAQTPWCSFPLSSLAVDFSQRASLLAITAP

SEQ ID NO: 60839 - protein, 51 aa, Zea mays
  Clone ID: LIB3354-004-C5_FLI.pep
DFHAIEEHWKAARSEGPRLSSGTVNGRENSELSVATVRRTCCLAPALIAIF

SEQ ID NO: 60840 - protein, 339 aa, Zea mays
  Clone ID: LIB3354-009-B1_FLI.pep
KGEGAEGKVSEEGEGAGGKVSEEGEGAEGRVSEEGQGAEGKVSQEGQGAEKIGHEDEKKGAAVGTMKVKTGEEGNKGASEQSEAQIFVQMVAAFGLKDKFDEEFLRRLFVANGRKRELARIACVLGFEESLGDIVEELIKSGNAIEAIYVAHEADLLGKFPPVPLFKSYLQNSTDKAQAVLKSGRHSSSALEEANSLEGNAYRSVIRCVESCQLQSVFPLEVLRKKLGKLEKEKSDRKKAAGPSRFPNKRSRGAAGPYPFPAAKAARGSSFGPRFQNPVSRSLNYAPHAGYINPAAASPFSVPGSVSGRRGGVPYGGPGATYGGSPSFATGGGQQPFRR

SEQ ID NO: 60841 - protein, 247 aa, Zea mays
  Clone ID: LIB3354-009-E5_FLI.pep
GAAAAAAALLSHHGVVSLGLRACPRFTVRQRPARFDQPSCQGDSAPADPTREVQERDAVDFPLPGPDRVGGEDRNIQEQGAGGVSREDSVLLLPRLQHLHGHHRASRAATAVHVDEEAGEGAEAPRAVQERAVPHEAAQVERAAAGARQVEPGHRGGRGAPAAGPEEGDPPRHGRVWLRQLPHRLLPAASKPTSKAEQVRTPTPSTVYQENNPPRIGLIWLPHPLVWQTRLIYVIIIIIIDKPSHYG

SEQ ID NO: 60842 - protein, 387 aa, Zea mays; identical to SEQ ID NO: 41756
  Clone ID: LIB3354-009-G7_FLI.pep

SEQ ID NO: 60843 - protein, 180 aa, Zea mays
  Clone ID: LIB3354-012-D11_FLI.pep
PLGQSVVVVTAHIRLSHGVLVRPSPGGGLVPEAVGLAHVGDLRDERVVRVGVGEQGADGEQHLGDRQRGAPLLLEDVQADAAVAVDVGVEHLRLERHLGRLERVVRREVDGDQEHAPRVGAVAGPHDRRLPVEHVVGHRPCAAGRGWIPLQVLELLDDPPQRHRPRKNYRAGLKLWKLQN

SEQ ID NO: 60844 - protein, 170 aa, Zea mays
  Clone ID: LIB3354-014-B11_FLI.pep
VPAGRTSAVPMAKPLNGSGRSMPRSNEGMRLIFSAVVGVMLGYLFGISFPTVNITKLHFPSSIISYIEDRNSGITTQTLLNHAWASANNHKKNSSESNTDEIPEIYVPTNPKGAERLPPGIVVSETDLYPRRLWGDPSEDLTSEPRYLVTFTVGIGQKANIDAAVRKFLL

SEQ ID NO: 60845 - protein, 201 aa, Zea mays
  Clone ID: LIB3354-014-G4_FLI.pep
GGMAENPQLFGNGMPVPFYSEMFVLARDGVEFHVDKIPSAPGGHVKTKGTIYLSNIRMVFVANKHVGNFFAFDMPLKFNQPIFHCNNISGFVEPVVPDNQNRALYSTHTFKVLFKDGGCGTFVPLFLNLTASVRRYNQFETQSAASMAPRVDPLQAVQTPVDDMMRHAYVDPNDPTKIFLQQPAPESQLRRRNYHGPADAN

SEQ ID NO: 60846 - protein, 200 aa, Zea mays; identical to SEQ ID NO: 46069
  Clone ID: LIB3354-019-F4_FLI.pep

SEQ ID NO: 60847 - protein, 414 aa, Zea mays
  Clone ID: LIB3354-020-H11_FLI.pep
AMNELCDLEVHINGHHTLHLHQSVMCAFSGRLRTLVKQEKKKKGGGRKEAVSINLAGGFPGGADGFELVARFCYNDGRVLLCPSNLPLLHCAAVSLEMTEEVCACNLLAQAEAFVNGLYYWTWADVLAAVRSCEPFAAAADASGLLDRLISALFSKITGATPGPGPGTPNRSSSSCSSSPDTAGLRRSSSSANKTPESMRPCAGREWWFDDMTSLSPPTVEKMMRVLGCYGVENKNLILTRFLLHYLRAATRRPPALEREGAALAGLADTAVHGVALVGGTAFSCRGLFWVLRIVSAVGLSRECRHKLERLMGLMLDQATLDDLLVSGDDGGGVYDVNLVMRLVRVFVASEEEADAPSERMRKVGRLVDKYLGEISPDQGLKVSKFLAVAESLPDSARDCYDGVYRALDIYLEV

SEQ ID NO: 60848 - protein, 133 aa, Zea mays
  Clone ID: LIB3354-023-G11_FLI.pep
GSPHPCPDPMANSNLPRRIIKETQRLLSEPGGVFKLELFLPEEYPMAAPKVRFLTKIYHPNIDKLGRICLDILKDKWSPALQIRTVLLSIQALLSAPNPDDPLSDNIAKHWKANEVEAVETAKEWTRLYASGA

SEQ ID NO: 60849 - protein, 208 aa, Zea mays
  Clone ID: LIB3354-024-A5_FLI.pep
IRPLPRVPRMTAAGFSRSASRQITFPASPSTILALVRTSNVLNASTAKSSMSSRLLSYTISFCTPKQMTIRIQTEQDGDGMDEVDRVGHARDVPERPVKGVLGVRAEVDGDEEVPAAAPLPGLPLELRLRAGNHGDEVRQHHLPPAVLLHVLLHRLHRPRARRSLEGTIGGGARSADAFPHGLRVRQHGARPRAADCCGRGDWRGRAH

SEQ ID NO: 60850 - protein, 526 aa, Zea mays
  Clone ID: LIB3354-024-C2_FLI.pep
PRVAAGLLPGLSYISAAGKLSSDPFTHGLILKPSEKQNAQQEQEALGNSALGAGPWQPHLLQIMPGSRASAHVPILRQLPRHQENHERRQERPRPKDEDEPRHVVGALLAPQPPLLSPQSQRCGQQQQQRRRLGSVQRGGRRHGVAGRDRPGVPRRVRGRHVLRGPPGRQGGPEGPPHRRDGGDRALHRRLRSGLLARRAQLLLLPGRADGGRPVPVVRVAVGGRGGRQLVREEQEGPHHGGVERPHLRGEHFGVADRRCHVEEEDLCLEDDEKKPSDMDAPLLERERRRADVEEKAVGFIEAWRIPGVASFALCLFFCKLVAYTFLYWLPFYISHTAIGGEYLSDSAAGVLSTLFDVGGVVGGILAGHISDHLDARALTAASFTFSAIPALFFYRVYGNVSLAWNIALMFVTGMLVNGPYALITTAVSADLGTHSSLNGNSRALATVTAIIDGTGSIGAAVGPLLTGYISARSWSAVFTMLMASALVAGLLLSRLVAAEVVAKMESRRTPAPADSDLPVSSMDEP

SEQ ID NO: 60851 - protein, 121 aa, Zea mays
  Clone ID: LIB3354-024-E12_FLI.pep
AWEGCDSRLLPLEVLFLRLVPWWELLSRSHELGCPSACPWTNHSKPWGSHRGLHRSRSTLHPRPALGGKVAGSAGWGWIMRLKRPWNSWTVSTQGFLEQISLAMVAGCLCWECALSVQCFG

SEQ ID NO: 60852 - protein, 127 aa, Zea mays
  Clone ID: LIB3354-025-C8_FLI.pep
AGAASNHGRSSERPPPPVYKFPSFSSSIYRGHQIQEEGRAPRTFGARSGSTSSRASSWLASSSSDHLQGSWCSLPLSPIKFSCLISTFRSQLPSIPSLRPMLGTLVQQQGQRTTFTCASSSVMVARA

SEQ ID NO: 60853 - protein, 337 aa, Zea mays
  Clone ID: LIB3354-028-C2_FLI.pep
PRRIDIYTQRSEHATNLTNSKAAKQIEHGMYNMNTSSINAASSWSIMKEEFTFQAHDRPFNNCHASTIVEVEKEIFLVSYFGGSIEGAPDVKIWTQRYSDGYWHPPVVADEENATAMWNPVLFQLPSHELLLFYKIGEHPQNWSGAMKRSLNGGMSWLEREQLPPGILGPIKNKPFLLDDGRLLCGTSVESWNSWGAWLEVTEDAGRTWSKYGPIFIQGEKLGVIQPVPYQTTNGSIRMLLRSHQTIGSVCMADSYDGGLRWSFARKSVLPNPNSGIDGIKMKDGRVALAYNTVSRGTLKVAVSTDDGLSWQEVVTLENAEGWEFSYPAVIQTQGRP

SEQ ID NO: 60854 - protein, 173 aa, Zea mays
  Clone ID: LIB3354-030-E3_FLI.pep
QPYLGAAAAAGGPRIVGKMQIFVKTLTGKTITLEVESSDTIDNVKAKIQDKEGIPPDQQRLIFAGKQLEDGRTLADYNIQKESTLHLVLRLRGGAKKRKKKTYTKPKKIKHKHKKVKLSVLQFYKVDDTTSKVTRLRKECPNSECGAGVFMANHFDRHYCGKCGLTYVYNQKA

SEQ ID NO: 60855 - protein, 316 aa, Zea mays
  Clone ID: LIB3354-031-A12_FLI.pep
LAPRTRSRDLEYLFGKYGRIREVELKRDYAFIEFSEHRDADEARYQLDGRDVDGSRIVVEFAKGVPRGPGGSREYMGRGPPPGTGRCFNCGMDGHWARDCKAGDWKNKCYRCGERGHIERNCQNSPRSVRRERSYSRSPSPRRGRGRSPSYSRSRSRSRSRSYSRSRSLSGSPRGGRRDRDDRRSRSLSYSRSPMRSPPAKEKERSPTPGGSRSPRSRSPQDQVMSPPPKDNGDRNGSDRGDSPRGRENSRSRSRSRSPSGGNRSPAANGRSPSPRGDRTPSPMADRSPSPKGNGNNDGGDDDTGRGGSPTGSKSP

SEQ ID NO: 60856 - protein, 126 aa, Zea mays
  Clone ID: LIB3354-031-F3_FLI.pep
GAASNHGRSSERPPPPVYKFPSFSSSIYRGHQIQEEGRAPRTFGARSGSTSSRASSWLTSSSSDHLQGSWCSLPLSPIKFSCLISTFRSQLPSIPSLRPMLGTLVRQQGQRTTYTCASSSVMVARA

SEQ ID NO: 60857 - protein, 116 aa, Zea mays; identical to SEQ ID NO: 48140
  Clone ID: LIB3354-032-G2_FLI.pep

SEQ ID NO: 60858 - protein, 193 aa, Zea mays
  Clone ID: LIB3354-034-H12_FLI.pep
IPMASRRRTLLKVIILGDSGVGKTSLMNQYVNKKFSNQYKATIGADFLTKEVQFEDRLFTLQIWDTAGQERFQSLGVAFYRGADCCVLVYDVNSMKSFDNLHNWREEFLIQASPSDPDNFPFVLLGNKVDVDGGNSRVVSEKKAKAWCASKGNIPYFETSAKDGTNVEDAFQCIVKNALKNEPEEELFVCRSI

SEQ ID NO: 60859 - protein, 152 aa, Zea mays
  Clone ID: LIB3354-036-C8_FLI.pep
RRRRPTVQIFVVIFSGNEHPKMVVLQPDRFLSELTCMYERSTEKGSVWVTMKRSTLKGKAQLRKMENKGQEVEHRCLIRASNGKKNISTSVSLKEYTKFQASYATVLKAHMHALKKRERKDKKKAADAEKAIETAPKKQKKASSKKSSGSKS

SEQ ID NO: 60860 - protein, 581 aa, Zea mays
  Clone ID: LIB3354-037-B3_FLI.pep
GFHLLSPPLLQRRPRATPSISFPSDPEASSSLQRLPRLPVSLLGGFAMSDMESVAALMNSTSSKIQQLQEAFAELESQSTVSMNLKWKQLEDHFRGLEQSLKKKFDELKEQEKEFQETVAKSEQILEQREAAVVAKELTSLEKLQEKREAALAMIFSKSRLSLPVPTINPMNKALNNLGVKWPKPASEESVHLQVDNAVVTPRSELVALCEEMNVKGLHKFISDNRKNLAAIREEIPSALKKTSHPYGLVLDSLEDFYSGDNLVLDGKKDGDLLGVRRTCLMLLESLGQLHTAGITCFSLEGHMLTTNIIERAKKIAFEWKSKLDNLEIDASNGNCLEAHAFLQLLATFGISAEYNEDDLCKLLPYVSRRRQTPELCRLLGLSQKMPGVIEVLVKSGRTIDAINLAYVFELTEQFEPVQLLKAYLRDVKKLSHARNVKISPGAQNEMNERELCALKSVIKCIEDHKLEEQYPVDPLQKRVLQLEKAKADKRRAVEAAKPQSKRPRANGSTFAPRATGFADKSFYPATPERHPSNPYERQFVYGAEAHLPPMMSSASYPMQPAHGPYYGNGYPVQYQVPYIH

SEQ ID NO: 60861 - protein, 313 aa, Zea mays
  Clone ID: LIB3354-037-B6_FLI.pep
RLFLYCLAKLLRRLLDAIDVLLTDGCQGLLVPLSARTRKRHHQHQGQAPSSDAGALLATSSDCCVLTREDIVRHLFGSISHFSPVAALTVASLGLVRRDVVHAVHVDDDGLDVIPLLRRAVSDGTAVAVVADDDALVGEICPSVLASCDVEAVSAAFAGLSAGDTMAYIDCSLSSHSPPEFLVRAIRAQLAGKGLDAMAELVECAGKDTAVLPLSPSSSLSSTSSDEDSPSGRARRPRRMSSGSFGWRSTEDVVACHSESSLVAVMAQALAHRVGYVWVANETSGALVGVVRFADVLAVLREQLRPQSVSPRC

SEQ ID NO: 60862 - protein, 215 aa, Zea mays
  Clone ID: LIB3354-037-E11_FLI.pep
EVDHVLVDVVLGADADDEVEVRELVQVLHRELVLVVAPEVLQEEAHVGGVGERVPAAVAEEEREARRDAGHPVHRRLGLAVAGDVPLRQHVVVLGQHAVAHGLSEVDHGFGGGRLGLVLEEDVDGGAVEAVVLAGDGADEVVAAHARAAAERPDEVRHRRPARRAEQVRSGQVRSAQLSCMPASICSGGCTRARYVTYASGSNSAMPRKSESTCE

SEQ ID NO: 60863 - protein, 116 aa, Zea mays; identical to SEQ ID NO: 48140
  Clone ID: LIB3354-042-F9_FLI.pep

SEQ ID NO: 60864 - protein, 67 aa, Zea mays
  Clone ID: LIB3354-044-F10_FLI.pep
LDNTANWSLRPCCGYDTVVQKLGVMLHTILFVGRRFSTTDVSGSKEAHRGAAAAATMGPPRGLYKDS

SEQ ID NO: 60865 - protein, 233 aa, Zea mays; identical to SEQ ID NO: 47999
  Clone ID: LIB3354-046-B3_FLI.pep

SEQ ID NO: 60866 - protein, 280 aa, Zea mays
  Clone ID: LIB3354-046-G9_FLI.pep
LRPDPTNRRGQRTMESGTERRRHHFVLVHGTCHGAWCWYKVATLLSSAGHRVTALDMAACGASPGRAEEVPSFEEYSRPLLATVAGLAPEEKVVLVGHSFGGVSLALAMEQYPDRVAVAVFVATGMPSAGKPMAFVFEQFLQEEYPADRYMDCEFETSGDPQRPVETFRFGPQYLKQRLYQLSPPEDLTLAMAMVRPSQRFRDDATMKGGVLTAERYGGVRRVCVVAEDDASVPAGFQRRMASWNPGTEVRGLQGADHMSMLSKPGELSELLMEVANKYS

SEQ ID NO: 60867 - protein, 395 aa, Zea mays
  Clone ID: LIB3354-047-H7_FLI.pep
PPPLKQPNPRLGKMLGGLYGDLPPPSSAGDEDKASTASVWSSATKMAPPTLRKPSTTFAPPPSILRNQHLRPPKATSIPAPPVVAAEPAPATSFQPAFVAVQSTVLEEYDPARPNDYEDYRKDKLRRAKEAELNKELERRRREEQDREREREQREREAREREEKDYQSRASSLNISGEEAWKRRAAMSGSGSAARTPSSPPHGDGFAIGSSSSAGLGVGAGGQMTAAQRMMAKMGWKEGQGLGKQEQGITAPLVAKKTDRRGGVIVDESSSRPPEKKPRSVNFDGQPTRVLLLRNMVGPGEVDDELEDEVASECAKYWTVSRVLIFEITQADFPADEAVRIFIQFERAEEATKAMIDLQGRFFGGRVVQATFFDEERFGRNELAPMPGEVPGFFD

SEQ ID NO: 60868 - protein, 161 aa, Zea mays
  Clone ID: LIB3354-049-A10_FLI.pep
RKEKMQASRARLFKEYKEVQREKSADPDIQLICDDSNIFKWTALIKGPSETPYEGGVFQLAFAIPEQYPLLPPQVRFLTKIFHPNVHFKTGEICLDILKNAWSPAWTLQSVCRAIIALMAHPEPDSPLNCDSGNLLRSGDIRGYQSMARMYTRLAAMPKKG

SEQ ID NO: 60869 - protein, 335 aa, Zea mays
  Clone ID: LIB3354-049-C2_FLI.pep
LLLLLPPLTLADRPRPPTSEALAAAGTALPARRSSARSVSGFLDAPAAPMAALPPAAEDPDAVEIREVWASNLEEEFAVIRAVVDVYPYVAMDTEFPGFVVTPSAEYRFTCDRNYAALEGNVNVLKLIQLGLTLSNGAGALPPCGTGGRRCIWQFNFRGFDPHTDPSSSDSIDLLRRSGIDFDLFAAEGVDSTRFAELMMSSGVVLNDDVQWVTFHSGHDFGYLLKLLTGREMPNTLDEFLKLTKTFFPVMYDIKHLMKFCGGGLYGGLSKLGELLKIERVGISHQAGSDSLLTLQCFMKLKQLYLKESVKLYDGVLFGLIPGEVEIKPVAPPIE

SEQ ID NO: 60870 - protein, 116 aa, Zea mays; identical to SEQ ID NO: 48140
  Clone ID: LIB3354-049-F3_FLI.pep

SEQ ID NO: 60871 - protein, 376 aa, Zea mays
  Clone ID: LIB3354-050-A1_FLI.pep
LNPSLGFLARRSAPRPPPLRARSPLHLPPQSFDCSTPPPISTPFPFSSFPPIRPPREAFVSRAAATMSSFWGVEVKPGKPYTLTHGDFAGRLRLTQATLGVDVGKGEKATGVKRCVLQCSAENRDPVFLCVLMPEQSETCHLELEFEEEVTFSVIGPRSIHLAGYYMTDACGEDRSDGDSGSDSLQSSDEDGFLEEDDDGNMVMGYSDSEDDDSESDDEEMAYNQGRGKSSVVIEEIEEDDDKAAVAEVQKGLKKQIRENGDESQLQLAARNPPTESLESEDEDGFPVSFSESKKSSEIVSNKNGGKDKETSNKDLKRKSGAISDRGDSSGGKAEIDGASKKKKKGKDKSTVMDTGKVNNEEKEVKLHDSPADPVG

SEQ ID NO: 60872 - protein, 127 aa, Zea mays; identical to SEQ ID NO: 60852
  Clone ID: LIB3354-050-B9_FLI.pep

SEQ ID NO: 60873 - protein, 201 aa, Zea mays
  Clone ID: LIB3354-052-D2_FLI.pep
KIQDKEGIPPDQQRLIFAGKQLEDGRTLADYNIQKESTLHLVLRLRGGMQIFVKTLTGKTITLEVESSDTIDNVKAKIQDKEGIPPDQQRLIFAGKQLEDGRTLADYNIQKESTLHLVLRLRGGMQIFVKTLTGKTITLEVESSDTIDNVKAKIQDKEGIPPDQQRLIFAGKQLEDGRTLADYNIQKESTLHLVLRLRGGQ

SEQ ID NO: 60874 - protein, 259 aa, Zea mays
  Clone ID: LIB3354-055-E10_FLI.pep
RVHSKPFRLFLRLLAMAPPRRALLVLAALLLSLSLGAASFHSDELLLNDDEEFEGVVARPSAPSPPAAPVVSSSRRRSADAPLPGSGESNAVQFTLEHDLGDGKGFVSAGTFSARLKTFAHGTQRCIPRDSLDEHIVIHMDGVNILAVNYGSVDGCQYPRPMKLPSKWTFSSYTILKTAEQAPRTPSFADQLIEADNGLGEVMKPPEKSFWAKYWMYIIPLGLIVMNAVTAAANIPEEAAGQGQPGAQRAPAAVAGRRR

SEQ ID NO: 60875 - protein, 102 aa, Zea mays
  Clone ID: LIB3354-056-F3_FLI.pep
SMLRHWSSTPASYILAEQRGAESRGRERQLRRLAMGEQGRPSSNRIRDIVRLRQLLKKWKQIALSPKAGKSGGGGGSHGVPKGFFTVCVGKEMVSEKQQTEL

SEQ ID NO: 60876 - protein, 469 aa, Zea mays
  Clone ID: LIB3354-059-B5_FLI.pep
RRLPCAPPFRPLSLASSISPPTMGKEKSHINIVVIGHVDSGKSTTTGHLIYKLGGIDKRVIERFEKEAAEMNKRSFKYAWVLDKLKAERERGITIDIALWKFETTKYYCTVIDAPGHRDFIKNMITGTSQADCAVLIIDSTTGGFEAGISKDGQTREHALLAFTLGVKQMICCCNKMDATTPKYSKARYEEIVKEVSSYLKKVGYNPDKIAFVPISGFEGDNMIERSTNLDWYKGPTLLEALDQITEPKRPSDKPLRLPLQDVYKIGGIGTVPVGRVETGVIKPGMVVTFGPTGLTTEVKSVEMHHEALQEALPGDNVGFNVKNVAVKDLKRGFVASNSKDDPAKEAASFTSQVIIMNHPGQIGNGYAPVLDCHTSHIAVKFAELITKIDRRSGKELEKEPKFLKNGDAGMVKMIPTKPMVVETFSAYPPLGRFAVRDMRQTVAVGVIKSVEKKDPTGAKVTKAAAKKK

SEQ ID NO: 60877 - protein, 286 aa, Zea mays
  Clone ID: LIB3354-061-B1_FLI.pep
RTSSSSRFVFLHWYRHAHVRTSRLVCDSAGVVAVAAAAPVPVHQPPQAIPQHGVVVVGRERAALLWHHRHRAAVAFRRALLAVQHRHHGLVIRLRRALLLQLLLFHHQLLTLLLEEQLLLLLLLLQELQALEVLSALLLLLLLVLVQQLCPGAPRRPGLLEVRPPVVLDLVVRPPWQAPRDRRPPVAEHGVQLEDDGLLVRGDLPPLEVRPEVVHPPQPAALPAPAQPCELGDGVPAALAVLLHVLGEQPVLQRRPRALPPALLQQQAADRVHATAALLVKYILPS

SEQ ID NO: 60878 - protein, 278 aa, Zea mays; identical to SEQ ID NO: 58418
  Clone ID: LIB3354-063-H2_FLI.pep

SEQ ID NO: 60879 - protein, 140 aa, Zea mays
  Clone ID: LIB3354-064-B8_FLI.pep
TEAGRHLLTLDEKNPRRIFEGEALLRRMNRYGLLAEGQNKLDYVLALTAENFLARRLQTLVFKAGMAKSIHHARVLIKQRHIRVGRQIVNVPSFMVRVESEKHIDFSLSSPFGGGPAGRVKRKNQKKASGGGDAGDEDEE

SEQ ID NO: 60880 - protein, 179 aa, Zea mays
  Clone ID: LIB3354-064-F2_FLI.pep
RAPMLRSRVSPMATVRRQAPACAVLCRSSLLAFCALLAASPCSSRPARFSVQPWPRAGALPLPRPASCPPATARSPSHCEFAVPPTPRSPWYSSSSSRCLRSTSLNRLLLDAGDGRCGAPLRTPSVLALLQEISSAEQSSFCCDVRVRYSPHVVVFVCLCVWPVPSRHLQILPLVVMFS

SEQ ID NO: 60881 - protein, 97 aa, Zea mays; identical to SEQ ID NO: 41209
  Clone ID: LIB3354-065-E9_FLI.pep

SEQ ID NO: 60882 - protein, 212 aa, Zea mays
  Clone ID: LIB3354-067-C5_FLI.pep
ASPSTMGKEKSHINIVVIGHVDSGKSTTTGHLIYKLGGIDKRVIERFEKEAAEMNKRSFKYAWVLDKLKAERERGITIDIALWKFETTKYYCTVIDAPGHRDFIKNMITGTSQADCAVLIIDSTTGGFEAGISKDGQTREHALLAFTLGVKQMICCCNKMDATTPKYSKARYDEIVKEVSSYLKKVGYNPDKIAFVPISGVLARSLRKSPSS

SEQ ID NO: 60883 - protein, 290 aa, Zea mays
  Clone ID: LIB3354-068-B11_FLI.pep
HYEANPGKPGPLILLPPVVYLLLNHRPEISPSLSSRRFPLYLFDPAMAAPAPATTGDLLRVDPLELRFPFELKKQISCSMQLSNHTDDYIAFKVKTTSPKKYSVRPNTGVVLPRSTCDVVVTMQAQREAPPDMQCKDKFLVQSVVAPAGITVKDVTGDMFTKESGYKMEEVKLRVTYVAPPQPPSPVPEESEEGSPPRASESENGDGPSGGFTRALRERIEPQDKSTEAGALVSKLTEEKNSAIQQNHRLRQELDLVRQEISKRRGGGFSFIVVIIVALIGAILGYLMKS

SEQ ID NO: 60884 - protein, 465 aa, Zea mays
  Clone ID: LIB3354-069-E9_FLI.pep
LTAASLPLRYCSSPPHSPAGAAAAAAAARSYPTSASGGGTAGGKGKMFGRAPKKSDNTKYYEILGVPKSASQDDLKKAYRKAAIKNHPDKGGDPEKFKELAQAYEVLSDPEKREIYDQYGEDALKEGMGGGGSHVDPFDIFSSFFGPSFGGGGGSSRGRRQRRGEDVVHPLKVSLEDLYNGTSKKLSLSRNVICSKCKGKGSKSGASMRCPGCQGSGMKVTIRQLGPSMIQQMQQPCNECKGTGESINEKDRCPGCKGEKVVQEKKVLEVHVEKGMQHNQKITFPGEADEAPDTVTGDIVFVLQQKDHSKFKRKGEDLFYEHTLSLTEALCGFQFVLTHLDNRQLLIKSDPGEVVKPDQFKAINDEGMPIYQRPFMKGKLYIHFTVEFPDSLAPEQCKALETVLPPRPSSKLTDMEIDECEETTMHDVNNIEEEMRRKQAHAAQEAYEEDDEMPGGAQRVQCAQQ

SEQ ID NO: 60885 - protein, 442 aa, Zea mays
  Clone ID: LIB3354-070-C2_FLI.pep
WGVILSFFSSSAARKVDSFRALAQLIIGSGRLFFLSGYPFQDFGLRGDEMMRRCVSALARRRRPDRTVDTMKARFQCLVNISSSIRDTDSQRCSSTCATSCATDPDVLSRETSSSEMLVDSFGRFHNYLRISLTERCNLRCQYCMPAEGVELTPKSELLSHDEIIRIADLFVTSGVNKIRLIGGEPTVRKDIEDICLHLSSLKGLKTLAMTTNGIVLSKKLPKLKECGLNALNISLDTLVPAKFEFMTRRKGHSKVLESIDAAVELGYSPVKVNCVIMRGINDDEICNFVELTRHKPINVRFIEFMPFDGNVWNVKKLVPYAEMLDKVRQSYKGVERLQDHPTDTAKNFRIDGHVGTISFITSMTEHFCAGCNRLRLLADGNLKVCLFGPSEVSLREPIRTGVDDAGLKEIIGAAVKRKKAKHAGMFDIAKTANRPMIHIGG

SEQ ID NO: 60886 - protein, 186 aa, Zea mays; identical to SEQ ID NO: 59938
  Clone ID: LIB3354-071-D4_FLI.pep

SEQ ID NO: 60887 - protein, 293 aa, Zea mays; identical to SEQ ID NO: 48478
  Clone ID: LIB3354-071-G9_FLI.pep

SEQ ID NO: 60888 - protein, 155 aa, Zea mays
  Clone ID: LIB3354-072-D3_FLI.pep
LQPVPPPNSAPAFAHRDSDIGKRKLESPASGMATGEEHVAAPAPAVEETPEKKQASTTELPAPSGWTKKLAPTRGGRGGRFEVIFVSPTGEEIKSKRQLTQYLKAHPGGPASSEFDWGTSDTPRRSARLSEKVKATESPEGEKTPKRARSSSKRG

SEQ ID NO: 60889 - protein, 279 aa, Zea mays
  Clone ID: LIB3354-074-A8_FLI.pep
TYRHELIIGRARHGTRSCDETLSLGVVHSAQGLQEREHPVEVVGHDALGHVGGAEPVLPRGQQRRPGRVDEPAPDDPADGPEPAEVPAEHGVHEPDAVAAEEGPPPGAVPERALQRVERLAGARHRRRPLLLVRAPEQHPQPRRLHLVVDVRAPEPRHRALVGVGRQHVRPRPRPHLVDVLQDDLGLVYGAPGVEEHRHALVHRVGPQEERALVAEVLLHVLVRQALQVEHDADPDHERARPHAEHLQVVVSRHWKLQLSALYDEIHAQRIYVECLRFR

SEQ ID NO: 60890 - protein, 493 aa, Zea mays
  Clone ID: LIB3354-075-E8_FLI.pep
QPDEGIEDARARATSGSNTTMVTGKKRTFVLYPSLGVGHLIPMVELAKHLLRHGHGALIAVVNPPDTDAVSAAAVERLAAANPAIAFRLLPVPASPDAGADWVKRDLDTLRLANPVLRDFLLRSQPAADADALILDMFCVDALDVAAELGVPAYFFFASAAGDLAMFLNLPYLYPTLPSFRDMGEAPVRCPGMPPVRAMDMPLTVQDRDSDRTKVRMYQFRRIPEGRGVLVNSFAWLEPRALRALGDGVCVPGRPTPRVFCVGPLVNDGSSTAGGGGRHECLAWLDAQPKRSVVFLCFGSKGSFPAAQLQEIAHGLESSGHRFLWAVRSPPEEPDTDLGKLLPEGFLDRNRDRGMVVKDWVPQAEVVRHEAVRAFVTHCGWNSTLEAIMSGLPMICWPLYAEQGLNKVFMVEEWRIGVELRGYEKFVKAEELEAKVRLVMEAEEGRILRERLAVAREKALGATKEGGSSEVAFAEFFGDLDKSSSPSVNGECD

SEQ ID NO: 60891 - protein, 271 aa, Zea mays; identical to SEQ ID NO: 58866
  Clone ID: LIB3354-077-C9_FLI.pep

SEQ ID NO: 60892 - protein, 331 aa, Zea mays
  Clone ID: LIB3354-081-F2_FLI.pep
REISLNRMNALAATSRNFKQAAKLLGLDSKLEKSLLIPFREIKVECTIPKDDGTLASYVGFRVQHDNARGPMKGGIRYHHEVDPDEVNALAQLMTWKTAVANIPYGGAKGGIGCSPGDLSISELERLTRVFTQKIHDLIGIHTDVPAPDMGTNSQTMAWILDEYSKFHGYSPAVVTGKPVDLGGSLGRDAATGRGVLFATEALLAEHGKGIAGQRFVIQGFGNVGSWAAQLISEAGGKVIAISDVTGAVKNVDGLDIVQLVKHSAENKGIKGFKGGDAIAPDSLLTEECDVLIPAALGGVINKDNANDIKAKYIIEAANHPTDPEADEASP

SEQ ID NO: 60893 - protein, 655 aa, Zea mays
  Clone ID: LIB3354-081-G1_FLI.pep
DSGVMQRPGRLQRSGSKRGLEPTGGGDDDDHAPKRPRVPALASVIVEALKMDSLQKLCSSLEPILRRVVSEEVERALAKLGPARIQGRSSPKRIEGPDGRNLQLQFRSQLALPIFTGGKVEGEQGAAIHVVLLDANTGCVVTSGPESFAKLDILVLEGDFSKEEDEDWTEEEFESNIVKEREGKRPLLTGDLQVTLKEGVGTIGELTFTDNSSWIRSRKFRLGLRIAPGFCEGIRVREAKTEAFPVKDHRGELYKKHYPPALKDDVWRLEKIGKDGAFHKKLNASGIYTVEDFLRLLVRDQQRLRSILGSGMSNKMWDSLVEHAKTCVLSGKHYVYYARDSRNVGAIFNNIYEFTGLIADDQFISAENLTDNQKVYADALVKKAYEDWMQVVEYDGKALLSFKQKKKTVTTRSDIASASTSNPASYGSANSQKQLSLPAKAGQTSSAGTMNEADGTRNAYNANGNQSARYAANTQSIPANVGMQYDGSAVSPEIQFSGSSLQSQSSRGSNMLALGPPQQHQSFEFPALGQPVQPTGLNPFEEWPQQQENRGGGVDDYLMEEIRMRSHEILENEEMQQMLRLLSMGGAGTSLAEDGFNFPPYMPAPSPNVSYEDDRTRAPGKAVVGWLKIKAAMRWGIFVRKKAAERRAQLVELDD

SEQ ID NO: 60894 - protein, 345 aa, Zea mays
  Clone ID: LIB3354-081-H12_FLI.pep
ICSQVAAFVPLMYMCICTYYSLFKIGMLMFYSLTPRQTSSVSLLMICSMVARYAPPISYNFLNLIRLGGNAKTTFEKRMGNIDDAVPFFGRGFNKIYPLIMVVYTLLVASNFFVRVIDFLGRWKRFKFQREEENIDGLDPSGMIILQKERSWIEQGCKVGEQVIPLARNFNGVNADIESQNVPLVENTVEMKVGATSSRNDGRAGQLKYANNRETIASKYTSIREQNRQSGKVVRKEISPNSISLLEERNSEQGSNAGVPPTGVSATWASMKIGFQNFKANMGSKKFLPLRQDPGFVPNLNVSSPESLDDIFQRLKRRPANVPVDSLDDDDDDNIGDTDLHFQDQ

SEQ ID NO: 60895 - protein, 122 aa, Zea mays
  Clone ID: LIB3354-084-G11_FLI.pep
CGTLVMGFLIRKSKQTKVMDPLRPEWTRHSKRVSLSGTKNGEMVNKSRPALSRQSHPSVSIKDRTVDWPVVVETLQLATYPGMGQGKLEPGYSICEETIAHWEWRDGGTSMYPPGIVGRLVG

SEQ ID NO: 60896 - protein, 117 aa, Zea mays
  Clone ID: LIB3354-085-A4_FLI.pep
ACAAPSPTIVLPMKPPVEPPPLVSPPCPRRYASLATPPCSSPRHRGQPLARALPRHGDVGFPDPFRLASMPSLRFVRAQERLHFLYESRLAVGKSSEGFQALQQSTPGPASRLLLHR

SEQ ID NO: 60897 - protein, 175 aa, Zea mays
  Clone ID: LIB3354-086-B10_FLI.pep
GRRRRADAESFLHPASAAVSDRMFLTRTEYDRGVNTFSPEGRLFQVEYAIEAIKLGSTAIGLKTKDGVVLAVEKRVTSPLLEPSSVEKIMEIDEHIGCAMSGLIADARTLVEHARVETQNHRFSYGEPMTVESSTQAICDLALRFGEGDEESMSRPFGVSLLIAGHDENGPSLYV

SEQ ID NO: 60898 - protein, 257 aa, Zea mays; identical to SEQ ID NO: 42313
  Clone ID: LIB3354-088-A1_FLI.pep

SEQ ID NO: 60899 - protein, 425 aa, Zea mays
  Clone ID: LIB3354-088-B1_FLI.pep
PPLLCSSSSAPAAATETSESGPPCESELKRRRRRRRSSSAAGGGRAKMRRVALLLVAAVCALAAPAAAVVTDGLLPNGNFEDGPPKSALVNGTVVSGANAIPRWETSGFVEYIESGHKQGDMLLVVPQGAHAVRLGNEASIRQRLAVARGAYYAVTFSAARTCAQAERLNVSVSPEWGVLPMQTIYGSNGWDSYAWAFKAKMDAVTLVIHNPGVEEDPACGPLIDGVAIRALYPPALARRAGGNLLKNGGFEEGPYFLPGASWGVLVPPNIEDDHSPLPAWMIVSSKAVKYVDAAHFAVPQGARAVELVGGRESALVQEVRTVPGWTYRLAFAVGDSGDGCAGSMAAEAYAARATVKVPYQSRGTGGYKRAVLDFTAIANRTRVVFQSTFYHMKPDGTLCGPLVDDASLVGLRKKKPARRLMQLL

SEQ ID NO: 60900 - protein, 171 aa, Zea mays
  Clone ID: LIB3354-088-B7_FLI.pep
VLSSSRSSSTGGMDGPRGLAPGRGRGRGEGRTVPPEWIGGSGSGQGAVPDGSWSYSWGWTSGPEGGWGYGHGSAQPPAALQTGLPTAAAVVEEAGVAELNSASVAYLAVSAGEPVAGRLGLEEATAAGARVVVGSAAAGGSGHREAADVAATEEGLLASGSIVYTGCGIMA

SEQ ID NO: 60901 - protein, 259 aa, Zea mays
  Clone ID: LIB3354-090-B4_FLI.pep
GRRRRADAESFLHPASAAVSDRMFLTRTEYDRGVNTFSPEGRLFQVEYAIEAIKLGSTAIGLKTKDGVVLAVEKRVTSPLLEPSSVEKIMEIDEHIGCAMSGLIADARTLVEHARVETQNHRFSYGEPMTVESSTQAICDLALRFGEGDEESMSRPFGVSLLIAGHDENGPSLYYTDPSGTFWQCNAKAIGSGSEGADSSLQEQYNKELTLQEAETIALSILKQVMEEKVTPNNVDIAKVAPKYHLYTPAEVEAVIARL

SEQ ID NO: 60902 - protein, 247 aa, Zea mays
  Clone ID: LIB3354-090-E10_FLI.pep
IGTFNCQNIQLSGFWSYSPRSQKLELSTAKTYKMAVKTLAELSLQDRDVTIQVQVNRKWEFKGNTDDGPILHVDMVLTDAMGNAIYAEMPSKLIEQKGSLLQLGKVYYIRRFRVANSKSQYKVLNAPLMIYLTLYSIIDLCRDPPSTFPLYVYNLTTYDDIDANGPKSKDFHASLYLNGGAACHWNPSITEAEPYYERMKVVSALSPLLEYLMINRGGTEHVMHVQINHPCNQQCPHVVHVALQMLF

SEQ ID NO: 60903 - protein, 203 aa, Zea mays
  Clone ID: LIB3354-092-C10_FLI.pep
CCWFVDLSTYQSVCVWASHHPFCRFYVFICTVAVTMQAQREAPPDMQCKDKFLVQSVVAPAGITVKDVTGDMFTKESGYKMEEVKLRVTYVAPPQPPSPVPEESEEGSPPRASESENGDGPSGGFTRALRERIEPQDKSTEAGALVSKLTEEKNSAIQQNHRLRQELDLVRQEISKRRGGGFSFIVVIIVALIGAILGYLMKS

SEQ ID NO: 60904 - protein, 124 aa, Zea mays; identical to SEQ ID NO: 41198
  Clone ID: LIB3354-094-A3_FLI.pep

SEQ ID NO: 60905 - protein, 395 aa, Zea mays
  Clone ID: LIB3354-094-E12_FLI.pep
HPPSSLLGCPSSSDRRLTAMDPGGGGGMLLEDFGQRVDLTRRIREVLANYPEGTTALRELIQNADDAGAGRVRLCLDRRSHGRASLLSPALAQWQGPALLAYNDAVFTDEDFASISRIGDSRKVAQTWKTGRFGVGFNSVYHLTDLPSFVSGKYVVLFDPQGAYLPNVSASNPGKRIDYVSSSAITMYHDQFSPYCAFGCDMKASFQGTLFRFPLRSSEQASSSRLSRQSYTEDDILSLFAQLYQEGVYNLLFLKNVLSLEMYVWESGMTEPKIIYSCYLGPQSEKLSWHRQALVRFSGTPVESSKQKLDSFSMDFISEAFLGNKIEKKSSTYFIIQGMASASSKIGIFATAAAKEYDLHLLPWASVAACISNTGLEDTVLRQGQAFCFLPLPGW

SEQ ID NO: 60906 - protein, 155 aa, Zea mays
  Clone ID: LIB3354-094-E7_FLI.pep
SAEPCTHISCTRTELQPPMENADLHESHNIQHEHTHNNQETVAGTQSDLTPKLKPRELMSALLQMTMETEDTTERLSAPTVPSWNFSPPTPISAALQTQHHQHRQTNQGMPRKITNLQSSRRDHAVSPMRRRVAPGQTHRSCVSWKIRAAVGSGR

SEQ ID NO: 60907 - protein, 88 aa, Zea mays
  Clone ID: LIB3354-094-B7_FLI.pep
TSWVGTICGKIVGYVSKTGPSFFLVPYAKCNSNLFIPTHASDDFKQSTEPLRNQGAKKVAEEHKPLSIYCYCYYQESESLQKDGFHPR

SEQ ID NO: 60908 - protein, 433 aa, Zea mays
  Clone ID: LIB3354-097-E1_FLI.pep
TRSRFSLDRTARVSKMFGRAPKKSDNTRYYEILGVSKDASQDDLKKAYRKAAIKNHPDKGGDPEKFKELAQAYEVLSDPEKREIYDQYGEDALKEGMGGGGGMHDPFDIFQSFFGGGSPFGGGGSSRGRRQRRGEDVVHPLKVSLEDLYNGTSKKLSLSRSVLCSKCNGKGSKSGASSRCAGCQGSGFKVQIRQLGPGMIQQMQHPCNECKGSGETISDKDRCPQCKGDKVVQEKKVLEVFVEKGMQNGQKITFPGEADEAPDTVTGDIIFVLQQKEHPKFKRKGDDLFYEHTLTLTESLCGFQFVVTHLDNRQLLIKSNPGEVVKPDSFKAINDEGMPMYQRPFMKGKLYIHFSVEFPDSLSPEQCKALEAVLPPKPVSQYTDMELDECEETMPYDVNIEAEMRRRQQQHQEAYDEDEDMPGGAQRVQCAQQ

SEQ ID NO: 60909 - protein, 316 aa, Zea mays; identical to SEQ ID NO: 48083
  Clone ID: LIB3354-099-E5_FLI.pep

SEQ ID NO: 60910 - protein, 157 aa, Zea mays
  Clone ID: LIB3354-099-F12_FLI.pep
LWVLNYSTIAAEFLLQILEDLVIAELFLQTLDCSQTLSAVALLDAHMHIILRSRTSTRVLSICLSKRIKGRWKLDVEIRHETWLLRFCRHRADQAFDLLFLCRSSRFPGGGVERTRLEAKADEKREGLTGCLLSGFCCMWGNSPCHCGCPCDLAKSG

SEQ ID NO: 60911 - protein, 166 aa, Zea mays
  Clone ID: LIB3354-104-B1_FLI.pep
WLRALATDAAGELDVLGHDGDALSVDGAEVGVLEETDEVGLGGLLERQHGVALEPEVCLEVLRDLAHQALEGQLADQQLRALLVLADLAQRHGSGPVPVGLLHAAGRRRRLPRRLGGELLAGGLASRGLAGGLLRTSHPPLLSSSSARRGNLLFGCLDGTSSLRMP

SEQ ID NO: 60912 - protein, 200 aa, Zea mays
  Clone ID: LIB3354-104-F9_FLI.pep
EVRTERCQTYKCWHNSTHGCLLLSKKRNLFSSSKVTALYSIEMAMGLINANPIIHEKKERRIRQAPETTDENAVESIDQLEIFDHIRDIKDPEHPYSLEQLNVVTEDSIELNDESNHVRVIFTPTVEHCSMATIIGLCIRVKLVRSLPPYYKVDIRVAPGSHATEAAVNKQLNDKERVAAALENPNLLDMVEECLSPTFD

SEQ ID NO: 60913 - protein, 325 aa, Zea mays
  Clone ID: LIB3354-105-A5_FLI.pep
APRPPPPRRASQANQPVRRGTGERQLQRPRAEHARFKIIRFKDIRRGCGMDRYQRVEKPRNDTPISQNEIRITTQGRMRNYISYGMSLLEENGHDEISIKAMGRAINKTVMVVELIKRRVGGLHQNTATESVDITDTWEPLEEGLLPLETTRHVSMITVTLSKNPLDTSSPGYQPPIPAEEVKPAFDYDHEESYPTGRGRGRGGGRRGRGRGMSNGPPPPAYGYNEEWEEEGDYYNRGRGRGRLRGRGGRGRGGYYGGGRRGGYGYDYGYAPRGGYYEEQDEYYDEPEEYAPPPGRGRGRGRRGGMPWRGRGGRGPPRGGRGSYY

SEQ ID NO: 60914 - protein, 163 aa, Zea mays
  Clone ID: LIB3354-105-A3_FLI.pep
NIEGEIAMKYGPLTYVSSMEDTTGASNAVQIWRHRVWRHTVTHHAMPRTKTPMETAMPKAEKMKGDICTTGERPLSGWGEKHVWGRWGRLLRPRLYTAPSQVSACCATTSAELLPCLRKLLHAAKGLSPSVKLNPKVQGDGLVPRRLHEVQAAYLGSRPLLLP

SEQ ID NO: 60915 - protein, 235 aa, Zea mays
  Clone ID: LIB3354-106-A3_FLI.pep
RSQSPRGSSASHRSYPMAPTSKLSMGIKRASRSHAYHRRGLWAIKAKNGGVFPKAEKPAAAAEPKFYPADDVKPRVPSTRKPNPTKLRSSITPGTVLILLAGRFMGKRVVFLKQLNSGLLLVSGPFKINGVPIRRVNQTYVIATSTKVDISGVDVAKFDDKYFAREKKQKVKKTEGELFETEKEASKSLPDFKKDDQKAVDAALIKAIEAVPELKAYLGARFSLRDGDKPHEMVF

SEQ ID NO: 60916 - protein, 231 aa, Zea mays
  Clone ID: LIB3354-107-D1_FLI.pep
GVMAVSFANLSSEAGLKKLDEYLLTRSYITGYQVSKDDLAVYTSFSSAPSSKYINVARWFNHIDALVRLSGITAEGQGVKVESSAVPSAPTPDVAEAQAPVAEEDDDDDVDLFGEETEDEKKAAEERAAAAKASGKKKESGKSSVLLDVKPWDDETDMAKLEEAVRSVQMEGLLWGASKLVPVGYGIKKLQIMMTIVDDLVSVDTLIEDYLCAEPVNEYVQSCDIVAFNKI

SEQ ID NO: 60917 - protein, 235 aa, Zea mays
  Clone ID: LIB3354-107-F6_FLI.pep
FSQVLHFCFQFFIKPDIVLFKQLLLLSHAIANCLTMGKLCFDLLYPGLFTSRSFCQVYNFIVVALDDVVLLFNFCISLLNQLQRLALGLVQLRDFNFQPLHLTILSNRLDAKLMYLRLRGGKLGSAALGRGGELGSLGLGAIELRGEGGVPLLEEGAGLLGSDRSGIRLGAYGIHLPPELTDGSISPLGNGSRVAAEETELLVGDEKRHRRKLRLRRPGPSPRPVTAVWRMGLRF

SEQ ID NO: 60918 - protein, 141 aa, Zea mays
  Clone ID: LIB3354-107-C2_FLI.pep
PIVTGTQNHQHMTLYLSSVSHPRQKQVDQTAIPSTPSFPRALRLRWHVTKGQTMLYTRWCWCAAILLIHVLDLAHHYTVARHVEPQHCGTHLLPLLPLFLPAAIQLRVYDRASSSCSSRVCPPCTVTTAAGSLEGHVDHIC

SEQ ID NO: 60919 - protein, 180 aa, Zea mays
  Clone ID: LIB3354-108-D7_FLI.pep
RAAALVLWFQVKYSTEPSNPTKSAKAMGRDLRVHFKNTRETAFALRKLSLTKAKSYLEDVIAHKQAIPFRRYCGGVGRTAQAKSRHSNGQGRWPVKSAKFILDLLKNAESNAEVKGLDVDTLYVSHIQVNQAQKQRRRTYRAHGRINPYMSSPCHIELILSEKEEPVKKEAESQIATRKA

SEQ ID NO: 60920 - protein, 141 aa, Zea mays
  Clone ID: LIB3354-109-B9_FLI.pep
TNGRPACVRPPGAVDDLQAQPTTGAARARGWEDLPAGRDCLPPSTAHSEERSLCPPSSVIFRRDEPRRVKAGPAARVGAELLILSTARFDYYFAPALPASVSFARTRSELNSMRNELGRPAIHVLHFSTYVNVTISFHLKL

SEQ ID NO: 60921 - protein, 169 aa, Zea mays
  Clone ID: LIB3354-109-E10_FLI.pep
PADPLLNPSSSTWYLLALLACALLVPIRFGFYRTALFYAIRGRKPACWIGLHLRMLFPATPLVAGLSVAAAALSGRYMIRAWQAFRTQAAMPRVRRFYPGGFQGEMNRREAALILGVRERATVDKIKEAHRRVMVANHPDAGGSHYVASKINEAKDMLMGKGKSGSSIF

SEQ ID NO: 60922 - protein, 154 aa, Zea mays; identical to SEQ ID NO: 60589
  Clone ID: LIB3354-110-E6_FLI.pep

SEQ ID NO: 60923 - protein, 124 aa, Zea mays; identical to SEQ ID NO: 41198
  Clone ID: LIB3354-110-C5_FLI.pep

SEQ ID NO: 60924 - protein, 300 aa, Zea mays
  Clone ID: LIB3354-110-A7_FLI.pep
RSHAAPGRGPSEMVNTFFLFCGCVDQASVAVVEKWGRFLRLADPGLHFFNPLAGECVAGSLTTRVQSLDVRVETKTKDNVFVQLICTIQYRVVKENADDAFYELQNPQQQIQAYVFDVVRAIVPRMNLDDLFEQENDVAKAVLEELEKVMADYGYSIEHILMVDIIPDAAVRKAMNDINAAQRLQLASVYKGEAEKILMVKKAEAEAEAKYLSGVGIAKQRQAITDGLRENILNFSHSVSGTSAKEVMDLIMVTQYFDTIKELGDGSKNTTIFIPHGPGHVKDISEQIRDGMMQASSSNV

SEQ ID NO: 60925 - protein, 256 aa, Zea mays; identical to SEQ ID NO: 57488
  Clone ID: LIB3354-110-G7_FLI.pep

SEQ ID NO: 60926 - protein, 223 aa, Zea mays
  Clone ID: LIB3354-112-B5_FLI.pep
RSLYALAHGCPRLTRLNISGCSSFSDTALIYLTCRCKNLKCLNLCGCVKAVTDRALQAIAQNCGQLQSLNLGWCDDVTDKGVTSLASGCPDLRAVDLCGCVLITDESVVALANGCPHLRSLGLYFCQNITDRAMYSLANSRVKSKRGRWDAVKDGLANLNISQCTALTPPAVQAVCDSFPALHTCPERHSLIISGCLSLTSVHCACALHPHRAGRALMANHAY

SEQ ID NO: 60927 - protein, 116 aa, Zea mays
  Clone ID: LIB3355-001-F8_FLI.pep
FRRRYGVRSGKQEGAGPQGPRGRDRRPRRDRRQERRGPGAPRRRAQPRRPDSQGAAGAAGVQRDGEEGRSEHHGRVRRRARRQGGRQHRRVQVYQVVLSRACVRSVRSCLRSVPWP

SEQ ID NO: 60928 - protein, 337 aa, Zea mays
  Clone ID: LIB3355-001-G8_FLI.pep
YICEAKLRSADIQAAVQVCSLLHQRYKDFSPCLIEGLLKIFFPGKSGDDLDADKNSRAMKKRSTLKLLIELYFVGIVEDASIFVNIIKDLTSAEHLKDREGTQTNLSLLSTFARQGKFFVGLQPHGQEAYDEFFKDLNVTAEQKKFFKKALNSYYDAVAELLQSEHASLRLMEAENAKVLSAKGELSDENTSSYEKLRKSFDQLLRGVSSLAESLDMQPPVMPDDGNTTRVTTGTDALPSSGKESSALEPIWDDEDTKAFYESLPDLRAFVPAVLLGEVEPKSNEQHVKGRELSGESTSEQETELHDNVPTSATERQLEVKVDDLVKESEDRDKEKV

SEQ ID NO: 60929 - protein, 116 aa, Zea mays; identical to SEQ ID NO: 48140
  Clone ID: LIB3355-001-H4_FLI.pep

SEQ ID NO: 60930 - protein, 220 aa, Zea mays
  Clone ID: LIB3355-008-E6_FLI.pep
RVTAVYNLPDTNRREPPLDLVELVCLHHRISLGNGVPGSSPVVELAVVLVGVAVERAVQVPTPAVESREPNPLPAGAAPVRPYLPPFGDRRHPLAGSGNISGLLHVHCLQLDLGNSYYRVAASNNRLHDGVAAVHDAVDRGGSQLGLILLRYHLLVALRAHVHGRRAAEEATVIDAEDGSLGGLAPSLLVLHGFLNSDETALFAIPLRRSPRGRRGGEGR

SEQ ID NO: 60931 - protein, 163 aa, Zea mays
  Clone ID: LIB3355-008-G7_FLI.pep
LAIIEHACVLDNHKDQQTWPLHCPSISPDLAVVAPGLVAVEPVVDGGGVGLRPVEEVGAHALGGQVAPRVEDAAPHVAGAARRRRRRRRHRRRRGRRRRLRPLVAAAVRVFVDDERAGGGGLAELLEARLRARPGHHVVPQLVQHLLIRSPLSTSQNHQDERI

SEQ ID NO: 60932 - protein, 174 aa, Zea mays; identical to SEQ ID NO: 50859
  Clone ID: LIB3355-009-B8_FLI.pep

SEQ ID NO: 60933 - protein, 132 aa, Zea mays
  Clone ID: LIB3355-010-F3_FLI.pep
TYVCLHHCMHGMDGSEALGLGLIYSSSRRAGGRSPSSSYLPHHVVLSRDEDVDGVDDARDVSQDGEQQADPELNPDAVAEEDADRRQQDGQQDLHERLRPHCRRRRLPSRSSSISAQSFAPCSALSSGPQLG

SEQ ID NO: 60934 - protein, 124 aa, Zea mays; identical to SEQ ID NO: 41198
  Clone ID: LIB3355-011-G3_FLI.pep

SEQ ID NO: 60935 - protein, 155 aa, Zea mays
  Clone ID: LIB3355-012-C7_FLI.pep
TISSKGLEHCGRCLYRLVLGGLILGLLDLQNLLHDLLLLDQKGTDDPLSDCGTRQNTTIWTVHSPAVPWQPRPLVLSRSQVWNSLDLLPGDRAFRSARALLGVLVHKPPTRGLDHAGLIGFCGVAVALPVGEPLHHFAAGRCFSRALALRALFLS

SEQ ID NO: 60936 - protein, 167 aa, Zea mays
  Clone ID: LIB3355-012-F10_FLI.pep
CQYGTHKWPASSIILLRSLTAGTCKSEWMEYNVPEILNASTKHRSCHKNFHLPLFIIKVMLSPLRSIRPSVFLVFFLTLISSASSRTKFMYSSNPMMRPSIRRSFCSKSQIWMRALLWRKRKMRFCRRARPPRIRQPDGLGHDTLHLGGRHGCGGGGGSLPSSSSNV

SEQ ID NO: 60937 - protein, 208 aa, Zea mays
  Clone ID: LIB3355-012-G11_FLI.pep
EPCRKASRLAGDVAGKPVKPLIQPFTRCSTSALDVPVPLSQGMQTKLVSNFSSIHSIGKILFVCKYKQHSVTQLILIQHPVELISSLNNTFPVVAVYNKNKSLCVLKVVPPQGPDLVLATNIPNSEANVLILNSFNIESDSGDGGDDLAELELVEDGGLTGGIEPDHENPHLLLGEEAAEQLPKGETHLFPREISDCGERLPPPPRAP

SEQ ID NO: 60938 - protein, 36 aa, Zea mays
  Clone ID: LIB3355-019-E3_FLI.pep
MYIEKNWHHSTINSDQDVYNRLSSEQHFCNRLEGIN

SEQ ID NO: 60939 - protein, 116 aa, Zea mays; identical to SEQ ID NO: 48140
  Clone ID: LIB3355-024-E9_FLI.pep

SEQ ID NO: 60940 - protein, 116 aa, Zea mays; identical to SEQ ID NO: 48140
  Clone ID: LIB3355-024-F2_FLI.pep

SEQ ID NO: 60941 - protein, 231 aa, Zea mays
  Clone ID: LIB3355-028-G11_FLI.pep
NVVELTNLLRVLGQTLKRLKTKKKTYYIEGNSARERTTTLKLSNLTATRAFLFQTTCAHVHVRTAYPLQLTSRYRYCRRTARIDLLGRYVHKNASATTTLASLIRRSHLDVLARRRVRVAGGRVRGVDGRASAVVAVRAGEGHARAVVASGGVRSVVGLLLVLVGVGLVLLGAGRLLGHLLLAVRGRRRLARLALHLCRPLLHLLLRRAHHVLRLHLRCLHPVLVWLPSLS

SEQ ID NO: 60942 - protein, 224 aa, Zea mays
  Clone ID: LIB3355-030-C8_FLI.pep
PPPHVHGSESLSSSAAKMVSLKLQKRLAASVLKCGKGKVWLDPNEVSEISMANSRQNIRKLVKDGFIIRKPQKVHSRSRARRAHEAKQKGRHSGYGKRRGTREARLPTKILWMRRMRVLRRLLRKYREAKKIDKHMYHDMYMKVKGNMFKNKRVLMESIHKSKAEKAREKTLSDQFEAKRAKSKASRERKIARREERLAQGPREPTAPVAAPAPSTGVPKKAKK

SEQ ID NO: 60943 - protein, 205 aa, Zea mays
  Clone ID: LIB3355-030-G11_FLI.pep
TLWTRVNITVANRITWPRGPHRSVPPVPVGVAVAAATVATAVAAATTTVAAAATVAAATAVAATAITAPATAVAAASTATTVPTAAASTAAAGLGLVDGDVAAVQLLAVHALDGVPHRLLRGEGDEAEAAGPLRLPIEDDLGLEDLAVGAEGVVEGVVVRGPGEAADEAAVLNIRRRHLDPLTHEPEPRRTSRTRTRTGGGGEAN

SEQ ID NO: 60944 - protein, 179 aa, Zea mays
  Clone ID: LIB3355-030-H8_FLI.pep
PNLSPSHQPSNSSLFEDPSVSTEAQQADHTPLPLVPSQEMGKSWSLISHLHTVAGPSITLLYPLYASVCAMESPSKADDEQWLSYWIIHSFVTLLEMLAEPLLHWVPVWYPAKVLFAAWLALPQFKGASFVYEKLVREQLRNYRARYPRKGAAAAAVGGDDDDHKVHIAKAEAEHDHVQ

SEQ ID NO: 60945 - protein, 231 aa, Zea mays; identical to SEQ ID NO: 48147
  Clone ID: LIB3355-031-C10_FLI.pep

SEQ ID NO: 60946 - protein, 170 aa, Zea mays; identical to SEQ ID NO: 42788
  Clone ID: LIB3355-031-E5_FLI.pep

SEQ ID NO: 60947 - protein, 153 aa, Zea mays
  Clone ID: LIB3355-032-B6_FLI.pep
QTSRSLFYFNLTSAFLQKGFTHSTRAHTEQPSSGHKAMVHTRSGTAEGHKITRLCRLPRHRPCRRGPPSWRRRCSGLPHAPRHRRPCPAPSRSGWRPGPPATAGPCACGSPRRPPTRTSSASSGRPGARPVLPTLCVRAGTCETFQTSRSLFY

SEQ ID NO: 60948 - protein, 116 aa, Zea mays; identical to SEQ ID NO: 48140
  Clone ID: LIB3355-035-B3_FLI.pep

SEQ ID NO: 60949 - protein, 152 aa, Zea mays
  Clone ID: LIB3355-038-A8_FLI.pep
LWVLNYSTIAAEFLLQILEDLVIAELFLQTLDCSQTLSAVALLDAHMHIILRSRTSTRVLSICLSKRIKGRWKLDVEIRHETWLLRFCRHRADQAFDLLFLCRSSRFPGGGVERTRLEAKADEKREGLTGCLLSGLRPSDGFAHLIICTTRL

SEQ ID NO: 60950 - protein, 76 aa, Zea mays
  Clone ID: LIB3355-042-E12_FLI.pep
VSYYSSSTTTTLKRAVYILSSRQISHEHARPQLRIERAARRSIDQKMLERVGSLSSPDLVSGSVSLPTTGRSTVSP

SEQ ID NO: 60951 - protein, 191 aa, Zea mays
  Clone ID: LIB3355-047-H5_FLI.pep
ADPLIGNKAKNTHNDLKNRDGAGSRSTVRLLEPGAGTTSAELLRLAAPGVSDEEGAIVAGKDVLDLLLGGLVDVLLVVGDEPLGDGLADGVDLRRLPAAADADPHVDVLEPGPPRQQDGLEGLEAEHLRSDQLNRDAVHLDQAAPRLRVRDRDGGLLPPEALGRARGRAAQHGHGWGRAGFAAAVGFWRLG

SEQ ID NO: 60952 - protein, 134 aa, Zea mays
  Clone ID: LIB3355-051-A11_FLI.pep
QEDYNRLRPLSYRGADVFLLAFSLISKASYENVSKKWVPELRHYAPGVPIILVGTKLDLRDDKQFFVDHPGAVPISTAQGEELRKLIGAAAYIECSSKTQQNIKAVFDAAIKVVLQPPKQKKRKKKVQKGCTIL

SEQ ID NO: 60953 - protein, 62 aa, Zea mays
  Clone ID: LIB3355-051-D8_FLI.pep
LIPLIRISALAPLCIHKCHYSSSASLPVYHQLPLPTLNYMNFTSPPIQLGLSSRRLHRSCSQ

SEQ ID NO: 60954 - protein, 491 aa, Zea mays
  Clone ID: LIB3355-051-E11_FLI.pep
VTGRMEEGFTGGVRIVSRRLVRPEPTASSPDNNSAPPEEEEDEIMHMTPWDLRMITVDYIQKGLLLPKPPAAGGAHAHRLVDGLASSFARALARFHPLAGRLAVDATTGGPGVVVSLRCSGEGAEFVHAEAPDVTVSDIITPPAGRYYVPSALVWSLFPLNGLLGTDAALDDDSRAPLLSAQVTELADGVFVAMSLNHAVGDGTTFWHLFNTWSEISRAGGEGREAELSTPRPVLDRWFLDTCPVPIALPLRKLEDIVRQPEYPPVRECFFDFPAESVRKLKAKANAEIAAGGGTAPAAVVLSSLQSLLAHLWRAVCRARDLAPGAETAYLLLVGCRARVRGVPQAYVGNAVTLAVAKSTAGEVLGGGLGCAAWLLNRAVASFDEAGVRAELAAWARDPRFAYVEPRGYGGAATVMTGSSPRFDVYGNDFGWGRPMSVRSGAGNKMDGKVTVYEGRGGAGSMALEVCLAPQALARLVADDEFMEAVSAAAP

SEQ ID NO: 60955 - protein, 116 aa, Zea mays; identical to SEQ ID NO: 48140
  Clone ID: LIB3355-051-F9_FLI.pep

SEQ ID NO: 60956 - protein, 241 aa, Zea mays
  Clone ID: LIB3355-052-C8_FLI.pep
VRASYWVDLGGTRAAGSAAVGSGRPAMAHRVDNEYDYLFKIVLIGDSGVGKSNILSRFTRNEFCLESKSTIGVEFATRTLQIEGKTIKAQIWDTAGQERYRAITSAYYRGAVGALLVYDITKKQTFENIQRWLRELRDHADSNIVIMMVGNKSDLNHLRSVPEEDGQALAEKEGLSFLETSALEALNVEKAFQTVLSDIHQIISKKALAAQEAAGSGPPGQGTTINVADSSANMKGGCCSS

SEQ ID NO: 60957 - protein, 229 aa, Zea mays
  Clone ID: LIB3355-053-D10_FLI.pep
VELTNLLRVLGQTLKRLKTKKKTYYIEGNSARERTTTLKLSNLTATRAFLFQTTCAHVHVRTAYPLQLTSRYRYCRRTARIDLLGRYVHKNASATTTLASLIRRSHLDVLARRRVRVAGGRVRGVDGRASAVVAVRAGEGHARAVVASGGVRSVVGLLLVLVGVGLVLLGAGRLLGHLLLAVRGRRRLARLALHLCRPLLHLLLRRAHHVLRLHLRCLHPVLVWLPSLS

SEQ ID NO: 60958 - protein, 180 aa, Zea mays; identical to SEQ ID NO: 52264
  Clone ID: LIB3355-054-B7_FLI.pep

SEQ ID NO: 60959 - protein, 201 aa, Zea mays
  Clone ID: LIB3355-055-D1_FLI.pep
RTTLSLAPHLPPIRLDFFGLVLVFDWCCGRRKMTGMEYLLSEVMEPHLFVIRKQKRESPEKSSPMLAYYILDGSIYQAPQLCNVFASRISRAMHHISKAFTIACSKLEKIGNVETEPDAVASESKTQKEAIDLKELKRIDHILSSLKRKIGAAPPPPPYPEGYVPPSAEQEKAPDDVAASEAPPQLDPIIDQGPSKRPRFQ

SEQ ID NO: 60960 - protein, 257 aa, Zea mays
  Clone ID: LIB3355-056-E10_FLI.pep
IKPPDFAVLLHYQSMRVAPATRTAAAAHPPSAFLLLLGCASLAIGGAAMAGHVLGGVKENPAAANSAESDGLGRFAVDEHNRRENALLEFVRVVEAKEQVVAGTLHHLTLEAVEAGRKKLYEAKVWVKPWLDFKELQEFSHKGDATAFTNADLGAKEGGHEPGWREVPVEDPVVKDAAHHAVKSIQERSNSLFPYELLEILRAHAQVVEDFAKFDILMKLKRGSKEEKIKAEVHKSLEGAFVLNQHQPAEHAESSSQ

SEQ ID NO: 60961 - protein, 123 aa, Zea mays
  Clone ID: LIB3355-056-H4_FLI.pep
GSLLQVRKGFVLMAPPQPKSGLFVGINKGHVVTKRELPPRPCHRKGKSTKRVSMVRGLIREVAGFAPYEKRITELLKVGKDKRALKLAKRKLGTHKRAKKKREEMAGVLRKMRSAGTHTDKKK

SEQ ID NO: 60962 - protein, 118 aa, Zea mays
  Clone ID: LIB3355-058-C5_FLI.pep
VCSLWRKMRVRSPQRITYTLASWLFMMLQRFPVESKGRRKKLQEVGYVTTICFSCFLIRCVMMCLNAFDKAADLDVLNHPILNFFYYLLVEIVPSALVLFILRKLPPKRGITQYHPIH

SEQ ID NO: 60963 - protein, 186 aa, Zea mays; identical to SEQ ID NO: 59938
  Clone ID: LIB3355-062-E7_FLI.pep

SEQ ID NO: 60964 - protein, 485 aa, Zea mays
  Clone ID: LIB3356-022-F10_FLI.pep
SLIRSEDSAGAAMNEKASVSKELNAKHKKILEGLLRLPENRECADCKSKGPRWASVNLGIFICMTCSGIHRSLGVHISKVRSATLDTWLPEQVAFIQSMGNEKANSHWEAELPPNYDRVGIENFIRAKYEDKRWVPRNGTLRPSSGVRDDKSQESPASANRSGHHRSSFEQNRASPALPSKVAPVASRIPSQASPQPPKVEPPVPKVVSPPQPQKSPAKVEATPPKVEKPSVAPPPKVDYATDLFNMLSMDGTTEKESESSPNDDNAWDGFQSAQPVPSSEEKDSAKPAESMTQSTPGIEDLFKDSPVVSLSSAPAVSQVNAKNDIMSLFEKSNMASPFAVQQQQLAFMSQQQALLMAALKAGNSPQIVPGNANQLNTNVSNPPLGTLPFQNWTNLGYQNPGLTLAAAQNGATKVSNNNQDLSSGTFGFGTPGMHNITPAVPANGATAAGASNNGTASTASSTLPSQSGKDYDFSSLTQGFFTKR

SEQ ID NO: 60965 - protein, 98 aa, Zea mays
  Clone ID: LIB3356-023-B7_FLI.pep
HHLSSIFSKTPGPKGGTELKTEETKPCFPSYSSASASPLFLLPFLEYLRFLRNLGSIPLVEVWRWRLGFLMPFLCALNDWLCAVWFFDLAISSGCRLG

SEQ ID NO: 60966 - protein, 110 aa, Zea mays
  Clone ID: LIB3356-023-C12_FLI.pep
GDPAGVRLRVHIIRDQRKEKRKTINGDDLLWAMATLGFEEYVEPLKIYLQKYKEMEGDSKLSTKAGEGSVKKDAISPHGGTSSSSNQLVQHGVYNQGMGYMQPQYHNGET

SEQ ID NO: 60967 - protein, 183 aa, Zea mays
  Clone ID: LIB3356-023-D9_FLI.pep
ARVVMEGLNATDAVIKKPRSVAFRKPRSMKQLTVECNGICLPSRSARHDDDTGVEAGGQRRKELHLNSPEMKGSMTHRSDVPSKIRRDDKSGGDYDGHGRSRKTKDAAKHGSESVLALECTARNIESLDNPQLVPRDDSLPGENRPRKVKFKFNRTQRTKNGQDDGGSGIPATSACFINQYKQ

SEQ ID NO: 60968 - protein, 216 aa, Zea mays
  Clone ID: LIB3356-023-F6_FLI.pep
PTPLFVAASAPPSQALTTVCWWLPRRRSSLVVAVEDYGRGSTASSSVGWEARRYIDQPKEMSAGRQAYWCYQCRQRVRPRGREMVCPYCDSGFVAEMDDVDALMSHFVGTDPDFHRDPRFGIMEAISAVMRHGMAGMNREVDVRGRPNFFSDLEMEFGSGPWLLFRGQLPGHLTEDNGFDVFVNGRRGGGGGGVGMRRANIADYFVGPGLVILSSS

SEQ ID NO: 60969 - protein, 151 aa, Zea mays
  Clone ID: LIB3356-027-H6_FLI.pep
TISSKGLEHCGRCLYRLVLGGLILGLLDLQNLLHDLLLLDQKGTDDPLSDCGTRQNTTIWTVHSPAVPWQPRPLVLSRSQVWNSLDLLPGDRAFRSARALLGVLVHKPPTRGLDHAGLIGFCGVAVALPVGEPLHHFAAGRCFSRALALRA

SEQ ID NO: 60970 - protein, 109 aa, Zea mays
  Clone ID: LIB3356-028-B3_FLI.pep
NALFLLVSVRTSRSHLPEDAHHLLSLLLCPLVSSKLSLGKLQSALVLANLQKLGDTLLIRSKASNLSDKAPDHGHPLRCFPLAVGRAQRQLALGDDMALVDAHEEARLR

SEQ ID NO: 60971 - protein, 455 aa, Zea mays; identical to SEQ ID NO: 40951
  Clone ID: LIB3356-028-C11_FLI.pep

SEQ ID NO: 60972 - protein, 230 aa, Zea mays
  Clone ID: LIB3356-028-C8_FLI.pep
KPSPDPGARVYSLLPTAAVAASSPQHPELDRTPLTMIIPKKNRNEICKYLFKEGVLYAKKDYNLAKHPQIDVPNLQVIKLMQSFKSKEYVRETFSWQYYYWYLTNDGIEHLRNYLNLPSEIVPATSRSLPSHLAAHLALALLVTAQGAQAVLTATGQGLVTGMGTVVVLVVLLVTLVAIRVELLLSSSHHSGGLALGVVAAAASARAQPLLPWSEVALGLDMVFPFACGL

SEQ ID NO: 60973 - protein, 180 aa, Zea mays; identical to SEQ ID NO: 52264
  Clone ID: LIB3356-028-E2_FLI.pep

SEQ ID NO: 60974 - protein, 84 aa, Zea mays
  Clone ID: LIB3356-034-A7_FLI.pep
KRNLLNIASSWVNGFILKYKRSALYLKPPNTEHYTLDHTLVATIKIWYRRMIISSLATTQWCKQHDDDCIQNWIHLLVTLRKRE

SEQ ID NO: 60975 - protein, 100 aa, Zea mays
  Clone ID: LIB3356-034-G5_FLI.pep
KPEEGGRRSRAAGAGGREDEDVRPVAGLLPPGVEAQLALSHGVRHHRLHHHQDDGQLHRGRPQELQVRPGTQEALTNRVESSESPADEKLAPYFSCLFFI

SEQ ID NO: 60976 - protein, 230 aa, Zea mays
  Clone ID: LIB3356-036-H1_FLI.pep
IRSCASYHFDPMAPTSKLSTGIKRASRSHTYHRRGLWAIKAKNGGAFPKADKAAAAVEPKFYPADDVKPRVPSTRKPKPTKLRSSITPGTVLILLAGRFMGKRVVFLKQLKSGLLLISGPFKINGVPIRRVNQTYVIATSTKVDISGVDVAKFDDKYFAREKKQKVKKTEGELFETEKEASKSLPDFKKDDQKAVDSALIKAIEAVLELKTYLGARFSLRDGDKPHEMVF

SEQ ID NO: 60977 - protein, 105 aa, Zea mays
  Clone ID: LIB3356-037-A12_FLI.pep
PVELLEGEAHGVVVVDLTDGIMELPPRLVEELGVGLNAVLVGNDFRVPPLLAAAAVHHLSPLHRSRGRRGAITTCSGRGAGVPARWWSGGGVGSRLGFRRLKGGD

SEQ ID NO: 60978 - protein, 73 aa, Zea mays
  Clone ID: LIB3356-037-E2_FLI.pep
KVDSQVKRAGSFIQTDFTGWIMALFGSRYGPTRSIHTEKNMSFVLFLSPLRFFLIFCFIFLPVTIKPIISQYA

SEQ ID NO: 60979 - protein, 87 aa, Zea mays; identical to SEQ ID NO: 46124
  Clone ID: LIB3356-037-G2_FLI.pep

SEQ ID NO: 60980 - protein, 129 aa, Zea mays; identical to SEQ ID NO: 52235
  Clone ID: LIB3356-038-A12_FLI.pep

SEQ ID NO: 60981 - protein, 295 aa, Zea mays
  Clone ID: LIB3356-038-C12_FLI.pep
PTHPLPVRPPPSPLRNRTALPNQRTSRALRWWGRVCLAGTESSSAEQSSQASSSNAVHSSAAVAAAAQPCTERRRGEGGVARGVVRGGAGGGGAAPRARGARGAVLLGGGAGDRGARGGGVVGGAALRPPAGVQALHPELPPRGRRRRGRGVGARGAGRLGPPRHQQPRAARDPGRRAPRAQLPRRRRRAPPRQLPVGHHRARGRRRRRHRHRRGGVVRGGRATRQHRGRDARVRRHHRALQPPVAGAHRRAPRLERRDQTKEPCWRLAPAPCFLTPSCSFALQGEEIRSIRELD

SEQ ID NO: 60982 - protein, 256 aa, Zea mays
  Clone ID: LIB3356-039-A12_FLI.pep
RMYVLTEGRIIQRTYVRTNMQAYVHPHLEEGVGGAVLADPVRGDAAELHDVGVVRAAAGAPAQHAGDHHQRHRHAHPADLRGALPRLLRGGGAPQGVPPAGRRGRLRRRRRRAGARPGAHPRAQVHGGRHPLRPLRHRHVRRAALRHENGDPDEERGVHAAVPVTGFPGERHLLDRLRAHPLRPLHHHPQRAGRAVRAGAAGPVRHLLQEHPEDRGGTQAQGGPGRHDGGGRRRQQGLQQQQRWQRHLLMMMSTTT

SEQ ID NO: 60983 - protein, 168 aa, Zea mays
  Clone ID: LIB3356-040-A5_FLI.pep
RTSRAHRHRQAHSAITVSPRSRTHGLAHTRPHPLPVSPSPPSTAASGRGNPTCVNRHVPWHCADQTQCFLSFLWTCSCRIMWNGFLMILNRLPQGVLLIGRYHDLRRISQRGALFLRQPRRQTIILLGLFFLGSLSSWLLDHLSFRSSRQHQTLVYSEVNRLTHAVCH

SEQ ID NO: 60984 - protein, 485 aa, Zea mays
  Clone ID: LIB3356-042-B10_FLI.pep
KIPRTMKLRLRSMQARGGSAAVETHRVDLPPTATLADVKTLLASKLSAAQPVPAESVRLSLNRSEELVSPDPAATLPSLGLASGDLVFFTLSPLTALAPPAQALPRNPSPSSGAAASFAEAADRGKGSKQSGTGDFSSSSLAQAVVVSPSFPVASGTRDVVMEEEAVDATKGWSSFVLRDLKREMDNVGPAEGTAAGRLVAALHAALLDAGFLTAKLTGSHLSLPQGWPSGALKPLTIKYTIPELSSMVSVTEEGKVVMLNYSLMANFVMVYGYVPGAQSEVCRLCLELPGLEPLLYLDGDQLNGVHEKEVHDLWRVLKDEICLPLMISLCQLNGLRLPPCLMGLPADLKTKVLGFLPGVDLAKVECTCKEMMNLASDDSIWKKLVSKFENYGEGSRLAGKNAKAIFVEAWQANKRRQKRPNPTFWNYGWGNSPYSRPLRLPLIGGDSDRLPFIGNHGSVGRHFGNQRRNISPNCILDGHRHNFL

SEQ ID NO: 60985 - protein, 189 aa, Zea mays
  Clone ID: LIB3356-043-B7_FLI.pep
AALVRLRLGGLLLAALPLRDGVLHAQKEEQSSDQRQILGELRKEACKFCLLHIVVVEVMDDRSDQSKVQQQEISTERAAQNKKEASKTLKTNCSSNHMLQLNVWHSYSQMSRYIFDKHVEFGPKGLSCWSTISTEFIKLLVGGEEESGDEEHPPDEGHEPHLGNGGEATTGRGRGGASAAAMGTWPVEL

SEQ ID NO: 60986 - protein, 339 aa, Zea mays
  Clone ID: LIB3356-043-G6_FLI.pep
PPRHHRATRVDMDPDAEVTFEFVPVIRQYKSGRVERLLPVNPVPPSVDAATGVASKDVTVDKATGLWARLYLPDPDLSARPDGDMRLPIVLYFHGGGLVVGSAADAPEHAFVNRLAARAGALAVSVEYRLAPEHPVPACYDDAWAALRWVVAPAADPWVRDHGDVARVFVLGFSAGGNLAHNLTLRAGSEPDLLPRGARVQGMALLHPFFLSPPAPGSEAAEGEVAKYAWVRAKLAEMWAFACGGWTAGPDDPRVNPLVDGAASLRRLGCARVLVCLADDALAAEGKAYYDGLLASGWAAADAKLLDSAPADHEFHLREPESAKAVLLMDRLAALISGN

SEQ ID NO: 60987 - protein, 89 aa, Zea mays
  Clone ID: LIB3356-046-D4_FLI.pep
AKRSWSWQSPSPPRVPAMVHGGYPRRDAAVRRPKSSSSAVVADRKRKWTAAAKNTSLKNQIRSTERFLHKVLTDTWGLGSSRLSSEPLV

SEQ ID NO: 60988 - protein, 153 aa, Zea mays
  Clone ID: LIB3356-051-D9_FLI.pep
TDPRIPRARAVRSPSEATAPPAPAPAPAAKSKGKADASSSSSSSSTPPRSRRALAVVMAASLLVLAVAFLVGSGSGGIDGGAAAPVEVEGTEVAYGSVIKLMHEKTKHRLHSHDVPYGSGSGQQSVTGFPEGDDSNSYWIIRPTPDSSSGCNT

SEQ ID NO: 60989 - protein, 90 aa, Zea mays
  Clone ID: LIB3356-051-G11_FLI.pep
SSLRGSQSNGEELNGVLTCRGGRGTATCRCSRWSCRSPAGRSPPDRTPSSTPPLLRLRVSQSSLTYLSTAAGTNRAFAVYGRGSAAAGAI

SEQ ID NO: 60990 - protein, 104 aa, Zea mays
  Clone ID: LIB3356-056-B1_FLI.pep
VTAACMASARWGTVLMLKPAMLILLQKEYIHCQYSYDSWDLHYRACLETHVLALFLCVLLELEWFNMKSRASLETPFLQGIFIFPREISSFSLRKWTPGKIELS

SEQ ID NO: 60991 - protein, 141 aa, Zea mays
  Clone ID: LIB3356-056-B6_FLI.pep
HALSLSKDRRVRSVPRLAVASSPPSAPPGHALSRSRIQRNHYFTTMVLDSLSSPHRRSQNIFFVSSSKKPQSSRDDSWSALVERHRFLLTTLLVLAFLCSIYLYFAVTLGASDACSGLTGGAQKIECQARSVLQHGKLKFR

SEQ ID NO: 60992 - protein, 582 aa, Zea mays
  Clone ID: LIB3356-058-B11_FLI.pep
MGSRFSFTATDGNDKIKAMLPTYFASEVHSGNLKNFGLIRILDYTCNSVKGNADKVLIVVKCETVCEALDAEINGEAKKEDPPIVLKPKDEGSVVAEETNSPPLVMKPKQEVKSASQIVTEQRGNAAPATRLSMTRRVHPLITLNPYQGNWVIKVRVTSKGNLRTYRNARGEGCVFNVELTDEDGTQIQATMFNEAAKKFYPIFELGKVYYVSKGSLRIANKQFKTVKNDYELSLNENAIVEEAEGETFLPPVQYNLVKIDQLGPYVGGRELVDIVGVVQSVSPTLSVRRKIDNETIPKRDIVVADDSGKTVTISLWNDLATTTGQELLDMVDSSPVVAIKSLKVSDFQGVSLSTIGRSTLEINPDLPEAKNLKSWYDSEGKDTSLAPISAEVGATRAGGFKSMYSDRVFLSHITSDPAMGQEKPVFFSLYAIISHIKPDQNMWYRACTTCNKKVTEAFGSGYWCEGCQKNYSECSLRYIMVIKLSDPTGEAWVSVFNEHAEKIIGCSADELDRIRKEEGDDSYVLKLKEATWVPHLFRVSVTQHEYMNEKRQRITVRGEAPVDFAAESKYLLEEIAKLTAC

SEQ ID NO: 60993 - protein, 186 aa, Zea mays
  Clone ID: LIB3356-058-E5_FLI.pep
IRPRRAEDSSGGSRSPPPDLAPNPDLAPSPFLSYVHSPSSDLTTPSLSPSPRPELRSVVMAGAAGGFVTRAFEAMLKECAANRGKFAALQQSIQSYLDSIKGATAEGAVITEALASAGRVLDGPQAELVLQPLRLAVETKHVKLVEPALDCLHKLIAYDHLEGDPGLEGGKNSPIFTDINKYSICP

SEQ ID NO: 60994 - protein, 109 aa, Zea mays
  Clone ID: LIB3356-061-H5_FLI.pep
RHPGTISGQTARRKAGSQRLYTDLARPSDCTRTRGKTADSSPPGVRSECVKTRWWRMVMHLLEGVRRQLQACAGVGPQAVLLVVEAVPARCSSSTPMRLRAAKCHQTPF

SEQ ID NO: 60995 - protein, 128 aa, Zea mays
  Clone ID: LIB3353-008-B2_FLI.pep
NPQFRKADIAVQNETTAGAWTNAGTVARHDLSKCCCRTPRAHVGTARGRSSAPLPKRYHQLASQLLQLSLRLPLHPCAASRRGIVLQILAAPLPWLRARRWRAAAGEYPLLPPLPSREYANLWGKGKR

SEQ ID NO: 60996 - protein, 170 aa, Zea mays; identical to SEQ ID NO: 42788
  Clone ID: LIB3353-011-D6_FLI.pep

SEQ ID NO: 60997 - protein, 78 aa, Zea mays
  Clone ID: LIB3353-013-C3_FLI.pep
YTDVENGLWGWVCRYSPTEKENCVLRCLSPECYDLIYGGDPLEEGELDYVRSQEYKYCMHKSSLGESLDGVKGSFSYS

SEQ ID NO: 60998 - protein, 284 aa, Zea mays
  Clone ID: LIB3332-003-A10_FLI.pep
QAGRRGGQEDRRPSRAGARDGNGTGPQNLRSFLPARPCPSTRRSCRPRPTSALSSSRGIGYATGCAMVLWVFGYGSLIWNPGFDFDDKILGFIKGYKRTFNLACIDHRGTPEHPARTCTLETDDEAICWGIAYCVKGGPEKELKAIQYLERRECEYDQKISIDFYKEGDPLKPAVTGVLVFVSTPDPIGNKYYLGPAPLQDMARQIATANGPTGYNRDYLFSMEKALASISHEDDSIIELANEVRKVLNRTKETKITGANASMKSHAPLVHLSALPEGTVVDSR

SEQ ID NO: 60999 - protein, 550 aa, Zea mays
  Clone ID: LIB3332-012-E6_FLI.pep
SWLVLVQRRTRARAIHIYMEYAHAWWSCIISLVPGDDMHASSLLFYSAEASHVCLHVEPGGNLHPQRRVALGEEVYPDGPELLADLWVSERVGESPHESVLSVGVPGAVPLPWLLEVVGLAYGCLLPPPRDRPGRQWRGRRRLPQRRVPGRVVVHLLVPVHEVHGAVVVVVVVRAARRVDGQHQVVGTQPVALRVGVGEHPALQHLVVRVVDPWHHQPRAERQLLVLVEEVVHVPVQHQPPHGAERQQVLRPRLGVVQRVEVVLLLRVRLHHLHVQRPLREAPRRDGVVQVLRRVAVVPSPDQRRLLVRQDAPHAARRLPVELDVLRLPRRAHERVRVHAEPFHVAVVGRHAHVVEEEEEGVQALGEVRQEVEHPPVLLHVRPRVGLERVDHVGELDAVADEEDGEVVAQQVPVALAGVELHGEPARVADRLRGPPLVDHRREAHDHGRPHAGRAQEVGARQRRHVVGALEEALGGGPARVHHALRDALAREVRHLLDQVVVLQQDGTARPHSQRLVVVPHRSARVRRRHRRVVAAGRTELGRIHCDSAS

SEQ ID NO: 61000 - protein, 620 aa, Zea mays
  Clone ID: LIB3332-014-C7_FLI.pep
FRLPFAPACSLVATAAAVALPPLRQVPSPVLAGPFAEFSSGPSPGLHRSGRLRRASTSYWVNMGTPMSPWKGRLRSHHATVQSLSKRRLPSRTKNPEEKEKLRTSTKKAAPKKTARGRPAGAAQQQPMARLGLSSRHAGRDSEHPVVIDDDVNGECNGRADQSATTPLRRSPRLHVEDKSLGKSPLPPNRRETSANRKTKNAHRKYKNQESLKRNSASAALSPRKDISDVSNKKSDKHELKPNRCEVLTGKRKRGTERRLSSKKQRCQDPKLLPAVCQEIAPCNEPRKSTHRRIEKDPSIEEFEVKLKVANERLTNIDENINKLSGTEREEMGNFCGSDWTKEQDMALRKAYFSARPSPHFWKRVSKMVPGRSAEDCFNRIYNDLSTPTPIAPRPRTSKTTFSPIGNLTLSDPKLPNILEPTVGRQKTANQKSLVAQKTVRHLLQKHCRIDQAQEADHFSIFESSPSALQLNLSFEDSPGTPDSYMNSDSLGKHSGSSSARKKPFSRLRTKPSEPSPAVLKPIKNAILHEKYIDQLARREGTKRPRRRTPAGSKTADSGKSLSEQQAGSLKAAKNALISEATDFISSFKALQANSLAHVVENSEDEIECDASDCSYADKE

SEQ ID NO: 61001 - protein, 250 aa, Zea mays
  Clone ID: LIB3332-019-B4_FLI.pep
TYGLRRIGLAAAQRRRRYDGGYGMTVFHFLNCAFLTFGPHVVYYSATPLSEYDTIGTSIKAAAVYLGTALVKLVCLATLLKVPENDSFDPYQELMKVFIGFIDVAGLYFALTQLTHRNISQNHKFQAVGLGWAFADSVLHRLAPLWIGARGLEFTWEYIFQGLEANANLVMTLSLAALGSLMWLRKNKPRTLVPIIYACALLLATMPSITSYLRRSLEWQTPKVVGFELFSSLVMAFISWQLFSACQRPM

SEQ ID NO: 61002 - protein, 139 aa, Zea mays
  Clone ID: LIB3332-022-B3_FLI.pep
SYPHSPPPPLVPRPIAMARIKVHELRGKSKADLQAQLKEFKSELSLLRVAKVTGGAPNKLSKIKVVRTSIARVLTVISQKQKSALREAYKKKKLLPLDLRPKKTRAIRRRLTKHQLSLKTEREKKREKYFPMRKYAIKA

SEQ ID NO: 61003 - protein, 378 aa, Zea mays; identical to SEQ ID NO: 59265
  Clone ID: LIB3332-035-A1_FLI.pep

SEQ ID NO: 61004 - protein, 271 aa, Zea mays
  Clone ID: LIB3332-035-G4_FLI.pep
KTIPAGSLTPLQVLAARERGPFAALVVRVRLAPVLDDAVSLGERAAQAVVAQVQLLQRGQPLQRQRHGAPDEVVGQVQVRHLRREHQLAQVEVEVVPRQVHLADGPAGGEQVGGVARQLVVGEVHGVDLVARVVARDRARQLVVRQDQRPELPLHQPRRDAARQLVVPEVQRPEAGQVGERRRDAARQLVAGEVHRVEAAQPRQGLRDGAGHVGVGDGQELQVGQRGQAGRDGARQPRQPEQGQRHELRQPAHRRRDLPAHVVRAVDEHVV

SEQ ID NO: 61005 - protein, 452 aa, Zea mays; identical to SEQ ID NO: 52903
  Clone ID: LIB3332-048-C5_FLI.pep

SEQ ID NO: 61006 - protein, 179 aa, Zea mays
  Clone ID: LIB3279-001-D10_FLI.pep
KRTNSIKLQIALLHPSAATGAGREIRLRALAADAAGELDVFGHDGDALGVDGAEVGVLEQTDEVGLGGFLEGQDGVALEPQIRLEVLSDLTDQALEGQLPDEQLRALLVLADLAQRHGAGPVPVGLLHAAGRRRRLPRRLGGELLARGLASGGLAGGLLRTSHLLLSLAARFLPCLDGT

SEQ ID NO: 61007 - protein, 150 aa, Zea mays
  Clone ID: LIB3279-004-B2_FLI.pep
DATANEEEEKEEDKEMTLEEFEKIREEKRKALLALKAEERKVEVDKDLRSLQPLSNKKENDEVFIKLGSDKDKKKENAERDERAKKSVSINEFLKPAEGERYYGGRGRGRGGRGDRGGFRGGYGGGYSRGPAAAAPSIEDQAQFPSLGGK

SEQ ID NO: 61008 - protein, 283 aa, Zea mays
  Clone ID: LIB3279-008-D7_FLI.pep
RAATRGANKLATVISRPSSGGGERESMADHKEEPVPESVMDKITEKFHGGDSSSSSSDSDDEKKGSSLASAAEAMKAKIYRLFGRERPVHSVLGGGKPADLILWRNRKISGGVLAGATAIWLLFEVMEYHLLTLVCHCLILSLAILFLWSNASTFINKSPPNIPEVKIPEDVAVNVALSLRYEINRGFATLREIGHGRDLKKFLIVIAGLWLLSVLGSCCNFLTLFYIVFVALYTVPVLYEKYEDKVDAFGEKAMTELKKYYAIFDEKCLSKIPKGPLKDKKH

SEQ ID NO: 61009 - protein, 308 aa, Zea mays
  Clone ID: LIB3279-010-D6_FLI.pep
QIYYEKDNTTICLFTLTPDAKDHMQQNVSLQDRVYLSISKPQFGELEVGLFVVIKESLLIRSIFLDKRAENRVTQQGFVTWELKKALLITTQKFLEVRVVKDQRVCSPGPLETRPLFVAPSQGVATREGNNVLIAQAHLLAKNLPQVVRTLSGIRKAALRWGLRLVLPTGVEGNLRPTGDLHGHNSRELVEIGVREDWELLLDGLEQPHRDVQPRVSAVSQFRLMLHRAEWTAGPRRHVERPRGVPREAEHERGAALLGDEGSELAPGLVHSLAVLGAHGRVVLRHGCDLRAERALDRRMRRDAAEGG

SEQ ID NO: 61010 - protein, 191 aa, Zea mays
  Clone ID: LIB3279-011-F1_FLI.pep
PLQDYQQQLQNSDPPNFKPAVPSQSNHSYAQDHLFPLPSQQLSERRQDGLPHLRRRRAHRLQVAMALPSCQIHRLDRVRIQHMGHVVGCLQIIQIQVGEPIVVLLHRPRHAANAVPHGHGLPVHHVTEAVLHAEGIVVDVRVVRLEAVRHGILRCALLVTERRRRLRLLSLHLLPIVFLVVQPAQHPLIQL

SEQ ID NO: 61011 - protein, 117 aa, Zea mays
  Clone ID: LIB3279-015-E5_FLI.pep
GLKPGLHGFHVHALGDTTNGCMSTGPHYNPASKEHGAPEDENRHAGDLGNVTAGADGVANINVTDSQIPLTGPNSIIGRAVVVHADPDDLGKGGHELSKSTGNAGGRVACGIIGLQG

SEQ ID NO: 61012 - protein, 372 aa, Zea mays
  Clone ID: LIB3279-019-B3_FLI.pep
RHPSASAAMAGTVTVPGSSKPSTPLLKDELDIVIPTIRNLDFLEMWRPFFQPYHLIIVQDGDPTKTIKVPEGFDYELYNRNDINRILGPKASCISFKDSACRCFGYMVSKKKYIYTIDDDCFVAKDPSGKDINALEQHIKNLLSPSTPFFFNTLYDPYREGADFVRGYPFSLREGAHTAVSHGLWLNIPDYDAPTQLVKPKERNERYVDAVMTIPKGTLFPMCGMNLAFDRDLIGPAMYFGLMGDGQPIGRYDDMWAGWCVKVICDHLSLGVKTGLPYIWHSKASNPFVNLKKEYKGIFWQEDIIPFFQNVTIPKDCNTVQKCYIYLSGQVKEKLGKIDPYFAKLGDAMVTWIEAWDELNPAGPAAGKDTAK

SEQ ID NO: 61013 - protein, 217 aa, Zea mays
  Clone ID: LIB3279-019-F6_FLI.pep
LDSISIVTVPSDNSCYRRRPDTAAPNYSKTREHTREACKRRPRSLGRGELGDGLGALGDGVLGELPGEDEAHGGLDLTGGDGGLLVVPRELGGLGGELLEDVVDEGVHDGHGLRGDADVRVHLLQHLEDVDLVGLHALLALLPAPLSLAALLAGGLACWDTLLRLGLLPGRRLLGSGLLLRRLLRRGLLLGLGRHRCGATWSSGLEAGWIGRKCEQT

SEQ ID NO: 61014 - protein, 290 aa, Zea mays
  Clone ID: LIB3279-050-G5_FLI.pep
SVAEEGEDGGQMAACRGFFECLLRLLNFILTVAGLAMVGYGIYLLVEWMKISEDGIGGASTAEVLVSGRPLLGAIVLGDSFLDNLPKAWFIYLFIGIGTIVFFVSLFGCIGAGTRNTCCLCFYAFLVILLILAEAAAAAFIFFDHGWKDVIPVDKTHNFDVMYDFLKENWEIARWVALGVVVFEAVLLLLALAVRAMNKPAEYDSDDEIIAIGRSPTIRQPLIHTQNVPATGVPVPTLDQRASRNDAWSQRMREKYGLDTSQFTYNPSDPSRYQQNGTPRAEERSRCTIM

SEQ ID NO: 61015 - protein, 250 aa, Zea mays
  Clone ID: LIB3279-054-A1_FLI.pep
VFKTYGFMLPVMLASMFAVTGLKAFLMAMAIPLGQSAISFIIDAVWPRRKGNRDDRWRRPVQEEEEEEEDFPRDATDFATGGRGRYSSSYYEGRRGRQSYQSSVSNDFADAASAAVGADDSTKSSSSGDGGGNKSSGGYGGWDELLDNNNNTAAAREAKRSSNSFSAGNTYYSTKSRPSATGEADADYTAAGGGGRAEQGVGAPPERMRMRRRRVPRTMGLGSTRYKQAPLLMRLLVAVFPFLGSWFSVL

SEQ ID NO: 61016 - protein, 99 aa, Zea mays
  Clone ID: LIB3279-055-G2_FLI.pep
KKRVLHTFRLSLDAAGVHEHPDLTAHGFRRQVGPELGADDAGVAMRAGDLAPDAAVVGAAALGLGLVDVGHPLPAVPRDVLLGVHPLDLHQRRSLVLVR

SEQ ID NO: 61017 - protein, 350 aa, Zea mays
  Clone ID: LIB3279-001-F12_FLI.pep
SQMDDDDGSLGIRNWGFYDTVKGSLGLQLMSPMPPDRDTKPLLPRAGFLQQHGHHNAPHQLHAQQPQHYRDSAGGGVSGGTPAEQHPIHMDFSRNEAWLHPSHHQHPHEQKVLHSRPIGPAGHVGHPGHVAHPVHAVHVVHHHPTGYGMISDAQHTLQMMQPQLESQLQEPPPCKEDEAPPPLVEDHSVVSTGPPVKKRQRGQKQSCQPKSPKPKKPKKSAVPPEGGTINGHATRRRGPKKNVGMMINGIELDLANIPTPVCSCTGAPQQCYRWGAGGWQSACCTTSISTYPLPMNTKRRGARIAGRKMSQGAFKKVLEKLAGEGYNLVNPIDLKTFWAKHGTNKFVTIR

SEQ ID NO: 61018 - protein, 408 aa, Zea mays
  Clone ID: LIB3279-001-F5_FLI.pep
QNGNSSRSRFLAPLRLSRRPPPATAAADEMGIKGLTKLLADNAPKAMKEQKFESYFGRKIAVDASMSIYQFLIVVGRTGMETLTNEAGEVTSHLQGMFNRTIRLLEAGIKPVYVFDGKPPDMKKQELAKRYSKRDDATKDLTEAVEVGDKDAIEKLSKRTVKVTRQHNEDCKRLLRLMGVPVVEAPSEAEAECAALCINDKVFAVASEDMDSLTFGAPRFLRHLMDPSSKKIPVMEFDVAKVLEELELTMDQFIDLCILCGCDYCDSIKGIGGQTALKLIRQHGSIESILENLNKDRYQIPEDWPYQEARRLFKEPNVTLDIPELKWTAPDEEGLISFLVKDNGFNEDRVTKAIEKIKSAKNKSSQGRLESFFKPTATTSAPLKRKETSDKTSKAAANKKTKAGGKKK

SEQ ID NO: 61019 - protein, 67 aa, Zea mays
  Clone ID: LIB3279-003-F12_FLI.pep
HCWVSVVIYVSVFHLLPFQSHCYVPKGACQFGGLCAVSSVASYLVNTIGQNKRKCKLKFMLYGFVLY

SEQ ID NO: 61020 - protein, 454 aa, Zea mays; identical to SEQ ID NO: 48078
  Clone ID: LIB3279-005-C3_FLI.pep

SEQ ID NO: 61021 - protein, 212 aa, Zea mays
  Clone ID: LIB3279-005-D5_FLI.pep
HVSISGLTAAAAALRGYARRRGLRRHFRRQALTRYSAMVFLEAEMSWNVLISPSQLDRKGLLLRKAIIVRLLEDVTNRRASKEHGYYIAVNQLKAISEGKVRELTGDVLFPVSFTCITQKPMKGEVMVGHVDRILKHGVFLKSGPVESIFLAEKSMSNYKYIGGENAMFMNDHSKLEKDTAVRFKVLGFRWMEADRQFQLLATIAGDFLGPL

SEQ ID NO: 61022 - protein, 480 aa, Zea mays
  Clone ID: LIB3279-006-C5_FLI.pep
KPQIRSIPLSPSLPHRTSRRARGGGVEMESDQGKLFIGGISWETTEEKLSEHFSAYGEVTQAAVMRDKITGRPRGFGFVVFADPAAVDRALQDPHTLDGRTVDVKRALSREEQQASKAANPSGGRNSGGGGGGGGGSDASGARTKKIFVGGLPSTLTEDGFRQYFETFGIVTDVVVMYDQNTQRPRGFGFITFDSEDAVDRVLQKTFHDLGGKLVEVKRALPREANPGGSGGGRSGGGGGYQSNNGHNTSSGSYDGRSDGGRYGQTQQGSGGGGYPGYGAGGYGAGAAGYGYGANPAVGYGNYGAGGYGGVPAAYGGHYGNPGAAGSGYQGGHPGSNRGPWGSQAPSAYGTGGYGGSAGYSAWNNSSGGGNALNSQAPGGPAGYGSQGYGYGGYGGDPSYASHGGYGAYGARIDSAGNPATGGSSGYNAGYGSGGANSGYSSAWSDPSQGGGFGGSVNGGAEGQSTYGTGYGSVQPRVAQ

SEQ ID NO: 61023 - protein, 142 aa, Zea mays
  Clone ID: LIB3279-008-E3_FLI.pep
ELEERNSSHNLLKFDSNSFLPLAEDAAAEGELPAAASKPPSSPPVEAELSLGVERSWTTCWPWNGDSGGGDGGGGGCCCWPPAKTTLLSNVDHFMVPTPHPARRSRPDPADSPEFRRDSPASLVSPNDILFTFLARLRPPIF

SEQ ID NO: 61024 - protein, 117 aa, Zea mays
  Clone ID: LIB3279-009-G4_FLI.pep
DLPVVMPQKRKQTILYTTPSFLYNVTIQGTAKEKTENKPPSRVALIWRNPDPCGPDTGNVHDTDRRRWPTSREASYHGPLTIGTPIASTTAGLSAACSIAFVVHPLKMARSLTALST

SEQ ID NO: 61025 - protein, 566 aa, Zea mays
  Clone ID: LIB3279-011-D5_FLI.pep
EAAPSAAPPSSRGHRFRLCPRISLRHRFLRRGAATTEGDPVAVAFNTMVTPPTVEQEDEEMLVPRQEAVDTDAAQPMEVVAQTEVVSTAESQPVEDPQTSRFTWTIENFTRFSEKKHYLEVFVVGGFKWSVLIFPKGNNVDHFSMYLDVADSTSLPYGWSRYAQFSLAVVNQIQPEFTIRKETQHQFNARESDWGFTSFMPLSELYDASRGYLVNDTVVVEAEVAVRRMVDYWTYDSKKETGYVGLKNQGATCYMNSLLQTLYHIPYFRKAVYHMPTTENDIPSGSIPLALQSLFYKLQYSDSSVATKELTKSFGWDTYDSFMQHDVQELNRVLSEKLEDKMKGTVVEGTIEQLFEGHHINYIECINVEHKSNRKESFYDLQLDVKGCRDIYSSFDKYVEVERLEGDNKYHAENHGLQDAKKGVLFLDFPPVLQLQLKRFEYDYMRDSMVKINDRYEFPLQLDLDRDGGKYIAPNADRSTRNLYTLHRYKFDDERVTKEDAKKALEEQYGGDEELPQINPGFNNAPFKFTKYSNAYMLVYIRESAKEKIMCTVDEKDIAEHLRVRL

SEQ ID NO: 61026 - protein, 210 aa, Zea mays
  Clone ID: LIB3279-011-H7_FLI.pep
FFSAPPEAEEERGAARSCAPPRSPRSCGNMGLTFTKLFSRLFSKKEMRILMVGLDAAGKTTILYKLKLGEIVTTIPTIGFNVETVEYKNISFTVWDVGGQDKIRPLWRHYFQNTQGLIFVVDSNDRDRVVEAKDELHRMLNEDELRDAVLLVFANKQDLPNAMNAAEITDKLGLHSLRQRHWYIQSTCATTGEGLYEGLDWLSNNIANKA

SEQ ID NO: 61027 - protein, 130 aa, Zea mays
  Clone ID: LIB3279-012-F3_FLI.pep
FFAGGGLEISRQVNREGWLPEEEEMITRAKLVEQLREHQIRSAQSYSAALAVFSPNPHIASRRDLKVAVIYAVLFCFLMVSCYAALYLKWFRLSAMFVTFGILLPVSLKISRHRRLKRKRERRLLLPLSM

SEQ ID NO: 61028 - protein, 268 aa, Zea mays
  Clone ID: LIB3279-012-F9_FLI.pep
TCVSVICEQRVIIPNGHGEKLVGLLHGTSSKNLVILCHGFQATKDDSILVALANAITKEGISAFRFDFSGNGESGGEFQYGSYRKEAADLRSVVLHFSEQKYDIIALIGHSKGGNAVLLYASKYHDVPAIVNISGRFALERGMEGRLGKNFMRRINEDGYIDVKNKKGELQYRVSKASLDDRLSTDTLFSSRAISEDCRVLTIHGAKDETVPAEDARQFAANIRNHELRIIADANHRYTGHRDELASLVLGFLSSHPYQTTSRLRPRL

SEQ ID NO: 61029 - protein, 152 aa, Zea mays
  Clone ID: LIB3279-015-C9_FLI.pep
RSSRHTIGEEEAGERMILAVLFANSDGNILVERFHGVPAEERLHWRSFLVKLGSENLKGSKNEELHVASHKSVSIVYTTVGDVCLYIVGKDEYDELASVKDVCAKPPTERLFLDKYGRICLCLDEIVWKGLLENTEKDRVRRLIRLKPPVEP

SEQ ID NO: 61030 - protein, 160 aa, Zea mays
  Clone ID: LIB3279-016-G9_FLI.pep
TCLLGEECARLFKSNTMKVECLSGSPPMGTSCVSKVPWTSPYHILWRFMELLKTARPSVLKFAQILVPTLIPRFLMSCASWRVAGSSTCSCRDNHRMEDLQPTEACLKLNVSPLNLRFGYMFLHCMEDLQYPVTRQYWTSISMYKQHRTANTSKIYHVVE

SEQ ID NO: 61031 - protein, 58 aa, Zea mays
  Clone ID: LIB3279-019-D1_FLI.pep
IHDYNQNNPFPTKQGFMLHFATIDQPRSCLRPSMTCSLFKGFILLRSSERPFGRAFTS

SEQ ID NO: 61032 - protein, 183 aa, Zea mays; identical to SEQ ID NO: 44872
  Clone ID: LIB3279-019-E2_FLI.pep

SEQ ID NO: 61033 - protein, 203 aa, Zea mays
  Clone ID: LIB3279-020-B7_FLI.pep
KKKKNTRKIKSGDGDSREPLSGREGKERRSGGEMGAAESVPETSIHEFTVKDCNGKEVSLETYKGKVLLVVNVASKCGFTETNYTQLTELYQKYRDKDFEILAFPCNQFLRQEPGTDQQIQDFACTRFKAEYPVFQKVRVNGPDAAPVYKFLKASKPGLFGSSRIKWNFTKFLVDKDGKVIERYGTSTAPMAIEKDIQKALEE

SEQ ID NO: 61034 - protein, 300 aa, Zea mays
  Clone ID: LIB3279-023-E8_FLI.pep
GFRPRAAALPDPTETTMAGGPAAVSFLTNIAKVAAGLGAAASLASASLYTVDGGERAVIFDRFRGVLPETVGEGTHFLVPWLQKPFIFDIRTRPHNFSSNSGTKDLQMVNLTLRLLSRPDVQHLPTIFTSLGLEYDDKVLPSIGNEVLKAVVAQFNADQLLTDRPHVSALVRDALIRRAREFNIILDDVAITHLSYGIEFSLAVEKKQVAQQEAERSKFLVAKAEQERRAAIVRAEGESESARLISEATAMAGTGLIELRRIEAAKEIAAELARSPNVAYIPSGENGKMLLGLNATGFGR

SEQ ID NO: 61035 - protein, 149 aa, Zea mays; identical to SEQ ID NO: 58795
  Clone ID: LIB3279-031-B1_FLI.pep

SEQ ID NO: 61036 - protein, 164 aa, Zea mays
  Clone ID: LIB3279-031-C10_FLI.pep
KYNLSDIFFVIIVDPVVYETQKCVLEENLSRRAEHYFFEMKRVTKGRDAWAHGNLQELGQLISESGRSSILNYECGSKEMIQLYEILLKAPGALGARFSGAGFRGCCLAIVESDRAEDAAAYVRAEYEKAQPELVSRIPADRRVLVCEPGDSARVILPDPHLSS

SEQ ID NO: 61037 - protein, 212 aa, Zea mays
  Clone ID: LIB3279-033-B12_FLI.pep
VRKRERGGKMLRHAARRLVSRAVAPPTARRALATAEVPAEAVEDSTFVEAWKKVAPNIEPPATPLSLMQPRPPTPATIPTKLTVNFVLPYKSEIANKEVDMVIVPATTGQMGVLPGHVATIAELKPGVLSVHEGNDVSKYLVSSGFAFVHANSIADIVAVEAIPVDQIDPALVQKGLAEFTAKLGAASTDLEKAEAQIGVDVHSALNAALTG

SEQ ID NO: 61038 - protein, 183 aa, Zea mays
  Clone ID: LIB3279-033-G10_FLI.pep
RVVGERAGGRQGAPRRRARRPPLTDDWAGLHCYFGPFVADENHRVLVGMASTACFVIVSKNDIPIYEAEVGSAPKKEDLSYHHQFILHAALDVVQDLAWTTNAMFLKSVDRFNDLVVSVYVTAGHTRFMLLHDSRSEDGIKSFFQEVHELYIKIFLNPLYLPGSRITSSHFDTKVRALARRYL

SEQ ID NO: 61039 - protein, 303 aa, Zea mays
  Clone ID: LIB3279-033-H4_FLI.pep
AASLPGYRERRRGDSCCLAETMAGGGDHSQTNGGHVDQRALEEGRKEEFADQGCAAMVVSVPFIQKIIAEIFGTYFLMFAGCGAVTINASKNGQITFPGVAIVWGLAVMVMVYAVGHISGAHFNPAVTLAFATSGRFPWRQLPAYVLAQMLGATLASGTLRLMFGGRHEHFPGTLPTGSEVQSLVIEIITTFYLMFVISGVATDNRAIGELAGLAVGATILLNVLIAGPVSGASMNPARSVGPALVSGEYTSIWVYVVGPVVGAVAGAWAYNLIRFTNKPLREITKSTSFLKSTSRMNSAASA

SEQ ID NO: 61040 - protein, 318 aa, Zea mays
  Clone ID: LIB3279-034-B6_FLI.pep
GLAMPLNIDIDLFKLDIDELIADYSKENCTSLFEFKRVWMGKKFSYIYEGRPKTNSGLFMQSLFLHCIGHLTSQSSLHQRLAGLYCLYCLYECQPYKPQFKIYLSLEECRQLKDIVVMAKQNGLQLVPALVKRMLDKNMFLFGYMNLIDDNGDKQVEELTALQNKRVKFACDKLFANTQAERYLHMDLGAEFELDSIKKLSKEYAEAKELALAEASQTVEVDDAKHLLQSERLLGDKIDEVVKEWDVQKEGFYERTGLSSSPGDQLMAIDNDESGAQCHEDGSRGDQLMAVDNDESGVQDHEDLDDDDGFAELELLLE

SEQ ID NO: 61041 - protein, 120 aa, Zea mays; identical to SEQ ID NO: 42512
  Clone ID: LIB3279-034-F10_FLI.pep

SEQ ID NO: 61042 - protein, 487 aa, Zea mays
  Clone ID: LIB3279-035-B7_FLI.pep
RTPPPSLVPLALAPAMAASWRAVALSVVTLAWLLGGGAWAFPAEDLVTRLPGQPPVTFRQFAGYVDVDVKAGRSLFYYFAEAQENAAAKPLTLWLNGGPGCSSIGGGAFTELGPFYPRGDGRGLRLNKKSWNKASNLLFVESPAGVGWSYSNTSSDYITGDARTANDMLRFLLGWYAKFPEYRSRALFLTGESYAGHYIPQIADALVTHNERSKGFKFNVKGVAIGNPLLKLDRDVPATYEYFWSHGMISDETFLAISHSCDFEDYTFNDSPHNESKPCNDAIAEANAVVGDYVNNYDVILDVCYPSIVMQELRLRQFATKISVGVDVCMSYERFFYFNLPEVQQALHANRTHLKYQWSMCSDFLNYSNTDGNIDMLPTLQRIVERKIPLWVFSGDQDSVVPLLGSRSLVRELAHTMGLHVTVPYSTWFRKGQVGGWVTEYGNFLTFATVRGASHMVPFAQPDRALGLFRSIVLGRRLPNATSPPIG

SEQ ID NO: 61043 - protein, 305 aa, Zea mays
  Clone ID: LIB3279-037-E12_FLI.pep
RMVFGQVVIGPPGSGKTTYCNGMSQFLSLLGRKVAVVNLDPANDALPYECAINIEDLIKLSDVMSEHSLGPNGGLVYCMDYLEKNIDWLEEKLKPFIEDHYLLFDFPGQVELFFLHSNARSVINKLIKKMDLRLTAVHLIDAHLCCDPGKYVSALLLSLSTMLHLELPHINVLSKIDLIENYGNLAFNLDFYTDVQDLSYLQYHLEQDPRSAKYRKLTKELCDVIDDFGLVNFSTLDIQDKESVGNLVKLIDKSNGYIFSSIDSSAVEFSKIAAAPLDWDYYRTAEVQEKYMKDDEFAQLTSRMQ

SEQ ID NO: 61044 - protein, 185 aa, Zea mays; identical to SEQ ID NO: 41307
  Clone ID: LIB3279-038-A1_FLI.pep

SEQ ID NO: 61045 - protein, 58 aa, Zea mays
  Clone ID: LIB3279-038-B10_FLI.pep
SNLFQHRFKINRPLFLPHNESLWNNMMITSSRREMQLNSSIRDKLFSKGYCSFPCANL

SEQ ID NO: 61046 - protein, 255 aa, Zea mays
  Clone ID: LIB3279-038-C2_FLI.pep
PSEKQKRRRAITNLSHIDFPKSPGAMTTAGEVDSAAGGEDLEPLFDYKRVQPRTTFCFDDSDLEVADIFKYCNKRPKVHTSTEEEGKPDEEVAAAKVVVLDEEDWLQPPPPKAAFRATAEEDSAFRELRLKKQEWAKFAESAQDILQKLDEITNKEVGPKEPPEQIILDEESEPQVEKAREKIVISIQDKDGQQQMRVYKDEKFDKLLKVYAKKAKLNPSDLSFVFDGEKINPSSTPQDLDLEDEDMIEVRRKKS

SEQ ID NO: 61047 - protein, 49 aa, Zea mays
  Clone ID: LIB3279-038-H7_FLI.pep
LRWGQYSHMRMQLQDLQKPPKCSESTVNFLSIFFDMSFCCYLDHSYMAN

SEQ ID NO: 61048 - protein, 120 aa, Zea mays
  Clone ID: LIB3279-041-F5_FLI.pep
TKELGTVMRSLGQNPTEAELQDMINEVDADGNGTIDFPEFLNLMARKMKDTDSEEELKEAFRVFDKDQNGFISAAELRHVMTNLGEKLTDEEVDEMIREADVDGDGQINYEEFVKVMMAK

SEQ ID NO: 61049 - protein, 251 aa, Zea mays; identical to SEQ ID NO: 48118
  Clone ID: LIB3279-044-B8_FLI.pep

SEQ ID NO: 61050 - protein, 114 aa, Zea mays
  Clone ID: LIB3279-045-C3_FLI.pep
FSSLVRRSSQQPPNPAAVEDGGGAAAAAGRAGEGDRGGAAHRQVARELQERRRRHDPHPLSLRQPLLAHVRPLPSSPYRRRFHTGGGRGDLSGGRGRARSRPRRRRGGPRRGGV

SEQ ID NO: 61051 - protein, 194 aa, Zea mays; identical to SEQ ID NO: 44919
  Clone ID: LIB3279-045-F5_FLI.pep

SEQ ID NO: 61052 - protein, 135 aa, Zea mays
  Clone ID: LIB3279-046-A3_FLI.pep
EGSGSSPVLIANSPSTACNPSSLLGHRDGITCVSLLSLKMASTNGQTEAPAPSVPKNPAMASCRKKKTDDVTFLEDLKDHMDEFIHASMDEHKTCFKKTIQKMFGMSKAVAERSAVEANKAEVESALPLQTSVSQ

SEQ ID NO: 61053 - protein, 356 aa, Zea mays
  Clone ID: LIB3279-046-G5_FLI.pep
RDAAAAAPAPACQDGLGGDVQHGGVVPAACGLLRAVAEPRRRREQDGRVLLPLVPGGVPAAVGVQALLLLLPLLRQRKGHRLRRRRRPHRRWPATRQRVGEGGGHRGGGPARRGRRRRRRRRRPRRDPQAGALLARLRGRLPRPVPPLRARPLGRQPQPAPRRGPARRHVPPLRRPGRHRRVARAHRDGLAQRHRQPHLPQRRHLLRRPRLRRPRHAPLRAAPARVGQRTLRIKRRSVIIRPDRCLRERERELLHYVLSRADEVLLPAPEEPAEPGGGGGRRQGAPVRRRGGAEQHPDDAAAAEEARAAGGGAAAARAAAAGRAGAVARVRAGEPGQAQVLQRGAVQRHHGPGQAR

SEQ ID NO: 61054 - protein, 255 aa, Zea mays
  Clone ID: LIB3279-047-A7_FLI.pep
PHPPTYLPTTNASAPLSSEPRPRGRGSLARTGPADDQAMGKYMRKGKMSGEVAVMEVPGGALLGVRTRSRTLALQRAQRPLDKGDADDAAGQYLELRSRRLEKPHKDHQPLPLPLPPPAPAAKRGAGRKAASTAAAPNALAEDEVEVEVSFGENVLDLDAMERSTRETTPCSLIRNPEMISTPGSTTKSKTSNSTTSRRRMETSVCRFIPSSLEMEEFFSAAEQQEQHNFREKYNFCPVNDCPLPGRYEWARLDC

SEQ ID NO: 61055 - protein, 86 aa, Zea mays
  Clone ID: LIB3279-057-C11_FLI.pep
GSVWFVANYATLCLRLVVRIEELTLGRKVRQSVASEAAIQTCPKPPIPSFQTPPSLFLFYSSIYNLEQETRTKLLHFMCMSYIIKS

SEQ ID NO: 61056 - protein, 193 aa, Zea mays
  Clone ID: LIB3279-060-D12_FLI.pep
LHTKPRIALPCSATSSDPDHPTPTPDNRLMEAKMGRFFESVSNFFTGGDHIPWCDRDLIAGCEGELVNAANEEQRNESLMRLSWALVHSRQTDDVNRGISMLQASLDNSASPLQTREKLYLLAVGFYRIGDYSKSRQLADRCLEIQADWRQAISLKKAIEDKIAKDGLIGIGIATTAVGLLVGGIAAAVARKK

SEQ ID NO: 61057 - protein, 117 aa, Zea mays
  Clone ID: LIB3279-176-E1_FLI.pep
ELKRRMGFEKQILRSGTGPKPIKGQKVTVHCTGYGKDRDLSKKFWSTKDPGQQPFSFSIGQGSVIKGWDEGVMTMQVGEVARIQCTPDYAYGAGGFPAWGIQPNSVLVFEIEVLSAQ

SEQ ID NO: 61058 - protein, 650 aa, Zea mays
  Clone ID: LIB3279-177-E8_FLI.pep
GDPPARHRNTSSRFRTKPSSVQPRLVRRGRSERATERAAMTPVDPHSYTDGAHPVVSRAALAFYLDFAASTIHASVVLTLSAPHSGDLLLDTRALAVHSASTDADPPEPIPFSLAAAPDPVLGTALTLALPRDTASFRLTFSTSPAASALQWLAPPQTASAQPFVFSQCQSIHARSVFPCHDTPAARITFSLLLNVPEQLSAVAAARHVARRDPLPSDHRGACDDGLWCAPGRIVEEFQMDQSVPPYLFAFAAGSIGFRDLGPRTRVYAEGGDTVLDEAAREFAGVEEMVKVGEGLFGPYEWERFDLLVLPPSFPYGGMENPRMVFLTPTVIKGDAAGAQVVAHELAHSWTGNLITNKTNEDFWLNEGFTTYAERRIVEVVQGEERAALNMGIGWRGLNRMMERFKDNMEFTKLKPKMAGIDPDDVYSEVPYEKGFQFLWRIEREIGRPAFDEFLKKYIATFKFQSIDTETFLEFLKTNVPGIENKIDLHLWVEGTGIPPDAMEPDSATYKKICSLAAEFKSGKLPSEDEVARWSGQEWELYLENLPADVEASQVTALDERYKLSESRDYEVKVAFLQLAIPTGCKCYFNEVEKCLKQVGRMKYLRPLYSSLAKCSSEEKMLAQRIFSEAQEFYHPIARSVAEAILSKHS

SEQ ID NO: 61059 - protein, 591 aa, Zea mays
  Clone ID: LIB3279-178-C2_FLI.pep
PPHLTTISSSIRTNISTNRHGEEMNASQFMDKQILGLAASASPSGGGAGGGGGVNLSDLMIPIPQEDGEDRLRRRRSSSSVNGTSDDMLPSYDFQPIRTGGATAAAPVSQASWGSLDSKAPSASASASAAASYNLKSAGILEPHVLKKVSHEEDRSNFPTVTIADIDRTMKKYSDNLLHALEGVSSRLSQMEGRTHQLENSVDELKLTIGNYNGSTDGKLRHLENMLREVQAGVQILRDKQEIVEAQLHLAKLQTTKTDAHSSENSGSGHAGSQPVPPPQAAIQPQQVLTPSQPPALPALPAPNAPLPTLQSQPPSQFPSHLQHSHVPSVPSVAPVPSVPALPRDAYYAPSSQPTETMHQQYQAPPVPQPQAPPAPQQYQSPSQFPQYSQPSQPSNVNPPTPHVPPAPQQPEETMPYAPPQSYAPNARPPSPYMQPPSGPAPPYYGQQNPTMYEPPAGRANPGPPSSYGSGGYGPQGGSGFSDSYGYTGSPSHRGNAGMKPSTPFAQSSGGSGGYGSGRLPTAQILPQAVPVSSSSTSGASGNRVPLDDVVEKVATMGFSREQVRATVRRLTENGQNVDLNVVLDKLMNGR

SEQ ID NO: 61060 - protein, 205 aa, Zea mays
  Clone ID: LIB3279-179-E1_FLI.pep
VVMNPEYDYLFKLLLIGDSGVGKSCLLLRFADDSYLDSYISTIGVDFKIRTVEQDGKTIKLQIWDTAGQERFRTITSSYYRGAHGIIIVYDVTDQESFNNVKQWLNEIDRYASDNVNKLLVGNKSDLTANKVVATETAKAFADEMGISFMETSAKNAINVEQAFMAMAASIKDRMASQPAAANARPATVQIRGQPVNQKTSCCSS

SEQ ID NO: 61061 - protein, 428 aa, Zea mays
  Clone ID: LIB3279-180-A12_FLI.pep
SRRIPSHYHPSRRPPIRSGSSNPGAVMATKRSVGTLGEADLKGKKVFVRADLNVPLDDAQKITDDTRIRASVPTIKFLLEKGAKVILASHLGRPKGVTPKYSLKPLVPRLSELLGVEVVMANVCIGEEVEKLAAALPEGGVLLLENVRFYKEEEKNEPEFAKKLASVADLYVNDAFGTAHRAHASTEGVTKYLKPAVAGFLMQKELDYLVGAVANPKKPFAAIVGGSKVSSKIGVIESLLAKVDILILGGGMIYTFYKAQGYSVGKSLVEEDKLELATSLIEKAKAKGVSLLLPTDIVVADKFAADAESKIVPATAIPDDWMGLDVGPDATKTFNEALDTTKTVIWNGPMGVFEFEKFAAGTEAIAKKLAELTTTKGVTTIIGGGDSVAAVEKAGLADKMSHISTGGGASLELLEGKTLPGVLALDDA

SEQ ID NO: 61062 - protein, 605 aa, Zea mays
  Clone ID: LIB3279-181-A12_FLI.pep
SSWISTVPADSSGSLSPSWRRLGDRCRCRCPCAPVSVGPFARSPAGSSSSTSSAWLLCEVQGCHMDSAQDFQPRTFSIKLWPPSESTRIMLVDRMTNNLSTESIFSRKYRLLGKQEAHENAKTIEELCFALADEHFREEPDGDGSSAVQLYAKETSKMMLEVLKKGPRTTAELEAPVADTPLVSADTVLDISGGKRAFIEADEAKELLSPLTKPGNSYKRICFSNRSFGIGAANVAGPILESVKNQLTEVDISDFVAGRSEDEALDVMRIFSKALDGSVLRYLNISDNALGEKGVRAFSELLKSQESLEELYVMNDGISEEAAKALSELIPATEKLKVLHFHNNMTGDEGAMYIAEMVKRSPNVESFRCSATRIGSDGGVALSEALGTCTRLKKLDLRDNLFGVDAGLALSETLPKLPDLVELYLSDLNLENKGTIAIAKALKQSALQLEVLEIAGNEINAKAAPDLAECLAVMQSLKKLTLAENELKDNGAVIIAKSLEDGHSDLKELDVSTNMLQRVGARCFTRAVANKPDFVQLNINGNFISDEGVDEVKEILKAGKKSLDVLGPLDENEPDGEPDDEDAEDDEDELDLKLQSVKVEQDEDD

SEQ ID NO: 61063 - protein, 238 aa, Zea mays
  Clone ID: LIB3279-181-C5_FLI.pep
AARADKEQAEEELCQATMGISRDSMHKRRATGGKQKAWRKKRKYELGRQPANTKLSSNKTVRRVRVRGGNVKWRALRLDTGNYSWGSEAVTRKTRILDVVYNASNNELVRTQTLVKSAIVQVDAAPFKQWYLTHYGVDIGRKKKTPAAKKDNAEGQEVEAAAEETKKSNHVTRKLEKRKEGRTLDPHIEEQFGSGRLLACISSRPGQCGRADGYILEGKELEFYMKKLQRKKGKSAVA

SEQ ID NO: 61064 - protein, 306 aa, Zea mays
  Clone ID: LIB3279-182-C1_FLI.pep
FPSSSDSHLTSGDARCRCRRRAPAYLQSFTVLPQRSRPHHPRRKPKYSQKRRHNSQALIMADYDQEQEMEVEALQAILMDDIKEIDPSESGIATTARCFQILLSPQDDDFDESAYVPVQLALIFAHTEKYPDEPPVLNVKSVRGIKPHDLASLKEKIQREATENLGMAMVYTLVSSAKEWLSEKYGQNGGDEEPEESEAEKEEVIIPHGEAVTVESFLAWRERFEAELALQRAKLMPDSALTATKEKKLTGRQYFETGRHAVKGASTVADEDEEEEEDIDFDDDFEDDEEDMLEHYLAEQSGKSTA

SEQ ID NO: 61065 - protein, 188 aa, Zea mays
  Clone ID: LIB3279-182-H11_FLI.pep
KMQLLTLRTPSCEQKEPNRSKDSTSRDTEERPNNVDDNNGRSSPLAPDAARELDVLGHDGDALGVDGAEVGVLEEPHEVGLGGLLQRGDSGGLEAEVGLEILRDLTDEALEGQLADEQLRALLVLANLPERDGAGAEAVRLLHATGCRRRLARRLGGQLLAGRLAARRLARRLLRAGHRRFGAWRENG

SEQ ID NO: 61066 - protein, 340 aa, Zea mays
  Clone ID: LIB3279-182-H8_FLI.pep
PPTRAAKEEQGQAKTKRNTSCVHHPLYGPTHPPTRSEGETAAAAEAARVQTAMGNSIGGRRKGAKVMQLDGTAFRVKPPASAGTVLRDHPGFQLLESEEVKLLGVRARPLAHDAQLRPGRLYFLVALPRPAAPPRRAWSGALHVGARERLESLMLTRRSTSDLSLAASAATGTGTAPPSPLSTASEGGGPVRLRMRLPKAEVDRLMAESRDAADAAARIMQLCAAATPDRTPRFVPTPDWGAGAAAFPQTPDRSPRFAATPDWGTGFMMPPGAAAAPTTPERWPALPRTPEYASTGVKASRKEVTHSATASIPPRRLLLWNVQFLDCTGISPFASVLFFF

SEQ ID NO: 61067 - protein, 398 aa, Zea mays
  Clone ID: LIB3279-185-B11_FLI.pep
KKKKKKKTTHLSPCRRRRQDRELPPLPSWAGRQHSRRSSPARSQPRKTTNHGTERLGPCCGPSISLVHLLGSLIVTPAHHAFACHAPPNQATAGLDRFIPARARAGETKKKSRDYLIRQRHEPRSLLFPAGPDVGRRVLRGAGQRGPPLRRPGRRRSARRHHEPISPPVGRGRREPGAPLGRLRGRGGADAPVRSGHEPRAPLGRPQDPPLGRGGAAGGVISSGAELHDPGCGLGAVAALGHEPLDLRLGQAHPEPDGPTLGLGERGRRRRGRGRDRGCRQGEVGGGAAREHERLQPLPRAHLERAGPGAARRDGRPGQHHEEVEPARAQLRVVRQRPGAHAQQLHLLGLEQLEPRVVAQHRARGRRRLHAERRAVQLHHLGALAPPADAVAHCRARL

SEQ ID NO: 61068 - protein, 189 aa, Zea mays
  Clone ID: LIB3279-186-E3_FLI.pep
KKKGIAAGSGMGTSPVIPATMLFVALLVAVCFGATAARSSHARHTDADDAIRLPSSFGAGGRPWNCCDSAIKDASLPAWRCNDVVDKCSADCQDCEASPAGDGFVCGDFILSLTEPPVCTPRPWDCCDSVACTRDYIPNCMCLDKVESCSSNCERCEFLYHSDPPRFQCRDIFHGYPGPKCRTWISTSN

SEQ ID NO: 61069 - protein, 366 aa, Zea mays
  Clone ID: LIB3279-187-G3_FLI.pep
SVASAAMATKLVVLGIPWDVDTEGLREYMAKFGPLDDCVVMKERSSGRSRGFGYVTFASADDAKNVLDCEHVLGSRTLEVKIATPKEEMKSQGTKKATRIFVARIPQSVDESMFRRHFEAFGEILDLYMPKEHGSKGHRGIGFITFQSAESVDSIMQESHELDGTTVVVDRATPKEEDVRYPPSRPSQGGYGAYNAYISAATRYATLGAPTLYDHPGSAYGRGYYGSSQAVGKKIFVGRLPQEANTDDLRHYFGRFGRIVDAYIPKDPKRSGHRGFGFVTFADEGVAERVSRRSHEILGHEVAIDTAAPLENDSAGGGYIDPMDLYGAYGSMRSFGRFCGGLDYNYGYGPSSGSSRSRSDWRYRPY

SEQ ID NO: 61070 - protein, 209 aa, Zea mays
  Clone ID: LIB3279-188-E4_FLI.pep
VFISMRLRMNNHQQQLQAWRKKKGIAAGSGMGTSPVIPATMLFVALLVAVCFGATAARSSHARHTDADDAIRLPSSFGAGGRPWNCCDSAIKDASLPAWRCNDVVDKCSADCQDCEASPAGDGFVCGDFILSLTEPPVCTPRPWDCCDSVACTRDYIPNCMCLDKVESCSSNCERCEFLYHSDPPRFQCRDIFHGYPGPKCRTWISTSN

SEQ ID NO: 61071 - protein, 237 aa, Zea mays
  Clone ID: LIB3279-188-F5_FLI.pep
FFFGLLRVHGRPHGTCSTQPRRARRGRSPLAGGWGAGVVFTGSLELRVAEQRRLVGGEGHVGAAERARGALVPEPGLEAGAVEEVAAGEAVHHGPRPEPGQAHAAVVAVGAAVRLARRRRRRQHLVQRRPEGPEEPLRQSRARRRQSVPAVVPGRQRGLQVQEHQRRPHQPRQRRDRDHRVVHQVPQQAVPRLRHARDPHRRRRVRFGIVWPVVDWVVNLRFFWDGRREWSRTHASR

SEQ ID NO: 61072 - protein, 64 aa, Zea mays
  Clone ID: LIB3279-191-F7_FLI.pep
FRVHLTPRNRSDSAPEHKNYDQTNTTMVFLVLILQDSMNREKPSSVSSFLKQRFSTNNWPKQKV

SEQ ID NO: 61073 - protein, 334 aa, Zea mays
  Clone ID: LIB3279-193-G9_FLI.pep
AARLVGSARGDMGAEAGEPSSILSLASAFSYGVASMAMVFVNKAVLMQYVHSMTLLTLQQIATALLIHFGQVLGMSKRKDFSWITAKKLLPVSIFYNANVGFALASLKGVNIPMYIAIKRITPLAVLVAGCMRGKGKPPTQVILSVICTATGVLIAALGDFSFDLYGYCMALTSVFFQTMYLILVEKSGAEDGLSSVDLMFYNSILSLPFLFFLIIATGEFPHSLTVLSAKAASLTFGVILVISLVMGIVLNFTMFWCTIVNSALTTTIVGVLKGVGSTTLGFVLLGGVEVHALNVTGLVINTFGGVWYSYAKYKQKRKTPRKIQHDVESHAHK

SEQ ID NO: 61074 - protein, 213 aa, Zea mays
  Clone ID: LIB3279-195-H7_FLI.pep
KERERRGMASPDDEISRLFRIRRTVYEMLRDRGYGVRDEQIKLERHKFIERYGNPVRRDELTFNATKLNGPSDQIYVFFPNEAKPGVKTIRNYVEKMKNENVFAGILVVQQALSAFARSAVQEVSQKYHLEVFQEAELLVNIKDHVLVPEHVLLTPEDKKTLLERYTVKETQLPRIQITDPIARYYGMKRGQVVKITRASETAGRYITYRYVV

SEQ ID NO: 61075 - protein, 183 aa, Zea mays
  Clone ID: LIB3279-196-D5_FLI.pep
AAAAAAAAFRSSSSYARAKPTNPLPPVLRPTHPGAMTLGSSGAGSSVVVPRNFRLLEELERGEKGIGDGTVSYGMDDADDIYMRSWTGTIIGPHNTVHEGRIYQLKLFCDKDYPEKPPSVRFHSRINMTCVNHETGMVDPRKFGLLANWQRDYTMENILTQLKKEMAASQNRKLVQPPEGTFF

SEQ ID NO: 61076 - protein, 196 aa, Zea mays
  Clone ID: LIB3279-196-G3_FLI.pep
KMQLLTLRTPSCEQKEPNRSKDSTSRDTEERPNNVDDNNGRSSPLAPDAARELDVLGHDGDALGVDGAEVGVLEEPHEVGLGGLLQRGDSGGLEAEVGLEILRDLTDEALEGQLADEQLRALLVLANLPERDGAGAEAVRLLHATGCRRRLARRLGGQLLAGRLAARRLARRLLRAGHRRFGAWREDGRAEPAVDL

SEQ ID NO: 61077 - protein, 72 aa, Zea mays
  Clone ID: LIB3279-197-A4_FLI.pep
RSNPVKNRSNPPIPNNRTAPKRNTDLSRLTTIVSAIRNYIEKSEGESESLPARVCTSHLLGHFLLEGNVPTG

SEQ ID NO: 61078 - protein, 109 aa, Zea mays
  Clone ID: LIB3279-198-C3_FLI.pep
QTLALGVRRAAAPWQLALRSTDCISRQDSASPPVLRFSLRRTNLLLDFSGCPCGGRHIGKPGSQLVSSKSDSVIIHSILTDLNPSETCMDFEEQDADSDPDVMNDYGEL

SEQ ID NO: 61079 - protein, 111 aa, Zea mays
  Clone ID: LIB3279-202-E8_FLI.pep
FTKEPNNLYNIHSFKHSGLANKKTVTIQPAAKDSAVVLSTTKTKKQNAPAKLSHKSVMRKEFRKMAKAVKNQVSDNYYRPDLTKPALARLSSVYRSLQVAKSGVKKKNRQS

SEQ ID NO: 61080 - protein, 477 aa, Zea mays
  Clone ID: LIB3279-203-C4_FLI.pep
SATRRRNKKKVTVVSFLDREFYQQQSPPPPQAAADRYNYKVKLTTHLAITCEVCVHVLLEVSREEVADLLHDLVVVVRVGQQVETHGGLLTVHDLHMVAVLLEALGVRQLPIAGEVQARHDDEALGEGEPPEPPPVRPERVARRMVPVGVLGQVRLPVPVPVLERDEVLAVQPPLRLGALGAAEHGVQQDVAAYVDPGVGGADGHVVGDVAARAVARQEHAGPPVPAAAEEGLRHGPLERGPAVVVGARVPVLGGAPVVHGHHHALAQLHEPPAQVVVDGRAGGRVGEAAAVEEEDHRERVRRRPAAEEVKDGQGDRRRARAAVVSGGAVDADLQASGRVDDVVGRGDPLLGPCVGRHPAVEELGEVAVEGAVGPPEHVVRQLEVGDEHPCVDRHRTLALVAVDLVAAGHGGGRAPLASARSLPRATKPGFAHGMGPGGPATPSDPAEPSSARAPRPPASPISSGQSPLLLRSNTNP

SEQ ID NO: 61081 - protein, 162 aa, Zea mays
  Clone ID: LIB3279-203-G6_FLI.pep
ARQPPPPSSNSCSHLGSLHPFRPNHRPQSEALAAAHSMAPLGSKLAQLQSKACEATRIVAKHGCSYHKTLMEKNKHYVVDPPTIDKCKDLSKQLFYTRLASLPGRYESFWKEVDGAKLLWKNRSSLKGEDAGVAAMFGIELYAWFCLGEIVGRGFTVTGYHV

SEQ ID NO: 61082 - protein, 325 aa, Zea mays
  Clone ID: LIB3279-206-E4_FLI.pep
GSRSRHCAAEAMATSTLSTVKVSNVSLKAAQREIKEFFSFSGDIVHVEMQSGDELSQVAYITFKDNQGAETAMLLTGATIVDMAVIVTPANDYELPASVLAALEPKDTKPSALQKAEDIVGTMLAKGFILGRDALDKAKALDEKHQLTSTATARVSSFDKRIGLSEKISVGTSVVNDKVKEMDQKYQVSEKTKSALAAAEQSVSTAGSAIMKNRYVLTGAAWVTGAFSKVTSAANDVGAKAEEKIAVEQEDKNAEGGPGQANISDIPAAHRELDSEFANIHVSETPEDVPISTVTVPAVTDEEPSTATPAAEVSKKPEAAQGLIL

SEQ ID NO: 61083 - protein, 181 aa, Zea mays
  Clone ID: LIB3279-206-H2_FLI.pep
RPISIDHIVHISNSKLYYCSSTGNKLLVMPASVRILLLLQKGNTDGDIHKWSRNLARIERDLRSGADCRWRRHAAGIPSDDATAAAEDVERGEGGLLDSLPFVVQRSGILRHGIPRALQLRVDLAVAPRDLAARLEHALETVLHLLRHVEEERGELGVSAVLSHRVGEGLVPDRRRRYVRS

SEQ ID NO: 61084 - protein, 453 aa, Zea mays
  Clone ID: LIB3279-207-F3_FLI.pep
LLRSALLHPTPLPLGHSPPRGHRALAAAFEFGAEPQPRMPMAVSAVTASHLALSFPARSRRRRAAPRAAAGGLTARARRLRCEFVAGGGNGALSGEDDPRLVDRQKVLDAAMNDINNSFGKGSVTRLGSAGGAFVETFPSGCLTLDFALGGGLPKGRVVEVYGPESSGKTTLALHAIAEIQKLGGNAMLVDAEHAFDPAYSKALGVDIENLIVCQPDNGEMALEIADRMCRSGAIDLICIDSVSALTPRAEIEGEIGMQQMGLQARLMSQALRKMSGNASKAGCTLMFLNQIRYKIGVFYGNPEVTSGGIALKFFASVRLEIRLIGKIKSAKGDEDVGVKVRVRVQKSKVSRPYKQAEFEIIFGEGVSKLGCVLDCAELMDVVAKKGSWYSYKDIRLGQGREKALQYLRESPTICDEIEKVVRAMIPEGSRHMSLLAFGQSSSTEDEQAYDEQ

SEQ ID NO: 61085 - protein, 76 aa, Zea mays
  Clone ID: LIB3279-208-B2_FLI.pep
INQGLLLHLPPEINNLITVYLILVVVFFVVFLFILLLLLLLLLLLLLHRRRIFLRRGKDVPVPHGEVPAKDGPRLL

SEQ ID NO: 61086 - protein, 256 aa, Zea mays
  Clone ID: LIB3279-213-B8_FLI.pep
HSPPPAPREALRASPARPPASQEPRFRKEGKASACRGSAPMAYRAEDDYDYLFKVVLIGDSGVGKSNLLSRFTRNEFSLESKSTIGVEFATRSIRVDDKVVKAQIWDTAGQERYRAITSAYYRGAVGALVVYDVTRHVTFENVERWLKELRDHTDANIVIMLVGNKADLRHLRAVSVEDAKGFAERESTFFMETSALESMNVESAFTEVLTQIYRVVSKKALDIGDDPAAPPRGQTINVGGKDDVSAVKKSGCCSS

SEQ ID NO: 61087 - protein, 126 aa, Zea mays
  Clone ID: LIB3279-213-C11_FLI.pep
PQRRHRRLRGVPAVQQLLALAATATGSHVPPQERPRVNSHHLASLLVLPASSSRSQVHEAQVAALLCWHVHLLRKFRTKQNSCVSQQLGPFEREMCTGYQATDRRLECCVPFGGSRAAAGRVALTS

SEQ ID NO: 61088 - protein, 469 aa, Zea mays
  Clone ID: LIB3279-215-C5_FLI.pep
TRRHASAAPPPSALRCPLASAPERQSLLAPAPPPPRGVGQTLAHRTRRPARSHSPPPPMAALSAPLRAVAAGSRVAASDPVKVSCVRSTGSAHFGCAFPYIRASSSAARNLEPLRAIATQAPPAMPQYSSGEKTKIGINGFGRIGRLVLRIATSRDDIEVVAVNDPFIDAKYMAYMFKYDSTHGPFKGSIRVVDDSTLEINGKKVTITSKRDPAEIPWGNFGAEYVVESSGVFTTTDKASAHLKGGAKKVVISAPSADAPMFVVGVNENSYDPKMNVVSNASCTTNCLAPLAKVVHEEFGIVEGLMTTVHATTATQKTVDGPSMKDWRGGRGAAQNIIPSSTGAAKAVGKVLPELNGKLTGMAFRVPTPNVSVVDLTCRIEKSASYDDVKAAIKTASEGALKGILGYTDEDVVSNDFVGDSRSSIFDAKAGIGLSSSFMKLVSWYDNEWGYSNRVLDLIAHMALVSAKH

SEQ ID NO: 61089 - protein, 105 aa, Zea mays
  Clone ID: LIB3279-215-D2_FLI.pep
MTSNSIRKLPRQYPASTQPPSLPLRLEQCEDVSLANRSLDVPHDETVLVIQELHSDLGNLTPGAGPSHHLHHNSKLHLGVHTLASRAESRTEDDGLTKETGVAAA

SEQ ID NO: 61090 - protein, 172 aa, Zea mays
  Clone ID: LIB3279-216-B10_FLI.pep
HTLLNPKRVLHIFSTNKQESFFVLFLSATLFLSSQFLLLSSLSFFHPSPFHLGMELDAPNLGRRRLQRGDGCPRVDVEDADEAVERHGGGERAGGVGGEGDDSERVAPRGGPQGSEVVGEPSADGLVERASEEHRRGAVVSGGRPRRRPDGLLVGAVHRLEPRELHLPWPRP

SEQ ID NO: 61091 - protein, 159 aa, Zea mays
  Clone ID: LIB3279-217-B6_FLI.pep
QQQPAAGSPRLRLLHPDRQQRKTRMSGSKVYTLEEVAKHNTKDDCWLVIGGKVYNVTKFLEDHPGGDDVLLSSTAKDATDDFEDVGHSSTARAMMDEYLVGEIDAATIPTKVKYTPPKQPHYNQDKTQEFVIKILQFLVPLAILGLAVAVRMYTKSESA

SEQ ID NO: 61092 - protein, 278 aa, Zea mays; identical to SEQ ID NO: 58418
  Clone ID: LIB3279-217-F4_FLI.pep

SEQ ID NO: 61093 - protein, 175 aa, Zea mays
  Clone ID: LIB3279-218-F8_FLI.pep
EHPLEFAKAPASYNQAAQRGVMDNLTELLTRISPQDFHNHHNQRLGVLTSFWVAVVFRRSKVSMSGFAPYLGAGGFPEDGLALLVVGLLDDVQQQQVVTGAEQVGRRPLQRRSAPLREVRRQSHPPLALGARHLLNSSSSSLPGSFLSSYRFLTSWGSLYGLRMAVVEVASCLFD

SEQ ID NO: 61094 - protein, 244 aa, Zea mays; identical to SEQ ID NO: 44982
  Clone ID: LIB3279-218-G12_FLI.pep

SEQ ID NO: 61095 - protein, 498 aa, Zea mays
  Clone ID: LIB3279-219-D12_FLI.pep
EGALIVCVRHRRMGDTSSSSHSRQDPSLLGYGFHGAIANSTPPANFFDQGGGGTYFGELEEAFMHQVASLRRTQQAATVSAPHHGDTKPFPTAAGATAATATATARPPPTLDIFPAWPMRSRLHTPKECSNVTADSTDDSESSSKNHSNHSSDQLGAAAAANMASQFEQASQQQLQHKNMATSSTPRTGKALDPKVIRRLAQNREAARKSRLRKKAYIQQLESCKLKLSQMEQDMQRARTQGLFLGGDPGASTSSGAAMFDVEYARWLDNHSRRLAELNGALHAHLADGDLRAIVDDALTHHDELFQLKAMAAKSDVFHLITGVWTTPAERCFLWMGGFRPSDLLKTLLPQLDPLTEQQVVGICSLQQSSQQAEEALSQGLEQLHQSLADTMAGGSLTDDANMSFMSQMALALGKLANLEGFVIQADNLRQQTLHQMHRILTVRQAARCLLAIGEYHNRLRALSSLWASRPREILVTDEGNCEISIAAQPSQNQFSTF

SEQ ID NO: 61096 - protein, 234 aa, Zea mays
  Clone ID: LIB3279-221-C8_FLI.pep
MCDPARIHYCKLGLNSKSARFLIHTHIQPGVCLHGEFRPGDKNAIGIGVEPLAVANPGSSDVDGDVLLAHPLLVGLHRVRAESPDTDVAAVDLIHVPDAAVDQDTSPPVVLRLLDGVAAKDGAAHAAAAVDHEDPTVAFLLEELADQDVVLVDLERDDGAGEDLAPSVDLEDWLERAELAVHDQVRVSVAYFGGGQWQGSHIFLLLTPAAAQAQTDRIGSDQISGGGEGRGAAP

SEQ ID NO: 61097 - protein, 333 aa, Zea mays
  Clone ID: LIB3279-223-D2_FLI.pep
FYFPGTTTTVKTRYTVMSKELLDKHPELKMEGTPTLTPRLDICNAAVIDLGAAAARAALDEWGRPAADITHLIYISSSDLRLPGGDLHLAARLGLSPNTVRTSLLFLGCSGGAAALRTAKDIAENNPGSRVLVTAAETTVLGFRPPSYDRPYDLVGAALFGDGASAVIIGAGPMTPAENPFLELEFSTQEFLPGTDKVIDGKISEEGINFKLGRDLPEKIESRIEGFCRTLMNQVGIKDFNDIFWAVHPGGPAILNRLEFCLKLQPEKLKISRKALMNYGNVSSNTIFYVLEYLRDELKKGAISEEWGLILAFGPGITFEGLLVRGVKKTFTS

SEQ ID NO: 61098 - protein, 109 aa, Zea mays
  Clone ID: LIB3279-224-B6_FLI.pep
IANRRQSGIQQLLAAEQEAQQIVNAARAAKSARLRQAKEEAEREIAEYRAQMEAEFQRKVAESSGDSGANVKRLEEETAAKIEQLTQQAASISPDVIQMLLRHVTTVKN

SEQ ID NO: 61099 - protein, 318 aa, Zea mays
  Clone ID: LIB3332-001-G6_FLI.pep
KAAACGTLSVLSSMSNKVYNDQGTPAAFRVPAGAVIPFGSMEDALKKSGSLKSYTNLLERIETAQIENGELDSLSSKLQATVSLLSPSEEIIESLKKTFDQNVRLIVRSTANVEDLAGMSAAGLYESIPNVSLSDPRSFGAAVGQVWASLYTRRAILSRRAAGVPQRDAKMAVLVQEMLQPDLSFVLHTISPVDHDPKLVEAEVAPGLGETLASGTRGTPWRLSCHKLDGKVTTLAFANFSEELMVLNSGPTDGEMSRRTVDYSKKPLSVDATFREQFGQRLAAIGQYLEQKFGSAQDVEGCLVGPDIFIVQSRPQPQ

SEQ ID NO: 61100 - protein, 314 aa, Zea mays
  Clone ID: LIB3332-003-A3_FLI.pep
RRGSEWQLPRTPRRFTEPAPSDPSRSFQKVTAMAAPFFSTPFQPYVYQSQQGSVTAFQISGGDVQVLQVMLKSQEKLTAKPGAMCYMSGNMQMDNNYLPENDGGVWQWIFGKRVSSTIFFNSGSDDGYVGIAAPFPGRILPVDLTNFSGELLCQADAFLCSVNDVSVSSTVEPRPRNIEIGAEMILKQKLRGQGMAFLVGGGSVMQKILAPREVITVDAACIVAMSATINFQLKSPNQLRRAVFGGDNQLTASLTGPGVVFIQSLPFHRLSQRIASRSVAGPSLRDNPKFFIQIVMFFFLAYVMIVSSIILTDV

SEQ ID NO: 61101 - protein, 283 aa, Zea mays
  Clone ID: LIB3332-005-B2_FLI.pep
SLHNIANMQIILELTRCRGRNSRGGLHKCAPCTAMPNNKIVAANMEEKGAGGKAAVPHDELPRFTIFLIPNRREPPLDLVELVCLHHRISLGNGVPGSSPVVELAVVLVGVAVECAVQVPTPAVESRKSNPLPAGAAPVRPYLPPFGDRRHPLAGSGNISGLLHVHCLQLNLGNSYYRVAASNNRLHDGVAAVHDAVDRGGSQLGLILLRYHLLVALGAHVHGRRAAEEATVIDAEDGSLGGLAPSLLVLHGFLNSDETALFAIPLRRSPRGRRGGEGRGIAG

SEQ ID NO: 61102 - protein, 278 aa, Zea mays
  Clone ID: LIB3332-008-D5_FLI.pep
TDISRGSGEEAASWRGPGEASLVIACPCFPVSCWEWTGREGDEKIRAPRAAMAGSAPATAMDKTSFATTCSLLSQYVKEKKGGLLQGLGALAMAPAAGEGAFRPPTTMNLLSALDDAPAEERSEKATAGEPKHQDKCTGGNPREEAAGEEEEEAQQLTIFYGGRVVVFDMFPSAKVEDLLQIMSPGGDGVDRAGGATVPTRSLHRPSHDSLSDLPIARRNSLHRFLEKRKDRITAKAPYQQVNSSVVGVEASKQAAGAGVEKPWLGLGQEATTAKLEM

SEQ ID NO: 61103 - protein, 232 aa, Zea mays
  Clone ID: LIB3332-008-F7_FLI.pep
QPILLLAYHFQPVGKACADRARAHGVGSGQTSLGIKAANGVVIATEKKLPSILVDETSVQKIQALTPNIGVVYSGMGPDFRVLVRKSRKQAQQYYRLYKEHIPVTQLVRETAAVMQEFTQSGGVRPFGVSLLIAGYDDNGPQLYQVDPSGSYFSWKASAMGKNVSNAKTFLEKRYTEDMELDDAIHTAILTLKEGYEGQISSNNIEIGIIRADREFKVLSPSEIKDFLEEVE

SEQ ID NO: 61104 - protein, 92 aa, Zea mays
  Clone ID: LIB3332-009-E10_FLI.pep
YTSFTLCRCCASLPTSHVTHLPRGHESHTPLPRKRGRVTLRGLYKVPLASENSLQFLGSSNAGIPRLTAIATKSTQGPPYTDHSPTALAPFG

SEQ ID NO: 61105 - protein, 90 aa, Zea mays
  Clone ID: LIB3332-012-B5_FLI.pep
SVTIMSLLVTFQIVISRQQQVWLVKALIDQMSTVATTCFGFRNLVHLQLYPLLQNAKQSSMHPKVLLVASTGTTSICLLLTWSKQATCYP

SEQ ID NO: 61106 - protein, 382 aa, Zea mays
  Clone ID: LIB3332-019-F4_FLI.pep
RERERGGRVAASRGVEEMSVAKEAGPSSRAVLVTGGAGYIGSHAVLQLLTAGFRVVVVDSLANSSELVIRRLRSLAVEHAKNLAFHKVDIRDKDGLEKVFASTRFDAVIHFAGLKAVGESVQKPLLYYDHNVVGTINLLEVMAAHGCKKLVFSSSAAVYGSPKNSPCTEDFPLTPHNPYGRTKLMAEEICRDIYHSDPEWNIILLRYFNPVGAHPSGYLGEDPCGTPNNLMPFVQQIAVGRRPSLTIFGNNYATKDGTGVRDYIHVVDLAEGHLFALKKLFESSSNIGCEAYNLGTGKGTSVLEIVNAFEKASGKKIPLIMGQRRPGDAEILFSSPAKAERELHWKAKYGITEMCGDLWNWASKSPYGYAASESPKLNGSSR

SEQ ID NO: 61107 - protein, 301 aa, Zea mays
  Clone ID: LIB3332-020-F9_FLI.pep
AKPTSQSEEEPGSGSCSGRGRSTRGMDRYQRVEKPRNDTPISQNEIRITTQGRMRNYISYGMSLLEENGHDEISIKAMGRAINKTVMVVELIKRRVGGLHQNTATESVDITDTWEPLEEGLLPLETTRHVSMITVTLSKNPLDTSSPGYQPPIPAEEVKPAFDYDHEESYPTGRGRGRGGGRRGRGRGMSNGPPPPAYGYNEEWEEEGDYYNRGRGRGRLRGRGGRGRGGYYGGGRRGGYGYDYGYAPRGGYYEEQDEYYDEPEEYAPPPGRGRGRGRRGGMPWRGRGGRGPPRGGRGSYY

SEQ ID NO: 61108 - protein, 217 aa, Zea mays
  Clone ID: LIB3332-021-D11_FLI.pep
RSASIIVAYLMRAEQKSLEEALEALKEISESACPNDGFLDQLKLFEEMGFKVDTSSPLYKRFRLKLLGQSYISGEKISSYMFEDDPGLSLESGSCQDSSKVEQRKTAYRCRKCRRVIAVEGNVISHVPGEGESCFDWNRRKSGHPYNNKEHGCSSLFVEPLKWMTPVEDGALEGKLSCIHCGARLGYFNWSGIQCNCGSWVTPAFQIVKSKVDISTI

SEQ ID NO: 61109 - protein, 189 aa, Zea mays
  Clone ID: LIB3332-023-E3_FLI.pep
VNFGENFSFQTTYQALTCGTGTKRPLELFTFRDTTEQQPCTRSLTLSLVEQGESHVVVALFLLLFLLLLLGSFGRSTTRRGGGRAAAAAATNHHRATTDDHLEDGGAGGDHGEGRLDAGRGVGRGGGGDEAALQLVGGGGGRLDLAGVLLGGPLAAAGAAAHEGVDAHLSSLVPCVRACAAARVSGKKG

SEQ ID NO: 61110 - protein, 291 aa, Zea mays
  Clone ID: LIB3332-023-H8_FLI.pep
RKKNPPSPPSRRPGSASPLPSPAIYLSLSAIDSAWQLLIANFTEFQLATVVTFLLHETVFFLSGLPSLLFERFGLFAKYKIQKKSNTSAYQNRCVLRLILYHVCVNLPVMIFSYPAFKFMGLRSSLPLPHWSVVVSQVLFYFVLEDFIFYWGHRALHTKWLYKHVHSVHHEYATPFGLTSEYAHPAEILFLGFATVVGPALTGPHLFTLWLWMVLRVLETVEAHSGYHFPWSPSNFLPLYGGSDFHDYHHRVLYTKSGNYASTFVYMDWLFGTDKDYRKAKTIEEKEGKNL

SEQ ID NO: 61111 - protein, 246 aa, Zea mays
  Clone ID: LIB3332-026-A7_FLI.pep
RSHGRAPTFYRTPSAAPLSILPPATPKFLGLLIGDFSAGDRKQRTKPLLCREASRSSLRPLLLKMRKLKFHEQKLLKRHNFLEYKREGGHREALVTQRYRLVERDDYKKYNGICLMVQKLVNIIKQMDPRDPFRIQMTDLILDKLYNMGVISTKESLLKCEKLSVSAFCRRRLATVMVKLKFAEHLKEAVTYIEQGHVRVGPDAVTDPAFLVTRNMEDFITWVDSSKIKRKVMEYNDALDDYDAMF

SEQ ID NO: 61112 - protein, 340 aa, Zea mays
  Clone ID: LIB3332-027-E10_FLI.pep
QTQTARPSGRLLASQRTRATVGITYQIPAGAAAMAENFQLQGRHGKSRVRVSRVWRRPAAAGGDVIVEWNVAVSIVSDCLPSYTSSDNSAIVATDSIKNTVYVKAKECTEVVSMEEFAVILGRHFTSLYPQVSEATVTIVERPWERVTVDGKRHSHGFKVGVEKHSTEVIVKKSGSLRINSGIQGYSLLKTTQSGFEGFVTDRYRLLPDTRERIVATEVTAWWRYPFEHVSQLPSKPFCFTQRYQDVKKVLAETFFGPPDVGVYSPSVQNTLYLMAKEVLTRFPDISSVQLRMPNLHFLPVNLGSKEAPLVKFADDVYLPTDEPHGTIEATLISRPMSKL

SEQ ID NO: 61113 - protein, 178 aa, Zea mays
  Clone ID: LIB3332-028-F12_FLI.pep
KKTQVQTTEPSLIFPVQDERGDPRRADGAELRGGRARVQLVRGRPLRGAGRGPRRPPLVRRDGRGAHGAARAGGALRGRRAGARGRARRAVRGALRALRPRRGRRRGPRRVPRRDEGGHARRRQRPRRAPRADGGRGRQPPQVGRRQGAGHYHASLTSSAPSASCLTVCTSASVLTAS

SEQ ID NO: 61114 - protein, 68 aa, Zea mays
  Clone ID: LIB3332-032-D6_FLI.pep
DSEVSGISTFHVAALILPGTRSSVPLLSNHCTHLMPPRSLQSTDRYCIGRQAQEVLSGGTGAAQPVQT

SEQ ID NO: 61115 - protein, 466 aa, Zea mays
  Clone ID: LIB3332-032-G12_FLI.pep
PRADRGAPPRCQRRGSFDPIVGRAPPSLPRFAPAVQVQRREHRAHSRMGNCWGARIKDGSPHPGASGMFSKSSGKDGSRLSGCSSRASSASMPPSAKTECEILRSANVKIFTFNNLKAATRNFRPDSVLGEGGFGSVYKGWIDENTLSPCRPGTGIAVAVKRLNHEGLQGHREWLAEVNYLGQFCHPNLVKLIGYCLEDEHRLLVYEFMPRGNMENHLFRRGSYFQPLSWNLRMKVALGAAKGLAYLHSAEAKVIYRDFKTSNILLDTDYSAKLSDFGLAKDGPVGEKSHVSTRVMGTYGYAAPEYLSTGHLTAKSDIYSFGVVLLEMLSGRRAIDKNRPQGEHNLVEWARPYLTHKRKIFRILDTRLEGQYNLNGAQTIAALALECLSYEAKMRPTMDAVVAILEELQGSGEAEKKLQEPKAGTKQAPAAVSASMSSSRKPRRKSLGDTKETVGVPDPKPLAHSR

SEQ ID NO: 61116 - protein, 348 aa, Zea mays
  Clone ID: LIB3332-032-H9_FLI.pep
PNSAGGGQGQYGSLRKHGVSVNAIVQQNQEFSIQNEDFPALPGNKGSSSDYPMDIHHKDHLQENINIMQAQHYPMARPSGFSLGSSYPPRQHQQSANSVQNAGLETIGLRPANSPSLSTNSGVYEQFMQKYHQPQTQNSLRLQAASDPCTVEDLSQKSVQGTQAVPDPYSLLGLLSLIRMKEPGPTTLALGIDLTSLGLNLNSQDNLYKTFGSPWSSEPAVGEPDYQIPACFSAEPPPALQPFHFQKFHPLTLFYIFYSMPKDAAQLYAANELYNKGWFYHKDYRVWLTRAPNSAPLVKTPLHERGSYICFDPSIWDTVHKDNFVLHYEAVEKRPVLPSAGQNIRREL

SEQ ID NO: 61117 - protein, 285 aa, Zea mays; identical to SEQ ID NO: 53470
  Clone ID: LIB3332-033-F5_FLI.pep

SEQ ID NO: 61118 - protein, 213 aa, Zea mays
  Clone ID: LIB3332-036-H10_FLI.pep
GLPLYVFLREGSDGDGKKVDPRCPNAPNPFHVCTDHCLAKISEAGRSSEGAKSPISLFSRHSRRSSSSSEDGSVKSAGSKKVDPRCPNAGNLFHECGEHCAAKMQRSEQQHKGVNLKSPRRKVGKNATAIPNWKVDPRCPNASNPFHMCAQYCFDHLSETAQTSAAKSDKRRGKGVSEDEGRGETKTNPGCANASNPYHKCGDQCKRKGGGDR

SEQ ID NO: 61119 - protein, 232 aa, Zea mays; identical to SEQ ID NO: 48242
  Clone ID: LIB3332-036-H12_FLI.pep

SEQ ID NO: 61120 - protein, 86 aa, Zea mays
  Clone ID: LIB3332-038-A4_FLI.pep
VSMMPMKPDVVIWGSILSASRAQGNVALGERAAEELAKLDQTHGASKIALSNIYADAGHWINVSVVRKELQDANLERLTGRSGIVQ

SEQ ID NO: 61121 - protein, 482 aa, Zea mays; identical to SEQ ID NO: 56456
  Clone ID: LIB3332-038-F3_FLI.pep

SEQ ID NO: 61122 - protein, 187 aa, Zea mays; identical to SEQ ID NO: 47521
  Clone ID: LIB3332-038-H5_FLI.pep

SEQ ID NO: 61123 - protein, 49 aa, Zea mays
  Clone ID: LIB3332-039-B2_FLI.pep
SKHEGYTPTELYCGHKKAKKKNTESLKRQKMREITVVEVLAMTNQSGEP

SEQ ID NO: 61124 - protein, 207 aa, Zea mays
  Clone ID: LIB3332-039-B7_FLI.pep
PMASRRRTLLKVIILGDSGVGKTSLMNQYVNKKFSNQYKATIGADFLTKEVQFEDRLFTLQIWDTAGQERFQSLGVAFYRGADCCVLVYDVNSMKSFDNLHNWREEFLIQASPSDPDNFPFVLLGNKVDVDGGNSRVVSEKKAKAWCASKGNIPYFETSAKDGTNVEDAFQCIVKNALKNEPEEELYVPDTVDVVGGNRAQRSSGCC

SEQ ID NO: 61125 - protein, 409 aa, Zea mays
  Clone ID: LIB3332-042-D11_FLI.pep
RHLKRSSDGGHRPPDGRAGPVGGAHRGAAPPLDARRRGAVIGVRVAAPRPPLLPRRGCRRALPPPRVRGGRPPGPLGRGAGPRGGRVRVHVPARPPRGARPGRAVGARVPGLARPGRPPRRVRPPRGGGVAPGREGRAVAAVLGPAAGRPGPRAAARALRRTPRAAARAALRPLLPALPPLPRGEPGVLRRRRPRPLLRPRPALLLHARLLLPAGGPRRRLLLVPALRRREQAVVHAPEPRRRPGPALDRVLERRRVGPPPPRLLVLRSIHRLLVLLLVVVLRMPIATPAANPAVGRQLPRRAGVNAEERGLEGPRSGRDGRGHRLRVLGRRRGGPNTRLRGYPRRAGPQDRPVLGLAPARRVDRRGRVGRAGARLPARRGALPVGRADPAGDRRQGPTPRASAGAPVT

SEQ ID NO: 61126 - protein, 350 aa, Zea mays; identical to SEQ ID NO: 42506
  Clone ID: LIB3332-043-G5_FLI.pep

SEQ ID NO: 61127 - protein, 161 aa, Zea mays
  Clone ID: LIB3332-045-B3_FLI.pep
LLSRENERSLESAMESTALMTARLPLLTSGSRSKPLPFASFTRAACRLASAPFSGSGSVVLLSRRSRDYAGVGSLVSESILLSVQGMMCDGCAASVKRILESQPEVTSATVDFKEASAVVWTTDEAKGTQGWQKQYGEKLAKHLGTCGFESRLQDDQRTIT

SEQ ID NO: 61128 - protein, 122 aa, Zea mays
  Clone ID: LIB3332-045-E2_FLI.pep
CCRPLVIITCINVLCKVHLGKKKNMQGSIDLRTSRFKNQTCVMKEPKQLFFVAHGFSLLFKTKLYISYPEDNKNRHLPADMYFDLRHVPPELTMYQFPEYTKGCSAIKRFVCQLMYNSVQWV

SEQ ID NO: 61129 - protein, 185 aa, Zea mays
  Clone ID: LIB3332-045-F7_FLI.pep
DPKRTKEFAGACTHAQHKHAIDASSSVVLGRAEPSRFRPFHDPQPLAGADEHAEGHVADEHEVAVLVLVGDGEVGGVDGGRVGGAGEAEEHGLQRLPQLAVALVHLEVHLPEVGGAVHAHLHEQPAGGRGLLRQGCRRLVLGRRLLLEAALPVRPHRRPSHQLSLGGRRRRGVGVGVGLAVALLG

SEQ ID NO: 61130 - protein, 204 aa, Zea mays
  Clone ID: LIB3332-045-G6_FLI.pep
VSHQLQPPAQRRAEGEGGHRHTMAVGGLLRGLVSPPAWLPCHELFASWHHWLPSLPRLRPPASDGFKLLLVLLLFSAALAEVRYIASSSMAPTLRPGDRAVAEKVTYLFRRPSIGDIVFFKVPTAVQNYGVNKDVVFIKRVLATPGDFIEVRQGQLIVNGVALKEHYAAATSLYTMEAMVQRSLKVTRKKMIKNWTGCSMLLTS

SEQ ID NO: 61131 - protein, 485 aa, Zea mays; identical to SEQ ID NO: 46930
  Clone ID: LIB3332-046-H12_FLI.pep

SEQ ID NO: 61132 - protein, 347 aa, Zea mays
  Clone ID: LIB3332-047-A10_FLI.pep
TLLFLFFSQGKKIKVSPSQAKNRLFIGNVPHDWTHDDFKTAVEEVGPGVLKVELMKAPGLDRNKGYGFIEYYNQACAEYAKQKMSTPEFKLDTNAPTVSWADPKNANEATSTAQVKSLYVKNLPKTVTQEQLKKLFEHVGEITKVVVPPAKSGHENRYGFVHFKERYMAMKALKNTERYELDGQLLDCSLAKPPADKKDSTVSTPTAKGGPLLPSYAPLGYGLVGAYNPRGKGLADAYNNPLGNGLAGAYGVLSARAAQPMVYAPGAPPGSTMIPMVLPDGRLVYVPQAAGQQPVHATSPLPQQGGRRFGGSGSGGGGSSSSGGKRQRGDDHGSNSNNSRRGRHRPY

SEQ ID NO: 61133 - protein, 363 aa, Zea mays
  Clone ID: LIB3332-047-E12_FLI.pep
QSSAAVSSLEGKRDGRFSRETRRGQTRHSPPQEDARPSGLAGMSRHCRGSLRPALERDGPDDHLVVDGSQGGADEGADPEDPMVAPGMIPVVDDGGAKAPSRVDAGAGDGDGGKVDQEHREPNWQWGKDGDMGVPGVPLGIGGREDGVHQDEGANNLSAKAIPLGVPGGDNIGATAVAHVKPLLEALHHSSSTDGTQALHDNVEDGPSQGQLPGQEQPEGHSWVDVSSGDAGGAVDEREDHPSEGPGDALDADGGALGGGLGDAHDGEDGDVEEEEGGDELGDARAVEGPGLELPGLEQRRRRGLLVVLVVVPGPGALRRRADGLPLRELVGAQAHVLLLPLHLCSPAPRYCPWLPALSPACA

SEQ ID NO: 61134 - protein, 276 aa, Zea mays; identical to SEQ ID NO: 60433
  Clone ID: LIB3353-003-C5_FLI.pep

SEQ ID NO: 61135 - protein, 334 aa, Zea mays
  Clone ID: LIB3353-003-H4_FLI.pep
KKGFAAGRTRHTPYTSQVPHGATSTVLRILLPRRRCGWCHSLSRNRSPAPRAIDAQVQAPTRPTAMAGDRQPEPDRPAASPLRPRALQEDFVAMDMMDVLLELADDPSQLEVPITRDNVKGFTLDLMGGGTDTSAVTVEWAMSELLRNPEVLAKATEELDRVVGRDRLVAEGDIPSLPYLDAVVKETLRLHPVAPLLTPRLCREDVSVGGYDIPAGARVFVNAWAIGRDPAVWEAPLEFRPERFAGSSVDVKGQHFELLPFGSGRRMCPGMGLALRMVPTILGNLLHAFAWRLPDGVAAEELGMEETFGLTVPRLVPLQAVAEPKLPARLYAAL

SEQ ID NO: 61136 - protein, 327 aa, Zea mays
  Clone ID: LIB3353-004-A1_FLI.pep
AMALVAGSYERFIWGFSLKTLTTPSATGASPSETLTLAPLFSYPAHTGPVRCVAAAPRAGLVASGGADNSVRLYDLPSAADLGPLLDPSAAVSALAFYSRGPVPRNLLAACDDGSLHIYDADGFALLSTLRAFPRHEAAEALAVHPSGRVALAVGRAGALAMLNLVRGRRSFACRLEHPASAIAYAEDRDGGDRFVMAAENKVSVHDSVDARVIHDMDCGKKVLAMAPAKSGVLYTGGEDRCITAWDLSSGKVSSRIEGAHATRVKGVVVFGNSNDGSQLSNLISSASSDGVIRIWDIRTIGNGKPTPLAEANTKARLTCLAGTSLK

SEQ ID NO: 61137 - protein, 185 aa, Zea mays
  Clone ID: LIB3353-004-D2_FLI.pep
SLSCRAGPTSGRPLAFFLCMSPAPSSRFSLPSPASSMRVRRHRAAGRQAPLQPTRPAARPGARAPGLATRTRPAAARQRPCDVQRRDRAPRAQPLAEPAAQRPALRSSSRARPAERLAPKATRALHPRREAADRAPAPHSERPTRPRDDREHSRSRAAPTVSSAFKTLQWSRYSSPINPFVDECH

SEQ ID NO: 61138 - protein, 151 aa, Zea mays
  Clone ID: LIB3353-004-D8_FLI.pep
IANSSSLPIYRLDTSAREHMALEKAKEIIASSPVDLALRKAKETVASHPVVVFSKTYCPFCTRVKQLLAKLGASYKAIELDVESDGAELQSALAEWTGQRTVPNVFVKGERIGGCDATMAMHDGGKLVPLLTEAGAIVTARATATTTTPSL

SEQ ID NO: 61139 - protein, 281 aa, Zea mays
  Clone ID: LIB3353-006-A12_FLI.pep
ASPSFHELHEGRTLMNKWRKSLSTKLWRKTKDLPVLVHARSPALRPHPVPRETRHSQDCRCAKFMASDTRKKLIQIDVSSDTVCPWCFVGKKNLEKAMEQSKGKFDFEVRWHPFFLNPDAPKEGVKKSDFFKMKFGPVQYEGAMSRMTEIFRGLGLEYDMSGLTGNTMDSHRLITLAGHQGYDKQNVLVEELFLNYHCQGKYIGDKQVLLDAARKVGIEGAEELLEDPIKGVDEVQEELKKYSSDISGVPHFVINNKYQLSGGQPPNEFTRAFEMAAKDGT

SEQ ID NO: 61140 - protein, 178 aa, Zea mays; identical to SEQ ID NO: 41250
  Clone ID: LIB3353-009-D5_FLI.pep

SEQ ID NO: 61141 - protein, 589 aa, Zea mays
  Clone ID: LIB3353-010-F12_FLI.pep
HSNRAPVASTKNRSRDRRVSETETRGGGMATPDDRGSWLLYLSLAAKCAGDQPYRLTGFLAVCAVAFVVTCLLHWCFPGGPAWGRWWWTRRLGAGAGGGATAAAAALPGPRGLPVVGSMWLMTGLAHRKLAAAAGSLGARRLMAFSLGGTRVVVASHPDVAREILSSPAFADRPIKESAYGLLFHRAIGFAPYGDYWRALRRVASTHLFSPRQVAASAAQRAVIARQMVGAVKELSAASPGRRGGVEVRRVLRRGSLHSVMWSVFGRRYDLELDPARESPETRELRRLVDEGYDLLGQLNWSDHLPGLACLDLQSTRARCDRLVPLVTRFVGGIVDEHRARNHLRAAPPGVVDFTDVLLSLPADDRLTDADMIAVLWEMVFRGTDTVAVLMEWVLARLVLHPDVQARVHDELDRVVGPDRAVTESDTASLVYLHAVIKEVLRMHPPGPLLSWARLATSDVHVDGHLIPAGTTAMVNMWAITHDPDVWAEPTEFQPERFMGSTEFPIMGSDLRLAPFGAGRRSCPGKSLAMATVAFWLATLLHEFELLPSPVDLSEVLKLSCEMAVPLALAVTARPRQAVQKSVGVSVSL

SEQ ID NO: 61142 - protein, 155 aa, Zea mays
  Clone ID: LIB3353-010-G11_FLI.pep
LTCTRRTGTSTRTPRGPGPRGMPCSIFSTWPLGSLLRCVAGTWTCLHVFVLSFLYNDEPNWVCSTVPRVVLNAAVLCHLEAVILSVKKNWYLEPFCVGWRCRPVHACVLLPFTSHRVGRNITFCLLSNWYETIMIVGDLVAADEANLNGSFTRDL

SEQ ID NO: 61143 - protein, 238 aa, Zea mays
  Clone ID: LIB3353-010-H5_FLI.pep
YARPVVARPEQVDRSSSVEHASLASHRSTTTHMAKVHPDRHPDVPPSSPAAEEEEEEATSLTVWRKSLLFNCRGYTVFDGRGDLAYRVDSYDDAGADAEAVLMDPAGRPAFTVARRSRLLGLLSGQQRLIYAGEDTRRPVYAVVRRGGKATARVTPCAAAGAAYEVEGSYARRRCVVYDAERRVVVAEVRPKEAVGTDVFRLVVRPGFDVSLAMAVVVALDQLFGGRPSLLRSWSTTM

SEQ ID NO: 61144 - protein, 260 aa, Zea mays
  Clone ID: LIB3353-013-B4_FLI.pep
LGGGRRLAGSLDGEHDLVGAQRRERERRVVPRQHERDLDGVPVLLQGGLKSLRLLPHRPVRGHPAEPRHAELPLRHLADHHPLVRRPRRLLHPGVLGRQQELHCHLARRLLVVRNHRRGHRDGLGLAAAGGDDGGRHGDLLAVAAAAAAGGDDGSRHGDLLGLGVLRLSEDPDVVGEDGEPAIRVSSHLLGIVGQLRGDAGRVLADLVAGAGVEDLVLGRLHRDLPQHHPQHHRHGGLSAEDGGELWRSGSLDVSVTVCE

SEQ ID NO: 61145 - protein, 185 aa, Zea mays; identical to SEQ ID NO: 41307
  Clone ID: LIB3353-013-C11_FLI.pep

SEQ ID NO: 61146 - protein, 319 aa, Zea mays
  Clone ID: LIB3353-015-A10_FLI.pep
IMASSAFLNALVLRSPSPSLSSSSNRRSTGAFAFPNPPRFPCLRSARRLVLARAAAAPAPGDGPEDEWGPEPEGGSAVTGAAVAEAPEAREVAELKAQLKDALYGTERGLRASSESRAKVLELITQLETRNPTPAPTEALTLLNGKWILAYTSFSQLFPLLGFGNLPQLVKVEEISQTIDSENFTVQNCIKFSGPLATTSVATNAKFEIRSPKRVQIKFDEGIVGTPQLTDSIVLPEKFELFGQNIDLSPLKGIFSSIENAASSVAKTISEQPPLKIPIRTNNAESWLLTTYLDEELRISRGDGSSIFVLFKEGSTLLY

SEQ ID NO: 61147 - protein, 125 aa, Zea mays
  Clone ID: LIB3354-112-C2_FLI.pep
SSSSSSSSTYSLLMLPQTHAHNIQKNANMPSASSVVAYWRLICSNSAVQRADHHLAELAEAGVRSRAGHRLVPELIEEAHSGHHQTRTDAIGWLAPACLGRRMRARRVVLSRRGECGTDEREEKT

SEQ ID NO: 61148 - protein, 243 aa, Zea mays
  Clone ID: LIB3354-115-E9_FLI.pep
VLCRFLPRRRAPPVDPPLLKTHSMASATGGSSSEMAVDHATGLGTVEKPRFDALMPSEMSGGRTQFRKVTVPQHRFAPLKRCWMEIYTPVYEHMKIDIRMNLKARRVELKTRQDTPDVSNLQKCADFVRAFMLGFDIADAVALLRLDDLYVDSFEIKDVKTLRGEHLSRAIGRLSGKGGKTKYAIENSTRTRIVIADTKIHILGSFVNIKVARDSLCSLILGSPAGKVYSKLRAVSARLAERY

SEQ ID NO: 61149 - protein, 186 aa, Zea mays
  Clone ID: LIB3354-119-D8_FLI.pep
FFWPLVCLRPSENSLFYLIKLIMSGDIDSTFKRLGEWYPQVIKDEKSVICLLLHSQRFIEYIRAEQLEDAVHYGRANLASFLTHEAFEWLLKDSVALLAYEKPAESCLGYLMGSPQREFVADAVNAAVLSTNPTMKDPESCLYSCLERLLRQLTVCSLERRAFNNDQGDAFLLHKEMQNYERSRRS

SEQ ID NO: 61150 - protein, 448 aa, Zea mays
  Clone ID: LIB3354-119-F11_FLI.pep
LFAGIGTRVTSCYSIVHLHNLCSRVLTVPVSYFQMESHNPSHSQIAEVTMDIAASASGAAGSKFCKGAACDFSDASNSSKDARERSASMRKLIVAVVLCVVFMAVEVVGGIKANSLAILTDAAHLLSDVAAFAISLFSLWAAGWEATPRQSYGFFRVEILGALVSIQLIWLLAGILVYEAVVRLVGESGDVRGSLMFAVSAFGLAVNVLMAVLLGHDHGHGHGHGHGHSHDHGHGHGDSDDGHSHHDDEEQEQGRVHHHEHGHGGAITVTTHHHHHHHDHDVEEALIKHEGTQSAGRAGKKPRRNINVHSAYLHVLGDSVQSVGVMVGGAIIWYKPEWKVIDLICTLVFSVVVLFTTIRMLRSILEVLMESTPREIDATRLESGLCGMEGVVAVHELHIWAITVGKVLLACHVTIARDADADEILDKVIGYIKTEYNISHVTIQVERE

SEQ ID NO: 61151 - protein, 215 aa, Zea mays
  Clone ID: LIB3354-123-G2_FLI.pep
LEVESSDTIDNVKAKIQDKEGIPPDQQRLIFAGKQLEDGRTLADYNIQKESTLHLVLRLRGGMQIFVKTLTGKTITLEVESSDTIDNVKAKIQDKEGIPPDQQRLIFAGKQLEDGRTLADYNIQKESTLHLVLRLRGGMQIFVKTLTGKTITLEVESSDTIDNVKAKIQDKEGIPPDQQRLIFAGKQLEDGRTLADYNIQKESTLHLVLRLRGGQ

SEQ ID NO: 61152 - protein, 96 aa, Zea mays
  Clone ID: LIB3354-124-A10_FLI.pep
LATLTNQVFMSDLDIQIPTAFDPFAEANAGDSGAAAGSKDYVHVRIQQRNGRKSLTTVQGLKKEFSYSKILKDLKKEFCCNGTVVQDPELGQVIQL

SEQ ID NO: 61153 - protein, 338 aa, Zea mays
  Clone ID: LIB3354-124-H10_FLI.pep
PFFPLPQAEDRTPKPGSQPRKPGDRRRQVENTLGGRSQAASESRGGVAVLAHGGGHSRRRSGMATPTPMPGSEGTLVAVMPRSPSPTPAEAGTSATETPVLIFLYFHKAIRAELEALHGAAVLLATERTGDVAALAERCRFFFSIYKHHCDAEDAVIFPALDIRVKNVAGTYSLEHKGESDLFSQLFDLLELDIQNDDALRRELASCTGAIQTCLSQHMSKEEEQVFPLLTKKFSCEEQADLVWQFLCNIPVNMVAEFLPWLSTSVTSDEHQDIRDCLCKVVPDEKLLQQVVFTWMEGKAAREVAESFATESNGSQADRHPIDDILYWHNAIRMELHD

SEQ ID NO: 61154 - protein, 99 aa, Zea mays
  Clone ID: LIB3354-126-A2_FLI.pep
TPVDMHPLVVSPSACTWNPWRPGLRPETLPVTAVGPSPSWVKKMVPLTPSLLPSTATAFTIVYVISGDPRGEEEWEGDGLRVLRFWKVPSEAGGSWGLQ

SEQ ID NO: 61155 - protein, 266 aa, Zea mays
  Clone ID: JC-ZMSHLIB3587P020B05_FLI.pep
DPVDSRLPPQQLPYPQRGGAGASRAAGGPVGSAAVKMNDADVSKQIQQMVRFIRQEADEKANEISVSAEEEFNIEKLQLVEAEKKKIRQEYERKEKQVEVRKKIEYSMQLNASRIKVLQAQDDLVNKMKDDAMKELLLVSHNHHEYKNLLKDLIIQGLLRLKEPAVLLRCRKDDHHHVESVLHSAKHEYASKADVHEPEIFVDHDVYLPPAPSHHDAHGQFCSGGIVLASRDGKIVFESTLDARLEVVFRKKLPEIRKLLFGQTAA

SEQ ID NO: 61156 - protein, 297 aa, Zea mays
  Clone ID: JC-ZMSHLIB3587P027G03_FLI.pep
ILFPGIREIFLPRGISHDCVRILQAGYRHIDCARVYGNEKEIGLALKKLFEEGVVKREDMFITSKLWNDHHAPEDVPEALNDSLNDLQLEYLDLYLIHWPFRVKKGTNTSPENFVTPDFPATWGAMEKLYDAGKARAIGVSNFSSKKLGDLLAVARVPPAVDQVECHPGWQQTKLHSFCQSTGVHLTAYSPLGSPGTTWMNGNVLKEPIIISIAEKLGKTSAQVALRWNIQMGHSVLPKSTNEERIKQNLDVYDWSIPDDLLAKFSEIKQARLLRGNFIVNPESVYKTHEELWDGEL

SEQ ID NO: 61157 - protein, 250 aa, Zea mays
  Clone ID: JC-ZMSHLIB3587P036G10_FLI.pep
IKLRAIHDKLRPPLRSPPSYSDPKERTQGESTMTEGGRPNRPDQRDLGELSAVSDLDHLGGGAVAGAHLLDGLDDVHALDDLAEDDVLAVEPRGRDGADEELGAVGVGPGVGHGEHTGGGVLAHELLVGELLAVDGLAAGAVAAGEVAALAHELGDDAVEGGALVVERLPGLAHALLARAQRAEVLRGLGHLVGVQLHHDPARRGAADGHVEEDARVRHRDRELGFGDIFPSLYECDLICGREGRTGAVK

SEQ ID NO: 61158 - protein, 283 aa, Zea mays
  Clone ID: JC-ZMSHLIB3587P041C08_FLI.pep
LEISRVRAHSRFWPPPPPSGKMAGLGKAMYAVGFWIRETGQALDRLGCRLQGKYFFHEQISRHRTIMNIFDKTPHVHKDAFVAPSASLIGDVQVGSGASIWYGCVLRGDANIIQIGSGTNIQDNSLIHVAKSNLSGKVFPTTIGNNVTVGHSAVLQGCTVEDEAFVGIGATLLDGVVVEKHGMVAAGALVRQNTRIPCGEVWGGNPAKFLRKLTDDEISFIAESAANYSNLSKVHAAENAKPLEKIEFEKVLGKKFAHQDEYDSSIGVTEGAPPELTSPNPAQ

SEQ ID NO: 61159 - protein, 177 aa, Zea mays
  Clone ID: 700569481_FLI.pep
ASRPSLFATGAGLDVVAVGAAVLAMALVQLHDGLHLVVRDGDADVVGEELPEHERVHQRGDEQRRHREHGDHGQRHAERLGEGVVHLGGVADGGDGGAGHRERVRPPRQREAEPPEEVDPHRQRRVQEHGDEVGHPGPVAELARDLGPRHARNAGRRHEEEEHRVELLRQRLVGGEP

SEQ ID NO: 61160 - protein, 619 aa, Zea mays
  Clone ID: LIB3150-014-G10_FLI.pep
TASREARRKKMAQLVETYACSPATERGRGILLAGDPKTDTIAYCTGRSVIIRRLDAPLDTWVYPDHAYPTTVARFSPNGEWVASADASGCVRVWGRYGDRALKAEFRPLSGRVDDLRWSPDGLRIVVSGDGKGKSFVRAFVWDSGSTVGEFDGHSKRVLSCDFKPTRPFRIVTCGEDFLANFYEGPPFKFKHSIRDHSNFVNCIRYAPDGSKFITVSSDKKGLIYDGKTGEKIGELSTEGGHTGSIYAVSWNPDSKQVLTVSADKSAKVWDIFEDASGKLNRTLVCPGIGGVDDMLVGCLWQNDHLVTVSLGGTFNVFSASNPDQEPVTFAGHLKTVSSLVFFPQSSPRTILSTSYDGVIMRWILGVGFGGRLMRKNNTQIKCFAAVEEELVTSGYDNKIFRIPLNGNQCGDAESVDVGGQPNALNLALQKPEFALVTTDSGIVLLHNSKVISTTKVNYTITSSSVSPDGTEAVVGAQDGKLRIYSISGDTLTEEALLEKHRGAITSIHYSPDVSMFASADANREAVVWDRASREIKLKNMLYHTARINSLAWSPDSRLVATGSLDTCAIVYEIDKPVASRVTIKGAHLGGVHGLTFLENDTLVTAGEDACIRVWKVVE

SEQ ID NO: 61161 - protein, 197 aa, Zea mays
  Clone ID: LIB3355-057-D9_FLI.pep
GGGGRGRMQAHHRQSYYAVLGVQPGATAAEIRAAYHRLAMRWHPDKIASGGGGADPARAEEAKSRFQQIHEAYQVLSDDKRRALYDAGMYDPLDDDDDQEDVEGFHDFVQEMVSLMAREEPVYSLAELQSMLDGMIKDFTAPQPWPSGFYTGGGGGGASSPSPLGKPSSQEQSTASSRLHPYGFGDAPCFSRTAFSQ

SEQ ID NO: 61162 - protein, 388 aa, Zea mays
  Clone ID: LIB3059-061-D10_FLI.pep
IILFALAQVIVWSSPAEAQTPKTGRGAMAASDLESKAKEAFVDDDFELATELYSQAIDAGPATADLYADRAQAHIKLGNYTEAVADANKAIELDPMMHKAYYRKGAACIKLEEYQTAKAALELGSSYASGDSRFARLLKECDERIAEESSQAPVKNVEATVAATIEDKEDFTNMENTPPVIEPPSKPKYRHDYYNSATEVVLTIFAKGVPADSVVIDFGEQMLSVSIEVPGEEPYHFQPRLFSKIIPEKCKYQVLSTKVEIRLAKAEQVTWTTLDYSGRPKTVPQKISTPAETAPRPSYPSSKAKKDWDKLEAEVKKEEKEEKLDGDAALNKFFRDIYKDADEDMRRAMMKSFVESNGTVLSTNWKDVGAKKVEGSPPDGMELKKWEY

SEQ ID NO: 61163 - protein, 635 aa, Zea mays
  Clone ID: LIB3060-037-F12_FLI.pep
KKKKITPPFPSLSRAQITRSKEKRKMAQLVETYACSPATERGRGILLAGDPKTDTIAYCTGRSVIIRRLDAPLDAWAYPDHAYPTTVARFSPNGEWVASADASGCVRVWGRYGDRALKAEFRPLSGRVDDLRWSPDGLRIVVSGDGKGKSFVRAFVWDSGSTVGEFDGHSKRVLSCDFKPTRPFRIVTCGEDFLANFYEGPPFKFKHSIRDHSNFVNCIRYAPDGSKFITVSSDKKGLIYDGKTGEKIGELSTEGNHTGSIYAVSWSPDSKQVLTVSADKSAKVWDIMEDASGKLNRTLSCPGIGGVDDMLVGCLWQNDHLVTVSLGGTFNVFSASNPDQEPVTFAGHLKTVSSLVFFPQSSPRTILSTSYDGVIMRWIQGVGFGGRLVRRNNTQIKCFAAVEEELVTSGYDNKVFRIPLNGNQCGDAESVDIGGQPNALNLAIQKPEFALITTDSGIVLLHNSKVISTTKVNYAITSSSVSPDGTEAVVGAQDGKLRIYSISGDTLTEEALLEKHRGAITSIHYSPDVSMFASADTNREAVVWDRASREVKLKNMLYHTARINSLAWSPDSRLVATGSLDTCAIVYEIDKPVASRVTIKGAHLGGVHGLTFLDNDILVTAGEDACIRVWKVVQQ

SEQ ID NO: 61164 - protein, 142 aa, Zea mays
  Clone ID: LIB3061-047-A4_FLI.pep
SSHPSRNRITVDVTNSYEHFHCHGVTVAVTWPGAEARGSFGSRSSRHSDSDGAVNSGRDIPAENSQHNSDAGTSRHPGDRASTSWPDEKLPSAKSSPGHCSSDLCIGAMDVQRRSAWGLVIVTAGRGGEIRVFQNFGFPVQV

SEQ ID NO: 61165 - protein, 138 aa, Zea mays
  Clone ID: LIB3061-071-B6_FLI.pep
ASTEFRTSAASSPLPRTRSSGCYSAEVGRLVFLMGRTIKKAKKAQSKKSKKKTESSSSSNPAIASGPAKVWQPGVDTLEDGEELQFDPQAYNYLRGFGIGWSCLSFDVVRDQLGLVRSEFPHTFYGVAGTQVVLIFMP

SEQ ID NO: 61166 - protein, 203 aa, Zea mays
  Clone ID: LIB3061-110-H8_FLI.pep
VCNYWRAGRCNRFPCPFLHSELPEAAPPKRPTGPGGNVWRNPNTGGRGGGHHNRWGKGPGGGSGIASHKPPERPCKYFLAGTECSYGERCRYPHSYCISDSIAMLTLLKGHEQGVTGIALPAGSDKLYSGSKDGTVRMWDCQTGQCAGVITMGREVGCMIIEGPWLFVGIPDAVKVRNTSKLCISHCFRFQKLRQLSTSSSML

SEQ ID NO: 61167 - protein, 318 aa, Zea mays
  Clone ID: LIB3066-032-A12_FLI.pep
PRLLLLTCERGSIIVQFGNMSSKKIELDHKDMVHDSAIDYYGKRLATASSDFTVKIVNIGAANAPSQVLATLSGHYGPVWRVAWAHPKYGAILASCSYDGRVIIWKEDARGNWSQVHVFSDNKSSVNSIAWAPYEVGLCLACASSGGRISILTMQADGGWDTATIERAHPVGATAISWAPATASLAGAGELVYKLVSGGFDSVVKVWGFNNGSWKLESALISDMHTDCVRDVAWAPVLGLSKSTIASGSQDGKVVIWTKGKDGDKWEGKLMRDFGSPVWRVSWSLTGNILCIAAGENNITLWKEGSDGQWEEAMKVEP

SEQ ID NO: 61168 - protein, 94 aa, Zea mays
  Clone ID: LIB3068-052-F1_FLI.pep
IKKFQFVSLTLKDTFLVRLVPRKIYQFQLLNHLSGWSELEAPLGGGVDKLLADPFSTGGGFPHFLSDSKGSNTKTPPSVSPRANWLASEGCAAT

SEQ ID NO: 61169 - protein, 419 aa, Zea mays
  Clone ID: LIB3150-010-D9_FLI.pep
CPLVASAVLHTRTCPQTAASASAAMSISGELPGEGSDGEEEVFIDEEDIIHEITIDEEDLPDRDEEDDDVGDGIEDIIDDSTYSFLGHKDEVFTVACSPTDASLVASGGKDDRGFLWRIGSDEGALELTGHKDTVGTVAFSSDGNLLACGSFDGQINVWNTAARTLKGTLEGSGSGFEWLKWHPRGHLIIAGSEDCNVWMWNADHNAIINTFVGHSNTVTCGDFTPDGKLICTGSDDASLRIWDPRSAQSRHVIRGHGYHTDGLTCLSMTSDSQTVVSGSKDSSVHAVNVNSGQIVGSLVGHTTSIECVGISSSYGWVATGSMDQKLIIWDLTHQSSRCTCEHDEGVTSLAWLGSSRYVASGCIDGKVRIWDSLSGDCAREFSGHADVVQSLAITADGNAMVSVSSDGSARVFDISMFK

SEQ ID NO: 61170 - protein, 458 aa, Zea mays
  Clone ID: LIB3150-029-G11_FLI.pep
VDLDSVPACEGEEGMDEFELEDNLEFILQSIQELMEDPGDNNAFGDANQNELFASIVNYDQENMLPDVSAADVAAGKDIQGIPWEKMLFGRDKYREMKMKNYRNYQNLSYAREDALQECKQVTKDSPYYDFHYNTRRARPSIVHFQLRNLVWATTKHDVYTMHDQSVTHWSSLEQTSTELINADDCIVPKQRGHGSQSVAMVQVTTMAVDSNLLVVGGFQGEIICKRLDDEGVVYSTRVTDDENAITNSLEMYQDPSGSRRLVAANNDCSIRIFDTEYFDLLKHYVFPWSVNSVSVSPNGKLFAVLGDHEDGCVVDPKCGKAIGSLRGHLDYSFASAWHPDGNIVATGSQDTTCRLWDIRNLSQSVAVLGGRMGSIRCVKFSSDGRFLATAEPVDFVHMYDAYADYSRSHEIDLFGEIGGLAFSPDTEAFYVGLADQTYGGMIEFSKRHQHHYLNSLW

SEQ ID NO: 61171 - protein, 438 aa, Zea mays; identical to SEQ ID NO: 49110
  Clone ID: LIB3150-038-G1_FLI.pep

SEQ ID NO: 61172 - protein, 124 aa, Zea mays; identical to SEQ ID NO: 47585
  Clone ID: LIB3279-224-E10_FLI.pep

SEQ ID NO: 61173 - protein, 69 aa, Zea mays
  Clone ID: LIB3279-225-E4_FLI.pep
AEVRGDGALQRVELAPQELRARIPRLPGLCEPSWTDQEVRADVLQAVLPQQRQGHWLHQVPLKSAGRAI

SEQ ID NO: 61174 - protein, 52 aa, Zea mays
  Clone ID: LIB3279-225-G9_FLI.pep
MQNLHSLLCTSEERTCLPWHKYLILSRCRFTQTGYKARLGLFCSKSMWIGCV

SEQ ID NO: 61175 - protein, 174 aa, Zea mays
  Clone ID: LIB3279-226-G4_FLI.pep
LLVFLQVGVVGLHPEGERHLGNEIPVVLDLMVSGLQLPHAAAQINSLLVHPKSQYLMFVLQHLPIRRVHPPVVHLLLAHVGLPILEALFNSDQLPGLQGVQVLAFQMPELNLHVVVLLLDSVDLCTQVLVLLTPQNLPGVGLVLLQDPGQPATKPNLGFLGWCPHFYWCPQFYA

SEQ ID NO: 61176 - protein, 174 aa, Zea mays
  Clone ID: LIB3279-227-E10_FLI.pep
LSSCSKFMMHDWFGIVLQTNFLGYILCFVGSVNLLMVIFGCSIFDSGNTDFGDSKIPNTTEIKTKPDGWETTSRGQDGNIWDISQREDDILIQEFERRIAFSKQQIASFIKTHIFSRRRPIDGWKYMIEEIGPNARKGKGSVQRLPSVSDPATQPYREETPAIASSSSFRGNRP

SEQ ID NO: 61177 - protein, 250 aa, Zea mays
  Clone ID: LIB3279-229-G3_FLI.pep
ARRSPLLPACPTSKEHALPPPALLYRSPSPTMDPAAMSRSPCSIVSPGSLLTAPLLPVRLAVQPRRRVPAFIAPSGRPSVARRAAAGDKFEAETPIEKSFPPFPTVMDINQIRDILPHRFPFLLVDRVIDYKPGEYAVAIKNVTINDNFFPGHFPERPIMPGVLMVEAMAQVGGIVMLQPEVGGSRENFFFAGIDKVRFRKPVIAGDTLIMRMTLIKLQKRFGIAKMEGKAYVGADLVCEGEFLMATGSE

SEQ ID NO: 61178 - protein, 148 aa, Zea mays
  Clone ID: LIB3279-229-G9_FLI.pep
LYMNSSLHTFATTKFEFHSMFSCTTNRRKLDIAKSSKQHIDDLEAALVLLPVLDLSYTPDVPPAGHHDHVADVKLEEVHDLVGLQIDLDGVVGLDERVGVADGVTVVGVQVGDAFLAKLNRPHLAELKLSILIPNWVKTEATFSSRLS

SEQ ID NO: 61179 - protein, 259 aa, Zea mays
  Clone ID: LIB3279-229-H2_FLI.pep
PEAATASTSDRVGAMEDVITDVPPPSRFSPDDLDNFAAPPAQPTPIFVVSPNPSPPAPRLLVVFISPTSLALLASPPPLHASLLLPDLPLLPHAPMRVYLHPSGALLAAAHGAFPAHRARRREGSCLQAPAGGGAGFGRGPERDVPGPPRRGRARGREVGDPRGARAGRRGGCQGSPGSGPTRQRGGRARRRRARGVRDPGQGGQHGGDVAGGRQARGVRGHAARGGGARRRHRQGRGQGLRPARPGFLVHLRFLCYCC

SEQ ID NO: 61180 - protein, 229 aa, Zea mays
  Clone ID: LIB3279-232-C9_FLI.pep
ARTNLSSPLALAALPADDPPGPRRIERRRSGAAAGEPGGGGGGGAGFMCDLVARTGRHQQRYEDGRRLVAGCIPFRYRANNDETSGDKTKKLVEVLMINSQSGPGLLFPKGGWENDETVEEAAAREAIEEAGVRGDIVHFLGLYDFKSKTHQDACCPEGMCRAAVFALHVKEELASWPEQSTRQRTWLTVPEAASSCRYQWMQEALLTGFSDWHDKWSRGGGGTNCDPA

SEQ ID NO: 61181 - protein, 176 aa, Zea mays
  Clone ID: LIB3279-232-E5_FLI.pep
GGNLCSAAAMYFKAHECETEYPRVRCEMSAAARLHNTTQHNNVHLVNWQSRLENQDSAYRCSGAATARHEWISLLSSSLHSSSHSSSVVCAGAIAWVGLHDERGVVEVAVPGVPAAVGVVEVHGDGGAGHGAVRVVARPALLDHGAAHLGARVVQVLRQDLVRRRRLRDAPRLIDR

SEQ ID NO: 61182 - protein, 704 aa, Zea mays
  Clone ID: LIB3332-023-D4_FLI.pep
QDAIMCYQRALQARPDYAMAYGNLATIYYEQGQLDMAIRCYNQAIVYDPQFIEAYNNMGNALKDAGRVEEAINCYRSCLALQANHPQALTNLGNIYMEWNMISAATSFYKAAISVTSGLSSPLNNLAVIYKQQGNYADAITCYTEVLRIDPTAADALVNRGNTFKEIGRVNEAIQDYVQAATIRPNMPEAHANLASAYKDSGHVETAIISYKQALRLRPDFPEATCNLLHTLQCVCDWENRDGMFRDVEEIIRRQIKMSVLPSVQPFHAIAYPIDPLLALEISRKYAAHCSLIASRFGLPPFVHPPPVPVKAEGKHCRLKVGYVSSDFGNHPLSHLMGSVFGMHDRANIEVFCYALSQNDGTEWRQRIQSEAEHFVDVSAMTSDNIAKLINQDKIQILINLNGYTKGARNEIFAMQPAPIQVSYMGFPGTTGAAYIDYLVTDEFVSPSSYAHIYSEKLVHLPHCYFVNDYKQKNRDCLTPVCPHKRSDYGLPEDKFIFACFNQLYKMDPEIFDTWCNILKRVPNSALWLLRFPAAGETRVRAYAAARGVRSDQIVFTDVAMKNEHIRRSALADLFLDTPLCNAHTTGTDILWAGLPMITLPLEKMATRVAGSLCVATGLGEEMIVSSMKKYEDRAVELALNPVKLQALTNKLKEVRMTCPLFDTARWVRNLERAYYKMWNLYCSSRHPEPFKVVEDDNESPFDR

SEQ ID NO: 61183 - protein, 330 aa, Zea mays
  Clone ID: LIB3332-038-F8_FLI.pep
KGDYDGALEHLVLASMTMVANGRDIEVATIDVAIGNTYLALARFDEAVFSYQKALTVLKSARGDDHPTVASVYVRLADLYHRTGRLRESKSYCENALRVYAKPAPGAAPDEIAGGLMEIAAIYEALGDLDEALKLLQRALRLLEGSPGQWSTVAGIEAQMGVLYYMVGRYADSRNSFESAVAKLRAIGERKSAFFGVLLNQMGLACVQLFKIDEAAQLFEEARAVLEQECGASHPDTLGVYSNLAAIYDAMGRVEDAIEILEHVLKVREEKLGTANPDVDDEKKRLAELLKEAGRSRNRKQKSLQNLFGTNSQRAKKEAGRRWSNFGFRS

SEQ ID NO: 61184 - protein, 208 aa, Zea mays
  Clone ID: LIB3354-051-A5_FLI.pep
LVAAMTSPPRVSMEITDEVVKSMKIGLVFQGYNGRICSMDFHSKATNYLVTASDDESIRLYDTQDAVCLNTINSKKYGVGLVCFTDNPSIVLYSSNNGWDESLRLLSMNDNRFIRYYKGHLDRVVCIALCSGKENFLSCSLDRTILLWDHRAEKPQGLLRAQRRPTVSYDAQGMVFAVAYGGRIKMFDIRKFGMPMSYSSAVMAGGFC

SEQ ID NO: 61185 - protein, 308 aa, Zea mays
  Clone ID: LIB3354-101-B4_FLI.pep
SLIIGMVGSLIFPTPNVDPKAENPNEMVTAGVLSSLQNFLRMCLIAILSYGPMPKHIAFIMDGNRRYAKFRSMQEGAGHRMGFSTLIASLMYCYEMGVKYITVYAFSIDNFKRDPSEVESLMQLMEEKINELLENRSVINKINCKINFWGNLDLLYEPVRLAAEKLMASTAGNTGLVFSICMPYNSTSEIVNAVSEVCAERMEMFQSEHIGDCNGHAANNGVRSEISVADLDRHMYSAGCPDPDIVIRTSGETRLSNFLLWQTTFSHLQNPDPLWPEFSFRHLVWAILQYQRVYPALEHNRKLAKKQL

SEQ ID NO: 61186 - protein, 217 aa, Zea mays
  Clone ID: LIB3354-115-A11_FLI.pep
AWRSRTRCLRDCRDYNGRICSMDFHSKATNYLVTASDDESIRLYDTQDAVVVCIALCSGKENFLSCSLDRTILLWDHRAEKPQGLLRAQRRPTVSYDAQGMVFAVAYGGRIKMFDIRKFGMGPFATFSVGTDDSEAHVVQFSGDGRRILLTTKAGRVHVLDSFEGNSIASFRAKPILTNSTLEASFCPEGNHIVSGSGDGSVYAWNVESGKVQRKNM

SEQ ID NO: 61187 - protein, 62 aa, Zea mays
  Clone ID: LIB3355-028-F3_FLI.pep
RTSPTWPEKLNTPPNQSLRATTCHANEGDQALNRSAWGLVIVTAGRGGQIRTFQNFGFPVRV

SEQ ID NO: 61188 - protein, 350 aa, Zea mays
  Clone ID: LIB3587-223-C6_FLI.pep
LWDWNWITPLPDKTGRERMESREEERKGSGGAAAGGGSTPGANLRDLVSREYYGHKKKVHSVAWNCLGTKLASGSIDHTARVWSIDPHVHSKVKDIELKGHTDSVDQLCWDPNHPDTVATAAADKSIRLWDARSGKCQVVELSGENINITYKHDGTQIAVGNKEDELTILDVRTLKVAKKHKSTYEMNEIAWNKAGDLFFITTGLGHVEVVKDLEFLKPCKLNAHTAGCYCIAMDPLDRYFAVGSADSLVSLWNVKELLCIRTFTKLEWPVRTVSFSHTGEFIAYASEDPFIDIANVETGRSIHQIPCKAAMNSVEWNPKYNLLAYAGDDKNKYMTDEGVFRVFGFETHN

SEQ ID NO: 61189 - protein, 152 aa, Zea mays
  Clone ID: LIB3593-003-D12_FLI.pep
DVEAEFAGGDSGGTTTELDGLPPPPSGLTISAAKAKGMDSYKGGQYADAIKWLSWAVVLIEKSGKDADIVEVLSSRASSYKEVGEYKKAITDCSKVLDQDKDNVSVLVQRALLYESTEKYRLGAEDLRLVLKIDPTNRLARSTIHRLNKLAD

SEQ ID NO: 61190 - protein, 391 aa, Zea mays
  Clone ID: LIB3595-041-H3_FLI.pep
ADGQVDRLLRAQEDDQAARIGEEEEEEQIEYPFFTEGSQELLKARLDIARYSLPRAKARIERAKRRHEDPDEDPEAEAELVVKQAGEFVLECSEIGDDRPLTGCSFSRDASMLATSSWSGIVKVWSMPQITKVATLKGHTERATDVVFSPADDCLATASADRTAKLWKPDGSLLMSFDGHLDRLARLAFHPSGKYLGTASFDKTWRLWDINTGKELLLQEGHSRSVYGVSFHPDGSLAASCGLDAYARVWDLRSGRLFFTLKGHVKPVLGVSFSPNGYLVATGSEDNFCRIWDLRKRQMLYSIPAHKSIISHVKFEPQEGYYLATSSYDTKAALWSARDYKPIKSLVGHESKVTSLDISGDGQKIVTVSLDRTIKIWSCRSSTQDNEMELD

SEQ ID NO: 61191 - protein, 309 aa, Zea mays
  Clone ID: LIB3595-054-C3_FLI.pep
LVSGSKSGELILWDPKTGNQLGTPLMGHRKWITAVSWEPVHLQSPCRRFVSASKDGDARIWDITTRKCVISLTGHTSSVTCVKWGGDGLIYTGSQDCLIKVWETSQGKLVKTLKGHGHWVNSLALSTEYVLRTGAYDHTGKTFSTAEEMKEAALARYKKMRGNAPERLVSGSDDFTMFLWEPTISKQPKARMTGHQKLVNHVYFSPDGQWLASASFDKSVKLWNGITGKFVAAFRGHVADVYQISWSADSRLLLSGSKDSTLKIWDIRTHKLKMDLPGHADEVYTVDWSPDGEKVASGGKDRVLKLWMN

SEQ ID NO: 61192 - protein, 72 aa, Zea mays
  Clone ID: LIB3595-062-F8_FLI.pep
HKHVLRPGFLHLNMEMSNTRAEPSDEAETMVLPSAVMASDCTTSACPLNSLAQAPERLSQMRTLPSMHPDAT

SEQ ID NO: 61193 - protein, 437 aa, Zea mays
  Clone ID: LIB3597-021-D1_FLI.pep
GATSDDEDAADRPFSMPVATRSASFSPPPMKPPRWESHPYLPPTHCFPQPPLPDAALPLASPSSGRYISKRERALLASSGAHIESGSSLPLTRVDFESAVGSITYPNLRADILHSLRCQPKPGPSTSFPLRLSVCLKGHTKAINCVDWSPTHGHLLASAGMDHTVHVWNVWDKGNTTARVLKHHTAAVKDVRWSLHRPFLLSGGLDCSLQLVDVVEGKVMEVFKEDQAVEVIKFNPSNPDLFLSGGSKGSLKLWDIRCGLVTKEFQRSLGTILDIDFSADGRQFISSTDTTRSNISENTIIVWDVLRQVPLSNQVYTEAFTCPCVRYHPREASFVAQSNGNYIAIFSARPPFKLNKYTRFEGHGVWGFPVKCSFSLGGRELASGSSDGSIYFYDYRSARLLRKIEAFKEACTDVAYHPVMPNVIAACSWAGEISVFE

SEQ ID NO: 61194 - protein, 325 aa, Zea mays
  Clone ID: LIB3597-047-G6_FLI.pep
PREMKLAGLKSVDGAHEESIWAAAWAPAADHRPTAVLLTGALDETVRAWLPDDLAALGSPTRGHALGVVSLAAHPAGSLAAAVSLDSFIRVFDVDTGASVATLEAPPSEIWGVQFHPKGNALAAAGGGSGSVKLWDTEKWKAITSLAVPRPEGARPDKTGSGKFVLSVAWSPDGRLLACGSMDGTIAVYDAVRMKFLHHLEGHHMPVRSMVFSPVDPHVLFTACDDCHVHIYDAREKGLVGAMSGHASWVLSIDASPDGLAVATGSSDRTVRLWDLNMRTSVQTMSNHSDQVWAVAFRPPGGAGVRAGRLASASDDKSVSLYDYS

SEQ ID NO: 61195 - protein, 218 aa, Zea mays
  Clone ID: LIB3606-003-G11_FLI.pep
LSDNAITNAIDIHRSISGSLHITVSNNDCGVREYDMERYQLVNHYRYNWPVNHTSVSPDKKLLAVVGDDRDALLVDSRNGKVTSTLVGHLDYSFATAWHPDSRTFATGNQDKTCRIWDTRNLSTSLAVLRGNIGAIRCIRYSSDGRFLVFSEPADFVHVYSVAADYKKRQEIDFFGEVSGITLSPDDESLFIGVCDRVYASLLQYRMIRGFDYLDSYV

SEQ ID NO: 61196 - protein, 309 aa, Zea mays
  Clone ID: LIB3606-014-E3_FLI.pep
IIGAMPPHKIETGHQDVVHDVAMDYYGKRLATSSSDNTIKIIGVSGTSHQQLATLSGHQGPVWQVAWAHPKFGSMLASCSYDGRVIIWKEGSKPDEWALVHTFAEHKSSVNSIAWAPHELGLCLACGSSDGNISVFTARSDGGWDTTRIDQAHPVGVTSVSWAPAMAPGALISAGSSGQFEYVQKLASGGCDNTVKVWKLNNGSWRMDCFPALQMHKDWVRDVAWAPNLGLPKSTIASASQDGTVVIWTAAKEGEQWEGRLLYDFRTPVWRLSWSLTGNILAVSDGNNNVTLWKEAVDGEWQQVTTVEP

SEQ ID NO: 61197 - protein, 119 aa, Zea mays
  Clone ID: LIB3606-043-E11_FLI.pep
GELLGEASVAKENGGGCSPFLAIVGNDSLEMAALSFTCTEGGYVDKKRRPRKQNNHKSVGSDHLVVPKCVFGFTDKPVCSLLGHAADVLDLSWSKSQVRIHHLRLNFNCLNAFWGYFWY

SEQ ID NO: 61198 - protein, 236 aa, Zea mays
  Clone ID: LIB3608-028-C1_FLI.pep
CQMQHLDQEGISFCCRTTYDDNAITNAVEIFNTSSGAVHFMASNNDSGVRYYDMERFQLFKHFQFEWPVNHASLSPDRKVVVIVGDDPDGLLIDANSGKTVHSIKGHRDYSFASAWSPDGRTFATGNQDKTCRIWDVRNLSKSVHVLRGNLGAIRSIRFTSDGQFMSMAEPADFVHIYDVKSDYNKRQELDFFGEISGTSFSPDTDTLFVGVWDRMYGSLLQFGRLYNYSYLDSLF

SEQ ID NO: 61199 - protein, 248 aa, Zea mays
  Clone ID: LIB3637-258-B5_FLI.pep
DKQVKCWDLEQNKVIRSYHGHLSGVYCLALHPTIDILLTGGRDSVCRVWDIRTKAHVSALTGHDNTVCSVFARPTDPQVVTGSHDTTIKFWDLVAGRTMCTLTHHKKSVRAMALHPKEKAFASASADNVKKFNLPKGEFLHNMLSQQKTIINSMAVNEDGVLATGGDNGSLWFWDWKSGHNFQQDQTIVQPGSLESEACIYALSYDVSGSRLVSCEADKTIKMWKEDLTATPETHPINFKPPKDIRRY

SEQ ID NO: 61200 - protein, 256 aa, Zea mays
  Clone ID: LIB3689-210-C7_FLI.pep
SSHTTCHVILFMFPEESSQAPVKNVEATVAATIEDKEDFTNMENTPPVIEPPSKPKYRHDYYNSATEVVLTIFAKGVPADSVVIDFGEQMLSVSIEVPGEEPYHFQPRLFSKIIPEKCKYQVLSTKVEIRLAKAEQVTWTTLDYSGRPKTVPQKISTPAETAPRPSYPSSKAKKDWDKLEAEVKKEEKEEKLDGDAALNKFFRDIYKDADEDMRRAMMKSFVESNGTVLSTNWKDVGAKKVEGSPPDGMELKKWEY

SEQ ID NO: 61201 - protein, 329 aa, Zea mays
  Clone ID: LIB3689-223-B10_FLI.pep
RARGDGMTERQVAELGPGTACCGWNHCGRRLAAGAVDGSVSVYDSQPPPSFKWQAHEQAIVNVVWLPPEYGDAIACVCADGTLSLWEEVAADDQLPTWRNCKIFEDGNSHILNVHFGLHLGILKMVTAYSDGQVKVYELLDSLELDKWQLQAEFQNITDPISRFGKPACTSASIAWNPRRGGSQQASFAIGFNSDSPHFNSCKIWEFEEAHQRWLPLVELGSPEDTGDKVCAVAWAPNIGRPYEIIAVATCKGIAIWHIGLNADADGGPSTQNVALLNGHDGEVWQLEWDMGGMTLASTGGDGMVKLWQANLDGVWHEQAVLDCSGSHV

SEQ ID NO: 61202 - protein, 319 aa, Zea mays
  Clone ID: LIB3689-225-F7_FLI.pep
AGAGGNVSTGPYVHQKEALVVAKECLLAAVKADPRAASVWVNLANAYYMDGEHKNSKRCLEQAAKLEPNHMPARYAIAVHRIRDAVRSQCSDDQLLWAANEMATVLKEGDPSAVDAPIAWAGLAMAHRAQHEIAAIYDTENINLNDAEERAQYTLKQAIQEDPDDAVQWHQLGLYNICMTRFSRSVNFLKAALARSPDCSYAWSNLGIALQLSDDPSSETVYKRALVLSSTQQLHAIFSNLGILYRQHRNYEFARKMLLRSLELCPGFAPASNNLGLVFVAEGRWEDAKSWFEKALQSDPLLDAAKSNLLKVLTLSTKQ

SEQ ID NO: 61203 - protein, 472 aa, Zea mays
  Clone ID: LIB3689-242-G2_FLI.pep
ALPFSSLAFTTRRPIRHRPPQPASQGQMAASLVSSFTVPLVSAVLGAAIALVFLAGYLRRKRAAIAHIPPTATAAAPDQPKHVRPSNQAQYKKGHLRPHHHAADKDAAKKHHHLDVNTLRGHTDSVTALAFSNDACNLVTVCADGAIRVFRIDDTSSKSFKILRINLPAGAHPTAVTFSEGSSSVVVAAQALLGSSLYMYADVSAPPTAENKLQGKLSPPEIKWSHPKIHGKESVLNLAAARATHGSGDGSTIIISCSEATDIKVWHGKSGKEFGTVDTNQLKNNMADISPNGRFIAAAAFTADVKVWEIVYSKDGSVKEVNKVMQLKGHKSAVTCLCFAPNSEQIITASKDGSIRVWNINVRYHLDEDPKTLRVMPIPLHDSKGSVCQYDHMTVSPDGKILAVTSGSTLQWLLVETGAVLDTADKAHEGDITGIAWAPRTIPNGGVHVFILATAGVDKKVKLWTAPDVGST

SEQ ID NO: 61204 - protein, 390 aa, Zea mays
  Clone ID: LIB3732-024-C2_FLI.pep
DSIILFALAQVIVWSSPAEAQTPKTGRGAMAASDLESKAKEAFVDDDFELATELYSQAIDAGPATADLYADRAQAHIKLGNYTEAVADANKAIELDPMMHKAYYRKGAACIKLEEYQTAKAALELGSSYASGDSRFARLLKECDERIAEESSQAPVKNVEATVAATIEDKEDFTNMENTPPVIEPPSKPKYRHDYYNSATEVVLTIFAKGVPADSVVIDFGEQMLSVSIEVPGEEPYHFQPRLFSKIIPEKCKYQVLSTKVEIRLAKAEQVTWTTLDYSGRPKTVPQKISTPAETAPRPSYPSSKAKKDWDKLEAEVKKEEKEEKLDGDAALNKFFRDIYKDADEDMRRAMMKSFVESNGTVLSTNWKDVGAKKVEGSPPDGMELKKWEY

SEQ ID NO: 61205 - protein, 312 aa, Zea mays
  Clone ID: LIB3732-025-A12_FLI.pep
DLTITSLLKLDDASLPSTPTRVSGMSADSYVHIVQAKVNVTFGRFDSAVALAEKAKLIDGVSSEVEVILNNVRLVALARARGNDLFKAGKFAEASLAYGEGLKYEPSNPVLYCNRAACWSKLGRWAKAVEDCSEALRVQPNYTKALLRRAASYAKLERWADCVRDYEVLRKDLPGDTEVAESLFHAQVALKTARGEVVSNMKFGGVVEEIISLEQLQDVIRSPGVSVLYFMATMNKQCAQITPSVDSLCSECPALNFLKVNVDERPLVASAENVRVVPSFKIYKDGTRVKEMVCPSLQVLRYSVRHYAVSSS

SEQ ID NO: 61206 - protein, 488 aa, Zea mays
  Clone ID: LIB3732-029-F9_FLI.pep
RTITIMDATANSDVQRAEEFKLKANDAFKANKFSQAIELYSQAIELNSSNAVYWANRAFAHTKLEEYGSAVQDATKAIEIDSRYSKGYYRRGAAYLAMGKFKEALKDFQQVKKICPNDPDATRKLKECEKAVQKIRFEEAISAGDDERRSVADSIDYHIIEVEPHYAGPRIDGEEITIEFVKAMLDEFKKQKCIHKRYAYQIVLKTLDLLRSMPSLVDVDVPNGGHFTVCGDVHGQYFDLLNIFDLNGLPSEENPYLFNGDFVDRGSFSVEVILTLFAFKCLYPKAMYLARGNHESKSMNKIYGFEGEVRSKLGEKFVELFAEVFCWLPLAHVINNKVFVVHGGLFSVDGVKLSDIRSIDRFCEPPEEGLMCELLWSDPQPQLGRGPSKRGVALSFGADVTKKFLQENNLDLIVRSHEVKDEGHEIEHDGKLITVFSAPNYCDQMGNKGAFIRFTAPEMKPDIVTFSAVPHPDVKPMAYANNFLRMFQ

SEQ ID NO: 61207 - protein, 316 aa, Zea mays
  Clone ID: LIB3732-035-H8_FLI.pep
MAQPSVILATASYDHTIRFWEAKSGRCYRTIQYPDSQVNRLEITPDKRFLAAAGNPHIRLFDVNSNSPQPVISYDSHTSNVMAVGFHCDGNWMYSGSEDGTVRIWDLRTGTCQREYESRAAVNTVVLHPNQKELISGDQNGNIRVWDLAANSCSCELVPEVDTAVRSLTVMWDGSMVVAANNRGTCYVWRLLKGTQTITCFEPLHKLQAHDGYILKCLLSPEFCDPNRYLATASSDRTVKIWNVDGFKLERTLVGHQRWVWDCVFSVDGAYLITASSDTTARLWTMSTGEAIRVYQGHHKATVCCALHDGAESAPS

SEQ ID NO: 61208 - protein, 209 aa, Zea mays
  Clone ID: LIB3732-057-C7_FLI.pep
GTRHYCSNDYCRFHNHHSNTTRLMSREFYTGNEQSLPHSICKFSTCKASLFLSTGMVTHMSSSDGCLRGRTGDGSSLSQQRHQLPIIVQCHSIITAANMLPIDEDIWDSPLSSPLLQGILELSSITFLIQLNGLVACSELLEQLLHTDAERAGSFAEDDEGSGGNDLLGLGERHCSRFRAGGWPKLPSKKGLSDSGSIFIRFLRVLGHR

SEQ ID NO: 61209 - protein, 332 aa, Zea mays
  Clone ID: LIB3900-003-E7_FLI.pep
KASAQKEKEAGNAAYKRKDFDTAIQHYTEAMELDDEDISYITNRAAVYLEMGKYDECIKDCDKAVERGRELHADFKMISRALTRKGTALAKLAKSSQDYDAAIEIFQKALTEHRNPDTLKKLNDAERAKKELEQQEYYDPRIADEEREKGNEFFKQQKYPEAVKHYTEALRRNPKDPRVYSNRAACYTKLGALPEGLKDAEKCIELDPTFSKGYTRKGAIQFFMKEYDKALETYQAGLKHDPKNQELLDGVRRCVEQINKASRGELSEEELKERQNKAMQDPEIQNILTDPIMQQVLTDLQENPRAAQAHLKNPGVMQKIQKLVSAGIVQMK

SEQ ID NO: 61210 - protein, 312 aa, Zea mays
  Clone ID: LIB3912-006-D11_FLI.pep
SSAAAEREQMTSSGTVAQQLPRTEARSLSGHEGAVLAVRFNRDGNYCLSCGKDRTLRLWNPHTGAQVKTYKSHAREVRDVHSSSDNAKLVSCGADRQIFYWDVASGRVIRKFRGHNSEVNSVKFNEYNAVVVSAGYDRTVRAFDCRSQNNDPIQTIDTFQDSVMSVNLTKTEIIAGSVDGTVRAFDIRMGRETVDNLGHPVNCVSLSNDNNCLLANCLDSTVRLLDKSSGELLQEYKGHTCKSFKMDSCLTNDDAFVVGGSEDGYIFFWELVDAPVVARFRAHSSVVTSISYHPTKACMLTSSVDGSIRVWT

SEQ ID NO: 61211 - protein, 431 aa, Zea mays
  Clone ID: LIB3912-054-B6_FLI.pep
MPKAVGGAADEEEFRAEVEERLINEEYKIWKKNTPFLYDLVITHALEWPSLTVQWLPDRTEPPGKDHSVQKMILGTHTSDNEPNYLMLAQVQLPLDDAEADARHYDDDHADIGGFGAASGKVQIVQQINHDGEVNRARYMPQNSFVIATKTVSAEVYVFDYSKHPSKPPLDGACNPDLRLKGHNSEGYGLSWSIFKEGHLLSGSDDAQICLWDIKANSRNKSLDALQIFKHHDGVVEDVAWHLRHEYLFGSVGDDYHLLIWDLRSPAPTKPVQSVVAHQGEVNCLAFHPFNEWVVATGSTDKTVKLFDLRKIDTSLHTFDCHKEEVFQVGWSPKNETILASCCLGRRLMVWDLSRIGQEQTPEDAEDGPPELMFIHGGHTSKISDFSWNPCEDWVVASVAEDNILQIWQMAENIYHDEDDLPISDEPAKTS

SEQ ID NO: 61212 - protein, 393 aa, Zea mays
  Clone ID: LIB3960-013-B4_FLI.pep
GHVRVTSIILFALVQVIVWSRRQQTPRAGGSAMAASDLESKAKEAFVDDDFELAAELYTQAIDAGPATADLYADRAQAHIKLGNYTEAVADANKAIGLDPTMHKAYYRKGAACIKLEEYQTAKAALELGSSYAPGDSRFTRLLKECDECIAEESSQAPAKNVEAPVAATVEDKEDVANMDNTPPVVEPPSKPKYRHDYYNSATEVVLTIYAKGVPADSVVIDFGDQMLSVSIEVPGEEPYHFQPRLFSKIIPEKCKYQVLSTKVEIRLAKAEQVTWTTLDYSGRPKAIPQKISTPAETAPRPSYPSSKSKKDWDKLEAEVKKEEKEEKLEGDAALNKFFRDIYKDADEDMRRAMDKSFRESNGTVLSTNWKDVGSKTVEASPPDGMELKKWEI

SEQ ID NO: 61213 - protein, 421 aa, Zea mays
  Clone ID: LIB4071-006-F1_FLI.pep
DFMQMLREVQRNPSSISMYLSDPRMMQVLSLMLNVKIQRPEASEPSQSTPPPPPQQQTSPLQTKAREVEPEPEPEPMDFTDEEKERKERKAAAQKEKELGNTAYKKKDFEAAIQHYTKALEHDDEDISYLTNRAAVYIEMGKYDECIKDCDKAVERGRELRADFKMISRALTRKGTALVKLAKTSKDFDIAIETYQKALTEHRNPDTLKKLNEAERAKKELEQQEYYDPKLADEEREKGNEFFKEQKYPEAIKHYTEALKRNPKDPRVYSNRAACYTKLGAMPEGLKDAEKCLELDPTFTKGYTRKGAIQFFMKEYDKAMETYQAGLKHDPKNQELLDGVRRCIEQINKANRGEISQDELQERQNKAMQDPEIQNILTDPIMRQVLNDFQENPRAAQEHLKNPGVMQKIQKLVSAGIVQMR

SEQ ID NO: 61214 - protein, 200 aa, Zea mays
  Clone ID: LIB4071-022-B4_FLI.pep
TSLTKLSLDSWATIKYQADDVTHIKKTMFRIAMFRRTRPPRPSTGFRHLACVAISRDLPDPDRPIGVASVEGASIGAPAQACAVQDLVLGDLDVRLEVLHDVLRLKVPDLNRVLGRSAEPVAVGREAEGVDDGARIQRVQPLPLSQIPQQSNTVLPAGGAERSIGAHGDGVNISAMTIESAAQLAVRKVPDLDGAVPGTG

SEQ ID NO: 61215 - protein, 170 aa, Zea mays
  Clone ID: LIB4148-011-A6_FLI.pep
LEGSSERLCRAGESAMGKMRQLICLVAAVAAAAILLTASAKKSGDVTELQIGVKYKPESCTLQAHKGDKIKVHYRGTLTDGSVFDSSYDRGDPFEFTLGNGQVIKGWDQGLLGMCVGEKRKLKIPAKMGYGERGSPPKIPGGATLIFDTELIAVNGKTSGGAKAESDSEL

SEQ ID NO: 61216 - protein, 144 aa, Zea mays
  Clone ID: LIB4148-019-H11_FLI.pep
LEGSSERLCRAGESAMGKMRQLICLVAAVAAAAILLTASAKKSGDVTELQIGVKYKPESCTLQAHKGDKIKVHYRGTLTDGSVFDSSYDRGDPFEFTLGNGQVIKGWDQGLLGMCVGEKRKLKIPAKMGYGERAPHQRFQVEQL

SEQ ID NO: 61217 - protein, 106 aa, Zea mays
  Clone ID: LIB84-014-C6_FLI.pep
FDSHEAEVFQVEWNPNLATVLASSAADKRVMIWDINRIGDEQSEEDADDGPPELLFVHGGHTDKISELSWNPSEKWAIASVSEDNILQIWEMAESIYCDDLSMQVN

SEQ ID NO: 61218 - protein, 547 aa, Oryza sativa nipponbare
  Clone ID: LIB3431-054-B3_FLI.pep
AFLSPHRATGERPAREEALPPPLLMLMMLGAASQWILAAAAAAAVAALLWLAVSTLEWAWWTPRRLERALRAQGIRGNRYRLFTGDVPENVRLNREARKKPLPLGCHDIIPRVLPMFSKAVEEHGKPSFTWFGPTPRVMISDPESIREVMSNKFGHYGKPKPTRLGKLLASGVVSYEGEKWAKHRRILNPAFHHEKIKRMLPVFSNCCTEMVTRWENSMSIEGMSEVDVWPEFQNLTGDVISKTAFGSSYEEGRRIFQLQAESAERIIQAFRTIFIPGYWFLPTKNNRRLREIEREVSKLLRGIIGKRERAIKNGETSNGDLLGLLVESNMRESNGKAELGMTTDEIIEECKLFYFAGMETTSVLLTWTLIVLSMHPEWQERAREEVLHHFGRTTPDYDSLSRLKIVTMILYEVLRLYPPVVFLTRRTYKEMELGGIKYPAEVTLMLPILFIHHDPDIWGKDAGEFNPGRFADGISNATKYQTSFFPFGWGPRICIGQNFALLEAKMAICTILQRFSFELSPSYIHAPFTVITLHPQHGAQIKLKKI

SEQ ID NO: 61219 - protein, 541 aa, Zea mays
  Clone ID: LIB3594-014-F8_FLI.pep
PASGSSSGSPFHSMAFPAVPLLLAALLLVAATRLWDYVFVRLVWRPYAITKGFREQGIHGPSYRFFKGCNEEIRSMKEKTDGLVLDVGDHKYLPRIAPHYLEWRAQYGEPFLYWYGAQARICIFDYELARQILSSKSGHFVKNDAHPTLLALVGKGLGFMEGSDWVRHRRVINPAFTIDKLKIVTETMLDFADSMAGELEAEASQNENGETQVDIYKHFSDLTVDNIAYAIFGSSYKLGKQVFEAQTELLGITMATFLDVPIPGSKYLPTQANRRKWMLETKLKSLLTRIIQPRLASGEHGNDLLGVMLDSCTETKQGGKQQQVDRLRLSLSMEEIIHECKLFFFAGHENTALLLTWSVYLLSIYPEWQERLRKEVLREFGREAPNPNALNRLKEMTMVLFETLRLYSPALFMQRKTLADMTVGPIKLPKGTAIVIPIPIMHRDKQAWGDDADEFSPMRFANGITGAAKVPHGLLAFSMGPRSCIGQNLSMLEAKSTLALMLRKFSFALSPDYVHAPVDLFTLKPKFGLPVILRPLDNVLI

SEQ ID NO: 61220 - protein, 540 aa, Zea mays
  Clone ID: LIB143-011-G1_FLI.pep
PASGSSSGSPFHSMAFPAVPLLAALLLVAATRLWDYVFVRLVWRPYAITKGFREQGIHGPSYRFFKGCNEEIRSMKEKTDGLVLDVGDHKYLPRIAPHYLEWRAQYGEPFLYWYGAQARICIFDYELARQILSSKSGHFVKNDAHPTLLALVGKGLGFMEGSDWVRHRRVINPAFTIDKLKIVTETMLDFADSMAGELEAEASQNENGETQVDIYKHFSDLTVDNIAYAIFGSSYKLGKQVFEAQTELLGITMATFLDVPIPGSKYLPTQANRRKWMLETKLKSLLTRIIQPRLASGEHGNDLLGVMLDSCTETKQGGKQQQVDRLRLSLSMEEIIHECKLFFFAGHENTALLLTWSVYLLSIYPEWQERLRKEVLREFGRDAPNPNALNRLKEMTMVLFETLRLYSPALFMQRKTLADMTVGPIKLPKGTAIVIPIPIMHRDKQAWGDDADEFSPMRFANGITGAAKVPHGLLAFSMGPRSCIGQNLSMLEAKSTLALMLRKFSFALSPDYVHAPVDLFTLKPKFGLPVILRPLDNVLI

SEQ ID NO: 61221 - protein, 344 aa, Zea mays
  Clone ID: LIB3062-024-C5_FLI.pep
ERAREALLPAAMGGETHLSVQELAASLGALPPEFVRSEQDQPGATTYRGAAVPDAPVIDMSEPGFGARMAAAAREWGLFQVVNHGVPSAAVAELQRVGRAFFALPTEEKERYAMDPASGKIEGYGTKLQRDLEGKKTWNDFFFHVVAPPEKVDHAVWPRSLAGYREANEEYCRHMQRLTRELFEHLSLGLGLHGGAMAEAFGGDGLVFLQKINFYPPCPQPELTLGVAPHTDMSTLTVLVPNEVQGLQVFKDGQWYEAKYVPDALIVHIGDQIEIFSNGAYKAVLHRTTVNKEKTRMSWPMFVEPPGELVVGPHPKLVTEESPAKYKAKKYKDYQHCKINKLPM

SEQ ID NO: 61222 - protein, 432 aa, Zea mays; identical to SEQ ID NO: 57127
  Clone ID: LIB3060-042-D1_FLI.pep

SEQ ID NO: 61223 - protein, 372 aa, Zea mays; identical to SEQ ID NO: 41023
  Clone ID: LIB3060-047-E10_FLI.pep

SEQ ID NO: 61224 - protein, 383 aa, Zea mays
  Clone ID: LIB3180-003-D11_FLI.pep
AGSRYIACPSQDTQLISASHAEQERGVIRHGRPHYGPGLRAGPRAPPQAHRHRGHRHPSHRPLASVRQRRRRGRAGRRGGRGEPGLGLLRGRGPRRARRDRGARDGGAARVLRAAGRAEGLRAEERGGAARVLRVGAHQEREGLEGGVRPRAARAAAAGSRGRRRARVREQVAPGSAGLQRGAGGVRESDGRAGVQAAGADRPEPEAEARPAARLLQGPDDLHPAEPLPSMPEPRPGPRRGTAQGRRRPDHPVPGRRRRARRPAALRRRVGPRQARARLFHHQRRRPHPGVEQRQVRERGAPGVSELGEREVLHALLLQPGDLHHGGAGGGAGERGRSAQVRRLQLGRLLQHQEEQQLQEAQRGEHSDRAFQEEPRPRLTTYC

SEQ ID NO: 61225 - protein, 356 aa, Zea mays
  Clone ID: LIB3959-010-D6_FLI.pep
EKAGSLPVPSVQAMVAAGRHAPVPPRYLRPDLAADVVVADDATTIPIIDFQRLLLVDPEESARLHAACQDWGFFQLINHGVPDDVMEAMKASTQSFFALPAEAKQQYRQQAGQLEGYGQLFVVSEDQKLDWADVLYLNTHPPEHRNLSFWPAGESFRQTLDTYSAAVKHVADRLLGAMYMNLGLQLSIMDMDPERGAGIQSVRMNYYPPCAEAADKVLGFSPHSDSDLLTLVLQVNQLQGLQIKRPPDGGGAWAWLPVTPLQGAFVVNVGDVLEIFTNGRYRSVEHRALVNAHTERLSIAAFHSPSIHATIGPLPELLGDQEVPKYKTLDHQSFITLFFSAKLQGKSFLERMKKLS

SEQ ID NO: 61226 - protein, 614 aa, Oryza sativa
  Clone ID: LIB4309-009-E6_FLI.pep
RSHAAAAAAAMPKHYRPAGKKKEGNAAKYITRTKAVKYLQISLATFRKLCILKGVFPRDPKKKVEGNHKTYYHMKDIAFLAHDPLIEKFREIKVHRKKVKKAFAKKNKDLADRLLNRPPTYKLDRLILERYPTFVDALRDLDDCLTMVHLFAALPAVEGERVQVQRIHNCRRLSHEWQAYISRTHSLRKTFISVKGIYYQAEVQGQKITWLTPHALQQVLTDDVDFNVMLTFLEFYETLLGFINFKLYHSINVNYPPVLDPRLEALASELYALCRYMSSGRVPGNSEPAGLIEDKEGEDNKESSKTDESELRLAQLQHQLPTNEPGALMHLVQESTAADADDADAKECRSLFKNLKFYLSREVPRESLLFIIPAFGGTVSWEGEGAPFDETDEDITHQIVDRPTQSHVFLSREYVQPQWIYDCVNARIILPTEGYIVGRVPPPHLSPFVDNDAEGYIPEYAETIKRLQAAAQSQVLPLPSLGDEDMENSLVEAIIDRSESNEIADKKRKLEMLEKQYHDELRMEYEGKTFSNRTADNQPDVVDKSDTKEADDHMEDSHKQAEKDAADISKTLMSRKQRGLLQAIEINQERKKDKVNLLKKRKKNADSSASAKGR

SEQ ID NO: 61227 - protein, 684 aa, Zea mays
  Clone ID: LIB3060-079-F5_FLI.pep
ASLPDLPGVSLLVLQRRLPLRPPLRQRTDFPPEPQISPAPYTPPAPAQIYGAPAMDAGAGATAIRVPYRHLRDAEMELVSLNGGAPGGDTGPPPPPPKDQPRSRADRTKLVLACMVAAGVQFGWALQLSLLTPYIQTLGIDHAMASFIWLCGPITGFVVQPCVGVWSDKCRSKYGRRRPFILAGCIMICAAVTLIGFSADLGYILGDTTEHCRTYKGSRFRAAIVFILGFWMLDLANNTVQGPARALLADLSGPDQCNSANAIFCSWMAVGNILGFSAGASGEWHKWFPFLTTRACCEACGNLKAAFLVAVVFLLLCMSVTLYFAEESPLDPKDTQGLSDSAPLLNGSRDAAHASNEPNNERFPNGHVGLNNVSANNNTEEFTNVNSNTENGGVFNDGPGAVLVNILTRMRHLPPGMHSVLLVMALTWLSWFPFFLFDTDWMGREVYHGDPNGDLSERKAYDNGVREGAFGLLLNSVVLGVGSFLVDPLCRMIGARLVWAISNFTVFICMMATTILSWISSDLYSSKLHHIIGANKTVKITALVVFSLLGLPLSITYSVPFSVTAELTAGTGGGQGSCCAYTVLISSLANHSDWYCLCSISRFGHRSPKSCYRGSPDSSVAWSRSMGRSVWRREYPGVRLGFGLLPGSRCARSSQAAKAVQLVPICRVPWIWLMLMPKTPPSAM

SEQ ID NO: 61228 - protein, 193 aa, Zea mays
  Clone ID: LIB3600-026-H5_FLI.pep
IRTKKSKQLSDSIRGESSGMPPRTAPAATSTPPRKVPLRKLLRAASVACGVQFGWALQLSLLTPYVQELGIPHAFASLVWLCGPLSGLLVQPLVGHLSDRIGPAASPLGRRRPFIAAGAACIAAAVLTVGFSADLGRLFGDDVTPGSTRLGAICVYLVGFWLLDVGNNGTQGPCRAFLADLTDHIQYTICNGC

SEQ ID NO: 61229 - protein, 278 aa, Zea mays
  Clone ID: LIB3245-573-A8_FLI.pep
KKETTAPAPPINFSPSIRDHLSSLPRHLLLGPGPSSSHHSMADSAALSTSLPRSLASRRPLSSPLHARTRARSQRRCRLGSRSLHRLRARAGKDDPEDLYGPYPWDQPLDLTAGFDIQWVPEDRVTLFTSDGLIQIGGSLVPRRVAASEKRQRKLKSGQKLRRFQESSYMDPNQSLCLGALFNIAATNGLDMGRRLCIFGFCRSIEMLSDVVEDTVLEHGGEVVTAEKASNNGLQEKLTMSVAVPLLWGVPPASETLHVAVRSGGGIVDKIYWQWDLF

SEQ ID NO: 61230 - protein, 520 aa, Zea mays
  Clone ID: LIB3689-238-C11_FLI.pep
IRTKKSKQLSDSIRGESSGMPPRTAPAATSTPPRKVPLRKLLRAASVACGVQFGWALQLSLLTPYVQELGIPHAFASLVWLCGPLSGLLVQPLVGHLSDRIGPAASPLGRRRPFIAAGAACIAAAVLTVGFSADLGRLFGDDVTPGSTRLGAICVYLVGFWLLDVGNNGTQGPCRAFLADLTENDPRRTRIANAYFSLFMALGNILGYATGAYSGWYSIFPFTVTESCGISCANLKSAFLLDIIVLVITTYTTVTSVQEPQTFGSDEAQNPGAEQEAFLWELFGSLRYFTLPIWMVLIVTALTWMAWFPFTLFDTDWMGREIYRGSPDNPGETQRYHDGVRMGSFGLMLNSVVLGFTSVVLEKLCRKWGAGLVWGVSNILMTLCFLAMLVITYVAKNMDYPSSGAPPTGIVVASLVVFTILGAPLAITYSIPYAMAASRVENLGLGQGLAMGILNLAIVIPQVIVSLGSGPWDQLFGGGNAPAFAVAAGASFIGGLVAILGLPRARIASSSSRRRGGTHR

SEQ ID NO: 61231 - protein, 265 aa, Sorghum bicolor
  Clone ID: LIB3478-033-D4_FLI.pep
QLLSSYPAGHRVNLAYSIYTLLLRLLLASMAASSWSSSSSCTSSFGSLDDDVVCVIKSDSVAAAAVAEGSVKFLCSYGGRILPRHTDGTLRYVGGDNRVLSVDRPLRFYDLQRKMRELCGWEAYLRCQLPTEDLDALISVTCDDDLANLLQEYDEASKDRLQSLKIRAFLFPRTPAPASSIPRSSPPSSPSSHSRPSPSAHLHRRNTSRAPAAGVSLTCAPRWWAAPRASRQAQAHQSQNYDLRSLDEERSHPHRYLVQNGRHLQ

SEQ ID NO: 61232 - protein, 161 aa, Sorghum bicolor
  Clone ID: LIB3478-015-B5_FLI.pep
SCLSADLQRKMRELCGWEAYLRCQLPTEDLDALISVTCDDDLANLLQEYDEASKDRLQSLKIRAFLFPRTPAPASSIPRSSPPSSPSSHSRPSPSAHLHRRNTSRAPAAGVSLTCAPRWWAAPRASRQAQAHQSQNYDLRSLDEERSHPHRYLVQNGRHLQ

SEQ ID NO: 61233 - protein, 696 aa, Zea mays
  Clone ID: LIB3245-071-H9_FLI.pep
LLLIEAGIKRPRPAMDLARSGGAAAADDGGEIERHEPAPEDMESDPAAAREKELELERVQPWREQVTLRGVVAALLIGFMYSVIVMKIALTTGLVPTLNVSAALMAFLALRGWTRVLERLGVAHRPFTRQENCVIETCAVACYTIAFGGGFGSTLLGLDKKTYELAGASPANVPGSYKDPGFGWMAGFVAAISFAGLLSLIPLRKVLVIDYKLTYPSGTATAVLINGFHTKQGDKNARMQVRGFLKYFGLSFVWSFFQWFYTGGEVCGFVQFPTFGLKAWKQTFFFDFSLTYVGAGMICSHLVNISTLLGAILSWGILWPLISKQKGEWYPANIPESSMKSLYGYKAFLCIALIMGDGTYHFFKVFGVTVKSLHQRLSRKRATNRVANGGDEMAALDDLQRDEIFSDGSFPAWAAYAGYAALTVVSAVIIPHMFRQVKWYYVIVAYVLAPLLGFANSYGTGLTDINMAYNYGKIALFIFAAWAGRDNGVIAGLAGGTLVKQLVMASADLMHDFKTGHLTMTSPRSLLVAQFIGTAMGCVVAPLTFLLFYNAFDIGNPTGYWKAPYGLIYRNMAILGVEGFSVLPRHCLALSAGFFAFAFVFSVARDVLPRKYARFVPLPMAMAVPFLVGGSFAIDMCVGSLAVFVWEKVNRKEAVFMVPAVASGLICGDGIWTFPSSILALAKIKPPICMKFTPGS

SEQ ID NO: 61234 - protein, 684 aa, Zea mays
  Clone ID: LIB3594-058-G11_FLI.pep
LVLLKQRHCRYSRRRPMGSEGEITGPLLASGAGAPAPEAVPPWREQVTARGLAVSAVLGVLFCLITHKLNLTVGIIPSLNVAAGLLGYFLVRTWTAALERFGVVSKPFTKQENTVIQTCVVACYGLAFSGGFGSYMLAMDQRTYELIGPDYPGNRAVDVKTPSLGWMIGFMFVVSFLGLFSLVALRKVMVIDYKLTYPSGTATAMLINSFHTTTGAELADKQVRCLGKYLSISFIWNCFKWFFSGVGDSCGFDNFPSLGLAAFKNTFYFDFSPTYIGCGLICPHIVNCSTLLGAIISWGILWPYISTKAGDWYPADLGSNDFKGLYGYKVFISVSVILGDGLYNLIKIIYATIKEIMNARAKQGRLPLAQVQDGDEGSNLSAEEKHLNETFIKDSIPPWLAGSGYIGLAAISIATVPMIFPQIKWYLVLSAYVVAPLLAFCNSYGTGLTDWNLASTYGKIGLFIFASWVGQNGGVIAGLAACGVMMSIVSTAADLMQDFKTGYLTLSSPRSMFVSQLIGTALGCVIAPLTFWLYWSAFDIGNPDGAFKAPYAVIFREMSILGVEGFSALPQHCLAICSFFFIASLVINLLRDVTPKNVSRFIPIPMAMAIPFYIGAYFAIDMFVGTVILFVWERVNRKECDDFAGAVASGLICGDGIWTVPSAILSILRIDPPICMYFKPSLSS

SEQ ID NO: 61235 - protein, 392 aa, Sorghum bicolor
  Clone ID: LIB3478-016-E3_FLI.pep
MGGRPGQSIHLVVCQCLGRQLLHGHLLHLLVRPGLHLAAEAGPAEHGAVRVRVRVPHPGGGDGDGVRVDGRDRLARDDDGVDHLPFRVVHGEHVEAAAADLLGVHDGVQEAARAVRAPHHQRGAGRHVPPEVLHHAGLLLGGHAHERRQEDDVVPGQVPGDVGHVGGAERHARGERRVGAHEAARAVVGVPADVVVVEGRGREVARREHEGAERERAGADEGDARRRRSRDVARQQAVLQLAQQQVVAEVGEEREVVQRVVEARQQVGVVRLQQCLGVGAEADEPRAHGLQLRAQALHVHRAARDAGRHEGGEERVHLRRRAQRRQLRDGRGQAGDLLHQRRLVRRHVLLEDDDSCFFFLDLLLLQLLVLLLLLAHDDHGRVQVCTVITVWV

SEQ ID NO: 61236 - protein, 308 aa, Sorghum bicolor
  Clone ID: LIB3478-026-A12_FLI.pep
RRRRGTAGGALLRPAGGLRQPAGPPHALPLLQQLPAAERAGARPAGAPRPGTAAGARRLRRLRPAPAQLPRARGAPPPGRGLRQLRHLRGRQRPRAPPRARRRGARRAHGVPHLRRGRRHQGPGRVRRRLPGGARGHGRRGEGPRGGAPREAHGARRRAGGAERARRARLPVPRRGPRGDPPRRLRRARRAPPGRGGDQLRHHRAQACPARRRARRRRRRRRGGARARARARRRAQPALPLLRDGGPGAPEDGGGGRGAAAVLGTGTPQDGWIAPAGHPFSCIYLIDRVNSNPLLLLCLRVSTPHAWS

SEQ ID NO: 61237 - protein, 136 aa, Oryza sativa nipponbare
  Clone ID: LIB3475-007-D3_FLI.pep
YTLASQMQHKYNQMIYCHNIVRLSIVRLLDGQLLVGGKLFCLLNRARLHLAARGRRPDHRQNHAARVRELVSARRGGGGGGTDLAGDDDGVDHLVLRVAHRQNVEPATPDVLGIDDRVQEPARPVRAPHDERRAVR

SEQ ID NO: 61238 - protein, 473 aa, Zea mays
  Clone ID: LIB3245-074-A11_FLI.pep
HPSGTVTKDLEPSPLFSTTASKMPQVMVVARNFMDMVAALPAGKLDMLYDSAFICEAVLRSLPPLAKKYALQMLYVLAPVTAAAMEEWVLDEYAAKHKVAIDKLLQLRVFVEVRDRRRDVSYKMNQKFQGNMQKYLVDGGSLPREPLPLSVTGRLPTPADLEAYALDQWECFLLQLINSSQVEKGSSFSSSMMKTFQRGLLSSRDGEASKLTENGFQFLLMETNAQLWYIMREYISSAEERGVDPTELISFLLELSFHKLGAAYSVNTLTDVQRIAIRDLAELGLVKQQQGRKDSWFIPTQLATNLSASLSDSSSNKEGFVVVETNFRMYAYSTSKLHCEILRLFARVEYQLPNLIVGAVTKESIYGAFENGITAEQIISFLRQNAHPRVADKIPAVPENVTDQIRLWETDLNRVEMIPSHLYEDFPSKEWFEQCCDYARDNGYLLWEDPKRMRLIVRGEFHPEMREFLRRQR

SEQ ID NO: 61239 - protein, 435 aa, Zea mays
  Clone ID: LIB3732-012-C11_FLI.pep
AHPVRIITISMRSGHIDVVGDYYLLDRSDRCKTGIHACGVCRVPACLGRQLLHGHLLHLLVRPGLHLAAEAAGPAEHGAVPVGVRVRVPHSGDGDGHGLTRDDDGVDHLPLRVVHGEHVEAGAADLVGVDDGVQEGARAVRAAHHQGGARRHVPPEVVHHARLLLGRHAHERRQEDDVVGGQVPRDVGHVGGAERHARGERGVGAHEAARPAVGLRADVVVVEGGGGEVARGEHEGAERERAGPHEGDAGGRRARDVARQQAVLQLAQQQVVAQVGEERQVVQRVVLQGRQQVRVVRLQLGLGVGAAADEPRAHALQLRAQALHVHGAARDAGRDQVREQRVHLRRRAQRRQLRDGGGQAGDLAHQRRLRLILQRQHLDGSYFMYVLHLHLLVLLLLIVIVLAHDDHGRVVCDHSRSQSACCFALEWARYTSYTV

SEQ ID NO: 61240 - protein, 435 aa, Zea mays
  Clone ID: LIB3587-280-G11_FLI.pep
AHPVRIITISMRCGHIDVVGDYYLLDRSDRCKTGIHACGVCRVPACLGRQLLHGHLLHLLVRPGLHLAAEAAGPAEHGAVPVGVRVRVPHSGDGDGHGLTRDDDGVDHLPLRVVHGEHVEAGAADLVGVDDGVQEGARAVRAAHHQGGARRHVPPEVVHHARLLLGRHAHERRQEDDVVGGQVPRDVGHVGGAERHARGERGVGAHEAARPAVGLRADVVVVEGGGGEVARGEHEGAERERAGPHEGDAGGRRARDVARQQAVLQLAQQQVVAQVGEERQVVQRVVLQGRQQVRVVRLQLGLGVGAAADEPRAHALQLRAQALHVHGAARDAGRDQVREQRVHLRRRAQRRQLRDGGGQAGDLAHQRRLRLILQRQHLDGSYFMYVLHLHLLVLLLLIVIVLAHDDHGRVVCDHSRSQSACCFALEWARYTSYTV

SEQ ID NO: 61241 - protein, 379 aa, Zea mays
  Clone ID: LIB3060-077-D5_FLI.pep
MQCDCMGCRPGQSILCLGRQLLHGHLLHLLVSPGLHLAAEAGPAEHGAVRVCVPHPGDGVLVDDREWLARDDDGVDHLPLRVVHGEHVEAAAADLLGVNHGVQEAARAVRAPHHQRGAGRHVPPEVLDDARLLLGGHAHERRQEDDVVGGQFPGDVGDVGGAERHARGERGVGAHEAARAVVGVPADVVVVEGGGGEVARGEHEGAERERAGADEGDAGGGRARDVARQQAVLQLAQQEVVGEVGEERQVVQRVVEGGQQVGVVRLQQRLGVGAEADEARAHALQLRAQALHVHGAARDAGRDEVGEERVHLRRRAQRRQPGDGGGQAGDLAHQRRLGLLVRRRLLLDDDSHISLDHLLLLVLLLLLLLLLAHDGHGSV

SEQ ID NO: 61242 - protein, 379 aa, Zea mays; identical to SEQ ID NO: 61241
  Clone ID: LIB3060-061-C11_FLI.pep

SEQ ID NO: 61243 - protein, 382 aa, Zea mays
  Clone ID: LIB3060-034-E6_FLI.pep
MQCDCMGCRPGQSILCLGRQLLHGHLLHLLVSPGLHLAAEAGPAEHGAVRVRVPHPGDGVLVDDREGLAGDDDGVDHLPLRVVHGEHVEAAAADLLGVNHGVQEAARAVRAPHHQRGAGRHVPPEVLDDARLLLGGHAHERRQEDDVVGGQFPGDVGDVGGAERHARGERGVGAHEAARAVVGVPADVVVVEGGGGEVARGEHEGAERERAGADEGDAGGGRARDVARQQAVLELAQQEVVGEVGEERQVVQRVVEGGQQVGVVRLQQRLGVGAEADEARAHALQLRAQALHVHGAARDAGRDEVGEERVHLRRRAQRRQPGDGGGQAGDLAHQCRLGLLVRRRLLLDDDSHISLDHLLLLVLLLLLLVLLAHDGHGSVCSV

SEQ ID NO: 61244 - protein, 441 aa, Oryza sativa
  Clone ID: LIB4309-013-D9_FLI.pep
IPTVVKRTREEEARKRGVQLRMHAAPPSGGSPAAAGAAAAAAVDLYGRPAAAGGDLVEELGEAGVLGRPLLRHLLLLGLRVAAEAGHLLPVLRLHPLHRSCLLLPQRPHLRLELLRRLPPPARPLRLQLHLHPLHPPRRLLPVRRPRPLPFLHLPATLHQLRHHHLPSSTTTPRRRRRRRRRRHRRRREAKRHRRRGRRRRRRRHPRREDRGSHHSAVVVVDELVGEVLEEPVVSPAGAAALVAVQRRRESPAIPIPELPLLLLLEHLPPLAQPLRRPAGDLGGDLLPLVAVLGLEADDEALLVVGERTFLDPRAEVVLPALEAGLGVAVEGAVHPLGHEAPLPGPILADVGEEDGVFLRPPPLPLPHRRRLHRCSPSPTIPARWCEYSCCSQKRHCTILLLCSWTSLELKTPNDFKNKNKKKKKSQEHEQWLVLAVVVPS

SEQ ID NO: 61245 - protein, 505 aa, Zea mays
  Clone ID: LIB3354-106-E3_FLI.pep
ASPRLASAATCRAATIQPPSVLPLPQQQAPAAAMPKPPPPTSDPSLPTTTTTSTPKSSSRPAPAGLLDPLAASGRSLLASARRSPVTTLAGAFFLLALVMYGEDARTIAELSIDDYLYPDADLYNVSGLPPLALPPPTCDLSSGRWVFDNASVPAYREKDCTFLTKQVTCLANGRPDDMWQYWRWQPSDCSLPTFDARRFMEAMRGKRLMFVGDSLNRNQWESLVCLVQPILSKGRKKIVKRGSLNTFYAKEYRATLEFYWAPFLVESNSDNPNFHSIKERIISPERIEAHARNWKDVDYLIFNTYIWWMNTADIKVRRPNSRYWSENDEVPRIEAYGRVFKTWSDWLNNNIDPARTSVFFMTISPIHISPQNWGNPGGIRCVKETLPYQNYSQPLDLYHDMRLYDLVIKVASSMEKVPVSVINITKMSDYRKDAHASVYTIRQGKLLTPKQKADPEKFADCIHWCLPGVPDVWNQILYTRILSKSPWRSNFSPPPSQSTPLPPQ

SEQ ID NO: 61246 - protein, 446 aa, Zea mays
  Clone ID: LIB3279-223-C6_FLI.pep
EAAHQGVEAEEREVGDRTEAEQKQKPLTLPIPIPVVALAEEELVENTKGRQKQQQQEEEQTQKPPPPPPPPPQVAGCDLYRGRWTFDAAGEQAPLYRESECEFLTEQVTCMRNGRRDDSYQKWRWQPDGCDLPRYDARLLLERLRNKRLMFVGDSLNRNQWESMVCLVQSVVPWGHKTLHKFVNNGSLNVFTAHDYNATVEFYWAPFLVESNSDDPQAHSVMNRVIAWRAIAKHAKNWKGVDYLVFNSYIWWLNTFEMKVIRRHQHQLEKEEEGVRWSKYALVDRPVAYREVLKTWARWVDRHIDPNRTRVFFMGMSPNHVTPWAWGNDGGIKCAMETQPISNNRTGRLDIGTDWRLHGVARGVLARYLRRVPVHFVDITGLSELRKDAHTSVHTLRQGKLLTPEQQADPKTYADCIHWCLPGLPDTWNHFLYAHILSLSSSAQDH

SEQ ID NO: 61247 - protein, 571 aa, Zea mays
  Clone ID: LIB3608-017-D12_FLI.pep
SYSSPPAPAKQASIDRGWGGQGGARTEIHQIRIRSHHRPSDAMQHRRKPASAAAPPAAKQPAARRPTARLSLAGLVVSIFLVATFLYNEDVVKAASGSSSSATTADAAEVGVSGRARSPDLRVLQEAAHQGVEAEEREVGDRTEAEQKQKPLTLPIPIPVVALAEEELVENTKGRQKQQQQEEEQTQKPPPPPPPPPQVAGCDLYRGRWTFDAAGEQAPLYRESECEFLTEQVTCMRNGRRDDSYQKWRWQPDGCDLPRYDARLLLERLRNKRLMFVGDSLNRNQWESMVCLVQSVVPWGHKTLHKFVNNGSLNVFTAHDYNATVEFYWAPFLVESNSDDPQAHSVMNRVIAWRAIAKHAKNWKGVDYLVFNSYIWWLNTFEMKVIRRHQHQLEKEEEGVRWSKYALVDRPVAYREVLKTWARWVDRHIDPNRTRVFFMGMSPNHVTPWAWGNDGGIKCAMETQPISNNRTGRLDIGTDWRLHGVARGVLARYLRRVPVHFVDITGLSELRKDAHTSVHTLRQGKLLTPEQQADPKTYADCIHWCLPGLPDTWNHFLYAHILSLSSSAQDH

SEQ ID NO: 61248 - protein, 571 aa, Zea mays; identical to SEQ ID NO: 61247
  Clone ID: LIB3060-079-H11_FLI.pep

SEQ ID NO: 61249 - protein, 492 aa, Oryza sativa
  Clone ID: LIB4309-030-D2_FLI.pep
EVHKRSGVKEEKLIMKSPPAAGEAGCHKPQATATNKMTVLQSPLGLRTILTSLVAFFIVVSSVSLLFDRGQDAQAQLAVEQHQHQEVLLKQKPASAAVGEQKSVVVDQSSLRSQEAQVQWTSELQDVATDSGDGGFDGEEDCNWSLGRWVYDNASRPLYSGLKCSFIFDEVACDKYGRNDTKYQHWRWQPHGCNLPRFNATKFLEKLRNKRLVFVGDSVNRNQWVSMVCMVEHFIPDGRKMRVYNGSLISFKAFEYNATIDFYWSPLLLESNSDNPIIHRVEYRIIRADRIEKHANVWKDADFIVFNSYLWWRKQRDGMMMKVMYGSFEDGDAKLDEVQMVDGYEIALKKLTEYLGANINKNKTRIFFAGSSPAHSWASNWGGDDNNKCLNETEPIQIEDYRSATTDYGMMDKAKEIFGTLEPKGIHVQILNITQLSEYRKDAHPTIFRRQYVPLTKEQIANPSIYADCTHWCLPGVPDVWNEFLYAYIMHK

SEQ ID NO: 61250 - protein, 507 aa, Oryza sativa
  Clone ID: LIB4309-016-D5_FLI.pep
PKPIAMWSALFSHLREVHKRSGVKEEKLIMKSPPAAGEAGCHKPQATATNKMTVLQSPLGLRTILTSLVAFFIVVSSVSLLFDRGQDAQAQLAVEQHQHQEVLLKQKPASAAVGEQKSVVVDQSSLRSQEAQVQWTSELQDVATDSGDGGFDGEEDCNWSLGRWVYDNASRPLYSGLKCSFIFDEVACDKYGRNDTKYQHWRWQPHGCNLPRFNATKFLEKLRNKRLVFVGDSVNRNQWVSMVCMVEHFIPDGRKMRVYNGSLISFKAFEYNATIDFYWSPLLLESNSDNPIIHRVEYRIIRADRIEKHANVWKDADFIVFNSYLWWRKQRDGMMMKVMYGSFEDGDAKLDEVQMVDGYEIALKKLTEYLGANINKNKTRIFFAGSSPAHSWASNWGGDDNNKCLNETEPIQIEDYRSATTDYGMMDKAKEIFGTLEPKGIHVQILNITQLSEYRKDAHPTIFRRQYVPLTKEQIANPSIYADCTHWCLPGVPDVWNEFLYAYIMHK

SEQ ID NO: 61251 - protein, 306 aa, Zea mays
  Clone ID: LIB3912-005-D5_FLI.pep
CTGELALPLHSMEDLYSIHPGISRVVGGAASEASVAGAGAGGPSPSDLTELMKAQIASHPRYPSLLSAYIECRKVGAHPHVTSLLEEVSRERRPDAGAGEIGVDPELDEFMDAYCRVLVRYKEELTRPFDEAASFLSSIQAQLSDLCSGGSSPAATATHSDDMMGSSEDEQCSGDTDVPDMGQEHSSHLGDHELKEMLLKKYSGCLSRLRSEFLKKRKKGKLPKDARTVLLEWWNTHYRWPYPTEEDKVRLAAMTGLDPKQINNWFINQRKRHWKPSEDMRFALMEGVAGGSSGTTLYFDTGTIGP

SEQ ID NO: 61252 - protein, 319 aa, Zea mays
  Clone ID: LIB3076-008-G7_FLI.pep
ARLLGHAIELQQRRLQGGAAGMEDLYSIHPGISRHGAAATSEASGVAGGPGSPPPPPPPAADLTELVKAQIAGHPRYPSLLSAYIDCRKVGAPSEVATLLEEIGRERCAAASAGGEVVGMDPELDEFMETYCRLLERYKEELSRPLDEAASFLSNVRTQLSSLCGGAASLSDEMVESSEDEPCSGDTDATTDPGQEHSSRLADRELKEMLLKKYSGCLSRLRSEFLKKRKKGKLPKDARSALMDWWNTHYRWPYPTEEDKVRLAAMTGLDPKQINNWFINQRKRHWKPSEDMRFALMEGGVAGSSSGTTLYFDTGTIGP

SEQ ID NO: 61253 - protein, 183 aa, Zea mays
  Clone ID: LIB3357-012-D1_FLI.pep
RGVRGRRWTGLTPAPAPAGGGSDGAGQGADRRAPTLPVPPLRLHRLPQGGRAVGGGHAAGGDRPGEVRRRLRRRGGRRHGPEADQQLVHQPAEAALEAVGGHAVRAHGGRRRRILLRDDALLRHGHHRAVITSDDKPFRIEGKLLVDTEISYMKQYPLSFCRIHCVYAWATTCIVGYTVCSGM

SEQ ID NO: 61254 - protein, 258 aa, Zea mays
  Clone ID: LIB3959-018-C8_FLI.pep
GSFSSMDQSFGNLGAGAGSSSGGSNSKAAAAAVSSSSFLQLPLSTASPAYYGAPLALLHHAAAAPSSSQQHQQQQHHHHYARHGAEMSAAEAEAIKAKIVAHPQYSALLAAYLDCQKVGAPPDVLERLTAMAAKLDARPPGRHEPRDPELDQFMEAYCNMLVKYREELTRPIDEAMEFLKRVEAQLDCISGGGGSSSARLSLADGKSEGVGSSEDDMDPNGRENDPPEIDPRAEDKELKYQLLKKYSGYLSSLRQEFS

SEQ ID NO: 61255 - protein, 269 aa, Zea mays
  Clone ID: LIB3354-055-G12_FLI.pep
IGRTVEGRLSLEAAAWLLGHAIELQARRLLQEGAAGMEDLYSIHPGISRAGGAATAASEVSGVAGGPGSPPPPPSQPPPPPPADLTELVKAQIAGHPRYPSLLSAYIECRKVGAPPEVATLLEEIGRERCAAASAGGEVGLDPELDEFMEAYCRVLERYKEELSRPFDEAASFLSSVRTQLSSLCGAAASLSAIYYTTANPETTSSFNIALVYEMVGSSEEDEACSGGDTEATEPGQQEHSSRLADHELKEMLLKKYSGCLSRLRSEFL

SEQ ID NO: 61256 - protein, 189 aa, Zea mays
  Clone ID: LIB3076-008-H10_FLI.pep
RQRAARLLGHAIELQQRRLQGGAAGMEDLYSIHPGISRHGAAATSEASGVAGGPGSPPPPPPPAADLTELVKAQIAGHPRYPSLLSAYIDCRKVGAPSEVATLLEEIGRERCAAASAGGEVVGMDPELDEFMETYCRLLERYKEELSRPLDEAASFLSNVRTQLSSLCGGAASLSGDEAIRDQFSGLLQ

SEQ ID NO: 61257 - protein, 316 aa, Zea mays
  Clone ID: LIB3607-041-F12_FLI.pep
NQRLENGQSGAMALASNSSDRSDRSDKPMDQKVLRRLAQNREAARKSRLRKKAYVQQLESSKLKLASLEQELQKARQQGIFISSSGDQTHAMSGNGAMTFDLEYSRWQEEENKQINELRTAVNAHASESDLRLIVDGIMAHYDEIFRLKGIAAKADVFHILSGMWKTPAERCFLWLGGFRSSELLKLLVNQLEPLTEQQLMGLSNLQQSSQQAEDAVSQGMEALQQSLAETLAGSLGPSGSSGNVANYMGQMAMAMGKLGTLENFLRQADNLRQQTLHQMQRILTIRQAARALLAIHDYFSRLRALSSLWLARPRE

SEQ ID NO: 61258 - protein, 341 aa, Zea mays
  Clone ID: LIB3732-015-B8_FLI.pep
SWRVLGMADASSRTDTSTVLDMDDKNQRLENGQSGAMALASNSSDRSDRSDKPMDQKVLRRLAQNREAARKSRLRKKAYVQQLESSKLKLASLEQELQKARQQGIFISSSGDQTHAMSGNGAMTFDLEYSRWQEEENKQINELRTAVNAHASESDLRLIVDGIMAHYDEIFRLKGIAAKADVFHILSGMWKTPAERCFLWLGGFRSSELLKLLVNQLEPLTEQQLMGLSNLQQSSQQAEDALSQGMEALQQSLAETLAGSLGPSGSSGNVANYMGQMAMAMGKLGTLENFLRQADNLRQQTLHQMQRILTIRQAARALLAIHDYFSRLRALSSLWLARPRE

SEQ ID NO: 61259 - protein, 162 aa, Oryza sativa
  Clone ID: LIB4506-022-A8_FLI.pep
SIVPLPNSVKDNKNNSLIKKEGSNSGKGAATSNDLEREGRRTLDPKTLRRLAQNREAPRKSSLSKKAYIQQLKSSRIRLSQLAQQVHVARVQMPFDLFCDISPTSKNWKICATIARNESCQVGTRIRQYSSRDCECCVPKIHFLRFCHRKELDAEEHRVSSQ

SEQ ID NO: 61260 - protein, 128 aa, Zea mays
  Clone ID: LIB3279-203-A3_FLI.pep
LGCSLNSRSCRSVSQSHATSLEVINQTVLAPLPGASLRLCHSFLTPGPRLLAGSTSCRTSTTPSAAAACAWRGTTSGAGGTRRRRRTSTAGGATRGATTSRSDKNLLRQHALSLLSCRTHAPSVVTDP

SEQ ID NO: 61261 - protein, 80 aa, Zea mays
  Clone ID: LIB3279-197-A12_FLI.pep
LILWLVLSIHRILLKIYQESNQPFMNLVAKFSQRKRCYQANATSLVDKKMKSKHWIHLTWSIHILMDTLILKNKLTMIQR

SEQ ID NO: 61262 - protein, 308 aa, Sorghum bicolor
  Clone ID: LIB3481-040-D1_FLI.pep
MNSLQESSSNSIAISTGQHWYKLSHEHDKSKQNPVKKRRPKQNRLSLPCFVSVRGSDRSEPQLRAEPELVAIIDVERRREVEVERRARARERPDRGGVVAIVHDGGRRRAVAVAVGVGGRGLPQGPRLRSSTPAMHRRWRRPGHSGAGPAGGLDGGAGAARGRGHGRGRAGGERGEVVGGEVGPGERAAQGARGHVVGARRGLGGVEGAEPDARALRRVPDLRRKPTPRPLPHAPVPRRRCSSHRRVAHRAPFIYLLLSSLYTTESKALVGAGLRSLSIGREAGSTRQGAEERGREGLGLGYGEEGAV

SEQ ID NO: 61263 - protein, 292 aa, Zea mays
  Clone ID: LIB3067-037-H2_FLI.pep
SFASRKFPVSRAASGGAKKAELRAPLPTPQKKKVMAQLPPRAPSAAPQDHWPPAAGEFLGFAAARRGAHRRSASDSAAFLEAVPIDDDVVIGGGGGGGDDFDRLDHDQLLSMFSDVDVSVSVSVSGSAGERAQLMDAGGAGADDGVADSSPAAADGVAEPKRVKRILANRQSAQRSRVRKLQYISELERSVTSLQMEVSALSPRVAFLDHHRSLLTVGNSHLKQRIAALAQDKIFKDAHQEALEKEIQRLRQVYQQQQVKVATTGGADIATAASPSMQARQELLACEGAAIR

SEQ ID NO: 61264 - protein, 297 aa, Zea mays
  Clone ID: LIB3596-052-G8_FLI.pep
STPPSSFASRKFPVSRAASGGAKKAELRAPLPTPQKKKVMAQLPPRAPSAAPQDHWPPAAGEFLGFAAARRGAHRRSASDSAAFLEAVPIDDDVVIGGGGGGGDDFDRLDHDQLLSMFSDVDVSVSVSVSGSAGERAQLMDAGGAGADDGVADSSPAAADGVAEPKRVKRILANRQSAQRSRVRKLQYISELERSVTSLQMEVSALSPRVAFLDHHRSLLTVGNSHLKQRIAALAQDKIFKDAHQEALEKEIQRLRQVYQQQQVKVATTGGADIATAASPSMQARQELLACEGAAIR

SEQ ID NO: 61265 - protein, 295 aa, Zea mays
  Clone ID: LIB3608-005-G10_FLI.pep
QSSSRALHHPASHSASSQSAEQPAAVPKGRAASSTPPTPQNKKVMAQLPPRAPSAAPQDHWPAAAGEFLGFAAARRGAHRRSASDSAAFLEAVPMDDDVVIGAGGGGDDFDRLDHDQLLSMFSDVDVSVSGSAGERAQLMDAGGADDGVADSSPAAADGVAEPKRVKRILANRQSAQRSRVRKLQYISELERSVTSLQMEVSALSPRVAFLDHHRSLLTVGNSHLKQRIAALAQDKIFKDAHQEALEKEIQRLRQVYQQQQVKVATTGGADIATAASPSMQARQELLACEGAAIR

SEQ ID NO: 61266 - protein, 343 aa, Zea mays
  Clone ID: LIB3637-206-C12_FLI.pep
ARPAAMDPRFPPPAPSSCFGGGGELPARGHHRRAHSETFIRLPDADLLLDPDADFGFSDIDFPSLSDDSPAASDPTPQPQAPPLQPPLQQAASPASAAPPRPPSGAHMRSLSLDAAFFDGLSLQGGGGGGGVRGGMAGHKRSGSMDGDTSPFEGESAPPSVLPDYAKKAVPDDKLAELALLDPKRAKRILANRQSAARSKERKIKYTSELERKVQTLQTEATTLSAQLTLLQRDTSGLTTENRELKLRLQAMEEQAKLRDALNDALREEVQRLKIAAGQVPNMNGNPFNGGLSQQQQMPSYFSQPQQMQYFSGHQGQHHHPKHDPQNSSNGGGQPLSDSMDFM

SEQ ID NO: 61267 - protein, 254 aa, Zea mays
  Clone ID: LIB3354-077-H4_FLI.pep
KLAIGTLSIDKYPQIQFDLVFNKEFELSHTSKTTSVFFSGYKVEQPIEGDEMDLDSEDEEEELNIPVIKENGKADGKEEQKNQEKAVAATASKSSLGLEKKSKDDSDDSDEDESDDSDEDDSDDSDEGEGLSPDEGDDDSSDEDDTSDDDEEETPTPKKPEAGKKRGAENALKTPLSDKKAKVATPPAQKTGGKKGATHVATPHPAKGKTPANNDKSTEKSPKSGGSVPCKSCSKTFNSEMALQAHSKAKHGAK

SEQ ID NO: 61268 - protein, 422 aa, Zea mays
  Clone ID: LIB3060-081-E5_FLI.pep
HSAIPHHAEAERPTQNPTPPPATASSDSLPTPPHPTVPLTPAQPASPQPSDSGHRRHPAMCGGAILSDIIPPPPPRRVTAGHLWPESKKPRRAASGRRGAPVEQHEQEEDFEADFEEFEVESGESELESEDEPKPFAAPRSALARGGLNTGAAGVDGPAANSVKRKRKNQFRGIRRRPWGKWAAEIRDPRKGVRVWLGTFNSPEEAARAYDAEARRIRGKKAKVNFPDEVPTAVSQKRRAAGPASLKAPKMDVEEEKPIIKLAVNNMTNSNAYHYPAVVGHNIIPEPFMQTQNMPFAPLVNYAALVNLSSDQGSNSFGCSDFSLENDSRTPDITSVPAPVATLAAVGESVFVQNTAGHAVASPATGNTGVDLAELEPYMNFLMDGGSDDSISTLLSCDGSQDVVSNMDLWSFEDMPMSAGFY

SEQ ID NO: 61269 - protein, 277 aa, Zea mays
  Clone ID: LIB3597-028-A7_FLI.pep
TMCGGAILANLREPAPRRLTERDIWQQKKKLKRGGGGGRRSFAAEDDEDFEADFEVFEADSSDSDLELRERTDDDVVEIKPFTAKRTFSSDGLSTMTSAVARSAKRKRKNLYRGIRQRPWGKWAAEIRDPQKGVRVWLGTFNSPEEAARAYDAEARRIRGKKAKGSNSFGCSDLGWENDTKTPDITSIAPISTIAEGDESAFVDSNSNSSFVLPALENSAVDLTDGLTDLESYMRFLLDGGPSDSVDSLLNLDGSQDVGSDMDLWSFDDMPIVGDFF

SEQ ID NO: 61270 - protein, 347 aa, Zea mays
  Clone ID: LIB3607-003-D12_FLI.pep
AETKKKTGRNLQNSRHSSSRRSLKREVVLDEAAVVEAPQRHVLVRRRGGVALHGVGAEQAVQRLVRAGVEEGELVAEEERVEQRVRLGVGGPGRRLVRGALRPRLEVEGRARRGGLVVGRRHALPREVRERVGSGALGGLVLQGRRGRALLLFLEVDDGVGGAGALAAGGGPGGGGGGGGEVELGPGPADVARGVVVGARGGLGGGEGAEPDADALDGVADLGGPLAPRAAPDAPVLLVGRPAPAPLLLARPGLRRRGRGADDEGGLALHHPLVLLLLLLGVLVELPERGLEVVRLPPLALAGGPRRAAAAGRRSRDELGEDRTTTHLCSLPLCNLYSISFSSRVFG

SEQ ID NO: 61271 - protein, 208 aa, Oryza sativa nipponbare
  Clone ID: LIB3598-036-A8_FLI.pep
CELVIDSSKTMCGGAIIADFVPPAGARRAAASDISDNAVLSAAGAGDESFAAAKAPAPGRKTAYRGIRRRPWGRWAAEIRDPRKGARVWLGTYATAEEAARAYDVVARDIRGAKAKLNFPPTIGAAAAPPPPKKRRKAAAAANHHHHHHQQESSGSSSASSLPPTPPPAAEHQLRECMSGLEAFLGLEEEEDDGGAGEPWDAVDMMLE

SEQ ID NO: 61272 - protein, 347 aa, Oryza sativa
  Clone ID: LIB4370-036-E3_FLI.pep
SLEGQAGLDVDEAAAVVEAPEPHALVGGGGGGGGLHGVGAEQAVQGLVGAAVEVVVLVGEQQRVEQRVGVVAGAGVGGVLRLGPRTLLGEVVVAVERQRRRGDGELVGGRHALPGEVREGVRLGALAGLGLVLDGRHGGGDLLLVLLLDEVDDRGRLDGRGGGGGGAAALAGVRGGSGREVELGPVPADGARGVVVGERGGLGVGEGAEPDADALDGVADLRRPLPPRPAPHAPVLRRLPAPARRRRRRLLGAEDERLVLGGRLLLLRLLHHHLLVIGVVVEVAERGLEVVGARALLLGLVGVARPDVARRDAPRRRRARYELRKDRSAAHLWLLLFFCFWVLGCEL

SEQ ID NO: 61273 - protein, 364 aa, Oryza sativa; identical to SEQ ID NO: 58508
  Clone ID: LIB4370-019-F2_FLI.pep

SEQ ID NO: 61274 - protein, 313 aa, Sorghum bicolor
  Clone ID: LIB3476-055-G10_FLI.pep
FEELKEKTDNFGSKALIGEGSYGRVYYAILDSEKHVAVKKLDASTDPELDNEFLTQVSIASKLKHDNFVEMLGYCVEGNQRLVAYEFATMGSLHDILHGRKGVPGAQPGPALDWMQRVKIAIDAAKGLEYLHEKVQPSIVHRDIRSSNVLLFEDYKAKIADFNLSNQSPDMAARLHSTRVLGTFGYHAPEYAMTGQLTQKSDVYSFGVVLLELLTGRKPVDHTMPRGQQSLVTWATPRLTEDTVKQCVDPRLKGEYPPKGVAKLAAVAALCVQYESEFRPSMSIVVKALSPLLQHKPQPPPATTPDATAPSDA

SEQ ID NO: 61275 - protein, 356 aa, Zea mays
  Clone ID: LIB3689-237-B11_FLI.pep
CSATATKIRTAARLAASYWPAAEGNTPIDPNQENPADGVQGRNIGSPPSMASIVAATVAAASVWWATQGLLPFFAPPVAFPFVPAPSAAFPTVDVPRPSEKDRDCPVENAQNECQEARKQVQFEGLRVAASSESDGSGKGEVSLHTELKLSPAQNADATPTTGAGTNDAFRNKKKQDRSSCGSNTPSSSDVDAGNVPEEDNANEKAKQASCSNSSAGDTNHRRFRSNGSTSDSWKEVSEEGRLAFDALFSREKLPQSFSPPQAVDSKEVAKEEEDEVTTVAVDLNKNATSIDHDDLDTMDEPRASFPNELSHLKLKSRRTGFKPYKRCSVEAKENRVPTSDMVGTKRIRLDSEAST

SEQ ID NO: 61276 - protein, 739 aa, Oryza sativa
  Clone ID: LIB4371-029-F9_FLI.pep
LTKRPIANTSVIFLLFLELGMEINSSGEEAVVKVRKPYTITKQRERWTEAEHNRFLEALKLYGRAWQRIEEHVGTKTAVQIRSHAQKFFTKLEKEAINNGTSPGQAHDIDIPPPRPKRKPNSPYPRKSCLSSETSTREVQNDKATISNMTNNSTAQMAGDAALEKLQRKEISEKGSCSEVLNLFREVPSASFSSVNKSSSNHGASRGLEPTKTEVKDVVILERDSISNGAGKDAKDINDQEMERLNGIHISSKPDHSHENCLDTSSQQFKPKSNSVETTYVDWSAAKASHYQMDRNGVTGFQATGTEGSHPDQTSDQMGGASGTMNQCIHPTLPVDPKFDGNAAAQPFPHNYAAFAPMMQCHCNQDAYRSFANMSSTFSSMLVSTLLSNPAIHAAARLAASYWPTVDGNTPDPNQENLSESAQGSHAGSPPNMASIVTATVAAASAWWATQGLLPLFPPPIAFPFVPAPSAPFSTADVQRAQEKDIDCPMDNAQKELQETRKQDNFEAMKVIVSSETDESGKGEVSLHTELKISPADKADTKPAAGAETSDVFGNKKKQDRSSCGSNTPSSSDIEADNAPENQEKANDKAKQASCSNSSAGDNNHRRFRSSASTSDSWKEVSEEGRLAFDALFSRERLPQSFSPPQVEGSKEISKEEEDEVTTVTVDLNKNAAIIDQELDTADEPRASFPNELSNLKLKSRRTGFKPYKRCSVEAKENRVPASDEVGTKRIRLESEAST

SEQ ID NO: 61277 - protein, 310 aa, Oryza sativa
  Clone ID: LIB4371-010-G6_FLI.pep
ANAMYQPNPISSSGQTHGNPTAHEQMELGNNAIVPSNGGNNNPNMAARQRLRWTNELHDRFVEAVTQLGGPDRATPKGVLRIMGVPGLTIYHVKSHLQKYRLAKYIPDPSADDNKDEDKDPRNLLSALEGSSGMQISEALKLQMEVQKRLHEQLEVQRQLQLRIEAQGKYLQKIIEEQQRVIGAGASRATSSEQLPDSEKTNPPTPVPISESPVQGAPHSKNSQSQVEPTKSPSHDDALPCGEPLTPDSSCRPGSPTLSPKHERAAKRQRGSDAGDVTAFADGEFVLPPGIFESSTGSEFQECSMPYSGH

SEQ ID NO: 61278 - protein, 384 aa, Zea mays
  Clone ID: LIB3597-001-E6_FLI.pep
LGGEETRRPKTFSPPFASCAIPAAAPFSLSMDSDYVASLLMGMGSSAPALDFAALDAGFLETLCGGGGGLFGVSGVAAGAGCGGVSPEGSSVSDPAWARARGDDNVRKRKAPPTGSAGGKEACPGKAAEAKGPDGKRCRVGGSDSPVKPKVEEVAASDASVELKAQKKGKGKTAKPAVEPPKDYVHVRARRGQATDSHSLAERVRREKISQRMKFLQDLVPGCNKVVGKALMLDEIINYVQSLQQQVEFLSMKLATVNPQLDFSNLSTLLHKDMYQPCGPSANSVFPLESDGAAFPFCDQADLFHSFGSGSAAMEDQCSLSLLDTALPHAANPQFAFQKQQRDFWEDALQNALPTGSEQRQEEDGLLVPNFDGQLHADQTKVEF

SEQ ID NO: 61279 - protein, 383 aa, Zea mays
  Clone ID: LIB3354-010-E10_FLI.pep
LGGEETRRPKTFSPPFASCAIPAAAPFSLSMDSDYVASLLMGMGSSAPALDFAALDAGFLETLCGGGGGLFGVSGVAAGAGCGGVSPEGSSVSDPAWARARDDDNVRKRKEPPTGSAGGKEACPGKAAEAKGPDGKRCRVGGSDSPVKPKVEEVAASDASVELKAQKKGKGKTAKPAVEPPKDYVHVRARRGQATDSHSLAERVRREKISQRMKFLQDLVPGCNKVVGKALMLDEIINYVQSLQQQVEFLSMKLATVNPQLDFSNLSTLLHKDMYQPCGPSANSVFPLESDGAAFPFCDQADLFHSFGSGSAAMEDQCSLSLLDTALPHAANPQFAFQKQRDFWEDGLQNALPTGSEQRQEEDGLLVPNFDGQLHADQTKVEF

SEQ ID NO: 61280 - protein, 321 aa, Zea mays
  Clone ID: LIB3957-019-B5_FLI.pep
IFSTPMAGFSRPNNSLLLKMPATLASSHTPNLSSLLFYDQNHGQAVNANAAAMTMVEDDASLQSSSAVLDTSPQPQGSAAAASPMERKRKPAEDSATLSSAQSKEDCKQQQESKSRRGKRPHNKEANTEEKSATEDEATRGYIHVRARRGQATDSHSLAERVRRERISERMRMLQALVPGCDKVTGKALILDEIINYVQSLQNQVEFLSMRIASMSPVLYGFGLDSDGLHDHAQKMGVMFQEALAMAGPVLSQASPAAPSEAIMDTTTPYSLHGHGQGSISFSQDNGSSTYLMQHQQAAGEPTRQQELLSQLVFNNMCSFQ

SEQ ID NO: 61281 - protein, 376 aa, Zea mays
  Clone ID: LIB3595-030-E6_FLI.pep
TRDDPRLPHPPFASCAIPAAAPLFVSMDSDYIASLLMGSSAPALSFAALDAGFLDTLRGGGGGGLFGVPAEAGCGGGSPEGSSVSDPAWARARDYGNARKRKAPPTGSAGGKEACLSKVAEAKGPDGKRCRVVGASDSPVKPKEEEEEAAASDALVEVKAQKKGKGKSSKPAVEPPKDYVHVRARRGQATDSHSLAERVRREKISQRMKFLQDLVPGCNKVVGKALMLDEIINYVQSLQQQVEFLSMKLATVNPELDFSNLSTPLHKDMYQQPCGGPSASSVFPLESAGAAFPFCEQADLFHSFGSGGSGSGSGMEDQCSLSLLLDTALPHAASPQFAFQKQQRDLWEDGLQHALPTPTTGSEQRQEEDGLLVPDP

SEQ ID NO: 61282 - protein, 245 aa, Zea mays
  Clone ID: LIB3732-052-F9_FLI.pep
DGRDRLASQLLAPADEAMAGADVDVGTELRLGLPGGGAAAAKKDTIDLKLKLPTAGMEEAAAAARPEPAAEKAKRPAEAPAADAEKPPAPKAQAVGWPPVRSYRRNAMTTVVQAVRSKKEEEPEKQQQPAAANAFVKVSMDGAPYLRKVDLKTYSSYKDLSAALKKMFGTFTASGNSMNEGRLVDPAGDADDVVTTYEDKDGDWMLVGDVPWEMFVESCKRLRIMKSSEAIGLAPRTKDKCKNKS

SEQ ID NO: 61283 - protein, 278 aa, Zea mays
  Clone ID: LIB3732-019-D8_FLI.pep
LRSYIHASYIFLPFGFRKKHVFVQHWRAQATLLLPPSSSSTIRVCSWIRVPRWRVCSLCLCMDQRSPGLRGRALHYPELLARRDEHIPGHVSGEHEVAVLVFVGDGVLVVVAAALCRRGEGVGEERVQSLPELPVPLVHPEVHLPEVRRAVHAHLHVQASLLLLLLLLLDLLGRRRRLEGVLPVRPHRRPPDHLRLGRRGGVVVVVEVEVSGGRAGPRGLALGAVVQSALGPDGGRRLLLPVVAAAAAGPRQAEAELGGAQVVGVELHGSEAKGELVW

SEQ ID NO: 61284 - protein, 288 aa, Zea mays
  Clone ID: LIB4071-005-C8_FLI.pep
FNSHSHSPFPLSGSHSPPTGYPTHHTQTATPHLPRPPVHVLLLPMSPPLDLDYIGLSPAAAAAAAHDDLKGTELRLGLPGSGSPDRRVVAATATTLDLLPAKGAKRGFSDEAPTPSPGAASGKGKKVAEEEDDKKVAATPQPVAKAQVVGWPPIRSYRKNTMSTTQLKGSKEDAEAKQDQGFLYVKVSMDGAPYLRKIDLKTYKNYKDLSTALEKMFSGFSTGKDGLSEYRKDGEYVLTYEDKDGDWMLVGDVPWEMFADSCRRLRIMKGSDAIGLAPRAADKSKNRN

SEQ ID NO: 61285 - protein, 287 aa, Zea mays
  Clone ID: LIB3594-033-F6_FLI.pep
NSHSHSPFPLSGSHSPPTGYPTHHTQTATPHLPRPPVHVLLLPMSPPLDLDYIGLSPAAAAAAAHDDLKGTELRLGLPGSGSPDRRVVAATATTLDLLPAKGAKRGFSDEAPTPSPGAASGKGKKVAEEEDDKKVAATPQPVAKAQVVGWPPIRSYRKNTMSTTQLKGSKEDAEAKQDQGFLYVKVSMDGAPYLRKIDLKTYKNYKDLSTALEKMFSGFSTGKDGLSEYRKDGEYVLTYEDKDGDWMLVGDVPWEMFADSCRRLRIMKGSDAIGLAPRAADKSKNRN

SEQ ID NO: 61286 - protein, 283 aa, Zea mays
  Clone ID: LIB3245-136-D7_FLI.pep
PLPGSHSHPFRLPTQTAHELTATSHVPHPLVHVLLLPMSPPLELDYIGLSPPAAAAAAENDELKGTELRLGLPGSGSPDRRVVAATATTLDLLPAKGAKRGFSDEAPPPSPVATAGKGKKVAEEEYDEKKVAATPQPAAKAQVVGWPPVCNYRKNTMTTTQLEGSKEDGDAKQGQGFLYVKVSMDGAPYLRKIDLKTYKNYKDLSTALEKMFSGFSTGKDGSSEYRKDGEYVLTYEDKDGDWMLVGDVPWEMFAGSCRRLRIMKGSDAIGLAPRAADKSKNRN

SEQ ID NO: 61287 - protein, 330 aa, Zea mays subsp. mexicana
  Clone ID: UC-ZMFLTEOSINTE061H11_FLI.pep
HRERRHTPRHPSPFPLLPQTLFLFPSPQELHLISRRPFCACAGGAHGDSGRRARSLHHYFTGGPPTPMEEITQHFGVGASSHGHGHGQHHHHHHHHHPWASSLSAVVAPLPPQPPSAGLPLTLNTVAATGNSGGSGNPVLQLANGGGLLDACVKAKEPSSSSPYAGDVEAIKAKIISHPHYYSLLTAYLECNKVGAPPEVSARLTEIAQEVEARQRTALGGLAAATEPELDQFMEAYHEMLVKFREELTRPLQEAMEFMRRVESQLNSLSISGRSLRNILSSGSSEEDQEGSGGETELPEVDAHGVDQELKHHLLKKYSGYLSSLKQELS

SEQ ID NO: 61288 - protein, 102 aa, Zea mays
  Clone ID: LIB3070-003-F1_FLI.pep
FHGWVMESSNEGTVKKSLSITPLGSDSGYFVNITVVNSAERTNDRLSVPITKAEFAVIRTTLSFALPHIMGWDQALTNHHPAPPASSRPTVERPHPDSEWER

SEQ ID NO: 61289 - protein, 509 aa, Zea mays subsp. mexicana
  Clone ID: UC-ZMROTEOSINTE040H02_FLI.pep
RTGGLISWPMSLPGRKAPAGASGVRRWLVTVVVSVLALVLTLVVISLSQGSSLPRTSLHGYLPIGATDLGKRSSSEHADENRSGAAIGEELSQGERESLVEQNGQGGDVNSSQTSAASGKMDDNEPDPVSSSDTTTIPDEDTSNESQKAEQDNCDLYRGEWVTDSSGPLYTNNSCPIITQMQNCQGNGRPDKDYENWRWKPEQCNLPRFDARKFLELMRGKTLAFVGDSVARNQMESLLCILWQVDVPQNRGNKRMHKWLFKSTKTTIARVWSSWLVHRSTEAVGIAPKGIDKVFLDIPDETFMEFLPRFDVLVLSSGHWFAKRSAYILNENVVGGQLWWPRKAGKMQVNNVDAFGISVETCLTAVVNNPNFTGLAIVRTWSPDHYEGGAWNTGGSCTGKVKPLDEVVRNGFTDAMHEKQVAGFRKAVQNAGEHGSRLKLMDITEPFAFRADGHPGPYRSPDPNKKTQRGPDGKPPPQDCLHWCMPGPVDTWNEMLLETIRREFETDRT

SEQ ID NO: 61290 - protein, 362 aa, Oryza sativa nipponbare
  Clone ID: JC-OSROLIB3475003E02_FLI.pep
YTLASQMQHKYNQMIYCHNIVRLSIVRLLDGQLLVGGKLFCLLNRARLHLAARGRRPDHRQNHAARVRELVSARRGGGGGGTDLAGDDDGVDHLVLRVAHRQNVEPATPDVLGIDDRVQEPARPVRAPHDERRAVRHVRAQVRDHPGLLLGRHAHERRQEHDVVRAELPRQGRHVGGVERHARAEALVGAAEQPPRPLVGRAAPVVVVEHRVRQVVRGEHEGAERQRARPDEGDAGGGNAGDVADEEVVLQLAQVDVVAVVREAGEVVERVVEGGEHVGVVRLEVALGGGAEADELLPHRLRLRAELGHVDGARRDARRDEVGEERVHLGGWAQRRQLGDGGVEAGDLLDQGSDLLVLSLHL

SEQ ID NO: 61291 - protein, 538 aa, Zea mays subsp. mexicana
  Clone ID: UC-ZMFLTEOSINTE78C08_FLI.pep
DLRQRYLPWHAHRRRWQGSYTKKKEQRHTRTHIWIDQYNQKSTTRTTAAQSGDIHVYKSYFFMYFPPPLLLLRPCAGGSMDGGAWRVLVDVDGQRLAVPLLEALEHGVDELALADAEEHLVALLAGGLELLAGEEHAAELLAHEAVQRERAAVRDPVGYGGGALGDGDAGGLHLLGQHRAELLLELGDPGEDGGLALRVAAAEGVVHQHGAQLLHQRQAGAGRVLRVREHGLAVDGGDELLLAEARAGEVPRGVHGQHLLGHLGHRVLDGGLDVLLQVAQVDGLAQRDDVGGRHELENVDGLGGLPGRDEAQGVDVLVVLLRALHVVGDGVAQVLELGAVGGHGDLGALESVVQAGVAAAGQVGGEAVVVELVDELGELREHELADVGDGEAGVVHGHADGGALEVAAVQRLAAVDVDDRVVVDGVDLALDGLGGGADDLDLGAEPLRRRAERVPVLLGLEQRVQLVDLLGVLHEGAALKDVLHDGRGLDGPRVVLELVGEVVGVLGLAVHDLAEDGGQDLGEDGQDVGVVHDGGRER

SEQ ID NO: 61292 - protein, 284 aa, Zea mays subsp. mexicana; identical to SEQ ID NO: 40473
  Clone ID: UC-ZMFLTEOSINTE055A05_FLI.pep

SEQ ID NO: 61293 - protein, 619 aa, Oryza sativa
  Clone ID: UC-OSFLM202020D04_FLI.pep
RSPSPRSHAAAAAAAMPKHYRPAGKKKEGNAAKYITRTKAVKYLQISLATFRKLCILKGVFPRDPKKKVEGNHKTYYHMKDIAFLAHDPLIEKFREIKVHRKKVKKAFAKKNKDLADRLLNRPPTYKLDRLILERYPTFVDALRDLDDCLTMVHLFAALPAVEGERVQVQRIHNCRRLSHEWQAYISRTHSLRKTFISVKGIYYQAEVQGQKITWLTPHALQQVLTDDVDFNVMLTFLEFYETLLGFINFKLYHSINVNYPPVLDPRLEALASELYALCRYMSSGRVPGNSEPAGLIEDKEGEDNKESSKTDESELRLAQLQHQLPTNEPGALMHLVQESTAADADDADAKECRSLFKNLKFYLSREVPRESLLFIIPAFGGTVSWEGEGAPFDETDEDITHQIVDRPTQSHVFLSREYVQPQWIYDCVNARIILPTEGYIVGRVPPPHLSPFVDNDAEGYIPEYAETIKRLQAAAQSQVLPLPSLGDEDMENSLVEAIIDRSESNEIADKKRKLEMLEKQYHDELRMEYEGKTFSNRTADNQPDVVDKSDTKEADDHMEDSHKQAEKDAADISKTLMSRKQRGLLQAIEINQERKKDKVNLLKKRKKNADSSASAKGR

SEQ ID NO: 61294 - protein, 353 aa, Zea mays
  Clone ID: UC-ZMROB73015F05_FLI.pep
GSLPVPSVQAMVAAGRHAPVPPRYLRPDLAADVVVADDATTIPIIDFQRLLLVDPEESARLHAACQDWGFFQLINHGVPDDVMEAMKASIQSFFALPAEAKQQYRQQAGQLEGYGQLFVVSEDQKLDWADVLYLNTQPPEHRNLSFWPAGESFRQTLDTYSAAVKHVADRLLGAMYMNLGLQLSIMDMDPERGAGIQSVRMNYYPPCAEAADKVLGFSPHSDSDLLTLVLQVNQLQGLQIKRPPDGGGAWAWLPVTPLQGAFVVNVGDVLEIFTNGRYRSVEHRALVNAHTERLSIAAFHSPSIHATIGPLPELLGDQEVPKYKTLDHQSFITLFFSAKLQGKSFLERMKKLS

SEQ ID NO: 61295 - protein, 358 aa, Zea mays
  Clone ID: JC-ZMSHLIB3569P013H09_FLI.pep
STTSRPRSRKEGIPPDQQRLIFAGKQLEDGRTLADYNIQKESTLHLVLRLRGGMQIFVKTLTGKTITLEVESSDTIDNVKAKIQDKEGIPPDQQRLIFAGKQLEDGRTLADYNIQKESTLHLVLRLRGGMQIFVKTLTGKTITLEVESSDTIDNVKAKIQDKEGIPPDQQRLIFAGKQLEDGRTLADYNIQKESTLHLVLRLRGGMQIFVKTLTGKTITLEVESSDTIDNVKAKIQDKEGIPPDQQRLIFAGKQLEDGRTLADYNIQKESTLHLVLRLRGGMQIFVKTLTGKTITLEVESSDTIDNVKAKIQDKEGIPPDQQRLIFAGKQLEDGRTLADYNIQKESTLHLVLRLRGGQ

SEQ ID NO: 61296 - protein, 202 aa, Zea mays; identical to SEQ ID NO: 48159
  Clone ID: JC-ZMSHLIB3569P024D06_FLI.pep

SEQ ID NO: 61297 - protein, 178 aa, Zea mays; identical to SEQ ID NO: 41250
  Clone ID: JC-ZMSHLIB3569P033E05_FLI.pep

SEQ ID NO: 61298 - protein, 457 aa, Zea mays
  Clone ID: JC-ZMSHLIB3569P003G12_FLI.pep
SLASSISPPTMGKEKSHINIVVIGHVDSGKSTTTGHLIYKLGGIDKRVIERFEKEAAEMNKRSFKYAWVLDKLKAERERGITIDIALWKFETTKYYCTVIDAPGHRDFIKNMITGTSQADCAVLIIDSTTGGFEAGISKDGQTREHALLAFTLGVKQMICCCNKMDATTPKYSKARYEEIVKEVSSYLKKVGYNPDKIAFVPISGFEGDNMIERSTNLDWYKGPTLLEALDQITEPKRPSDKPLRLPLQDVYKIGGIGTVPVGRVETGVIKPGMVVTFGPTGLTTEVKSVEMHHEALQEALPGDNVGFNVKNVAVKDLKRGFVASNSKDDPAKEAASFTSQVIIMNHPGQIGNGYAPVLDCHTSHIAVKFAELITKIDRRSGKELEKEPKFLKNGDAGMVKMIPTKPMVVETFSAYPPLGRFAVRDMRQTVAVGVIKSVEKKDPTGAKVTKAAAKKK

SEQ ID NO: 61299 - protein, 259 aa, Zea mays
  Clone ID: JC-ZMSHLIB3569P035C07_FLI.pep
TVCYIASMATNENLPPNVIRQLAKELKNLNESPAEGINVTVNDDDFTTIFADIEGPAGTPYENGVFRMKLLLSHDFPQSPPKGFFLTKIFHPNIATSGEICVNTLKKDWNPSLGLRHVLLVVRCLLIEPFPESALNEQAGKMLLENYEEYARHARLYTGIHALKNKSKTGAISESTTALNVDKSSTAPNESAPSSMPPAIPTSAASRALGTNLQDQSPTVSDPTVGAAAPARRKDGPMPSKVPVDRKKMDARKKSLKRL

SEQ ID NO: 61300 - protein, 290 aa, Zea mays
  Clone ID: JC-ZMSHLIB3569P038G05_FLI.pep
LIRIPRQAGRRGGQEDRRPSRAGARDGNGTGPQNLRSFLPARPCPSTRRSCRPRPTSALSSSRGIGYATGCAMVLWVFGYGSLIWNPGFDFDDKILGFIKGYKRTFNLACIDHRGTPEHPARTCTLETDDEAICWGIAYCVKGGPEKELKAMQYLERRECEYDQKISIDFYKEGDPLKPAVTGVLVFVSTPDPIGNKYYLGPAPLQDMAMQIATANGPTGYNRDYLFSMEKALASISHEDDSIIELANEVRKVLNRTKETKITGANASLKSHAPLVHLSALPEGTVVDSR

SEQ ID NO: 61301 - protein, 180 aa, Zea mays
  Clone ID: JC-ZMSHLIB3569P003H02_FLI.pep
LPYCCVKTMEWPPPSTSPSPSLVVRSPRQTVSLIRNRRPHRDWAPSSRSPSFAARDHGPKPSEVYGFVGSITTVIATAVYLAWAYTPEPVLQSLGITYYPSKYWALAVPSFVVVTVVLSMGIYMGLNFAATPPPTSFSTIFDEKSREHTAFSSATEDERPIEPISDIGIDRINSLMFGDR

SEQ ID NO: 61302 - protein, 339 aa, Zea mays
  Clone ID: JC-ZMSHLIB3569P016A12_FLI.pep
SASSAPRSGDHCSLMAMEGPVFCRPAMQAKLPAAALINNSLTKSGQLGTALFGAISKYRNISRFISPISQTSTKNIGPCCSFSSSSDGNGYMAGNSSESDEDYVNSTVLEAVEVRSGSEGYVIKMRDGKNLRCVHSNFQGRNIPENTPQPAIVLRIEDGSGTLLPIIVLEMPSVLLMAAIRNVHIARPTIYQVVKEMIDKMGYEVKLVRVNKRIQEAYCAELYLTKVNDPTDNITFDLRPSDAINIAVRCKVPVQVHRSLAYSDGIRPVEPARMAVTAGLSDGLLFTELDRPDGQPCVEAQEFGLVRNMLIAAIEERYKDAASWKDKLIRLRSKRENWA

SEQ ID NO: 61303 - protein, 77 aa, Zea mays
  Clone ID: JC-ZMSHLIB3569P017C02_FLI.pep
LRPRKPGEHTPRSNSFLARRWRQRWPAQQHTCTYVTIKCLVEWRLLTEGGFLSLCRMCYICTCTSQDHSSPPPPKMV

SEQ ID NO: 61304 - protein, 245 aa, Zea mays
  Clone ID: JC-ZMSHLIB3569P038G11_FLI.pep
RGAGPEARRSRRGVSCRRRRPGRPRRRVGQARRTRGASGHGRPGRRTPGATTRGRSPPPPALASPPRSAARGTVPRKARRAPPRGSASRRCRSQPPSASCCPPSCFARSHADALSCCCTHCWSGLGRWGLVQLTGLGTMGIEESKERNGQGGGPPQRRCFYSMKRSQICPPLHQVAGPCAAPSAHTMGMVVAGSTEQGRALTRQPCRWRWRGRVEAICRRRRCNSRSERRYWGWELWRAGGEAPS

SEQ ID NO: 61305 - protein, 212 aa, Zea mays
  Clone ID: JC-ZMSHLIB3569P016B03_FLI.pep
RCFKKPPRAQPHRQEREQGARDSSVGPGSKDGGEGGGRAPGRQQVLGAAAHRHGGAGRRGRGRRQGLQGAPAGAAVRARGAQVLVLLPRGHRRVRRHLPLPLHHRPHRHGRLQVHLQVRHRRHPGHRLVLRRDDLRARLLHRRHLRSLPHCQLGSRCSWSTLPPSPSPAPASTRLGALAPPSSTTGIMRGATIGSSGSAPSSAPPWLPSTTR

SEQ ID NO: 61306 - protein, 406 aa, Zea mays
  Clone ID: JC-ZMSHLIB3569P023C06_FLI.pep
LWPDPRTSTKTSPWHRRVARRLVGNSPPPPSDPPAAAPCSGDGGTSQPAMTTRIAPGVGANLLGQHSAERNQDATTYVGNLDPQVSEELLWELFVQAGPVVNVYVPKDRVTNLHQGYGFVEFRSEEDADYAIKTLNMIKLYGKPIRVNKASQDKKSLDVGANLFIGNLDPDVDEKLLYDTFSAFGVIVTNPKIMRDPETGNSRGFGFVSYESFESSDQAIEAMNNQHLCNRPITVSYAYKKDTKGERHGTPAERLLAANNPGSQKNRPHTMFASGPPTQGHPNGGPPVPRPYGNGTIPGQIQHIRQPPPPPVGQFPPPMQMHGQPTWPAQHSMPPPMPSQLQYRLPMRPPPPNMMPPPVGMVRPPPPPTGMSAPPMWMPPPPPPHQGGGMPPPPMSMPPPPPPPSS

SEQ ID NO: 61307 - protein, 265 aa, Zea mays
  Clone ID: JC-ZMSHLIB3569P041A08_FLI.pep
LKARKKVAGALREVVRKRMDDKAEDDCGASKKNGEKKDMVEELLEAEGGSFSVEEMVDFCLSLLVAGYETTSVLMTLAVKFLTETPTALAQLKEEHDSIRGVKGKGQALEWSDYKSMPFTQCVISETLRVANLISGVFRRANTDIHFKGHVIPKGCKIFASFRAVHLSLDHYENARTFDPWRWQQGKSKLQSAEGASLFTPFGGGPRLCPGYELARVVVSVFLHHLVTRFSWEEAEEDRIVFFPTTRTLKGYPIILRRRPDCDDL

SEQ ID NO: 61308 - protein, 198 aa, Zea mays
  Clone ID: JC-ZMSHLIB3569P005C02_FLI.pep
RADPFDSLFLDALSAGGAKRSATSGRSNDDVGRETSLELIGATLWLAAGGGGVSVGVGRGAGLTAVGDGGLGCGPMGAGCGAAAPATAVAAASTATTVPAAAAASTAAAGLGLVDGDVAAVQLLAVHALDGVPHRLLRGEGDEAEAAGPLRLPIEDDLGLEDLAVGAEGVVEGVVVRGPGEAADEAAVLNIRRRHLDP

SEQ ID NO: 61309 - protein, 322 aa, Zea mays
  Clone ID: JC-ZMSHLIB3569P016B08_FLI.pep
VSAWVSSIESEPPFDIAEEDDDNYDGEDDEENGECAASQPRHLELGEPSSGKGGNSKSKRCATTADEVVQANTVVQSLNAFSSVAHISGMGLKVVPMIAPFSTLRAVNLSSNLIVHISPGSLPKGLHSLDLSRNKIASVEGLRELTKLRVLNLSYNRISRIGHGLSNCTAIRELYLAGNKISDVEGLHRLLKLAVLDLSFNKITTAKALGQLVANYHSLLALNLVGNPVQANIGDDALRRAVTGLLPSLAYLNKQPVKPQRIAREVATDSIARAALSGSDSRSIRKRTSRRLTQSPRSSSLTRARGGGGGGSPTPRNTSRRR

SEQ ID NO: 61310 - protein, 191 aa, Zea mays
  Clone ID: JC-ZMSHLIB3569P023C07_FLI.pep
HDCILNAYNRPLPHLRAELTGGRGHPFPGIVHTLANLPPWNIFHNPRLLLKILLPLFDKSFILFSLEHRQYSTTSSNFLFFECPAHLVPLTDLVHAIREGAEGREEDGSGAGARGGNPARVAHGRETARRRPVLQHRHLLDAGHPRLVPHQGLRHPRSPTRTPDRRGDQTSAAAARVNGGWRRTIVLRIGG

SEQ ID NO: 61311 - protein, 517 aa, Zea mays
  Clone ID: JC-ZMSHLIB3569P029G11_FLI.pep
VGFLTQLGDCMQGFITDHERALEELFSENAEGSHKYNACLNTMATRISTVFASMREFPRVHYRIAKTIDASTMTTLRDLVPTKLAASVWNCLAKYKTTIPEFPQTETCELLIVDRSIDQIAPIIHEWTYDAMCHDLLCMDGNKYVHEVPTKNGSATEKKEVLLEDHDPVWLELRHAHIADASERLHDKMTNFISKNKAAQLHQARTDGELSTRDLQKMVQALPQYSDQIDKLSLHVEIAGKLNNIIREQCLRDVGQLEQDLVFGDAGTKELINFLRTQLVVSRENKLRLLMIYAALNPEKFESDKGAKLMQLAGLSADDMIAVNNMRCLCGPDTKKSSVGGFTLKFDVHKKKHTNRKERTGEESTWALSRFYPILEQLIENLSKGELPKDEYNCMNDPSPTVHGLPTSSSARTSPAHSMRSRRTGGTWARPRGSDDGYSSDSVLKHASSDFRKLGQRIFVFVIGGATRSELRAAHKLSSKLKRDIILGSSSLDDPPQFITKLKLMSVEELTLDDLQL

SEQ ID NO: 61312 - protein, 363 aa, Zea mays
  Clone ID: JC-ZMSHLIB3569P042D06_FLI.pep
AAEISILNRNSFRCEEIRAYSTTQACTYACAHAGTRTRRIGLSLSLQTHDDEPDTQQYHTIHTLQAALDQAACRPNASSSDVAVAGALGRHGGAVAVAIGAVVVDGVAAPDLGQAAVLRGVEVPELRLVPPARALGGAEARLRGGLAAVDVEAAVGGDEGRVGPVRLLAPAAGRPVVGVPQAGVELHRLAERVPHAQVGARVLEHPDRHVVHEERDHVEVPEDGVGVVLLGGVEPEVDPLLAVALAAGEHVGLQDVGLPRPVAQELEVDLVVLRVLRRQVEGRDGARGVAADELHVHAEVAEEVGAPRLEARAGGLVQVQLHLPPAVDVVDVVLRPRRHVVLLERHVHGLPRRRRRRPLRQQR

SEQ ID NO: 61313 - protein, 490 aa, Zea mays
  Clone ID: JC-ZMSHLIB3569P016D04_FLI.pep
VQAEMKAANVQHPIVCIDVIKEGIISGPRAGLMKEVLSGKMLEQSQTSKSLRHFFFAQRATSKIPNITNIGLTARKIKKAAIVGGGLMGSGIATILILNNFNVVLKEVNEQFLSAGINRIKVNLQSLVRKGQLTEEDYEKKLSLLCGALDYEQFRDTDVVIEAVIEDMVLKQQIFSDLEKYCHHNCIFATNTSTIDLNIIGQKTASQDRIVGAHFFSPAHVMSLLEIVCTHHTSSQVIVDLIDLAKKIQKTPIVVGNCTGFAVNRMFFPYAQAASFLVDYGLDVYHIDHVITQFGMPMGPFRLADLVGFGVAIATRKQYYQSYPERSYKSMLLQILVEDNRTGESSCKGFYVYDDKRKASRDPDFGKYIEKSRNMAGVMQDPKLMKLTDNDIVEMIFFPVVNEACRVLDEGIALKASDLDVASIMGMGFPSYRGGVMFWADSLGAKYVYDKLDAWSKDYGEFFRPCEYLAVRARQGASLAAKVDGVKSRL

SEQ ID NO: 61314 - protein, 224 aa, Zea mays
  Clone ID: JC-ZMSHLIB3569P023D09_FLI.pep
AATTIHRTGRMTGSMDLPAKGGFSFDLCRRNNMLEKNGLKVPGFRKTGTTIVGLVFQDGVVLGADTRATEGPIVADKNCEKIHFMAPNIYCCGAGTAADTEAVTDMVSSQLQLHRYATGRESRVVTALTLLKSHLFKYQGHVSAALVLGGVDCTGPHLHTVYPHGSTDTLPFATMGSGSLAAMSVFESKYKEGLTREEEYRLCAKQSVLVFSMTWVVGATWTSA

SEQ ID NO: 61315 - protein, 278 aa, Zea mays
  Clone ID: JC-ZMSHLIB3569P035G11_FLI.pep
RETEEACDPLHSLHPVHHSLVQEVTHQTGKGKHHQRRRERTPSLSSRTARSYPVSPFSGLGESEMASSASRFIKCVTVGDGAVGKTCMLICYTSNKFPTDYIPTVFDNFSANVVVDGTTVNLGLWDTAGQEDYNRLRPLSYRGADVFVLAFSLVSRASYENIMKKWIPELQHYARGVPVVLVGTKFDLREDKHYLMDHPGLVPVTTAQGEELRRQIGAMYYIECSSKTQQNVKAVFDAAIKVVIQPPTKLREKKKKKSRKGCSMVNILSGRKMLCFKS

SEQ ID NO: 61316 - protein, 287 aa, Zea mays
  Clone ID: JC-ZMSHLIB3569P011A11_FLI.pep
EQPAVEEEMYPYRMSNVMIGYLNLATLLASLPIIGAGLWLARGSSSSSSTTCSSILQTPLLAVGFAALLVSLAGFVGACFHVAWALRLYLAAVALLVAFLLGLTAFGFAVTAGGGGAQVYGRPYREYRVTDYSAWLQKRMQDDRYWRPALACVVGSKACPKIQNWTPMDYLQHDLTPIQSGCCKPPTACQYSGGMPVGAQDEDCYRWNNAPDILCYRCDSCRAGVMEQVRQDWHKIFVLDVAVLAALVCICSCGCCAFRNARRSRSQYPYGVNQTSKINPRWDYWWR

SEQ ID NO: 61317 - protein, 64 aa, Zea mays
  Clone ID: JC-ZMSHLIB3569P019D06_FLI.pep
KIYLAKPKVIIIHLIKNCSSTNTPSWSCRSTLYIEVFCTSKHQSIFRHQSLLRNSMCCIPSSSD

SEQ ID NO: 61318 - protein, 413 aa, Zea mays
  Clone ID: JC-ZMSHLIB3569P019E05_FLI.pep
AAQTSQTSTPLPPSPEAASASPPAEDAPLLPDAGVRRRAACGRFAQRSGSFRREVGRAAAETFLLTRLTLILLRYLGIGYRWIRQFLALCCYTLLLMPGFIQVVYYYFFSSQVHRSVVYGDQPRNRLDLYMPTSTTGLKPVVAFVTGGAWIIGYKGWGALLGRRLAERGIIVACIDYRNFPQGTIGDMVEDASQGIAFVCKNITSYGGDPSRIYLVGQSAGAHIAACALLNQAIRESGEGDTSSWSVSQLKAYFGISGGYNLLNLVDHFHRRGLYRSIFLSIMEGEVSLQKFSPQMMIMESSARSAVSLLPRIILFHGTSDYSIPPAESQAFADALQQQGARADLFLYEGKTHTDLFLQDPLRGGRDKMLEEIARVIHSEDPDAAAQHLVVVPVARRLVPEFMLKLAGRVSPF

SEQ ID NO: 61319 - protein, 256 aa, Zea mays
  Clone ID: JC-ZMSHLIB3569P012H04_FLI.pep
SAAAGSEHIEDGLLLVRVRFVPSDPATMNIFKKKVDPKEALRTSKREMAVATRGVEREIGSLQMEEKRLVAEIKKTAKTGNEAATKILARQLVRLRQQILNLQGTRAQIRGVATHTQAMYAGTSISAGMKGASKAMSAMNKQMEPAKQIKVMKEFQKQSTQLDMTLEMMSDAIDETLDKDEAEEETEELTNQVLDEIGVDVASQLSSAPKGRIGATNKKVDNGQARPARNVAAPALEPSSAEVEDLERRLASLRRI

SEQ ID NO: 61320 - protein, 429 aa, Zea mays
  Clone ID: JC-ZMSHLIB3569P023F06_FLI.pep
KIQDKEGIPPDQQRLIFAGKQLEDGRTLADYNIQKESTLHLVLRLRGGMQIFVKTLTGKTITLEVESSDTIDNVKAKIQDKEGIPPDQQRLIFAGKQLEDGRTLADYNIQKESTLHLVLRLRGGMQIFVKTLTGKTITLEVESSDTIDNVKAKIQDKEGIPPDQQRLIFAGKQLEDGRTLADYNIQKESTLHLVLRLRGGMQIFVKTLTGKTITLEVESSDTIDNVKAKIQDKEGIPPDQQRLIFAGKQLEDGRTLADYNIQKESTLHLVLRLRGGMQIFVKTLTGKTITLEVESSDTIDNVKAKIQDKEGIPPDQQRLIFAGKQLEDGRTLADYNIQKESTLHLVLRLRGGMQIFVKTLTGKTITLEVESSDTIDNVKAKIQDKEGIPPDQQRLIFAGKQLEDGRTLADYNIQKESTLHLVLRLRGGQ

SEQ ID NO: 61321 - protein, 135 aa, Zea mays
  Clone ID: JC-ZMSHLIB3569P045E07_FLI.pep
PAWFSFNSKDGVHIVSGDSLIECTTIADKCAKVGAVGINCTPPRFIHGLILSIRKVTDKPILIYPNSGERYDGEKKEWVESTGVSDGDFVSYVNEWCKDGAVLIGGCCRTTPNTIRAIHRTLNKSPNKQQLPAVE

SEQ ID NO: 61322 - protein, 274 aa, Zea mays; identical to SEQ ID NO: 37026
  Clone ID: JC-ZMSHLIB3569P024B05_FLI.pep

SEQ ID NO: 61323 - protein, 82 aa, Zea mays
  Clone ID: JC-ZMSHLIB3569P045E12_FLI.pep
HAKMRNSTVFFLKKKPTGNNTLLDRQWLAGLPCHRSFALDHLPRGRHCPPPQIFEQNPKSIHSETLSPSPVTKPIDPKRDEP

SEQ ID NO: 61324 - protein, 194 aa, Zea mays
  Clone ID: JC-ZMSHLIB3569P021H08_FLI.pep
HGLRHCRSVHHSFHTTRPLVQTSEKRLRNGPPAYPAGRLCALPADAAGELDVLGHDGDALGVDGAEVGVLKQADEVGLGSLLQRGDGGGLEAEVGLEVLRDLADQALEGQLADEQLRALLVLADLAQRHGARAEAVRLLHAAGRRGRLARRLGRQLLPRGLAARGLARRLLRASHLCGDLGWGRRESVGARVFR

SEQ ID NO: 61325 - protein, 217 aa, Zea mays
  Clone ID: JC-ZMSHLIB3569P037H04_FLI.pep
GGKYGDYGKVKAPNAATSLAGSSLTGGGRGGGIILVLGRRAVVTGAFLGEGGDGVGPAEPGGRLEGDLGGVVPVDEHVGEGDPDEELLGLDPGHAPHPPVLHEGGDLGGVRDLARDRAERVRERLPLAQPHEARGAVVADLLHVGQRQQAQREVRLCQQLRRLLRAQRRAAVHLRARAVRLDGLRPHGGLLGGGIWAARWRWNGGQGKARQGKAMLG

SEQ ID NO: 61326 - protein, 357 aa, Zea mays
  Clone ID: LIB3062-029-H3_FLI.pep
ETIDEHLPASAMAAATVSVPRIKLGSQGLEVSAQGLGCMGMSAFYGPPKPEPDMIKLIHHAVAAGVTLLDTSDMYGPHTNEILLGKALQGGVREKVELATKFAVSFADGKREIRGDPAYVRAACEASLKRLGIDCIDLYYQHRIDKKVPIEVTIGELKKLVEEGKVKYIGLSEASASTIRRAHAVHPITAVQLEWSLWSRDVEEDIIPTCRELGIGIVAYSPLGRGFFCSGAKLVDSLSEQDFRKHMPRLQPENIVKNAKIFEHVNAMAAKKGCTPSQLALAWVHHQGNDVCPIPGTTKIENFNQNVGALSVKLTPDEMAELESCAAAGEILGDRYPQMANTWKDSETPPLSSWKSE

SEQ ID NO: 61327 - protein, 317 aa, Zea mays
  Clone ID: LIB3062-029-D7_FLI.pep
NRALKQSERAVRPNPHGRLHNAAPSRAAPAPATAGLAGGHAPGVRRLRGREVPGGACVRVVRGPAEAGRVAALDVRRVQELPVGGVRGGARGGGRMGGVGPEPDGRGHGRRAGAGGAGGGRGRGARRADVQHHGVRPAGQGLHAAGLPGDRPRRGRRGRQDPGVRQAAAAQGDEGREPGVAGRRVLHGRRPRQARVPGGQPRRQEQARPRRQGPRGGRGPLARPRARGRRPVRGRRQRRGRVLVHGAVQVPQRRRARGRRVRARATCARAGGVFGGGMVTREWWSHHPGEGGGGGLGTKYRAVFFLLGFVFKLCFWP

SEQ ID NO: 61328 - protein, 117 aa, Zea mays
  Clone ID: LIB3062-028-H8_FLI.pep
HRTGRMTDGKITRNEHPQHKERPLAKPALVAKFRPFTSSDGGSTGTRLSWDAWPRRAPWMLMAFLLVSSWLPLAPLFFSKLRSRAILDFWPLPPPMVDGSGDDRRQVRAPRPAAGPR

SEQ ID NO: 61329 - protein, 135 aa, Zea mays
  Clone ID: LIB3062-027-E5_FLI.pep
KGDPRAHSRRGFRTRKKYIGVKISFFPPSTSPSAAFSRKLETLSLPCGARPTYSRALTIVRVIMRPTEVKRKLLRENRLGSKGKYQGKGESSARSLSQTTSNPASFTAWRHCRVLLISGRPLPSSISSLILLWVA

SEQ ID NO: 61330 - protein, 323 aa, Zea mays
  Clone ID: LIB3062-019-E11_FLI.pep
IFCQKDSKSSASASCWIGSTILKIHSTLRNSSLPLQIRTERPEDQKVMATHSSLASAKRSELMYLSPPLGNTVTIIFPRFSCLDATLRQAARFAPDDMPTSRPSSLANLLAFAIASSAVTVTISSVTEVSRFLGTNPGPTPWILCREGLPPEMTGLSAGSTQTTFTAGFFVFKYSGGSPTGAAWAAARSRPTKTNRSIAARQPTPAAPSPVNILPLSYTLQLQPPPAVEVEPPTPRPRSTAGARSAARPEHGGRTAGRPEHCRRSQAPRPTGARSPAADSPTRRLSSRRPPTRRCPAADRRLVVVQPPTGRCPAADHAVTVSP

SEQ ID NO: 61331 - protein, 146 aa, Zea mays
  Clone ID: LIB3061-057-F9_FLI.pep
LLAQNIRAQQLQQLVLANLAAYSQQQQFLPFNQLGSLNSASYLQQQQLPFSQLPAAYPQQFLPFNQLAALNSPAYLQQQQLLPFSQLAGVSPATFLTQPQLLPFYQHVAPNAGTLLQLQQLLPFNQLALTNPAVFYQQPIIGGALF

SEQ ID NO: 61332 - protein, 214 aa, Zea mays
  Clone ID: LIB3061-054-A1_FLI.pep
QANMQQQALAASVLQQPIAQLQQQSLPHLTIQAITTQQQQQFLPALSHLAMVNPAAYLQEQLLASNPLALANVVANQQQQQLQQFLPTLSQLAMVNPAAYVQQQQLLSSSPLAVGNAPTYLQQQLLQQIVPALTQLAVANPVAYLQQLLPFNQLTLSNSAAYLQQRQQLLNPLVVANPLVAAFLQQQQLLPYNQFSLMNPVLSRQQPIVGGAIF

SEQ ID NO: 61333 - protein, 126 aa, Zea mays
  Clone ID: LIB3061-051-B2_FLI.pep
AKIQDKEGIPPDQQRLIFAGKQLEDGRTLADYNIQKESTLHLVLRLRGGMQIFVKTLTGKTITLEVESSDTIDNVKAKIQDKEGIPPDQQRLIFAGKQLEDGRTLADYNIQKESTLHLVLRLRGGQ

SEQ ID NO: 61334 - protein, 139 aa, Zea mays
  Clone ID: LIB3597-012-G2_FLI.pep
QRTARRAEESAQGTAARDSATQQLRARAEADQPKHHRQAQLDALGTKGAERCWTVRRGELSREMNAAKELREQSATLEHTRPWRAGHRRWRAEHRGARREEDTPGSYAGLAESEQGGRGSGRGHGWGGKSSWGAAMGGA

SEQ ID NO: 61335 - protein, 96 aa, Zea mays
  Clone ID: LIB3898-010-C7_FLI.pep
HNIASPAAGRGITSVQAGVGGTGGWVAGEHLARKAPRLDGLEAHVVERLAAAPPAPAARRALAPRRQILARPHPRAALARPGSGGGRRDQEEQREQ

SEQ ID NO: 61336 - protein, 83 aa, Zea mays
  Clone ID: LIB36-022-A7_FLI.pep
LCYVSSMREFMERCHILVRRHRLPWVQWLVLETCTSVGHLSWFLAISRVVLRQISQSFCEPIMMELYLLLISTYLLSNCNVRL

SEQ ID NO: 61337 - protein, 166 aa, Zea mays
  Clone ID: LIB4074-012-G8_FLI.pep
TARQSLNIKRRRRRRRQRWSSTALTVKWKHFLFLSPPAIHCSTRARSLLQAEQLAWARWHRPGRLLMMPMVLQAHSCDTALSALQQSALGSGAPGTRYARHARRRFSCGRHCPPACAPAPRSTDDGPVPPPRTSRTRHAARSARGAVAASSAIVASSCGGWGCGCF

SEQ ID NO: 61338 - protein, 114 aa, Glycine max
  Clone ID: 701066231_FLI.pep
QISKQRRGNTKMKKGLSFVLLLILVIIHYKVVNANNNNCVTEDCLIGHSLESEFSFGSHVARMLYDVSQSVSGQTGNSNNAAVNCPESNGYRSCLPSQNGGGPNQNCGDYTRTC

SEQ ID NO: 61339 - protein, 240 aa, Glycine max
  Clone ID: 700872534_FLI.pep
FQFSLCRFEPWATTAAFETEKIMGWESFVVVHNIAKRHNVGTLARSATAFGVSELILVGRRDFNCFGSHGSSSHLRFRHFHSLQDARKFLKDKDFDICGVEITTDSLPVNQHPFTKSTAFLLGNEGTGLSPKEIEICDFFVYIPQYGGGTASLNVTVAASIVLHHFGVWAGFTERSRDGNKFVVAERPVKQGGRNYCTETEDSIIEERKARRENAANGFFDETESGNSSSNLLDALFVDG

SEQ ID NO: 61340 - protein, 178 aa, Zea mays
  Clone ID: LIB3061-048-D12_FLI.pep
AASNIPLSPLLFQQSPALSLVQSLVQTIRAQQLQQLVLPVINQVALANLSPYSQQQQFLPFNQLSILNPAAYLQQQLLPFSQLATAYSQQQQLLPFNQLAALNPAAYLQQQILLPFSELAAASRASFLTQQQLLPFYKQFAANPATLLQLQQLLPFVQLALTNPAASYQQHIIGGALF

SEQ ID NO: 61341 - protein, 284 aa, Zea mays
  Clone ID: LIB3061-042-H6_FLI.pep
FEHSETHLAKRTSNDLTTMATKILSLFALLALFVSATNAFIIPQCSLAPSAIIPQFLPPVTSMGFEHPAVQAYRLQQALAASVLQQPIAQLQQQSLAHLTIQTIATQQQQQFLPALSQLAVVNPVAYLQQQLLASNPLALANIVAYQQQQQLQQFLPALSQLAMVNPAAYLQQQQLISSSPLAVVNAPTYLQQQLLQQIVPALTQLAVANPAAYLQQLLPFNQLTVSNSAAYLQQRQQLLNPLAVANPLVAAFLQQQQLLPYNQFSLMNPALLWQQPIVGGAIF

SEQ ID NO: 61342 - protein, 252 aa, Zea mays
  Clone ID: LIB3061-037-A12_FLI.pep
KVEYSSNNRATMAAKIFSILMLLALSACVANATIFPQYSQAPIAALLPPYLPSMTASVCENPALQPYRLQQAIATSNLPLSPLFFQQSPALSLVQSLVQTIRAQQLQQLVLPVISQVALANLSPYSQQQQFLPFNQLSTLNPAAYLQQQQLLPFSQLATAYSQQQQFLPFNQLAALNPSAYFQQQILLPFGQLATTSPTSFLKQQQLLPFYQQFVANPATLLQLQQLLPFVQLALTNPAAFYQQHIIGGAIF

SEQ ID NO: 61343 - protein, 311 aa, Zea mays
  Clone ID: LIB3062-029-D12_FLI.pep
FYCRTPDLQEGLVLSANYTARNGHHGDRGGAGAGAAGQRQRRAEDAALRGRPQEPAQERRPLPVHPGHERVPAGAGEHEGAPRGHRQAPMEPDDDLRRRGAVPEHAHQAHRRQEDHGDRRLHRLLPPRHGARPPGGRHDLGHGHQPRELRAGPALHREGRRRPQDRLPRGSRAPRPRRPHRGGEEPRVVRLRLRGRRQGQLPQLPRAAAEAGEAGRPHRLRQHAVERLRRAPRRRAHAQVHPLLPRLRARPQQGARRRRPRRDLPAPRRRRRHPLPPRQVKTCPGLACPTTATDGAAGRILIPIIIDDPQH

SEQ ID NO: 61344 - protein, 188 aa, Zea mays
  Clone ID: LIB3062-023-E2_FLI.pep
GHLVPHPLRPINRSDASTSTHPLPSSVIPRCVPSPQTSAMADQLTDEQIAEFKEAFSLFDKDGDGCITTKELGTVMRSLGQNPTEAELQDMINEVDADGNGTIDFPEFLNLMARKMKDTDSEEELKEAFRVFDKDQNGFISAAELRHVMTNLGEKLTDEEVDEMIREADVDGDGQINYEEFVKVMMAK

SEQ ID NO: 61345 - protein, 652 aa, Zea mays; identical to SEQ ID NO: 38995
  Clone ID: LIB3062-021-A10_FLI.pep

SEQ ID NO: 61346 - protein, 238 aa, Zea mays
  Clone ID: LIB3062-020-H12_FLI.pep
HNNVQFATLTYVDPSTYQIMGNLKIVTTGILFRLVLKRKLSNIQWMAIVLLAVGTTTSQVKGCGDSPCDSLFSAPLEGYLLGILSACLSALAGVYTEYLMKKNNDSLYWQNVQLYTFGVIFNMGWLIYGDFKAGFELGPWWQRLFNGYSITTWMVVFNLGSTGLLVSWLMKYSDNIVKVYSTSMAMLLTMVLSIYLFSVKATIQLFLGIIICIISLQMYFMPVHMLIELPQTLPVTSK

SEQ ID NO: 61347 - protein, 244 aa, Zea mays
  Clone ID: LIB3062-019-F4_FLI.pep
KTDEGKAETLHRSYRQRKRSQRYTKDYVEAISDIDLDFDSDDDIMGEAVYDEEYLRRRKRYKASLSENDDEFQLDQVANDGDEVGTSLNVNEDTEDLQWYKRFPLLTPQGTKLKSIDEIQTGIRRSKRSTRSRINYRQLDTFGANTKYGKSEKCNASDPDAGSDALNDTELSTSQDREEEDDGVNKAQQQYTEKPIVPVKESRSVRRKFLVLNELVPIAGFDDASVLVKDKHVNNNGGKCSAAH

SEQ ID NO: 61348 - protein, 486 aa, Zea mays
  Clone ID: LIB3062-014-C7_FLI.pep
RRLRTRLSPRPKAFPLLPFFSHFSPPPPLPPFDNTMRECISIHIGQAGIQVGNACWELYCLEHGIQADGQMPGDKTIGGGDDAFNTFFSETGAGKHVPRAVFVDLEPTVIDEVRTGTYRQLFHPEQLISGKEDAANNFARGHYTIGKEIVDLCLDRIRKLADNCTGLQGFLVFNAVGGGTGSGLGSLLLERLSVDYGKKSKLGFTVYPSPQVSTSVVEPYNSVLSTHSLLEHTDVAVLLDNEAIYDICRRSLDIERPTYTNLNRLVSQVISSLTASLRFDGALNVDVNEFQTNLVPYPRIHFMLSSYAPVISAEKAYHEQLSVAEITNSAFEPSSMMAKCDPRHGKYMACCLMYRGDVVPKDVNAAVATIKTKRTIQFVDWCPTGFKCGINYQPPSVVPGGDLAKVQRAVCMISNSTSVVEVFSRIDHKFDLMYAKRAFVHWYVGEGMEEGEFSEAREDLAALEKDYEEVGAEFDEGEDGDEGDEY

SEQ ID NO: 61349 - protein, 285 aa, Zea mays
  Clone ID: LIB3062-002-E5_FLI.pep
DMGQALGLIQVDQSTVAIKETFGKFDEVLEPGCHFLPWCIGKQIAGYLSLRVQQLDVRCETKTKDNVFVNVVASVQYRALADKASDAFYRLSNTREQIQSYVFDVIRASVPKMNLDDAFEQKNEIAKAVENELEKAMSMYGYEIVQTLIVDIEPDEHVKRAMNEINAAARLRLAASEKAEAEKILQIKRAEGDAESKYLAGLGIARQRQAIVDGLRDSVLAFSENVPGTSAKDVMDMVLVTQYFDTIKEIGASSKSSSVFIPHGPGAVRDIAAQIRDGQLQASLL

SEQ ID NO: 61350 - protein, 185 aa, Zea mays; identical to SEQ ID NO: 41307
  Clone ID: LIB3061-120-B2_FLI.pep

SEQ ID NO: 61351 - protein, 180 aa, Zea mays; identical to SEQ ID NO: 37897
  Clone ID: LIB3061-115-C2_FLI.pep

SEQ ID NO: 61352 - protein, 400 aa, Zea mays
  Clone ID: LIB3061-113-C3_FLI.pep
RARALVQQKMSDNLMEKVSAFGERLKITGTEVSKKMTAGMSSMSFKMKELFQGQTPADKIVEDATSENLDGPDWNSNLEICDLINTEKVNSVELIHGIKKRIMMKDARVQYLSLVLLETIVKNCEKAFSEVAAERVLDEMVRLIDDPQTVVNNRNKALMLIEAWGESGDELRYLPVYEETYKSLKSRVRFPGRDNESLAPIFTPPRSVAEADVETSLPQQAFEDVHVHTYTAEETKEAFDVARNSIELLSTVLSSSPEQDASQDDLTATLVQQCYQSQHTIQRIIETVGDNEAVLFEALSVNDEIQKVLSKYEEMKQPRASEHAEQRAVVIPVATEHEDLTAAVNEDALVRKPAAARTRSGGDDDILDDLDEMIFGKKGGSSSQEGPKKPDPKKDDLITF

SEQ ID NO: 61353 - protein, 292 aa, Zea mays
  Clone ID: LIB3061-111-A8_FLI.pep
HRQLPVFPYAQAQHGNSADRRRPTKPCEEERAVAFATLGSGGHIFLAASGFDPVASNARPVEPGRALPGFLSSPSPRRRSEEANLESKISHARGSTGAASQRQQQRERRGRSPVWREEGNKEMDEIMNKVGAYWLGQRANKEISSAGDDLDSLSTSVGDGAKWLVNKLKGKMQKPLADLLKEHNLPVGLFPREATNYEFVPETRRLTVYIPSPCEVGYRDGSELRFDATVSGTLGEDRLTEVEGIKTKVLVWARVTAVKADAAKVHFTAGIKRSRSRDAYEVVRGGITVDEF

SEQ ID NO: 61354 - protein, 478 aa, Zea mays
  Clone ID: LIB3061-108-B12_FLI.pep
SFCSERTHRPSPISDPLVDPKMQIFVKTLTGKTITLEVESSDTIDNVKAKIQDKEGIPPDQQRLIFAGKQLEDGRTLADYNIQKESTLHLVLRLRGGMQIFVKTLTGKTITLEVESSDTIDNVKAKIQDKEGIPPDQQRLIFAGKQLEDGRTLADYNIQKESTLHLVLRLRGGMQIFVKTLTGKTITLEVESSDTIDNVKAKIQDKEGIPPDQQRLIFAGKQLEDGRTLADYNIQKESTLHLVLRLRGGMQIFVKTLTGKTITLEVESSDTIDNVKAKIQDKEGIPPDQQRLIFAGKQLEDGRTLADYNIQKESTLHLVLRLRGGMQIFVKTLTGKTITLEVESSDTIDNVKAKIQDKEGIPPDQQRLIFAGKQLEDGRTLADYNIQKESTLHLVLRLRGGMQIFVKTLTGKTITLEVESSDTIDNVKAKIQDKEGIPPDQQRLIFAGKQLEDGRTLADYNIQKESTLHLVLRLRGGQ

SEQ ID NO: 61355 - protein, 238 aa, Zea mays; identical to SEQ ID NO: 61063
  Clone ID: LIB3061-100-D1_FLI.pep

SEQ ID NO: 61356 - protein, 224 aa, Zea mays
  Clone ID: LIB3061-096-E8_FLI.pep
SRKFLFMEGVGARLGRTSARYGPATTFTGHVRKWRKEWVPVVAAAAAAAANANTSANGGTTSSTGMGSGGGSRGNNLLLFKWTPVNGANGGGGDGEQQQQAETATRRRRYVPVSLMEEQRQESTKSDDENKANDGDPSSNETEPSNGKTDINDTPMDESQATDEDGRDSGKNGGGTDLNLNLGLKDPDGDNEVETSEKHVAANNPQTENRSKRKSVTPDLEMTM

SEQ ID NO: 61357 - protein, 178 aa, Zea mays
  Clone ID: LIB3061-084-G9_FLI.pep
AEALQAYLLVSSLFVAPAPAPAPAPLSKPPQQQREGEKAQEEEEEEPMPFVYPDPVEVGELTLEQLSAYDGKDPAKQILIAIRGQVYDVSRGRLFYGPQGPYSLFAGRDATRALALMSFDPNDLTGDLDGLSADELEVLQDWEEKFKERYPRVGHLACQDATDSGQTTAGLHHEEGDA

SEQ ID NO: 61358 - protein, 285 aa, Zea mays
  Clone ID: LIB3061-082-A12_FLI.pep
TKEAMEKESSATYEPKRNSEIRVFESSDEISTDLAEYISQVSEISVKERGYFAIALSGGPLVSFLGKLCEAPYNKTLDWSKWYIFWSDERAVAKNHAESNYRLTKEGFLAKVPILNGHVYSINDNATVEDAATDYEFMIRQLVKVRTIGVSERNDCPKFDLILLTMGSDGHVASLFPNHPAMELKDDWVTYITDSPQPPPERITFTLPVINSASNIAIVSTGDDKAKAVHIAVSDMAEGLDAPTSLPARMVQPTDGKLVWFLDKAAASFLDSKNDDDDACYERHE

SEQ ID NO: 61359 - protein, 350 aa, Zea mays
  Clone ID: LIB3061-079-E3_FLI.pep
RRSKMKAPSLLVQCFPGLLPSKATSCVPIVSEKDLQLPSPAVEIIPSKSVHPYKYAGEKVDVQGLNIFKGKVSVADMIVISPSEVASSKYDGTLKYWESSITLVDILKNEIRDGQLSFRGKRVLELGCGYGLSGIFACLKGASTVHFQDINAETIRCRTIPNVLANLEQAQDRQNRPSESPVTPSRQLLAPNVHFYAGEWDELPTILSVVQPPAAPTNLSFSEDDFMDGCSSHDGSSVVGHDYCPRRSRKLSGSRAWERASETDQADSGYDVILISDVPYAANSLKKLYALISKCLRPPYGVLYVASKKNLVGSNGGARQLRALMEEEGVLGGHFLTEVCDREIWKFFFK

SEQ ID NO: 61360 - protein, 278 aa, Zea mays
  Clone ID: LIB3061-079-C7_FLI.pep
HQAKRTSNDLTTMATKILALLALLALFVSATNAFIIPQCSLAPSAIIPQFLPPVTSMGFEHLAVQANMQQQALAASVLQQPIAQLQQQSLPHLTIQAITTQQQQQFLPALSHLAMVNPAAYLQEQLLASNPLALANVVANQQQQQLQQFLPTLSQLAMVNPAAYVQQQQLLSSSPLAVGNAPTYLQQQLLQQIVPALTQLAVANPVAYLQQLLPFNQLTLSNSAAYLQQRQQLLNPLVVANPLVAAFLQQQQLLPYNQFSLMNPVLSRQQPIVGGAIF

SEQ ID NO: 61361 - protein, 300 aa, Zea mays
  Clone ID: LIB3061-059-D7_FLI.pep
PPPPPPPPRLQPSLARAAAAAMSGLYSQGFSPARNLSPQIRSNPDVDSQYLAELLAEHQKLGPFMQVLPICNKLLSQEIMRVSSIVHNHGFGDHDRHRFRSPSPMSSPNPRANLPGNGFSTWSGLQERLGFPQRASMDWQGAPPSPSTQVVKKILRLEVPVDSYPNFNFVGRILGPRGNSLKRVEASTGCRVFIRGNGSIKDPGKEDKLRGKPGYEHLSDPLHILIEAEFPASIIDARLRHAQEIIEELLKPVDESQDFYKRQQLRELALLNSTLREDSPHPGSVSPFSNGGMKRAKTGQ

SEQ ID NO: 61362 - protein, 304 aa, Zea mays
  Clone ID: LIB3061-058-D3_FLI.pep
KGAGRNRASLDPSPRRSTHEAGGAMAMKLDMSALETNFANLTASAGDDTYFSAEAPDVPSMVLPICDDFDGFQAATKDMVKNKKGTTTLAFIFDKGVIVAADSRASMGGYISSQTVRKIIEINPYMLGTMAGGAADCQFWHRNLGTKCRLHELSNKRRISIAGASKLLANILYSYRGMGLSIGTMIAGWDEKGPGLYYVDSEGARLVGNRFSVGSGSLYAYGILDDGYRFSMSVEEAAELARRAIYGATFRDAASGGCVSVYHVGPDGWTKLSGDDVGELHYHYYPVQKTPVEQEMADAPTASA

SEQ ID NO: 61363 - protein, 276 aa, Zea mays
  Clone ID: LIB3061-058-C2_FLI.pep
FCLLWGEGERESERDLVERLARWSSNEDVGGVQRAGGGGAGGAGGGGQPDAVAQDEGVAAGGALPGRLRAGRVRAARRPRPPRLLPHQPGAPPPQVVRGEGRGVLPVRGGAGQPGSSEPAARAVKQGRQRGAPRHRGLQDAARPRALPGQLHARPAHRLLRLRPLRQVHQLPARRIRPRGQGAALLGDHRRRLRRLLRRHRHAQRLMRQVARAVPARLLLLQRPRRAQVLREPQAQGHRCPRRRRRDLRCHFQGGGRVYCPDGAALIYHHQAEAMR

SEQ ID NO: 61364 - protein, 449 aa, Zea mays; identical to SEQ ID NO: 46598
  Clone ID: LIB3061-057-C7_FLI.pep

SEQ ID NO: 61365 - protein, 180 aa, Zea mays; identical to SEQ ID NO: 37897
  Clone ID: LIB3061-055-B7_FLI.pep

SEQ ID NO: 61366 - protein, 123 aa, Zea mays
  Clone ID: LIB3061-054-G10_FLI.pep
QPNHLDSWGSFALARVDFLGFEERPSVRPGKEQEGGGDDRGGAQRPPGEEGAGQVQRGRHHRRPQEAGGGADGDAPREDPHPEVVQHLQGPHHPQGLRGPRRHGPRALLQLSRRPSLPLVRLV

SEQ ID NO: 61367 - protein, 252 aa, Zea mays; identical to SEQ ID NO: 61342
  Clone ID: LIB3061-037-H8_FLI.pep

SEQ ID NO: 61368 - protein, 153 aa, Zea mays; identical to SEQ ID NO: 48136
  Clone ID: LIB3061-037-H2_FLI.pep

SEQ ID NO: 61369 - protein, 283 aa, Zea mays
  Clone ID: LIB3061-032-D11_FLI.pep
EHSETHQAKHISNNLTTMATKILSLLALLALFASATNAFIIPQCSLAPSSIITQFLPPVTSMGFEHPAVQAYRLQQAIAASVLQQPISQLQQQSLAHLTIQTIATQQQQQFLPALSHLAMVNPAAYLQQQLLASNPLALANVVANQPQQQLQQFLPALSQLAMVNPAAYLQQQQLLSSSPLAVANAPTYLQQQLLQQIVPALTQLVVANPAAYLQQLLPFNQLTMSNSAAYLQQRQQLLNPLAVANPLVAAFLQQQQLLPYNQFSLINPVLSRQQPIVGGAIF

SEQ ID NO: 61370 - protein, 274 aa, Zea mays
  Clone ID: LIB3061-022-E7_FLI.pep
AKRTSNDLTPMATKILALLALLALLVSATNAFIIPQCSLAPSAIIPQFLPPVTSMGFEHPAVQAYRLQLALAASALQQPIAQLQQQSLAHLTLQTIATQQQQQQQFLPSLSHLAVVNPVTYLQQQLLASNPLALANVAAYQQQQQLQQFMPVLSQLAMVNPAVYLQLLSSSPLAVGNAPTYLQQQLLQQIVPALTQLAVANPAAYLQQLLPFNQLAVSNSAAYLQQRQQLLNPLAVANPLVATFLQQQQQLLPYNQFSLMNPALQQPIVGGAIF

SEQ ID NO: 61371 - protein, 285 aa, Zea mays
  Clone ID: LIB3061-011-E4_FLI.pep
YFEHSETHQAKLPSNDLTTMATKILALLALLALFVSATNAFIIPQCSLAPSAIIPQFLRPVTSMGFEHLAVQAYRLQQALAASVLQQPINQLQQQSLAHLTIQTIATQQQQQFLPALSQLDVVNPVAYLQQQVLASNPLALANVAAYQQQQQLQQFLPALSQLAMVNPAAYLQQQQLLSSSPLVVGNAPTYLQQQLLQQIVPALTQLAVANPAAYLQQLLPFNQLTVSNSAAYLQQRQQLLNPLAVPNPLVTAFLQQQQLLPYSQFSLMNPALSWQQPIVGGAIF

SEQ ID NO: 61372 - protein, 211 aa, Zea mays; identical to SEQ ID NO: 48028
  Clone ID: LIB3061-035-A4_FLI.pep

SEQ ID NO: 61373 - protein, 282 aa, Zea mays
  Clone ID: LIB3061-029-C2_FLI.pep
GRRGGQEDRRPSRAGARDGNGTGPQNLRSFLPARPCPSTRRSCRPRLTSALSSSRGIGYATGCAMVLWVFGYGSLIWNPGFDFDDKILGFIKGYKRTFNLACIDHRGTPEHPARTCTLETDDEAICWGIAYCVKGGPEKELKAMQYLERRECEYDQKISIDFYKEGDPLKPAVTGVLVFVSTPDPIGNKYYLGPAPLQDMARQIATANGPTGYNRDYLFSMEKALASISHEDDSIIELANEVRKVLNRTKETKITGANASLKSHAPLVHLSALPEGTVVDSR

SEQ ID NO: 61374 - protein, 217 aa, Zea mays
  Clone ID: LIB3061-026-A8_FLI.pep
QRRKGFQSLNSNTSTGMSHRLNARHKANRFSIHQNYFSQCLGFHSIPGALLCSCLVLGFLYFQDLLDNLLLLNQESTDNSLPNSNSREYSTIRTVNSPAVPRQPGPLVLGRSQVGDPLDLLPGDGALGTARPLLGVLVHKLPTWGLHDPGLIGFCRVAVTLSVGEALHHLVAAAGRPLVRLRGLGPGGKEGQEEGRDARRRREWIWLAWEATGSGRL

SEQ ID NO: 61375 - protein, 468 aa, Zea mays
  Clone ID: LIB3061-014-A1_FLI.pep
RLPSAPPFRPLSLASSISPPTMGKEKSHINIVVIGHVDSGKSTTTGHLIYKLGGIDKRVIERFEKEAAEMNKRSFKYAWVLDKLKAERERGITIDIALWKFETTKYYCTVIDAPGHRDFIKNMITGTSQADCAVLIIDSTTGGFEAGISKDGQTREHALLAFTLGVKQMICCCNKMDATTPKYSKARYEEIVKEVSSYLKKVGYNPDKIAFVPISGFEGDNMIERSTNLDWYKGPTLLEALDQITEPKRPSDKPLRLPLQDVYKIGGIGTVPVGRVETGVIKPGMVVTFGPTGLTTEVKSVEMHHEALQEALPGDNVGFNVKNVAVKDLKRGFVASNSKDDPAKEAASFTSQVIIMNHPGQIGNGYAPVLDCHTSHIAVKFAELITKIDRRSGKELEKEPKFLKNGDAGMVKMIPTKPMVVETFSAYPPLGRFAVRDMRQTVAVGVIKSVEKKDPTGAKVTKAAAKKK

SEQ ID NO: 61376 - protein, 115 aa, Zea mays
  Clone ID: LIB3061-008-G2_FLI.pep
FPKLKHRSLCYYKFILHRPPFSHTSNYSPNSICSAAYSFSTSSSIRCFLAVDVSFHCGAVVLLFSLDPAGRPLFRLASFASLALFSSTDRHVLLLCPSAIPHNWHLLFFFFSFGT

SEQ ID NO: 61377 - protein, 125 aa, Zea mays
  Clone ID: LIB3061-008-E4_FLI.pep
QRQPNHLDSWGSFALARVDFLGFEERPSVRPGKEQEGGGDDRGGAQRPPGEEGAGQVQRGRHHRRPQEAGGGADGDAPREDPHPEVVQHLQGPHHPQGLRGPRRHGPRALLQLSRRPSLPLVRLV

SEQ ID NO: 61378 - protein, 288 aa, Zea mays
  Clone ID: LIB3061-002-H5_FLI.pep
RIPRQAGRRGGQEDRRPSRAGARDGNGTGPQNLRSFLPARPCPSTRRSCRPRLTSALSSSRGIGYATGCAMVLWVFGYGSLIWNPGFDFDDKILGFIKGYKRTFNLACIDHRGTPEHPARTCTLETDDEAICWGIAYCVKGGPEKELKAMQYLERRECEYDQKISIDFYKEGDPLKPAVTGVLVFVSTPDPIGNKYYLGPAPLQDMARQIATANGPTGYNRDYLFSMEKALASISHEDDSIIELANEVRKVLNRTKETKITGANASLKSHAPLVHLSALPEGTVVDSR

SEQ ID NO: 61379 - protein, 90 aa, Zea mays
  Clone ID: LIB3061-001-B11_FLI.pep
REVARSSRRRSTPRPPPTRTAMGFWVTTLIFLLAGVAASLFTLLCCNRGPSTNLFHLTLVTTAVICCWMMYAIVYLAQMKPLINPILSGE

SEQ ID NO: 61380 - protein, 211 aa, Zea mays
  Clone ID: LIB3061-001-A12_FLI.pep
QALKTYIWLQCFDGSIQQVEEEVAMFCPMICLEIVKNGTGSSKNHAIVLPERVSPASLSLILNYCRFHQVPGRSNKERKSFDEKFVRIDTEKLCKLASAALGLQLRPLVDLTCGALARIIGGKTPDEVRDIFHLPDDLTEEEKLEPLKNVNDDPTIRLLNRLYAKKRKELQERQKLKDVQTQEQKDERSLDELLCFINGHGDSRGGKASKN

SEQ ID NO: 61381 - protein, 219 aa, Zea mays
  Clone ID: LIB3061-001-E12_FLI.pep
PTPHRSGGGGANAGEGEGVREGAPAMVHVNFYRNYGKTFKKPRRPYEKERLDAELKLVGEYGLRCKRELWRVQYALSRIRNAARHLLTLDEKNPRRIFEGEALLRRMNRYGLLAEGQNKLDYVLALTAENFLARRLQTLVFKAGMAKSIHHARVLIKQRHIRVGRQIVNVPSFMVRVESEKHIDFSLSSPFGGGPAGRVKRKNQKKASGGGDAGDEDEE

SEQ ID NO: 61382 - protein, 389 aa, Zea mays
  Clone ID: LIB3060-114-D7_FLI.pep
RPPQLTLSPGDRELQPMDRLVVFSRRRRRWILLAAAGAAAAVGAYKIYHHPAVAERRRRLVRLAAAIAAFADAAASSADAVALVTSDLADFVRSDADEVPRSVKQLAKLAASREVSATVSTLSEAVTSGILRGSGSSSSGPASGGTVALSDRLVDRLFSDSGERLASAVAGSFARHLVLAFYSAPSPQGEASSSPTMWVNVVATGKCRKAISNWVEVFVGTAVREFIDKTIHINTYEQLFEGLTNPRHDAKVKELLVSVCNAAVETLVKTTHHALYSTNGNLGANGSVSGNANGAGEGWVETVSSTLAVPSNRKFVLDVTGRVTFETVRSFLEFVLWKLQDGARKGGGSVVDSGLRVVRYMSDKSMVIATICITLCLHVLNGTRLLVTA

SEQ ID NO: 61383 - protein, 530 aa, Zea mays
  Clone ID: LIB3060-113-H6_FLI.pep
LLPLLHTSRFRETSPPFPSKPTGSGGFDRIESDRIGSMEISLEASWVGVQRHGQDLADRLAQGFSGLLLHAQPPQLPPWSPAALLPPKLVIPFDLDLPVVPFVAGMRRGVGTVDLPAVAVSSLVEIGGRLGQAGSELGAAVQHLARQVPVPVPFRKWEAAQPPTVVTGDVALAVGTVGSANVALERAVDIGSLEVAAAAAAAATGSATAGSVGAVGAMDDDRLDDEEDGFDCEIGTLENIKKAKGTVNVSATYNTRHHDFESSVVARGDLWRLESSRGNLTSGNDSSPLFLVQLGPLLFVRDSTLLLPVHLSKQHLLWYGYDRKNGMHSLCPAIWSKHRKWMLMSMMCLNPVACSFMDVQFPNGQMTYVAGEGITASGFIPLFGGLLQAHAKCPGDTRVSFSFKNKQGTRFSPTFQWPDNSVSFGVAQAVAWKRSGLMVRPSIQISVCPTFGGTDPGICTEFVHSLKEEVSVMCGFSCSRHPSAFTALSLGRSKWNGQVGSSGLVITLETPLDNMARPSLSVQLNGGFEF

SEQ ID NO: 61384 - protein, 336 aa, Zea mays
  Clone ID: LIB3060-112-E5_FLI.pep
ETKQRSSSSLGAVAADEGEEEGAVVAGRLGVDGVGERALVHAVVLRLDVLHVDLRPGDHHPDEHRVAGAQPLHGPVQLLGEVPGWAVGAAEHGEEAETEVARRLALDGALQGAVVHVVVRPGNSRHVRPAPLAEDSDEGALVGAQPPLAGLVEVARVQRHRRRVDLVALGARDGQVREQEALVVAGRAFGDVVLDVAAEPGAVRLAHDLQLRRRPGADDLRGRPQVGDVARERLLQDGGVAGGRVQDPQQHRPLVVAAQLGRDAPGQVLVKHGPVLLLDQRALCRVAVRQDVGHRRAVATEPSECFVEVDGVLPRPRRHRRHGQARHPVGRWCRVL

SEQ ID NO: 61385 - protein, 449 aa, Zea mays
  Clone ID: LIB3060-112-E12_FLI.pep
KNQSFVLLPPARPAPVTNLPLPPSVAMARKKIREYDSKRLLREHLKRLAGIDLTILSAQITQSTDFAELVSQQPWLSTMKLVVKPDMLFGKRGKSGLVALNLDFNQVKEFVKERLGVEVEMGGCKAPITTFIVEPFVPHDQEYYLSIVSERLGSTISFSECGGIEIEENWDKVKTIFLPTEKPMTSDSCAPLIATLPLEARGKIGDFIKGVFAVFLDLDFSFLEMNPFTMVNGEPYPLDMRGELDDTAAFKNFKKWGGIEFPLPFGRVLSPTESFIHELDEKTSASLKFTVLNPKGRIWTMVAGGGASVIYADTVGDLGYASELGNYAEYSGAPNEEEVLNYSRVVLDCATADPDGRKRALLIGGGIANFTDVATTFNGIIRALREKESKLKASRMHIYVRRGGPNYQSGLAKMRKLGAELGVPIEVYGPEATMTGICKQAIECIMAAA

SEQ ID NO: 61386 - protein, 304 aa, Zea mays
  Clone ID: LIB3060-109-F11_FLI.pep
LCSSRVAPEGAESLDGARPEDVLVVEGRDGSAQERAHPENPVVIPWLVLVVDDGGAQAPGRVDAGAGDGDGGQVDHEHGEADGEGSQNRDVGVAGVALGVGGGEDGVHEHEGADDLGAEPRAAGVAGRERVGAAAVPVEVGALERLDEADAADGAEALRHHVQQRAHQRHLARQEEAEGDGRVDVAPRDAGGAVDQHEDHAAEGPRDAQHAHAAARRVGRGPRRRRVRLVLVPYHRRHRHVQEQQRRDELRDHRAVQRPRTQLRRVHQRRRRRVRVVLGGELPAARAALDHVVLAHGLPLRLLL

SEQ ID NO: 61387 - protein, 378 aa, Zea mays
  Clone ID: LIB3060-107-F8_FLI.pep
APAAMITALQVSGGGLPLMFTRRRRRAFRPPQAVASDAAAAAGTAREEGGKVALGGSGVAVTKLGVGAWSWGDTTYWNEFRWDDTKLKAAKGAFDASIDCGITFFDTAEVYGAGVSGAINSESLLGRFIKERQRKEQVDVAVATKFAALPWRFGRGSVICALKASLDRLGVSSVELYQLHWPGIWGNEDYLDGLGDAVEQGLVKAVGVSNYSEKRLRDAYERLRKRGVPLASNQVNYSLIYRNPEENGVKAACDELGVTLIAYSPIAQGALTGKYTPESPPKGPRGRIYTPEFLTKLQPLINRIKEIGGSYGRTSTQVVLNWLVCQGNVVPIPGAKNAEQAREFAGALGWSLAPDEVEELRSMARQVKPVIGFPVEKL

SEQ ID NO: 61388 - protein, 328 aa, Zea mays
  Clone ID: LIB3060-107-F4_FLI.pep
RTLADYNIQKESTLHLVLRLRGGMQIFVKTLTGKTITLEVESSDTIDNVKAKIQDKEGIPPDQQRLIFAGKQLEDGRTLADYNIQKESTLHLVLRLRGGMQIFVKTLTGKTITLEVESSDTIDNVKAKIQDKEGIPPDQQRLIFAGKQLEDGRTLADYNIQKESTLHLVLRLRGGMQIFVKTLTGKTITLEVESSDTIDNVKAKIQDKEGIPPDQQRLIFAGKQLEDGRTLADYNIQKESTLHLVLRLRGGMQIFVKTLTGKTITLEVESSDTIDNVKAKIQDKEGIPPDQQRLIFAGKQLEDGRTLADYNIQKESTLHLVLRLRGGQ

SEQ ID NO: 61389 - protein, 348 aa, Zea mays
  Clone ID: LIB3060-107-A8_FLI.pep
TLESLELSVPDPLDLDILGRLGPEVGVGRLHALEDADDLAGLRVALGDAQRDVAGGGGGVLDVLLLELLLVTSAPGGERDGVVVAGGAAAALGVEEGGAAVAGHEEGPAEALGLAGGDELLDGEEERHALAPRELHGDGGVVDAVLLLELERAVGADLERALDLVQRVREAGHELGLLELGRGVLGDALRLDGEGRRLQAQLLHLVLAGLERERLHAAVDGRALVRRARALHLHVRFALDLVVGQPLGRALRARARDEERRGGEREAGELRGVDAPAGDVLQGARDPGGAGVDAERPAGELRRRAGRQRGKGRPAADLGRLHQGGRGLERGCHRRRGGDAFWLLPFSS

SEQ ID NO: 61390 - protein, 217 aa, Zea mays
  Clone ID: LIB3060-104-G3_FLI.pep
ARQYASSAITDLDRQNTGKATVLGDAARVLRDLITQVESLRQEQSALVSERQYVSSEKNELQEENSSLKSQISELQTELCARMRSSSLSQTSIGMSDPATHQQMWSSIPHLSSVAMAARPASAASPLHGQEGYSADAGQAGYAPQPQPRELQLFPGSSASSSPERERSSRLGSGQATPPSLTDSLPGQLCLSLLQPSQEASGGGGVVSPSREERRDG

SEQ ID NO: 61391 - protein, 525 aa, Zea mays
  Clone ID: LIB3060-103-H6_FLI.pep
ASSPVLSTPSNLPTPPHPPCSPRDLSGQLRRAPTSPLIPPRRRRQPTGGGEEGRGAMETADYSGKLFVGGISWETDEDRLREYFGRFGEVTEAVIMRDRSTGRARGFGFVVFADATVAERVTIEKHMIDGRMVEAKKAVPRDDHSIVSKSNTSSIGSPGPGRTRKIFVGGLPSNVTEADFRGYFEQFGVITDVVVMYDHNTQRPRGFGFITYDSEDAVDKALHKSFHELNGKMVEVKKAVPKEQSPGPVARSPAGVGQNYAMNRVHSFLNDFNQGYNPNPIGGYGMRVDGRFGQLSGARNGLSSFGPGYGMGMNVEGGMSGTFGANSGFISNSNGRQMGSYFNGSSNRLSSSIGYLGYDSGSMLSSMSRNFNAGVNYPINPTNMSAFAALGNGGGVNYMGLPSIAPELAQLGNISSLGSGNFSRGAGVNNLSLPSGSYGRSNSTGTIGEPFSASGNAYEVNNPDTYGNSSIYGGTSWRFPSSEVDVPSFSHDLGNVDPNMKSDISANYMGNYSVSNNQPSRGITS

SEQ ID NO: 61392 - protein, 445 aa, Zea mays
  Clone ID: LIB3060-099-B1_FLI.pep
LFLQAHSSSPDLGSSRSMSWRWTLARRVATLAAIGGGGAQAQRLLSTSSAGGGTGLLGRHYIPLASQIRSKVVGCRGAALVSSRWLHEAQYQVRQDGASRAQEQQDPFELVADELSLLANRLRSMVAAEVPKLASAAEYFFKVGAEGKRFRPTVLLLMASALKFPLSESTEGRVLSILADKLRTRQQNIAEITEMIHVASLLHDDVLDDADTRRGVSSLNLIMGNKLSVLAGDFLLSRACVALAALGNTEVVSLMATAVEHLVTGETMQISTSREQRRSMEYYLQKTYYKTASLISNSCKAVAILAGHTAEVSVLAYEYGRNLGLAFQLIDDVLDFTGTSASLGKGSLSDIRHGIITAPMLYAMEEFPQLQEVVDRGFDNPANVEIALDYLQKSRGIEKTKELAREHADRAVKAIESLPDSDDEDVLTSRRALIDITERVITRTK

SEQ ID NO: 61393 - protein, 690 aa, Zea mays
  Clone ID: LIB3060-095-H2_FLI.pep
IGSAGAAAAAADQGFASPVLAKIRLLSPATRMAPASETELQAPPPASAKEIKSPEVLPEPGSLSALQRKKLGAHFMESDERRVSRARTPLGAAYEPPSAAGGGGGTTPVNIRGEPIQDLSRTGGWVAAFFIFGNEMAERMAYFGLSVNMVIFMFKVMHRPFASSANAVNNFLGISQASSVLGGFLADAYLGRYWTIAIFTTMYLLGLIALTVSASVPALVPPQEGCDKLAMLLGACAPAAPWQMGYLQTALYVTALGAAGIRPCVSSFGADQFDERSPGYKRRLDRFFNLFYLAVTLGAIAAFTAVVYIQMQHGWAAAFGTLALAMGTSNALFFVGTPLYRHRLPGGSPLTRVAQVLVAAFRKRDAAFDSGDFVGLYEVAGAKSAIRGSAKIDHTDDFRWLDKAALQLEGDLAGGEDEEAVNPWRLCTVTQVEEVKILLRLLPVPACTVMLSVVLTEFLTLSVQQAYTLNTRVAALHLPVTCMPVFPCLAIFLILALYYQTFAPLARRLTGHPHGASQLQRVGLGLFFSILSVAWAGFFERYRRGYAVRHGYLGLFLTPMPDLSAYWLLIQYCLIGVAEVFCLVALLEFLYQEAPDAMRSVGSAYAAVAGGLGCFVASAINTAVDAATRDDEEGRPSWLAQNINVGRFDYLYWLLAVLSTVNLLIFVFFAKRYKYRVRVDVPTTVAVDKQ

SEQ ID NO: 61394 - protein, 365 aa, Zea mays
  Clone ID: LIB3060-095-B10_FLI.pep
TKQNQKKREGEGFQLLQSLVKKLKLRRYIHHLHLHREAEAAGRYKNTDCCGLTTMWRSGLGTSPPPACSTNSAGVRKLPWQTHTIRTSSPFLYLYRNPSVLRPPGPSALYDTMGMSSAMALRRSPVLAVRIVSDRSVRRRSGSGSSWQAAPSGPVASAARRSAGPCCGRLGVGDPAVVKATERRSWKPLGTVCSRPSSRPPAAGTGLPELMELRRSRRLRLASRRRWLCIARRRSRSSMYSAGREEVRSRSGGGAAAGPASCAPQLVPVVAAGKEQIDATEDERWSRGSALLPSCEGSAPKQPPRDRPRLSSISSDSPPGPGAAPAPPTGACPPSRPNPPRKSLEAMGLHRRPLLPTDSPRKNAS

SEQ ID NO: 61395 - protein, 418 aa, Zea mays
  Clone ID: LIB3060-094-G7_FLI.pep
SPPRPNAATPLPVRERCSTSVPAPMATACPPLSLPSTSLFRGRSARAGPRRRQLTAVRCSAVGEAVVEQASPGTAEEPLLVSAIRGRKVERPPVWLMRQAGRYMKSYQLLCERYPSFRERSENVDLVVEISLQPWKVFKPDGVILFSDILTPLPGMNIPFDIVKGKGPVIYDPLRTAAAVNEVREFVPEEWVPYVGQALNILRQEVKNEAAVLGFVGAPFTLASYCVEGGSSKNFTLIKKMAFSEPAILHNLLQKFTTSMANYIKYQADNGAQAVQIFDSWATELSPADFEEFSLPYLKQIVDSVRETHPNLPLILYASGSGGLLERLPLTGVDVVSLDWTVDMAEGRKRLGSNTAVQGNVDPGVLFGSKEFISRRIYDTVQKAGNVGHVLNLGHGIKVGTPEENVAHFFEVAKGIRY

SEQ ID NO: 61396 - protein, 562 aa, Zea mays
  Clone ID: LIB3060-093-G10_FLI.pep
SQLPPICLFGFGPISSHPFPLHWSLLPPSTADPVPARGTMAGKGEEVYVAAIDQGTTSTRFIVYDRHAKPVASHQLEFKQHYPEAGWVEHDPMEIIETVKVCMKEAVGKAKAGKHNVVAGLKAIGITNQRETTVMWSKSTGRPLYNAIVWMDARTSPVCRRLENELSGGRTHFVETCGLPISTYFSALKLLWLMENVDAVKDAVRTGDALFGTIDTWLIWNLTGGVAGGQHVTDCSNASRTMLMNLKTLDWDKPTLAVLGVPVEILPKIISNSEKIGVVAKEFPFAGVPISGCLGDQHAAMLGQLCQKGEAKSTYGTGAFILLNTGEEPTQSSHGLLSTIAYKLGPAAPTNYALEGSIAIAGAAVQWLRDSLGIIQSAAEIEKLAETVPDSGGVYFVPAFNGLFAPWWRDDARGICIGITRFTNKGHIARAVLESMCFQVNDVLSSMHKDAGEAGEVKSAEGEFLLRVDGGATVNNLLMQIQADLLGSPVVRPADIETTALGAAYAAGLAAGVWTKEKVFAGLHKENTTVFRPKLDEAHRKKRADSWYKAVSRSFDLADLSL

SEQ ID NO: 61397 - protein, 208 aa, Zea mays
  Clone ID: LIB3060-089-C9_FLI.pep
NEQSFISGIGNWIADEVLYQSRIHPLQIASNLPRESCEALHQSIEEVVKYAVEVDADMDRFPKEWLFHHRWGKKPGKVDGKKIEFITAGGRTTAYVPQLQKLVGTQSSKTISVAENGDAKDSGTEGEDADADVLNPRKRAAASRGQRNKDTAGSRKARGNGADAEAAEPTTGVVGSNGEQAFGQPNSDAVDKSDRATRRSSRKVKARK

SEQ ID NO: 61398 - protein, 88 aa, Zea mays
  Clone ID: LIB3060-087-D2_FLI.pep
TQEPPRPVHGCIQLPCDWLPSSQRLGSSRVLTAPAFLIGWLHGCARNVRVQANLFYAPRRLPATNQEVRHDLCHMHVAVFQCPCMLHS

SEQ ID NO: 61399 - protein, 287 aa, Zea mays; identical to SEQ ID NO: 58142
  Clone ID: LIB3060-086-G8_FLI.pep

SEQ ID NO: 61400 - protein, 342 aa, Zea mays
  Clone ID: LIB3060-085-D10_FLI.pep
NFPEIQAHTMQGISICGSVTSPHGANCRRACVARNDVRLPCEVNAVSQGLHSLHWCAHKPQMKNNGRRMNAAVKTNARWLFGGDGRSNDARLERSESANEDILIFYFQMDLQTRIQYALNIEQFDVAKQLREKLTEIETEIIRQREARRGSPKTEAQDKALNLIRVRADLQKAIDSENYALAAGLRDDIAKLEVESLAVSAKALAYQNVKYAFRLGQKVRHNIHGYRGVICGMDPVCCESKSWMETANVDKLSKGPNQPFYQVLVDVYVDPELLVAYVAEENLSAAEESEKGRFDHPYIEFLFYGEDTAGDFIPIKQLREKYDQPRYEASGDESDNDGNTNS

SEQ ID NO: 61401 - protein, 300 aa, Zea mays
  Clone ID: LIB3060-017-D3_FLI.pep
KSSSDRRGEENKAQILDAPEPMATPAAEKPEDVEIREVWADNLETEFAVIRDIVDDYPYVAMDTEFPGVVCRPLGTYKSAAEFNYATLKANVDMLKLIQLGLTLSDEHGGLPALGPDGRPCVWQFNFRGFDPRTDVAAADSIDLLRRSGIDFSRHAADGVDSRCFAELLMSSGVVLNSDVHWVTFHSGYDFGYLLKLLTGTNLPDTLPGFFDLIKIYFPVIYDIKHLMRFSNSLHGGLNKLAELLDVARVGICHQAGSDSLLTALSFKKLKEAYFNGLTEKYAGVLYGLGFEGVETTSAH

SEQ ID NO: 61402 - protein, 283 aa, Zea mays
  Clone ID: LIB3060-016-D6_FLI.pep
VSRQLNLIYQQQASKQGSEEGALCMLDPSTGSLLLSSSCCCWRRRLFGSRLILLFLLLFFLLLLYHRLLRRCLCRRRCRLRRCSWLGLLLLLLHGDFPGGGLRRRLRLGLLLGDKRCDLVQDEGDRRKQGRGAGLGHRLAHHLGSREVNLSQLIEELGDCSRVLLADLDWLLILEQSLDLRRRCFVGLHDLGLQLCLLVLNLLVNLLLVEGLQEACSCSLLAILVKDLVEARQNLGLPHAGHLDLFFRIYTCSNNLCRQEGRRRGRRWQLMLLQLCEVCDVEL

SEQ ID NO: 61403 - protein, 392 aa, Zea mays
  Clone ID: LIB3060-007-C2_FLI.pep
IRIYTSHLPVPVCKYTARLECTLHSTYTAMAVRPQHWHTYVRTGSSIEAVTSRGAIDARLGDSGAGVDEVAVDEVGGEDLQLVAEALGEGLGDEEPRVAVDPLRDGPHAQHRVVGLGRHRVLHPVEEPPAGHRRLLPQELEVALELGLRQVRVDPVVLEVAGAPQRVPGPGRRRLAGLPDADDPPREQLRDGPVEHRLVLRDQVLAQLVGQEPVEPRRVLVPELGADLQDDQLGLGLAQEPAHVVQHHVHGVRRQDAVADPALLLHAHVDDARAHGQLLVHGHGLALREGAGHQRHADLVGGRVVRAGPHHLVHAQLVGAQLRHPPLPVRRPVLRPRERVAGGGQPRGQRPLLGGHQLPPVHLLREEGAHGFQRVAAAVGIGGSHGWINYKG

SEQ ID NO: 61404 - protein, 183 aa, Zea mays
  Clone ID: LIB3060-005-B8_FLI.pep
PISILPSSAPFPACARHAGDLGGAWARPLSDGVSRFPSCLSPVPSPLVLCEPAGDSAKLFQHRYPSMAARRNVRYSPLPSEDGDDSNFIKEDVDLRYTYTPKSYRRIPWKSIALALFLLLLGTSLLFLSYFIFTGHMEGDSSQAYGLLFLGFLSFLPGFYETRVAYYSWRGAPGYTFASIPDY

SEQ ID NO: 61405 - protein, 277 aa, Zea mays
  Clone ID: LIB3060-004-F5_FLI.pep
KLKITSHIAAVGADDLAVDPLGGVGAQEADHRRDVTGLAEPLHRVCLHGVSHHGLALALEEHVRGRGPGRDAVGRDAGAPELLGHGPHQRLHRRLGRRVGPEPRREAPHHGRRHGDDAPAAAAAEAVGRLPEAQERAAQVHGEHAVEGLGGGAGHGGVRVVQHPGAGHQDVRAAEGLVRRVEERPRAGLVRDVRPHGHRARERRRQRARLVGARRVAQHQARAEGGQVRGDGAADAPRRARHDRHAPRQRLGAAAARRSRRGLGGGGDVTGVRHRTA

SEQ ID NO: 61406 - protein, 319 aa, Zea mays; identical to SEQ ID NO: 61146
  Clone ID: LIB3060-004-A5_FLI.pep

SEQ ID NO: 61407 - protein, 141 aa, Zea mays; identical to SEQ ID NO: 48129
  Clone ID: LIB3059-049-F1_FLI.pep

SEQ ID NO: 61408 - protein, 366 aa, Zea mays
  Clone ID: LIB3059-043-D7_FLI.pep
ECSFLAFTSQHGSLRPPTAAASRAMEQAAMPQVPRVKLGIQGLEVSKLGFGCMGLTGTYNAPLGDEAVAAVVAHAFRRGITFFDTSDAYGPRTNETLLGKALKQLPREQVQVATKFGIGQGAAGMTVCGTPEYVRACCEASLRRLDAGYIDLYYQHRVDTTVPIEDTIGELKKLVEEGKVKYIGLSEASPDTIRRAHAVHPITAVQMEWSLWSRDIEPEIVPLCRELGIGIVAYSPIGRGFFGGRGVIQQVSSESSLQRHPRFTTESLEKNKQIYLKIEDLAKKYQCSPAQLALAWVLRQGDDVVPIPGTTKTKNLDANVDSLKVKLTAEDLKEIGSQIRAEDVAGGRQYNSYAHTSWKYADTPKK

SEQ ID NO: 61409 - protein, 320 aa, Zea mays
  Clone ID: LIB3059-038-E12_FLI.pep
DRGALVEFYAPWCGHCKKLAPEYERLGASFKKAKSVLIAKVDCDEHKSLCSKYGVSGYPTIQWFPKGSLEPKKYEGQRTAEALAEFLNTEGGTNVKLATIPSSVVVLTPETFDSIVLDETKDVLVEFYAPWCGHCKSLAPTYEKVASVFKLDEGVVIANLDADKHRDLAEKYGVSGFPTLKFFPKGNKAGEDYDGDRDLVDFVKFINEKSGTSRDTKGQLTSEAGRIASLDVLAKEFLGASGDKRKEVLSSMEEEADKLSGSAARHGKVYVTIAKKILEKGNEYTEKETKRLDRMLEKSISPSKADEFIIKKNVLSTFSS

SEQ ID NO: 61410 - protein, 213 aa, Zea mays
  Clone ID: LIB3059-038-B7_FLI.pep
PSSHIGSMFFGCPKISSNEQTTLRNLARRQEFQNGHAKRSNSVLVVLDVEALGVGGSITLVGAEGSLRVGLAPGEEGSSSLLQVLHLASPGLEGARLEGTAEGERQGPRLLGAELVHGIEVAGGLLLALSTREEDNSRHSSRDGPLEGTDGVLSNHLRSHLLGVGAWSHHVGLQEGTLQEDMVLVERLVAGSKDGLSDVSAAINVMRAINKDL

SEQ ID NO: 61411 - protein, 145 aa, Zea mays
  Clone ID: LIB3059-031-E1_FLI.pep
ALLRYIHSGAGIKKREYGDFPLPIALVENSGRCKTNEHGEKILPDGTPWVPKLMKEITVVISNGSKPIHVDQKLIDGPNPNNRWKMFIPIILAVEYFLVVKGIRRAIHADIANGKVDDWEQRYRDLVGSRDPVEQKGSTTRNRKA

SEQ ID NO: 61412 - protein, 251 aa, Zea mays; identical to SEQ ID NO: 40987
  Clone ID: LIB3059-026-E3_FLI.pep

SEQ ID NO: 61413 - protein, 133 aa, Zea mays
  Clone ID: LIB3060-022-C6_FLI.pep
ISNPSVLSLAWRRQCPGLPAAQSCGASAASVPRLRLHVGRRHAVANRLEALPERLPTSGPAPTMVLTSNISVQKTLYEVLSVSEDATYDEIRAAYRKHGKSYAILHPEQIMTSSCSHPDRASRSSHPKSKSGT

SEQ ID NO: 61414 - protein, 237 aa, Zea mays
  Clone ID: LIB3060-022-A6_FLI.pep
RCSSHIPREDACSSPIDTMAVFSDLHTADGLKSLEAHLAGKTYVSGDSITKDDIKVFAAVPSKPGAEFPNAARWYETVSAAVASRFPGKAVGVNLPAGSAPAAAAPADEAEDDDDLDLFGDETEEDKKAADERAAAAKASSKKKESGKSSVLMDVKPWDDETDMKKLEEAVRSVQMEGLTWGASKLVPVGYGIKKMTIMLTIVDDLVSIDTLIEDHLTQEPINEYVQSCDIVAFNKI

SEQ ID NO: 61415 - protein, 224 aa, Zea mays
  Clone ID: LIB3060-019-G12_FLI.pep
TPAPTDPDPSPSPRVFSVEYFSVCVPPSSLRLVRAAVSGRSVVWFALKARGGGVAACSLRFHGGACRLLGSDLEFVMASKRILKELKDLQKDPPTSCSAGPAGEDMFHWQATIMGPPDSPYAGGVFLVNIHFPPDYPFKPPKVSFKTKVFHPNINSNGSICLDILKEQWSPALTISKVLLSICSLLTDPNPDDPLVPEIAHMYKTDRPKYESTARSWTQKYAMG

SEQ ID NO: 61416 - protein, 383 aa, Zea mays
  Clone ID: LIB3060-019-B11_FLI.pep
RSLIPPADRVGGRGSESSGMASEPVARAVAEEVGRWGSMKQTGVTLRYMMEFGSRPTQRNLLLSAQFLHKELPIRFARRALELDSLPFGLSNKPAILKVRDWYMDSFRDIRYFPEVRSRNDELAFTQMINMVKVRHNNVVPTMALGVQQLKKELGRSRKVPFEFDEIDEFLDRFYMSRIGIRMLIGQHVALHDPKPEPGVIGLINTRLSPIQVAQAACEDARSVCLREYGSAPDINIYGDPNFTFPYVTLHLHLMLFELVKNSLRAVQERYMNSDKDVPPVRIIVADGEEDVTIKVSDEGGGIPRSGLPRIFTYLYSTAKNPPELDRPNTEGVTMAGYGFGLPISRLYARYFGGDLQIISMEGYGTDAYLHLSRLGDSEEPLP

SEQ ID NO: 61417 - protein, 166 aa, Zea mays
  Clone ID: LIB3060-014-G9_FLI.pep
QRRRRDLADDLVEGAGVLEPEHDADAEDVADGAAGQRVGEGEPGGVTRLQAGVARLQLQPRRRLAVRGRRQPEPPREQHQRRRRHHDQVGGGADVVAADALRRRPLPAHPHGRQRCHRGPGRGVAPEAVEPGHGGGELGCHVWRLRRRRRTSHLCAAVPSSASAEW

SEQ ID NO: 61418 - protein, 315 aa, Zea mays
  Clone ID: LIB3060-014-D1_FLI.pep
LYTTTLARPLRLSPSGSGSSGCIRCATPRLLTQVPIPQPGGMAVSNNITACINFLVLLCTIPIAATGLWLASRHGGEDCARLARWPIAVLGALLLLVALAGFAGAYWNRRGLLACYLFAMAALITLLLALLVFAFAVAHDSGAYPAPGRAYQDYRLQGYSSWLRGYVADDPRRWEGVRACVAASGTCRKLAMDRSFIVPEQFYMSHLSPIESGCCKPPTVCGYAYANPTAWTGPAASPAADADCAAWSNDPGQLCYACASCKAGVLGGLREQWRRATVPLLVATVALIFVYVVGCSAFRNAQTEDLFRRYKWGNY

SEQ ID NO: 61419 - protein, 253 aa, Zea mays
  Clone ID: LIB3060-012-A9_FLI.pep
TFQHCSKQNLLLSLCLHFLYYTSATHFKKYNEPTPLLVMSRKATQEMMCMVCLKIQPVGPFCQTPSCNRLSMAKYYCNICKFFDDERTVYHCPFCNLCRLGKGLGVDFFHCMKCNCCLGMKLTEHKCREKGLETNCPICCDFLFTSSAAVRALPCGHFMHSACFQAYTCSHYTCPICCKSLGDMAVYFGMLDALLAAEELPEEYRDRCQDILCNDCERKGRCRFHWLYHKCGSCGSYNTRVIKTDTADCSTPN

SEQ ID NO: 61420 - protein, 833 aa, Zea mays
  Clone ID: LIB3060-002-F9_FLI.pep
GAPVFDQYCDADLGDNAMELVQRGPVDIERIDLRRGALAGCYGEQSARGHTPSSFNDDLGASLDSVANSSVHGGHGSVLPHLTPICAGTSRIPVPDDRRLDCAEDFDTNHLDKGFESDPVPLPVVYDRYDEPNHNEIVEVLALLEYNEEARITDAIEGLIREATSRTAALESVEHRRRQVLTAAGEVEQEPTEGIINEVEAEEACEHSEVPPTSPPSRPSPTRSSTATSSTTHRSPRRKSSFHARCTSHPTTTARLLHSLPSPNQAEVVESFELESARPPVVYNSHVELGLYSFTPTIFSVEQVIEEEVPVAMPTRCSRMDLNRDAYSVLDLPVVCIVGGPNSNEYGTNRVLHHTISLPDFSQELRGFQAITYYQAIINNLDDAQEQMDMAIATALRKSKQVYVSVSCNMADLFHSHSCSCRWDSALHKPPWPPPVQPVQFVIPGDGAQDWIPPWPSFSGEIEQLELMVLIELGSSPTFFSDRLSPQLLGVQIVGLMVKVANVVELRLLSVTSQQYAYATLPPSCTEEFDATHLNKAKILLNIMGVIIQLNYRRIFVHDGQPLESKPKEPLRIQKMMTGDSVMMDETDDSWFNCHKIKLPADCGYEFQMKYGLIGWLMGALLGYAQGANHKLFSPLTALHPLVVACCDHGSIMDALTTNFMSNNLVQLCGCLLSVAANKGNFSAFPWDPGDDGAVILGVLGCSSYPIKTKWLNYHQKCYRLLSKVAPPPLGSRHTGCVVNAQRGGDQVWMQPLVHDLGQLNGHQQREIQVSSIISDSISATLWKTVEQTNPSHSFTTGLAQSVGFKQPWPPPMEFECLDCACPPATWRIWSAA

SEQ ID NO: 61421 - protein, 181 aa, Zea mays
  Clone ID: LIB3060-001-G9_FLI.pep
THRGMATYDHAATPTPQSPGVGGVPFSSCIGDLLRFVLSSHAAAYPGDDTVAFPLSPSYCARLLNDGELFEKLEACIQQCLEEGRLPGPPAVVGIPAEEEGPEERGWKLLLPEKGAELKRMYDAVEFELHVQEPYFTQLRAGVKKVEGRLATGNYNRITQGSLLLFNKCLLLNVEVILFSK

SEQ ID NO: 61422 - protein, 177 aa, Zea mays
  Clone ID: LIB3059-064-A10_FLI.pep
NKPLMHWKLGQNTTRWFNTLLTNNVSVKNTLPCLVSRGREKTQLIISGCHIHELEMLYFFLSVCVPADLIFLRTHHLLSLLLCPLVSSKLSLGKLQSALVLANLQKLGDTLLIRSKASNLSDQAPDHGHPLRCFPLAVGRAQRQLALGDDMALVDAHEEARLRLRRRHEDEHFPVSR

SEQ ID NO: 61423 - protein, 168 aa, Zea mays; identical to SEQ ID NO: 37644
  Clone ID: LIB3059-060-E5_FLI.pep

SEQ ID NO: 61424 - protein, 174 aa, Zea mays
  Clone ID: LIB3059-059-G11_FLI.pep
QRTLCPVPPTQMASTSPEPAAADETIDTIHIRRLECSDHERGFVALLSQLSPCPDLTTSVFATRFAELAAQGDDHIILVAEDPSASDRRILATGCLFVERKFLRGCGKVGHVEDVVVDAAARGRGLGLRIVRRLVEISRDAGCYKVILDCTPELRAYYAKCGFVEKGVQMAVYF

SEQ ID NO: 61425 - protein, 171 aa, Zea mays
  Clone ID: LIB3059-058-G4_FLI.pep
ALLGSKPFFAFIGEHFESSEELKHLKEVLLDLFRGEVVENLNLAGVDRIYVCTAISPTTVYMMHCALRLKRSGTSIPRMELVEVGPSMDLVVRRHRLPAESLKKEAMKTAEHAKKMKNVTKDPVQGKLGKVYMPDQQVGKLTLSNDVKGLKRERREAKKNQDSKKQKVNPE

SEQ ID NO: 61426 - protein, 171 aa, Zea mays
  Clone ID: LIB3059-054-D3_FLI.pep
SPSPSSDITETGRQSSNQALSPLMRRASWMSLGMMVTLLAWMAQRLVSSKRPTRYASAASCSAATAEDWNRRSVLKSCAISRTSRWKGSFRMSSSVLFWYLRISRRATVPGRNLCGFFTPPVAGADLRAALVASCFRGALPPVDFLAVCFVRAIGESCERAGGAARSKDLK

SEQ ID NO: 61427 - protein, 108 aa, Zea mays
  Clone ID: LIB3059-054-C1_FLI.pep
LLDQVSCLLLHYRWSIGCTHLDEEKEANFSFKQHNITGCPDRQFGQHLVGQRFLCSWTNLEFLRSSSVKLAVILVMMKPVMANPVRKGQLRFHSRRKKTGHGSNVFIY

SEQ ID NO: 61428 - protein, 164 aa, Zea mays
  Clone ID: LIB3059-054-A8_FLI.pep
EPCDFMKLREGACSGMLRSSSLFCNLVLRFRQQIAQGDDRSLGASTLFNRLEFLQLLEVLPWLLPDLSFIKLLDYAILHFNSEIVHRASNNLCLGLHKLLEPQKSIGLLVVLIDGEARELLELEVVLVRRHVLDAACQHPGVVSHGLLLCAARGGNGGEGKQHE

SEQ ID NO: 61429 - protein, 166 aa, Zea mays
  Clone ID: LIB3059-047-F11_FLI.pep
KMSSVFSGDETAPFFGFLGAAAALVFSCMGAAYGTAKSGVGVASMGVMRPELVMKSIVPVVMAGVLGIYGLIIAVIISTGINPKAKPYYLFDGYAHLSSGLACGLAGLAAGMAIGIVGDAGVRANAQQPKLFVGMILILIFAEALALYGLIVGIILSSRAGQSRAD

SEQ ID NO: 61430 - protein, 226 aa, Zea mays
  Clone ID: LIB3059-047-C7_FLI.pep
DNNSATVKLLLIASGFTVLRIMKQKEMITESSYTASPLKPHHSKTTARNSLLIFLAAETGKLIGDHNVKLSSSLHDFLALLSGHVVCDFSAVCPVVHHKQLQLRNIVHDKLLKLVGEVVPGLLVRAISNVRHQGASLELPPDTGVDTLGPAPAWLEALVAVEVGPLELLDPLLHDLLSQQRHRHLQAPRAVCGEEGRSRGGGAAAAGGRAGGPALSCLRDRSGSFI

SEQ ID NO: 61431 - protein, 276 aa, Zea mays
  Clone ID: LIB3059-042-H3_FLI.pep
CLVWPSSPVRNAKPPSGEMAPKRGGRAPVPAKKKTDKVTNPLFEKRPKQFGIGGALPPKKDLHRFVKWPKVVRIQRQRRILKQRLKVPPALNQFTRTLDKNLATNLFKMLLKYRPEDKAAKKERLLKRAQAENEGKTVESKKPIVVKYGLNHVTYLIEQNKAQLVVIAHDVDPIELVVWLPALCRKMEVPYCIVKGKARLGSIVHKKNASVLCLTTVKNEDKLEFSKILEAIKANFNDKFDEVRKKWGGGIMGSKSQAKTKAREKLLAKEAAQRMT

SEQ ID NO: 61432 - protein, 108 aa, Zea mays
  Clone ID: LIB3059-041-D12_FLI.pep
QLSNHNRNTKLLPQLPTLSIQCDRTEHTAKENHTQPKSSRSSLLKTILLVVVSVRDADSSTYHTPSLERTIIALVADDTLAITFLAHATNHDARLLPAYDEIRMVLRH

SEQ ID NO: 61433 - protein, 290 aa, Zea mays
  Clone ID: LIB3059-037-B3_FLI.pep
RTAMMRPTSTLAMVVPSLAVAILCILVRSASAEFWLDEFTTDGDVRRDYDRSGRQVASLVLDQRSGAGFNSTRKYLFGEFSVEMKLVGGNSAGTVTSFYLTSGEGDEIDMEFMGNSSGSPTVLNTNVWANGDGKKEHQFYLWFDPAADFHKYKIVWNDKNIIFQVDDVTVRVFKRYDDLPYPDAKPMAVHATLWDGSYWATRKGEVKIDWSSAPFVVSYRDYTANACAVHGRNGGGSSSCPAGANEWMDRQSDDTDRLTVAWARRNCLQYNYCDDGWRFPQGFPGECARN

SEQ ID NO: 61434 - protein, 132 aa, Zea mays; identical to SEQ ID NO: 43695
  Clone ID: LIB3059-036-B4_FLI.pep

SEQ ID NO: 61435 - protein, 76 aa, Zea mays
  Clone ID: LIB3059-036-A10_FLI.pep
VWNHLFASHDVDPPTMVKASSREDAQPMTESSNAEVNTSSAVAAGESESHEIGSPKSLKDAIKPKHKRKKKKSDRS

SEQ ID NO: 61436 - protein, 186 aa, Zea mays; identical to SEQ ID NO: 44856
  Clone ID: LIB3059-028-H8_FLI.pep

SEQ ID NO: 61437 - protein, 109 aa, Zea mays
  Clone ID: LIB3059-028-C1_FLI.pep
AHQLIIPAQRNPLIESVVFPDLASDQALAIVRFISSSPSSYMYFIKSIIPDIGSFSLSMFGLNLSSLKCKSNQLPLEPLKRVTTTLVGFTTTLHFSGTISLFSFGIAHR

SEQ ID NO: 61438 - protein, 199 aa, Zea mays
  Clone ID: LIB3059-025-H12_FLI.pep
PPPKDGRRRGYGRLLAPMAHEKKLSNPMREIKVQKLVLNISVGESGDRLTRAAKVLEQLSGQTPVFSKARYTVRSFGIRRNEKIACYVTVRGEKAMQLLESGLKVKEYELLRRNFSDTGCFGFGIQEHIDLGIKYDPSTGIYGMDFYVVLERAGYRVARRRRCKSRVGIQHRVTKEDSMKWFQVKYEGVILNKAQANTL

SEQ ID NO: 61439 - protein, 278 aa, Zea mays
  Clone ID: LIB3059-022-G1_FLI.pep
SFCLLWGEGERERARERSSREASRWSSNEDVGGVQRAGGGGAGGAGGGGQPDAVAQDEGVAAGGALPGRVRAGRVRAARRPRPPRLLPHQPGAPPPQVVRGQGRGVLPVRRGAGQPGSSEPAARAVKQGRQRGAPRHRGLQDAARPRALPGQLHARPAHRLLRLRPLRQVHQLPASRIRPRGQGAALLGDHRRRLRRLLRRHRHAQRLMRQVARAVPARLLLLQRPRRAQVLREPQAQGHRCPRRRRRDLRCHFQGGGRVYCPDGAALIYHHQAEAMR

SEQ ID NO: 61440 - protein, 246 aa, Zea mays
  Clone ID: LIB3059-011-D2_FLI.pep
DAKFFIIKSYSEDDVHKSVKYNVWASTPNGNKKLDAAYQEAKEKSSETPVFLLFSVNASGQFVGLAEMVGRVDFEKTVEHWQQDKWTGCFPVKWHIVKDVPNSLLKHIILENNENKPVTNSRDTHEVKLEQGLQVLKIFKDHVCKTSILDDFGFYDNREKMMQERKAKQQQSLKKVIDVKLPSVTDMERSPKGETGSTELTGVGTDVLNKERLLGKAGEKNGEKGNDVAPQDLKTQTEKLAGLNGC

SEQ ID NO: 61441 - protein, 143 aa, Zea mays
  Clone ID: LIB3059-006-C2_FLI.pep
TLWTRVNITAANRITWPRGPHRSVPPVPVGVAVAAATVATAVAAATTTVAAAATVAAATAVAAAAITAPATAVAAASTATTVPTAAASTAAAGLGLVDGDVAAVQLLAVHALDGVPHRLLRGEGDEAEAAGPLRLPIEDDLGL

SEQ ID NO: 61442 - protein, 95 aa, Zea mays
  Clone ID: LIB148-050-G1_FLI.pep
HLPGGAGGQPAQGLRRGPGAQGPRRRPAHQERWHLRQPAPRQPARLLQGRAAPRLRRAAQAAGLGRRRRPVNYTTAASRTCCTKLQRYRANAWHG

SEQ ID NO: 61443 - protein, 223 aa, Zea mays
  Clone ID: LIB148-042-B4_FLI.pep
GPALFRHSQGGQEISGHGLDSGDDLRRHLIRPLLCRGWHRRRQRPPRLRHPGPRLLRHLPRRVRDQCHRVHRGRQGEAGVQALRHRQARALHRRGDRRERHVHDRAQGQPRGGHLRGGLGGEPAQGLRPGAGGQGPRRRPAYQERRHQRQPAPRQPARLPQGRAAAHLRLAAQTVGLGRRRRSVIAHRRRRSICNSTSSTTDRSRRRLAGTKPQILFTWITNM

SEQ ID NO: 61444 - protein, 151 aa, Zea mays
  Clone ID: LIB3059-022-D7_FLI.pep
RRCPTVQIFVVIFSGNEHPKMVVLQPDRFLSELTCMYERSTEKGSVWVTMKRSTLKGKAQLRKMENKGQEVEHRCLIRASNGKKNISTSVSLKEYTKFQASYATVLKAHMHALKKRERKDKKKAADAEKAIETAPKKQKKASSKKSSGSKS

SEQ ID NO: 61445 - protein, 252 aa, Zea mays; identical to SEQ ID NO: 37337
  Clone ID: LIB3059-015-G8_FLI.pep

SEQ ID NO: 61446 - protein, 124 aa, Zea mays; identical to SEQ ID NO: 41198
  Clone ID: LIB3059-013-E7_FLI.pep

SEQ ID NO: 61447 - protein, 188 aa, Zea mays
  Clone ID: LIB3059-005-E4_FLI.pep
LQPSIHELPFSIYTHGGVDRAHQGVRLRRAGAGGLCLPQPLDGLPGRQGPQKLQGVLPHHVRHRVGEQGRQALQLRAEGAPELSRVDARFLRHTAAGRSAAPDHRRRSGRHLHRREVLLLQGIRHRRSGQPSQDWGAQLLGVAWADHLHSIFRHQPAHQGDALNFGFICELQAGLTAQVTHGLSIKTL

SEQ ID NO: 61448 - protein, 243 aa, Zea mays
  Clone ID: LIB3059-001-D10_FLI.pep
AGKWSQAPIASLLPPYLSPALSSVCENPILQPYRIQQAITAGILPLSPLFLQQSSALLHQLPLVHLLAQNIRAQQLQQLVLANLAAYAQQQQLPLVQLLAQNIRAQQLQQLVLANLAAYSQQQQFLPFNQLAALNSAAYLQQQQLLPFSQLAAAYHQQFLPFNQLAALNSPAYVQQQLLPFSQLAAVSPAAFLTQQQLLPFYLHAAPNVGTLLQLQQLLPFNQHALTNPTAFYQQPIIGGALF

SEQ ID NO: 61449 - protein, 414 aa, Zea mays
  Clone ID: LIB148-066-E4_FLI.pep
SRAPRFPRRWISGGLVEMGDAVDDIICATDAAVAVEDAASGKPAMLSSLGGQGEEEHEEKDNEDKSGESEVINPPEDAGGEATSPLEGLKPRLSKGNQSHGPNAVKSKSPTSGDEGQTRKKAPNSSLPKAPIVQVSHGDAGVGSNKDGKNESRSSSVDATLLDDSKEKRKTQKPLAQLFSIKSDEEQSNGESAKPRKVGSIPSYGFTFKCDERSEKRREFYSKLEEKIHARELEISNLQAKSKETEEAELKMLRKSLNFKATPMPSFYKEPTPVKVELKKIPPTRAKSPKFGRSKNKSTPETEENATADQPAHLSLEENVSQTGVKKPTPLNPAKKPQRKSLPRLPSEETGPLDATSRQLIKSAKLDAVSAPETGSATGQAQLQGSQTETDSGQGPVEAGANPDEQDASEQSVV

SEQ ID NO: 61450 - protein, 214 aa, Zea mays
  Clone ID: LIB148-061-B5_FLI.pep
LTPMVFQLLVPSFGEHDLGELGVVDLAIAVGVGLAEHLGELVVGEALAEVLEDVAELFAGDEAVLILVEDAEGLAQLLLVGAAGLPHLARHQGEELLEVDGAAAVRVHLVHHALQLLLRRRLPQRPHHRAQLLGRDRPVAIFVEEAERLPELLDLFLGQLLLHLLHPPCLPPRPRFFNPPPLTDRSLLAPSETPHDRWTTTHCSSRGRFALVEE

SEQ ID NO: 61451 - protein, 165 aa, Zea mays; identical to SEQ ID NO: 50227
  Clone ID: LIB148-060-E1_FLI.pep

SEQ ID NO: 61452 - protein, 76 aa, Zea mays
  Clone ID: LIB148-058-E7_FLI.pep
PEGEGVRRGGGAPDRVARHGQPRPRPDPKDSAGKCDELRAVQCVMPRDRRQVEVVALAFHFQKDESAANLYANRNN

SEQ ID NO: 61453 - protein, 418 aa, Zea mays; identical to SEQ ID NO: 55743
  Clone ID: LIB148-058-E5_FLI.pep

SEQ ID NO: 61454 - protein, 218 aa, Zea mays
  Clone ID: LIB148-057-C7_FLI.pep
ESACVQPQAGVGTMSSFTGTQDKCAECDKTVHFIDLLTADGVTYHKTCFKCSHCKGILSMCSYSSMDGVLYCKTHFEQLFKETGSFSKNFTPGGKSSDKGELTRAPSKLSSAFSGTQDKCAACQKTVYPLEKLTLEGESYHKSCFKCSHGGCILTTSSYAALNGVLYCKIHFAQLFMEKGSYSHMMKKSPSQDTLPDMAADEQPPEPAPPQDGEGEDN

SEQ ID NO: 61455 - protein, 111 aa, Zea mays
  Clone ID: LIB148-051-F4_FLI.pep
QRLLQFLTSSTNYTSLVYARACSKREYMGLLLLPIHRSIQVQGARAAACHAGSSARPAMCARVGPGHIKSSVRRRSRSRAHMTSARRPRPRPQRRRRRRPRRGQHAWQTGP

SEQ ID NO: 61456 - protein, 144 aa, Zea mays
  Clone ID: LIB148-049-B9_FLI.pep
YLSLCSQFASSTYCGTVANQSQGCAPPDCVVSMSLAPKRSRLPAPGDADELSVIEDQIAWIVHIITSIVKKSPQRGRGAALVVSLTLIKASTSRGLGHLPLIGVVVELVMVHWYGCKLREKDLETVMQHVHTKMATMVTFALVL

SEQ ID NO: 61457 - protein, 228 aa, Zea mays
  Clone ID: LIB148-044-H11_FLI.pep
RYGEAATHVGEQDVHDYGEDEYHCSCELDVPPPHGVPEAASLALEAHRVPLHGCRLVHQHLQTVTPLQHPVDVVHHHAPDLVHLSPHAIYPVRAGVVGVVVHLLGQNAGELVVHGVRQRGERRSAVRLDEPPVDVLQEREGDTPPGGVVGHAERREAVGALDVEHVEVLRVRHVAVVVAAAREALQDLPRHGARVAARRRRAVVLRQHHRAARHHAVLDLAHCSGRNN

SEQ ID NO: 61458 - protein, 245 aa, Zea mays
  Clone ID: LIB148-044-E1_FLI.pep
NRPHRATVPCQLPSITAKSNNSLLFVFAPRSIQEGEAEGGMAENPQLFGNGMPVPFYSEMFVLARDGVEFHVDKIPSAPGGHVKTKGTIYLSNIRMVFVANKHVGNFFAFDMPLLFVHGQKFNQPIFHCNNISGFVEPVVPDNQNRTLYSTHTFKVLFKDGGCGTFVPLFLNLTASVRRYNQFETQSAASMAPRVDPLQAVQTPVDDMMRHAYVDPNDPTKIFLQQPAPESQLRRRNYHGPADAN

SEQ ID NO: 61459 - protein, 278 aa, Zea mays
  Clone ID: LIB148-012-B12_FLI.pep
SMGLLSNRIGRESLKAGDHIYSWRAAWVYAHHGIYVGDDKVIHFTRGRGQEVGTGTVVDIILVSSTPKRSNTPCPVCTDETSDSSTETNGVVSSCLSCFLAGGALYRFEYAVNPALFLAKARGGTCTLAPSDPDDTVARRARYLLSNGFRCYNLFKSNCEDFAIYCKTGLLVAEQGVVGQSGQAISIIGGPLAAVVSTPFRLVTTNIYGMAVMAVGVYCASRYAADIGNRRDVVKMEVEDLTAGLASGRICAVENIAQLVAPEAEGPADATATATLAA

SEQ ID NO: 61460 - protein, 253 aa, Zea mays
  Clone ID: LIB148-010-B3_FLI.pep
KICVDSLAAKPESQKATPRKLAELFVNIAAEKGSGMATFVHRKYSDKEDSDIFKCYDSCSDDVEEAVAHLNGLVREPTDAKFLELKSWLSSTLGGTSTCEDACKDLPKTSDKDDVVNFSLDFEKLQRVTLDLITEASGTMSAGIALPPSNAGAPSYGAAAPSGGSADAPAGASEGPASASGPSGDDAPASGAGASASAADAPAAAASSGPSSAPAPSSSSESSAAPGPSSDGTSSAPAPSSGDDSDSDDDGSA

SEQ ID NO: 61461 - protein, 254 aa, Zea mays
  Clone ID: LIB148-005-D10_FLI.pep
WTIMAPLLASMLLVGLAAGSEEEEDGGGKKKPHVNHGKFKAEPWTDGHATYYGGRDGLTDTTDSGACGYKGELGKDYGTLTAAVGPSLYTNGTGCGACYELKGPKGTVVVTATNEAPPPVSGQKGEHFDLTIPAFLKIAEEKAGIVPITYRKVACERKGGIRYTITGNQHYSEVKVTNVGGAGDVVALWVKGNKRVKWTPMKRSWGQLWTTEVDLTGESLTFRVMTADHRKATSWHVTPRDWQFGKTYQATKNF

SEQ ID NO: 61462 - protein, 143 aa, Zea mays
  Clone ID: LIB148-002-H1_FLI.pep
WINCSNKQHRMQLRCADIYIFLPCIGVYRRRLLIRVRGHLVHGLHVVAALGEPEPAHAVLRVAPPLVVVVQHPGRPLLLGHPHLRVGGDVAHQLHHADPHRHPCRREQRVHLRPNPARRHVFFPRFCKSEDRSRSLDLLGLEM

SEQ ID NO: 61463 - protein, 175 aa, Zea mays
  Clone ID: LIB143-057-C12_FLI.pep
GLQMTTAARPTWAPAKGGNEQGGTRIFGPSQKFSSRDLAAHTSLKPRYSLSLSPTSLCDLYLFVEPSRPRCMDSLTSYLSRQLVHGRFLLCPYNHNQSFHRLAPGIFDLVPRSPIRAPAVGSMLPRDSRHGVAALYTGAQPWPSEFRACPPQLSSTGCLILPDSLSVPRVIYHYL

SEQ ID NO: 61464 - protein, 249 aa, Zea mays
  Clone ID: LIB143-053-F2_FLI.pep
AKAKRLDSHSNCRLDLSNGLEESLPRSTLLKSSMVTEQLCVDTIRNNSTLTLVLQVVGTAELGEAPLSALNNLLAARELELGASQSFTGMCSIVVLASNRKEYLTNVHPSTGALRLAKGTPHSSLEPISPSTRKHLVDTKDMEGVNPDPKVEGILSCRLGHVLVAGNTGSLKSLTGDILLLPRDKVHTVGELINTLSLHANIVDPNLGVRDTTAVPGLGVWLVLDLAIASRRPSPHGDGSREEAAAANE

SEQ ID NO: 61465 - protein, 155 aa, Zea mays
  Clone ID: LIB143-050-A3_FLI.pep
AISAMPTNLYGPHDNFHPENSHVLPALIRRFHEAKATNAPEVVVWGSGSPLREFLHVDDLADAVIFLMGHYSGMEHVNVGSGSEVTTKELAELVKEVVGFQGNLVWDSSKPDGTPRKLMDSSKIQGMGWKPKIALKEGLVETYKWYVENVISNKK

SEQ ID NO: 61466 - protein, 137 aa, Zea mays
  Clone ID: LIB148-038-D9_FLI.pep
LFVVVANPSPISSRSPGGNFAPETLARRITSKGENFLWLQRLKDAAAPMSDDTGGRALPKFGEWDVNNPASADGFTVIFSKARDEKKAPPTQGHIRNNRSVSADSKDSRAEKMTSYNARTNASKKWFCCVSPSPTQS

SEQ ID NO: 61467 - protein, 145 aa, Zea mays
  Clone ID: LIB148-037-B11_FLI.pep
RSVGPAPDDVEAHLAGVGGLDLALDAVQLPPEPVLGAGVQHLAPGACSVRGPGEEEDLALLAVLDGGEVEVVDRVAALVGGEAVGEVAVALVRSAEAVHLDLHVRVVDPEHDEPEAPPRLQLPELHLALVVHRKAGRRVRHGCFC

SEQ ID NO: 61468 - protein, 179 aa, Zea mays
  Clone ID: LIB148-036-B7_FLI.pep
GSGNLRDAVRLPPGEDLNEWLAVNTVDFFNQVNILYGTLMEFCTPATCPTMSAGPKFEYRWADGVQIKKPIEVSAPKYVEYLMDWIEAQLDDESIFPQKLGTPFPQNFKEVVKTIFKRLFRVYAHIYHSHFQKIVSLKEEAHLNTCFKHFTLFTWEFTLIDKAELAPLIDLIESIVSVC

SEQ ID NO: 61469 - protein, 375 aa, Zea mays; identical to SEQ ID NO: 38457
  Clone ID: LIB148-036-A10_FLI.pep

SEQ ID NO: 61470 - protein, 196 aa, Zea mays
  Clone ID: LIB148-035-H2_FLI.pep
SDPLTVRPFCWVVLLHASPWSGTQRRRSREMECLLGLLKVRVVRGVHLAICDPLTHSSDPYVVLRHGQQKVKSSIKYRTINPEWNEELTLSITNMMNPVKIELFDHDTFTKDDSMGNAEFSILNFVEIAKQDLSDVPDGTVMKTIHTEKGSCLATDSHITCKDGKVSQDILLRLRDTETGDLVLRLTWVNIPGVAR

SEQ ID NO: 61471 - protein, 183 aa, Zea mays
  Clone ID: LIB148-034-E3_FLI.pep
VSSTMGTKMKKGILKPFRYISNMMDGKEPEMQIGLPTDVKHVAHIGWDGPGSTNSGSSNNNNAGGAPSWMKDYHSAPLDSSSFRSESGGTAAANPWASQEIVMDGASIGETSFRDTKSEAGGGDDSPPSPATRRTRRQHRSRGSATSSMDDTTGGEGGAEEKEKRKEKGKKGARKNRKKDKPA

SEQ ID NO: 61472 - protein, 371 aa, Zea mays
  Clone ID: LIB148-033-D3_FLI.pep
SPRRWISASPTRPPARPGVGRGMGLLGRRTLLRLLALASAAVAVAVTVEAYEGDADPLYRACVEGCQKTGSLKETSIKHCMVPTDGQPVDKSWYTHEPLYLQWKDWNCKSECRYHCMMERENERAKLGLQPVKYHGKWPLKRASVFQEPLSAALSALTLVVQFNGWLSFFLLLYYKLPLRPETHKTYYEYTGLWHIYGLLAMNSWFWSAIYHSCDTIWTEKLYFSSDAAFLGYSLILAILRTLNLRDEASRVMVAAPILAFVTTHILYLNFYELDKGLNMKVCTVIIIAQCLLWALWAVMTRHPSRLKIIFVAIGGAAAVLLEASDIPPRWGYVDGRAICLAVAIPLSYLWWSFAKEDAEMRTSAILKKAR

SEQ ID NO: 61473 - protein, 210 aa, Zea mays
  Clone ID: LIB148-033-A11_FLI.pep
EVGSKRETDLGKAEKFKVRGKQMAVLNYSKASFLPVQVYHSSFADDDGITKACSCPLLPLKTHIKGPAPASDPDKADIVDEAITFFRANVFFKNFHVKSSADKLLIYLTFYINIALKRLEGCRTLAVGTKAIINLGLEKVPVPGEPGFPFPGLFTLPQSQEEAELLRNYLKQIREETSGRLLNCAYRANGFPNKWWLAFAKRKFMNIVIL

SEQ ID NO: 61474 - protein, 376 aa, Zea mays
  Clone ID: LIB148-031-F11_FLI.pep
PTKARQARPAAGEREEAEGDSRELREATAMGDSSDSVSVDVERIFFGGKGHRVRTRHGPLSVSVYGDEDKPALVTYPDLALNHMSCFQGLFFCPEAASLLLHNFCVYHITPQGHELGAAPISADVHVPSVDDLADQVADVLDFFSLGSVMCLGVTAGAYVLTLFATKYRERVLGLMLVSPVCKAPSWSEWLYNKVLLNLLYYYGTRGIVKESLLQRYFSMDVRGNGQDPESEIVQACRSLLDERQGTNVWRFLQAINRRHDLTESLEKLQCQTLIFVGENSQFHADTVHMTTKLDRRYCALVEVQACGSLVTEEQPHAMVIPMEYFLMGYGLYRPSQQESSPRSTLSPFCISPELLSPESMGVKLKPIKTRISRNV

SEQ ID NO: 61475 - protein, 354 aa, Zea mays
  Clone ID: LIB148-030-D2_FLI.pep
RGPKSKPCECIEEEPPTPSQPAMVAAEDPEHFFAASPPLRDAAVVAASLQEFVARNSHASSDGVGRRRIVCVTSGGTTVPLEQRCVRYIDNFSSGHRGAASTEYFLKAGYAVIFVHRRGSCQPFSRFLPDDSFLQFFDVTTDSKVQVAESQATVVKRAIGDYRKATEGGSLLKLPFTTIFEYLQLLKMVATSMSCVGLHGMFYLAAAVSDFYVPWDSMAKHKIQSAGGPLDMKLSQVPKMLPVLRNHWAPLAFCVSFKLETDPDILVQKAETALNKYRMDVVVANLLATYKEEVVIISNGKSNTIRRCSKGEDLEEHIIKLLEKSHSKYIYSSTEGCSKNDYEKLIPLGIKSLA

SEQ ID NO: 61476 - protein, 160 aa, Zea mays
  Clone ID: LIB148-023-A4_FLI.pep
APPIQIQIQGLVMASKRILKELKDLQKDPPTSCSAGPAGEDMFHWQATIMGPPDSPYAGGVFLVNIHFPPDYPFKPPKVSFKTKVFHPNINSNGSICLDILKEQWSPALTISKVLLSICSLLTDPNPDDPLVPEIAHMYKTDRPKYEATARSWTQKYAMG

SEQ ID NO: 61477 - protein, 177 aa, Zea mays
  Clone ID: LIB148-018-F5_FLI.pep
LKKKKRRRLEQVMSSLPGGFLCVRVLRGIDLVSCDAKGSDPYVVLSLDGQKLKTSVMKKTVNPLWNEDLTLAVMDASAPIKLEVFDKDTFSKDDMMGDAEFDVEALAQIVQMDLEDIRSGTVVRTVRPGGTGSCLADESHIIWDKGHVVQDLLLRLRNVDSGVVHLQLRWVATPPED

SEQ ID NO: 61478 - protein, 154 aa, Zea mays
  Clone ID: LIB148-017-H12_FLI.pep
ARPSPFVTITSSQPTKMSRVTAAVLFYILAVAALSAAEAPAESPKEGSAAKAPEAAKRTAAPAEAPGAASTPVAAAAPSSSSRKSGPATAPATASTPPSSTDEELSPSPPASTAAASPAAEGPAADDSAGAAALGSGAAIAGVAAAVATMIFFY

SEQ ID NO: 61479 - protein, 459 aa, Zea mays
  Clone ID: LIB148-013-B4_FLI.pep
WSSAPAITRRERSARLHSRAIRAAARARLVLLGGIFFLRAPSAPPHRPAVSRLVFGFVCSGGGRPAVRGAVMPEVGQYGYKKTDGICDSVCGEPVSKTALTMSRLKCALRGFDLRALMVLLIGVPILILMIYAHGQKVTYFLRPIWESPPKPFKTIPHYYHENVTMENLCKLHGWKVRDFPRRVFDAVLFSNELDILEIRWNELSPYVSEFVLLESNSTFTGIKKPLHFKENKHRFGFAKSRLTYGNIGGRFVKGENPFVEESYQRVALDRLLKLARIEDDDLLIMSDVDEIPSGHTIDLLRWCDGIPDILHLQLRNYLYSFEFFLDDKSWRASIHKYQAGKTRYAHFRQADELLADSGWHCSFCFRYISDFAFKMQAYSHVDRIRFKYFLNPERIQDVICRGADLFDMLPEEYTFQEIIAKLGPIPSTYSGVHLPSYLLRNVDRFRYLLPGNCRRESG

SEQ ID NO: 61480 - protein, 109 aa, Zea mays
  Clone ID: LIB148-012-G11_FLI.pep
SSNPKLTGRRRPHELVTSSSMPLILRYLFLTLNNVAPCSVDDRMRLDYGVSIMARNCRALRSQSHTRIRCAACLSAADPQPHDLCWSPYNGRALCMTSADALPPKRRWW

SEQ ID NO: 61481 - protein, 81 aa, Zea mays; identical to SEQ ID NO: 54180
  Clone ID: LIB148-012-E5_FLI.pep

SEQ ID NO: 61482 - protein, 228 aa, Zea mays
  Clone ID: LIB148-012-B6_FLI.pep
AEAMDGQRRQQWPRSRSGAAAAPLLLLLLLAVSLGGHGDHGAAAAGVAPAAGNGMTELQKHVAFFDRNHDGIITFDETYQGLRDVGVGDVTAKASAAFINGALGPKTRPDNSNSSSTDIYVENIQKGKHGSDTGAYDAQGRFVPAKLDEMFTKHAKTVPNALTKDELDEMLKDNREKMDVAGWLGAKSEWEMLYKLAKDKDGRLPKDTVRAVYDGSLFYQLAAQGKKG

SEQ ID NO: 61483 - protein, 120 aa, Zea mays; identical to SEQ ID NO: 42991
  Clone ID: LIB148-007-G7_FLI.pep

SEQ ID NO: 61484 - protein, 139 aa, Zea mays
  Clone ID: LIB148-003-C6_FLI.pep
IHSQALLYEVVAEPLDHHVALAGGHGLVVDADHHRLPCLLHSYASRSLLPADDSAGLALDDHVLGGAEEEAGRGQEPGLVEVLHDVGHLLCLELWECGALGPNGAVVADYGSGGQVVALDLAHEVLIDVCLPRHPVRPA

SEQ ID NO: 61485 - protein, 151 aa, Zea mays
  Clone ID: LIB143-070-A1_FLI.pep
RGAQRRWRRLAPTTRSCPSTSPPPSTRAPSTSSATRLVRFQLCRMVTCTSSNHAQSASTLLAKTSQKVVDENLEKLKKVLEVYEARLTKCKYLAGDFLSLADLNHVSVTLCLFATPYASVLDAYPHVKAWWSGLMERPSVQKVAALMKPSA

SEQ ID NO: 61486 - protein, 428 aa, Zea mays; identical to SEQ ID NO: 47785
  Clone ID: LIB143-068-H4_FLI.pep

SEQ ID NO: 61487 - protein, 108 aa, Zea mays
  Clone ID: LIB143-066-D10_FLI.pep
PAQLQLQQEQPQLVPQLQVLQSQPPPSVAASKPPALALVVGAARTVVLMLLAAAVSTLGDMQLHELPQEQLEPQSHLPLLQDMITGEGEQALAVLGGGGRRRRGVVPC

SEQ ID NO: 61488 - protein, 260 aa, Zea mays
  Clone ID: LIB143-063-E5_FLI.pep
CTCILQASSGALPVALAAEMAANLEDVPSLDLMHELLRRMKCSSKPDKRLIVIGPPGSGKGTQSPIIKDEYCLCHLATGDMLRAAVAAKTPLGIKAKEAMDKGELVSDDMVVGIIDEAMKKPSCQKGFILDGFPRTVTQAQKLDEMLAKQGANVDKVLNFAIDDAILEERITGRWIHSASGRTYHSKFAPPKSPGVDDVTGEPLIQRRDDTAEILKSRLEAFHRQTEPVIEYYSKRGLVVNLPAEKPPKEVTAEVLKALS

SEQ ID NO: 61489 - protein, 189 aa, Zea mays
  Clone ID: LIB143-062-A9_FLI.pep
SNLTATRAFLFQTTCAHVHVRTAYPLQLTSRYRYCRRTARIDLLGRYVHKNASATTTLASLIRRSHLDVLARRRVRVAGGRVRGVDGRASAVVAVRAGEGHARAVVASGGVRSVVGLLLVLVGVGLVLLGAGRLLGHLLLAVRGRRRLARLALHLCRPLLHLLLRRAHHVLRLHLRCLHPVLVWLPSLS

SEQ ID NO: 61490 - protein, 224 aa, Zea mays
  Clone ID: LIB143-061-A2_FLI.pep
VPRPTRYPRVPQIRSARPIRNLERSRRRPQQRGGRSTTAPQGSYSRRSGSTGSGSSEGKMSSVFSGDETAPFFGFLGAAAALVFSCMGAAYGTAKSGVGVASMGVMRPELVMKSIVPVVMAGVLGIYGLIIAVIISTGINPKAKPYYLFDGYAHLSSGLACGLAGLAAGMAIGIVGDAGVRANAQQPKLFVGMILILIFAEALALYGLIVGIILSSRAGQSRAD

SEQ ID NO: 61491 - protein, 265 aa, Zea mays
  Clone ID: LIB143-058-G2_FLI.pep
FGDYDHKKIYVGEESPCYAILTRTGTRAVKVKMTKACTDPFCSLGGSIDRLRKGAIGDAELNELVRVRDGVDHGRVGTQTISPRHQVRDLGLVQQGDPGDLLHRLHPADMRHQSDVQVPDAVPAEVALPLAELRESLLEELQGRGQLPRRLLLAPVVVRSLQYADRPRQLVVDVLRPEPLDGAGVSVGGEEGRRAGGPDLVDVLDDDQRLGDGLAVVEQDGDLLVHRVRPQQQLALPAHHLLHELELDALQLQGDQDADHERARP

SEQ ID NO: 61492 - protein, 189 aa, Zea mays
  Clone ID: LIB143-057-D12_FLI.pep
GLGMTLRSFSAFATAATQLGAFGTLLNSTLRLRLLGLGHLSLLRLLLILGLLDALLDLTKSSFSSSITDLRLLSSLLLDHFQGSTHNGPRVWLLGGTAPLLDSFSMDVLLVLLPVHCCPGKLCRLQAVVEVALAFRVGKKENLRISTNKPDAFPRIDLLATEAAEFRLQHHLLSFKKSSPKTVYFTQTK

SEQ ID NO: 61493 - protein, 325 aa, Zea mays
  Clone ID: LIB143-056-D6_FLI.pep
WRLVPSSGRARRASTAPMPMLLPPPPLLLITQLLPPIPSAPSFGPLPSAPLAAPPLAPAMSSSSPPPRPDDDDGAQEVGAGDGRSLGYGEAEYWDARYVEEGGAPYDWYQRYDALRPFVRCFAPPASRILMVGCGSALMSEDMVTDGYVEIVNIDISSVVIEMMRKKYFDVPQLQYLRMDVRDMSMFPDESFDCAIDKGTLDSLMCGVDAPLSAAQMILEVDRLLKPGGTFILITYGDPSVRMPHLNQSACDWKVVLYILPRPVFTGKITRRVLDPVPLTERGRLPDGFVPEDPDSHYVYVCKKMQGLTGTGSPTVNHIERQGEE

SEQ ID NO: 61494 - protein, 208 aa, Zea mays; identical to SEQ ID NO: 47551
  Clone ID: LIB143-053-E2_FLI.pep

SEQ ID NO: 61495 - protein, 271 aa, Zea mays
  Clone ID: LIB143-053-D12_FLI.pep
SRGKSFPARNRKHHHHHHHQSLRFPSAAAAAAAEEVDEMLSADIPPNQTIYLNNLNEKVKKEELKRSLYALCSQYGRILDVVALKTQKLRGQAWVVFSEITAATNAFRGLQDFDFYGKKMRVQYAKTKSDCIAKEDGTYAPKEKRKKQEEKAAEKKRRAEEAQQAGPNAAAAQSNGTGYQASRLAKASQEPPAPPNNILFIQNLPDQTTSMMLQILFQQYPGFREVRMIEAKPGIAFVEFEDDGQSMVAMQALQGFKITPENPMAISYAKK

SEQ ID NO: 61496 - protein, 451 aa, Zea mays
  Clone ID: LIB143-047-H3_FLI.pep
FDRIRVGLIQFDSAGGMASEKHFKYVILGGGVAAGYAAREFAKQGVKPGELAIISKEAVAPYERPALSKGYLFPTNAARLPGFYVCVGSGGEKLLPEWYSEKGIELILSTEIVKADLSTKTLTSAAGANFTYEILLIATGSSVIKLTDFGTQGADSNNILYLREIDDADKLVAAIQAKKGGKAVVVGGGYIGLELSAALKINDFDVTMVFPEPWCMPRLFTADIAAFYEAYYTNKGVKILKGTLAVGFDADANGDVTAVKLKDGTVLEADIVVVGVGGRPLTTLFKGQVAEEKGGIKTDASFETSVPGVYAIGDVATFPLKMYNELRRVEHVDHSRKSAEQAVKAIKGKESGEPVPEYDYLPYFYSRSFDLAWQFYGDNVGETILFGDSDPTSSKPKFGSYWIKDGKVLGAFLEGGSPDENKVIAKVAKTQPPVANLEELKKDGLQFASKI

SEQ ID NO: 61497 - protein, 290 aa, Zea mays
  Clone ID: LIB143-046-G7_FLI.pep
RILVLRRPIGGAADPWDAGLLPGGCVDRVRRAAHLALAVHPRHRLHLVHGVLVAPQPSGRREEEAFGERGTGFPTGTLHELGVVRDHKTAVGVNAPVERNISIGVSSHEDRLSGAIIQDKCKFPTYVPHNLICRIRAPVPQGPVSLDDDADLVSAFAQPVLLLEHGNVRNCSLEHAEYAVHRSKQPGEEGVLVARGERQGAGPAKVDGDRVGPRLSEPVREARRAAAPRGARLPQPLRARRHRPIEHRQHLRPELRCDPRGRPRSPSPRTFPLPRAAELANRDNTSVSGI

SEQ ID NO: 61498 - protein, 168 aa, Zea mays; identical to SEQ ID NO: 48297
  Clone ID: LIB143-043-H1_FLI.pep

SEQ ID NO: 61499 - protein, 276 aa, Zea mays
  Clone ID: LIB143-039-C4_FLI.pep
ASCGRRLPFGTPSPPSGEMAPKRGGRAPVPAKKKTDKVTNPLFEKRPKQFGIGGALPPKKDLHRFVKWPKVVRIQRQRRILKQRLKVPPALNQFTRTLDKNLATNLFKMLLKYRPEDKAAKKERLLKRAQAENEGKTVESKKPIVVKYGLNHVTYLIEQNKAQLVVIAHDVDPIELVVWLPALCRKMEVPYCIVKGKARLGSIVHKKNASVLCLTTVKNEDKLEFSKILEAIKANFNDKFDEVRKKWGGGIMGSKSQAKTKAREKLLAKEAAQRMT

SEQ ID NO: 61500 - protein, 266 aa, Zea mays
  Clone ID: LIB143-037-H4_FLI.pep
TRHPSFPPPFCPHFVPFTPETGEQSRAQQNAEARGGDRLLDQPSPLLSPMAARVLAALALALALALVAVPAPTRASNDEGDALYALRQRLSDPNGVLQSWDPTLVTPCTWFHISCDQVGRVVRLDLGNSNVSGSIGPELGRLVNLKYLELYRNNLDGEIPKELGNLKNLISLDLYANKLTGGIPKSLSKLDSLRFMRLNNNKLTGSIPREFAKLSNLKVIDLSNNDLCGTIPVDGPFSTFPLRSFENNSRLNGPELQGLVPYDFGC

SEQ ID NO: 61501 - protein, 106 aa, Zea mays
  Clone ID: LIB143-033-D11_FLI.pep
SCLAAAASATVAPAAPAAAHATACPLTWRPPPPAASRPRSSPRRPPRPAPAASRRPPRAAAATATPATAAPAAAAPAAAATEPVRRWRTRVERTTTSRINIIAASK

SEQ ID NO: 61502 - protein, 94 aa, Zea mays; identical to SEQ ID NO: 45349
  Clone ID: LIB143-019-A3_FLI.pep

SEQ ID NO: 61503 - protein, 489 aa, Zea mays
  Clone ID: LIB143-012-F1_FLI.pep
NPPTIMSLSTLSHPAAAAAGSGKSLFPAGPAAQSVHFPKARLPVPAAVSAATAAVHAEDRVSSLTQVSGVLGSQWGDEGKGKLVDVLAPRFDIVARCQGGANAGHTIYNSEGKKFALHLVPSGILHEGTLCVVGNGAVIHVPGFFGEIDGLESNGVRCGGRILVSDRAHLLFDLHQAVDGLREAELENSFIGTTKRGIGPCYSSKVTRNGLRVCDLRHMDTFGDKLDILFKDAASRFQGFQYSKSLLKEEVERYKKFADRLEPFIADTVHVLNESIKQKKKILVEGGQATMLDIDFGTYPFVTSSSPSAGGICTGLGIAPRAIGDLIGVVKAYTSRVGSGPFPTELFGEEGDRLRKAGMEFGTTTGRPRRCGWLDIVALKHSCQINGFSSLNLTKLDVLSGLSEIKVGVSYTQTDGQKLQSFPGDLDTLEQVQVNYEVLPGWQSDISSVRRYDELPQAARLYVERIEELVGVPVHYIGVGPGRDALIYK

SEQ ID NO: 61504 - protein, 336 aa, Zea mays
  Clone ID: LIB143-011-A9_FLI.pep
STLCWPIDPTHFFRRHHHLLHTHTTVLFIRTHCFSSEVGACGEDLVGQVAVVPDLVAGEHLEVLLEEPGKPQERLLVRGLVRPGVDWVEDFRRHALDLSRDLQAKDLGLLVVGGEKLAGVDGVDDLPGVGKPDPLAHTVPAARPAGVDEPPGGAVLLHLLGEHGGVLGRVEHDEGRAEAGGEGGLWLLDAVLRAGDQGGVSADEVVHGLRQVQLAHRREHAEGVARQQDHVLGVWADAWYLGVGDVLDRVGSPSVLGDRFVGVVNFTSMLIEDNVLQHGSELDGVPDIRLFLLRQVYALGIAAALDVGHAILAPAVLVVADQKPVVIRRQRRLPGT

SEQ ID NO: 61505 - protein, 459 aa, Zea mays
  Clone ID: LIB143-005-F3_FLI.pep
DPTVPLADRLIVMSPSGVQKERMVAEDMYVMAADGKVLSAPVAKPWPNKPPKCTDCAPLFMKAYLMRGAGAVIHSHGIETCIATMLIPGAKEFRVTHMEMIKGIKGHGYHDELVIPIIENTPYEYELTDSLSEAIAAYPKATAVLVRNHGIYVWGESWINAKTQAECYHYLLDACIKLYQLGIDWTTPEHGSINNPRRPHSILSPEICNGCHAADSSKCVVLDIEGTTTPISFVTDVMFPYARDNVRKHLTSTFDFEETKEDIKLLRIQIEDDLQNGVAGAVPVPPDEGGKEEVINSLVANVESMIKADRKITSLKQLQGHIWRIGFQKKELQGVVFEDVPVALKNWHASGIKVYIYSSGSREAQRLLFGNTTYGDLRKFLCGYFDTTTGNKRETRSYFEISQSLGVDSPSQILFITDVFQEAIAAKNAGFEVIISIRPGNAPLPDNHGFRTIKSFSEI

SEQ ID NO: 61506 - protein, 236 aa, Zea mays
  Clone ID: LIB143-001-F4_FLI.pep
EIFFPSKDGERKRDKGKARERRRRLICCRSAKRKRKRSAGVVKMFLVDWFYGVLASLGLWQKEAKILFLGLDNAGKTTLLHMLKDERLVQHQPTQYPTSEELSIGRIKFKAFDLGGHQIARRVWKDYYAKVDAVVYLVDAVDKERFAESKKELDALLADDSLANVPFLILGNKIDIPYAASEEELRYYLGLSNFTTGKGNVNLADSNVRPLEIFMCSVVRKMGYGEGFKWMSQYIK

SEQ ID NO: 61507 - protein, 242 aa, Zea mays; identical to SEQ ID NO: 46973
  Clone ID: LIB143-046-D6_FLI.pep

SEQ ID NO: 61508 - protein, 77 aa, Zea mays
  Clone ID: LIB143-045-E5_FLI.pep
VNKTSPTKTTRDKTLSTQLLSKTYPTKEKTLKGMLAFGNQGKAHQSSRTHFAEKLTRSGSLSQVLFHKLVYYLNLLA

SEQ ID NO: 61509 - protein, 191 aa, Zea mays
  Clone ID: LIB143-045-D1_FLI.pep
KGCAARPACILETRKTAPGLRLIDKWAVLIGGGKNHRLGLFDMVMIKDNHISVAGGIANAMRSVDQFLQKEKLTIPVEVETRTIEEVKDLLKYAAENKTSLTRIMLDNMVVPLGNGDLDVSMLKDAVRLINGRFETEASGNVTVDTVKKIGETGVTYISSGALTHSVTALDISLKIDTELALQVGRRTNRA

SEQ ID NO: 61510 - protein, 433 aa, Zea mays
  Clone ID: LIB143-038-B5_FLI.pep
RLRRSQSPEAASLASRSGLVRLGALFAGGRKARGKPEDAEGGRGRRPQISLPPPARPAFGIERGRKERRCFNMKALILVGGFGTRLRPLTLSFPKPLVDFANKPMILHQIEALKEVGVTEVVLAINYRPEVMINFLKDFEDKLGITITCSQETEPLGTAGPLALARDKLADGSGEPFFVLNSDVISEYPFAELIKFHKSHGGEATIMVTKVDEPSKYGVVVMEEATGRVERFVEKPKIFVGNKINAGIYLLNPSVLDRIELRPTSIEKEVFPQIAADQQLYAMVLPGFWMDVGQPRDYITGLRLYLDSLRKKSAARLAAGAHVVGNVLVHESAKIGEGCLIGPDVAIGPGCVVEDGVRLSRCTVMRGVRIKKHACISNSIIGWHSTVGQWARIENMTILGEDVHVCDEVYSNGGVVLPHKEIKSSILKPEIVM

SEQ ID NO: 61511 - protein, 288 aa, Zea mays; identical to SEQ ID NO: 47549
  Clone ID: LIB143-036-E8_FLI.pep

SEQ ID NO: 61512 - protein, 105 aa, Zea mays
  Clone ID: LIB143-033-H10_FLI.pep
PQAQARSQTRQRNLVLHADDAADALPLGHQVERLVDLGERDAVRDELLHLQLLFHVQLHHIWQISAWLVVAKEGPLQGPFVQEVHRVGLELSVLMWHTHQHSNTP

SEQ ID NO: 61513 - protein, 178 aa, Zea mays
  Clone ID: LIB143-030-H9_FLI.pep
HCLAKIAEAGRSSEGAKSPISLFSRHSRRSSSSSEDGSVKSAGSKKVDPRCPNAGNLFHECGEHCAAKMQRSEQQHKGVNLKSPRRKGGKNATAIPNWKVDPRCPNASNPFHMCAQYCFDHLSETAQTSAAKSDKRRGKGVSEDEGRGETKTNPGCANASNPYHKCGDQCKRKGGGDR

SEQ ID NO: 61514 - protein, 288 aa, Zea mays; identical to SEQ ID NO: 47549
  Clone ID: LIB143-029-B3_FLI.pep

SEQ ID NO: 61515 - protein, 114 aa, Zea mays
  Clone ID: LIB143-028-E11_FLI.pep
RASERATARERERGRGRVGIQVSNSLSRGDRKVVTHRSTASSSPPMADWGPVVIATVLFVLLTPGLLFQLPAHGRIVGFGTMHTSGIAILVHAVLYFALITIFLIAIGVHIYAG

SEQ ID NO: 61516 - protein, 165 aa, Zea mays
  Clone ID: LIB143-027-A4_FLI.pep
PGQQANRRRRWGSVSTSRASSSTGRATSPSSTTSRRSTAAPSPSPSGPTPTSTSSSHPTRSTGPSSRPCGSRGSSRSPGPSSAPPTSAASRSSTPRRRTASCWRPASARSPAPCWDPRWRTTGTSSTRWTSRGPTSGSSTGGRTRSQARRAEPHRVMPILLSTPA

SEQ ID NO: 61517 - protein, 264 aa, Zea mays
  Clone ID: LIB143-026-D11_FLI.pep
LRCAPLGRSASAFSSRGGELLVGVGDEEQLVDDAGEAAADEGPDPVHPLVAPLPADEGGAEGHGGVHGRAVEGAAHQDVGPHDEADGNGGDGAQAALLRVHRRGVHRVHQPEGHHDLQHQRLPHRHARQPEGARGLPARREAEQEARHGGPQQLRHPVQEPPEQGDVAAHEGAEGHGRVHVPAGDVRAHRHRHEQRERVRHRRRDQARRGRRAAAGQLAEGHAGALAGEDEDEGGDELSERRLEGARVVHLLVAPQGDPIDRHF

SEQ ID NO: 61518 - protein, 161 aa, Zea mays
  Clone ID: LIB143-026-D1_FLI.pep
ASNSTCLSLVPGGGGRMAASTARTVKDVNPHEFVKAYSAHLKRSGKMELPEWVDIVKTARFKELPPYDPDWYYIRAASVARKIYLRQGIGVGGFQKIYGGRQRNGSRPPHFCKSSGAISRNILQQLQEMGIIDVDPKGGRRITSQGRRDLDQVAGRVAVEA

SEQ ID NO: 61519 - protein, 267 aa, Zea mays
  Clone ID: LIB143-024-D8_FLI.pep
ESAQHDYRHMDVEASHESPPLRSKTMRRLLVATNCVMLALGVTGGQLLSRLYFSKGGHRQWLSGWLQTGGWPLLLPPVAASYVRRRARDRSAPVLLTQTQPRILLAAAGLGLIAGVDNLLYAWGLEFLPVSTSAILISTQLAFTVLFAYLIVRQRLTMATVNAVALLTVGAVVLGLHVSSDRPAGVTRSQYWLGFTLTLGAAVLYGLFLPLVELTYKCAAGGGRPVTYALVVELQLVMGFVATAFCTVGMIVNKDFQVMHDNSIYQI

SEQ ID NO: 61520 - protein, 242 aa, Zea mays
  Clone ID: LIB143-024-A5_FLI.pep
NNHTCTELAAKMATKHLALCLLVLLSIGMGMATAAANRKLGYGPGGGGGGGGSGGGGGYGGPGYGSGSGYGEGGGSGGAAGGYGHGGGGGGGGGEGAGAGGSGYGSGQGSGYGAGSGAAGGYGSGGGGGGGGGGGQGGGSGYGHGGGEGYGSGSGFGGGAAGGGGGHGGGGGGGQGGSGYGSGSGSGSGYGSGEGYGQGGAHGGGYGSGGGGGGGGGQGGGGSGYGSGSGSGYGGGNDNGHY

SEQ ID NO: 61521 - protein, 197 aa, Zea mays
  Clone ID: LIB143-021-D8_FLI.pep
QAPTRCPAQQHARNSGPAPTMVLTSNISVQKTLYEVLSVSEDATYDEIRAAYRSAALNTHPDKAQTTLESSSVPSTEQQEFSSVQKAWEVLRHPTSRAYYDKQLQSSRQSIEIIASEIQVGDMIVESAAGALELLYPCRCGDYFSITSGELSGMGIVVTGDGEEVEGLQASDSGSASVVLGCGSCSLKIRLVIDGTS

SEQ ID NO: 61522 - protein, 119 aa, Zea mays
  Clone ID: LIB143-019-G1_FLI.pep
AARVSLTRTQPPCISPASSRTRSRLPFPTYSPSRCRAPVLASLGFRPSPADPSPPPAMSKQGGKAKPLKAPKVDKKEYDESDLAYLQKKKDEEKALKELKAKAQKGAIGGSGLKKSGKK

SEQ ID NO: 61523 - protein, 269 aa, Zea mays
  Clone ID: LIB143-013-H9_FLI.pep
TQESAEEIETYQRYKYPTMSKTQGNFKLTVVEGEFTDSQIVVMLGENGTGKTTFIRMLAGLLKPDTVEGTDIEIPEFNVSYKPQKISPKFKNTVRHLLHQKIRDSYMHPQFVSDVMKPLQIEQLMDQEVVNLSGGELQRVAICLCLGKPADIYLIDEPSAYLDSEQRIVASKVIKRFILHAKKTAFIVEHDFIMATYLADKVIVYEGRPSIDCSANAPQSLVSGMNKFLSHLDITFRRDPTNYRPRINKLDSTKDREQKSAGSYYYLDD

SEQ ID NO: 61524 - protein, 174 aa, Zea mays; identical to SEQ ID NO: 44891
  Clone ID: LIB143-012-F10_FLI.pep

SEQ ID NO: 61525 - protein, 194 aa, Zea mays
  Clone ID: LIB143-006-A2_FLI.pep
TDQTFSRGTMARSLSTALMRGLMRSSRASTSAAVSRPAIQQFMNYSSGLSGTPNANGDSVTTRVAADHDTHQDFQPTSKSSDMSFSDIVAQDVKEHPVVIYMKGYPDAPRCGFSALAVKVLQQYGVPISARDILSDLKLKESVKAYSNWPTFPQIFIKGEFVGGSDIILTMHQKGELKELLGDIAQKAEQSGSS

SEQ ID NO: 61526 - protein, 117 aa, Zea mays
  Clone ID: LIB143-005-F1_FLI.pep
PLRLRSRRRRRRRYAPHLASFRVAKMTKRTKKAGIVGKYGTRYGASLRKQIKKMEVSQHSKYFCEFCGKFAVKRKAVGIWGCKDCGKVKAGGAYTMNTASAVTVRSTIRRLREQTEA

SEQ ID NO: 61527 - protein, 197 aa, Zea mays
  Clone ID: LIB143-004-H3_FLI.pep
PPPPALAGSAAQFRGQAQLPRFAAPRRYDLRLRPDLVTCTFSGTAAVTVAVSAPTRFLVLNSADLSIDSASIRFRDLAPKEVVFFADDEILVLGFSKDLVLGEGVLSMKFNGTLNDQMRGFYRSKYQYKGKMKNMAVTQFESVDARRCFPCWDEPAFKVIIVLNEISNNMGVLLQVFHLLGFCALSNIFVALKRIHM

SEQ ID NO: 61528 - protein, 614 aa, Zea mays
  Clone ID: LIB143-004-D3_FLI.pep
HAPFSRARARARGAGAGMASQVAGSTPAVAALGFLLPTFWEIEVTCAAAMILVALYVAYELLNPRSSQAAAAGDADELLVRGLDGADKFKGGVSGPSAYVVKLELLAAKNLMAANLNGTSDPYALITCGAEKRFSSMVPGSRNPMWGEEFNFFVDSLPVKINVTIYDWDIVWKSTILGSFTVTVESEVPSGPIWHTLDSTSGQVCLHIKVIKVHESSSRAINSSAEAGARRRISLDKQGPTVVHQKPGPLQTIFELPPDEVVDHSYSCALERSFLYHGRMYVSSWHICFHSNVFSKQIKVVIPLRDIDEIRRSQHAVINPAITIFLRMGAGGFGVPPLGCPDGRVRYKFASFWNRNHTFRALHRAMKNFVMMIDAEKQERAQSALRAHSSSRKNSKKEINVPEDCAALTGKLQPFVKEEVLVPVFNGTFPCTAEQFFSILLSDDSNYITEYRTDRKDKDINLGQWHVADEYDGQVRELNCKSICHSPMCPPYSAMTEWQHIVLSADKMDLVFETVQQVHDVPFGSFFEVHCRWCVKTISSNSCSLNISAGAHFKKWCIMQSKIKSGAVDELKKEVKVMLDFAQGYMLKVSSPDQENSNLAQQDNTAPDAPSDTG

SEQ ID NO: 61529 - protein, 242 aa, Zea mays
  Clone ID: LIB143-004-C5_FLI.pep
VLIGSNGTADQVEKIVKTLNEGNVPSSDVVEVVVSPPYVFLPVVKSQLRQEFQVAAQNCWVKKGGAFTGEISAEMLVNLGVPWVILGHSERRALLGESNEFVGDKVAFALSQGLKVIACVGETLEEREAGSTMDVVAAQTKAIAEKIKDWSNVVLAYEPVWAIGTGKVATPAQAQEVHASLRDWVKINVSPEVSESTRIIYGGSVTAANCKELAAQPDVDGFLVGGASLKPEFIDIINAAAV

SEQ ID NO: 61530 - protein, 49 aa, Zea mays
  Clone ID: LIB143-002-D12_FLI.pep
VGVCHCSRFQLECEDDVFAILPSLIWYAYNTLINFCKHYHLQARRHIHL

SEQ ID NO: 61531 - protein, 249 aa, Zea mays; identical to SEQ ID NO: 54913
  Clone ID: LIB3067-011-A5_FLI.pep

SEQ ID NO: 61532 - protein, 77 aa, Zea mays
  Clone ID: LIB3067-027-D1_FLI.pep
NIHDFIQLPRFCPESDTLVVKPTVKYRSIMQPNLMQEQDSESNSSFVCTGHYTTYMKNKACYCRLSVHGDPARTSLE

SEQ ID NO: 61533 - protein, 151 aa, Zea mays
  Clone ID: LIB3067-031-F2_FLI.pep
EDVCRQCSCSSSSSSSFPAAARAWVSVSSSRRPVRRAIIMAAVETVVLKVAMSCEGCAGAVRRVLSKMEGVETFDIDLKEQKVTVKGNVKPEDVFQTVSKSGKRTSYWEGEATAPDAAAAPEAEAAPSTAAEAPPAAAPAAPEITPAKADA

SEQ ID NO: 61534 - protein, 177 aa, Zea mays
  Clone ID: LIB3066-036-B6_FLI.pep
RRRRRSRSSVCERGRNAGGEGAGGGHGHAGADAGRGDLRGLARARPLRRRRLPRHRRPHQDGVRQAVRRRVAVRGGRQLRVLLHPQQRHLHLLLHGAPLLPPLQGRRRRSRRRRRRRRLLINQVSVHHTVHFVLLASIYIYIYIYIYIYIYIYIYIYMPFVMSRSSDPVRPAARVVV

SEQ ID NO: 61535 - protein, 72 aa, Zea mays
  Clone ID: LIB3066-042-B12_FLI.pep
VRLIGLLLHWYSCTRGDLKQRLFGCSVHKCRLVSCKISPPARPVRDGRQARSATARKRRRVVACLFFAISLN

SEQ ID NO: 61536 - protein, 213 aa, Zea mays
  Clone ID: LIB3066-042-B2_FLI.pep
LPGTTGGREGYDHVTWNSNNLRRRIISMEQSPAVGCLKSNATQVIYRGSTTGLSLLDRVLYVIGVASAQVSILWNPVLASVRARHLVPLQNKLAFLVSLALLMCRIIFPPNYGSTANTEDIRNSMHSCDHHAVFFYSRSHVDNLMEEVRLAVLALEGLGDDVAGNAEVGLTVLAAVDVAVQVHQEQAPHRRLLSHLPQLRSNPSLSASRQFHP

SEQ ID NO: 61537 - protein, 186 aa, Zea mays
  Clone ID: LIB3066-044-D6_FLI.pep
LYAKKDYKTPSWKRYLQISRRFFLEGVLYAKKDYNLAKHPKLDVPNLEVIKLMQSFKSKEYVRETFSWQYYYWYLTNDGIEHLRSFLNLPSEVVPNTLKKSSKPPSRPFGSGPPGDRPRGPPRYEGDRPRFGDRDGYRGGPRGAPGDFGGDKGGAPADFQPSFRGSRPGFGRGGGGAFGAGGSSME

SEQ ID NO: 61538 - protein, 297 aa, Zea mays
  Clone ID: LIB3066-046-E8_FLI.pep
PPFKGLSRNDVLDGSDSAEAQNTQEPSTRWGLGDSSNLASGLEDANPSYPYLPTVLEEPGSSFSEAAEDDPLPGIEGLRITGEPFPGQELQAGGYSINGTTTCNFEWVRHLEDGSVNFIEGAKQPSYVVTADDVDTLLAIEVQPLDDRKRKGDFIKVYANGQRKISCDPETKELIKRTLDIGHVTYEVQVQLPQVRFLDIWEPAVLAIKREGYSIKCNGQRGVLITEKFQQGTAIHIPYGRPTEFSITSAASADGVSYNLKPVENTLLRDTIVLVLRLFKNMALERRGRRKKGLFFK

SEQ ID NO: 61539 - protein, 87 aa, Zea mays
  Clone ID: LIB3067-001-C4_FLI.pep
RLASAHRGSVLLPKPLAFAAQITIEFLLAAQEEDTGEAGGGDAAPNDDCGREQRPVAVDHFRLPRVPLPSLASQIATAVLVDAAGVL

SEQ ID NO: 61540 - protein, 94 aa, Zea mays
  Clone ID: LIB3067-002-B11_FLI.pep
ADSRQETRARSRLIEIHSFLPTTAYVLVMLDLFFLLYFRPDRVDGCKLRVNICLCLKIVHCYDLRGEGVMVCVCCDMICNHGKQKPDVLCHCPD

SEQ ID NO: 61541 - protein, 63 aa, Zea mays
  Clone ID: LIB3067-006-C2_FLI.pep
TYIYFHPFAVSLSRICCVPNMYCKFGIFVSYNKASTAISPHDNPEICIVQSSNHGILIQKFCL

SEQ ID NO: 61542 - protein, 76 aa, Zea mays; identical to SEQ ID NO: 58310
  Clone ID: LIB3067-006-D6_FLI.pep

SEQ ID NO: 61543 - protein, 186 aa, Zea mays
  Clone ID: LIB3067-008-C7_FLI.pep
GTRHYCSNDYCRFHNHHSNTTRLMSREFYTGNEQSLPHSICKFSTCKASLFLSTGMVTHMSSSDGCLRGRTGDGSSLSQQRHQLPIIVQCHSIITAANMLPIDEDIWDSPLSSPLLQGILELSSITFLIQLNGLVACSELLEQLLHTDAERAGSFAEDDEGSGGNDLLGLGERHCSRFRAGGWAGG

SEQ ID NO: 61544 - protein, 287 aa, Zea mays
  Clone ID: LIB3067-009-H8_FLI.pep
VLELSEGWDSLVTARAAELLSLNLETMEKLKESEELLERCLAVKKKILPEDHLQVAYTLVHLARLTLHRVVKDRDVNSDVTAYYLAKAKQFSNDSIRITEGQLNSSRKDQNKINNTSTADTDKSAAIILFQALHVFGLIDIAAKQLLGQGLVLLLRLPLEHLKHGFFKIEAVHIPGTPRPFIWTDTYTIYARYSALQIHFKNKFGKEQDYNSVQDALQKCVSLYKEPHTRRLVKNAAKQDYMICLTSLIDMVQSLFPIPHIPGLQELLCEAEQILGELEEESTRKKQ

SEQ ID NO: 61545 - protein, 59 aa, Zea mays
  Clone ID: LIB3067-017-G4_FLI.pep
IGYSVWISFRLLAQISETVSVRTSETNAVPLLAPRNTSLQSRRTTPAMNSIHTHTKKRW

SEQ ID NO: 61546 - protein, 117 aa, Zea mays
  Clone ID: LIB3067-018-A4_FLI.pep
KNGATARVSGQLLQRNGEDGARQRRDARRTRDLRKVGQFNCKVGVLWPKAKEGVGVLLIRNIPFPQQFHPKAFCVVLDCAVQIPNTVNCMEHPLFVLFMPVNHNLSCLRGFTIGCHP

SEQ ID NO: 61547 - protein, 186 aa, Zea mays
  Clone ID: LIB3067-018-A5_FLI.pep
FNKDVRTCTKLERAVCVCVRHLLDHGEGAGARAAPSTASAARLSTIAEDDREMLALCGSPSDHGHAQAQVAARFMTEVAPPQVVSVMRRRKAPRSLDTIAEDDREQQLACGSPSDHGLATAWSSLQRIPTPPQPPRERAGGSVTRDLSKNFLDAHGCQQASGWEGLHMLGHRRAVHALELHKVGAC

SEQ ID NO: 61548 - protein, 198 aa, Zea mays
  Clone ID: LIB3067-019-F4_FLI.pep
SAVLYAFSLLDLFSLLPNASKQSCVCSFTFLVILFLLLLFQMYRTVKSTDKPPAATSSGGGGPPVDGGGGSGDDDHPSDWRRAPSSSAGRDVSPQAFTGHRSASSDGAASHAGGDVECSSADDSDGGRPRSASPPRLPPPSACNADTLHSVGVPSTTEDMEPACRSAGLQHSLNHEMSCPPSLEFTLGRPNWNGAEHD

SEQ ID NO: 61549 - protein, 155 aa, Zea mays
  Clone ID: LIB3067-027-G7_FLI.pep
TIPIGLKQFRLQALLYEVVAEPLDHHVALPGGHGLVVDADHQRLPGLLHGYASRSLLPADDGAGLALDDHVLGGAEEEAGRSQEPGLVEVLHDVGHLLRLEQRECGALGPDGAVVADDGGGGEVVVALDLAHEVLVDVGLPRHPFRPCCCSAATC

SEQ ID NO: 61550 - protein, 271 aa, Zea mays
  Clone ID: LIB3067-029-B12_FLI.pep
PMRPTPALDAGGRMVTSFLSATEWMLPSPATQVHTISVLPSRRDFAFSNLTMSLRNSGGNEGESGSTKFHVVRDDLLHPLANGNKARKLDALLPVLRRCGATDIVTCGGCQSAHAAAIAVHCAEWGIRPHILLRGEQLDVPTGYNLISLMFGNVTYVSRSLYAQRDEMLYEHAIKVAGYSGTVMWADEVIGKGLGVDEDTTDGNGSRRVMIVKEGAGSVQALLDSSGGLLLLCLLTHLKDINSERDLLYLILRRFSRKSTMEWRKMLLMTI

SEQ ID NO: 61551 - protein, 107 aa, Zea mays
  Clone ID: LIB3067-032-E6_FLI.pep
DTNRIIGSVGFKLTRADGHRTWLHIEQSFWRYSFVHHRLVLVSLGPLLLWFMLLHFPLVGAALLAEEGTEEGGVHVVDHLLSAAAKARVSTSPASSCGRLVCVLKTA

SEQ ID NO: 61552 - protein, 76 aa, Zea mays; identical to SEQ ID NO: 58310
  Clone ID: LIB3067-046-F1_FLI.pep

SEQ ID NO: 61553 - protein, 227 aa, Zea mays
  Clone ID: LIB3068-005-B9_FLI.pep
RVTAVYNLPDTNRREPPLDLVELVCLHHRISLGNGVPGSSPVVELAVVLVGVAVERAVQVPTPAVESREPNPLPAGAAPVRPYLPPFGDRRHPLAGSGNISGLLHVHCLQLDLGNSYYRVAASNNRLHDGVAAVHDAVDRGGSQLGLILLRYHLLVALRAHVHGRRAAEEATVIDAEDGSLGGLAPSLLVLHGFLNSDETALFAIPLRRSPRGRRGGEGRGIAGNSV

SEQ ID NO: 61554 - protein, 123 aa, Zea mays
  Clone ID: LIB3068-043-D9_FLI.pep
LAGDDERHHGRMTTLRNLKIKTSTCKRIVKELRSYEKEVEKEAAKTADMKEKGADPYDLKQQENVLAESRMMVPDCHKRLETALADLKATLAELKESNEQGAEIGEAESTIAEVEAVVKPAED

SEQ ID NO: 61555 - protein, 64 aa, Zea mays
  Clone ID: LIB3069-003-B9_FLI.pep
IFPPSFHWLLLGEGSSHGVISCGEACALNLSCSIKTSCIILSLFSNIGSLSLFSNICSQIFVTC

SEQ ID NO: 61556 - protein, 124 aa, Zea mays; identical to SEQ ID NO: 41198
  Clone ID: LIB3067-035-D9_FLI.pep

SEQ ID NO: 61557 - protein, 108 aa, Zea mays
  Clone ID: LIB3067-036-C5_FLI.pep
ITGWSALLVLLDELGVLEVLLGEVGRHLSDDEAGDGEPREEGPIALPLPAEEDRPRIERLHLLGLRLRLRLREEGAAECRARDRVADAARQRAAPVARRGRWEGGECV

SEQ ID NO: 61558 - protein, 70 aa, Zea mays
  Clone ID: LIB3067-038-G6_FLI.pep
CSTFSSGSSWTFSQLSSTSASSASSLCLWAIGLYPTFPRCRQNRRRHEWTEFFPTIHFLRGGHCRPLGVL

SEQ ID NO: 61559 - protein, 126 aa, Zea mays
  Clone ID: LIB3067-039-G5_FLI.pep
KESEATAKEREEAAVFGSEITTNVTDLAPPKDVKDEWPESKQTYAFYFIKVRSFEDLKLRAKIEQSNKEFQKKIQARSKLIEAVTTNDVFFLQVLIEVIFLTDAPLFINVECFVTHLCTYEPVVEA

SEQ ID NO: 61560 - protein, 152 aa, Zea mays
  Clone ID: LIB3067-040-F3_FLI.pep
RLLVEKKRCYIYNNYCRQRHLLLGRRFKKLAKREGHNEIISSARRCKTGRRCSSRWCSSSCCRRACCSRCRASAGSSSSATSRPAPSPSSSTPSSSSPSPPSSSSPSGCTCTSAPRRRRRAVPSLPLYLSLAARAPSFSSFMFSLYIYSLYE

SEQ ID NO: 61561 - protein, 267 aa, Zea mays
  Clone ID: LIB3067-044-F2_FLI.pep
TYSEDTFRCSAQDRQVHIRHCNTLKTLEIHVPRSKVRYAKAKRQDSHPHLSNGIEESLPRSTLLKSAVVAEQLCVDTIRNNSALALVLQVVSAAELGEAPLSALNDLLAARELELSATQSFAGMGSIVVLASHGKEDLTNVHPSTGALRLAKGTPHSSLEPISPGTGKHLVDTEDMERVNPDPKVEGILSCRLGHVLVAGNAGSLERLTGDILLLPRDKVHTVGELINTLPLHPDIVDPDLGVRDTTAVPGLRVRLVLDLAIASSRP

SEQ ID NO: 61562 - protein, 187 aa, Zea mays
  Clone ID: LIB3067-048-B5_FLI.pep
LPPLRSPPLPNGRSLHGSSSWLQGAGDRWKLRQPRPRRQGRLAEEGRARLGVRQEPGGPGAPGVRAGRCDRQRREPGQVLEPPPQDRRVRPGGGGPQAGRWWRAGRRRGCCRRHGAGPEGVVPPARGRREAAPRRVSRAALLGQPTLLLAHKKGGGRAWQWQAPCSCSAGLGSLLISLQYYTTSSGA

SEQ ID NO: 61563 - protein, 160 aa, Zea mays
  Clone ID: LIB3067-048-H2_FLI.pep
RLVRARYLLHITSPELGGRRGRSRRSASGGVLPDGVPELVLVDGSKALERLAVPDEAEGRHHMDAVDLRDFQQFVDVDLEEDRGRVLAGAVRVHRGHHLAPTAPGGHEVDDHQLALLLGLGHAGVELVLGVARDHGTLLGRHYSDPLFSFPRCGIRSPCR

SEQ ID NO: 61564 - protein, 94 aa, Zea mays; identical to SEQ ID NO: 45310
  Clone ID: LIB3067-049-G3_FLI.pep

SEQ ID NO: 61565 - protein, 181 aa, Zea mays
  Clone ID: LIB3067-054-F9_FLI.pep
KAPTIIYFRRYNDEQQQRDSSSPLAPDAAGELDVLGHDGDPLGVDGAEVGVLEEPHQVRLRGLLQRRHGRGLEPQVRLEVLCDLADEALEGELADEQLRALLVLADLAERDGAGAEAVRLLHAARGRGRLARRLGGQLLPRRLAAGRLARRLLRAGHSERRGGVSSLRTWIGRLRWRRQGQ

SEQ ID NO: 61566 - protein, 77 aa, Zea mays; identical to SEQ ID NO: 40300
  Clone ID: LIB3067-055-H12_FLI.pep

SEQ ID NO: 61567 - protein, 64 aa, Zea mays
  Clone ID: LIB3068-010-F3_FLI.pep
NHLRTPDFVEFSFPFDEYLSTSMSIPNIWPFLSLFFTYVYVVLASSCARLCVMRYAVCDWITVT

SEQ ID NO: 61568 - protein, 231 aa, Zea mays
  Clone ID: LIB3068-034-G6_FLI.pep
LARARTAGGAAKTESRRAHYCSREASRRLHCMAQLPPRIPTEVHHWPEGGQHGAAAAAWADDFAEFAAARRGAHRRSLSDSVAFVEVAPADGGAGEFDRLDDDQLLSMFPPDEAGGSGGGGGSSAAGSENGGSSDSDGDKRGARGGPAGGAPSTGSGGGEQNGVVDAQAPATGGQAAVVASTELIRDPKRVKRILANRQSAQRSRVRKLQYISELERSVTTLQLTCCGRTR

SEQ ID NO: 61569 - protein, 116 aa, Zea mays
  Clone ID: LIB3068-041-A12_FLI.pep
NPFVGYKSVPAKPETWRPQPAAACFLVRRGHALVKLGEPHADPHGVLQELLRAPADARLLLLVQVLAPERVHAVREAPLHQRIVHSQAVADLELVDHGGHPHLVLLGEAVQVAEHA

SEQ ID NO: 61570 - protein, 156 aa, Zea mays
  Clone ID: LIB3068-046-A1_FLI.pep
TGTYHEKTISTSEDTVQDNLTEDEPSFGSQEVDDAESTEETKQNIAENIAEVSDVAIVDDAIEQNVLQTEDIVEMHKQELEREETERIEPVESEEASDQRNDAPFDYSAREDNTKESEIQQTESATETNEIEPTEIEAVPRESNTCVSEEPSQEDH

SEQ ID NO: 61571 - protein, 78 aa, Zea mays
  Clone ID: LIB3068-049-F6_FLI.pep
LSHLVPVYGASWLVLGDNVYRVDDPGEIGEEGEQEAEPEFDLAAELEEDAERREDDGDEDVDAVRRALLHLSPSPLLD

SEQ ID NO: 61572 - protein, 123 aa, Zea mays; identical to SEQ ID NO: 60961
  Clone ID: LIB3068-052-F5_FLI.pep

SEQ ID NO: 61573 - protein, 166 aa, Zea mays; identical to SEQ ID NO: 52973
  Clone ID: LIB3068-053-D8_FLI.pep

SEQ ID NO: 61574 - protein, 115 aa, Zea mays
  Clone ID: LIB3068-058-C3_FLI.pep
QQTSKQAMEIESVKCECCGLKEDCTPHYIASVRSGFHGQWLCGLCCEAVRDEACRRKAHHGVEEAVRAHMAFCNMFKLNPAVRVADGMRQMLRRRSGDMSKPESAKKYESSVTLY

SEQ ID NO: 61575 - protein, 90 aa, Zea mays
  Clone ID: LIB3068-060-B12_FLI.pep
FCPFYKSVWMMRNIIHFNTLANQAVERAAGTDGQKITYGVIKHRLGDLFYRLVSQKFEDPAEGEEALVGKFKKLYDDLTTGFRNLEDEAR

SEQ ID NO: 61576 - protein, 108 aa, Zea mays
  Clone ID: LIB3068-060-B5_FLI.pep
VTYSNISAPACVATAMTTMVVGSAVGWRGGAWYARRGLRREQQKLVGMGHMKSHDRWHWRPFNRLRNSRLASKNKRADAHPSTEAPSTSSNTASADVSSASQPAAGSA

SEQ ID NO: 61577 - protein, 183 aa, Zea mays; identical to SEQ ID NO: 58622
  Clone ID: LIB3069-003-G1_FLI.pep

SEQ ID NO: 61578 - protein, 333 aa, Zea mays
  Clone ID: LIB3069-035-G11_FLI.pep
RCCGRRARTWARASAASAWSTTPASTSTPSTATRTTAACTTAPASCSGSGARARTRAGRSCRGVPRPTPPRPTREARTPCASSARPAARTTASRCATARRAWRPPTRGTSTSTGSRTCATAPGCGTRRATRPSRSSTRSPARRSSTPRGRATPSSSCPTTRTTRTSPCSGPRAATSATASAASAWSTTSTSTSTPSTATRLTAASMTVPRSCSGSGARATTSAGRSSLGERTKETTSWYPNNNSAGCGDPQIKEAGCDASRSSRLSSGVCVRQPATVWLVFQHLSACLREEVGVTDSREGPGHRLLHYEFLIMSYVCTLNQLCMRSHLLSPTE

SEQ ID NO: 61579 - protein, 115 aa, Zea mays
  Clone ID: LIB3069-048-G11_FLI.pep
SSPPTRNRRERKGKPAAAPAPSNQQIGTSVLRNPSMAEESGRPLPKFGEWDVNDPASADGFTVIFNKARDEKKGGNGQDTDSPSKDPRTERVESYAAKPSTKKWFCCVTASPTQS

SEQ ID NO: 61580 - protein, 130 aa, Zea mays
  Clone ID: LIB3069-054-G7_FLI.pep
GLTIINNLLQYHPESSEKLAMGEFFGIKPPEKKVDVDIATHIVVEDDGPKRSILYIETADRPGLLLEIIKIIADTNIDVESAEIDTEGLVAKDKFHVSYRGGKLNSSLSQALTNCLRYYLRRPETDEDSY

SEQ ID NO: 61581 - protein, 154 aa, Zea mays
  Clone ID: LIB3069-006-G7_FLI.pep
KRNIYLLEKGIILIFQLRYRLIHVAIQIHKHGGSTLERKYQVRQRFHKFKHSIYDKKTSHYLKRSPSLSSQAHDIPILLEICILLLQQCPKPCPMCSSKGDHDDLAKLELVEDGGFTSGIDADHKDLHILIDEEPAEELPKHEPHSSMSAFFTT

SEQ ID NO: 61582 - protein, 248 aa, Zea mays
  Clone ID: LIB3069-015-G7_FLI.pep
AARALMSMGEALRAAAADAVVTFLWVLCVSTLGASTTAVTSYLRLQGVHFALLVTVSLLSVLLFVFNILCDALGGASFNPTGVAAFYAAGVTSPSLFSIALRLPAQAAGAVGGALAISELMPAQYRHMLGGPSLKVDPHTGAGAELVLTFVITLAVLLIIVKGPRNPIIKTWMISICTLCLVLSGAAYTGPSMNPANAFGWAYVNNRHNTWEQFYVYWICPFIGAILAAWIFRAMFLTPPPKPKAKKA

SEQ ID NO: 61583 - protein, 257 aa, Zea mays
  Clone ID: LIB3069-020-H6_FLI.pep
GIVDPERQTSREIRQGTMGRGKVVLQRIENKISRQVTFAKRRNGLLKKAYELSVLCDAEVALVLFSHAGRLYQFSSSSNLLKTLERYQRYIYASADAAVPSSDQMQNNYQEYVKLKARVEVLQHSQRNLLGEDLALLSPSELDQLENQVDKTLKQIRSRKTQVLLDELCDLKRKEQMLQDANRVLKRKLGEFEAEAASPPQLAWQGEGGMLSHDPPQPEHFFQALESNPCLQPTYHTMDMNQQPVPAPGGCYPAWMS

SEQ ID NO: 61584 - protein, 121 aa, Zea mays
  Clone ID: LIB3069-027-A11_FLI.pep
DQRRRRHACAAAPTMDEDEFRRMLDLFPVVRSRDYCCSDPGTSNRGTRQLSRVQEATKGDNKDSSGAQDMFMQKLKMAAENKIGATKAEFFCKTFEEVHEKLVHRELNLDAAKKFLSAYES

SEQ ID NO: 61585 - protein, 231 aa, Zea mays; identical to SEQ ID NO: 53471
  Clone ID: LIB3069-029-D4_FLI.pep

SEQ ID NO: 61586 - protein, 222 aa, Zea mays
  Clone ID: LIB3069-032-C2_FLI.pep
LDICYSIFIVLTCTFTSVGYAFVYFEDERDGNDAIRALDGYPFGPGRRRLSVEWSRGDQAGRRDGNKPEANTKPTRTLFVINFDPMNTRVSDIERHFTPFGNISSVRIRKNFAFVQFETMEEARKALEATHATTLLDRVISVEYAFRDDSEVSDRYGSPRRGGGYGRRGDSPVYRSRPSPDYGRPASPVYGSYDGPGPVRDRYRRSPAYRSRSPPVKRRTYD

SEQ ID NO: 61587 - protein, 147 aa, Zea mays
  Clone ID: LIB3069-047-H5_FLI.pep
TAFCHQVTVLSTSSMVREKPVLVGAGALSEGTNVPLMSTTISLRGIRLVAPGGTPFPARANQELGHPVLGGLHFWRCILSAAAATAWKRAKQRRRRVLERWELVPEREDGVLGGGVECLGDDETSRRRGVLDSDGDLRSVSRKGTRG

SEQ ID NO: 61588 - protein, 147 aa, Zea mays
  Clone ID: LIB3069-048-D6_FLI.pep
GLCNSVDINVFQIILWLVLWWKPVRVMVILPKMFFAGVSLFAALGFVLYGGRLFLMLQRFPVDSKGRRKKLQEVGYVTTICFSCFLIRCVMMCLNSFDKEADLDVLNHPILNFLYYLLVEIVPSALVLFILRKLPPKRGITQYHPIH

SEQ ID NO: 61589 - protein, 82 aa, Zea mays; identical to SEQ ID NO: 55893
  Clone ID: LIB3070-001-H11_FLI.pep

SEQ ID NO: 61590 - protein, 210 aa, Zea mays
  Clone ID: LIB3075-023-B5_FLI.pep
RRRRIRSEWGTMRIMIKGGVWKNTEDEILKAAVMKYGKNQWARISSLLVRKSAKQCKARWYEWLDPSIKKTEWTREEDEKLLHLAKLMPTQWRTIAPIVGRTPSQCLERYEKLLDAACAKDENYEANDDPRKLRPGEIDPNPESKPARPDPVDMDEDEKEMLSEARARLANTRGKKAKRKAREKQLEEARRLASLQKRRELKAAGIDTRH

SEQ ID NO: 61591 - protein, 253 aa, Zea mays; identical to SEQ ID NO: 61460
  Clone ID: LIB3075-025-F10_FLI.pep

SEQ ID NO: 61592 - protein, 178 aa, Zea mays; identical to SEQ ID NO: 41250
  Clone ID: LIB3075-026-G4_FLI.pep

SEQ ID NO: 61593 - protein, 196 aa, Zea mays
  Clone ID: LIB3075-029-H10_FLI.pep
IPSRGDKYKIILLPNSLHTAIWKQCYQFRQILVGVALHGVLGKPVVGRDSPSIGELINAVSPLEHSSGTHPRTYAHRNHSEPAILAAALHLIEKSTDAPCTCSTQRMSKSHCTAINIDFSRIKFQLLAAVDILRCKSLVDFEKINIIHLKASSFHCCRDCNGRTNTHDSWINSNSGKGPKDTKNWKTLLHSNIPSH

SEQ ID NO: 61594 - protein, 259 aa, Zea mays
  Clone ID: LIB3075-031-D8_FLI.pep
FNQVRDIPCGTKGGVMISFDKIEVVNRLRKEFVHETLLNYGVHYDKTWIYDKIHHEINQFCSAHSLQQVYIDMFDQIDETMKEAIQRDCTRYAPGIEIISVRVTKPNIPGSIRRNFELMEEERTKALIAMEKQKVAEKEAETQKKIALSEAEKNAQVSKILMEQKLMEKDSSKRQEQIDNDMYLAREKAVADANYYRILKEAEANRLKLTPEYLELRFIESIANNSKIFFGEKIPNMIMDQRLLKNYLDAAPRKDHYEM

SEQ ID NO: 61595 - protein, 169 aa, Zea mays
  Clone ID: LIB3075-050-H2_FLI.pep
LQFIDNGDGSSLGHHDLDELLVVDLAVAVNIGLTDHLVDLLVSQLLAEVGHDMAELSSRDETILVLVEDAKGLLKLLLGVGVLHLPCHQVQELWEVNGPIAISINLVDHVLQLCFSGVLAKGAHHSSKLLGSDAAVAILIEEAEGLLELRDLLVRELVRHGRWLRRGHA

SEQ ID NO: 61596 - protein, 374 aa, Zea mays
  Clone ID: LIB3075-056-D1_FLI.pep
AIMVHRTSIADVHVMCMDLSPKKPNKASASDGGAYYDWSPADLPMLGVASIGAAKLCLTAGGLALPSYSDSAKIAYVLQGKGIFGVVLPEATKEKVISVKEGDAMALPFGVVTWWHNNADAAISDLVVLFLGDTSTGHKPGQFTNFQLTGSTGIFTGFSTEFVARAWDLTQDDAAKLVSTQPGSGIVRVKDGHKMPEARDEDRQGLVLNCLEAPLDVDIKNGGRVVVLNTQNLPLVKEVGLGADLVRIDAHSMCSPGFSCDSAYQVTYIVRGSGRVQVVGIDGTRVLETRAEGGCLFIVPRFFVVSKIADETGMEWFSIITTPNPIFSHLAGRTSVWKAISPAVLQSSFNTTPEMEKLFRSKRLDSEIFFAPSN

SEQ ID NO: 61597 - protein, 49 aa, Zea mays
  Clone ID: LIB3070-008-A3_FLI.pep
VHLSPICSRVLGPASLPISKSNRCEATNYAIVSFRNILCYRLRVIQRAS

SEQ ID NO: 61598 - protein, 119 aa, Zea mays
  Clone ID: LIB3070-008-A8_FLI.pep
GISCFQKVIAVFRVLTYRVAADATDEYVRIGESTALESLRMFVKAVIEVFGVEYLRSPNEKDIEQLLALGNERCFPGMLVSLDGMHWRRKNRMPLLQGQFFGHRHTPTIILEAVALLDL

SEQ ID NO: 61599 - protein, 145 aa, Zea mays
  Clone ID: LIB3070-008-G10_FLI.pep
CPSDDLPLASFLLLPQSPVPTRCALAMDPSSEIILDTPYFRIYSDRRIDRLMGTETVPAGFDPSTGVTSKDVVIDSDAGLYVRQAQPAGHAVREGARVRGGAGLPAAEGQGLLRGPRGKRVERHGGVVRVPGPGPRLLPLQTRLR

SEQ ID NO: 61600 - protein, 139 aa, Zea mays
  Clone ID: LIB3075-004-B1_FLI.pep
RSRNTRPRRRVVHGGSGTPSSNSLSTGAPILVLVSRTRSSRRRGAPRPTQFERHPDPGEVPLTATMAGGNSGGDSGSAKKSTRQWLAEGELEGVDKAVDASTNRHQRVEAQEGERSGQNLGSGWGDDEGGDGGREGVSG

SEQ ID NO: 61601 - protein, 164 aa, Zea mays
  Clone ID: LIB3075-011-F5_FLI.pep
PVPMAGGDQQTRSLAAATTEAEDEVERGLLLDVVVGQDAAVVQLLAGEDEALLVRRDALLVLDLGLDVLDRVRALHLQGDALAGEGLHEDLHLRMYEDFATREERNEIGNVGRGACVERPKCWRPCRFIVATTKSWPGRRVRQPWRLGTPRARSPEAITTAANS

SEQ ID NO: 61602 - protein, 121 aa, Zea mays
  Clone ID: LIB3075-023-D10_FLI.pep
KINITISKYHPWRQKVNWEMPPRSNRTPRCVAPLEPPVLLRGLSALASRPRGGGSSALARSPAWNSARFGVAQPAPKARTDSPGRWRTHATTHRGWNTGAGGFTGGGAFSTPVFLHSRSFS

SEQ ID NO: 61603 - protein, 144 aa, Zea mays
  Clone ID: LIB3075-024-C10_FLI.pep
PEASAMSNSASGMAVCDECKLKFQELKAKRSFRFIVFKINENVQQVVVDRLGEPGESYDAFTACFPANECRYAVFDFDFVTDENCQKSKIFFISWAPDTSRVRSKMLYASSKDRFKRELDGIQVELQATDPSEMSMDIVKSRAL

SEQ ID NO: 61604 - protein, 178 aa, Zea mays; identical to SEQ ID NO: 41250
  Clone ID: LIB3075-025-C1_FLI.pep

SEQ ID NO: 61605 - protein, 122 aa, Zea mays
  Clone ID: LIB3075-044-A3_FLI.pep
CWGLDQGQGATKLSPPPPWRYGGGRRLQRRADAAAAARRLLRPEQGRRHLPRRDIPRVPRDRGRRHVVCLQLRLHQRPPWTQDHTGIYAWHWHLSPLNRQHPQRHLEMLLLSFRRSSSAVFV

SEQ ID NO: 61606 - protein, 119 aa, Zea mays
  Clone ID: LIB3075-045-G1_FLI.pep
ALEYTPREHAFRYGSATIAVCRRRPRLALVVRSRTPRRWCGSCPGGESDAGSHVVGGDCSPPSHPCRGATHHVVGVLYAIIIAVRSRGFEESSWYLESKVPGEEDVVQEEPHNEEFDSI

SEQ ID NO: 61607 - protein, 34 aa, Zea mays
  Clone ID: LIB3075-054-F4_FLI.pep
MLGYNVLNPLHLAKFVNKHWVMPISKHMMLLLLN

SEQ ID NO: 61608 - protein, 201 aa, Zea mays
  Clone ID: LIB3078-002-F9_FLI.pep
APRPPPNTPSRHAVAAASPSFTMIISKKNRREICKYIFHEGVLYAKKDYNLAKHPKLDVPNLEVIKLMQSFKSKEYVRETFSWQYYYWYLTNDGIEHLRSFLNLPSEVVPNTLKKSSKPPSRPFGSGPPGDRPRGPPRFGEDRPRFGDRDGYRGGPRGAMGDFGGEKGSAPADFQPSFRGSRPGFGRGGGSAFGASGSSME

SEQ ID NO: 61609 - protein, 215 aa, Zea mays
  Clone ID: LIB3078-003-F7_FLI.pep
HTPLQFLEPSLPLVIPLVTMPALAKPASRTAKPAAAPKPKPAAAKPKAATAGASHPPYFEMIKEAITALKERTGSSSQAIAKYVGDKHGASLPANFKKMLSIQLRGSAAKGKLVKVKASYKLSDAAKKASPKTKAKPAKAAAAKTTAPKPAKAAAAKSKKAAAAKPKKAAAAGTKRKVPEKKVVAKPKKSPAAKAKAKPKTLKSPASKKARKASA

SEQ ID NO: 61610 - protein, 126 aa, Zea mays
  Clone ID: LIB3078-009-H9_FLI.pep
HAQLHSAANNAPCPGQEPSRIAPMSGGTFVAVPGKMHYPSAECASAFLCSPIKKHLLDHFHKAPLPVPEYHPVPDHSKPPVPEYHPVPEHSKPAPEYHPPTPEYHPPTPVYGQPKPTPIYHPPAEH

SEQ ID NO: 61611 - protein, 258 aa, Zea mays
  Clone ID: LIB3078-003-D3_FLI.pep
RPSHFYISYNIVQVHHASHHEHFIIIIIIVDSLPSSPPPTKRKSSISAIKPNNACMCGSTPRTAKFIRAPHLGVKAWKMVAWPGSARWAKRLSMGPVPVYSAWNQAPMTASMARRPFLISLVRSSLIFSGEPEPQPSGSNHRPPGYPTSVPVSLLLGKMGSVLTLPGLMMSAQRRPSAQPMRMSSMMKRVVVSVKYCCSPAVYQKGVLRTPILVRNSGMKIPAAPSIAHRQCTSSACTFHRRLSGSDPRPQGSKPKSP

SEQ ID NO: 61612 - protein, 98 aa, Zea mays
  Clone ID: LIB3078-017-C11_FLI.pep
DIMLQEVFDRLKAKDINLQVTEKFKERVVDEGYNPSYGARPLRRAIMRLLEDSLAEKMLAGEVKEGDSAIVDVDSEGKVVVLNGQGGIPELSTPAITV

SEQ ID NO: 61613 - protein, 191 aa, Zea mays
  Clone ID: LIB3078-019-G6_FLI.pep
DQLQPAEKEIPARRRGGGHGGDGQGHAGLVWRRQPQRRALAFCRSIPGHGGTGENGPDGGVQGSILDDCAPWSSLLRAFQRSRLACGQEIQYVRRADCLRGLWRISPLVVWAWLVSERRRSFSLHSIHDHHGYLASSSCELAPLVYRWPQVSQFAALVRAFPWSCRLHRPLLDSRGGGLPEEELQILTQAA

SEQ ID NO: 61614 - protein, 192 aa, Zea mays
  Clone ID: LIB3078-021-E12_FLI.pep
IHNGCCSDTVDQLAINTVSLYKLLGGDAVAEVVEGVAVQEQRAGLEPDSLRATVSAELVAGLWDDSASGTEHGPSGMDQLVGLVLGEVLWLLAQAKRVVAIVSRDLSGEVLRHLRPVQQPIRQVDPPVRTIPLGELVADVWRRGRYRSGLGLLGRLLAEKGDNLLSPRGGRCGGVAGGAREVELGAQNLGWS

SEQ ID NO: 61615 - protein, 139 aa, Zea mays
  Clone ID: LIB3078-027-A7_FLI.pep
WLGEGVSSVEQAEAHVVIRLLLGLFLLLLDSRGSSSRSTTSRCGSSNWSSSATRSNGEDEVLDVALLQELGKEGRPVGLDLDVGRLHDRGDLLGGDGDAIVAEDESGVGAGKLAGGHGFVRLPLTGRRICGIRLREAVR

SEQ ID NO: 61616 - protein, 203 aa, Zea mays
  Clone ID: LIB3078-030-F11_FLI.pep
SFEKSRIEKLQKEIESDNSAVVQLQYELEVERKALSMARAWAEEEAKKAREHARALEEARNQWERQGIRVVVEGELKDDASAGVTWANAGKENAVDESINQAEALLEKLKTMSGEMEVRSRGAVERVMQHVRSFIAILKQQAADARQWCTEFGACAASRANEVSAQVKGSVSAFGATLGDKSKRAMEECKDGLERISHRFKTD

SEQ ID NO: 61617 - protein, 56 aa, Zea mays
  Clone ID: LIB3078-030-F12_FLI.pep
PLVTNCSQGFGHDSWRKLHCLRNASHLSDHCHNVVEFVNSRTDSNSSSSCSYCHWC

SEQ ID NO: 61618 - protein, 161 aa, Zea mays
  Clone ID: LIB3078-033-B1_FLI.pep
RGIHIHGPRPPASHGGSSQAAGRAPPVPPLSMAAAPVGAQNRCVFVGNIPYDATEEQLVQICEEVGPVVSFRLVIDKETGKPKGYGFCEYKDEETALSARRNLQGYEINGRQLRVDFAENGRNTDRNREKVDDPQIFTVEEPFLPPLEFSVNLRSCIVFVL

SEQ ID NO: 61619 - protein, 57 aa, Zea mays
  Clone ID: LIB3078-033-B10_FLI.pep
TRNQELFRHLHKSSPATSCGGGGALWLGAVSATARYCGSAAAAAVQPQPYGPYLKQQ

SEQ ID NO: 61620 - protein, 324 aa, Zea mays
  Clone ID: LIB3078-034-D10_FLI.pep
QDDMLNAKELVQWENGLSFNDIAARQGIRIRRHCRPTASLKEIEEELGAPLNILEKIIWDKEIEVAEGHAKKPLEEVIQAATKAPPSRDFYGALEAAYKRNGVPALIAEVKKASPSRGVLRENFNPVEIAQAYEKNGAACLSILTDEKYFQGSFDNLEKVRSSGVKCPLLCKEFVIDKWQIYNARSKGADAILLIAAVLPDLDIRKFLQICEELGMTALIEVHDEREMERVLKINGVKLIGINNRSLETFVVDTSNTKMLLEKHGDSIREKGILVVGESGLFTPDDVAYVQNAGVSAVLVGESLVKQECPGRAIVGLFGKELLH

SEQ ID NO: 61621 - protein, 110 aa, Zea mays
  Clone ID: LIB3078-039-F9_FLI.pep
LKLIYSHTLYCHLQTAAVDDNKFNFRRNFTGEPVLQTTPEKPLCSSISVFTLQKPLVPLLQKTLHGFNCRWGFFSMCQGGIQFIPFSATGTGLWYYLAYIYANLLCSMFW

SEQ ID NO: 61622 - protein, 207 aa, Zea mays
  Clone ID: LIB3078-045-G4_FLI.pep
VPLPPLRLRRRRRTEPEPGALTNPRRQAAAGMVYYALLVGAELDGLTNLQPRHGCDDPNFPYYLKLKCENCGEVTAKSTYVTLSEQVDLPKGHGAAHLVQKCKLCGRDGTIVMIPGQGTPLTIEQSQKEEKTCLMVFDCRGYEPVEFSFGTGWKAESVHGTPFEIDCSEGEFSEYDEKGECPVELGKLQSTFKVVKKHERGGKTRFV

SEQ ID NO: 61623 - protein, 187 aa, Zea mays
  Clone ID: LIB3078-046-D6_FLI.pep
AAHQRRPVHRQPGDARHLQPAHRVVPLQPAGLPHRREPAAAGRRGRPRPRLPPRRALRAHRPAPQHARARPGGRARRRRPRRHPQRLPHHVRRRLLQRGRPVHGAHAHAHRPEEGGRQAADRRRLGQVHRRVLLRWYLRRALGILPPLRARPPLLLQVEYKFIKMHIYNIAPPPILLSACKGMPFQQ

SEQ ID NO: 61624 - protein, 148 aa, Zea mays
  Clone ID: LIB3078-046-G9_FLI.pep
SAVPSAPTPDVAEAQAPVAEEDDDDDVDLFGEETEDEKKAAEERAAAAKASGKKKESGKSSVLLDVKPWDDETDMAKLEEAVRSVQMEGLLWGASKLVPVGYGIKKLQIMMTIVDDLVSVDTLIEDYLCAEPVNEYVQSCDIVAFNKI

SEQ ID NO: 61625 - protein, 124 aa, Zea mays
  Clone ID: LIB3078-046-H3_FLI.pep
SSSASDDGRKHPNITQDTNKGFSTPQPGSTAKQIHASRSVFLLLVAVITAALCGDLLVVLLQGGQVLACLGELPLLHALADVPVHERALGVHEVELAVDAGEHLDDAGGVGDHAHGTLHLGEVG

SEQ ID NO: 61626 - protein, 120 aa, Zea mays
  Clone ID: LIB3078-055-B9_FLI.pep
RYVIISLHALLFFSKATTSSIRFWWPAKSKPTKKLPRQYVLAHGLVFIPGTAKYGVKDARGRTHWSLHGSLSGLTSEGSITSATVTSDESASALASPVDASASSMSDLPHLPPRAIAIIS

SEQ ID NO: 61627 - protein, 263 aa, Zea mays
  Clone ID: LIB3079-017-D10_FLI.pep
SPIRTQSNRHPAEMGRKFFVGGNWKCNGTTDQVEKIVKTLNEGNVPSSDVVEVVVSPPYVFLPVVKSQLRQEFQVAAQNCWVKKGGAFTGEISAEMLVNLGVPWVILGHSERRALLGESNEFVGDKVAFALSQGLKVIACVGETLEEREAGSTMDVVAAQTKAIAEKIKDWSNVVLAYEPVWAIGTGKVATPAQAQEVHASLRDWVKINVSPEVSESTRIIYGGSVTAANCKELAAQPDVDGFLVGGASLKPEFIDIINAAAV

SEQ ID NO: 61628 - protein, 192 aa, Zea mays
  Clone ID: LIB3079-017-D8_FLI.pep
EPCRKASRLAGDVAGKPVKPLIQPFTRCSTSALDVPVPLSQGMQTKLVSNFSSIHSIGKILFVCKYKQHSVTQLILIQHPVELISSLNNTFPVVAVYNKNKSLCVLKVVPPQGPDLVLATNIPNSEANVLILNSFNIESDSGDGGDDLAELELVEDGGLTGGIEPDHENPHLLLGEEAAEQLPKGETHLFPS

SEQ ID NO: 61629 - protein, 105 aa, Zea mays
  Clone ID: LIB3079-019-D2_FLI.pep
RTMLTTTCVSIQYLYPIVHPISTVEQHFQIFRSTNGTTIWTGRTIQRLKSQNYKSEVSVKYWHIGKARIATHAVANAESPGVFLQVEIIRSISSMHSSVPEATPM

SEQ ID NO: 61630 - protein, 223 aa, Zea mays
  Clone ID: LIB3079-024-E1_FLI.pep
SRPPATSMAGKAAADTGSNDRVVEVEGSSSSSMADVYKGELTPLQRHVSFFDRNKDGVIYPSETYQGFRAIGCGVALSAAAAVFVNGGLGPKTVLENEKPAPFKFPIYVKNIHRGKHGSDSGVYDSNGRFVPEKFEEIFKKYAHTRPDALTGKELQEMMKANREPKDLKGWLGGFTEWKVLYSLCKDKDGFLHKDTVRAVYDGSLFERLEQERNSKKESSKKK

SEQ ID NO: 61631 - protein, 240 aa, Zea mays
  Clone ID: LIB3079-031-D8_FLI.pep
TLHLVLRLRGGMQIFVKTLTGKTITLEVESSDTIDNVKAKIQDKEGIPPDQQRLIFAGKQLEDGRTLADYNIQKESTLHLVLRLRGGMQIFVKTLTGKTITLEVESSDTIDNVKAKIQDKEGIPPDQQRLIFAGKQLEDGRTLADYNIQKESTLHLVLRLRGGMQIFVKTLTGKTITLEVESSDTIDNVKAKIQDKEGIPPDQQRLIFAGKQLEDGRTLADYNIQKESTLHLVLRLRGGQ

SEQ ID NO: 61632 - protein, 115 aa, Zea mays; identical to SEQ ID NO: 36608
  Clone ID: LIB3078-012-D1_FLI.pep

SEQ ID NO: 61633 - protein, 114 aa, Zea mays
  Clone ID: LIB3078-014-D6_FLI.pep
FPTQNDKTLAICCLQLIGAGKTHRIVNHLSNNGIKVSGRKRLTTYYSSALWRNKISLHLRFGKQNMLVHTGIILSKLKLLGDATRILALHVEESSAGCRNQPDEDRGTLCLPHQ

SEQ ID NO: 61634 - protein, 166 aa, Zea mays; identical to SEQ ID NO: 58128
  Clone ID: LIB3078-016-F7_FLI.pep

SEQ ID NO: 61635 - protein, 151 aa, Zea mays
  Clone ID: LIB3078-019-A2_FLI.pep
FAHSLQPLHRAATATARMPFKRFVEIGRVALVNYGEDYGRLVVIVDVVDQNRALVDAPDMVRCQVNFKRLSLTDIKIDIKRVPKKTALIKAMEEADVKTKWENSSWGKKLIVQKRRASLNDFDRFKVMLAKIKRGGAIRQELAKLKKASTA

SEQ ID NO: 61636 - protein, 74 aa, Zea mays
  Clone ID: LIB3078-023-H10_FLI.pep
FAIGGGTSVKRSYASYVLKTCGQHSHIYKHEICRAQLCCIRTGGLVIWCYRNSETLVVCLWCPVLHDSCKSSMV

SEQ ID NO: 61637 - protein, 145 aa, Zea mays; identical to SEQ ID NO: 37232
  Clone ID: LIB3078-023-H6_FLI.pep

SEQ ID NO: 61638 - protein, 121 aa, Zea mays
  Clone ID: LIB3078-025-C7_FLI.pep
LSVCFPIHFEVGQCTRNIVVVTLVDLHHLREPLLALGVLLGEQVLLPGAPPHDLAPPRHPEPLRRRLVRLHLVALLPRRDDLERGGGGGRLARERRRDGGRGGGQRRAEEGFRRECEAGCG

SEQ ID NO: 61639 - protein, 179 aa, Zea mays
  Clone ID: LIB3078-028-B6_FLI.pep
PINRSDASTSTHPLPSSVIPRRVPSPQTSAMADQLTDEQIAEFKEAFSLFDKDGDGCITTKELGTVMRSLGQNPTEAELQDMINEVDADGNGTIDFPEFLNLMARKMKDTDSEEELKEAFRVFDKDQNGFISAAELRHVMTNLGEKLTDEEVDEMIREADVDGDGQINYEEFVKVMMAK

SEQ ID NO: 61640 - protein, 129 aa, Zea mays
  Clone ID: LIB3078-054-E10_FLI.pep
EINTWPFLVHLYSNKTLDAARVHEHSDLAPHGLRREVGLELGTDDARVSVRTGDLAPDAPVAGLIALGLGLVDVRHALASVPRDILLGVHPLDLHERRGLVLVRLGPLVSKDGAPDVEPDALSRASLHH

SEQ ID NO: 61641 - protein, 77 aa, Zea mays; identical to SEQ ID NO: 56361
  Clone ID: LIB3079-001-H6_FLI.pep

SEQ ID NO: 61642 - protein, 191 aa, Zea mays
  Clone ID: LIB3079-002-C1_FLI.pep
DQQRLIFAGKQLEDGRTLADYNIQKESTLHLVLRLRGGMQIFVKTLTGKTITLEVESSDTIDNVKAKIQDKEGIPPDQQRLIFAGKQLEDGRTLADYNIQKESTLHLVLRLRGGMQIFVKTLTGKTITLEVESSDTIDNVKAKIQDKEGIPPDQQRLIFAGKQLEDGRTLADYNIQKESTLHLVLRLRGGQ

SEQ ID NO: 61643 - protein, 474 aa, Zea mays
  Clone ID: LIB3079-002-H1_FLI.pep
PHQLCSATTILLFLERSNRRKHAPRRRVPSPHPLTIAGRRSARRGFESGKRAMGAKRAVLVGINYQGTKAELKGCHNDVARMRRCLVDRFGFDESGIRVLIDDGSAPQPTGANIRRELARLVGDARPGDLLFFHYSGHGIRLPAETGKDDDTGYDECIVPCDMNLITDQDFTELAQKVPSGCLFTIVSDSCHSGGLLDKTKEQIGHSTKQKQKQTQTQTQSRELEERSPSGTSFREFLKGTVREAFESQGIHLPHRSRSHQQGSGHGDDGDQESRYINTADAHVKNRSLPLSTLIEMLKEKTGKDDIDVGSIRLTLFNLFKDDASPKIKKFMKVMLNKLQQGQHGGIVGFMGALAQEVLKAKLDGKEEEEFDPAMKQHVHSDQEVYAGTTARVPSNGVLISGCQTDQTSADATTPKGVSYGALSNAIQAILAERGTVTNKELVLKARKMLSKQGYTQQPGLYCSDENASAAFIC

SEQ ID NO: 61644 - protein, 234 aa, Zea mays
  Clone ID: LIB3079-005-C3_FLI.pep
LQGRGACRKSTGVRPVVWKVEGQALKMSSTVPKSSNIFWHDCLVGKTDRQKLLNQKGCVVWITGLSGSGKSTLACTLGRELHTRGKLAYVLDGDNLRHGLNKDLGFKAEDRAENIRRVGEVAKLFSDAGLVCIASLISPYRRDRESCRALLSDGSFIEVFLNMSLELCEARDPKGLYKLARAGKIKGFTGIDDPYEAPLNCEIEIKEIDGVCPSPSDMAGQVVTYLEEKGFLHE

SEQ ID NO: 61645 - protein, 138 aa, Zea mays
  Clone ID: LIB3079-008-A4_FLI.pep
TIPTIGFNVETVQYNNIKFQVWDLGGQTSIRPYWRCYFPNTQAIIYVVDSSDTDRLVTAKEEFHAILEEDELKGAVVLVYANKQDLPGALDDAAITESLELHKIKSRQWAIFKTSAIKGEGLFEGLDWLSNTLKSGSS

SEQ ID NO: 61646 - protein, 266 aa, Zea mays; identical to SEQ ID NO: 60141
  Clone ID: LIB3079-008-C5_FLI.pep

SEQ ID NO: 61647 - protein, 102 aa, Zea mays
  Clone ID: LIB3079-010-D5_FLI.pep
MLASNTSSASSDVKTWQAFPDTQTQARPKVDHGTNGSQNITKNTTSGASPDAWGFGTDSFRTSSAPVKAATQINRAAQGSSSQRFNSGVAKKVEQPSGWAGF

SEQ ID NO: 61648 - protein, 375 aa, Zea mays
  Clone ID: LIB3079-012-B5_FLI.pep
GLFRLGGGRERSAASPGGSKAREKMQGGSSGIVYGGLKYQARCIADIRADAGSTTFLAGTLSLKEENEVHLIRFSPAESELVCDGLFYHPNEIWDLKSCPFDHRVFSTVYTSGEGYGASVWKIPELNGQSNSPQLEQLFELSGHTGKIRRVIWWPLGKHDKLISIDDRNIFLWNIDTSKKIAKVISQGSTDMLPNLRGGAWDPHNHNLVAAISDSSLQLWDLRSMEKSTAIEHAHIRDVDYNPKKQNIVATAEEEFGIRLWDLRMLKYPLKDLPGHSHWTWAVRHNPAYDELLLSAGTDSTVNLWLAKVSSDDPESDSPSALSNRQEVPLLNSYTDYEDSIYGIAWSSHDPSLFASLSYDGRVVLESVKPYLQRK

SEQ ID NO: 61649 - protein, 58 aa, Zea mays
  Clone ID: LIB3079-017-B10_FLI.pep
HSRNMGGYHEVSVALCIMFSFVHQLQQLFAKLFEFCNNWNVVAWSDYVCFLKHSCLSL

SEQ ID NO: 61650 - protein, 400 aa, Zea mays
  Clone ID: LIB3079-017-G5_FLI.pep
RIVVLASLADPPLPSPRFKMQIFVKTLTGKTITLEVESSDTIDNVKAKIQDKEGIPPDQQRLIFAGKQLEDGRTLADYNIQKESTLHLVLRLRGGMQIFVKTLTGKTITLEVESSDTIDNVKAKIQDKEGIPPDQQRLIFAGKQLEDGRTLADYNIQKESTLHLVLRLRGGMQIFVKTLTGKTITLEVESSDTIDNVKAKIQDKEGIPPDQQRLIFAGKQLEDGRTLADYNIQKESTLHLVLRLRGGMQIFVKTLTGKTITLEVESSDTIDNVKAKIQDKEGIPPDQQRLIFAGKQLEDGRTLADYNIQKESTLHLVLRLRGGMQIFVKTLTGKTITLEVESSDTIDNVKAKIQDKEGIPPDQQRLIFAGKQLEDGRTLADYNIQKESTLHLVLRLRGGY

SEQ ID NO: 61651 - protein, 135 aa, Zea mays
  Clone ID: LIB3079-021-C5_FLI.pep
EQQIKSLISSVPTKPQQPSFMSDLDVQLPSAFDPFAEANAEDSGAGPGTKDYVHVRIQQRNGRKSLTTVQGLKKEFSYNKILKDLKKEFCCNGTVVQDPELGQVIQLQGDQRKNVATFLVQAGIAKKENIKIHGF

SEQ ID NO: 61652 - protein, 166 aa, Zea mays
  Clone ID: LIB3079-037-G9_FLI.pep
RYWIHFQKSLHIQTESIQLETCTVRFAYYPCNNILQPSKANIKALFLSSFAHYALDCIYPLTGRHDYSSNSIARDETQLRTMFQKHVACTLLGVDANSIVGDDGAGLGRDLELLRGVLEHRGKGRRLGHAEHFERELGVGGEDDLEGYLPSCAAASRRHGGVRLRL

SEQ ID NO: 61653 - protein, 232 aa, Zea mays
  Clone ID: LIB3079-041-D1_FLI.pep
IKLRAIHDKLRPPLRSPPSYSDPKERTQGESTMTEGGRPNRPDQRDLGELSAVSDLDHLGGGAVAGAHLLDGLDDVHALDDLAEDDVLAVEPRGRDGADEELGAVGVGPGVGHGEHTGGGVLAHELLVGELLAVDGLAAGAVAAGEVAALAHELGDDAVEGGALVVERLPGLAHALLARAQRAEVLRGLGHLVGVQLHHDPARRGAADGHVEEDARVRHRDRELGFGDIFPS

SEQ ID NO: 61654 - protein, 147 aa, Zea mays
  Clone ID: LIB3079-052-B6_FLI.pep
KKQLYTALDKAKAKLENALHHPTEEVGEEHQCFHSPLSYPETEQYPREEEKDQAENKAEDDVHNPLINSKTHTTLACILALVQREAPVLPQRAQRPAQLPGLDIEQRLRLPVVARDNSTATIPALRQLALQQLLLGLRRRRGVPLPL

SEQ ID NO: 61655 - protein, 122 aa, Zea mays
  Clone ID: LIB3079-055-B10_FLI.pep
GSTARLLAPLDGTPSLTLLRRALATTLQHFQFSQTLLLLARHDERVVALDVVGVPLRHLVAHHLLPQELRRRAPPRRVQRVAEDGRPHLRGSRRRRRRQQPPQSARRRAHFSPGLLLLLCGR

SEQ ID NO: 61656 - protein, 171 aa, Zea mays
  Clone ID: LIB3088-007-C10_FLI.pep
QDSLQAPHLAQGGSPEITETMVKAVAVLAGTDVKGTIFFSQEGDGPTTVTGSISGLKPGLHGFHVHALGDTTNGCMSTGPHFNPVGKEHGAPEDEDRHAGDLGNVTAGEDGVVNVNITDSQIPLAGPHSIIGRAVVVHADPDDLGKGGHELSKSTGNAGGRVACGIIGLQG

SEQ ID NO: 61657 - protein, 162 aa, Zea mays
  Clone ID: LIB3088-024-E11_FLI.pep
SLPSLPQILPQIAMADQLTDDQIAEFKEAFSLFDKDGDGCITTKELGTVMRSLGQNPTEAELQDMINEVDADGNGTIDFPEFLNLMARKMKDTDSEEELKEAFRVFDKDQNGFISAAELRHVMTNLGEKLTDEEVDEMIREADVDGDGQINYEEFVKVMMAK

SEQ ID NO: 61658 - protein, 104 aa, Zea mays
  Clone ID: LIB3079-036-C4_FLI.pep
LCLTTHYIDANFILKKEDYCIQSCKISPSRIQAFNEIAERSGFPSKAGLILDVPNCCNSTHNMIMEAIEYKVVLKRYAEEQLEPSPDDEEWTNSEAIGEFLGGI

SEQ ID NO: 61659 - protein, 117 aa, Zea mays
  Clone ID: LIB3079-038-B9_FLI.pep
ASEPPPERERERERERGRVRVGIQVSNSLSRGDRKVVTHRSTASSSPPMADWGPVVIATVLFVLLTPGLLFQLPAHGRIVGFGTMHTSGVAILVHAVLYFALITIFLIAIGVHIYAG

SEQ ID NO: 61660 - protein, 117 aa, Zea mays
  Clone ID: LIB3079-042-C1_FLI.pep
RLVRARYLLHITSPELGGRRGRSRRSASGGVLPDGVPELVLVDGSKALERLAVPDEAEGRHHMDAVDLRDFQQFVHVDAALPRDRHDAALIAEVEAHHAHLRFTVSHSAVNHCSFQI

SEQ ID NO: 61661 - protein, 128 aa, Zea mays; identical to SEQ ID NO: 41546
  Clone ID: LIB3079-043-H8_FLI.pep

SEQ ID NO: 61662 - protein, 122 aa, Zea mays
  Clone ID: LIB3079-046-A10_FLI.pep
LLTGLHISSTVSWETGYLHTEDLGLAGVLHAGGDALHGQDEGVLQAWSVLALLVQLHQLRRLTLVGELLGQGRLRAHLEARVAYPLQGVGLAHVQSGDVGLTQPQTLLQIRITFKDVLVTSN

SEQ ID NO: 61663 - protein, 134 aa, Zea mays
  Clone ID: LIB3079-047-A4_FLI.pep
AWPFRVHLYSNKNLTLDAARVHEHSDLAPHGLRREVGLELGADDARVAVRAGDLAPDAPVAGLAALGLSLVDVRHALASVPRDVLLGVHPLDLNERRGLVLVRLGPLVSEDGAPDVEPDALSRASLHHGGRLLP

SEQ ID NO: 61664 - protein, 88 aa, Zea mays
  Clone ID: LIB3079-049-D7_FLI.pep
LEDSASVHEGVLCKCDASRHEEQKPFSKGQENCAATRRGQAEEEVVAREERPLSSKAGVLEAALPRLPIVSSQCPSLLFDQFHKQEAT

SEQ ID NO: 61665 - protein, 191 aa, Zea mays
  Clone ID: LIB3079-055-G8_FLI.pep
SPAGLVTRHAGRGSTAAASSIHPLSPPRFASSADSSSLGRPRPLFRRASSPEMANARSGVAVNDECMLKFGELQSKRLHRFLTFKMDDKFKEIVVDQVGDRATSYEDFTNSLPENDCRYAIYDFDFVTAEDVQKSRIFYILWSPSSAKVKSKMLYASSNQKFKSGLNGIQVELQATDASEISLDEIKDRAR

SEQ ID NO: 61666 - protein, 68 aa, Zea mays
  Clone ID: LIB3088-002-F6_FLI.pep
YPPAMVLLVLCLFLVFLGSQLLCFMWSHTALFVVLHHRSWLTQKPTFWGQQLNEMFAREFRALWNLFG

SEQ ID NO: 61667 - protein, 46 aa, Zea mays
  Clone ID: LIB3088-003-C11_FLI.pep
HNTSFLIPIESIMPVVRTSFLESSQQDTTKHYKFQEFPLHGDSAVS

SEQ ID NO: 61668 - protein, 205 aa, Zea mays
  Clone ID: LIB3088-004-A6_FLI.pep
PLSTAQSPGAAARKRLDTVNGATTNSKAKSVSQKAMGASSARKEKHKDPSMQIKGTECINTTTSIEEHLHKELPDPVDLKSMEMTVPDQHEPSFNEPEHVLKDDEKSEGHFSEEKVDAGANEIHNGGQDDNGGVKTIYECGIVEKKADRSVDKTVPKTEVAQVWRKDDPKGNDVIEETKSKLLLERKSRVKALVGAFETVLSFKE

SEQ ID NO: 61669 - protein, 118 aa, Zea mays
  Clone ID: LIB3088-022-A12_FLI.pep
HQQFGYYSPERTKIIIIITPKRYNYYYVMETSRWHISRCSPSGTCLSWHHRSRPHQCSDRAGPASWPLRAPAGPSALPPRSQGALAMSSAPSSAEPGHRRTTHAMGSETGSLHSGSEL

SEQ ID NO: 61670 - protein, 160 aa, Zea mays
  Clone ID: LIB3088-057-E11_FLI.pep
VRHLRGEIDKLVTARKELSAEAASLVEELNREQSVKQQLPVLKTEIDGLQQELVHVRTACGLEQKGNLELLEQRKAMEKNMLSMAQEIEQMRGELANFEVRPRGPGGAYGMQIGSSEVTFTKNPYEDGYNAYVGVPEKDPLHPPEYASWGTYDRSRLQYR

SEQ ID NO: 61671 - protein, 67 aa, Zea mays
  Clone ID: LIB3115-010-H11_FLI.pep
GMSTSERILLREDAECCICLSSYEDGAELSALPCNHHFHWPCITKWLRMNATCPLCKYNILKGSDSA

SEQ ID NO: 61672 - protein, 233 aa, Zea mays
  Clone ID: LIB3115-014-H2_FLI.pep
DYGMLLKTCTVRYCRHNTVTFLHKRHQPSPESKRSGNYHRGNTPNRTTIVLLQEEETSARRIARLGAGELGDGFGALGDGVLGELAGEDEANGGLDLAGRNGRLLVVPRQLGRLRRQLLEDVVDEGVHDGHGLGRDANVRVHLLQHLEDVDLVRLHRLLCLLLPLLLATLLACGLARGEPLLSLGLLPRRGLLRRRLLLRRLLGGGLLLGLGRHWNRAAVSGLGFLSTRSGRR

SEQ ID NO: 61673 - protein, 81 aa, Zea mays
  Clone ID: LIB3115-021-G9_FLI.pep
APWGRAPDAPTPGSHFPGQLPGLPGQMTQGIGGIQAGQAPLTPEMEKMLVQQVLGMSAEQINMLPPEQRQQVLQLRDMLRQ

SEQ ID NO: 61674 - protein, 162 aa, Zea mays
  Clone ID: LIB3116-008-D11_FLI.pep
KFRLHTLLYQGGIKYILLSDFSICTSKHKAHQVAVPPAYTTRVTRRGIGIYVGARAAMQLDQSVYMPTRRSVGRGGSWSGSRCTGRCSGRSRSGVRRRDPRGSRTTGSGASRRGCQPRACTPRPRSRSCAARRPAASGRRAAGTPPRSRSRRSRSRFRSRSR

SEQ ID NO: 61675 - protein, 223 aa, Zea mays
  Clone ID: LIB3116-014-G10_FLI.pep
VDLSAAAMSKLQSESVKDAISQIVGDAKEKNRKFTETVELQIGLKNYDPQKDKRFSGSVKLPHIPRPKMKVCMLGDAQHVEEAEKMGLDYMDVEALKKMNKNKKLVKRLAKKYHAFLASEAIIKQIPRLLGPGLNKAGKFPTLVTHQESLESKVNETKATVKFQLKKVLCMGVAVGNLAMEEKQIQQNIQMSVNFLVSLLKKNWQNVRCLYVKSTMGKPYRVF

SEQ ID NO: 61676 - protein, 198 aa, Zea mays
  Clone ID: LIB3116-020-E3_FLI.pep
MLMLRRHVQACLELERMGNNRDGFIGQSGLRPPRSSSHTSRSTSPASIGYSGCCSAAAAGGAGVYGAAATRGAACPAACRNSSTPRCGRRRPRLSPSCCGDCRSASSAPVTRCTMAQKVATSVLMYVVGARLDGRSRRRFPVCPPAGPSRHRTDEDSDATPVGVQSVTTTAPCISIAAVAVATRLEVRRADGAELAST

SEQ ID NO: 61677 - protein, 112 aa, Zea mays
  Clone ID: LIB3116-022-A8_FLI.pep
GETRFKSAGMVDETNTHPRITLHDSQQEMESGSLYRQFGDCIQLIYIYNIRLFRRIICILFSMERTLAPVLYVSSWKEPWPHASYTLHSSVSGLSLQKSSRGSPLPAAAAPG

SEQ ID NO: 61678 - protein, 160 aa, Zea mays
  Clone ID: LIB3116-022-D3_FLI.pep
QHFPDRRGWNHNQFEGKEFLIDAQVDLLGKDRNGCSGRRRRARVACDEVVVGVPTAGGLADLGIPGELRVEAVEGPEAVGAQREAPRRLSALAPLLHLVDMLPPNLVALVRVLHQTEDQILREVHDETHRRLRSPSSPSRVSLGSAGASVSLSVPGESVP

SEQ ID NO: 61679 - protein, 232 aa, Zea mays
  Clone ID: LIB3116-022-D7_FLI.pep
EQAEEELCQATMGISRDSMHKRRATGGKQKAWRKKRKYELGRQPANTKLSSNKTVRRVRVRGGNVKWRALRLDTGNYSWGSEAVTRKTRILDVVYNASNNELVRTQTLVKSAIVQVDAAPFKQWYLTHYGVDIGRKKKTPAAKKDNAEGQEVEAAAEETKKSNHVTRKLEKRKEGRTLDAHIEEQFGSGRLLACISSRPGQCGRADGYILEGKELEFYMKKLQRKKGKSAVA

SEQ ID NO: 61680 - protein, 166 aa, Zea mays
  Clone ID: LIB3116-025-A11_FLI.pep
AGTDFLDLVDVLVLELDVVAALLAFLGPIDVDALVEPERVRKLPVGLEQARLVVHVLEDNVGLVVLVVAEADEDDVPSRDPDLLVHLTPDMAEAARAIDADGLAPPVAEHPGHLRVLLPVFLEDELALVVVSLVLSSLPVLASLTLVLRHLRGGRERRDETLGARS

SEQ ID NO: 61681 - protein, 188 aa, Zea mays; identical to SEQ ID NO: 54100
  Clone ID: LIB3116-028-A10_FLI.pep

SEQ ID NO: 61682 - protein, 96 aa, Zea mays
  Clone ID: LIB3116-028-C12_FLI.pep
ADGEMFEVAAEQLGLEPDVCVVFGNSNLTTESAHNAGMRCVAVAGRHPAYELQSANHVVRWLDQLSIVDLQRLANGEVIGRRGRESDMDMEIVIEE

SEQ ID NO: 61683 - protein, 131 aa, Zea mays
  Clone ID: LIB3116-028-C4_FLI.pep
AVADRRKRKKKRQRARMPCLNVSTNVNLEGVDTSAILAEASKSVANIIGKPEAYVMVVLKGSVPMAFGGTQEPAAYGELVSIGGLNPDVNKKLSAGIASILESKLSVPKSRFYLKFYDSKRSDFGWNGSTF

SEQ ID NO: 61684 - protein, 206 aa, Zea mays
  Clone ID: LIB3116-028-F12_FLI.pep
TLWTRVNITAANRITWPRGPHRSVPPVPVGVAVAAATVATAVAAATTTVAAAATVAAATAVAAAAITAPATAVAAASTATTVPTAAASTAAAGLGLVDGDVAAVQLLAVHALDGVPHRLLRGEGDEAEAAGPLRLPIEDDLGLEDLAVGAEGVVEGVVVRGPGEAADEAAVLNIRRRHLDPLTHETEPRRTSRTRTRTGGGGEANP

SEQ ID NO: 61685 - protein, 204 aa, Zea mays
  Clone ID: LIB3116-028-F2_FLI.pep
NQLSHDSRHKPYKYFERQHHPWAMAETLDNPDTAAASTTDGLITTAKTEHQVEGALLLDIVVCKGATILQLLAGEDQTLLVWGNPLLVLDLSLHVVDGVRALNLQGYGLASQGLHKDLHTAPQAEHQMEGALLLDVVVSQGATILQLLAGEDQPLLVRGDTLLVLDLGLHIINGVGALNLQGDGLASQCLHEDLHSSPEAQHQV

SEQ ID NO: 61686 - protein, 137 aa, Zea mays; identical to SEQ ID NO: 47611
  Clone ID: LIB3116-028-F4_FLI.pep

SEQ ID NO: 61687 - protein, 60 aa, Zea mays
  Clone ID: LIB3088-050-E7_FLI.pep
LDDPYFSALMSITLVDGVLVCVERAETPVFLNLEPSSPVLLVRGNISCSSWLYIPKQTMF

SEQ ID NO: 61688 - protein, 247 aa, Zea mays
  Clone ID: LIB3088-058-F1_FLI.pep
GSVVACHPRVSFPVGASSDLIWTPPPPLTQVVLMAPAVEAVKETGSFQKVPALNERILSSMSRRSVAAHPWHDLEIGPGAPTIFNCVIEIPRGSKVKYELDKKTGLIKVDRVLYSSVVYPHNYGFIPRTLCEDSDPLDVLVIMQEPVIPGCFLRAKAIGLMPMIDQGEADDKIIAVCADDPEYRHYNDIKELPPHRLAEIRRFFEDYKKNENKEVAVNDFLPASAAYEAIQHSMDLYATYIVEGLRR

SEQ ID NO: 61689 - protein, 81 aa, Zea mays
  Clone ID: LIB3114-043-A6_FLI.pep
KKSSAIPRSREKMPKQIYEIKDFLLTARRKDARSVKIKRSKDVVKFKVRCSKYLYTLCVFDAEKANKLKQSLPPGLTVEEV

SEQ ID NO: 61690 - protein, 144 aa, Zea mays
  Clone ID: LIB3114-057-A12_FLI.pep
PCLNTNCTFNQDKQNCNLITRLTTLKTGSQKFKHSTNSKTPKTIQEPTKNARASAQPPGLPLGLEQGEDVTLANGPLDIPHDEPVLVIQKLHSDLGHLTPGAGPAHHLHHNSKLHLGVHALASRVDGSRRALSHARRAGAAAAL

SEQ ID NO: 61691 - protein, 41 aa, Zea mays
  Clone ID: LIB3115-003-F8_FLI.pep
LFFTLASCCISNTASSFLILIDAVFYKMFQQKSVVIITSTS

SEQ ID NO: 61692 - protein, 176 aa, Zea mays
  Clone ID: LIB3115-007-H5_FLI.pep
IRHETDRIDGGGIAVVKPRGRSDEPQDQETQARSERPWIMAGAVDRILFTGRRYYIYTPRRRPPPLDSRAPSPGRASSVAAAAGAAAAGAALAGVAVAAAALGGRLEAAGAGLGGRRGEDRGLDAAGGGGLHVRVHTAAVASAAAGAAGAAPALAAAARRHDHRRREEVWFLLVLL

SEQ ID NO: 61693 - protein, 206 aa, Zea mays
  Clone ID: LIB3115-010-F4_FLI.pep
RRSQSLPSSRRRHRCSAEATPHRRQDADLREDPDGENDHVGGGVLGHHRQREGQDTGQGGHPAGPAAANLRRQAARGRPHPRRLQHPEGVHPPPGAPPPRWRQEAQEEDVHQAQEDQAQAQEGKARSAAVLQGGRRHRQGDPPPQGVPQHRVRCGCLHGQPLRPPLLRQVRPHLRLQSEGVIPCAALLHPPTYQAFTCWLLDLNII

SEQ ID NO: 61694 - protein, 133 aa, Zea mays
  Clone ID: LIB3115-011-E3_FLI.pep
SFIYIGHQPDDACVVALLKMLIISSTPHLGVKAWKMVAWPGSARWAKRLSMGPVPVYSAWNQAPMTASMARRPFLISLVRSSLIFSGEPLPQPSGSNQRPPGYPTSVPVSLLLGKMGSVLTLPGLMMSAHCRP

SEQ ID NO: 61695 - protein, 226 aa, Zea mays
  Clone ID: LIB3115-013-G2_FLI.pep
SIGRGEMKATLKGRYEGDKATAATSLAAPAGDLRLKASATEAVFANGPSLRGLTLTLEKPGAFLVDLKPHNQDVRFQFMKSALVLDKRVSLTYTHSTSLAAPAPPSRTTLDCTATFDPANKVSLSHTLGSGGCRVKYTYAHGVERLTTIEPLFDTNKNAWEFAVTRKLAGGDAVKGTYAATTKLLGLEWSRDSIAGGSLKVATMFDLSDQPKAPKLIAESTWNYEI

SEQ ID NO: 61696 - protein, 74 aa, Zea mays
  Clone ID: LIB3115-016-B5_FLI.pep
ATDASKNSSDVLRFVKTGCPSLCGLLRQRCVMYFRNWDFYEMYLREPCLFRFSDIGFDLCDTNRSFSPYNFLML

SEQ ID NO: 61697 - protein, 170 aa, Zea mays
  Clone ID: LIB3115-016-F5_FLI.pep
RYLRSRRQGSTQQATSRKVRLNEPTRREKKNQSRENTKIPAETDFYSELHYSYHSRPFLPSPIFAFTRSTPYQSYFQLPTYLSCGGSEVISSERLEVLLGTSRSQFSTKEGRLGGSGAVEGYVNSVFVCGTLEMFVLTLSKGFNFLLFTYGRFNLSFYCWLRNANGVFVK

SEQ ID NO: 61698 - protein, 227 aa, Zea mays
  Clone ID: LIB3115-020-A11_FLI.pep
IDKITRPKPGWAHTSVPPAAAAAAVAATTTLAPTAVAATASVAAATTLAPTAVAATAAITAVTAPATIAAAAATAAVATAATATATGLGLVNGDVTAVELLAVHVLDSVEHGVLGGEGNEAEAARPPRLPVGDDLHNHMKTSCSIRANADLYQNEADLLNHDPDLAPTAQTDRGMKPSEDEANLGVEDLAVGGEGILQRLVAGGPGKPADEATVLHISRRHRPSTKP

SEQ ID NO: 61699 - protein, 156 aa, Zea mays
  Clone ID: LIB3115-025-G4_FLI.pep
APASQLRRSQSCAPQAASSMADTKASPAVTLRTRKFMTNRLLSRKQFVLEVLHPGRANVSKAELKERLAKMYEVKDPNCIFVFKFRTHFGGGKSTGFGLIYDNVDSAKKFEPKYRLIRNGLATKVEKSRKQMKERKNRAKKIRGVKKTKAGDAKKK

SEQ ID NO: 61700 - protein, 102 aa, Zea mays
  Clone ID: LIB3115-029-D2_FLI.pep
AFPVFPTERSSQREVARSSRRRSTPRPPPTRTAMGFWVTTLIFLLAGVAASLFTLLCCNRGPSTNLFHLTLVTTAVICCWMMYAIVYLAQMKPLINPILSGE

SEQ ID NO: 61701 - protein, 176 aa, Zea mays
  Clone ID: LIB3116-004-G8_FLI.pep
HGRKMDHSHMDHGGHMGHDMPGMGGDGPKCNMNMLFTWDTTDLCIVFPSWHISGTGSLIFSLLAVVLLTAGYEAIREISRRYEAYSKGIMEGPRDDADESSSLLGPGRNGGVGRSAEQQMKMIKAVLYAVQVFYSFFIMLLFMTYNGWIMLAVAVGAFVGYLMFSQSSSTKSVACH

SEQ ID NO: 61702 - protein, 134 aa, Zea mays
  Clone ID: LIB3116-005-F1_FLI.pep
KYAADPLILVVQTNTPVVVCVSNMNSFLFSCSEIHSIRPSSLERATSGDGDWGRGRLLGRLLGVGEILGVVDDGEEEGARGAARNLLPEAEVVERDLEEVAAGARVRVRLQLRVPLHVLDLHLVVRRHLAAAKP

SEQ ID NO: 61703 - protein, 131 aa, Zea mays
  Clone ID: LIB3116-007-D5_FLI.pep
GAEELAPKISITKLRCTAVHKHLPKQNEGQPAPIGCNSQIETTEVTGYLHNLYRTLIKHKIGSESRQRHSLGEIPELAEHADEAGHGDAFEERLRVILLPRGRVHLRIRQPILVPYLVPYHPPGPPRRAAA

SEQ ID NO: 61704 - protein, 141 aa, Zea mays
  Clone ID: LIB3116-011-F10_FLI.pep
CRSPRTSPIRFTKGLRPAAMAAKLAQLRTQVTRAAEFASKHGCSYYKEVMEKNKQYVVQPPTVEKCQELSKQLFYTRLASLPGRYESFWKELDCVKQVWKNRKDLTVEDLGIASLFGVELYAWFCVGEIVGRGFTLTGYKV

SEQ ID NO: 61705 - protein, 90 aa, Zea mays
  Clone ID: LIB3116-014-G2_FLI.pep
LVIIFCMGEDGWAISSHKKKNTSICPSWFLVLCDLSEALNCEYRQKQLSAGYFTSHNGASWIQNNYLQKKSWNHQTQNIFTQKSELNRRL

SEQ ID NO: 61706 - protein, 86 aa, Zea mays
  Clone ID: LIB3116-027-E7_FLI.pep
TNYPRCPPSRRRRRKSPSSPARQMAGGRVAHATLKGPSVVKEIFIGLTLGLIAGGMWKMHHWNEQRKTRSFYDMLDKGQISVVVEE

SEQ ID NO: 61707 - protein, 168 aa, Zea mays; identical to SEQ ID NO: 37658
  Clone ID: LIB3118-023-A8_FLI.pep

SEQ ID NO: 61708 - protein, 71 aa, Zea mays
  Clone ID: LIB3118-033-B11_FLI.pep
QKRIFSMLSTRSSRATRSSVQHPSIWCTTSRRVFMGSVVSRNSGSFSWLYHHEILYAKVVVCLANWMPSDL

SEQ ID NO: 61709 - protein, 126 aa, Zea mays; identical to SEQ ID NO: 61333
  Clone ID: LIB3118-007-B6_FLI.pep

SEQ ID NO: 61710 - protein, 131 aa, Zea mays
  Clone ID: LIB3118-014-D6_FLI.pep
TTMHTLLIISHCLCCKKDTGYMILHLYCDSPRAARARHGHTHTYTRTPLPCIFSPTEDDGDLPKMYSCPTWPIERLQAARAPRALSSTGHAPPSELAPDVVFTVVAAAAGEAEGGALGYMAAASGQCWGPG

SEQ ID NO: 61711 - protein, 116 aa, Zea mays
  Clone ID: LIB3118-022-H6_FLI.pep
WRRRGSPPCETPARCSPSGASPAAASPRTSPTPPRSRSSRHTFAPTNQSTAQQRTRSLLVSQQLKMEIGRAESRGDGRLDVLLGHAHRFFASSSPVCSGGATDWQSKTTTWPRRQQ

SEQ ID NO: 61712 - protein, 156 aa, Zea mays
  Clone ID: LIB3118-023-D7_FLI.pep
EHPGMSTPARKRLMRDFKRLMQDPPAGISGAPQDNNIMLWNAVIFGPDDTPWDGGTFKLTLQFNEEYPNKPPTVRFVSRMFHPNIYADGSICLDILQNQWSPIYDVAAILTSIQSLLCDPNPNSPANSEAARMFSENKREYNRKVREVVEQSWTAD

SEQ ID NO: 61713 - protein, 68 aa, Zea mays
  Clone ID: LIB3118-027-F11_FLI.pep
QILHRLPNAHKFDGKITIYIEQRHSFIGPSINVVISAVLSLSFFFFVSLNWGLNCTLLVMREFTHQGA

SEQ ID NO: 61714 - protein, 103 aa, Zea mays
  Clone ID: LIB3118-028-D12_FLI.pep
DVKRDRLFRGFASMSTRGGEAARQATVKIIETVHVEADRYSFKSIVQRLTGRDAVVGGGGDYSEGAPDRGSYEEAAAQRAAGFTSKQASRPFADRHACKDESC

SEQ ID NO: 61715 - protein, 124 aa, Zea mays; identical to SEQ ID NO: 47585
  Clone ID: LIB3118-040-C2_FLI.pep

SEQ ID NO: 61716 - protein, 94 aa, Zea mays
  Clone ID: UC-ZMFLB73150E08_FLI.pep
IFHYNRGREHYSPLKHIFFSTTGSYHRHHLSNIHDTSSKMKHGGGQKKIALAELQISGVGISHPVRSQGDSTPIHCHAKGGGAPGTTSINLPLA

SEQ ID NO: 61717 - protein, 143 aa, Zea mays
  Clone ID: UC-ZMFLB73204E01_FLI.pep
HNLPDIIFIIITCKFAANDNTHETTRVQDGHSRTQIQRNSTNRPADRYKSRGDGEQRGETVGQAADGAGGHRGVAAEVPGLDHPGDVPVLHRDPGVALALRREGDLRRGSRGGGGRCREVEGDDGARLEVLGLEEVGDLLERL

SEQ ID NO: 61718 - protein, 83 aa, Zea mays
  Clone ID: UC-ZMFLB73113C05_FLI.pep
ASVSRKGGAVTCHCDIDYSATQVTLSYKYVTLHLQQQARMPQIVKHPRGNSQLQPQVPVSRRGHFTIQHRSIASLHVLESISR

SEQ ID NO: 61719 - protein, 318 aa, Zea mays
  Clone ID: UC-ZMFLB73162E09_FLI.pep
GDRARLYYLYASIVASHHQSCAVPDPPRVLSCRRWKPCPPRTQPAARRRRRRATPARACRRWCTAGPTPRGCACRATATCTAPTPCPLATPGRRSAPGAAQPLPLRPATRGGFLCASCRLGEEKDERDGGGAADSSSDDGGAVEGYAGCPSVADLATILGAGSAWEEPQTLRLESRSSGGELADEVIRQLVELARSEAAARAEMEQLTPWPSPELAAITGQYADFGALDADTAWHDDAAAIAAAVVPSTEEEQQAWIAAGCDVGACRTEEKARENDAALAEPCLSSFVEMSEICPASVVVTLSHGGDEGVDSSGKTAP

SEQ ID NO: 61720 - protein, 304 aa, Zea mays
  Clone ID: UC-ZMFLB73217C11_FLI.pep
PSHPATKFSTLRSNRNNEVRQEPQQPDRGDAPGLARQVPVLQGPQEAAEADRRRLWRAAEQAPAGGGRARRILAACDDPGGGRIRRAPRRRARQVQRLLPREGGGLRHPAEGVAGQGGERRGGGVGGGAAAGAQGDRRLPRRDGLAGELQRAQLHRAGQDPQEVRQEDRRADPPALHPERDAGAVLRHRRAVQARQGVRGDAGPAPPAPEPAAARAERQRRGRRQRRRRRQATTGGARRLIAAQRRRRWRWRHGAGGDRGHGEHVHEEYGGRAQGAQGDQERELHGERVLPAATTVIDTLCSVQ

SEQ ID NO: 61721 - protein, 35 aa, Zea mays
  Clone ID: UC-ZMFLB73029E08_FLI.pep
SNSEKWLHTTGKKVYACSKHQLSTYQMNISGSLFS

SEQ ID NO: 61722 - protein, 252 aa, Zea mays
  Clone ID: UC-ZMFLB73096H08_FLI.pep
YSNMNQRMPLIYVKLYTYQIFRGLAYIHTVPGVCHRDVKPQNLLVDPLTHQVKICDFGSAKMLVKGEANISYICSRYYRAPELIFGATEYTTSIDIWSAGCVLAELLLGQPLFPGESAVDQLVEIIKVLGTPTREEIRCMNPNYTEFRFPQIKAHPWHKIFHKRMPPEAIDLASRLLQYSPNLRCTALEACAHPFFDDLREPHARLPNGRPFPPLFNFKQELANASPELINRLIPDHARRHLGLTLLPATGP

SEQ ID NO: 61723 - protein, 208 aa, Zea mays
  Clone ID: UC-ZMFLB73154F03_FLI.pep
QKKMQRAVQAVRSHGNVLKYAVLQHISAPKPAMLPAAFSRFMSVSSARLEDRGFETATVADVLKSKGKSADGSWLWCTTEDSVYDAVKSMTQHNVGALVVVKPGQNKSIAGIVTERDYLRKIIVQGRSSKSTKVGDIMTEENKLITVNPDTKVLQAMQLMTENRVRHIPVIDGTGMLGMVSIGDVVRAVVAEHREELNRLNDYIQGGY

SEQ ID NO: 61724 - protein, 167 aa, Zea mays
  Clone ID: UC-ZMFLB73205H11_FLI.pep
APAELPHAILFPGVHPYGSHHLGAPLPALPWRLPLDPSLRGPSPVDGVVPSCSTPCSLPWPMPLSGARPCPLSSALPACRSYPPAMEFVVSPSSPILCSVSTWSCLQTAPFTAAAGQRPSVFFFSIVAHLSVAAPRCRTSSGSPAPSAPVWCLIKCSSGVLCHGQLY

SEQ ID NO: 61725 - protein, 125 aa, Zea mays
  Clone ID: UC-ZMFLB73184D09_FLI.pep
FYMQDSFHRLLHKADGKRAEWEYPFAVGGVNISYMLVQMLDLQSGKMRTKAGVHFVQLLDDDGVAFDNLFCVAFQVLDSQWLARRASYMEFNEVLKSTRGQLEQELTIGGISRIQDMPSFRMLRR

SEQ ID NO: 61726 - protein, 174 aa, Zea mays
  Clone ID: UC-ZMFLB73082F03_FLI.pep
RLALTVGAHAGTGKLRKATGRDLSLRTWNSGCTTMHTLLIISHCLCCKKDTGYMILHLYCDSPRAARARHGHTHTYTRTPLPCIFSPTEDDGDLPKMYSCPTWPIERLQAARAPRALSSTGHAPPSELAPDVVFTVVAAAGEAEGGALHIWATWQQHQANVGGYKLERAGTPCW

SEQ ID NO: 61727 - protein, 501 aa, Zea mays
  Clone ID: UC-ZMFLB73164D02_FLI.pep
IPLSEPRRPPQIRRSLAAMISSSKLKSVDFYRKIPRDLTEASLSGAGLSIVAALAMVFLFGMELSSYLAVNTTTSVIVDRSSDGEFLRIDFNMSFPALSCEFASVDVSDVLGTNRLNITKTVRKYSIDRNLVPTGSEFHPGPIPILNKHGDDVEEDHVDGAFSLSSRNFDSFSHQYPVLVVNFYAPWCYWSNRLKPSWEKTAKIMRERYDPEMDGRILLGKVDCTEEVELCRRNHIQGYPSIRVFRKGSDIKENQGHHDHESYYGERDTESLVAAMETYVANIPKEAHALEDKSNKTVDPAKRPAPMASGCRIEGFVRVKRVPGSVVISARSGSHSFDPSQINVSHYVTQFSFGKRLSPRMLHEFIRLTPYLRGYHDRLAGQSYTVKHGEVNANVTIEHYLQVVKTELVTQRSSKELKVLEEYEYTAHSSLVHSFYVPVVKFHFEPSPMQVLVTEVPKSFSHFITNVCAIIGGVFTVAGILDSIFHNTLRMVKKIELGKNI

SEQ ID NO: 61728 - protein, 279 aa, Zea mays
  Clone ID: UC-ZMFLB73134G06_FLI.pep
VRAPAAVGPRGLWPRRAVRARAARPPEVLLLPPVPPLRRQRRRERLASPRWHRRRRGHAVRALGEERGGRQAAVRRVLLPGAEGRDGGREGGAAPGAGVRGQRGGVRRHHRGLRHHVHVPGPDRVPARGGRGGGCGGRAVQAVQGRGGRAGAAPLLRAAAGRQVHGAAGAVVPLRGRGGDAAPGRELLRGRGARRRGGHLPRRRHRLQRRLRGWERGQRPGHHPRQLPAAELPGGVRPGEGEAGVPPAVMHVVAVVRSHDVGMAGIGVEASNYSRVQST

SEQ ID NO: 61729 - protein, 172 aa, Zea mays
  Clone ID: UC-ZMFLB73139F08_FLI.pep
DQFRERLQVDEEDVELEGNLDPRQRSVSCRDEGASSRAGGPSCLSGPREPQRSSSRLPEGMLLLSPPRLNLGIYLLGAGAAAAAAAAGAAADSRGGCATGAESGARTASDPFKSFSLVAFAFSSSSISLNRCFSAMASSLAFLSASSLFLLSSASRFLASSSSRSISIRCSS

SEQ ID NO: 61730 - protein, 77 aa, Zea mays
  Clone ID: UC-ZMFLB73018A09_FLI.pep
EISTLVYKIYHPKRQDYGCQTAIPASAYILIGDMGAGTQGRTKASREDVQEIGKDTSRCSFPTGTPSIPRNLQHLLS

SEQ ID NO: 61731 - protein, 153 aa, Zea mays
  Clone ID: UC-ZMFLB73038B12_FLI.pep
RHGMAATAYSVALLGGARLPAAFLPRRSSVCHHQLRLQDAPRLISLHRARAASEDTSASGGDELIEDLKAKWDAVEDKPTVLLYGGGAVVALWLTSVVVGAINAVPLLPKILELVGLGYTGWFVYRYLLFKQSRKELVDDIETLKKKIAGTAE

SEQ ID NO: 61732 - protein, 227 aa, Zea mays
  Clone ID: UC-ZMFLB73156H09_FLI.pep
GRTTMASLLARQAAQALRARQTAQLGPAASAMQGHLRTYMNAGIPKRFKEDEEKEQLAKDLAKDWNAVFERSINTLFLTEMVRGLMLTLKYFFDRNVTINYPFEKGPLSPRFRGEHALRRYESGEERCIACKLCEAICPAQAITIEAEEREDGSRRTTRYDIDMTKCIYCGFCQEACPVDAIVEGPNFEFATETHEELLYDKEKLLENGDRWETEIAENLRSESLYR

SEQ ID NO: 61733 - protein, 252 aa, Zea mays
  Clone ID: UC-ZMFLB73105E02_FLI.pep
EQAMLEVPQSSLVHLPCHSDFCLVAPWPSGLNLRSNGPRNSVNSCKLFQELTVAGFCQFLHVGANCFDVIVSVGEEANDPAVALHRNLERGSQLRSERPVCFARAGHERQRGHDTGYCSVPRAWMECPSNFHYELFRGKMNLSTSSSAAAPRTGGVLLPVAIAVQILQRVYDRPAEDRHSVQAMRPLCDVMESISNPAPRPNPGDDGLITTCFWFGFRRRVDTDRVEVPSGAPKETDDAAIALHWDVEGCAS

SEQ ID NO: 61734 - protein, 188 aa, Zea mays; identical to SEQ ID NO: 44912
  Clone ID: UC-ZMFLB73135H09_FLI.pep

SEQ ID NO: 61735 - protein, 328 aa, Zea mays
  Clone ID: UC-ZMFLB73157F05_FLI.pep
AGRNQGCSPLSPCSPLGSPPAAAETSSSPATPDPIKAALGGGPLSGGVVDTSAPMANRGAAAGKLTVAETFSNLREQGKSAFIPFITAGDPDLATTSKALKILNSCGSDVIEVGVPYSDPLADGPVIQASATRALKKGTTLDSVIEMLKGVTPELSCPIVLFTYYNPILKRGVGNFMSFIKQAGIHGLVVPDLPLEETALLRSEAIMHNIELVLLTTPTTPTDRMKGIAQASEGFLYLVSAVGVTGARSNVNLRVEHLLREIKKVTDKPVAVGFGVSTPEHVKQIVGWGADGVIVGSAIVRQLCEAATPEEGLERLEEYARSMKAAMP

SEQ ID NO: 61736 - protein, 211 aa, Zea mays
  Clone ID: UC-ZMFLB73208F09_FLI.pep
SGLAGPGGEGEMGKNQAYKAMQRARLGSSSGAPGAADAPEDGMTDGSFHSPEWHAARLASLNKTHTLTWEEFKKKQKEEELKRGELEADKDKMMREYRAQLDAERAQKLANGRNHSRSNSKSSSSKKERKDKDAKKRSKKRRKHKSSSESSSSSSSESSSSDDEDRGSRKSRSRSRSKRTRKEKKSRSRSKRRGSESEEEGPVRLSKFFGK

SEQ ID NO: 61737 - protein, 303 aa, Zea mays
  Clone ID: UC-ZMFLB731215A02_FLI.pep
LTPKWVVSVFLIVGVIFVPIGVVSLLAARDVVEIIDRYDEACVPVNMTENKLAYIQNETISKECIRNLTVTKYMKQPIFVYYELDNFYQNHRRYVKSRNDAQLRDASKANQTSACEPEKTTANGQPIVPCGLIAWSLFNDTYNFTRGNENLTVDKKDISWKSDREHKFGKDVYPSNFQNGALKGGATLNPKIPLSEQEDLIVWMRTAALPTFRKLYGRLYFDLKENDTITVRLNNNYNTYSFGGKKKLVLSTATWLGGKNDFLGFAYLIVGGLCIFLAFAFTLLYFVKPRKLGDHNYLSWNRR

SEQ ID NO: 61738 - protein, 226 aa, Zea mays
  Clone ID: UC-ZMFLB73004E09_FLI.pep
GEAWLWIGVLLLLSSSRCRWRRLLGSRLFLLSLLRLRWCLGRCISYSRLGILHLHGDFPGSGLSHRVLRLGLLLGDVRCDLVQDEGDRRRQGRGAGLGHRLAHHLGSREVNLSQLIEELGNCSRVLLADLDWLLILEQSLDLRRRCFISLRNLGLQFCLLLLNLLANLLLVEGLEEACSCSLLAILVEDLVEARQNLGLPQTGHLSQPMLLCVGLRCEISRQEGSL

SEQ ID NO: 61739 - protein, 31 aa, Zea mays
  Clone ID: UC-ZMFLB73005F12_FLI.pep
SDFMLLSNNVSLRKLLKHNLAQMDTFKSRLQ

SEQ ID NO: 61740 - protein, 237 aa, Zea mays; identical to SEQ ID NO: 44890
  Clone ID: UC-ZMFLB73008F03_FLI.pep

SEQ ID NO: 61741 - protein, 217 aa, Zea mays
  Clone ID: UC-ZMFLB73008F10_FLI.pep
LDKRNRWLALLEKGTSTACRTTTLQQHQWKSPSMSSLQADGISTSPSSISCCRSLGSLPSTVHPTLTQVPRISLTVPANSLAMDLFLMVLAISTTSSRPMLPLCLMFLTFFLSLSGSLSALMTSAAAEGTTETLAWRFWTVSLTVTRRPFQSLAVSLAMSSPIFFGERPSGPILGARDDAAPTSPPVTRTKTSTTCDGSSLGGMAAAAAGVWVGFGK

SEQ ID NO: 61742 - protein, 335 aa, Zea mays
  Clone ID: UC-ZMFLB73008G11_FLI.pep
HQFIIHVRCGKTKTRTTGGRSYTERVEARSFHLEASEVEHGGPEPEEAAAAALAVRGPGEPQAAAEAEPGLPLHRRSHSHRSLLHLLLLLARRADAEVQVEVGALERPLPLAPLAGGVAVALALALPVAADDHRRLVALLLLLQPEDGALLIITGSGGHLRLERYGDVGRVVLRDRAVRHRVDPPAQQLPPDVRVPVVLDLVVRPAGQPSGDQGPLVAEDAVQLDDELVLLLREVAALEVGAEVVDPAEAAALAAAQEAGGLGQRAPAPLAVRPDVRDQALVLLLGPRALVGVRLLAARRPPHGERAGDRRCCQQPWLLLYRPFAAAGLASRWVA

SEQ ID NO: 61743 - protein, 50 aa, Zea mays
  Clone ID: UC-ZMFLB73018C05_FLI.pep
ARCLAFPPDPASTRSTSTLPPGRSWGCHELKSLMVSFRERKFGAFLDRVK

SEQ ID NO: 61744 - protein, 200 aa, Zea mays
  Clone ID: LIB3150-014-D10_FLI.pep
QLVAKTKEMRKRRYDNHQMTVKSLVDLLERGAGGGATSGGGSDVIGSKLALSLVGGAAPGLAVEERLTVLVELQLGDDHLGGVDAHVHGGAVHLLAGDPLDVDDPAAAVHLHHLPLTALVGAAHDLHLVVLADRDGAHVVLVAELRRQPRGHENAADGGRGRKVRLAALPAGARDAGIALHGGGGLDDPAYLGGRFGGGG

SEQ ID NO: 61745 - protein, 150 aa, Zea mays
  Clone ID: LIB3150-015-E11_FLI.pep
QNKVPNHTTKQRLRMSLSNGTRSQSITSSLKRLFPFCLLLRRTESKTRLLGGARNAASGLVKHGVDLVAVLHLQLIRGLLAAKPAAIKQERNGIHVHRLAVTISVHQLLQLGGPLYAKEHLIAILSLDLKVDVGAALRGLLVLLAGSRHR

SEQ ID NO: 61746 - protein, 125 aa, Zea mays
  Clone ID: LIB3150-028-C12_FLI.pep
LPLPLRRSPHASGATSTMAPKKEKAPPPSSKPAKSGGGKQKKKKWSKGKQKEKVNNAVLFDQATYDKLLSEVPKYKQITPSILSERLRVNGSLARRAIKDLMAKGLIRMVSVHSSQQIYTRATNT

SEQ ID NO: 61747 - protein, 172 aa, Zea mays; identical to SEQ ID NO: 36903
  Clone ID: LIB3150-002-E6_FLI.pep

SEQ ID NO: 61748 - protein, 245 aa, Zea mays; identical to SEQ ID NO: 38748
  Clone ID: LIB3150-006-A5_FLI.pep

SEQ ID NO: 61749 - protein, 141 aa, Zea mays; identical to SEQ ID NO: 48129
  Clone ID: LIB3150-017-D6_FLI.pep

SEQ ID NO: 61750 - protein, 191 aa, Zea mays
  Clone ID: LIB3150-018-H3_FLI.pep
QKAPDSPRKIAAAITYLLTEVPPSFPPARAAPVAMVKRWLPLEANPDVMNQFMWGLGVPEDVGFCDVYGLDDELLAMVPQPVLAVLLLYPQDRSKESQASATSSVETKEPSKNVYFTKQTVGNACGTVGIIHALGNATSRIKVRGHILIDFINELLTWILSSVLHFLRRTRKWRMLIPLPLLLVTQRPRTV

SEQ ID NO: 61751 - protein, 169 aa, Zea mays
  Clone ID: LIB3150-026-G7_FLI.pep
FFLAATFFSPWLLPPRAATPFFPNSMEQRLPSPSSASPSRREEQTPSSPSPSRPHPWRPSPSFFLLLISPWCSSPFFTTPSSGSSFHGGRPDFFSPLLGLPCTGAAASMADLSSSAQGAPVPLLLLPRTTAARPTFPRCAAPQQNAAVPAATASKSLRPALRSKNSSPA

SEQ ID NO: 61752 - protein, 284 aa, Zea mays
  Clone ID: LIB3150-027-C1_FLI.pep
DGGADARRAVPGSASSSAAPPPASRLAPSPPVLRTPAGDSASLRRYINMRLNKVEVNLIRLLEAAPRQQNQAKLVYYVTTARELLEQLGAETTPEGISSISKAKLSEYSEKIEALASRLAASVPENENPIIESKDEISYEEAKPESPISLSSGLRRRSTAHAVVGTSHQENKEDIGAPIKLDAEAQAYIEKHRKLQEDLTDEMVELARQLKESSLMMNQSVQETEKILDSTERAVEHSLASTGHATSRAAEVYSLASKTTCFQWLLMFVMSCMFVMVVLLIRVT

SEQ ID NO: 61753 - protein, 100 aa, Zea mays
  Clone ID: LIB3150-028-H8_FLI.pep
NTHQLSCRQRVTNKSYAGRITDPDLVNLYRPISGNLVRSLLSSSSFLRGASSSWCRIWPGLVALDLPSAGSSQSCSEEYAQMVQTWESSRTNHYLKHQQL

SEQ ID NO: 61754 - protein, 116 aa, Zea mays
  Clone ID: LIB3150-029-F6_FLI.pep
LRLRSRRRRRRRYAPHLASFRVAKMTKRTKKAGIVGKYGTRYGASLRKQIKKMEVSQHSKYFCEFCGKFAVKRKAVGIWGCKDCGKVKAGGAYTMNTASAVTVRSTIRRLREQTEA

SEQ ID NO: 61755 - protein, 241 aa, Zea mays
  Clone ID: LIB3150-030-B7_FLI.pep
PLSTFQFHSASAAGRRLRNSDSPTTRRMSEEDKTAASAEQPKRAPKLNERILSSLSRRSVAAHPWHDLEIGPDAPAVFNVVVEITKGSKVKYELDKKTGLIKVDRVLYSSVVYPHNYGFVPRTLCEDNDPLDVLVLMQEPVIPGSFLRARAIGLMPMIDQGEKDDKIIAVCADDPEYRHYNDISELSPHRLQEIKRFFEDYKKNENKEVAVDAFLPATTAREAIQYSMDLYAQYILQSLRQ

SEQ ID NO: 61756 - protein, 110 aa, Zea mays
  Clone ID: LIB3150-047-C11_FLI.pep
LEQYPSRVHYWWNYVQDLLLDLSLLLLPQPVQRAVSITLSTDKPRESKRGEVTIVQAIRIQVANVDLDRGMILGSDDPVRGRALPGDVEVHRLTLLVLHDDGWGTTAAAT

SEQ ID NO: 61757 - protein, 116 aa, Zea mays
  Clone ID: LIB3150-060-F8_FLI.pep
YSSPPTRNRRERKGKPAAAPAPSNQQIGTSVLRNPSMAEESGRPLPKFGEWDVNDPASADGFTVIFNKARDEKKGGNGQDTDSPSKDPRTERVESYAAKPSTKKWFCCVTASPTQS

SEQ ID NO: 61758 - protein, 162 aa, Zea mays
  Clone ID: LIB3150-036-C7_FLI.pep
GSPHPCPDPMANSNLPRRIIKETQRLLSEPAPGISASPSEENMRYFNVMVLGPAQSPYEGGVFKLELFLPEEYPMAAPKVRFLTKIYHPNIDKLGRICLDILKDKWSPALQIRTVLLSIQALLSAPNPDDPLSDNIAKHWKANEVEAVETAKEWTRLYASGA

SEQ ID NO: 61759 - protein, 269 aa, Zea mays
  Clone ID: LIB3150-037-F12_FLI.pep
ASSSVAAAAAGAPSCPTSGGASPRRSPTRRTSSWWTGGPPAAPPRRAVRSAATAAAWTATEMARSSVFAPTCGAGGARRGGTSSGGAPCAARPTTAPARARRWTGSARTRRSACPWTGGSSPALPLAAASRRSTISSEETARRAHPAAADMTYQHRVPYRPTAPLRGPGVAESGAGGEKAFRLFSFLFASFSPADELNEVYLAGAGCRSDAHFLLGSTPSFSFYLSLDSVILHYPVTNKKKRREYQGSKEPKSSGDPPAARLSFYFIFL

SEQ ID NO: 61760 - protein, 123 aa, Zea mays
  Clone ID: LIB3150-045-D7_FLI.pep
NRSTHSAHSPSAVACPLSPCFSAVEAASQCEETPTQMASRWVRPEVYPLFAATGVAVGICGFQLFRNITGNPEVRVNKAGRAAGVLENHEEGRRYAMHGLRSFVHDKTPEIMPAVNKFFTDPK

SEQ ID NO: 61761 - protein, 183 aa, Zea mays
  Clone ID: LIB3150-058-G3_FLI.pep
TPPDRRARTQTLETVAMDSGGGGGSGAHKAASGSAPSPAPNPTAMLSALMSKRAKLQEELRSIERQVYDMETTYLQETNQFGSVLKGFESFLSSSKNTSNLKRSRKFQADERLFSLSSVTSPAVDEHLAGRDDGREYGAGRSKGGSTPANGQGKPKKGGRPGGRDGKRLRPSNDPDLDDEDDY

SEQ ID NO: 61762 - protein, 173 aa, Zea mays
  Clone ID: LIB3150-069-H6_FLI.pep
LTMAEEASAPAAGTEAPPGKMTMVVGVDESEHSFYALQWALQHFFPPGQPQQYRLVVVTAKPTAASAVGLAGPGAADVLPYVEADLKRSALRVVEKAKGLCTQASDAVFEALEGDARNVLCEAVERHGAEMLVVGSHGYGAIKRAVLGSVSDYCAHHAHCTVMIVKKPKQHKH

SEQ ID NO: 61763 - protein, 84 aa, Zea mays
  Clone ID: LIB3150-070-D7_FLI.pep
GYSAQGTGSTLIMPVLDNQLKSPSPLLLPARDAVTPLSESEAIDLVKDVFASATERDIYTGDKLEIVVINKVGTKREYIDLRKD

SEQ ID NO: 61764 - protein, 313 aa, Zea mays
  Clone ID: LIB3150-073-E10_FLI.pep
KAISEGWLDSSYVNSGVNGSVEDDEHEKLARYKREAVSIIHEYFLSDDTTEVIRSVKELGYPEYNPIFVKKLITIAMDRKNREKEMASVLLPSLSMELFSSEDIAKGFVMLLESAEDTALDILDASDELGLFLARAVIDDVLAPLNLDEISSKLPPNCSGAETLNMARSLASARHAGERLLRCWGGGTGWAVEDAKDKITKLLEEYESGGDVGEACNCIRELGMSFFNHEVVKKALVMAMEKKNERTLNLLQECFGEGIITINQMTKGFSRVRDGLDDLALDIPDAREKFLSYVQRAKKSGWLLPGFGVASSA

SEQ ID NO: 61765 - protein, 263 aa, Zea mays
  Clone ID: LIB3150-091-G4_FLI.pep
PYLASYGVENPIYAVLQLAQTTMRSELGKITLDKTFEERDALNEKIVSAINEAATDWGLKCIRYEIRDINPPAGIRQAMEMQAEAERKKRAQILESEGMKQAQILESEGKKTAQILESEGAMLDLANRAKGAAEAILAKSEATARGMRLVSDAMTTEGSAKAASLKLAEQYIEAFSNLAQKTNTMLLPGDSASPASFVAQAMKTYEQIHSHSQALKSHPQIEELKESGETSPAPSSEASKTPPLIEEADSNQTFSLQRPKNKQ

SEQ ID NO: 61766 - protein, 59 aa, Zea mays
  Clone ID: LIB3150-093-A7_FLI.pep
RGAMMLGDDAAAVDLHVGLGVAEPLGLQPYADAVLDAAPEGAGHHLLALGVVPCHHLSR

SEQ ID NO: 61767 - protein, 288 aa, Zea mays
  Clone ID: LIB3150-073-F12_FLI.pep
LRARRLAAFSNSCSVSPFLAWRLSCSGDDRPFRRPLFCSSSPSCFCCGEFFRREPGHRRRRPPAVRRAEPRVQAWQVQARILPSRVWLEMGKAKSKGPKFAAVKKIITKKTINKYKEDVLNHKKKDVDKEKLGRNVPQVSSALFFSYNTALGPPYRVIVDTNFINFSIQNKLDLEKGMMDCLYAKCTPCITDCVMAELEKLGQKYRVALRIAKDPRFQRLACTHKGTYADDCIVERVTQHKCYIVATCDRDLKRRIRKVPGVPIMYITRHRYSIERLPEATIGGAPRI

SEQ ID NO: 61768 - protein, 113 aa, Zea mays
  Clone ID: LIB3150-075-G4_FLI.pep
PYIRARLGSGRLVVVELEPHPVVDLVVLERDVVLVDVVPLLDADLLGARPRLRRHQLLEVADGVVLVALHPHLLPQAVVQHHLDHLRLPDPERAPLSPPTDSQTLDLASEWLA

SEQ ID NO: 61769 - protein, 196 aa, Zea mays; identical to SEQ ID NO: 41372
  Clone ID: LIB3150-076-F1_FLI.pep

SEQ ID NO: 61770 - protein, 178 aa, Zea mays; identical to SEQ ID NO: 41250
  Clone ID: LIB3150-076-G4_FLI.pep

SEQ ID NO: 61771 - protein, 200 aa, Zea mays; identical to SEQ ID NO: 61744
  Clone ID: LIB3150-078-B8_FLI.pep

SEQ ID NO: 61772 - protein, 240 aa, Zea mays
  Clone ID: LIB3150-087-H7_FLI.pep
GTSQRTGMAAARHLRSGLPLLRAHLASSESAAVAQVSRGFASQAAKPTGKEIKVPKALFGGTGNYASALFLTAAKSNALDKVESEIKAIVEASKKSPLFSQFIKDLSVPKATRVKAIAEIFADAGFSDVTKNFLAVLADNGRLKYIERIAERFVDLTMEHKGEMKVVVRTVISLTKEEEKELKETLQDILGENKTILVEQKIDYSIMGGLVIEFGQKVLDISIRNRAKQMEAFLRQPLDF

SEQ ID NO: 61773 - protein, 171 aa, Zea mays
  Clone ID: LIB3150-092-A4_FLI.pep
TSTVVTINRKRLSALPADAAGELNVLGHDGDALGVDGAEVGVLEEADEVGLRGLLQRGDGGGLEAEVGLEVLRDLADQALEGELADEQLRALLVLADLAERHGARAEAVRLLHAAGCRGRLARCLGRQLLPRRLASGGLARRLLRAGHRWCGSGGAGGACLGFGIGNNKSG

SEQ ID NO: 61774 - protein, 330 aa, Zea mays
  Clone ID: LIB3060-030-B2_FLI.pep
NRTAGSAHAQRLPAMASLTLPPAPPNPRQDAIDLHKAFKGFGCDSTTVINILTHRDSVQRGLIQQEYRAMYHEELSHRISSELSGNHKKAMSLWILDPAGRDATVLREALNGDTMDLRAATEIICSRTPSQLQIMKQTYYARFGTYLEHDIAHHTSGDHQKLLLAYMGIPRYEGPEVDPTIVTHDAKDLYKAGEKRLGTDEKIFIRVFTERSWAHLASVSSAYHHMYDRKLEKVIKSETSGNFEFALLTILRCAENPAKYFAKLLRKAMKGLGTDDMTLIRVVVTRTEIDMQYIKAEYLKKYKKPLAEAINSETSGNYRTFLLSLVGHGH

SEQ ID NO: 61775 - protein, 142 aa, Zea mays
  Clone ID: LIB3060-027-C5_FLI.pep
KIEKPNPQAENSTVSSIRSATIHSHGDGLQDGDGGDGREGGVPALVHGDEVEEGAPLRGVQDRRLPLRRLRLRLRQRRQLPEEQDLLHRLVTGGVEDTGQDPVRDVEAGPAAAAGRGALRGAGHRPLRDGLRRHQRPRAMRA

SEQ ID NO: 61776 - protein, 140 aa, Zea mays
  Clone ID: LIB3066-005-G9_FLI.pep
GERGNKEKEDKRCVESKTCPRIGMRAAMSLSLPLRLFLGLRATGRGRLTECSRRRRRRRRPRGRRRRRARRRRSRWWGPEPEPPRRAPRWPPRRRRGRRRRSSSSPSLNAAAAAGGTERNGTEARKKDGRGEQAGCWLAG

SEQ ID NO: 61777 - protein, 214 aa, Zea mays
  Clone ID: LIB3062-059-D6_FLI.pep
GVPPGTTPETCLSCRGSGFIFMQTGPFRMQSTCTKCGGSGKTVKEFCKACRGNKVVPGRKSVRLDILPGSDNEDTIKVVRSGGEDPDGRPGDLYVTLEVREDPVFRREKGDIHVDAVLNVTQAILGGTVQVPTLSGDVVLKIKPGTQPGQKVVLRGKGIKTRNSPYHGDQYVHFNVNIPENLTSRQRELIEEFAKEEQGEDEKDAKAAAGASGG

SEQ ID NO: 61778 - protein, 407 aa, Zea mays
  Clone ID: LIB3062-057-D1_FLI.pep
AAVDAVKEPLEAQLCSTNTEAEKLRDVVKALEDQVEKEKALCEELAAKVELKTKAARTAEAVQESLEAQLSSANAEIQKLEEITKQLQSELEKEKTLHEEFSAQLEMKIEAERTRSMESAKESLEEQFQLVNSETAKLRDTVHALEHDVEKEKVFSAELQMQLEALEAVKKVLESEAESAHQDAKILSQKVESLEAKLTEHMLVTDEFTANVESLQSDRIAMEHKLKTADRELIKLTNKVSLLHREIEQERLMSEEYEQKCQKLEDQLSRDSRDAKLWRLANSNGDLKVKKEKELANAAGKLAECQKTIASLERQIKSLTDLDGVVLEPERLESSRDMPLPLDFRNSDAEFAMFTDDLYDFDLPNDSKSFFSPLPSIQTSSPPSEMSVFAGGLSTLSSYRSKRASRR

SEQ ID NO: 61779 - protein, 86 aa, Zea mays
  Clone ID: LIB3062-049-B11_FLI.pep
RLPCLCIIVNSGQRKMSFAVPSVRYKQMSSQTFCTGCVRLHSFIFLPWDFVFVKGCKQKYMIWLGSHTEWTFATLQSLTSIHVYLP

SEQ ID NO: 61780 - protein, 133 aa, Zea mays
  Clone ID: LIB3062-042-E8_FLI.pep
NSPDCPVCTGLSGEPTVGQGQRSAARSARDTWPSQRSEGGTGLSGVHRTCPVRQRLPDLQRSTAPIKERNRAPDTVRCAPDCPVRPTTEGKDGLPDLFSTAPSCLGAIKGTPRRMEENTKHTKQLLSILDHPH

SEQ ID NO: 61781 - protein, 177 aa, Zea mays
  Clone ID: LIB3062-037-F7_FLI.pep
MDWNCTVLDHLQLSLHLVLEEVVVEVVERLGGGLLDDVRVRHLVVGLVELHGPADDGAALALRLGRSHLQRDLEVLVEVRQLAVHHAVRHHLVLVVRRLKLLLGERQHRHRLGVLEEADGAGRLAVALDGLDALVLLGEDLGEQLRRVTQRRPQLVSRGLDLHHQLNLGRHCLCTDS

SEQ ID NO: 61782 - protein, 80 aa, Zea mays
  Clone ID: LIB3062-034-E1_FLI.pep
VFKWYVLLINTVRMCYVQTHTWLSLQWQPTSCSIYHSQAKCFQRAPILRNKTFTYNDEGMCWSNTYPERTARFRSLAFVW

SEQ ID NO: 61783 - protein, 139 aa, Zea mays
  Clone ID: LIB3062-033-F12_FLI.pep
HSHRLHSNQHTFPFGGSKEGRRRWVAAWRCTKTGGSKSGTPAGRTSSSTSAGPAAASPSSASSASLSPSSSTRASSANSICRTRMQVGHTGSSCKRRPGLQNTSIPRPGLRGGEFLFSLYRYCFSLNLMKQFGMLNYCA

SEQ ID NO: 61784 - protein, 177 aa, Zea mays
  Clone ID: LIB3062-033-C9_FLI.pep
STDYGGVVRPARQRGTAQTTRTRVIDVTGSTTSLSLPQRAGISIIELPGGARLPFVSVAGLEREAAAAVLLLVPRHGHDQAVHVPAPRGLAGGERVHGGLLRPLQLQQSVVVVAEDDAVRRRRGPRPCWAPVVVVEVGQYAVEEAAAVLAALVRVHIVVVLLVVVDPTVAVAVAVGR

SEQ ID NO: 61785 - protein, 106 aa, Zea mays
  Clone ID: LIB3066-026-E7_FLI.pep
ETDRKYFFFPSFDLRKGLKLHCCRTAEGFWCKICNLLLVGVPVRLALICFYNVFVFMYCSCNSLSSRDGNRGKQLNELVLLLSFRTLKDHLSLLALPRKEEFCINN

SEQ ID NO: 61786 - protein, 452 aa, Zea mays
  Clone ID: LIB3066-024-A3_FLI.pep
GGAGGGVQIQIRWAARTRSPPTTMAGAVSALFLLDIKGRVLVWRDYRGDVSALQAERFFTKLLDKEGDSEVHSPVVYDDAGVTYMFIQHNNVFLLTAARQNCNAASILLFLHRVVDVFKHYFEELEEESLRDNFVVVYELLDEMMDFGYPQYTEAKILSEFIKTDAYRMEVTQRPPMAVTNAVSWRSEGIRYKKNEVFLDVVESVNILVNSNGQIVRSDVVGALKMRTYLSGMPECKLGLNDRVLLEAQGRATKGKAIDLDDIKFHQCVRLARFENDRTISFIPPDGSFDLMTYRLSTQVKPLIWVEAQIEKHSRSRIELMVKARSQFKERSTATNVEIEVPVPSDATNPNIRTSMGSAAYAPERDAMVWKVKSFPGGKEYMCRAEFSLPSITAEEGAPEKKAPIRVKFEIPYFTVSGIQVRYLKIIEKSGYQALPWVRYITMAGEYELRLI

SEQ ID NO: 61787 - protein, 432 aa, Zea mays
  Clone ID: LIB3066-018-C9_FLI.pep
GGVFRHHLEGDSFAGQGLHEDLHASPEAQHQVEGALLLDVVVGKRAPVLKLLPSKDEPLLVWRDALLVLDLGLDVVNGVRGPARHAQHRVPADDHHRHPGGEPDQLLDGGHRGRVGLAHRAGARGRAGAHHHPGRAGAPRHAQLPYRPRVQRRRQGGAGEDPRHGRRAGRVRRHGGGERGGERHRAPVAQHPGAQVPAAADGGSADPLLPAADGHQRDHVLRAGAVPDHRLRRRRVADGGRHHGAGQHVRHRGVHRVRGPPGPARAVPAGRHADVRLPDRGGHADRAPVRHRRRGRDVPLQRLAAGALHLPLRRRVRLVVGAAGLARPLGGVRAGGPVGGAEHRRVRQHAAHLHHRPGLPQHAVLAQVRALLLLRRVDVHHDHLHRPLPAGDQGGAHRGDEPRLEPPLVLGQVRQRRHTTRRRQPEIQRRLI

SEQ ID NO: 61788 - protein, 276 aa, Zea mays
  Clone ID: LIB3066-013-H8_FLI.pep
CSARARSFGMEQNDGSFLAVRRLSGGAIHHHRHHSSPAEVVGVSTAWIGKGLTSCVCAQGTESDGRLSFDLSPIQEECLHRLQNRIEVQYDGSNLEHQKALVALWHASFPGTELLGLVSDQWKEMGWQGKDPSTDFRGGGFISLENLLYFSKKYPKSFHELLRKQNGDRALWEYPFAVAGVNITFMLIQMLDLQAAKPTSLVGAVFLNLLLENDRAFDILYCITFKLMDQKWLEMHASYMDFNVVIKSTRRQLERELLLEDIQRIQDMPSYMLLTC

SEQ ID NO: 61789 - protein, 468 aa, Zea mays
  Clone ID: LIB3066-013-F11_FLI.pep
MTQEKTVVLYPSLGVGHLNPMAQLAKAILRHGSVAVTIAVVDPPEKHAVLAAALARLAAVSPSITVHLLPIPPCATSKQHSHPIMPILDALRAANPALRAFLAARVPAVAALVVDMFCTDALDVAAELAIPAHFFYPSAAGDLAVYLQVPDLCRAAPSPLRDMGKAALNFAGVPAVRALDMPDTMHDWESDVGSVRLRQLARMPEAAGILVNSFEWLESRALEALRGGHCLPGRSTPKIYCVGPLVDGGGSGTEGNGERHACLAWMDGQPKQSVVFLCFGSLGAFSAAQLKETARGLERSGHRFLWAVRSPSEDQDSGEPDLEALLPDGFLERTRGRGLVLKNWAPQTQVLRHEAVGAFVTHCGWNSVLEAAMSGVPMICWPLYAEQRLNKVHVVEEMKVGVVMEGYDEELVTADEVEAKVRLVMESEEGKKLRERTAMAKEMAADAIKQGGSSYVELGEFLKGLGRK

SEQ ID NO: 61790 - protein, 107 aa, Zea mays
  Clone ID: LIB3066-011-F1_FLI.pep
GLRRAWVSGPDRPLPWPHQVHGHPRRARRCHPREEGTDDPSSSMLIISQYNARRSSFSGSFPQGSGGITVKKTGQALVIGIYDEPMTPGQCNMVVERLGDYLVEQGL

SEQ ID NO: 61791 - protein, 196 aa, Zea mays
  Clone ID: LIB3066-010-H6_FLI.pep
PQLSFPLVGDRLSPAAAAAINVDDYGPRFSFEARIMIHFVLLISRQGKVRLTKWYTPYPQKQRSKIIKEISTLVLTRGPKLCNFVDWQGYRVVYKRYASLYFCMCIDPADNELETLQIIHHYVEILDRYFGNVCELDLIFNFHKAYFILDEILIAGELQESNKKSVLRLVTTQDALVEAAKEEAGSLRNIIAQATK

SEQ ID NO: 61792 - protein, 237 aa, Zea mays
  Clone ID: LIB3066-009-C7_FLI.pep
QNSRSWMRMHFTTNEWQTNFKKFIQTTFGGTTRGETAPCPCSRCRCMSYKTQSQVQSHLVIRGFDESFIEEGNQANDSDEGNAATVVNDDETGDSGSVTELVSTLISGAIHEDIIGNINEEPNAKAKAFFNLLTEAKKELYPGCKEVTKVSFIVRLFQIKCMFGLSKSALAVVLQLFRLVLPEGHCVTDTLDTSCCHESLVWHQCFVAMKHLVVTKPFATDSNVALTLITMKYVVAI

SEQ ID NO: 61793 - protein, 263 aa, Zea mays
  Clone ID: LIB3066-006-G1_FLI.pep
LRDEGREPRTDSLTRTRSRRDFLSNRPSRDPSCPTNRGSKMSFLFGKRKTPAELLRENKRMLDRSIREIERERQGLQAQEKKLITEIKKTAKEGQMGAVKVMAKDLIRTRHQITKFYQLKSQLQGVSLRVQTLKSTQAMGDAMKGVTKAMSQMNRQLNLPGLQRIMQEFERQNERMEMVSEVMGDAIDDALEGDEEEEETEELVNQVLDEIGIDINQELVGAPSATVAQPASVGRVAQAESAGNADSGIDADLQARLDNLRRM

SEQ ID NO: 61794 - protein, 129 aa, Zea mays
  Clone ID: LIB3066-006-D6_FLI.pep
SSNNRMCIDQAACARTTKILRLCTFHELLVSLSLSGLSRSFSIPEESTNEQQRNRAVGSSIRKADDVRKSGDQSKSRAWCRRTVAADVAESLGVIRRGTEVHRHLDTAADEPQRSIDDLRTCTATTTSS

SEQ ID NO: 61795 - protein, 221 aa, Zea mays
  Clone ID: LIB3066-004-G3_FLI.pep
RRGNMGTKMKKGILKPFRYISTIMDGKEAEMQIGFPTDVKHVAHIGWDGPGSTNNNNNNSNNNSGGAPSWMKDYHSAPLDSSSFRSESGGTAAANPWASQEIVMDGASVGETSFRDTKSEAGVDVGGGDSPPSPATRRSRRHRSRGSGNSSMDATGGEGEEKTKEKSKKGTRKNRKKQDKSAGDDASGTCQDLPAVPKKSNRRKNKGSSEGSGSAAAKDTT

SEQ ID NO: 61796 - protein, 188 aa, Zea mays
  Clone ID: LIB3062-057-G7_FLI.pep
QVKKYSGGMRRRLSVAISLIGDAKVVYMDEPSTGLDPASRKSLWSAVKQAKQDRAIILTTHSMEEAETLCDRLCIMVDGKLQCIGTPKELIARYGGYYVLTMTTLPEFEQEVEDLVRRLSPSSRKVYHLSGTQKHELPKQEARISDVFMAVESFKKRVEVQAWGLADTTMEDVFVKVAKGAQSSEELS

SEQ ID NO: 61797 - protein, 454 aa, Zea mays; identical to SEQ ID NO: 48078
  Clone ID: LIB3062-054-F2_FLI.pep

SEQ ID NO: 61798 - protein, 230 aa, Zea mays
  Clone ID: LIB3062-041-H7_FLI.pep
ECAKKKTVTVLRHAGIRSADDAGVGVLLGAVDDVLGRVRPGVVLVLRGGGGGGVRVPRVRVRVHRGRRGLLVVALLVSVLLVAAPLLLVAVFLFLLRGRADGDDGGGADLAQPAHDVDGVRQPDHRQLGLLHVHRDGVDACARAWGCRRVRDQNSDTDSLATNILEGGRGGSYSCRRAASMTVTVEGSRAGERRGVPWRVETALSTFCLSLLSCRSSFSTTFCATTRRAE

SEQ ID NO: 61799 - protein, 143 aa, Zea mays
  Clone ID: LIB3062-041-F8_FLI.pep
GPREGACSALQHEHDEAIVCTACFQPSCSHSCSCFFVLSSVFRRQAPRVAAGSRSQRQRTRPVVRVPLPASEQAARAAGSGYGGKDTRGGGDGEADGRSERGRRGRADLQRGLQQRGHACCLSADGEAQAQAPHQTIGSCPFM

SEQ ID NO: 61800 - protein, 153 aa, Zea mays
  Clone ID: LIB3062-038-D11_FLI.pep
APPLKLSPHPSLPLPKCSPAARWCLFRFCDGLGSSAPSDSLDRWVSLASIPAALIPLSEFREPEVMQGYGVRPDAEVLDAIDTAARQKQLKVVAKLYWGDAREKLCDAVEDLKIDSLVMGSRGLGPIQRILLGSVTNYVLSNASCPVTVVKGK

SEQ ID NO: 61801 - protein, 288 aa, Zea mays; identical to SEQ ID NO: 60584
  Clone ID: LIB3062-038-C3_FLI.pep

SEQ ID NO: 61802 - protein, 139 aa, Zea mays
  Clone ID: LIB3062-037-D8_FLI.pep
TKHSHCPTPSVHRLALHSSNPGRLGRIRDPSTVLSSQVDRRPDQVRASVSAMSAGGSRARQNAMRSGVVVLGAVAFGYLSFRVGFKPYLDQAQEAIDSARDPDPDPATTAARDASDDPGAGRPGGDLGPSKDPAVVLRD

SEQ ID NO: 61803 - protein, 186 aa, Zea mays
  Clone ID: LIB3062-032-B7_FLI.pep
SAPALERQRCKQLARLVAVPQETSDRLLNALWIQVQTRCVSPATILILPDRMTISSNALDQTSRVKCCAGFKEFFDRLLSECTNGIHPHDGVKMAVIITQKIFKPGRSSDLWCKKRWRSFNMAYHGRKLLCVSYGHNKFRPLRDDYVKSFDWLLLCRPHSVLLSCHILAVAFQMRSKPREKPALSF

SEQ ID NO: 61804 - protein, 124 aa, Zea mays; identical to SEQ ID NO: 41198
  Clone ID: LIB3062-029-H8_FLI.pep

SEQ ID NO: 61805 - protein, 339 aa, Zea mays
  Clone ID: UC-ZMFLMO17326B09_FLI.pep
AGERREQRATHSPPPDFLGVADRSPGQRGTAGPLGSPEMLPYATAAEAEVALGRPMTPAEALWFRYTAGVSDYHLYCCNILFLFVVFTVAPLPIALLELRAPAAVSPYKLQPRVRLSRAEFVRCYKDVLRIFFLVIGPLQLVSYPAVKFVGIHTKLPLPSLAELAAQLLVYFLVEDYLNYWIHRFLHGEWGYQNIHRVHHEFTAPIGFAAPYAHWAEVLILGIPSFVGPAIVPGHMITFWLWIILRQVEAIETHSGFDFPFTPTKYIPFYGGAEYHDYHHYVGGQSQSNFASVFTYCDYLYGTDKGYRFHKTYLAKLKDLGHNDGQKGDGSGPSYVKLD

SEQ ID NO: 61806 - protein, 89 aa, Zea mays
  Clone ID: UC-ZMFLMO17279H07_FLI.pep
LLLKKKTAGHLATDRKNQVLWGYKNLVYNSGTNNHKCHTLPAMCPQERHRRLVSYLSIIQEGGEEQCEAFELAFFSRVGRPRMRIQQGL

SEQ ID NO: 61807 - protein, 206 aa, Zea mays
  Clone ID: UC-ZMFLMO17327C02_FLI.pep
ESSDGWSMRTFSEMVSTSQRERWSLDSELVGSISSKMTRSSAWSSTTCPPDQDGCKLCLKLLKERSTWNAQELAVVAVLLCGHAYHADCLDSITTEADKYDPPCPVCTHGEKCTVKLFGKLESKIKNKIPKNVAVDINLDGNSSNKHQKKGRREPRLGTSSSMKVPFSRPFLRRHFSIGSRPPRSVSETDSTRKKGFWARHWERVE

SEQ ID NO: 61808 - protein, 303 aa, Zea mays
  Clone ID: UC-ZMFLMO17327E10_FLI.pep
QGKWEGRRERETGKALFLLLLLSNSVSCPCRPRPVSPVFERGKRRRRRGMGRDERFPVWEAALGAGVAAAFAAGLVGVYLSMPDSDYSFLKLPRNLEELQILTGHLENYTSDYTLQVLVGYCAVYIFMQTFMIPGTIFMSLLAGALFGQLRGLALVVFAATAGASSCYFLSKMIGKPLVFTLWPDKLSFFQRQVAKRREKLLNYMLFLRVTPTLPNTFINLASPIVDVPYHIFLLGTLIGLIPAAYVTVRAGIALGELTSLSDLYDTQSIALLFLIGVVSVTPALLGKDEAQEKPPEMAVGAS

SEQ ID NO: 61809 - protein, 211 aa, Zea mays
  Clone ID: UC-ZMFLMO17427C07_FLI.pep
SQIHKEEQESYTRRKKKNTQQNKELTGGRISVAGALGGESLREPPPILAVVVAHEVALRPPDGAPLGAVKLPVHPPAAAGGPARAAADAGAGVVAAVGDDEGRVGPVDADPALLGGPVAAVPQRGVQRHGPGARVRQVGVALEGADEEVVDLEQDVGRVPDDGVGVVVGGGVEPEVELVLLLAVAAGPHVGVQHHRLPARVAHELHVDLVA

SEQ ID NO: 61810 - protein, 149 aa, Zea mays
  Clone ID: UC-ZMFLMO17367H09_FLI.pep
ALKPFMCEAPKQEPEPLPYLAEKNHINYDIPLEVLIKPKDQNVALIVTKTNFKHLYWTVTQQLTHHTINGCNMRPGDIFATGTLSGPEPDSLGCLLELTWNGQKEIPVGNLTRKFLEDGDEVILTGCCKGEGYNIGFGTCTGKVLPALP

SEQ ID NO: 61811 - protein, 153 aa, Zea mays
  Clone ID: UC-ZMFLMO17336H11_FLI.pep
VVSRPNDLLRHQDATHPLLPMYISTCSDSDGYGCTHLTSHPEFSSRCKGLRKLAGVGGVDVDGRTGAVAARVNDPGVAALAVAIEVDHDDADVVVEMPPHPSLDRPQITVPDLPLPGRFLQGSLHQSAGYPSSRILEDNLHRSIVAEVLPKAI

SEQ ID NO: 61812 - protein, 108 aa, Zea mays
  Clone ID: UC-ZMFLMO17264C08_FLI.pep
LLIGVMNFRPIVLIFLLLVLIVTSQFEWKQHIGEAEANPTATRRRQQALGREDAVKEKVILAQEKNIQQLNELIQSLQLQLLHCRGSNSSAQTASSHSEVEGHEMIGD

SEQ ID NO: 61813 - protein, 290 aa, Zea mays
  Clone ID: UC-ZMFLMO17286F04_FLI.pep
AATGGPHVQAGDAAHSRGYLQALPRRARPPPFAGPRARGRAAVQHVRCAGGARVAVRVPGARPAGRPAHQAVLRHGRAAAAAAAASGGLLRQRDLHGDAAGQRRHGDGRGGRGRVRDPGRAGPDGRRVLPVSAGLPGAAAGPVGAGPRGAHVPVPQPGAHQLGAPAHPRRGLRVGAARVHGPRRHRLRGARVRAPQRQPRRQPVRGHLAAGGAHGEVPEAHLRLLISNSSPQVISTSTRNTKKQETVGSRLQQYSLISHIVPAHFSVPACPLWAGRIPFVLNYLRAPAIV

SEQ ID NO: 61814 - protein, 187 aa, Zea mays
  Clone ID: UC-ZMFLB73157G05_FLI.pep
ASWVMMVLWHCWLLIYHFQIGLDQIEALYQYAQFQFECGNYSGAADYLYQYGALCTNSERNVSALWGKLAAEILMQNWDLALEELNRLKEIIDSKNFSSPLNQLQNRIWLMHWALFIFFNHIRYLNAIQTNAHHLIRYLATAVVVNKRRRNMLKELIKVIQQEHHSYKDPVTEFLECLYVNYVVVGF

SEQ ID NO: 61815 - protein, 115 aa, Zea mays
  Clone ID: UC-ZMFLB731215G05_FLI.pep
KGLFPLSIIYTRGHCTFFRPSHTAFYPGKIKDGMQQRMTWHCSAAWRPSLQARRPLGGAGDDGEQVVAEGVAEVLGEVLHGAFAGDVGLDEEGEHGEHGQPAVLDLLHLEDGGLV

SEQ ID NO: 61816 - protein, 74 aa, Zea mays
  Clone ID: UC-ZMFLB73144G11_FLI.pep
RQLFRFTRLDRCITYNLSSSLGGRRRFTSSTLVFGGAVCKSWNPPRTSSRHHFHIVFCTSTHYKSSEEEHLILQ

SEQ ID NO: 61817 - protein, 188 aa, Zea mays; identical to SEQ ID NO: 44912
  Clone ID: LIB3180-005-A6_FLI.pep

SEQ ID NO: 61818 - protein, 58 aa, Zea mays
  Clone ID: LIB3179-028-C4_FLI.pep
RTTSPKRVNFTESESFRGESQSPVEGEELQSAITMQRFTSTGWRRCQRGRRPSASSPT

SEQ ID NO: 61819 - protein, 96 aa, Zea mays; identical to SEQ ID NO: 41063
  Clone ID: LIB3179-028-G4_FLI.pep

SEQ ID NO: 61820 - protein, 234 aa, Zea mays
  Clone ID: LIB3180-009-A4_FLI.pep
LRYHAGAIESWVVFLRLRPLESDPFPRFACAVAADLRACGIGFRGSSCAEMGLTFTKLFRRLFAKKEMRILMVGLDAAGKTTILYKLKLGEIVTTIPTIGFNVETVEYKNISFTVWDVGGQDKIRPLWRHYFQNTQGLIFVVDSNDRERVVEARDELHRMLNEDELRDAVLLVFANKQDLPNAMNAAEITDKLGLHSLRQRHWYIQSTCATSGEGLYEGLDWLSNNIANKARSI

SEQ ID NO: 61821 - protein, 102 aa, Zea mays
  Clone ID: LIB3180-012-C6_FLI.pep
EHSVSFNDMEVYSKICILLKSKNAISALFTCSTTPCRGNLRTSFSHQKKLTREHIYFKTQHGETTCVCYREGQSASPRRLIVPNSPSFYSLLPHQGVVFMQP

SEQ ID NO: 61822 - protein, 198 aa, Zea mays; identical to SEQ ID NO: 48022
  Clone ID: LIB3180-012-E5_FLI.pep

SEQ ID NO: 61823 - protein, 260 aa, Zea mays
  Clone ID: LIB3180-016-F2_FLI.pep
SPRCGASFGHGDTAAIPTMEYVNPLTGFRVDGRRPNEMRQLKGEVGVVARADGSALFEMGNTRVIAAVYGPREVQSKGQQVNSKEALVRCEYRMAEFSTGDRRRKPKGDRRSTEISLVIRQTMEASILTHLMPHSQIDIYVQVLQADGGTRSACINAATLALADAGIPMRDIATSCSAGYLCSTPLLDLNYLEDSAGGSDVTVGILAKMDKVTLLQMDAKLPIDTFENVMGLAIEGCKAIATYIREVLLENTKKLECQRG

SEQ ID NO: 61824 - protein, 288 aa, Zea mays
  Clone ID: LIB3180-041-E2_FLI.pep
RRRMSRRWSRTIYVGNLPGDIREREVEDLFYKYGKIVDIDLKVPPRPPGYAFVEFEDPRDAEEAIAGRDGYNFDGHRLRVEAAHGGRGNASSHDRSSGFGGGGGARRGVSRHSEYRVLVTGLPSSASWQDLKDHMRKAGDVCFSEVYREGGGTVGIVDYTNYDDMKYAIKKLDDTEFRNAFGRAYIRVKEYNGKRGRSYSRSRSPSRSYSKSRSPSKSPRTRRSSSRSRSRSVSSRSRSPSKGRSPSRSPARSKSPNVSPANGEAASPKKQSPNRSPSGSRSPDAKPE

SEQ ID NO: 61825 - protein, 228 aa, Zea mays
  Clone ID: LIB3180-010-D11_FLI.pep
AVSFANLNTEAGLKKLDEYLLTRSYITGYQASKDDLAVYTSFSSAPSSKYINVARWFNHIDALVRLSGITAEGQGVKVESSAVPSAPTPDVAEAQAPAAEEEDDDDVDLFGEETEDEKKAAEERAAAAKASGKKKESGKSSVLLDVKPWDDETDMAKLEEAVRSVQMEGLLWGASKLVPVGYGIKKLQIMMTIVDDLVSVDTLIEDYLCAEPVNEYVQSCDIVAFNKI

SEQ ID NO: 61826 - protein, 381 aa, Zea mays
  Clone ID: LIB3180-020-H10_FLI.pep
PSCGQPLRGMEMESTPLLTPYKMGDFNLAHRVVLAPLTRCRAFGNVPQPEHMALYYRQRATPGGFLIAEACAVSESARGYPDVPGLWTHQQVVAWKPIVDAVHASGAVFFAQLWHTGRASPSEFQPNGQAPISSTDKQIPAQVNHSGDVNTFAVPRRLETEEIPHVVNDFRVAARNAIKAGFDGVEIHAANGYLFDQFMKDSTNDRDDSYGGSLENRCRFTAEVMAAVADEVGANRLGVRLSPFADYMDCHDSNPEALALHVIDETLNPLGVLYCHMVEPRMRVNPDDGIMTLEHMLLPFRRAFRGTFIANGGYDREEGNDAIARGRGYADLIAYGRIFLANPDLPMRFAKNAPLNKYDRSTFYTSDPVVGYTDYPFLDQL

SEQ ID NO: 61827 - protein, 191 aa, Zea mays; identical to SEQ ID NO: 40423
  Clone ID: LIB3180-021-C8_FLI.pep

SEQ ID NO: 61828 - protein, 229 aa, Zea mays
  Clone ID: LIB3180-021-F3_FLI.pep
PQPSPARDGEDKAAAAATATPGARRASVGAAVAVAEDGLLHRGDAGVAAARVRAAAAGRAAGPAPAARAALQLPPRAAALLGLLGRRARRPGQVLPLRLLARRPPRGLRRALPPHPLRVRRGRRRRRRLQVGRRRLQRRLRLLRPRQGRRRLRRRARVAGQRPARRRRGHVPHVARARRRPPRHGVPRVMPRAPTPAARLQNRRRSGKTEGRPDAQGTEAMHDMTPICS

SEQ ID NO: 61829 - protein, 371 aa, Zea mays
  Clone ID: LIB3180-023-E2_FLI.pep
KSKGAVRLRVSRRLLALSAMDAQRALLDELMGTARNLTEEEKKGHKELKWDDPDVCGPYMVRFCPHDLFVNTKSNIGPCSRIHDPKLKESFEKSPRHDTYMQRFEAELAQQCEKLVMDLDRKIRRGRERLAHDSAVPMPIPGKLAELLSVRKEQVKKLLEQIEELGEAGKVDEAEALMRRVDILNAEKTALANEADNKVAMLEKKMELCETCGSFLVADDALERTQSHVTGKQHIGYGMVRDFLAEYKAAKEKTKEEERLAREQKAEEHRKQRGKEYDSGGRDRDTRRERSGERDFDRDRQYERSRGRDRVYDYRDRGSEHRSNRYRNGRDSERGGHRYRSGGMTNDRGRMRSRSRSPTRHGYGRSRSPDH

SEQ ID NO: 61830 - protein, 105 aa, Zea mays
  Clone ID: LIB3180-032-C11_FLI.pep
GLLLLRRRRRRFPRLRPPKPCRRTRPSGSRRSWPRRCARTAPSPTGSACAPTTPSGTTPSAGTGVAPNSDSERWKKCWLKTPRGYRALQARKLLFNFFCLCYLSL

SEQ ID NO: 61831 - protein, 235 aa, Zea mays
  Clone ID: LIB3180-045-A6_FLI.pep
IKLRAIHDKLRPPLRSPPSYSDPKERTQGESTMTEGGRPNRPDQRDLGELSAVSDLDHLGGGAVAGAHLLDGLDDVHALDDLAEDDVLAVEPRGRDGADEELGAVGVGPGVGHGEHTGGGVLAHELLVGELLAVDGLAAGAVAAGEVAALAHELGDDAVEGGALVVERLPGLAHALLARAQRAEVLRGLGHLVGVQLHHDPARRGAADGHVEEDARVRHRDRELGFGDIFPSLYE

SEQ ID NO: 61832 - protein, 144 aa, Zea mays
  Clone ID: LIB3180-050-D8_FLI.pep
EINTWPFLVHLYSNKTLDAARVHEHSDLAPHGLRREVGLELGTDDARVSVRTGDLAPDAPVAGLIALGLGLVDVRHALASVPRDILLGVHPLDLHERRGLVLVRLGPLVSKDGAPDVEPDALSRASLHHGGRLLRFALTLPPPG

SEQ ID NO: 61833 - protein, 62 aa, Zea mays
  Clone ID: LIB3227-022-G6_FLI.pep
DRWHKITPQNHGIRIDCRHSITRKPVPGLERQTFQSRLLTTNLPTMHAKMNCTIVAIHRPEI

SEQ ID NO: 61834 - protein, 135 aa, Zea mays
  Clone ID: LIB3227-030-D3_FLI.pep
PGRRQGRAGGSARAGQGRAREAGVPALPHPGARHQVHADPPRGAPSQAPFRAGEARQPALLHPLRRRGHHLQAQARGPRQPQEVAGWLACLTAWGNSLRFQSHPPTRSTINQSTARPPACGVLLVCCCFLSLLYC

SEQ ID NO: 61835 - protein, 264 aa, Zea mays; identical to SEQ ID NO: 53149
  Clone ID: LIB3180-053-B9_FLI.pep

SEQ ID NO: 61836 - protein, 229 aa, Zea mays
  Clone ID: LIB3180-054-A12_FLI.pep
LHRQNHRHPGASPSRSPPPVAFVPSISGCDAGEPDTANRIRRQGEREEMGLTFTKLFSRLFAKKEMRILMVGLDAAGKTTILYKLKLGEIVTTIPTIGFNVETVEYKNISFTVWDVGGQDKIRPLWRHYFQNTQGLIFVVDSNDRDRVVEARDELHRMLNEDELRDAVLLVFANKQDLPNAMNAAEITDKLGLHSLRQRHWYIQSTCATTGEGLYEGLDWLSSNIATKS

SEQ ID NO: 61837 - protein, 175 aa, Zea mays; identical to SEQ ID NO: 36984
  Clone ID: LIB3180-061-H2_FLI.pep

SEQ ID NO: 61838 - protein, 117 aa, Zea mays
  Clone ID: LIB3227-011-C5_FLI.pep
GPSRVSLNCPISFRRIKTPIKGRLCKHYQCFDYDNYMEMNSRKPNWRCPYCNTSSSFTDLRIDQKMMKILEETGDDVTDVLVFADGSWKVVPAQDEKSDRHRGDTIQQAEDAVNIID

SEQ ID NO: 61839 - protein, 170 aa, Zea mays
  Clone ID: LIB3227-021-C7_FLI.pep
PSYVAVQKHESEVQQGSLIAFTSVFMLRLYQLKNKDSLRLGNWLQCLDHDNTVSPDNHHSNICLVISIDLHSVVDHQIHELVESPKCANNNTVCIQLNLKLLVHVLLEIRRLPRAAHGGGYLASNAREAKGSRSADQLLKTLARWKSRRKTAAGADEQPSFKGNTSRRRV

SEQ ID NO: 61840 - protein, 205 aa, Zea mays
  Clone ID: LIB3227-022-F8_FLI.pep
SISGCDAGEPDTANRIRRQGEREEMGLTFTKLFSRLFAKKEMRILMVGLDAAGKTTILYKLKLGEIVTTIPTIGFNVETVEYKNISFTVWDVGGQDKIRPLWRHYFQNTQGLIFVVDSNDRDRVVEARDELHRMLNEDELRDAVLLVFANKQDLPNAMNAAEITDKLGLHSLRQRHWYIQSTCATTGEGLYEGLDWLSSNIATKS

SEQ ID NO: 61841 - protein, 132 aa, Zea mays
  Clone ID: LIB3227-025-E7_FLI.pep
RRRPPVCSLPSALPPPRWPIKPTARDVVLTSALAASPHFRRGYRTQPKHTASSPSFSTLKLVPSCCSSVDCRLSCSLDVVVVPVLLCSFAVSAPSVDPTPNAVADPRSPKLDVIEFIPGVSFYLLSWCEWLI

SEQ ID NO: 61842 - protein, 59 aa, Zea mays
  Clone ID: LIB3227-027-G1_FLI.pep
FLRHYLSIILTSKIYWHWELPVPVTEVYASGTPFSAFGSNNSLKSESFVPCAGIWVYLS

SEQ ID NO: 61843 - protein, 85 aa, Zea mays
  Clone ID: LIB3227-027-H1_FLI.pep
RSKATASAMSRAIGRLSGKGGKTKYAIENSTRTRIVIADTKIHILGSFVNIKVARDSLCSLILGSPAGKVYSKLRAVSARLAERY

SEQ ID NO: 61844 - protein, 160 aa, Zea mays
  Clone ID: CC-ZMPO148069D04_FLI.pep
LKTAERSPLPLPLRSILQRSEVNMSDRAKMSWQAYVDEHLMCEIEGHHLAAAAIVGHDGAAWAQSTAFPEFKTEDMANIMKDFDEPGHLAPTGLFLGPTKYMVIQGEPGAVIRGKKGSGGITVKKTGQALVVGIYDEPMTPGQCNMVVERLGDYLLEQGM

SEQ ID NO: 61845 - protein, 164 aa, Zea mays
  Clone ID: CC-ZMPO148044E03_FLI.pep
LINVGVGVVVWMHSQALLYEVVTEPLNHHVALSRGHGLVVDADHQRLSGLLHSYASRSLLPADDSAGLALDDHVLGGAKEEADRGQKPRLVEVLNDVGHLLWLELWECGALGPNGAVVADYGGRAQVVALDLAHEVLIDVRLPRHPVQWLLLLNYDLQCNARGG

SEQ ID NO: 61846 - protein, 348 aa, Zea mays
  Clone ID: CC-ZMPO148071F08_FLI.pep
EGIPPDQQRLIFAGKQLEDGRTLADYNIQKESTLHLVLRLRGGMQIFVKTLTGKTITLEVESSDTIDNVKAKIQDKEGIPPDQQRLIFAGKQLEDGRTLADYNIQKESTLHLVLRLRGGMQIFVKTLTGKTITLEVESSDTIDNVKAKIQDKEGIPPDQQRLIFAGKQLEDGRTLADYNIQKESTLHLVLRLRGGMQIFVKTLTGKTITLEVESSDTIDNVKAKIQDKEGIPPDQQRLIFAGKQLEDGRTLADYNIQKESTLHLVLRLRGGMQIFVKTLTGKTITLEVESSDTIDNVKAKIQDKEGIPPDQQRLIFAGKQLEDGRTLADYNIQKESTLHLVLRLRGGQ

SEQ ID NO: 61847 - protein, 91 aa, Zea mays
  Clone ID: CC-ZMPO148045B10_FLI.pep
GGGGGAAGAQERQDGGGGARGPFFLFLARARQHVLHARPLMREPAVVISSADKSSGARPAMGWDGRRCSSNLCATYVLVFIIIVITNNNDW

SEQ ID NO: 61848 - protein, 83 aa, Zea mays
  Clone ID: CC-ZMPO148032H11_FLI.pep
WPVHACSSSCSSWPPSRWHRSRAPHAWTLWRVGPWHPPMHRRRRPMLPLLAPTPPHPQTRHRRRPLAAVPPTRRKNLFILWNN

SEQ ID NO: 61849 - protein, 72 aa, Zea mays
  Clone ID: CC-ZMPO148045D08_FLI.pep
MEKYDDEQEQCVFPVLSNQDLVKFLPFISKKLIIHVEGGFFQQFVLDGDLDLQTLVTILLGGDIGPQKHLWS

SEQ ID NO: 61850 - protein, 202 aa, Zea mays
  Clone ID: CC-ZMPO14820002F11_FLI.pep
DERSRLILSIELGAFFVPRSVFICNLKLTGTFEWIMDGLVGLLKVRVVRGINLAYRDARGSDPYVVLRLGKKKLKTSVKKRSVNPIWHEELTLTVTDPSLALKLEVFDKDTFSRDDPMGDAEIDVAPLVEAANASPEASLRNGAIILSVRPSATNCLADESHVCWRNGKFAQDMILRLRNVESGEIQLQLQWLSIPPAAASR

SEQ ID NO: 61851 - protein, 220 aa, Zea mays
  Clone ID: CC-ZMPO148046E06_FLI.pep
WASACVRAATDRRPGTMSFTGTQDKCTACDKTVHFIDLLTADGAIYHKTCFKCSHCKGVLSMCSYSSMDGVLYCKTHFEQLFKETGSFSKNFTPGGKSSDKGELTRAPSKLSSAFSGTQDKCAACQKTVYPLEKLTLEGESYHKSCFKCSHGGCILTTSSYAALNGVLYCKIHFAQLFMEKGSYNHMNKKSPSQEVLPDVADEEQPPEPAPPQDEKEEDN

SEQ ID NO: 61852 - protein, 160 aa, Zea mays; identical to SEQ ID NO: 61844
  Clone ID: CC-ZMPO148038E03_FLI.pep

SEQ ID NO: 61853 - protein, 173 aa, Zea mays
  Clone ID: CC-ZMPO148047E05_FLI.pep
ERYKQTPIRVIFSFAMAIHRAPVTGKQYRIEFEELRITITETAALHGSLASSRLCGTGRDTAEPFLRCVGPGAVGGHLLVPGPGVLAVGRRRPVPDVALGRGFLLIPGLAEDHREPVGRGRVVHVPFAELGYSAASVVRHRCRSVLQPESQKILPLLIRRARVSGGKIFPGAR

SEQ ID NO: 61854 - protein, 135 aa, Zea mays
  Clone ID: CC-ZMPO14820005E03_FLI.pep
RYAQAAKNAIHCHLQRRLYTVTGKYPESSLAAGLPATELHRTAAMQWTISLSLASSRLCGAGRDTAEPFLRRVGPGVVGGHLLGPGVLAVSRHRPVVPDVALGRGSFLLVPGLAEDDREPVRGRRVVHVPLAELG

SEQ ID NO: 61855 - protein, 166 aa, Zea mays
  Clone ID: CC-ZMPO148048H06_FLI.pep
TPTPYIIINEKLVWAQPTAACINKELEEVIGGRRRRGHQIEGVGHRRTPEPTTPHVATTAGDDRASRTRRSYPRVPWPPPSLPKPIVPRTITVTTEPRVRRRHSFDSGLPSPLARPPLERRHHSVLGENHRCLPAASGASAWVTHLGAPPPPAPDISTACTPEGTA

SEQ ID NO: 61856 - protein, 176 aa, Zea mays
  Clone ID: CC-ZMPO14820006D12_FLI.pep
RPTNASSEDVVADVRGRAPDVRDRGPPPHVGGHRRPRRRHLGSEHRIPRVQARGDGCHHEGFRRAGAPRPDRPDTGRHQVHGHPRRTWSCHPWQEGIRGHHCEENRAVTHHWHLRRADDSRAVQPGGGKAGRLPARTGDVMTTPSPGMHVDDVAGSNFVFSNNNNKAKTLLPTLFA

SEQ ID NO: 61857 - protein, 187 aa, Zea mays
  Clone ID: CC-ZMPO148042H08_FLI.pep
TWKQKRCQYGTHKWPASSIILLRSLTAGTCKSEWMEYNVPEILNASTKHRSCHKNFHLPLFIIKVMLSPLRSIRPSVFLVFFLTLISSASSRTKFMYSSNPMMRPSIRRSFCSKSQIWMRALLWRKRKMRLMGWVMIRCTLVDAMAAAAAAGASPPPPRTSRSFRRRARRGQNPSYHASRLRGGSEG

SEQ ID NO: 61858 - protein, 107 aa, Zea mays
  Clone ID: CC-ZMPO148063C12_FLI.pep
RNLSVTLFILTAYVAATAAPTVCAVKSPASTTTTRKHEAAKEETDAPAKAPAAAATEGPAAGAPMTWPDGGPEFVKMVIKNPFFKSAPPSGSEDGLPIDPTPEGSMN

SEQ ID NO: 61859 - protein, 220 aa, Zea mays
  Clone ID: CC-ZMPO148043A09_FLI.pep
SPPFPLLVSAPLLASDPQFLLRISHSAQRRCEGRGTRRKMGLAFGKLFSRLFAKKEMRILMVGLDAAGKTTILYKLKLGEIVTTIPTIGFNVETVEYKNISFTVWDVGGQDKIRPLWRHYFQNTQGLIFVVDSNDRDRVVEARDELHRMLNEDELRDAVLLVFANKQDLPNAMNAAEITDKLGLHSLRQRHWYIQSTCATTGEGLYEGLDWLSSNIASKA

SEQ ID NO: 61860 - protein, 215 aa, Zea mays subsp. mexicana
  Clone ID: UC-ZMROTEOSINTE016B11_FLI.pep
KTSGSVGRCVGGLLHDGAGVGVLVAEGGGVADLGGGGPGERRGGGVGDDVADVAGGGLLVVGARRVGVLHHLVGHVGPGLHPLARLVGNAAHDLGGVHVARDRHLVLLGRHLHGAHALHALHRLLHLALAPFAVDAHLHLHRLELLPLLEMPASPRQGAELGDDVDDAHRSQAFSSLHLDGPFPFVPEWGNKERSAQRSSTTKRTATLSRRQRAS

SEQ ID NO: 61861 - protein, 110 aa, Zea mays subsp. mexicana
  Clone ID: UC-ZMROTEOSINTE008A01_FLI.pep
NLLLDISLLLLPQPVQGAVCVALSTDKPRESKRCEVTIIQAIRIQVANVDLDRGMVLGSDDPVCGRALPGDIEVHSLTLLVLHGDSWGNYRKSNLQETEQTGGGVRSRRR

SEQ ID NO: 61862 - protein, 134 aa, Zea mays subsp. mexicana
  Clone ID: UC-ZMROTEOSINTE019C07_FLI.pep
QGEEASSLASEAVEGSALALERVDDVHGGDGLAACVLGVGDGVADDVLEEDLEDAAGLLVDKPRNALHAAPPSQPTDRGLGDALDVVTEHLPVALCSALAQTFAALAAPRHRRCRCPVFHALLASKKMGDFLGR

SEQ ID NO: 61863 - protein, 193 aa, Zea mays subsp. mexicana
  Clone ID: UC-ZMROTEOSINTE026G07_FLI.pep
FVLMARLYIGNLDPRVTARELEDEFRTFGVLRSVWVARKPPGFAFIDFDDKRDAEDAIRDLDDFYGSVGKNGWRVELSRNASGGRGGRDRHGGSESKCYECGETGHFARECRLRIGSGGLGSGRRRSRSRSRSRSPRYRRSPSYGRRSYSPAARSPRRRSVSPARGRSYSRSPQHKGAREESPYDNGYRRSRS

SEQ ID NO: 61864 - protein, 91 aa, Zea mays subsp. mexicana
  Clone ID: UC-ZMROTEOSINTE028A01_FLI.pep
EIGHGRDLKKFLIVIAGLWLLSVLGSCCNFLTLFYIVFVALYTVPVLYEKYEDKVDAFGEKAMIEMKKYYAIFDEKCLSKIPKGPLKDKKH

SEQ ID NO: 61865 - protein, 189 aa, Zea mays subsp. mexicana
  Clone ID: UC-ZMROTEOSINTE021A11_FLI.pep
SHTLTTAKSHEQVGPRSLERGPQLPGRRPDLAVHERELDLTVVELLSVVPLAELEVHRRSLDDLDAGGPHAVARGHLVVHLLYSAIQGCVAVLLVHVVVAGSALVAQPDAVVLDCRRVTLKDLVDGQDLAVALLNLLQLPQEVPELALGADLVGGPELHAVDLGVLIAGRRERAPHHLVLMEPEGHHFR

SEQ ID NO: 61866 - protein, 58 aa, Zea mays subsp. mexicana
  Clone ID: UC-ZMROTEOSINTE014G12_FLI.pep
RLHIVSNNITIQHTALKQAFSVPESYNPEPATESTIHINSRGPVSCCCKTFWGSRITR

SEQ ID NO: 61867 - protein, 220 aa, Zea mays subsp. mexicana
  Clone ID: UC-ZMROTEOSINTE077E04_FLI.pep
KNSSNQSTRYAAADTLSRKITTPHVHRAPNHENAQTTALVLFFPIDKYRRANGWLHDPAAQSFKAGSPTATLTVSSAELVPSKVSCSHRQALDQWQVLRPCPECCYLHHGPEQQFQGQRGRYSLGIHAVQCFDELHGDQSENCWLVHFLHRQCAVAATYAVHHLHQQNTPLHHQEPGIQRASFAATSLTNPCHLVLCLNQTWPPGLAHPHSARYCLSYLQ

SEQ ID NO: 61868 - protein, 109 aa, Zea mays subsp. mexicana
  Clone ID: UC-ZMROTEOSINTE129C12_FLI.pep
TLVLNGIQPVLSGVAVGCGWQQFVAYVNIGCYYIVGVPLGALLGFVFKLGVKGIWAGMIGGTCMQTAILVWVTLRTDWNKEVEEAQKRLHKWEANKTTEPLLAGVSNHK

SEQ ID NO: 61869 - protein, 155 aa, Zea mays subsp. mexicana
  Clone ID: UC-ZMROTEOSINTE107G09_FLI.pep
SANRGDTKETRVAATFGIHRLNMKPLTNSFITRVFGCLLAIVQAEHVILHEEGPSCRQQMECLGELDRVLLGAGADGTGDEDEHASLGPRRLAVDGDNLVLAGLEGKRSELAGNGGWALELLALEGEHGGLLIQPHQRRAVGVERPVVVLHEGFR

SEQ ID NO: 61870 - protein, 205 aa, Zea mays subsp. mexicana
  Clone ID: UC-ZMROTEOSINTE080E06_FLI.pep
GAGAAMKKIFGAKKDKGPPPSIQDATERINKRGETVDEKIKKLDEELARYEEQRNMLYNQTYNLDQVGFAADGLKDAQQTMNAMKAANKELKGMMKTVKIDEIDNMQDEMTDLMDVSNEIQETLGRSYNIPDDVDEEELMGELDALESDMEFDSAAVPSYLQPDSDFDADLNLPAAPSRPAMVPAGGLQEDELGLPAVPRASLRS

SEQ ID NO: 61871 - protein, 124 aa, Zea mays subsp. mexicana
  Clone ID: UC-ZMROTEOSINTE031E05_FLI.pep
PYTCPSIRYYCLFIHSCIRASSGPTTDPMGDRSGVVLVGEDVEEREGLGDGELEPELGPVVVVQDGAEGVLLQRVVDLPRCHPHLRREARLAGALLVLPRRRVDVGPAEARGLEDAVELVRGVV

SEQ ID NO: 61872 - protein, 87 aa, Zea mays
  Clone ID: UC-ZMFLMO17035E11_FLI.pep
GEKYGLMNVSSMVHTKENRDTTLNLEPSPDLLTKVPSLVERKVSKHPPVLKLKRTMATKTKSHLVVKGASPTPATPNPLPPVLVLNY

SEQ ID NO: 61873 - protein, 98 aa, Zea mays subsp. mexicana
  Clone ID: UC-ZMROTEOSINTE049D06_FLI.pep
PPPTARLGQSPAPQGSPGRKASTHHTSQVSLSHINTINKGIEIRLLFLAATCEWVWIWGLSGLLDSGMTFVHGWMDYFTIHGEDHFRPPCSVCRSCSV

SEQ ID NO: 61874 - protein, 363 aa, Zea mays subsp. mexicana
  Clone ID: UC-ZMROTEOSINTE085F02_FLI.pep
KILDELLDSMNHSSAQVREAIGIAMCVTTSNMRLSGLFGTGCSPQGLHGDVSMIEQTGNKYWSERLTDGANELAVSIQNSTQSKQLESTSDSAEDSMDDREQADAKRMETIFHFMIASLKSGRSSVLLDTIIRLVYPILSLQETSNKDLSLLAKSAFELLKWRILHRPFLETAITSILPLVSDPNWRTRSALLSYLRTFTYRHTFILSGSEKSQIWQTIENLLVDNQVEVREHAAGVLASLMKGIDEDLSKDFRERSYAQAQHIFVARRRNLKFSVGTIHGAVLALTASVLSVPYDMPSWLPSNVSLLARFIREPPPIRSTVTKAVAEFKRTHADTWSIQKDAFTEDELEVLRDTSSSSSYFA

SEQ ID NO: 61875 - protein, 231 aa, Zea mays subsp. mexicana
  Clone ID: UC-ZMROTEOSINTE066D11_FLI.pep
GVMAVSFANLNSEAGLKKLDEYLLTRSYITGYQASKDDLAVYTSFSSAPSSKYINVARWFNHIDALVRLSGITAEGQGVKVESSAVPSAPTPDVAEAQAPAAEEEDDDDVDLFGEETEDEKKAAEERAAAAKASGKKKESGKSSVLLDVKPWDDETDMAKLEEAVRSVQMEGLLWGASKLVPVGYGIKKLQIMMTIVDDLVSVDTLIEDYLCAEPVNEYVQSCDIVAFNKI

SEQ ID NO: 61876 - protein, 200 aa, Zea mays subsp. mexicana
  Clone ID: UC-ZMROTEOSINTE086B01_FLI.pep
FMFQLFCDTEVDHCKEWNSNRQEKGEPAYDTNIFEDLVSRFEKPDRRNRWDSPLFELFPSRDELVETAPVIAEAVSYLTKKVDSKTRDVKVLQPTIATQTVRTTEANSLYEMDKATQEVINAIVEAQSCGLGLAVNKISIGPNLPTIKLERSVGLPELRSLRRTFIKLAGQYSLSGPPPPTDADSAKRMFVDYLNRELGA

SEQ ID NO: 61877 - protein, 192 aa, Zea mays subsp. mexicana
  Clone ID: UC-ZMROTEOSINTE117B02_FLI.pep
YDDRETIHMHASHDCAGVDVLVAEHGHVLDLRSAGVCHGLRRAADKARGSLLVVGAADVGVGGERVGHVGPHLGVLAGGLDALQHLGGLHVPGHRALALLRVHRHARHAAHRLHRALHATLATFAVHLHLDVHRLQRSLLPELERLLRLRDAAHMRHVVQDAHGATAGGVYVVAAAAAALLPLVLFCCELAT

SEQ ID NO: 61878 - protein, 106 aa, Zea mays subsp. mexicana
  Clone ID: UC-ZMROTEOSINTE032B02_FLI.pep
ERERSRARRRRWRAEGRDSTRLGSSSGGGTSGGGTLWRGTSCATPHPGSASPSSPSGSTSSARPPTTASTAPPATTTTRSPAGSVTRSRSWSQLYQALVLLMFLQF

SEQ ID NO: 61879 - protein, 208 aa, Zea mays subsp. mexicana
  Clone ID: UC-ZMROTEOSINTE043B09_FLI.pep
KGTDAGGVDDDGGRAAGQTRDLELATVSDLHLLGGGAAAGAHLLDGLDDLHALDDLAEDDVLAIQPGGLHGADEELRAVGVGAGVGHGEHPGAGVLADEFLVGELLAVDGLAAGAVAAGEVAALAHELGDDAVEGRALVVERLPGLAHALLARAQRAEVLRGLGHLVGVQLHHDPAGWGTADGHVEEDAGVRHRDPKLGFGEIFPSLS

SEQ ID NO: 61880 - protein, 167 aa, Zea mays subsp. mexicana
  Clone ID: UC-ZMROTEOSINTE056B09_FLI.pep
SKAKNKRAAIQSLKRKKLYEQQIEQLGNFQLRIHDQMIMLEAAKATTETVDALRTGAAAMKAMQKATNIDDVDKTMDEINEQTENMKQIQDALSTPLGASDFDEDELEAELEELEGAELESQLLEPVAALPVHPVHVPGNKQPARPAPQKATAEDDELAALQAEMAL

SEQ ID NO: 61881 - protein, 94 aa, Zea mays subsp. mexicana
  Clone ID: UC-ZMROTEOSINTE086F06_FLI.pep
TRMPCSLVQEKRSVMDSSASSDSYFQNHKASLVMSIIFIVMAIWISTITNYLKHKVLRADWTLMRLVFFQPEPYNIMFVLTLATRTTDYPLVKV

SEQ ID NO: 61882 - protein, 186 aa, Zea mays
  Clone ID: UC-ZMFLMO17011F04_FLI.pep
FFHAAMAFNYYRSTWCGSAAANKNNEEIEACAVLVATLRKKRRWGGSVVGHKMKNRDRIGGDIQLNNDYFIERSLFNPEQFRRRFRMQQSLFLEIEDKLAAANKFFRQKRNAAGVLGFSSRQKCTVALRMLAYGGPADFLDEGLRMGESTVLQTIKEFAKTVLQTFFCLACFFPPLDGSSDSSDVK

SEQ ID NO: 61883 - protein, 154 aa, Zea mays subsp. mexicana
  Clone ID: UC-ZMROTEOSINTE056H11_FLI.pep
GMQIFVKTLTGKTITLEVESSDTIDNVKAKIQDKEGIPPDQQRLIFAGKQLEDGRTLADYNIQKESTLHLVLRLRGGMQIFVKTLTGKTITLEVESSDTIDNVKAKIQDKEGIPPDQQRLIFAGKQLEDGRTLADYNIQKESTLHLVLRLRGGQ

SEQ ID NO: 61884 - protein, 79 aa, Zea mays
  Clone ID: UC-ZMFLMO17042H02_FLI.pep
TAGTAEDRPGAESSALFSPRSSNGDGWQHTKRRVRSRVAVASYHHHYHQQLIFAGWLGHNPSIDPDHLNAPETDSSVVW

SEQ ID NO: 61885 - protein, 193 aa, Zea mays subsp. mexicana
  Clone ID: UC-ZMROTEOSINTE057H04_FLI.pep
LVLHMIRRSRDYTYHMHASHDGAGVDVLVAEHGHVLDLRSAGVCHGLRRAADEARGSLLVVGAADVGVGGERVGHVGPHLGILAGGLDALQHLGGLHVPGHRALALLRVHRHARHAAHRLHRALHATLATFAVHLHLDVHRLQRSLLPELERLLRLRDAAHMRHVVQDAHGATAGGIYMLLLPLVLFCCELAT

SEQ ID NO: 61886 - protein, 135 aa, Zea mays subsp. mexicana
  Clone ID: UC-ZMROTEOSINTE035B07_FLI.pep
FSSTATIFSLSKLPPSSANLAHAIKTNHHPCVAPIALLRDLINHKHYSFPQRSQHTMPREEYQVPTTSGGASAGAMTRGATGGERHDSRAVMTYICGDCGGNVTLSKDALVACPHCAGRVLYKERTKRMVQFEAR

SEQ ID NO: 61887 - protein, 140 aa, Zea mays subsp. mexicana
  Clone ID: UC-ZMROTEOSINTE044F06_FLI.pep
DRLPAPPSHPCLQLASTLRSAGHGHLAEAPATTSSPASYRSRASHTAYSMKCPNLWTVDATSAPSPNTLSQFRALPVRHRFSSVQLVLCLVSMVNCGLCLCTGVWFGGEESHMCEDRNPCNSCLMFGVMQIGNRHHYPKY

SEQ ID NO: 61888 - protein, 97 aa, Zea mays subsp. mexicana; identical to SEQ ID NO: 55204
  Clone ID: UC-ZMROTEOSINTE129C11_FLI.pep

SEQ ID NO: 61889 - protein, 334 aa, Zea mays
  Clone ID: UC-ZMFLMO17076F09_FLI.pep
LHCAPSSPPPLPATNCQGAKQVQIPSLPHKQRHQGLQPGQVLFFHSAMGNLCCCVQVDQSTVAIREQFGKFDSVLEPGCHCMPWFAGKRVAGHLTLRLQQLDVRCETKTKDNVFVNVVASIQYRALADKASDAFYKLSNTRSQIQAYVFDVIRASVPKLHLDDAFEQKDEIARAVEEELEKAMSAYGFEIVQTLIVDIEPDEHVKRAMNEINAAARLRAAANEKAEAEKIVQIKRAEGEAEAKYLSGLGIARQRQAIVDGLRDSVLGFSVNVPGTTAKDVMDMVLITQYFDTMKEIGASSKASSVFIPHGPGAVRDIATQIRDGLLQGSSVAKH

SEQ ID NO: 61890 - protein, 195 aa, Zea mays
  Clone ID: UC-ZMFLMO17092A12_FLI.pep
VGLGIGATPFISILRDLLNNIKIADELMDLAMETSRSEDSANSFSVSTASSNRKRAYRTSRAHFYWVTREAGSFEWFKGVMNEVAEMDKKGVIELHNYLTSVYEERDARTTLLSMVQALNHAKHGVDIVSGTRVRTHFARPNWKEVFTRIASKHPNSTVGVFYCGAPTLAKELKALAHEMSHRTGTRFHFHKEYF

SEQ ID NO: 61891 - protein, 285 aa, Zea mays; identical to SEQ ID NO: 53470
  Clone ID: UC-ZMFLMO17092B01_FLI.pep

SEQ ID NO: 61892 - protein, 145 aa, Zea mays
  Clone ID: UC-ZMFLMO17160A05_FLI.pep
TKAKDVPQQWHKEPEHHKFLKKTFSLLFTTTQGGEQNEAPRLMLLGGARNAASGLVKHGIDLVAVLHLQLIRGLLAAKPAAIKQERNGIHVHRLAVTISVHQLLQLGGPLYAKEHLIAILSLDLKVDVGAALRGLLVLLAGSRHR

SEQ ID NO: 61893 - protein, 177 aa, Zea mays
  Clone ID: UC-ZMFLMO17130A08_FLI.pep
LLSLLGLRAGHPPALLLSGRRRRRRRGARAPEEALQLLKPQAEHLHLEQALPARRGGRGRPRLPRRRRAGPWRPHLALPARRRTAAVVLLLILRHGCGGALLGYCSHRRPCPVQQERRAARRERRRRWLVELRRRRHGGYGEASGLYVRARASWFFLERREGKRAVCRGEYGVEEMK

SEQ ID NO: 61894 - protein, 142 aa, Zea mays
  Clone ID: UC-ZMFLMO17206H01_FLI.pep
GDAAHGATHNSDFAKSRSCTRLASACSSPPWRKPPPQARHLAGGAFVWPASDMTRPRSSRRRLVASSHHHSRSLPVARILGCGREDFPLRWIKGETLTLLADRSPNTTAEVAVSDPQRHQKKEAGPGYANATACMPFATWIG

SEQ ID NO: 61895 - protein, 198 aa, Zea mays; identical to SEQ ID NO: 47763
  Clone ID: UC-ZMFLMO17054H10_FLI.pep

SEQ ID NO: 61896 - protein, 90 aa, Zea mays
  Clone ID: UC-ZMFLMO17211B08_FLI.pep
VEKSILMVFCIGQPGQIYEHWARHDQICSLVLGDSSLKLMMLLGCPPKHRDSSWLLERAMSVHEDLSLALALALPLPNVSLLSSGLLADG

SEQ ID NO: 61897 - protein, 99 aa, Zea mays
  Clone ID: UC-ZMFLMO17140G11_FLI.pep
DAVDPPLLRLLVAVLVPELPDLAPDHVRHVRLHEHVGRVEHVHDEPLRRRHRRVQVDDELRHRYVAGDEQPLDRVNHLTCALDRDNCRCLAPTTTLVVV

SEQ ID NO: 61898 - protein, 209 aa, Zea mays
  Clone ID: UC-ZMFLMO17236H03_FLI.pep
PPPPRRRSSLSSQPPPIEPLAPAPGGGMEAGGEEFAIGVVLSAKTTLGEEFEGQIVAFDRPSNLLVIQEGVGRAESGERRNVRVLKANYIREFSVLSKGDDPLDPAGCMLDLNSIYAREDAALRQAEIEAEKIGVGVTPEAQNIFDALSKTLPVQWDKTDIVVMKEVRVRSPYLPENVSGGTAAANERVKKVIDFERKRLHSRAPGQFS

SEQ ID NO: 61899 - protein, 76 aa, Zea mays
  Clone ID: UC-ZMFLMO17085F08_FLI.pep
TPSSNITSSTCSDDDTMPVRRENSRTQARRGRWRCCCSDEVGSTQMERKRAGPEHGAVHGCSTTWRSPNQGESDEF

SEQ ID NO: 61900 - protein, 87 aa, Zea mays
  Clone ID: UC-ZMFLMO17197F03_FLI.pep
LYLGRFKRHISQIQKAHFRLISAMIIPLSGHLIKKFRDALAKHKADKCSLGPTWGLESELLALAANKDVQGDTTGFKHGRLRGGQDR

SEQ ID NO: 61901 - protein, 75 aa, Zea mays
  Clone ID: UC-ZMFLMO17087F12_FLI.pep
SYYKSRSFQHWVYFSSVITEERSSCSPVYRQLGDTHTHTHHSCRSVKVPSRQLLAPQASGSGRCKLNRPLSLLQW

SEQ ID NO: 61902 - protein, 283 aa, Zea mays
  Clone ID: UC-ZMFLB73183E09_FLI.pep
AGRRGGQEDRRPSRAGARDGNGTGPQNLRSFLPARPCPSTRRSCRPRPTSALSSSRGIGYATGCAMVLWVFGYGSLIWNPGFDFDDKILGFIKGYKRTFNLACIDHRGTPEHPARTCTLETDDEAICWGIAYCVKGGPEKELKAIQYLERRECEYDQKISIDFYKEGDPLKPAVTGVLVFVSTPDPIGNKYYLGPAPLQDMARQIATANGPTGYNRDYLFSMEKALASISHEDDSIIELANEVRKVLNRTKETKITGANASMKSHAPLVHLSALPEGTVVDSR

SEQ ID NO: 61903 - protein, 242 aa, Zea mays; identical to SEQ ID NO: 46973
  Clone ID: UC-ZMFLB73192D07_FLI.pep

SEQ ID NO: 61904 - protein, 288 aa, Zea mays; identical to SEQ ID NO: 47549
  Clone ID: UC-ZMFLB73192F03_FLI.pep

SEQ ID NO: 61905 - protein, 288 aa, Zea mays; identical to SEQ ID NO: 59326
  Clone ID: UC-ZMFLB73193G06_FLI.pep

SEQ ID NO: 61906 - protein, 334 aa, Zea mays
  Clone ID: UC-ZMFLB73196G08_FLI.pep
LAPGFTLPYFQFSSEGDPNPESPPAKTSSRARAHTHTLLALCQRLGLWRRRKHLGDAFGGDGGEVLGPRVAVLRGGCDRPVVLVGPVRGGGHDDLRDVREHRQAVQRAPGGDGQVLRRGLVPHVEVLGHGLHAAVHVPRHRLRHRERRTGCAPHARPLRLGRQLARHLRHAPNHRVDMRRRRLQRAREVLVHLVHRVVHLAVDEGEDVERQAAEAVVDGANDALDGRLDGVNAGAERAGVVLGEAVEPSEAHRGLGSRHLDEVQVPQLRGPPRLLLLHHNLPLLRLLVLGVGLLLRHRANQTRDSLGYSGTVEPGRQTGLREEEKETEQARRYG

SEQ ID NO: 61907 - protein, 237 aa, Zea mays
  Clone ID: UC-ZMFLB73210F06_FLI.pep
ARDQRNQRERGMAAGLQVFGQPASTDVSRVLTCLFEKKLEFDLVRIDTFKTHHKLPEFIRLRDPNGQVTLKHGDKTLVDSRDICRYVCTQFPNDGNKSLYGSGALERASIEQWLQAEAQNFGPPSSALVFQLAFVPHLTHLGVRQDPAVIAENEDKLKQVLDVYDEILSRNEYLAGDEFTLADLSHLPNSHYIVNTERGRKLFTNKKNVAKWYEKLSKRETWKQVAKMQKEHPGAFE

SEQ ID NO: 61908 - protein, 51 aa, Zea mays
  Clone ID: UC-ZMFLB73217B04_FLI.pep
TSHELITASSMHLILRYLFLTWHLRFQVPTCSSDDTCPHASPNRCSGYSIS

SEQ ID NO: 61909 - protein, 200 aa, Zea mays
  Clone ID: UC-ZMFLB73217H10_FLI.pep
CHDLLSQQIDLLDGLRRGGRLRGSGAARLAEVRRRRRSGVLTSMASLSSKHHVLIQVLLARGPLSERDFHAFIDGAFGKNTALGTKRLASEDLANDWDNKRLNPGNDNYPLSTGAANNLFLGIEQGAGSSNGQSAFPKFDNGSSVALPSGQGMSGLMGKGAKWRDGDWLCNNCNNHNYASRAFCNRCKTQKESAVHPGVL

SEQ ID NO: 61910 - protein, 82 aa, Zea mays
  Clone ID: UC-ZMFLB73221F08_FLI.pep
FQEEMGSQIIRRRGHKALNGRMWTTADRPSAAIHCWSPVLTYPFSFTRNCMYSPANKGELPVPWRNVMVLPCDLSKYKWKFA

SEQ ID NO: 61911 - protein, 70 aa, Zea mays
  Clone ID: UC-ZMFLB73222G03_FLI.pep
RRSFCYAKRQPDRPARDSTTTQTVASTQSDMVYLAQNQNRSTENYRYHKKHLIPSSSTKRAFYLPKTHHV

SEQ ID NO: 61912 - protein, 251 aa, Zea mays
  Clone ID: UC-ZMFLB73225D09_FLI.pep
TRNSQTRTTSPPPKPIPPARSLTGVTAPQIRLPSPARSRVFRSSAAMSHNHGDTIPLHPSSAQSDMDEIESLIHAAPSPATVLPARPPSPTRASIPVSSSPALAPAPVPTKPPLPAASIPISVSVSPVLTSVSVPIGADGFGPPPNTLTEPVWDTVKRDLARIVSNLKLVVFPNPYREDPGKALRDWDLWGPFFFIVFLGLTLSWSASVKKSEVFAVAFAVLAAGAIILTLNVLLLVRPFFSTHKHGYTCT

SEQ ID NO: 61913 - protein, 153 aa, Zea mays; identical to SEQ ID NO: 44881
  Clone ID: UC-ZMFLB73226F09_FLI.pep

SEQ ID NO: 61914 - protein, 212 aa, Zea mays
  Clone ID: UC-ZMFLB73234F01_FLI.pep
NSSSRGNKIITISAAQKTFRPRHLAFYNDRVTVLHACFLLLVNKYAFLVILLILAEAAAAAFIFFDHGWKDVIPVDKTHNFDVMYDFLKENWEIARWVALGVVVFEAVLLLLALAVRAMNKPAEYDSDDEIIAIGRSPTIRQPLIHTQNVPATGVPVPTLDQRASRNDAWSQRMREKYGLDTSQFTYNPSDPSRYQQNGTPRAEERSRCTIM

SEQ ID NO: 61915 - protein, 82 aa, Zea mays
  Clone ID: UC-ZMFLLIB3205431C12_FLI.pep
PRNIRVRRRCGVLWWAGRWAQGSCEPPLQSGSVSAPTGAHQQRQGRSGPRVRRTATPAQKRLARRESEFPSFCKFKLKHSVC

SEQ ID NO: 61916 - protein, 166 aa, Zea mays
  Clone ID: UC-ZMFLLIB3205461E07_FLI.pep
FPVIPSGYIHTPNNIVHHGANHIASYTQMAGWRPSPIGGTEPPTLWWQGLTMELKNALTTSSEASRLSKHIAYSITAASQGSVILPPSSPVNPNSSRDMLRSSPNTAVPRYASGTSNLVPSEEYTTQWPLTATGIDVPHEPSASFASVAVSRLLAMAAVACHFFAI

SEQ ID NO: 61917 - protein, 263 aa, Zea mays
  Clone ID: UC-ZMFLLIB3205464A01_FLI.pep
LIFAGKQLEDGRTLADYNIQKESTLHLVLRLRGGMQIFVKTLTGKTITLEVESSDTIDNVKAKIQDKEGIPPDQQRLIFAGKQLEDGRTLADYNIQKESTLHLVLRLRGGMQIFVKTLTGKTITLEVESSDTIDNVKAKIQDKEGIPPDQQRLIFAGKQLEDGRTLADYNIQKESTLHLVLRLRGGMQIFVKTLTGKTITLEVESSDTIDNVKAKIQDKEGIPPDQQRLIFAGKQLEDGRTLADYNIQKESTLHLVLRLRGGQ

SEQ ID NO: 61918 - protein, 73 aa, Zea mays
  Clone ID: UC-ZMFLMO17304G12_FLI.pep
GAFSSQQIGCVVTNLTSHYKFLDYYISSPWQVWNHNIPDMHDGGLVGYRYPVWSKWRLQDSPRSPGFLSIPQF

SEQ ID NO: 61919 - protein, 223 aa, Zea mays
  Clone ID: UC-ZMFLMO17310C01_FLI.pep
HLQQQQELHSLDTTYKLPLLLSSHRVPVLPRSDGVQGSRHFQNRPEKPPGCCCCPWPPPPPLAPACGGLGGAPLDDSLRLNVPLDGGLLGPAATPVGARFSGAGDGASCCCCCFGCFFPPASKLPTTICTGEAAVRSPATQPPRTRPSGPASETLSPPVRLRWPPFSDRRNDPDRDSISKRPSYVTVPPEVADCRSVTFDMAPFAERMQTARVPCCENDMIFA

SEQ ID NO: 61920 - protein, 226 aa, Zea mays
  Clone ID: UC-ZMFLMO17318F12_FLI.pep
QNKIITWDNTKLVLLIDDHLVSISHSGTLSDHPSLGSFTSIILGSTRLLSFASRVTNHIMLRLDFSKNEDGHQFEHIIEHLMSVELNLLLHLILQGFYSISHTSTHIKPHISRVLTRTSKTTKGFRDHHGSSRGGRPWEQRRGWGHPLAAERGGHCLLQGRASSYSREGRRPWQEGERARLGTIARGGWGGLERGPGRGCGWGRAWRKPGTAGEGSRSSAGRAWCV

SEQ ID NO: 61921 - protein, 190 aa, Zea mays
  Clone ID: UC-ZMFLMO17330H09_FLI.pep
NDSQRWEIICKLSIGIVKGLDHLHTASQKPIIHGNLKTNNIMLDADFQPRISDFGLYLLLNPAAAQEMLETSAMQGYKAPELIKIRDGTRESDIYSLGVIMLEMLAQKEAANDESPNARDIHLPVSFRDLVLERKISEAFSSELIIQSKNSGKEGNLNAYFELATACCNPSSSLRPDTKKILKRLEDIAR

SEQ ID NO: 61922 - protein, 102 aa, Zea mays
  Clone ID: UC-ZMFLMO17356A12_FLI.pep
YQFPSSERAVAVKSPVGPDGRAASDYCRMARARTEQIRTGRGGKELTTAAGAGRERRRRPPLREAPGDAAAAVTAEVVGEQQGGMVKREEDLLRRRWAVARA

SEQ ID NO: 61923 - protein, 205 aa, Zea mays
  Clone ID: LIB3066-050-F1_FLI.pep
TIARIQHSEFGTATQLHFCFPFLSQLHICNPGEEDLWFSASQSAVVDDVLLLIVVVVRVQLLEQRGADGQRHVLEVAERVGGAQVVADADVPGEQDAGAVPVRLHLVAVLARALHQDHLADVLLVAVLELDRVRAVRVGHPVDGALELAGAEVLALQPHLGARDVLGDIGHEPGAAGVAVDAALDDVVGEVVVDGGASRGTEEDG

SEQ ID NO: 61924 - protein, 252 aa, Zea mays
  Clone ID: 700235367_FLI.pep
VFVRIADLYNKSGKLRESKSYCENALKIYQKPIPGTSLEEIATGLTDVSAIYETMNEHEQALKLLQKALKMYNNSAGQQSTIAGIEAQMGVLHYILGNYGESYDSFKSAIAKLRTCGEKKSAFFGIALNQMGLACVQRYSINEAAELFDEARTVLEQEYGPYHPDTLGVYSNLAGTYDAMGRLDEAIEILEYVVGMREEKLGTANPDVDDEKRRLGELLKEAGRVRSRKAKSLENLLETNPYIATKRNAVAA

SEQ ID NO: 61925 - protein, 191 aa, Oryza sativa nipponbare
  Clone ID: LIB3475-007-C8_FLI.pep
RDLVSPRESNHCRRSRDREGGAMNRGGGVGVGDESGSDYESGGGMRKPLLMHTGSWYRMGSRQGSLTGAGTSSMAILRESHVSAFLCTLIVALGPIQFGFTGGFSSPTQDAIIRDLDLTLSEFSVFGSLSNVGAMVGAIASGQMAEYIGRKGSLMIAAIPNIIGWLAISFAKVWHYMVQNLTFTTLLLYTI

SEQ ID NO: 61926 - protein, 356 aa, Zea mays
  Clone ID: LIB3593-006-F8_FLI.pep
SEIKEAQPLTMASDELAKIVEPRKKGNVKYASICAILASMASVILGYDIGVMSGAAMYIKKDLRITDVQLEILIGILSLYSLFGSFAGARTSDRIGRRLTVVFAAVIFFAGSLLMGFAVNYGMLMAGRFVAGVGVGYGGMIAPVYTAEISPAASRGFLTTFPEVFINIGILLGYVSNFAFARLPLHLGWRVMLAIGAVPSALLALLVFCMPESPRWLVLKGRLADARVVLERTSATPEEAAARLVDIKAAAGIPRDLDGDVVAVPSKGRDGSSETQVWKQLILSPTPAVRRILLSAVGLHFFQQASGSDSVVQYSARLFKSAGITDDNKLLGVTCAVGVTKTFFILVATFLLDRAG

SEQ ID NO: 61927 - protein, 189 aa, Zea mays
  Clone ID: UC-ZMFLB73023C07_FLI.pep
PSSLSLFEENYLLLLPLPLLRAPARHPQASFRTGMDDYAREMMELKTLVTRTLEKKGVLAKIRAELRASVFEAIEEEDRVMENDDGGNPALLGSCNDRAKQLHASPSGRLLTALVCEYLEWAQLSHTMKVYLPECNLPKDFWKNELKDFSNKSGAEGSRSAESGPLLLDVLEEFVSSKDGRQEDDEFRI

SEQ ID NO: 61928 - protein, 65 aa, Zea mays
  Clone ID: UC-ZMFLB73035D04_FLI.pep
DRCFQAVHLMVLDIFAGWFEFVKNVTVEYHGVTVGCTRAFHPPPGNWLSCLVSTRCLLIVVALSH

SEQ ID NO: 61929 - protein, 111 aa, Zea mays
  Clone ID: UC-ZMFLB73090E08_FLI.pep
RHVSMSGLSVVKSYCGHGIGELFHCAPNIPHYSRNKAVGIMKAGQTFTIEPMVNAGVWNDRLWPDDWTAVTADGKRSAQFEHTLLVTETGCEVLTARLPSSPDVFPWLKKP

SEQ ID NO: 61930 - protein, 148 aa, Zea mays
  Clone ID: UC-ZMFLB73093A10_FLI.pep
PVGAAPTVQHHQSSPIGAVPPKHPRRCITTSLAHPVPPRNEPPSRIQHDELVGKDVILYAIIGPEQPVAKGTIVSTNPNTLLGGVPLGKEYCEVIVNTVLKRDAILPCPYGYVETMADAHQMSVAWLYKRMKISKASGSPQGIGGGWH

SEQ ID NO: 61931 - protein, 49 aa, Zea mays
  Clone ID: UC-ZMFLB73110D06_FLI.pep
TINDVHDHHSYLIFSYVQTAKYMHQSIFQRAWLTLLPWSHLKDGKLMVH

SEQ ID NO: 61932 - protein, 83 aa, Zea mays
  Clone ID: UC-ZMFLB73121H02_FLI.pep
CGLGLGTVEGTQRDEVYLACMGSLGVALQKTFGIIHCRSLQKAWHIQIALFVFFLRLSSPLKVPRSKLRFSFLFIVIIQFLTS

SEQ ID NO: 61933 - protein, 151 aa, Zea mays
  Clone ID: UC-ZMFLB73127B09_FLI.pep
APPQQGGCSGHGEAEHEAVPAELLHHEGERAAAQGGPAAEPGEPGAALRAQAPPRQVRRRWRWRWQQQQRGSGEPRLAQARRRRRRRCAAVSSSGRRHACPQAQAQVGCGCGCSPSHGCCCCCRIVVAFMVFVLAITLISSGCYLVSGMFV

SEQ ID NO: 61934 - protein, 164 aa, Zea mays
  Clone ID: UC-ZMFLB73146G03_FLI.pep
YYETVVLSEHDMLAHLTCLGLLQCVVVEQLLNEVNMGHEHSPAAVAEQFQSIQSIPFRVVGLEEVEVEVPLVPNHLAAGEAAHRYDHLRRRRRRVVGGVPQGEMEPLVQLRGLTGRRPNESAACSIPQLRGSRAIFVCVCTTVHRSVVLFDSLFFDHSFVPPCK

SEQ ID NO: 61935 - protein, 291 aa, Zea mays; identical to SEQ ID NO: 45247
  Clone ID: UC-ZMFLB73148F03_FLI.pep

SEQ ID NO: 61936 - protein, 320 aa, Zea mays
  Clone ID: UC-ZMFLB73152G12_FLI.pep
KQRLESLSPSKSRSARAGSRSPRHHKGSKSSPTSDRHSRHSRHSRSRSLDRKHHHSDKKDRKSEIQDDRRSHRGSRRDKDESSVKDDGERSHRGSRRDKDESSVKDDGERSHRGSRRNKDESSVKDDGERSHRGSRRDKDESSVKDDGERSHRGSRRGKDESSVKDDGERSHRGSRLDKDESSVKDDGERSHRGSRRDKDESSVKDDGERSHRGSRRDKDENSVKDDGERSHRSSRGDNDGRSVKDPVEDKRVDSNAVAHKRSSEDEILNNNSSNHKKHRHEVGLEVDEGNDVCPAVADPNGKHETGVGGSLGGAAESAI

SEQ ID NO: 61937 - protein, 250 aa, Zea mays
  Clone ID: UC-ZMFLB73154B08_FLI.pep
AKPKRLDSHSNCRLDLSNGLEESLPRSTLLKSSMVTEQLCVDTIRNNSTLTLVLQVVGTAELGEAPLSALNNLLAARELELGATQSFTGMCSIVVLASNRKEDLTNVHPSTGALRLAKGTPHSSLEPISPSTRKHLVDTKDMEGVNPDPKVEGILSCRLGHVLVAGNTGSLKSLTGDILLLPRDKVHTVGELINTLSLHANIVDPDLGVRDTTAVPGLGVWLVLDLAIASRRPSPHGDGSREQAAAANER

SEQ ID NO: 61938 - protein, 278 aa, Zea mays
  Clone ID: UC-ZMFLB73160H07_FLI.pep
HSPSLSYSPPSPCSPEAAAGKMAPKRGGRAPVPAKKKAVVTNPLFEKRPKQFGIGGALPPKKDLHRFVKWPKVVRIQRQRRILKQRLKVPPALNQFTRTLDKNLATNLFKMLLKYRPEDKAAKKERLLKRAQAENEGKTVESKKPIVVKYGLNHVTYLIEQSKAQLVVIAHDVDPIELVVWLPALCRKMEVPYCIVKGKARLGSIVHKKTASVLCLTTVKNEDKLEFSKILEAIKANFNDKFDEVRKKWGGGIMGSKSQAKTKAREKLLAKEAAQRMT

SEQ ID NO: 61939 - protein, 153 aa, Zea mays
  Clone ID: UC-ZMFLB73163A09_FLI.pep
LQNSSVWHMEREKKEKITGDPGDMNKRLDDSEFKPVLSGRISESLYAAMVEETTSVEDNLGDPFLQTRLGNHLTDLLCYFLLAEADVAGDAVVLGRGHLDLGDDGQRRATCRRGDGRRGDEEASIHGRREGVGAGERRRREHGSLSFAPLLFR

SEQ ID NO: 61940 - protein, 235 aa, Zea mays
  Clone ID: UC-ZMFLB73173G01_FLI.pep
SVARLGSNPKQGVDLSAAAMSKLQSESVKDAISQIVGDAKEKNRKFTETVELQIGLKNYDPQKDKRFSGSVKLPHIPRPKMKVCMLGDAQHVEEAEKMGLDYMDVEALKKMNKNKKLVKRLAKKYHAFLASEAIIKQIPRLLGPGLNKAGKFPTLVTHQESLESKVNETKATVKFQLKKVLCMGVAVGNLAMEEKQIQQNIQMSVNFLVSLLKKNWQNVRCLYVKSTMGKPYRVF

SEQ ID NO: 61941 - protein, 128 aa, Zea mays
  Clone ID: UC-ZMFLB73175H11_FLI.pep
SAGVEMLVYQDLLSGDELLSDSFTYKELENGVLWEVEGKWVTQGPVDVDIGANPSAEGGEDESVDDTAVKVVDIVDTFRLQSNLLLTRNHLCLTSKNTSRISLLCWSQRKRMSSKRVSRVQPSFSLAS

SEQ ID NO: 61942 - protein, 190 aa, Zea mays
  Clone ID: UC-ZMFLB73247A09_FLI.pep
VRPLRSARARRDPAPSSSPPPPPPMAASTFSGDETAPFFGFLGAAAALVFSCMGAAYGTAKSGVGVASMGVMRPELVMKSIVPVVMAGVLGIYGLIIAVIISTGINPKAKPYFLFDGYAHLSSGLACGLAGLAAGMAIGIVGDAGVRANAQQPKLFVGMILILIFAEALALYGLIVGIILSSRAGQSRAD

SEQ ID NO: 61943 - protein, 163 aa, Zea mays
  Clone ID: UC-ZMFLB73247A11_FLI.pep
KNSDENYTLLTSTPKRNKKSYPKQNQVSKIQMPPKPFLQHLAPINLWCGGLHSPSSPVSTVWLLATVRRAHLIVASTGHSTRTHPHWRTHRHPLVHPHPHVHSSHRLLVHPHPHSHRLLVHPHPHLLLIHSHPHAHWPVHSHSTTITGTGTRTHTPPGTHLVR

SEQ ID NO: 61944 - protein, 227 aa, Zea mays
  Clone ID: UC-ZMFLB73247D08_FLI.pep
HDCRPTGNAMVRSSPSHYGWRTMADGDGVSIFGSSHVWVDHCSLSNCADGLIDAIMGSTAITLSNNYFTHHNEVMLLGHSDSYVKDKAMQVTIAFNHFGEGLIQRMPRCRHGYFHVVNNDYTHWEMYAIGGSAEPTINSQGNRYLAPTNPFAKEVTKRVETAQTVWKSWNWRSEGDLLLNGAYFTPSGAGASASYSRASSLGAKSSSMVGTITSDAGALSCRKGAAC

SEQ ID NO: 61945 - protein, 350 aa, Zea mays
  Clone ID: UC-ZMFLB73253E01_FLI.pep
EFCGIEIPVSSSPSFYNLLPCFTRTSAQTKKNKEDEKLILAFSRLDNEPVAGGDGDGHRRRGRQGARPLDRARRVAVLALVRHHQHGRVVGGPLHVLPRRASPHSAALVVAPWVRGALDGLLAVLPPRVLVRRDVGDLRADRRHSDGPLHAVLPSLGAVATAAVGGGLGVGAGAGLPLVAGQRRLPGGHEAPALGDAALAGRDRREEGRGGDGRGGRHGQVRLREVQRQALRRLRHADGRQGGRTGDDRRRRRRRRRRLDGPAAEAGVPRAVEDGDDLAELGDGLAGDLAERLISGSVRRGGLRGQGRHQQLQVAEPGRRRLLDGELVVGAARGVAAHQVHGHGSRCFAG

SEQ ID NO: 61946 - protein, 125 aa, Zea mays
  Clone ID: UC-ZMFLB73263F09_FLI.pep
LAYVRDREAPGQQVVLHLDQQPEHHVARQLQRRHREVPQRCQVRCQVEERVRPPHRRSCVDDPLEDDVERGPEEEVGDPEPREPQAIQGGLAQQEDCVHRMHPDQQEVEAVVLLGEEREDDEPEP

SEQ ID NO: 61947 - protein, 263 aa, Zea mays
  Clone ID: UC-ZMFLB73269H05_FLI.pep
AEKVYREFSTILESEVDLDFASVMVQALNLILLTSTELGELRSLLKKSLVDSCGKDLFQSLYASWRHSPMATISLCLLAQAYSHASCVIQSLGEEDINVKFLVQLDKLIRLLETPVFAYLRLQLLEPGKHTWLLKTLYGLLMLLPQQSAAFKILRTRLKTVPFSENIKRTSSANPYSQILQVTEDGNRNQDTQNYSAINFPSLLQQFEHMQLQHRNHLKDQLQSRKSASALTLSQEIQRYEAAHSSSLSEINRPPSRTSKGIL

SEQ ID NO: 61948 - protein, 245 aa, Zea mays
  Clone ID: UC-ZMFLB73242H09_FLI.pep
LGLGCLLLGLGRLRHGRCRWSLSFCRGLRSGLLCSSCCISRRSSLGGGRCRGVFFLLLFLGLFLLLDGGGGGGGFLFLLVNRRFLRGCLLSGGRGRGLLGRLLGSDDREQRGDLLERGEDGAGQQGRAGLGDAVAHLLGSREFDLGQLLEELGDCGGVLLDPGHLAPLLDQDLEWCRGRLVDLDDLGLEISLLLLELAIDPLLGLVEGLDELGGGGGLLAGALDEDELDLGQHLGLPNVHGYAMG

SEQ ID NO: 61949 - protein, 364 aa, Zea mays
  Clone ID: UC-ZMFLB73270H08_FLI.pep
HPEQLISGKEDAANNFARGHYTIGKEIVDLCLDRIRKLADNCTGLQGFLVFNAVGGGTGSGLGSLLLERLSVDYGKKSKLGFTVYPSPQVSTSVVEPYNSVLSTHSLLEHTDVAILLDNEAIYDICRRSLDIERPTYTNLNRLVSQVISSLTASLRFDGALNVDVNEFQTNLVPYPRIHFMLSSYAPVISAEKAYHEQLSVAEITNSAFEPSSMMAKCDPRHGKYMACCLMYRGDVVPKDVNAAVATIKTKRTIQFVDWCPTGFKCGINYQPPSVVPGGDLAKVQRAVCMISNSTSVVEVFSRIDHKFDLMYAKRAFVHWYVGEGMEEGEFSEAREDLAALEKDYEEVGAEFDEGEDGDEGDEY

SEQ ID NO: 61950 - protein, 174 aa, Zea mays
  Clone ID: UC-ZMFLB73295D03_FLI.pep
ENQPPLPPPSASACATAADSKALVLTPRKTLAPTTMKGKANASKKDEARLRAGGGGAGKRKKAAASGKPKRPPSAFFVFMSEFRQEYQAQHPGNKSVAAVSKAAGEKWRSMSEQEKQPYVDQAGQKKQDYEKTKANIEKESTSSKKAKTDDDDGSKSEVDDEDGGSDEDNDDDE

SEQ ID NO: 61951 - protein, 423 aa, Zea mays; identical to SEQ ID NO: 60546
  Clone ID: UC-ZMROB73002H07_FLI.pep

SEQ ID NO: 61952 - protein, 123 aa, Zea mays
  Clone ID: UC-ZMFLB73308A06_FLI.pep
VPGSQALSLLSRDLREAHLQVLLGGGGQRSSDNSSSSSATNISADPLLSSFGLGFPTSDAEQASKSTVSIPDDATTVKEAPAQARKLSIDSSLTSEERELKRKQARVRATFVQDLLLSTLFGD

SEQ ID NO: 61953 - protein, 170 aa, Zea mays
  Clone ID: UC-ZMFLB73296H09_FLI.pep
GSANHHFISFVPFPTKTKNCTIQLVRASLPLARVAEVAPFLRDVGDLHPGVIDAAGLPPARQHLRLRPHPLAVVATGHHQPELQRRLRRAPRRPVVPRHEPPVGRPHLPKSNHTHAHDVMEWKATMNSNRLAECCAVQQKPKDESNSTETDESFETHKAGVPLRASEEAW

SEQ ID NO: 61954 - protein, 252 aa, Zea mays
  Clone ID: UC-ZMFLB73407G03_FLI.pep
PCRAPPRLHVSWSGSRSMPDAAVPWCSLLGPCPAPDYSSSSRRPLCLARIVVPLLPGFPYARARWRCPCSAWPRPPQSTTLLGHGRHAAPWFQLAILPARRSRPARPPTSLCATSSSSLFLQSVFLCWLAGFLLPAHPAHASPYVPCLRAARPSSQPWRRPKLLRVMCPAPFSAYARLARFPARPAFCSRSSLRAKLLARSFLELGPALFLSLCSCSPCRESLASSPARFRINLVVVPRVSKKSQELGEVGG

SEQ ID NO: 61955 - protein, 209 aa, Zea mays
  Clone ID: UC-ZMFLB73409B08_FLI.pep
RQRVRDPAVHGRHVDHHGAHRGHLLRRRHAHRLPPAVRLHPGQERVQRDDRDDGAGADAGVAQRRALLRLRLRRELLRAGQEPGGPAAGRGPARGPLGRGQVRGRAPLRRLRGGRRRRGAGGAPRGQPPGHPVGRRRQRRAQGRPGLALHRRAVQLALRVHRQGQRDLDALRRRRRGRRRQYVMRFQACSRGTEAFREGRACTCAAVLQ

SEQ ID NO: 61956 - protein, 82 aa, Zea mays subsp. mexicana
  Clone ID: UC-ZMFLTEOSINTE76B01_FLI.pep
DRFALDFISRLDTGTKTCHGPRATNILFYLCTRCSCSLSFTTDANKCCSSLLRSQMRLHQFFPYGIHVCRKHRDPRATFLQD

SEQ ID NO: 61957 - protein, 275 aa, Zea mays
  Clone ID: UC-ZMFLB73239C05_FLI.pep
TPSVLGRRGEGNPGPGRVVGRGSAAEEMEEREKLVCLAKLAEQAERYDDMVEFMKNLARMDVDMSAEERHLFSVGFKNTIGAKRASWRIICSHEQKVAADRQTGVMIDAYKKKVEEELRKVCNEVLSVIAIHCLPLASTGENIVFFYKMKGDYYRYLAEFSTGTEKKAASDQSLMAYQHAMVVASSELSPAHQIRLGLALNLSVFFYEIMNSHERACQVAKQAFDEALTEINSGEGVYKDSTLMMQLLKDNLALWTSELTGGEASKGNGDVDMEG

SEQ ID NO: 61958 - protein, 229 aa, Zea mays
  Clone ID: UC-ZMFLB73242D06_FLI.pep
SNPKQGVDLSAAAMSKLQSESVKDAISQIVGDAKEKNRKFTETVELQIGLKNYDPQKDKRFSGSVKLPHIPRPKMKVCMLGDAQHVEEAEKMGLDYMDVEALKKMNKNKKLVKRLAKKYHAFLASEAIIKQIPRLLGPGLNKAGKFPTLVTHQESLESKVNETKATVKFQLKKVLCMGVAVGNLAMEEKQIQQNIQMSVNFLVSLLKKNWQNVRCLYVKSTMGKPYRVF

SEQ ID NO: 61959 - protein, 316 aa, Zea mays
  Clone ID: UC-ZMFLB73245C08_FLI.pep
RYPRVVWPPPAASFSPSIPLPVTSPTRQALRSTRAASPVCPTHTPTGARVPRSAEQGREEGMAVVGVLALQGSYNEHMAALRRIGVKGVEVRKPEQLLGIDSLIIPGGESTTMAKLANYHNLFPALREFVGGGKPVWGTCAGLIFLANKAVGQKTGGQELVGGLDCTVHRNFFGSQLQSFETELSVPKLSEKEGGNDTCRGVFIRAPAILEVGPDVEILADCPVPVDRPSITISFGEGTEEEEYSKDRVIVAVRQGNILATAFHPELTSDSRWHRFFLDMDKESPAKAFSALSLSSSSRDTEGLPKNKPFDLPIFE

SEQ ID NO: 61960 - protein, 240 aa, Zea mays
  Clone ID: UC-ZMFLB73248A11_FLI.pep
PLLLPSRSQGVVLAGGSGAPLQEEEGGGEDTRMASRSASKDIITLRGSAAIVSEFFGYAANSILYNRAVYPEESFSKVKKYGLTMLLTQDEGVKNFIASLTSQLSEWLEAGKLQRIVLVIMSKATSEVLERWNFNIVTDAEVVEKGAIKEKSDKEIMREIQAIMRQIASCITYLPCLDEPCVFDVLAYTDTDVDAPGTWVESDAKLIDNPQMVKLHSFDTKIHKVDTLVSYKKDEWDEEE

SEQ ID NO: 61961 - protein, 273 aa, Zea mays
  Clone ID: UC-ZMFLB73248G10_FLI.pep
EIVGHSVTSTHHISNDARRPGGLLAARTGGSFRDTGEDDAGAEQLLADLGGECVVAEEELDEEEPADEHHEVLPGALLVVDAGVVGLAAVGPVHVLQQLAALLAEEAVGHEVPGRVAEHAGVLGGARLVAEQHLAFPHLEHRVVALHQQVLLGVPVLELDGRVQAQRLPHHRLGQLHPLHRREGDLAAGVGHGAADLGHQPLVELLAAAGHVGQQAREQHLEAAVAVEGGGEEEVVAGLLARQAQALGGVQRLLRHRGEVLVQRPVVALDEER

SEQ ID NO: 61962 - protein, 179 aa, Zea mays
  Clone ID: UC-ZMFLB73251A04_FLI.pep
NLPQRGRRQDSLQAPHLAQGGSPEITETMVKAVAVLAGTDVKGTIFFSQEGDGPTTVTGSISGLKPGLHGFHVHALGDTTNGCMSTGPHFNPVGKEHGAPEDEDRHAGDLGNVTAGEDGVVNVNITDSQIPLAGPHSIIGRAVVVHADPDDLGKGGHELSKSTGNAGGRVACGIIGLQG

SEQ ID NO: 61963 - protein, 113 aa, Zea mays
  Clone ID: UC-ZMFLB73253G05_FLI.pep
LTRWHGCTGLRPSCRWGSSAACSASWATPSISSTRPRTAGRSTSGTICGTSPWSAATRSSWNNPPATRVLINLKLFWMLTNLVQKHRSTALLFPVQLEPRLVCFALKYQQFGE

SEQ ID NO: 61964 - protein, 282 aa, Zea mays; identical to SEQ ID NO: 48444
  Clone ID: UC-ZMFLB73255A08_FLI.pep

SEQ ID NO: 61965 - protein, 186 aa, Zea mays
  Clone ID: UC-ZMFLB73255F01_FLI.pep
LQKRESLLFIFRATAASSSDSGILQVCNEISTFLWLFQSREYHLGSRNVLLGIKQVVIQSVLLPNHSHVLVSRRVRVARCCTRLPPKQTIQIRTLLVAGALVDGVALRALGLEDLLASSWVPRGRFRKRRHRYQARSREGRRGRWARARIALAIGGGGRPCCNLEFARLNEETRQQQAGRHSPRTA

SEQ ID NO: 61966 - protein, 312 aa, Zea mays
  Clone ID: UC-ZMFLB73258C12_FLI.pep
VARHCSTAKPRSSRVAPEGAEGLDGASPEDVLVVEGRDGSAHERAHPEDPVVVPGLILVVDDGGAQAPGRVDAGAGDGDGGQVHHEHGEADGEGSQNRDVGVAGVALGVGGGEDGVDEHEGADDLGAEAGAAGVAGGERVGAAAVPVEVGALERLDEADAADGAEALRHDVEQRAHQGDLARQEEAEGDGGVDVAPRDAGGAVDEDEDHAAEGPGDAQHAHAAARRVGARRRRVRLVLVPDHGGHRDVQEQQRGDELGDHGAVQRPGPQLRRVDQRRRGRVRVVLGSELAAASAALDHVVLAHRLLEPPRLA

SEQ ID NO: 61967 - protein, 269 aa, Zea mays
  Clone ID: UC-ZMFLB73261C12_FLI.pep
ANGDFQSLLSSVKKTIHWRETFHILTLQELDRWSHLVFWHGFDTMLRPCLVVRLGLACSSIPPHDRPRFGQAVVSQIDHGVVNLINEEDSRITVLLDCHGISPFRFPMQMMRSFITVVQENYPNRLGVLFVIRLPPVVRVIAQTFLQVLKPATKQKLRFEGDSYKKALAEFLQAVPAFLGGKCSCPRCESPRDDSVIQAGEGSKKQPRLVSVDDGLPVTDLDFDLDEEIPSPYSCENAIRAAIIGLLMVCIFVAFLAGMIDPASVPASA

SEQ ID NO: 61968 - protein, 121 aa, Zea mays
  Clone ID: UC-ZMFLB73262G02_FLI.pep
GAISEDLDGPLDLPKLPSPQHSLFAGPLEPGGDYGELVPSGQPDSKTSALQNGTLGSTRPPLPQHVSFAGPLEMAKLSSPHQDTLIEDPRHFGPLGSTRPPSPQLISFDGPLEMARLSSPH

SEQ ID NO: 61969 - protein, 44 aa, Zea mays
  Clone ID: UC-ZMFLB73265D05_FLI.pep
TPTAIFVSTNLHANEQQNFTKMSTWCQRKNTGTRSYLLIHLLGS

SEQ ID NO: 61970 - protein, 254 aa, Zea mays
  Clone ID: UC-ZMFLB73268G04_FLI.pep
PPPSAHHHDPRERERGRMASSQCCDNPPALNPACGKGKVVDSFGGLKAYVAGPEDSKAAVVLVADVFGFEAPILRNIADKVASSGYFVVVPDFFHGDPYVPENAEKLIPVWLKSHTPEKGFEEAKPVIAALKEKGVSAVGAAGYCWGAKVVVELAKANELLQAAVLFFFSNITPEVKCSISILGAEMDVRSPPELVKQFEQALSVNSGVGHFVKVFPGVAHGWSVRYSLDDAAAVKSAEEAFADMLDWFNKNLK

SEQ ID NO: 61971 - protein, 504 aa, Zea mays
  Clone ID: UC-ZMFLB73273E09_FLI.pep
KKHPKNHLLFLRSPARSPTRIRSRTHRSALRSPPIRGSIRARARSAPGSDLVAASPEEMNGAGGSHHQQQQRLRQQQQQALLMQQALQQQQQQQYQSGVLAAAAAAAMTQMEPVSNGNLPPGFDPSTCRSVYVGNVNPNVTESLLIEVFQSAGLVERCKLIRKEKSSFGFVDYYDRRSAALAIMTLHGRHVYGQAIKVNWAYASTQREDTSGHFHIFVGDLSSEVNDATLYACFSAYPSCSDARVMWDNKTGRSRGYGFVSFRNQQEAETAITEMTGKWLGSRQIRCNWATKNNSEEKPETDNHNAVVLTNGSSNNSATDASQDAGSKEPPQNNPDCTTVYVGNLGHEVNRDELHRHFYNLGVGAIEEVRVQQDKGFGFVRYSTHGEAALAIQMSNGSVVRGKPIKCSWGVKPTPPGTGSKPLPPPAATYQPAVAMPGVPQGFTTAELLAYQRQLALSQAAAGQQHAGLAGQVSAAGLLAAAGSQALYDGYPNQSSAQQLMYYN

SEQ ID NO: 61972 - protein, 309 aa, Zea mays
  Clone ID: UC-ZMFLB73274C08_FLI.pep
TNQRLRSSYFGVSIGLFPVSRILVALLTVLERFGDFTISWLPFYSEAKLMFFVYLWYPKTKGTTYVYGTFFKPYISQHENEIDRNLLELRARATDTVVLYFQKAASAGQSTFFDVLKYVAAQSPSQKSRQRLHQDSQQPPQQQQPQVQVQQAQPQKQAAPVMRRASSIAARQAAMAQQSQETKPVSSSPKIKRQTSARSGSVASTKPPVAASALKPGGSPKKGEVKPAADPVQTPTTGADSPKPEPSAPSLPGAEGVDKMAIDEASGDAPEGAEELDPALEEETPMEETIRVTRAKLRRRTATEDPAGN

SEQ ID NO: 61973 - protein, 186 aa, Zea mays; identical to SEQ ID NO: 44856
  Clone ID: UC-ZMFLB73275F02_FLI.pep

SEQ ID NO: 61974 - protein, 217 aa, Zea mays
  Clone ID: UC-ZMFLB73275H02_FLI.pep
ESEMASSASRFIKCVTVGDGAVGKTCMLICYTSNKFPTDYIPTVFDNFSANVVVDGTTVNLGLWDTAGQEDYNRLRPLSYRGADVFVLAFSLVSRASYENIMKKWIPELQHYARGVPVVLVGTKFDLREDKHYLMDHPGLVPVTTAQGEELRRQIGAMYYIECSSKTQQNVKAVFDAAIKVVIQPPTKLREKKKKKSRKGCSMVNILSGRKMLCFKS

SEQ ID NO: 61975 - protein, 243 aa, Zea mays
  Clone ID: UC-ZMFLB73276A11_FLI.pep
FDFSRRRCSSHIPREDACSSPIDTMAVFSDLHTADGLKSLEAHLAGKTYVSGDSITKDDIKVFAAVPSKPGAEFPNVARWYETVSAAVASRFPGKAVGVNLPAGSAPAAAAPADEAEDDDDLDLFGDETEEDKKAADERAAAAKASSKKKESGKSSVLMDVKPWDDETDMKKLEEAVRSVQMEGLTWGASKLVPVGYGIKKMTIMLTIVDDLVSIDTLIEDHLTQEPINEYVQSCDIVAFNKI

SEQ ID NO: 61976 - protein, 124 aa, Zea mays; identical to SEQ ID NO: 41198
  Clone ID: UC-ZMFLB73296H12_FLI.pep

SEQ ID NO: 61977 - protein, 98 aa, Zea mays
  Clone ID: UC-ZMFLB73303A07_FLI.pep
CRCNGQMHLACIIRRAQSDAMQKRERNQLFMFRLQAASLFFLLSRIHNFSEEDCRADRWEKPVENLVALHQMPFASVNHTLSASVCRMVITRPSSMYF

SEQ ID NO: 61978 - protein, 81 aa, Zea mays; identical to SEQ ID NO: 61689
  Clone ID: UC-ZMFLB73337A08_FLI.pep

SEQ ID NO: 61979 - protein, 202 aa, Zea mays
  Clone ID: UC-ZMFLB73338A02_FLI.pep
TITSAHGPHEYSTQSDECTSSKQRTYSSSCPENGTLSVYPLCTSDQAFSTDKLAAQDTDDSDCEVFRVKRRSSIVMEKRCSEDLTITLTENQALRRLKKACSDDRQENATESHCLDFISGNTDNFINRSKQKMNVDQLDAKNVEDEVAFGQKSIGCSYLSPSVDLGPKRLKIRGPSFPSTVSEVEISYRFQEDIDLASQHTQ

SEQ ID NO: 61980 - protein, 274 aa, Zea mays subsp. mexicana
  Clone ID: UC-ZMFLTEOSINTE067D09_FLI.pep
KYSEALDILQSGALVQLKHGQVTCGGELAVLFVDTLITGELPYSEQIFDRIRKMYEAFPRVTVPHFLGDDYDDEGHQLSEAISAAKVRAESCSSFMKAAIRWSAEFGTSRNGSSELHVMLAEYIYSESPETDMTKVSSHFVRGNDPKKFASMLVNFMGKCYPGEDDTAIARGVLMYLSQGNLRDANLLMDEMNEQLKSANSEFPKTDLIQFIKYLLPTLERDAYPLFRTLRQKYKTSTDRDAVFQELLDEIAAKFYNIQRQNPLEGLFSEMFKI

SEQ ID NO: 61981 - protein, 444 aa, Zea mays subsp. mexicana
  Clone ID: UC-ZMFLTEOSINTE070F06_FLI.pep
GCCFNRQALYGYGPPSLPALPKSSICSWCCCCCPKKKVERSEREINRDSRREDLESAIFNLREIDNYDEYERSMLISQMSFEKSFGLSSVFIESTLMENGGVPESANPSTLIKEAIHVISCGYEEKTEWGKEIGWIYGSVTEDILTGFKMHCRGWRSIYCMPVRPAFKGSAPINLSDRLHQVLRWALGSVEIFFSRHCPLWYGYGGGRLKWLQRLSYINTIVYPFTSLPLVAYCCLPAICLLTGKFIIPTLSNAATIWFLGLFMSIIVTSVLELRWSGIGIEDWWRNEQFWVIGGVSAHLFAVFQGILKMIAGLDTNFTVTAKATDDTEFGELYLFKWTTVLIPPTSILVLNLVGVVAGFSAALNSGYESWGPLFGKVFFAMWVIMHLYPFLKGLMGRQNRTPTIVVLWSVLLASVFSLLWVKIDPFVGGTETVNTNNCNTIIC

SEQ ID NO: 61982 - protein, 229 aa, Zea mays subsp. mexicana
  Clone ID: UC-ZMFLTEOSINTE072C12_FLI.pep
LYLAVKPLPLVLVLVLVLVHHSRPAPSSALRLPRRTASAWLPRFPSCSTSAPPPFAAVASMDAPPQGYRTNVGICLADPSLTKIFSASRIDIPSAWQMPQGGIDAGEEPRAAAFRELREETGVTSAEIVAEAPVWLTYDFPTDVRTKLNARWGTDWKGQAQKWFLFRLTGNDDEINLNGDGSEKPEFGEWTWMTPQEVIEKAVDFKKPVYEEALKHFAPYLQSDPAASS

SEQ ID NO: 61983 - protein, 97 aa, Zea mays subsp. mexicana
  Clone ID: UC-ZMFLTEOSINTE076H08_FLI.pep
DSTKNLFKFLQVTRKKSLYLYIKKPPCSALYFHSSILRYMHVIVVAYSSTHSKCFTGIHYCLLHPQGNHLIAEPELSLLVHSEESLLQLFQRGKSRA

SEQ ID NO: 61984 - protein, 343 aa, Zea mays subsp. mexicana
  Clone ID: UC-ZMFLTEOSINTE079B09_FLI.pep
DGSDSLEGFVLCHSIAGGTGSGMGSYLLETLNDRYSKKLVQTYSVFPNQMETSDVVVQPYNSLLTLKRLTLNADCVVVLDNTALNRIAVERLHLSNPTFAQTNSLVSTVMSASTTTLRYPGYMNNDLVGLLASLIPTPRCHFLMTGYTPLTVERQVNMIRKTTVLDVMRRLLQTKNVMVSSYARTKEASQAKYISILNIIQGEVDPTQVHESLQRIRERKLVNFIDWAPASIQVALSRKSPYVQTTHRVSGLMLANHTSIRHLFGKCLGQYEKLRKKQAFLDNYRKFPMFADNDLSEFDESREIIESLVDEYKACESPDYIKWGMEDPGEANVAADLDSKLVV

SEQ ID NO: 61985 - protein, 141 aa, Zea mays subsp. mexicana
  Clone ID: UC-ZMFLTEOSINTE079E09_FLI.pep
INHNEHKLSISPTPRKKRSMASEQGVVIACHNKAEFDAHMTKAQEAGKLVVIDFTAAWCGPCRAIAPLFVEHARKFTQVVFLKVDVDEVKEVTAAYEVEAMPTFHFVKNGKTVATIVGAKKDELLALIEKHAAPAPASASA

SEQ ID NO: 61986 - protein, 42 aa, Zea mays subsp. mexicana
  Clone ID: UC-ZMFLTEOSINTE40F05_FLI.pep
IHGSFLFGQCFHIKYFRYIRANCAILIRSTDFVMHIAISFVL

SEQ ID NO: 61987 - protein, 195 aa, Zea mays subsp. mexicana
  Clone ID: UC-ZMFLTEOSINTE41G10_FLI.pep
YVVANTQKIKRRARTRDTSSLGRLRLRLRLGLAVGFDLGGDPSGLVLGCLEQEAPALVVHGDLERLGAEPVGDGEHDAAHLVVELGAVDGAAVVGVELLEDGVVERGDLGGERRRLGGPEAAAVEEAEGLERAPELGAGQHAVAVGVQRGEARVQAAREGRLVRHEAAHRGAVQDHHAHRGPFVPWTRLRLARAG

SEQ ID NO: 61988 - protein, 93 aa, Zea mays subsp. mexicana
  Clone ID: UC-ZMFLTEOSINTE45A01_FLI.pep
ADRGVLRQMHKSYRSKRVRNSRLQAVQPDGDDCWSKEKQTMRAAPAQRRPETVDDACTCTRETKRRRAGRESWMLAALRSGPPGSSGRRRSAC

SEQ ID NO: 61989 - protein, 147 aa, Zea mays
  Clone ID: UC-ZMROB73006B08_FLI.pep
YDNNISGDSGHHPTWNIYVKASTKELNWGICLPHTVHACFVQSGMKQQPAGEGAGAHQDQPPRASLLVASWRMSMSTPSCGSSTYRTTEPLMKQFRTESMWGYLSWSTTRVFSSLMLRYWSTEWSVPRIAKSFLSSTVTSFPTSSLK

SEQ ID NO: 61990 - protein, 94 aa, Zea mays
  Clone ID: UC-ZMROB73006F09_FLI.pep
SGGSPGWSALLVLLDELGVLEVLLGEVGRHLSDDEAGDGEPREEGPIALPLPAEEDRPRIERLHLLGLRLRLRLRLLAISSHPPPPASLLARLR

SEQ ID NO: 61991 - protein, 100 aa, Zea mays
  Clone ID: UC-ZMROB73050A09_FLI.pep
VVCSVRLDSAHPTQARVSIGVVICFALHFITLCNVPMMCVVLVCSIPSLYSFPFFFRGKIDVKISSDLPFSIALEWEKTGDFRFDFVYAWNSWLLLRFVS

SEQ ID NO: 61992 - protein, 339 aa, Zea mays
  Clone ID: UC-ZMROB73050H02_FLI.pep
PPGVVSSGSRLPTSSACSPRRRLGSERRKKMVASIRVPKTQRARRELLKHAPKLVETSKKTLILHGTKTSAVLNSVLSDIYHLKRDNAVKYTKKNDNIRPFESGGESSLEFFSLKADCSLIVYGSHSKKRPNNLILGRTYDHHIYDLVEVGVENYKSMESYVYDKKLAPLLGSKPFFAFIGEHFESAEELKHLKEVLLDLFRGEVVENLNLAGVDRIYVCTAISPTTVYMMHCALRLKRSGTSIPRMELVEVGPSMDLVVRRHRLPAESLKKEAMKTAEHAKKMKNVTKDPVQGKLGKVYMPDQQVGKLTLSNDIKGLKRERREAKKNQDSKKQKVNPE

SEQ ID NO: 61993 - protein, 81 aa, Zea mays
  Clone ID: UC-ZMROB73055E11_FLI.pep
VHRVRLHVVVDDDTIRSCERLVVFAWLRKNILKSKKVTVCERNRNKKNETSRCQSCYCNLQESSQIKIQIAVSILHYHSLI

SEQ ID NO: 61994 - protein, 186 aa, Zea mays
  Clone ID: UC-ZMROB73062A06_FLI.pep
RPATPSCTSPRRRWRRGTCCPRRCRASSTGWSTSCAGPQASASPPRRSASRSGLLFSRIRRSTSAMHPRRTSKHKTAAPLIFSSVIINPKIKSTSKRTALFFEGCLSVDGYRAVVERHLDVEVSGLDRNGSTMKVRASGWQARILQHECDHLEGTLYVDKMVARTFRVVENLDLPLPTGCPQLGAR

SEQ ID NO: 61995 - protein, 133 aa, Zea mays
  Clone ID: UC-ZMROB73071D12_FLI.pep
SISPTPRKKRSMASEQGVVIACHSKAEFDAHMTKAQEAGKLVVIDFTAAWCGPCRAIAPLFVEHAKKFTQVVFLKVDVDEVKEVTAAYEVEAMPTFHFVKNGKTVATIVGARKDELLAQIEKHAAPAPASASA

SEQ ID NO: 61996 - protein, 200 aa, Zea mays
  Clone ID: UC-ZMROB73077A03_FLI.pep
QQPIPPVCGLPLPCLLVSSVSPPCLPETQSRALFGRRRSATTTMGFISFVGRVLFASLFLLSAYQEFIEFGNDGGPAAKTLKPKFNLFVKLVSKNTGLGVPHIDIKTVIAATMFLKGFGGLLFIVSSSFGAFLLLIYLAFITPIVYDFYNHEMESTLFVDLFFKFIQNLAFMGALLFFLGMKNSIPKRRSKGRTTKTKTN

SEQ ID NO: 61997 - protein, 238 aa, Zea mays subsp. mexicana
  Clone ID: UC-ZMFLTEOSINTE089E04_FLI.pep
TRHRIVCAAISRMSISMRLAIPAPAVTAAAPTRLRVRAAAAGNGASLPVARAAVRAETVALRGCAWLPPKPLGAAQPCRSRGAAAVCHSSAHLSARTIQWISAGASAVLLVAKGTAIHKSFLVPFFALQAPCSIISWIKGDYGQWTAFLALLVRLFFFIPGELELPLSTMLLVSVAPYQFMDLRGTQGGAVLSLAIAAYLAFQHFTRVGGPGKAFEQGSIVATLAIICIMIVPLMLLF

SEQ ID NO: 61998 - protein, 51 aa, Zea mays subsp. mexicana
  Clone ID: UC-ZMFLTEOSINTE086H02_FLI.pep
PVITVFMTHVKRENKIPVITVFMTHVKREKSDSRYSFRLLLICSAVITRQE

SEQ ID NO: 61999 - protein, 293 aa, Zea mays subsp. mexicana
  Clone ID: UC-ZMFLTEOSINTE083C11_FLI.pep
LRCAAHPWVGRLRLLVVGGGELLVGVGDEEQLVDDAGEAAADEGPDPVHPLVAPLPADEGGAEGHGGVHGRAVEGAAHQDVGAHDEADGDGGDGAQAALLRVHRRRVHRVHQPEGHHDLQHQRLPHRHARQPEGARGLPARREAEQEARHGGPQQLRHPVQEPPEQGDVAAHEGAEGHGRVHVPAGDVRAYRHRHEQRERVRHRRRDQARRGRRAAAGQLAEGHAGALAGEDEDEGGDELSERRLEGARVVHLLVAPQGDPIDRHFNGPLASSRSGHDCDWSWSEAKLSSGGV

SEQ ID NO: 62000 - protein, 152 aa, Zea mays subsp. mexicana
  Clone ID: UC-ZMFLTEOSINTE088G03_FLI.pep
TQLLRRRDKGMAGIGPIRQDWEPVVVRKKAPTAAAKKDEKAVNAARRAGAEIDTMKKYNAGTNKAASSGTSLNTKRLDDDTENLAHERVPSDLKKNLMQARLDKKLTQAQLAQMINEKPQVIQEYESGKAIPNQQIISKLERALGTKLRGKK

SEQ ID NO: 62001 - protein, 114 aa, Zea mays subsp. mexicana
  Clone ID: UC-ZMFLTEOSINTE128F07_FLI.pep
SRTDTDQGICAHVDLMRFDDGIAIVSLESACVMRFSRAEPASDTPKQGGSASESTAEVPVLLNPGSLALMSGDARYLWMHEINRKPGRQLWDGRELEQRRRTSVTLRKVLPSTD

SEQ ID NO: 62002 - protein, 257 aa, Zea mays subsp. mexicana
  Clone ID: UC-ZMFLTEOSINTE080C05_FLI.pep
MNHGLLTTAEAEHQVESALLLDVVVGKRAPVLELLAGKNEPLLVRRDALLVLDLGLDIVNGIRRLDLKGDSLASQSLHEDLHAAPETQHQVEGALLLNVVVGQRAPVLELLASKNEPLLVRRDALLVLDLGLDVVDGVRRLHLEGDSLSSEGLDEDLHASPGAENKVEGALLLDVVVGKCAPVLELLASEDEPLLVRGNAFLVLDLGLDVVNGVRGLHLEGDSLSSESLDEDLHLWIDEGIGDRGRAVCAFRAKGEK

SEQ ID NO: 62003 - protein, 265 aa, Zea mays subsp. mexicana
  Clone ID: UC-ZMFLTEOSINTE080D05_FLI.pep
VNISISNFTQLRTRLNPSSRAAAPARRQPTGAGAAMKKIFGAKKDKGPPPSIQDATERINKRGETVDEKIKKLDEELARYKEQIRKTRPGPSQEAIKARAIRLLKHKRMYEEQRNMLYNQTYNLDQVGFAADGLKDAQQTMNAMKAANKELKGMMKTVKIDEIDNMQDEMTDLMDVSNEIQETLGRSYNIPDDVDEEELMGELDALESDMEFDSAAVPSYLQPDSDFDADLNLPAAPSRPAMVPAGGLQEDELGLPAVPRASLRS

SEQ ID NO: 62004 - protein, 257 aa, Zea mays subsp. mexicana
  Clone ID: UC-ZMFLTEOSINTE083G10_FLI.pep
DPIESGFPSAASAAGAMNSSKQALIYSFVAKGSVVLAEHTAFSGNFSTVAVQCLQKLPPNSTRSTYSCDGHTFNFLVDRGFVFLVVADEAAGRSVPFVFLERVREDFMQRYGSSIDEEGQHPLADDADEDDFLFEDRFSIAYNLDREFGPRLKDHMQYCVNHPEEINKLSKVKAHLSDVKGIMMDNIEKILDRGEKIELLVGKTETLQSQADSFHRHGRELRRKMWLQNLRFKLMVGGGIAALILIIWLMVCRGFKC

SEQ ID NO: 62005 - protein, 265 aa, Zea mays subsp. mexicana
  Clone ID: UC-ZMFLTEOSINTE088C04_FLI.pep
AEQRSTRRDKRMPVSRIAVGAPGELSHPDTAKAAVAEFISMLIFVFAGSGSGMAFSKLTDGGAATPAGLIAASLAHALALFVAVSVGANISGGHVNPAVTFGAFVGGNISLLKALVYWVAQLLGSVVACLLLKIATGGAALGAFSLSAGVGAMNAVVLEMVMTFGLVYTVYATAVDPKKGDLGVIAPIAIGFIVGANILAGGAFDGASMNPAVSFGPAVVTGVWENHWVYWVGPLAGAAIAALVYDIIFIGQRPHQQLPTTAADY

SEQ ID NO: 62006 - protein, 196 aa, Zea mays subsp. mexicana
  Clone ID: UC-ZMFLTEOSINTE096A11_FLI.pep
EVFFGDEHPPGHISAMGDYTIQISTKLIDQLARDDEKVKRKARKPKPKKKPTVQPHEEPLEFPREPKTTSLATAPGWPLQPPPMFLPVTPAPPPPPATMPEVEAIRSVLKESEALLKKLENQETGARQELSKRAKELHDKEFKLPYQKPMPCTQERAGCLECYKTNTKDPLKCAEAVKRFEACALMAIKSTAAKAD

SEQ ID NO: 62007 - protein, 103 aa, Zea mays subsp. mexicana
  Clone ID: UC-ZMFLTEOSINTE097A11_FLI.pep
IIIISMVVDRCDQQLQGSHLQPLPQPQAWAASPDSAAASTNSGAAFFSGATPRTTVACAAVLVSSRSGYFLPHLQLEPQPQLDPQLQDILDLVVQKKLDLFKN

SEQ ID NO: 62008 - protein, 196 aa, Zea mays subsp. mexicana
  Clone ID: UC-ZMFLTEOSINTE097B04_FLI.pep
AVCPSIHPSSCTSKKSRTHAGVAHLPSSSSSRREFHAGSGMSIELLTKFLTLLFGYAMPALECFKAIEQRPGRADQLRFWCEYWIILVLLVMFDEIAGVLISKIPMYYELKLAFLVYLWYPKTRVCARNTLSAATPTKSFSCAYSTCELLIKSLNRMLLRSELGNGHRVRDLPPAAGDAVPAQHRGQAPVPARQRR

SEQ ID NO: 62009 - protein, 120 aa, Zea mays subsp. mexicana
  Clone ID: UC-ZMFLTEOSINTE104D10_FLI.pep
WWFNTKKRHRCLQTVSGTRFLCSAGFYYRPLRLIAPTIRGAGKIGSQTKMQGASIVRSRARCLVPVGKLDTLVDGRLELALEVIQPLLLEVVELTQTKHFLHSILAEPNLGGKEWQLCHS

SEQ ID NO: 62010 - protein, 258 aa, Zea mays subsp. mexicana
  Clone ID: UC-ZMFLTEOSINTE92C06_FLI.pep
LIKQNQAVELDKTTMKMHEVEEPPAEITRDAHPAHALRLVATDDGAPFRCDGCKEPGSGQGRRYRCGHGCDFDLHVACALAGPTLRHPLFGEGLEFQLLPEAPPPVDKTFCNACGLRAPGLVYHCFDRDLDLHPTCAALKPESAFPGGHLAQLGWEAAEHRCVACDAAAAAGKRFWAYRWAYGGTHGYLHVACMKKIAFQSWEQAYQASVVGGGLVEASVPTMTAVLHRKRTDEITGGVKIIDTGIRGQYLSSSTWGT

SEQ ID NO: 62011 - protein, 109 aa, Zea mays subsp. mexicana
  Clone ID: UC-ZMFLTEOSINTE93E03_FLI.pep
VIADPYIRIPPRPQSQGFKRGQSIPFRNSSGPWSSSLSAVSKTMSLRSSWYLVTLSWSSGSLAARILAASKPAFSAIPIATVATGIPFGICTIDRRESNPDSVEVLMGT

SEQ ID NO: 62012 - protein, 170 aa, Zea mays
  Clone ID: 700074105_FLI.pep
HPSASSSGSGGGDDDEPEEEPEEARARVGGARPHRQAPEAPGRPRQRRRHAPPPHPLRQVPPGLLRQGGHALLPQAPQQVPLPVGQRGAALVDGARRQGRGGGRRGPGPARRRDAVRLLQGARQGDAAVQAHRRQGQAHLQGRREEDQGCRRRRPADRLGPFASCFNYLR

SEQ ID NO: 62013 - protein, 56 aa, Zea mays
  Clone ID: UC-ZMFLB73344B09_FLI.pep
NIYSNLLLHIIRLVVTAITIHNIRLLGYRCCTTQYHHRLPIYSFSAQPSISILTTR

SEQ ID NO: 62014 - protein, 300 aa, Zea mays
  Clone ID: UC-ZMFLB73053C11_FLI.pep
GDRGHAAAWAAGRASDVPCRTMAARLRRSPISSPPPPPSLCISLYPPPHSSVETTYPACSTYLRSPAMTVLDAESRFHVLAVDDSIIDRKLIEMLLKSSSYQVTTVDSGNKALELLGLRDNGAEDASPPSSSSSSSSSSSPDHQEIDVSLIITDYCMPGMTGYDLLKRVKGSSSLKDIPVVIMSSENVPARISRCLQDGAEEFFLKPVKPADMKKLKSHLLKRKQPNQKNKPQAQAVESPEQQLDPHPQPVHEPEEAAADRNGVNKRKAAAMEEGLTVVVTAPESTKPRRLSTSSLTVET

SEQ ID NO: 62015 - protein, 109 aa, Zea mays
  Clone ID: UC-ZMFLLIB3205440E08_FLI.pep
VTHRLLEKLGCRVLSVASGVQCTSSFAAEPSFQLVVLDLALQRTDGLEVARAIRKFSSNSWLPLIVALAARIDDKVRDGCQRSGISGLIQKPATLAALGDELYRVLQNS

SEQ ID NO: 62016 - protein, 149 aa, Glycine max
  Clone ID: UC-GMRONOIR078D08_FLI.pep
EKRNMGAFTEKQEALVSSSFEAFKANIPQYSVVFYTSILEKAPAAKDLFSFLSNGVDPSNPKLTGHAEKLFGLVRDSAGQLKANGTVVADAALGSIHAQKAITDPQFVVVKEALLKTIKEAVGDKWSDELSSAWEVAYDELAAAIKKAF

SEQ ID NO: 62017 - protein, 381 aa, Oryza sativa
  Clone ID: UC-OSFLM202018G09_FLI.pep
LPVPSAVNASIFESFVRRNITESETDVRSSIQQLVKDSYGFPADGCSEILYGNTCLALFNKLALCCIQDQGTLLFPLGANGHYVSAAKFVNANTLTIPTKLESGFKIEPRVLADTLETVSRPWVYISGPTINPTGFLYSDSDIQELLSVCGKYGARVVIDTSFSGLEFQTDGWSRWNLERCLSAVNCPKPSFSVALLGELSFELTAAGHDFGFLILNDSSLVDTFHSFPSLSRPHSTLKYTFKKLLGLKNQKDEHFSNLIMEQKDTLKSRADHLIKTLEGCGWDVAGSHGGISMLAKPTAYIGKIIKVDGFDGKLDGCNIKEAILRSTGLCINSSSWTGIPDHCRFSFALESSEFERAMGCIVRFKELVLGSKAFHQINGN

SEQ ID NO: 62018 - protein, 280 aa, Oryza sativa
  Clone ID: UC-OSROM202018E07_FLI.pep
KVLKANGLHLLLPAPPMASLVAIAIAMALMVVQPGRQMTAFAARTSPAAAAEAFWRAAMPGAPMPDAIVELLHHEHGVASAGGKANGGGDGPPPPMNFNYDDYRALPRSDAPSPDALNRVAAVQNADENGVSSPPPPPPTVFFLEDAVRVGESLPLPRPAADATAAGAAAATALPPLRLYTVRSVRAIEGSSFVVCRGETTAGAGVYGCRDAATGPARAYAVDAAGGGGGDAVIAAVVCHADTSRWDPDHAAFRLLGVRPGGAAVCRAVADAHILPTNKD

SEQ ID NO: 62019 - protein, 258 aa, Oryza sativa
  Clone ID: UC-OSFLCYP036C07_FLI.pep
HKLINLILLNLSLDGDGDDTAATGGGSSTGTGDDGGHLDVLGGLGLLGCGPVVAGIEDELDGTEDGTKAVGDGHIDVEADERVGRPANAVEEAHQRQEERHVLYALRLYHFPHDGERGEVHDRAEEDAEDADDHGALLVRVRAQQHAQNHRQHEHQLHAQHSQHPQALLVGGVEEEDEEVGALDDEADAVDGDDKDAVWVDDGDAVEHPEHAVEQRRQVRVRLELLHVLPLADPPERRHGGEEEAEGDDIADDADDVA

SEQ ID NO: 62020 - protein, 159 aa, Zea mays subsp. mexicana
  Clone ID: UC-ZMFLTEOSINTE74F11_FLI.pep
PTEISSVHSHAPVYHLQQAGGDGYTRRNGSTSQSQEGWTTTVHTSSENQRTRERERSQNEAESLVPRTAATALEASAETEPAAPRPRLRPEPAGPPRRRRRGAAQHLPHHVHVLVLARAHLLPQPPQPGLANPEAGRDAEPGPPHRQHDAVPPVAHRQI

SEQ ID NO: 62021 - protein, 286 aa, Oryza sativa; identical to SEQ ID NO: 48884
  Clone ID: UC-OSFLM202123C02_FLI.pep

SEQ ID NO: 62022 - protein, 200 aa, Oryza sativa
  Clone ID: UC-OSFLM202117E05_FLI.pep
GDKTFFIAALLAMQYQRALVLLGSMAALSLMTIVSVIIGRIFQSVPAQFQTTLPIGEYAAIALLAFFGFKSIKDAWQLPDNANGNLQGNSESGELAEAEELVKEKVAKKLTSPLEVLWKSFSLVFFAEWGDRSMLATIALGAAQSPFGVASGAIAGHLVATFLAIVGGAFLANYLSEKLVGLIGGVLFLLFAVATFFGVF

SEQ ID NO: 62023 - protein, 75 aa, Zea mays
  Clone ID: UC-ZMFLB73207G05_FLI.pep
SRILSLLILCVEDCLAVAERHAFQNINWWKRSLMLPLCEKDRTRHNNIKLRHCSLPTFSIWQIEEQQDQPLPYAV

SEQ ID NO: 62024 - protein, 108 aa, Zea mays
  Clone ID: LIB3153-009-E11_FLI.pep
PRAPRPRCATRVAGPSRGGATTASTASPSASPRATPAGSARPGPACALMSVSMVSSPVAADSIHRLAHRCVVVLTLKQPSHQCRASDSGPGDGRWRTTTLLCTCQLKI

SEQ ID NO: 62025 - protein, 178 aa, Zea mays; identical to SEQ ID NO: 41250
  Clone ID: LIB3153-010-D7_FLI.pep

SEQ ID NO: 62026 - protein, 291 aa, Zea mays; identical to SEQ ID NO: 58804
  Clone ID: LIB3153-011-B10_FLI.pep

SEQ ID NO: 62027 - protein, 187 aa, Zea mays
  Clone ID: LIB3153-011-H5_FLI.pep
QRIGDSPQSAAIRGGDGEGVRGDDGDGEAGYQGGTQPARVPPLRARRPPVAHVGVREEQVPVDLLRQGDLLPAAGEGEGVPRRSRRGVRGDRRGGPCRLPQGHELHLGRRRGRRQALQLRVAAAAAMFGLLPLASYHVLVDLLCSYTPMLHSRVKQRKIKLRISGLHNSHQRSVRRFSCYDKWNLYM

SEQ ID NO: 62028 - protein, 124 aa, Zea mays
  Clone ID: LIB3153-012-E8_FLI.pep
WTSRCLAAAGQANFVNRGGFRRPNFGNSFHQNGSYDQPGRGRQDFNQGSSGRHTGRGRFGYSVGDQFSYRTVESNPVLATPGLAPADAVAQAVALLTQVISIPQPVVDHGKAESSGQAEKGPVG

SEQ ID NO: 62029 - protein, 65 aa, Zea mays
  Clone ID: LIB3153-013-B2_FLI.pep
QDKRTNAVRSPYCSAGASSLLLTRCSLDDIRITRINNAEAADPKVFTTGSSKVNIVSMEVVDSDL

SEQ ID NO: 62030 - protein, 171 aa, Zea mays
  Clone ID: LIB3153-013-C12_FLI.pep
QAQYQNRNSLNGFRYNKLTTKVVTMRGARRLEAELGKEPPVLAGLEPLLEARLGGLAGFDLLVPGGERVGPARGDVFEIDVEGVAGGHEVSEIDELDETLDAGLLGRLLGGVLADHLLGVLGQAGDEAVPIGTVAGALLEHAHDHRLPAGEPALEEDYGLAGLEKLHHLRA

SEQ ID NO: 62031 - protein, 334 aa, Zea mays
  Clone ID: LIB3153-013-E3_FLI.pep
PLPAPLHVALPMDSATVALASPASDDRRFWDRLRTRVDTILEDRRGLPPAAAAGAPMRGVESERGKRLREDSLMLVRGLDSVAESLAQLSDTLTAAQKGVSALATCSSQARGCEGGACPCPEEVKAEEEEPRAKRMCGGSTEDSPRNGLDSNSPAAGEETAAGPDGLGKGNVQASAEIAQSTNLKRARSLAVSMASRAAALARELKNIKSELHFMQERCGLLEEENKRLREGCDNGVAPEEDDLVRLQLEALLAEKSRLAQENANLTRENQGLMQLVEYHQLASQDLDESYEDVMQGIRLDFSSPLGKISDDEEGERDDEVPVTPAEVPCSPDE

SEQ ID NO: 62032 - protein, 252 aa, Zea mays
  Clone ID: LIB3154-006-E5_FLI.pep
KVEYSSNNRATMAAKIFSILMLLALSACVANATIFPQYSQAPIAALLPPYLPSMTASVCENPALQPYRLQQAIATSNLPLSPLFFQQSPALSLVQSLVQTIRAQQLQQLVLPVISQVALANLSPYSQQQQFLPFNQLSTLNPAAYLQQQQLLPFSQLATAYSQQQQFLPFNQFAALNPSAYFQQQILLPFGQLATTSPASFLTQQQLLPFYQQFVANPATLLQLQQLLPFVQLALTNPAAFYQQHIIGGALF

SEQ ID NO: 62033 - protein, 277 aa, Zea mays
  Clone ID: LIB3152-035-A11_FLI.pep
QEDRRPSRAGARDGNGTGPQNLRSFLPARPCPSTRRSCRPRPTSALSSSRGIGYATGCAMVLWVFGYGSLIWNPGFDFDDKILGFIKGYKRTFNLACIDHRGTPEHPARTCTLETDDEAICWGIAYCVKGGPEKELKAIQYLERRECEYDQKISIDFYKEGDPLKPAVTGVLVFVSTPDPIGNKYYLGPAPLQDMARQIATANGPTGYNRDYLFSMEKALASISHEDDSIIELANEVRKVLNRTKETKITGANASLKSHAPLVHLSALPEGTVVDSR

SEQ ID NO: 62034 - protein, 410 aa, Zea mays
  Clone ID: LIB3152-036-E1_FLI.pep
GFVRHRHFRPPWPRPPRIRFWCVSSTGVPDVSASPRPPFPAPCSSTPSRRSLAFPPPLSASSPAASTYRPLPSSPQQLMASSPTRQRSSAFEEAADRQLEKLAENFIKKKAKEAGRGGGPSTAEVDKYLEKYRKDAEICVNAVEESVRASLGKRKTAPKLPSGADAKKLKIWLGKNKVEEDESDSDSDSDVDDEDSEDLESADAKSVVVDEGNYSNGSRKNEEKLDLGSVSGSSHSEGESSGEKSQLTTSSGAEGGDFESGDSAELEVGMVDHPISVAAASEEVTADEDNTALATSNQNNPEVPQVEEVRKADKDNTASATSNQNNQEVPQVEQHVDVSNSYSEPLDLAKYSSSAELEVLGLEKLKIELQSRGLKCGGTLQERAARLFLLKTTPLDKLPKKLLAKANGGK

SEQ ID NO: 62035 - protein, 172 aa, Zea mays; identical to SEQ ID NO: 36903
  Clone ID: LIB3152-046-D1_FLI.pep

SEQ ID NO: 62036 - protein, 337 aa, Zea mays
  Clone ID: LIB3152-051-D7_FLI.pep
HRLTTSVQGGGKGRRNRGTRRTAGTGRQGSRSRVPTSDASPTRPPPFLCLHTAGSLRRSPLLPWSTVHPTMYNNYRNPPGTHMPPQNSQPVQFDNPLYGASSGLIRSGIGVYGEKFLGSSSEFMQSNINRYFSNPQYYFHVNDQYVRNKLKVILFPFFHRGHWTRISEPVGGRLSYKPPIYDINAPDLYIPFMAFGSFIILSGFTLGFMGKFTPEAINLQFTRALIGWGFQLTVLKGLLYSMGGGEVPLLDLVAYGGYLFAGLSLAVVARLVWAYSYYVMMPWMSLCMGVFLVRTMKRVLFTEMRSSERHSSRQHYFLLFMAIVQFPLFFWLGSIGV

SEQ ID NO: 62037 - protein, 251 aa, Zea mays; identical to SEQ ID NO: 54164
  Clone ID: LIB3151-049-A1_FLI.pep

SEQ ID NO: 62038 - protein, 166 aa, Zea mays; identical to SEQ ID NO: 48325
  Clone ID: LIB3151-052-E5_FLI.pep

SEQ ID NO: 62039 - protein, 233 aa, Zea mays; identical to SEQ ID NO: 47999
  Clone ID: LIB3152-002-H2_FLI.pep

SEQ ID NO: 62040 - protein, 199 aa, Zea mays
  Clone ID: LIB3152-005-A7_FLI.pep
QDKEGIPPDQQRLIFAGKQLEDGRTLADYNIQKESTLHLVLRLRGGMQIFVKTLTGKTITLEVESSDTIDNVKAKIQDKEGIPPDQQRLIFAGKQLEDGRTLADYNIQKESTLHLVLRLRGGMQIFVKTLTGKTITLEVESSDTIDNVKAKIQDKEGIPPDQQRLIFAGKQLEDGRTLADYNIQKESTLHLVLRLRGGQ

SEQ ID NO: 62041 - protein, 250 aa, Zea mays; identical to SEQ ID NO: 38264
  Clone ID: LIB3152-009-E6_FLI.pep

SEQ ID NO: 62042 - protein, 279 aa, Zea mays
  Clone ID: LIB3152-017-F3_FLI.pep
LPTASCGRRLPFGTPSPPSGEMAPKRGGRAPVPAKKKTDKVTNPLFEKRPKQFGIGGALPPKKDLHRFVKWPKVVRIQRQRRILKQRLKVPPALNQFTRTLDKNLATNLFKMLLKYRPEDKAAKKERLLKRAQAENEGKTVESKKPIVVKYGLNHVTYLIEQNKAQLVVIAHDVDPIELVVWLPALCRKMEVPYCIVKGKARLGSIVHKKNASVLCLTTVKNEDKLEFSKILEAIKANFNDKFDEVRKKWGGGIMGSKSQAKTKAREKLLAKEAAQRMT

SEQ ID NO: 62043 - protein, 106 aa, Zea mays
  Clone ID: LIB3152-031-A11_FLI.pep
GRGRHGAMRSSEAMELLGFHPYSRPSPSEIAEAYSCSKDGRRSGSRMEVHVMRSGVPTSHGRSNRTLVKAPFLLITFAAVSFGAFSASRAYQRQKELCSSQNPFLP

SEQ ID NO: 62044 - protein, 296 aa, Zea mays
  Clone ID: LIB3060-054-H6_FLI.pep
HDHKKTRRERGRPGAGDSAADDDLVDVLLRLVEEDEDRPETTEASRLTRDGVKAFVQDIVAGGTESSAVTIEWAMSELLRRPDALRAATAELDRVIGHGRWVTERDLPDLPYIDAVVKETMRLHPVGPLLVPHHAREHTVVAGYDVPAGARVLVNVWAIARDPASWPDAPDAFRPERFLNGSSGASVDVRGAHFELLPFGAGRRMCPAHGLAMKLVTAGVANLVHGFAWRLPDGMAPEDVSMEELFGLSTRRKVPLVAVAEPRLPAHLYTNVTPPQQVAGSTIANLSTRPEYKLVF

SEQ ID NO: 62045 - protein, 105 aa, Zea mays
  Clone ID: LIB3060-051-B10_FLI.pep
RYTRGHQTTQIPRYSSSLNDPWLTDHRGGGAPGGECSPSGCCSLLGCGHPPAACQRRSDAAGLGGCPLCPGSSPSRCRWCRSSQPPGLWSCQSRSSQRSAYHLAS

SEQ ID NO: 62046 - protein, 139 aa, Zea mays
  Clone ID: LIB3060-037-F11_FLI.pep
REDAPWRKSKPRAPMANRAEGAAAGDREALQNLFLDVARVLVVFGRRTRAGVPQPPALAARRVAPRAGASASGRTLPALGTGRHRHGHRHPEELARLVELASSVDRFADGEVFTRALSMIYQVNKEGLDFLACYISEYI

SEQ ID NO: 62047 - protein, 273 aa, Zea mays
  Clone ID: LIB3060-023-D10_FLI.pep
LPLEPSLSRTLIEANELGCLSQALTVASILSAEITLRSVSKDVVDGKRKRQELPDGSGWGDHIQLLQIFESWDQTGYDTKWCSHHDLQVRGMKLSKDVRNQLCQIIQKIAKGSTDVDARKSRKNDPDYRKLRRALCVGYGNQLAERMLHHNGYHTVGYRTQLVQVHPSSVLEGDEYGKFPMYVIYHELISTTRPYMRNVCAVEQAWVQPILKKLDKLDINRLSGGSSAPGDSELLGDNKQVNSSKNDVGVKQSEVDSKIQAARERYLARKGKK

SEQ ID NO: 62048 - protein, 203 aa, Zea mays
  Clone ID: LIB3060-083-B8_FLI.pep
DMAPHQQQRALLLFPLVFLLLLLAPPLAGAWGKEGHIMVCKIAEKYLSEKAAAAVQALLPESAGGELSTVCPWADQVRWHYHWASPLHYANTPQVCNFKYSRDCHNSRGQQGMCVVGAINNYTDQLYSYGQKTSYNLTESLMFLAHFVGDVHQPLHVGFEDDEGGNTITVHWYRRKANLHHVCACCTSSMPNFRCVYSPGSQS

SEQ ID NO: 62049 - protein, 155 aa, Zea mays
  Clone ID: LIB3060-082-F2_FLI.pep
ACKKEFVMASKRILKELKDLQKDPPTSCSAGPAGEDMFHWQATIMGPPDSPYAGGVFLVNIHFPPDYPFKPPKVSFKTKVFHPNINSNGSICLDILKEQWSPALTISKVLLSICSLLTDPNPDDPLVPEIAHMYKTDRPKYESTARSWTQKYAMG

SEQ ID NO: 62050 - protein, 368 aa, Zea mays
  Clone ID: LIB3060-082-D5_FLI.pep
HSQIIQLKHTLNVHELISFKKLSISQAQSEAAVISEIRMRRFLPPLDNVHAWAWHVLHFRPSHTALSPVKSRTAAAHDLASLPACGASSQAGRPLGGAGDDGEQVVAEGVAEVLGEVLDGAFAGDVGLDEEGEHGEHGEPAVLDLLHLEDGGLVGVAGQAQGVEGATGVQLVLEVQSVDDPVVLGAADEDDLRDHGDHQVDGDAVAEIAEGVAVQEQGAGLEPDGLGAAVSAELVARLWDDSASGTEHGPSGMDQLVGLVLGEVLWLLAQAKRVVAIVSRDLSGEVLRYLRAVQEPIRQVDPPVRTVPLGELVADVRRRGRHRRGLGLLGRLLAEEGDDLLSPRGGRCRGVAGGAGEVELGAQNLGWS

SEQ ID NO: 62051 - protein, 341 aa, Zea mays
  Clone ID: LIB3060-082-C6_FLI.pep
FDNRARCAPMEVEEAGGEVENAGKDEAEAEYHSRDFEWEDLKEEVESGPVFSYHLSPFLDPAASTTSPPQPSSEAWRSFHRRHASGKFFKERRYLLKEFPELCSSKDHAKVLEVGCGNGSTAVSILRSSERITVFACDCSKDTLEKAYEIISNTKGINIKDRFHPFLMDVSKETFPDWLFCKACQTSLGKAAASLLDPSHHGIREEHPVFLGENQCCAGGMDFITMIFTLSAIPFDIMPTTIEQCVSVLKPGGLLLFRDYGLYDMTMLRFLPHQRVGFREYMRSDGTFSYFFSLDTVRELFRAAGLVELELEYCCVKSVNRKNGKTMRRVWVHGKFKKPPR

SEQ ID NO: 62052 - protein, 153 aa, Zea mays
  Clone ID: LIB3060-074-H3_FLI.pep
ESTDPKDLRLKLQRRSFQQDFTSTRSSGVRDLREKLSGIMNPQPSNADPPKPKPKPVSEVVNISRRQIADEMHARQNKKPPKQTSSKKTSQPKAESPLDSFLSSLGLEKYSITFQAEEVDMAALRHMTDSDLKALGIPMGPRKKIILALESRA

SEQ ID NO: 62053 - protein, 350 aa, Zea mays
  Clone ID: LIB3060-073-H10_FLI.pep
TLESLELSVPDPLDLDILGRLGPEVGVGRLHALEDADDLAGLRVALGDAQRDVAGGGGGVLDVLLLELLLVTSAPGGERDGVVVAGGAAAALGVEEGGAAVAGHEEGPAEALGLAGGDELLDGEEERHALAPRELHGDGGVVDAVLLLELERAVGADLERALDLVQRVREAGHELGLLELGRGVLGDALRLDGEGRRLQAQLLHLVLAGLERERLHAAVDGRALVRRARALHLHVRFALDLVVGQPLGRALRARARDEERRGGEREAGELRGVDAPAGDVLQGARDPGGAGVDAERPAGELRRRAGRQRGKGRPAADLGRLHQGGRGLERGCHRRRGGDAFWLLPFSSGG

SEQ ID NO: 62054 - protein, 250 aa, Zea mays
  Clone ID: LIB3060-073-C6_FLI.pep
YCQKKNYGSGFRWLFLHLQAPPVTATRRKNEPRNNPGSAGTHSNCAARPKIQKASERAPSSAAPISLGMAPQAWVVAENGEDLQQPREFLPLSKLEDVGVLYWHLDPKKSESEEELAKIRRDRGYSYMDLIEICPDKLENYEEKVKNFFCEHMHADEEIRYCLEGSGYFDVRDKDDKWIRIRIREGDMIILPAGIYHRFTLDSAKYTKLMRLFIGEPVWTALNRPQEDHPARQEYVKNVSAGTGFALAAH

SEQ ID NO: 62055 - protein, 547 aa, Zea mays
  Clone ID: LIB3060-066-E11_FLI.pep
GDGGKQRRRGQRTRAESLRPPHLHCLTDENAGRMADGTDVSPESEATAAAGKSGEIWGTLEELLLACAVTRHGTASWDSVAMEVQTRIPVAARPGLTPHSCRLRFRHLHRRFSTVGSGGVEEAEEDPDASAAEGWVDELRRLRVAELRRDVERCDLSIGTLQSKVKRLKAEREQRASGEAVSDHDRLSSEEPGCSCRESNSTDLKPPKHPSQLGDGSKEEKVAKQEASVESAVDSKDSSEVRSSASLCRRRRGSGNAEEEEAEAEASKSSPLTFLLDAVLAKLGCVLDRLRENDSEESAMYRDTIRRHVDLETLRRRLNASAGSRADDDSHSSAHELYRDLLLLCTNIVVFFPGGTPENSAAVEARALVTGHASAVLHKPKQENVAVAAPAPASADIVGSLIEKGKPLIVCRKRSSIAKAAASARKEENTMKGETAEETEDEKKSVAAATKDKTWGVRTKKSRGGKNSAGPGRNLADGADGPRKGAGAGTDGLAKKRNAVDFLKRLNQSPPRKRGSGSHLGTTRKRPAAMEEQTTKRKRGTGRKEGT

SEQ ID NO: 62056 - protein, 263 aa, Zea mays
  Clone ID: LIB3060-064-G10_FLI.pep
GWYLAQTRSKIGLAGYKPRTSRAVEGNIWRGKQWRARRVRLKVLGLQVSPFVLRVCLALNMKGVSYEYVEEDVSNKSELLLKSNPVHKKVPVLIHNGKPICESPVIMQYVDELFAGRPILPTDPYERATARFWAAYADDKLFPAWYGMVKAQAEEERAEKAKETLAAIEHMEVAFAKCSGGNAFFGGDSIGYVDIVLGSFLFWFEAVRRVFDLEIINASKTPLLAAWAERFVGTVEAKEVLPLPTADMAVQYINKLHAPLPPP

SEQ ID NO: 62057 - protein, 388 aa, Zea mays
  Clone ID: LIB3060-063-D7_FLI.pep
RSHARTERKRTTTTTMPEPPLLVCRNQALNSINFRVRYGSMEICCLLELPCASCMRDAAADGYDHHQRFTGETLLLSVFHGEAVSSSLALVLVGFVLLALVRPEESVAPGPLPAPAPVRRSRIGGAIGIPEAGGAAVAVAAAGPAAVPGLAELALGPPLLLLHRRLLLLLPLLLLAVLGGVGLGRDLLLAAEGEREEELDEQAGVQADAAVQAPAPLLPHRPLLPPLLLALGASLLPATAAVLGVRRRDGVLPGAGGLALLLRRDGDGATRAWSGGGRRRQRVGRGVGRGRGRRVLDDVAERELVGGLREAADEVEHLAAVPRDGLRPRRRAARRRRVLPVELVVVRPQLRRRRARAAGAVVHLRRGLRRRLQPPDLLVPVPRRHRVR

SEQ ID NO: 62058 - protein, 322 aa, Zea mays
  Clone ID: LIB3060-061-C7_FLI.pep
TSITLVPRSSLYYIYNSGGGVLQQQQRQQQAGSLVFGDRGSLQEAVADLRGDVAHRSGAMRDEHRGRLGRRADLLHGVEVLGDEHHVHDVLGGGARHVDGEPQHAVPEPVHDGLPLARNAQPGQVLGFRLPLRALDLHDLLRLRLLVCSRPEPRSCVDLVHCALHMLVWLDVHDESLHDLKAISRHGLLKLVLHRPCDLVLLLESIVQMELGNACSDHVKDVGLDLGPCVAQFVESVTCFVSQSAVLNRCHHIHKNIVLCFCLTAHIQLLQPECEMPSYTLAGEPRHAVASWLKHAVKLAKLLPDGHSRLVNLNTAAQVAHS

SEQ ID NO: 62059 - protein, 228 aa, Zea mays
  Clone ID: LIB3060-058-H5_FLI.pep
NPKQGVDLSAAAMSKLQSESVKDAISQIVGDAKEKNRKFTETVELQIGLKNYDPQKDKRFSGSVKLPHIPRPKMKVCMLGDAQHVEEAEKMGLDYMDVEALKKMNKNKKLVKRLAKKYHAFLASEAIIKQIPRLLGPGLNKAGKFPTLVTHQESLESKVNETKATVKFQLKKVLCMGVAVGNLAMEEKQIQQNIQMSVNFLVSLLKKNWQNVRCLYVKSTMGKPYRVF

SEQ ID NO: 62060 - protein, 247 aa, Zea mays
  Clone ID: LIB3060-057-H9_FLI.pep
ARATGSSRGPGNRRRMEVGRAPRRRVSPAAAAAAVPSLLLFAVLFAGRAAAFGHLQAAGAGATALYKHASFFDRDGDGVVSFSETYGAFRALGFGFGLSSVSAALINGALGSKCRPQNATSSKLDIYIEDIQNGKHGSDSGAYDAEGRFVPEKFEEIFAKHAKTVPDALTSDEIDQLLQANREPGDYSGWAGAEAEWKTLYSLGKDKDGLLRKDVARSVYDGTLFHMLAPNWKSPDEEEELSAIRES

SEQ ID NO: 62061 - protein, 217 aa, Zea mays
  Clone ID: LIB3060-057-F12_FLI.pep
RKMSTYLVSCCLRPPSAGAEMPKAASAASSSSLAPPPDTKRVGRRDFVLRSSEIATLAAIFHFSGSKPSYLGVQKSPPSLALCPATNNCVSTSEEISDSNHYAPPWNYNPKDGRSGKPITKEEAMKELIEVVTKTKPDNFTPRIVEKKDDYIRVEYESPIFGFVDDVEFWFPPGNKTMVQYRSASRSGFIDFNANKKRVKELRLALEKKGWASESNF

SEQ ID NO: 62062 - protein, 241 aa, Zea mays; identical to SEQ ID NO: 47787
  Clone ID: LIB3060-057-D10_FLI.pep

SEQ ID NO: 62063 - protein, 359 aa, Zea mays
  Clone ID: LIB3060-052-A8_FLI.pep
REERWRFSRETRRGQTRHSPQEDARPSELACMSQHTRGSLRPALERDGPDDHLVVDGSQGGADEGADPEDPMVAPRMIPVVDDGGAKASSWVDAGAGDGDGGKVDQEHREPNWQWGKDGDMGVPGVPLGIGGREDGVHQDEGANNLSAKAIPLGVPGGDNIGATAVAHVKPLLEALHHSSSTDGTQALHDNVEDGPSQGQLPGQEQPEGHSWVDVSSGDAGGAVDEREDHPSEGPGDALDADGGALGGGLGDAHDGEDGDVEEEEGGDELGDARAVEGPGLELPGLEQRRRRGLLVVLVVVPGAGALRRRADGLTLRELVGAQAHVLLLPLHRCSPAPRYCPWLPALSPACAVGLSVVS

SEQ ID NO: 62064 - protein, 259 aa, Zea mays
  Clone ID: LIB3060-052-A5_FLI.pep
YTVNVCMYIVTGHVTRSSERDWSLHYMAMAPLPPPSFSSLAVLMVVVGFLVQFSSWLGLQRSSELITTQSYTVGLLGVPGASSPPPPPILAFPRSFFVQPSPLGVVAAAAPKGESGAPLAGDGDDGAELDSLRGDVTTDSAAGRRSMVKLRVTAPGGGAEPAAAAAATAADDDDEGEKEAYLRSLPRPESGRGPATVSSHSWFRSPIYAPVRARPTYVRSGRPATAWCAFCFESDALALFPLVLLFDVFVVLGARGREA

SEQ ID NO: 62065 - protein, 139 aa, Zea mays
  Clone ID: LIB3060-051-D6_FLI.pep
TPQEAGQSKFTPRLPSSGVGGESGDDGVLGLELGLPVGEDAELLVGEPGEVPGDVGLVLGHLAEGAAGLAAREDGVGAAGAVEAAAGGDVVDLAPDGDVDGLGRVGAVVRAQLRRRQLRRHRSPGKGVRVAGGAALGWC

SEQ ID NO: 62066 - protein, 338 aa, Zea mays
  Clone ID: LIB3060-047-A2_FLI.pep
NTVSGLNKINTSLLLQAAGWPCMNHDRCNASGSFTTRMHLAFHSKQLAAAAAAAGMLMHHVLVELEAGEHVVVDGVGEVVEQVLERADAGDEPLDEVTEDGEHGEPAVLDLLELELIHLLLGLAEAERVEEGPAGVGRVAGAGEELLEAEEVLLAHGARVVPVLEAAVLGEAHERHVEDEERVGVGPVVVGARGRDDARLEPRQRGLRGDDAHLAEDLRGDGAHRAQHGVAAVDHLAIGQPLGLDEAPGALRVREAQRVEAIVAGQRAIEVGEGLLGREPQLPVGTLLGWRAGAGPDDEGRLPRRRPRDGRLHGAAQQLPAGEESLGRHRSALVLLLT

SEQ ID NO: 62067 - protein, 233 aa, Zea mays
  Clone ID: LIB3060-040-G7_FLI.pep
LQASNNEQSVQARDLRIAEDEHLHELGPALVAEQALLPVRPPRVRQAKPRASAAEVADAGAGVGSSEHAHHGGERRADEQAVGAELWPAAGVVEQRRAAPAHLGQHHGRRRDLRRFRPVEEERVQRVVVVVRASVPLRAEPAETEATVGVANDDAGALEVAPPVEVRSTEAVHGGLVAAPELTVSEVCFCHERHGERWLDVVVGELQLRRRRLGFSRAFAPVKEATRGDEGWP

SEQ ID NO: 62068 - protein, 283 aa, Zea mays
  Clone ID: LIB3060-038-D4_FLI.pep
LFATMKEHLMLNIDDLSILEPNEVIGTVKNKSSGETIAHPPSMAHAILAVGESMVSEAEPLLQVVECRICQEEDSIKNLESPCACTGSLKYAHRTCVQRWCNEKGDVTCEICHEPYEHGYTAPPRGHPDETTIDISGGWTITGTAFDLRDPRILAVAQNHIMEAEYDDYSATNASTAAFCRSAALVLMALLLLRHALTLTDEDDDDTSAMFSLFLLRAAGFLLPFYIMAWAISILQRRRQRQEAAALAAAEVAFILQSGQGRGVHFTIAPDSPATPQHEPPQP

SEQ ID NO: 62069 - protein, 187 aa, Zea mays
  Clone ID: LIB3060-030-F4_FLI.pep
TMDAAVSLSLPLHHAHAHGPLPLPHPAPHHLHCAVPLRHHATSASAVTAPPPKPDVQAPPSARLSPALAAPAPPRSSPAAARSSSRAATGYAAALADACVRAGTLRRAARHARALLRLRLERPLEEGAAAVEAAVTVAGQQLDARVAALVRMLVAKGRAGMLAEALAEFAAICDHLLPTRPRARHAY

SEQ ID NO: 62070 - protein, 201 aa, Zea mays
  Clone ID: 700204871_FLI.pep
VAKETEFNLWGFMFIMLAAVMAGFRWSMTQILLQKEEYALKNPFTLMSHVAPVMAIVTAIISIVMDPWHDFRASHFFDSSTHIIRSSVLLLLGGALAFFMVLTEYVLVSVTSAVTVTVAGIVKEAVTILVAVLFFNDPFTWLKALGLAIIIFGVSLFNIYKYKRFKKGHHSEDAGTNIQSSNGTSKYVILDDDTEDQDDTG

SEQ ID NO: 62071 - protein, 117 aa, Zea mays
  Clone ID: 700452480_FLI.pep
ASSELMNFICATWSKILSCCHGITRYRRRPPDLSHPALLHRAELFGSGPQLVLLDLPRGRLGQRPEDDRLGHPVPRHPLPAEAHDVVGQRRLVRPVGCCSVLERHERARRLAPPLVG

SEQ ID NO: 62072 - protein, 98 aa, Zea mays
  Clone ID: 700549862_FLI.pep
SLVALLGSCLGNLHPFHPSPVFVSNTNLYVLNGIAKVILQLLSVGLKSDDKWSVEYGLLPFIPTAKSFKMDIVLAMLLQLQRWISYPCLFFMGMCSRF

SEQ ID NO: 62073 - protein, 92 aa, Zea mays
  Clone ID: 700578212_FLI.pep
AGLNVNQVLTRCLFAGLCFHAYQQVSYMILAMVSPVTHSVGNCVKRVVVIVTSVLFFRTPVSPINSLGTAIALAGVFLYSQLKRLKPKPKTA

SEQ ID NO: 62074 - protein, 77 aa, Zea mays
  Clone ID: LIB3228-009-F10_FLI.pep
PNQEDGGDLPQETHEIVKPVAVHSQNPINVDELVGMSKLSIWEHGQETVSTSLSLNLLGGQNRQSAFHANPQTRAQA

SEQ ID NO: 62075 - protein, 252 aa, Zea mays
  Clone ID: LIB3591-084-A1_FLI.pep
AMSLWFSNSAYIYLSVSFIQMLKALMPVAVYSIGVLFNKETFRSSSMLNMLSISFGVAIAAYGEARFDVRGVALQLAAVAFEATRLVLIQILLTSKGISLNPITSLYYVAPCCLCFLVVPWVFVELPRLRAVGTFQPDFFVFGTNSLCAFALNLAVFLLVGKTSALTMNVAGVVKDWLLIAFSWSVIRDTVTPINLFGYGIAFLGVAYYNHVKLQALKAKEAQKKAAQADEEVGSLLQERDGHGDHKSDNQA

SEQ ID NO: 62076 - protein, 113 aa, Zea mays
  Clone ID: LIB3600-040-F5_FLI.pep
FVFGTNSLCAFALNLAVFLLVGKTSALTMNVAGVVKDWLLIAFSWSVIRDTVTPINLFGYGIAFLGVGYYNHVKLQALKAKEAQKKATQADEEAGSLLQERDGHSDRKSDNQA

SEQ ID NO: 62077 - protein, 331 aa, Zea mays
  Clone ID: LIB3607-005-D11_FLI.pep
KVLIIYYRIRSSQSSGAARKNVRSMSSGLILKLFLLALIWNTLGMNLCNASVTLTSATVASATGNSTPVITFCLALLLRMEVVKLRSVSGIAKVTGVALCLAGALVIALYTGPSLSPVNRHHRASGGAHGFKAPTRGGTWVTGTFLMLLSNVTWSLWTVLQGALLKEYPNKLLVTTSQCLFSTAQSFVVAAVAERDFSKWALKLDVSLIAVAYTGFLVTGVSYYLQAWCVQIKGPVFLAVWNPLCFVLTIFCSSFFLGENVHLGSIVGGILLVCGLYSVLWGKTLEVHQTVESGDNTVGEVQNGQEEKNHQQKVLEKGRQEEASMTAPGVV

SEQ ID NO: 62078 - protein, 269 aa, Zea mays
  Clone ID: LIB3608-024-C10_FLI.pep
TKVQKANRGPVEQAKQNLSLGFNSIGFYQMTKLAIIPFTVLLETIFLKKRFSETIKFSLLVLLLGVGIASVTDLKLNCLGSVLSGLAIATTCVGQILTNTIQRKLKVSSTQLLYQSAPYQAAILFATGPFVDHLLTGRSVFAHRYTFPVVGFIVLSCLIAVSVNFSTFLVIGTTSPVTYQVLGHLKTCLVLSFGYTLLHDPFTVRNILGILVAIFGMALYSIFSVREGKKKSAGDALPVSQMPDKETEPLLATKDNSDTKKANGVAHDC

SEQ ID NO: 62079 - protein, 247 aa, Zea mays
  Clone ID: LIB3608-041-A7_FLI.pep
TNLLCHANVDTFIVFRSLTPLLVAIADTTFRKQPCPSKFTFLSLVVILGGAVGYVTTDSAFSLTAYSWALAYLVTITTEMVYIKHIVTSLGLNTWGFVLYNNFLSLMLAPVFWFLTGEHRSVFAAMESRGEGWFQLDAVVAVALSCVFGLLISFFGFAARRAVSATAFTVTGVVNKFLTVAINVMIWDKHASAYGSVCLLFTILGGVLYQQSVTVKGNGAVVAQRELVPEQPEEVDEEKQSLVSSAK

SEQ ID NO: 62080 - protein, 129 aa, Zea mays
  Clone ID: LIB3637-200-F3_FLI.pep
VLSCLISVSVNFSTFLVIGKTSPVTYQVLGHLKTCLVLTFGYVLLHDPFSWRNILGILIAVIGMVLYSYFCTRETQQKPAEASPQAVQAKEGESNPLISDSLSAAENGGSATDDEPLKVPMWSSKYSKA

SEQ ID NO: 62081 - protein, 304 aa, Zea mays
  Clone ID: LIB3637-227-D4_FLI.pep
AVGFNFPVALSLIHYLFAFALMSVLKALYLLPIASPSKSTPFSSLFALGAVMSFSTGLANISLKHNSVGFYQMAKIAVTPTIVVAEFILFKKKVSLRKVSTLVVVSFGVAVATVTDLEFNFFGACVALAWIIPSAVNKILWSNLQQSGNWTALALMWKTTPITIFFFIVLMPLLDPPGLLSFSWDFKNSSTIIISALFGFLLQWSGALALGATSALAHVVLGQFKTIVIMLSGYLVFKSDPGFTSLCGAVIALAGMSVYTYLGMKESAASGRRNSLNSRQNSHLKKPKAIIDGENPETKPMDSV

SEQ ID NO: 62082 - protein, 115 aa, Zea mays
  Clone ID: LIB3689-255-G2_FLI.pep
GWHMIIGGLPLLVISVLNHDPALSGHIQDLTWSDILALGYTSIFGSAVSYGVYFYNATRGSLTTLSSLTFLTPMFASVFGYLYLGETFSPVQIGGALLTLVAIYMVNYKSIIGEK

SEQ ID NO: 62083 - protein, 218 aa, Zea mays
  Clone ID: LIB3912-037-A2_FLI.pep
FMLFQKKVSSKKAVTLAVVSFGVAVATVTDLEFNFFGACVALAWIVPSAVNKILWSSLQQSGNWTALALMWKTTPITIFFLLTLMPLLDPPGLLLFNWNFRNSCAVIISALFGFLLQWSGALALGATSALSHVVLGQFKTIVIMLSGYLIFGSDPGITSVCGAVLALGGMSFYTYLGLKKDPATSGKKAPSRQNSFMARPKVAADDSDDADSEQDDTV

SEQ ID NO: 62084 - protein, 282 aa, Zea mays
  Clone ID: LIB3959-014-H3_FLI.pep
KLVLKAIPFPYTITTFHFASGTFFITLMWLLNLHPKPRLSLKQYAKLLPLALIHMLGNVFTNMSLGKVSVSFTHTIKAMEPFFSVLLSILFLGETPSLPVLGSLVPIVGGVVLASMTEVSFNWIGFWSAMTSNLMNQSRNVYSKKILADKEDSLDDINLFSIITVMAFLLSAPLMLCVEGIKFSPSYLQNAGVNVKELFIRAALAGTSFYFYQQVSYSLLARVSPVTHSVANSLKRVVVIVSSVLFFRTLISPINALGTGVALAGVFLYSQFKKSKPKATAA

SEQ ID NO: 62085 - protein, 161 aa, Zea mays
  Clone ID: LIB3062-021-B2_FLI.pep
SRKVSLTKGLSMRPTATVGIPPKILHRRTIPVLGTTGTTQARKMSLRNRTRAVTPGLAGMMGRMMVLIALVTTITAPPTRGATKTGHPVAHFGQKAASAETSLFSIELYFQSCYMPGNVRVQWLVLFGILKQSGERVCVFCTMSTTVIISSEIYFCGQMPF

SEQ ID NO: 62086 - protein, 159 aa, Zea mays
  Clone ID: LIB3062-052-A2_FLI.pep
EIPLRLSRVTKLSSFLAPTAMDEVTEAVNNLNISGVGAAGVAGAEGHKKNRIQVSNTKKPLFFYVNLAKRYMQLHNEVELSALGMAIATVVTVAEILKNNGLAVAKSIMTSTVDIKDETRTRPIQKAKIEILLGKTEKFDELMAAAAEEREANGAEEQS

SEQ ID NO: 62087 - protein, 145 aa, Zea mays
  Clone ID: LIB3079-023-E9_FLI.pep
TPQEAGQSKFRPRLTSSGVGGESGDDGVLGLELDLPVGEDAELLVGEPGEVPGDVGLVLGHLAEGAAGLAAREDGVGAAGAVEAAAGGDVVDLAPDGDVDGLGRVGAVVRAQLRRRQLRRHRSPGEGVRVAGGAALGWCRWIVGA

SEQ ID NO: 62088 - protein, 215 aa, Zea mays; identical to SEQ ID NO: 51863
  Clone ID: LIB3357-021-F5_FLI.pep

SEQ ID NO: 62089 - protein, 115 aa, Zea mays
  Clone ID: 700342733_FLI.pep
KVACKFLQPGAYDLVGYIVYEIDQHPYQNVFYNGTIEVVEAGGLLSVESVFLITLGFALLGLFGLWAYGQVQQLSKKTKKAPKVELGTGTTDANIDEWLEGTSFVQRSKSKKKQT

SEQ ID NO: 62090 - protein, 155 aa, Zea mays
  Clone ID: LIB3595-003-A8_FLI.pep
LPSGIVLYTDDDEWSTWKKIGDEVLHIELRKWADVMVIAPLSANTLAKIAGGLCDNLLTCIVRAWDYSKPLFVAPAMNTLMWNNPFTERHLHTINQLGIALIPPVTKRLACGDYGNGAMAETSQIHTSVRLACKTQPHDASSSLAGPVSNNRPSS

SEQ ID NO: 62091 - protein, 164 aa, Zea mays
  Clone ID: LIB3600-012-D2_FLI.pep
QPRQTEQRWMIMDSSIISSVGVVVEGCVRLGGPGGGGGLDGGRRRDGRAEQVPGQVRDAPEVEGVEDLEGEDDLVELDLAVDALEDTGAAGDRQVRLLVGQVRALHRDVAVVSEVEAVDGLVAVAVAVGDVLDEHADARGDAQPLVQAAVVHLQVGVVERERDG

SEQ ID NO: 62092 - protein, 384 aa, Oryza sativa nipponbare
  Clone ID: LIB3434-007-C6_FLI.pep
EKMQAQDVKNVFCMKGGQGESSYLKNSKAQLRDLQMMLYALEETLDKIAIPPRGPGRLLLTAADLGCSCGRSSLVVADAIVQHMTKLCRGRGKHVDAVAAADPEFWFYFSDLPSNDFNTLFSLLPPHAASSGDGSGRRYFAAAVPGSFHDRLFPERSIDVFTSTFCLHWLSQVPDEVADTRSPAYNKGKVFVQGSSEETGTAYRRQFQSDMARFLRCRAAELKPGGAMFLVFVGRPSSAGPTDQGRSLNLLGTMFEESWRDLVDEGLIDGGRMDSFNIPSYAATLEEFRESVDADGSFAVNRLEHVMGGRLAVDDDPHDDRCAVGRRVANNQRSIFGPLVEAHIGRALADELFVRMERRAEELSDELVDEMGVRFHILCSLSLV

SEQ ID NO: 62093 - protein, 367 aa, Gossypium hirsutum
  Clone ID: LIB3829-008-C2_FLI.pep
IKKMEQVFSMERGTGEESYATNSKLQSTCLSLSMPVLKQAVLSFCCTDLPETITIADLGCASGPNTFIAVSEIISIMYKNCCELGRSPLEFRVFFNDLPGNDFNTIFQSLPAFQEKLQQENGPKFGPFFTAGVPGSFYGRLFPSKTLHIVHSSSSIHWLSQVPPELVDKANPVINKGKIFISRTSPAAVIDSYVTQFRKDFTLFLKLRSEEIAPKGRMVLTLRGRTTPDPTSDQSCLLWDYLGQAFQDLVAKGVVEEEMLDGYYTPYYEPCPEEIQAEVEKEGSFAVDRLEVVALPWDYVNGGINYDRALTAKEMAKAMRAVNESMIGSHFGADIMDRLFHRFMEIMAADTMEVEHVSLVVSLIRNA

SEQ ID NO: 62094 - protein, 57 aa, Zea mays
  Clone ID: LIB3070-003-H11_FLI.pep
SQLHVCNIYSGISSSRYEIQYIQLYSRAHGGNVRTRNPRSIERIKKALPCCQGVSPR

SEQ ID NO: 62095 - protein, 309 aa, Zea mays
  Clone ID: LIB3245-021-G6_FLI.pep
PNMSELSLCFTEHSSDCTNLITLMDGLGRTCPNLEKMHISSKQLSNEAVCALENANLRGLFMLSLILGSKITDAAVASIVRSCASLELLDLSGSSISDNGVGMICKAYPRTLSRLLLALCPNVTTRGIQLATAQLPCLQLMDCGMSLCANVKNEKEGPYFGEINGGIRIIRKLSILKRQPIHQKLIIKHGNLKKLSLWGCSALDALYLNCPELNDLNLNSCTNLHPERLLLQCPNLKNVYASGCQDMLIGAIRNQVLNEFAAVEPSLPCKRLADGSKRVQLPQFLKQQPSKDNKLIELSQTQCTVHLGS

SEQ ID NO: 62096 - protein, 120 aa, Zea mays
  Clone ID: LIB3245-034-E3_FLI.pep
VAWLHAVLLLLILFIAVTLHDTTLHACTVRRLCTASQGCYLVLLEFSSGKPRVFEELCLARLLAPAVAEVAVAGGPPAVLLDALVAAEAVGDAGERVVLALAHAHPGLRHHRRRRPAVVV

SEQ ID NO: 62097 - protein, 230 aa, Glycine max
  Clone ID: 701008047_FLI.pep
NFEHLPTPLPMASYHEEEVRLLGKWASPFSNRVDLALKLKGVPYKYSEEDLANKSADLLKYNPVHKKVPVLVHNGNPLPESLIIVEYIDETWKNNPLLPQDPYERALARFWSKTLDDKILPAIWNACWSDENGREKAVEEALEALKILQETLKDKKFFGGESIGLVDIAANFIGYWVAILQEIAGLELLTIEKFPKLYNWSQDFINHPVIKEGLPPRDELFAFFKASAKK

SEQ ID NO: 62098 - protein, 277 aa, Glycine max
  Clone ID: LIB3074-012-C7_FLI.pep
HTVTVPFRFPLFFFLLSFKSPLRGNPEPETMLLRTAAASASSLSLFSPNAEPPRSVPARGLVVRAAKGSTNHRALTGVIFEPFEEVKKELDPVPTVPQASLARQKYVDESESAVNEQINVEYNVSYVYHAMFAYFDRDNVALRGLAKFFKESSEEEREHAEKLMEYQNKRGGKVKLQSIVMPLSDFDHADKGDALHAMELALSLEKLTNEKLLNLHSVATKNGDVQLADFVETEYLGEQVEAIKRISEYVAQLRRVGKGHGVWHFDQILLHEGGDAA

SEQ ID NO: 62099 - protein, 283 aa, Glycine max
  Clone ID: LIB3107-006-H2_FLI.pep
DPHAHNNTLSPFRSVFLCFFFLSFKSPLRGNPEPETMLLRTAAASASSLSLFSPNAEPPRSVPARGLVVRAAKGSTNHRALTGVIFEPFEEVKKELDLVPTVPQASLARQKYVDESESAVNEQINVEYNVSYVYHAMFAYFDRDNVALRGLAKFFKESSEEEREHAEKLMEYQNKRGGKVKLQSIVMPLSDFDHADKGDALHAMELALSLEKLTNEKLLNLHSVATKNGDVQLADFVETEYLGEQVEAIKRISEYVAQLRRVGKGHGVWHFDQMLLHEGGDAA

SEQ ID NO: 62100 - protein, 172 aa, Gossypium hirsutum
  Clone ID: LIB3582-009-H12_FLI.pep
LCRYLLMSGAFDSVEYSVSYVYHAMFAYFDRDNVALKGLAKFFKESSLEEREHAEKFMEYQNKRGGKVKLQSIVMPLSEFDHAEKGDALYAMELALSLEKLTSEKLFNLRNVAVRNHAVQLTDFIEGEFLAEQVEAIKKISEYVAQLRRVGKGHGVWHFDQMLLREGEEAIA

SEQ ID NO: 62101 - protein, 75 aa, Oryza sativa nipponbare
  Clone ID: LIB3474-009-C11_FLI.pep
QPRRRHRDRQDHEEQVHGQGDGRDRQGDPWDLRQRWVHRRRQGPQGSAAGDLRWRGRDPFGLKGLIFEDITISCY

SEQ ID NO: 62102 - protein, 84 aa, Gossypium hirsutum
  Clone ID: LIB3149-063-D10_FLI.pep
FISGVLLLFFLFLISSSHLSARSLANKQGKEEVELTQTADMEDNELMNQLLGVEACDAGDDECLKRRIISEAHLDYIYTQHHKP

SEQ ID NO: 62103 - protein, 119 aa, Zea mays
  Clone ID: LIB3637-195-C9_FLI.pep
CTHSEQTKPSMQTGEAEAEMHWSRARLTACPCAACRCSRGARLRAAASVGTPPRRRRRPPSHTPPPLRPSSLRRRRSRRRRCHCSWRQRHLPQSSRGRRRQLPPWRHYSPLGEEPEEER

SEQ ID NO: 62104 - protein, 313 aa, Zea mays
  Clone ID: 700095295_FLI.pep
YLYYPGTQPTLIWPTRLKLELIWHTLAHEHACSDNAYNWTRLFFSCVFSISSFTHRTANKLVQATNLLQLLWSQEEPIRDAAELVHVVYLVRGSHSAEVGHVGDGADRKAAVDQAVVDEHVGHAEQRNPQARAEAEAGHDAAVEEAVGEEGDGEHVVELEGALARPVVRLVHVPQGGVPQRPVRPPRPELHPDRRPDGERERAQRLDHRHLAALHLPAEAIVHGGDGHGRDSEARHHGGHQVRPPLGPLPRLLLRNAPRRRGPGLLVQRRHGSGRGRRVLRHEARDGAARGPGAGERRERQGAPREGRRPAPR

SEQ ID NO: 62105 - protein, 142 aa, Zea mays
  Clone ID: LIB3732-039-A3_FLI.pep
PLQLLSRILFHLLQPSLDVIPWHVSKHFPNLEAYNVFIGQDEFIPSIIKVLIRLLCELDLFLELVEAVVEATEAVDVLLVLPRHLRLRAVALLHLRFSLGRADRRSESKASSSPDPLFGLGIAAAARFGRSSSTRSERGEGR

SEQ ID NO: 62106 - protein, 342 aa, Zea mays
  Clone ID: LIB3061-001-H3_FLI.pep
GIRNFSHAANTAEMMSSRAGSILLRHAGSRLFTAAAISPAAASRPLLAGGNGVPAVMLRLMSTSSPAAPTEAKDEAAKASKVGGDKKAVVINSYWGIEQNNKLARDDGTEWKWTCFRPWETYTADTSIDLTRHHEPKTLMDKVAYWTVKSLRFPTDIFFQRRYGCRAMMLETVAAVPGMVGGMLLHLRSLRRFEQSGGWIRALLEEAENERMHLMTFMEVAKPRWYERALVITVQGVFFNAYFLGYLLSPKFAHRVVGYLEEEAIHSYTEYLKDLEAGKIENVPAPAIAIDYWRLPANATLKDVVTVVRADEAHHRDVNHFASDIHCQGMQLKQSPAPIGYH

SEQ ID NO: 62107 - protein, 303 aa, Gossypium hirsutum
  Clone ID: LIB3582-039-E10_FLI.pep
YKMMVGKEDLGLSLSLGFPQNHHSLQLNLRPSLLPSSVDSCSSVPSGFTAFHKSSWNDVSAPSDPNAESFRGETRSFLRGIDVNRLPSTVDCEEEAGVSSPNSTISSVSGKRSEREGTNGDELDIERACSRGISDEEDGDASRKKLRLSKDQSAILEESFKEHNTLNPKQKMALAKQLGLRPRQVEVWFQNRRARTKLKQTEVDCEFLKRCCENLTEENRRLQKEVQELRALKLSPQFYMQMTPPTTLTMCPSCERVGASSTVDPRSHHQLPQTHHRAIPINPWAPAAAPIPHGPFDALRPQS

SEQ ID NO: 62108 - protein, 303 aa, Gossypium hirsutum
  Clone ID: LIB3825-019-H3_FLI.pep
SKTMVGKEDLGLSLSLGFPQNRHSLQLNLRPSLIPSSVDSCSSVPSGFTAIHKSLWNDVSAPSDPNAESFRGETRSFLRGIDVNRLPSTVDCEEAAGVSSPNSTISSVSGKRSEREGTNGDELDIERACSRGISDEEDGDASRKKLRLSKDQSAILEESFKENNTLNPKQKMALAKQLGLRPRQVEVWFQNRRARTKLKQTEVDCEFLKRCCENLTEENRRLQKEVQELRALKLSPQFYMQMTPPTTLTMCPSCERVGASSTVDPRSHHQLPQNHHRAIPINPWAPAAAPIPHGPLDALRLRS

SEQ ID NO: 62109 - protein, 140 aa, Zea mays
  Clone ID: 700426218_FLI.pep
WKQQDVGALVAGTAMVGLSSGFIFAAAVSVTSELFGPNSIGVNHNILITNIPLGSLLYGQIAAMVYDANGQRMTLMDNRTGIIDTMIVCMGVKCYSTTFLVWGCITLLGLVSSVVLFIRTKPAYAAAGRSSCKHLHQVSS

SEQ ID NO: 62110 - protein, 264 aa, Gossypium hirsutum
  Clone ID: LIB3272-010-H4_FLI.pep
KNLSTMLLRPVSSLCVQAKQGDNLICSLKGSPVTSSSSSALSFLPRKHGRALGVYASIGTNNHALTGVVFQPFEEVKKEELDIPIAPHLSLARQKFADACEAAINEQINVEYNVSYVYHSLYAYFDRDNVALKGFAKFFKESSEEEREHAEKLMEYQNKRGGRVKLHSILMPPSEFDHAEKGDALYGMELALSLEKLTNEKLLCLHNVAVQNNDAQMADFIESEYLAEQVEAIKKISEYVSQLRRVGKGHGVWHFDQMLLHEGA

SEQ ID NO: 62111 - protein, 273 aa, Gossypium hirsutum
  Clone ID: LIB3582-005-E5_FLI.pep
HQKLGFLFLLFCAMLLKAVPTFSSLNPQLENQGALFSSFSSSINHQLSSLRNGPGSLVVCAAKGANHKPLSGVVFQPFVEVKKELDLVPSVPQLSLARQKFTDDCEASINEQINVEYNVSYVYHAMFAYFDRDNVALKGLAKFFKESSLEEREHAEKFMEYQNKRGGKVKLQSIVMPLSEFDHAEKGDALYAMELALSLEKLTSEKLFNLRNVAVRNHDVQLTDFIEGEFLAEQVEAIKKISEYVAQLRRVGKGHGVWHFDQMLLHEGEEAIA

SEQ ID NO: 62112 - protein, 234 aa, Gossypium hirsutum
  Clone ID: LIB3166-014-B6_FLI.pep
GSYSSNVNLAVENSSWNDEKQLQDMYLSRKSFAFDCDAPGAGMTEKRKVFEMALSTADATFQNLDSSEISLTDVSHYFDSDPTNLVQNLRKDGKKPSAYIADTTTANAQVRTLAETVRLDARTKLLNPKWYEGMMSSGYEGVREIEKRLTNTVGWSATSGQVDNWVYEEANSTFIQDENMLNRLMNTNPNSFRKLIQTFLEANGRGYWETSEENIEKLRQLYSEVEDKIEGIDR

SEQ ID NO: 62113 - protein, 168 aa, Zea mays
  Clone ID: LIB3060-025-A6_FLI.pep
AKKESEKQSPCLASSTRSRRSSTWGATTRIRRRSTTRRPRSTTRRRRGSTTRRTAGSTRKASWRRSRTRSPASTATSPATTRRRRTRRRRIRRSTARATTTTAATVAAAATATEIWCRSTGATQVCLLDGGFIPADADVVFHWCHACMYRAIIIKKKKEITVRDGLFA

SEQ ID NO: 62114 - protein, 372 aa, Zea mays; identical to SEQ ID NO: 59949
  Clone ID: LIB3960-001-D8_FLI.pep

SEQ ID NO: 62115 - protein, 111 aa, Zea mays
  Clone ID: LIB3245-225-F7_FLI.pep
TLPSLTNSFKAINDEGMPMYQRPFMKGKLYIHFSVEFPDSLSPEQWNALEDVLPPKPVSQYTDIELDECEETMPYDVNIEEEMRRQQQHQEAYDEDDDVPGGGQRVQCAQQ

SEQ ID NO: 62116 - protein, 116 aa, Gossypium hirsutum
  Clone ID: LIB3543-053-D10_FLI.pep
FFKHFLSLHLQRNGSSGVHMHEKKKKKKEQNHIYNHMPTLMEIYVILFMAFDATIEPIFYCLFFFHNNSTSWLVILGINIVHMSSKGSSHQALLFANSFTVLISINFLCLNSLMLG

SEQ ID NO: 62117 - protein, 87 aa, Gossypium hirsutum
  Clone ID: LIB3135-022-G2_FLI.pep
FSLQTKKTREKKMSKLCSLFIAALLFNFMQSYAARPEPTLSLTQHEGVEAEKVDADENCEGIGKEECLMRRTLAAHVDYIYTQNHKP

SEQ ID NO: 62118 - protein, 146 aa, Zea mays
  Clone ID: LIB3587-284-E1_FLI.pep
QFINALNLARPTAMRRRGSNSSPLAAAAQLLLLLLLLVAGCIHSAAAAARHLPSPGAPVQALDHQAETGGKAASAGADGAGGLVLQEGGTGNGDELSSSTLLETTTTTMGAEACEEGNDKDECLLTRRLLVDAHLDYIYTQHKGKP

SEQ ID NO: 62119 - protein, 146 aa, Zea mays; identical to SEQ ID NO: 62118
  Clone ID: LIB3592-092-B9_FLI.pep

SEQ ID NO: 62120 - protein, 136 aa, Zea mays
  Clone ID: LIB4148-004-A12_FLI.pep
TLPLIIRVHREKRERPTEMASGGSSKQLKASLLMVVAALLLLICTCTTRGQAARPDPGSEGHTPQQLRAAVSVSVAAGNEKESGSSVAVVEMRRQQEPEAVSECEDDDGDDEQAECLMRRTLLAHTDYIYTQGKHN

SEQ ID NO: 62121 - protein, 136 aa, Zea mays; identical to SEQ ID NO: 62120
  Clone ID: LIB3062-040-H4_FLI.pep

SEQ ID NO: 62122 - protein, 140 aa, Zea mays
  Clone ID: LIB3353-018-B12_FLI.pep
ALLNITAHHQGIQRDRRETYTEMASGGGSKQLKASLLMVVAALLLLICTCTTRGQAARPDPGSEGHTPQQLRAAVSVSVVAGHEKKSGSSVAVVEMRREDPDQAARECEDDDADDEQAECLVRRTLLAHTDYIYTQGKHN

SEQ ID NO: 62123 - protein, 135 aa, Zea mays
  Clone ID: LIB3898-007-F4_FLI.pep
PRTDSIGSAVVLLGVDVVGVRGQRAPHHALVLVVGALALLLLPLPFRRRRRSILLQVTRRSDGRRRRCRGVVPGGAGHGGRLRRRRRQQEDRERRREHHHRRPPRHGRRNEWSVFVSRTGKWGPGMERKRWASGR

SEQ ID NO: 62124 - protein, 136 aa, Zea mays
  Clone ID: LIB3150-059-E12_FLI.pep
PRTDSIGSAVVLLGVDVVGVRGQRAPHHALVLVVGALALLLLPLPFRRRRRSILLQVTRRSDGRRRRCRGVVPGGAGHGGRLRRRRRQQEDRERRREHHHRRPPRHGRRNEWSVFVSRTGKWGPGMERKRWASGRW

SEQ ID NO: 62125 - protein, 164 aa, Zea mays
  Clone ID: LIB3969-011-F11_FLI.pep
QVIIKYSLHKPTFSVGGAVALAAEPRRWPASASSSLHCSCGMASSLAVTACPCAACRCSRGARRGAAASARTRPCRSPPRTPPSSRSPRKARRHWRPRRHGGEAGDVRRQAGGERLPRSWRRMRSTRGGGGRWRGRRCCNASSSLPVVSRLAGSVALCLWKSKS

SEQ ID NO: 62126 - protein, 169 aa, Zea mays
  Clone ID: LIB3732-053-B9_FLI.pep
QVIIKYSLHKPTFSVGGAVALAAEPRRWPASASSSLHCSCGMASSLAVTACPCAACRCSRGARRGAAASARTRPCRSPPRTPPSCLGLSPRSPRKARRHWRPRRHGGEAGDVRRQAGGERLPRSWRRMRSTRGGGGRWRGRRCCNASSSLPVVSRLAGSVALCLWKSKS

SEQ ID NO: 62127 - protein, 169 aa, Zea mays; identical to SEQ ID NO: 62126
  Clone ID: LIB3596-022-E4_FLI.pep

SEQ ID NO: 62128 - protein, 360 aa, Oryza sativa nipponbare
  Clone ID: LIB3479-004-E11_FLI.pep
AERPRTRDDSGVGGDNLTLSLSPLLSQNPRRARQILPPVRLATDRAPPAMGAAACDAAVEELTRLLDQVEEPLKQTFQNVHQGYPTDTLVRFLKAREWHVSKACDMLVDSLNWRIQNEIDSILEKPIIPVDLYRSIRETQLVGLSGYSKEVHYYVQSHIQINEYRDRIVLPMASKKFGRPISTCIKVLDMTGLKLSALNQMKILTAISTVDDLNYPEKAETYYIVNAPYIFSACWKVVKPLLQERTRKKVHVLHGCGRDELLKIMDHSSLPHFCQREGSGSSKNSSNDVNNCFSLDHPFHQELYHYIDEQALNQELIKQGSLHVNIPDQDPEDAKIVEVIEAEFHKLGEQNGSVNGEHKE

SEQ ID NO: 62129 - protein, 304 aa, Zea mays
  Clone ID: LIB3606-030-E10_FLI.pep
ASLEWKKGIMFRRKHASHSNSTDAEQQEAKINELKSALGPLSAHGEKYCSDTCLRRYLEARNWNVTKSRKMLEESLKWRATYKPEDIRWPDVSVEAETGKMYKANFRDREGRTVIIMRPTKENSTSHDGQIRFLVYVLENAILDQREGQEKMVWLIDFTGWTMAHATPIKTARECTSILQNHYPERLAIAFLLNPPKVFEAFYRAVKYFLDPRSIEKLNFVYLKDEESMKVLYKCIDPVVLPVEFGGKNSVVYNHEDYSKLMLQEDIETSSFWEDDAKTVNHAINGTLVPDVASQLSRIAAKAS

SEQ ID NO: 62130 - protein, 121 aa, Zea mays
  Clone ID: LIB3066-040-G4_FLI.pep
LAILFYALIYDVQLFLDHEKKNVQLLLAPKDFLQSEQSSLDNDQITSSLMNRGSRAQTSGYNKFDEDNQMTTQKPYDHVKAPSKEIKWQRFLGPLAFRKPYIPEFLRPSQIGPKTVVVAEY

SEQ ID NO: 62131 - protein, 287 aa, Zea mays
  Clone ID: CC-ZMPO148043C03_FLI.pep
AMSNILPAMTFVLAVIFRMEKLQMEKVRCQAKVLGTVVTVAGAMLMTLYKGPLMQLARTTSRHASASASASPAAEITISGRDWFLGSVFVVVATLAWASLFVLQAHTIKQYSAQLSLTTLVCFVGTLQAVVVTFVMERRTSVWTIGFDMNLLAAAYAGIVTSSIAYYVQGLVIQKAGPVFASAFSPLMMIIVAAMGSLILSEKIYLGGVLGAALIVAGLYSVLWGKHRETQEKEEAADTKMALPTAAASSMQDAAAGVAVDGAGCNVGNGLTRSSSNAAAGAAANAV

SEQ ID NO: 62132 - protein, 87 aa, Gossypium hirsutum
  Clone ID: UC-GSFLNU33B129C05_FLI.pep
MAKLATFFVLTLLFVSTLSFAARPGPAFPNQSPTKTQAKGITVVETEVERSTEAVEDSCQGVGEEECLMRRTLAAHVDYIYTQNHKP

SEQ ID NO: 62133 - protein, 203 aa, Gossypium hirsutum
  Clone ID: UC-GSRONU33B004A11_FLI.pep
LILMATTGNKNINAKLVLLGDVGAGKSSLVLRFVKGQFVEFQESTIGAAFFSQTLAVNDATVKFEIWDTAGQERYHSLAPMYYRGAAAAIIGYDMTNQASFERAKNWVQELQAQGNPNMVMALAGNKADLLDARKVAAEEAQTYAQENGLFFMETSAKTASNVNELFYEIAKRLPRVQPAQNPAGMVLMNRPSERTATASCCS

SEQ ID NO: 62134 - protein, 133 aa, Oryza sativa
  Clone ID: UC-OSFLCYP071A08_FLI.pep
EVLHIELRKWADIMVIAPLSANTLAKIAGGLCDNLLTCIVRAWDYSKPLFVAPAMNTFMWNNPFTSRHLETINLLGISLVPPITKRLACGDYGNGAMAEPSVIDSTVRLACKRQPLNTNSSPVVPAGRNLPSS

SEQ ID NO: 62135 - protein, 157 aa, Zea mays
  Clone ID: CC-ZMPO148067D11_FLI.pep
PSPPMAPTTATAAAVGTKATALGVAACERDVEKLEFIEDKTRNFDAEQVRVLAEILARNNGAEYLRRHGMEGRTDRLAFKACVPVVTYEDLRPEIERIANGDRSNIISSHPITEFLTSSGTSAGERKLMPTIEDELNRRQMLYSLLMPVMNLWVMNH

SEQ ID NO: 62136 - protein, 161 aa, Zea mays
  Clone ID: UC-ZMROB73039B02_FLI.pep
HLAVHQRAQPSTTYGDEAPRQQLLAACGCCPAPPTPPRRRLLPLHGSGGSPPAFSWRPSPSAGSPSRERCQGCISWCRRRRRPCAPGRWHGQQRRRPLLQNPPRDDDDDDGSGGVRGGERQGRVRAEAAARRRAPRLHLHAAQGQAVTVSDEDGACRGCRK

SEQ ID NO: 62137 - protein, 103 aa, Zea mays
  Clone ID: CC-ZMLE189072C06_FLI.pep
LFYYCALLQMSGATLFNLSLLTSDMWAVAIRVLFYQQEINRLYYLAFTVVAIGLIIYSLNDRSSDDETAGSTEAPAQYQQLPIEDNSTRIGSSSGKCLIGSRS

SEQ ID NO: 62138 - protein, 113 aa, Zea mays
  Clone ID: UC-ZMFLB73144E02_FLI.pep
ENLSSPKAEFFRHKVDICIQILKIQFVSVVASLPCEAVAVRLLGVAAVAGRHDEVAEGLHDLELDAAPPQRRPLLLLRVADAVVLVAVLHPFLPSWCLVGSVRVRAPLVERPS

SEQ ID NO: 62139 - protein, 262 aa, Glycine max
  Clone ID: JC-GMFL02220073B03_FLI.pep
AFFDYPFGDSVLMALAPSKVSSFSGFSPKPSVGDALKNPTCSVSLSFANVKLGSRNLRVCASTVPLSGVIFEPFEEVKKGELAVPTAPQVSLARQNYADECESAINEQINVEYNASYAYHSLFAYFDRDNVALKGFAKFFKESSEEEREHAEKLMKYQNTRGGRVVLHAIKNVPSEFEHVEKGDALYAMELALSLEKLVNEKLLNVHSVADRNNDPQLADFIESEFLSEQVESIKKISEYVAQLRRVGKGHGVWHFDQRLLD

SEQ ID NO: 62140 - protein, 260 aa, Oryza sativa
  Clone ID: UC-OSFLM202006A10_FLI.pep
SSSSSSSWIFSSAMAGNRGGDAGEGEWLKVAELRATVEAQDPHAKEVDNLTLRRFLRARDHNVEKASAMLLKALRWRREAVPGGSVPEEKVQSDLDDDKVYMGGADRTGRPILLAFPAKHFSAKRDMPKFKSYCVYLLDSICARIPRGQEKFVCIVDLKGWGYSNCDIRAYIAAIEIMQNYYPERLGKALMIHVPYMFMKAWKMIYPFIDNVTRGKFVFVDDKSLQEVLHQEIDDSQIPDTLGGKLAPVSLKNNARINLD

SEQ ID NO: 62141 - protein, 98 aa, Zea mays subsp. mexicana
  Clone ID: UC-ZMFLTEOSINTE026E08_FLI.pep
SCPYFTNFMDKLLLHSHKEFSIGVTLKDRYSSREARRTAPSTRSGTAGHGTGSRARTRRGQRRCRSAGGARSGHTGSRRSPHALAPTFKALESGFRLG

SEQ ID NO: 62142 - protein, 418 aa, Oryza sativa
  Clone ID: UC-OSFLCYP022H02_FLI.pep
SPPPPPRAMASASGLVNAALPDDLLAEVFRRVAAAGGKADLDSCALVCRRWRGVERASRRAARVPVDGPDGDAVVRCVADRFPGLADVFLDEALEAIGSSCSALENLSLDNLNKCSDRSLFSIANGCKQLKSLIIKSSVKFTDRSIERVSQNCKMLQHMEINMCHIMESAALEHIGQRCINLLGLTLNSLWIDNNAFLGFGRCCFLLKSVCLANCCKISDEAISHIAQGCKNLRELSIISCPQIGDEALLSVGENCKELRELTLHGLGRLNDTGLATVDQCRFLEKLDICGCNQITDYGLTTIIRECHDLVHLNISDTKKIGDTTLAKVGEGFRKLKHLMMLRCDAISDVGLEDIARGCLQLEACGVFRCSQVTPAGVAALAGGSSRLQRIIVEKCKVPEEATGKCRMINDPILISYY

SEQ ID NO: 62143 - protein, 274 aa, Gossypium hirsutum
  Clone ID: UC-GSFLMAXXA094H12_FLI.pep
GHFSSFRMLGRPGLSRTGSFRPENLGQNALHMIGNLCFTIFVIGVLVFTIIAATYEPEDPLFHPSTKLTTFLTSTSNATFQSDNTVVKTGEDFMAANQTAFATFINVTDVVEIKEEDSLPENHEKAIVLFNPNPLLLHDTPPLSSPPSTLSFSFDSHLLSGFKNQILRAADMKSAETEENKMENEGCLAVVPWVPSQIASVESRDSEQQVPALMETDEMDVEENCSNNGSMQEEHGYELDGLKPRDALHNWAQQQHCMLPQPPQNPFTPITWSD

SEQ ID NO: 62144 - protein, 122 aa, Oryza sativa
  Clone ID: UC-OSFLCYP022H12_FLI.pep
ITFGHLHGRNLTLLIWIADHLYAVPLLDFGGRKGSHHPYSYLGYGAVHFSGLSNFKSTGLEANASSSVSASNCSAKTLSSLNFIKVIQLPSVETSATAGRLRRLVMLGNLSRNLGSTTSQKS

SEQ ID NO: 62145 - protein, 260 aa, Oryza sativa; identical to SEQ ID NO: 62140
  Clone ID: UC-OSFLM202025G02_FLI.pep

SEQ ID NO: 62146 - protein, 115 aa, Gossypium hirsutum
  Clone ID: UC-GSFLNU33B019G09_FLI.pep
KMRKPTKESELNTEPIGQNLIKLISNLCFSVFVLSVLIFTAIAITYQPPDPWLESAPSLTKLFTQTENATVGCHFFSHFLSCQTPFFFFKRQQLVTSLIWVSSKVKPHSTIYCLI

SEQ ID NO: 62147 - protein, 229 aa, Triticum aestivum
  Clone ID: UC-TSFL189012E11_FLI.pep
LGEADPSPGREGWVRWQGQRQLGQEVRRPRAGVALLAQARGGHGREADQGAGAARVRAQRARPREPRLPPAQRQAEPERARRPRPLHQQGVQRQPGQADRDHGGDLHPDPARAGAQRRPLRGHLQHLLRRLRPHHRAGALPHLRGVLPRRHRRLRRLRGRLRPGQAQPDRLPLQDLLHLLPQGHPRPAKGAALHGARPAIPHRRAHARSQGHRATRMPQQLHRLATLAR

SEQ ID NO: 62148 - protein, 234 aa, Oryza sativa
  Clone ID: UC-OSROCYP016G10_FLI.pep
RDIPEERYTNAFLGYGPEDSHFVVELTYNYGVESYDIGTAFGHFGIAVEDVAKTVDLIKAKGGTVTREPGPVKGGKSVIAFIEDPDGYKFELIERGPTPEPLCQVMLRVGDLDHAINFYEKAFGMELLRKRDNPQYKYTIAMMGYGPEDKNAVLELTYNYGVKEYDKGNAYAQIAISTDDVYKTAEVIRQNGGQITREPGPLPGINTKITACTDPDGWKTVFVDNVDFLKELEE

SEQ ID NO: 62149 - protein, 260 aa, Oryza sativa nipponbare
  Clone ID: JC-OSLELIB3474025C11_FLI.pep
SSSSSSSWIFSSAMAGNRGGDAGEGEWLKVAELRATVEAQDPHAKEVDNLTLRRFLRARDHNVEKASAMLLKALRWRREAVPGGSVPEEKVQSDLDDDKVYMGGADRTGRPILLAFPAKHFSAKRDMPKFKSYCVYLLDSICARIPRGQEKFVCIVDLKGWGYSNCDIRAYIAAIEIMQNYYPERLGKALMIHVPYMFMKAWKMIYPFIDNVTRDKFVFVDDKSLQEVLHQEIDDSQIPDTLGGKLAPVSLKNNARINLD

SEQ ID NO: 62150 - protein, 158 aa, Oryza sativa nipponbare
  Clone ID: JC-OSROLIB3475P055E12_FLI.pep
LGVVTSSLLVRLPVALSRLAGRRRQTSSSSSTRRPGPGHAMPEKEAQAAAFCGEAVIAEFESLTRDAAAVQRDTLRRILADNACAEYLRCRGLAGRTDAASFRACVPLATHADIEPYIARIADGDTSPVLTAKPITSISLSSGTTQGKRKYLPFNQEL

SEQ ID NO: 62151 - protein, 203 aa, Oryza sativa nipponbare
  Clone ID: JC-OSROLIB3475011G10_FLI.pep
QSTCRKMKIKLDFHMIKGDGDSSYAKNSSTQGKAILSTKPMVEKATKEICMDLQPRSMVVADLGCSSGANTLLFISEVIAIISEETPANNNNRECPMEVQFFLNDLPNNDLNHNFQLLEQFKQSIVRDCARRGLQHPPYYVAGVPGSFYTRLFPCNSVHIFHSSFSLMWLSQVPDLLGSSMNKGNIYSDFASHYLFTDHKITY

SEQ ID NO: 62152 - protein, 159 aa, Zea mays
  Clone ID: LIB3353-008-E10_FLI.pep
STCSLPTTEPMADQLTDDQIAEFKEAFSLFDKDGDGCITTKELGTVMRSLGQNPTEAELQDMINEVDADGNGTIDFPEFLNLMARKMKDTDSEEELKEAFRVFDKDQNGFISAAELRHVMTNLGEKLTDEEVDEMIREADVDGDGQINYEEFVKVMMAK

SEQ ID NO: 62153 - protein, 258 aa, Zea mays
  Clone ID: LIB3353-010-A12_FLI.pep
ALCGLREREAPAAATGQDEPPPQTERAGDQCVRSWWRAWKSLAGGKQGFGRMVSLSTWFRYAAQKFEYCVSLSLKKYNDVGRISSTQLTDVLNKNLFQGKLTYVCPTKGEEAMAPIASPTGGAVLVRKLANLSPTQVFVGDVVLLKDPEKSDDLIIRRLAALEGYEMVSNDEKDEPFVLEKDQCWVLADNLALKPKEARDSRLFGPVPMTDILGRVIYSLRTAVDHGLVENSGMAMKQDGPVLAVELDVEEMAKNIKP

SEQ ID NO: 62154 - protein, 299 aa, Zea mays
  Clone ID: LIB3354-002-A7_FLI.pep
HVATRKGNTIMVQTLISVEGIEINAVNRAGETAFAIADKQGNEELVNILREVGGGTAKEQVNPPNPAKQLKQTVSDIRHDVQSQMKQTRQTKMQFQKIKKRIQKLHIGGLNNAINSNTVVAVLIATVAFAAIFQLPGNFLEDMTQAPDPDMTLGQALIASDPAFIIFLVFDALALFISLAVVVVQTSLIVVEQKAKKKMVFVINKLMWLACLCISAAFIALTYVVVGRDEEWLAWCTMAIGTVTMVATVGSMCYCVVAHRMEEKSMRKIRRTSMSQSWSISIDSEAELMNSEYKKMYAL

SEQ ID NO: 62155 - protein, 260 aa, Zea mays
  Clone ID: LIB3354-011-C4_FLI.pep
APANLTHRNTKAPKAQTHHLPMENGDETLASPTAAAETDALNGGVAEEEQVPITHPAKSYVTLADDNPAPNGGVVKEEEGGAHTTAKSYAAVAAQAEIEDLRAAKLDLEEKLAEARRENKSLAEETHRSEGIFTQAREEVTIAEFAATSAEKEVASLRAEVERLDAVLRIEKGEHELDKQRHEKVAKEVDAVRQEKLKLEEIRALKASATAAATTKEREAAPASEAPKEGEVAWLGMAVAAAAGAAGTAAIMLVYLRLKR

SEQ ID NO: 62156 - protein, 215 aa, Zea mays
  Clone ID: LIB3354-049-B8_FLI.pep
RSGGGGAKAGEGEGAREGAPAMVHVNFYRNYGKTFKKPRRPYEKERLDAELKLVGEYGLRCKRELWRVQYALSRIRNAARHLLTLDEKNPRRIFEGEALLRRMNRYGLLAEGQNKLDYVLALTAENFLARRLQTLVFKAGMAKSIHHARVLIKQRHIRVGRQIVNVPSFMVRVESEKHIDFSLSSPFGGGPAGRVKRKNQKKASGGGDAGDEDEE

SEQ ID NO: 62157 - protein, 332 aa, Zea mays
  Clone ID: LIB3354-050-B7_FLI.pep
LCEPHRPHTPPAGHIGPDGDSKMTAGQLLRTEPSAQPQRVRHSTPPAALQADIVPSYPPPESDGDESWVWSQIKAEARRDADAEPALASFLYATVLSHASLDRSLAFHLANKLCSSTLLSTLLYDLFVASLAEHPSVRAAAVADLIAARSRDPACAGFAHCLLNYKGFLAVQAHRVAHVLWAQGRRALALALQSRVAEVFAVDIHPAATVGRGILLDHATGVVVGETAVVGDNVSILHHVTLGGTGKAVGDRHPKIGDGVLIGAGATVLGNVRIGAGAKVGAGSVVLIDVPPRSTAVGNPARLIGGKKGEEVMPGESMDHTSFIQQWSDYII

SEQ ID NO: 62158 - protein, 313 aa, Zea mays
  Clone ID: LIB3354-055-A9_FLI.pep
GILTLKYPIEHGIVNNWDDMEKIWHHTFYNELRVSPEDHPVLLTEAPLNPKANREKMTQIMFETFECPAMYVAIQAVLSLYASGRTTGIVMDSGDGVSHTVPIYEGYTLPHAILRLDLAGRDLTDHLMKILTERGYSLTTSAEREIVRDIKEKLAYVALDYEQELETARSSSSVEKSYEMPDGQVITIGSERFRCPEVLFQPSLVGMESPGVHEATYNSIMKCDVDIRKDLYGNVVLSGGSTMFPGIADRMSKEITSLAPSSMKVKVIAPPERKYSVWIGGSILASLSTFQQMWISKGEYDETGPGIVHMKCF

SEQ ID NO: 62159 - protein, 292 aa, Zea mays
  Clone ID: LIB3354-061-C7_FLI.pep
VNKRCSNQDSRLEAVHCPQVSTALALPRERDIPPPEPETSRLVDSLCLLPLLSSPPSHAHAAGLSFDLLTMKQNPERPRSGSRPAQPVLGRFAVEPRLPAPLNDDGVCAPLLLAGGVGRNGDVDGGNEVLLGPWALRLVGSPPKNPAPSRSSWNMSTNSCCSSSKLSCTLTDGRWRGLAHHVGHVSVVVLAVVDADVVEEPLVGVGEHGVGALDLLEPLLGLLHARRAAGRRAPVRMPYHGEPPVRDPELGVGALPVEPEHGVEVGARSCLLVLDVAALTGSHVGWRRRAPR

SEQ ID NO: 62160 - protein, 231 aa, Zea mays; identical to SEQ ID NO: 43391
  Clone ID: LIB3332-016-A7_FLI.pep

SEQ ID NO: 62161 - protein, 91 aa, Zea mays
  Clone ID: LIB3332-017-D5_FLI.pep
TWQDRVPKLFGFKRLAGLGKLLQLFINLCFRQAIQVHASLHTHIVARPELGLDTGALADKEGEGGVASLDVTIVLLHELTGGGAGRGGLTE

SEQ ID NO: 62162 - protein, 239 aa, Zea mays; identical to SEQ ID NO: 41895
  Clone ID: LIB3332-022-A3_FLI.pep

SEQ ID NO: 62163 - protein, 206 aa, Zea mays
  Clone ID: LIB3332-032-H5_FLI.pep
LIIVGGGHAATIAVRAAGKDLIKPSAVAAVAPTWAGPLPIVFGRGSDMETRYGLLRGTLRAPALGWMMYNVLVSNEKSIQSQYKSHVYANPDNVTPAIIESRYELTKRKGARFVPAAFLTGLLDPVQSREEFLQLFAKLDGDVPVLVVSTVNAPKRSKAEMEALRGSKGVTKFVEVAGALLPQEEYPLAVAEELYSFLQESFAARR

SEQ ID NO: 62164 - protein, 198 aa, Zea mays
  Clone ID: LIB3332-034-B3_FLI.pep
NPSPCDPEIPKPAEEGMQQPMHMQPQAPAITPAAGISTEQIQKYLDENKQLILAILENQNLGKLAECAQYQSQLQKNLLYLAAIADAQPQTAVSRPQMAPPGGSPGVGQYMSQVPMFPPRTPLTPQQMQEQQLQQQQAQLLNFSGQMVARPGMVNGMAQSMQAQLPPGVNKQDAGGVASEPSGTESHRSTGGDDGGSD

SEQ ID NO: 62165 - protein, 121 aa, Zea mays
  Clone ID: LIB3353-009-E5_FLI.pep
CCFRDCLFVCIYNISRHMLNLQQSGSPTPSPEPSPSVGGGKWCVAKSGASATDLQNNINYACAYVDCRPIQSGGACLDPNNIHSHASYVMNAYYQANGMHDYDCDFKGTGVVTSSDPSKQL

SEQ ID NO: 62166 - protein, 98 aa, Zea mays
  Clone ID: LIB3353-015-D12_FLI.pep
PCAISHPAHKTNIFITMPAMRAHPTWQRPSRCHISLLFHVSFSPLLSRTLPCLQLGTDRRDQHLSDLIIIEISSNNYQYKEISSSRGAERRSNNPSTL

SEQ ID NO: 62167 - protein, 238 aa, Zea mays
  Clone ID: LIB3354-002-F11_FLI.pep
GKWSLLKLARRMMENFCAGMGASSSREWSMLDGLTGSMGKDVRVMVQNSVDEPGVPPGVVLSVATAVWLPVTPERLFNFLRDEELRAEWDILSNGGPMQQVLRIIKGQLDGNSVAMLRADHTDSHLNSILILQETCTDRSGAMVVYAPVDFPAMQLVLGGGDSKNVALLPSGFVILPAGSSAGGVGHKSRGSLLTVAFQILVNSQPTAKLTVESVDTVYSLISCTIEKIKAALHCDVC

SEQ ID NO: 62168 - protein, 229 aa, Zea mays
  Clone ID: LIB3354-003-B5_FLI.pep
SVSLSPPETGFRTESGLALEPRLHAVRPAAMEDEEHEVYGQEIPVDGEDVDMSAGDDATKLQELDEMKRRLKEMEEEAAALREMQAKVAKDMQDPNATTSENKEEMDSRSVFVGNVDYACTPEEVQQHFNSCGTVNRVTILTDKFGQPKGFAYVEFVEVEAVQEAIKLNESELHGRQLKVAPKRTNVPGMKQPRGRGFNPYRPYGYSPYGYGYGYGRFPRFRRPRRPYF

SEQ ID NO: 62169 - protein, 186 aa, Zea mays; identical to SEQ ID NO: 59938
  Clone ID: LIB3354-003-F12_FLI.pep

SEQ ID NO: 62170 - protein, 441 aa, Zea mays
  Clone ID: LIB3354-032-D11_FLI.pep
AIVHCWHTRDTARRRPQRAREGAGAGCLLERLVTRPLASPPKLSLPRPPILLALTSKSPGPMGRPPSAGAPAFRFLPSEVAEMEARLLQLNNGIPTRAVLQTLADKFSASPERAGKVAIQPKQVWNWFQNRRYSHRAKTPRATSSPPAKMTPSGADHQQHAANASAFRAAQLSSVAAAHHGSSSTGKNPVESVSVEFEAKSARDGAWYDVAAFLSHRLFESGDPEVRVRFSGFGAEEDEWINVRKCVRQRSLPCEATECVAVLPGDLILCFQEGKDQALYYDAHVLDAQRRRHDVRGCRCRFLVRYDHDSSEEIVPLRKVCRRPETDYRLQILHAARAAATNADVHTPPKEVKVELASTDKSPAEQKPQKQHKMMDVNTDEVTMVSTLEQDETPGKTVAPVPSATAETRNSSSDTVMKGAEASSVVEDDDEVQAVDKMKEG

SEQ ID NO: 62171 - protein, 258 aa, Zea mays
  Clone ID: LIB3354-043-D9_FLI.pep
SRCPAATATGTGSCLPLPLPPMSPRLPSLSATPTTTRASPPLLPPLLPPRRPAVRRSISVILFPIAVTFYVTWWFFRFVDGFFSPIYAHLGIKIFGLGFVTSISFIFVVGLFMSSWLGASILGLGEWFIKRMPFVRHIYDASKQISAAISPDQNKHAFKEVVIIRHPRIGEYAFGFITSEVLLQGYSSEEQMYCVYVPTNHLYIGDIFLVSSSDVIRPNMSVREGIEIVVSVGTSMPQVLSILETEPNQLNRIRSTRS

SEQ ID NO: 62172 - protein, 50 aa, Zea mays
  Clone ID: LIB3354-043-F3_FLI.pep
QNMYITCDQPLTVIPRDTPLRNHCRHLYINCPVTTIKDNSSVICILSVSL

SEQ ID NO: 62173 - protein, 240 aa, Zea mays
  Clone ID: LIB3354-047-F3_FLI.pep
TLSGSFPYARFSLVAQHQSTSEEPSPVPGMECVLGVVGRDFALVAADTSAVQSILVHKTDEDKVMVLDSQKLMGASGEPGDRVQFTEFIQKNLHLYQFRNTIPLSTAAAANFTRGELATALRKNPYMVNIILGGYDKDVGASLYYIDYIATLHKIDKGAFGYGSYFCLSLMDKLYHPDMTVEEAVDLVDKCIKEIRLRLVVAPQNFVIKIVDKDGAREYARRELVGDNAPAEAATAVVAA

SEQ ID NO: 62174 - protein, 89 aa, Zea mays
  Clone ID: LIB3354-049-H5_FLI.pep
RHGRRARHHRKTHDRRPNGNAYEVNNPDTYGNSSIYGGTSWRFPSSEVDVPSFSHDLGNVDPNMKSDISANYMGNYSVSNNQPSRGITS

SEQ ID NO: 62175 - protein, 173 aa, Zea mays
  Clone ID: LIB3354-051-F4_FLI.pep
LASYSCYSRRARSSDSDCNEEGEEMVGSGADGGGGGDDARSKEAAGMMALHEALRNVCLDSDWTYSVFWTIRPRPRCRGGNGCMVGDDNGSLMLMWEDGFCRPRVAECLADMSGGEDPVRKAFIKMSIQLYNYGEGWVLYWVGAVQVQVQAVEFGRSRVVCNFFPTFQSPLPA

SEQ ID NO: 62176 - protein, 198 aa, Zea mays
  Clone ID: LIB3354-056-E1_FLI.pep
VVRSIMAVTMSPLEALRALTALGLETDAWVITSSMSLASTPVSSTSSSLSSWPGPDVSGLVIWLKSGALNCSAAWVCSWELRSSILASPNMTYVSEFGLLNTSGFEMTNSIFLLFFTVTRLTPVMGFMPSFSMALRLFFSLLLCFDLPLASPSCPSSSSSSSSSSSSSSSSSSTTTSSAWSSKTHLRNHSTSSSWICS

SEQ ID NO: 62177 - protein, 293 aa, Zea mays; identical to SEQ ID NO: 48478
  Clone ID: LIB3354-063-F7_FLI.pep

SEQ ID NO: 62178 - protein, 220 aa, Zea mays
  Clone ID: LIB3354-066-D5_FLI.pep
RLLNLYQIPCATAFLECYATCAINTVLAVCCRFATYPGASNCCKLGKHMMTEMLKSKQHAGKLICSSMGARMDSEPKSWRILADVLYDLGTALEVVSPLCTQLFLEVAGLGNFAKGMAVVAARATRLPIYSSFAKEGNLSDLFAKGEAISTLFNVMGIGAGIGLASTVCSTTQGKLIAGPLLSAVHIYGVIQEMRATPVNTLNPQRTAMIVADFIKVWYL

SEQ ID NO: 62179 - protein, 214 aa, Zea mays
  Clone ID: LIB3354-067-D2_FLI.pep
SVSYSPVSENYNLASTRLITSYMAYIQWKKTTRPPGWLDLIHPCLYSKEQRRGRGRRISKKPQEEGRRPSTLNTQLKEHTRILPARTPRPSVVPGPAGLSPAVVVAARRGGEEGRHVGAGGEADVVVRRQRRLRRRVVAEEGVADGRLPAAGEVEDGPVQERQQALHGLVLWFRSRTGSESRATRTPTTTTATVVCVWLVWAASAAAAGVYEGD

SEQ ID NO: 62180 - protein, 255 aa, Zea mays
  Clone ID: LIB3354-072-C5_FLI.pep
YSTTASSTSSAPYGGYGGGGEGWGYDSLKNFRQISPAVQTHLKLVYLTLCVALASSAVGAYLHVVWNIGGMLTMLGCVASIAWLFSVPVYEERKRYWLLIAAALLEGASVGPLIKLAVEFDPSILVTAFVGTAIAFACFSCAAVVAKRREYLYLGGLLSSGLSILLWLQFAASIFGQSTSSFMFEVYFGLLIFLGYMVYDTQEVIERAHRGDMDYIKHALTLFTDFVAVLVRILVIMLKNAADKSEDKRRKRRRW

SEQ ID NO: 62181 - protein, 332 aa, Zea mays
  Clone ID: LIB3354-073-C9_FLI.pep
GPSSIADEVVVALLREPSPPPPTGAPVCSSSLKAMDHDRLNLPSTSAISLEVMGHQLHISQDPNSKHHGTTVWDASMVFVKFLEKNSRKGRFCPSKLKGKRVIELGAGCGLAGFGMALLGGDVTTTDQAEVLPLLMRNVERNRSWISQSNPDSDSVGSITVAELDWGNKEHIKAVEPPFDYIVGTDVVYSEHLLQPLMETITALSGPKTKILLGYEIRSTTVHEKMMEMWKSNFIVKTVSRSKMDVKYQHPSIHLYMMDLKAPLIPEVEAADNGNYEEEVEVAVNQEEDEDPGVKSESCSGSSPEAKSGSLDDWEIRRCGAMAARLLKDVKL

SEQ ID NO: 62182 - protein, 172 aa, Zea mays
  Clone ID: LIB3354-075-G7_FLI.pep
YQQMQEVAGDRGGYLHGRGALDSDDLLYLKEQMEAEEDAERLLRHTEKRAFAAFKKAAILADSTPAVPVALRVEPKPKSDIRQQDLLKNIVGIKPKRPKVSSPSQPPDSNKPKHTEEDLVSELSSSRNPLGPSHGTANPDHTAPRLDERTEVKQQNRAGSLLGLAYESSDEE

SEQ ID NO: 62183 - protein, 277 aa, Zea mays
  Clone ID: LIB3354-078-G8_FLI.pep
KIQDKEGIPPDQQRLIFAGKQLEDGRTLADYNIQKESTLHLVLRLRGGMQIFVKTLTGKTITLEVESSDTIDNVKAKIQDKEGIPPDQQRLIFAGKQLEDGRTLADYNIQKESTLHLVLRLRGGMQIFVKTLTGKTITLEVESSDTIDNVKAKIQDKEGIPPDQQRLIFAGKQLEDGRTLADYNIQKESTLHLVLRLRGGMQIFVKTLTGKTITLEVESSDTIDNVKAKIQDKEGIPPDQQRLIFAGKQLEDGRTLADYNIQKESTLHLVLRLRGGY

SEQ ID NO: 62184 - protein, 222 aa, Zea mays
  Clone ID: LIB3354-084-F3_FLI.pep
HVSARQDPRPLREPVLAPRRGRSAAQGRAVRAGPGRPGQQERAAARQEPCPQEGARAPPWRQGRLRVPPHRRVRRRGLRRAVHPAGRPPRPCRRPFLGELLGHQSTYAAAAGHRPLTRSCDFLNVVSLGRTYAVLPAVLAGVLGGGRGAEGRGEGGQGEPGAPGGAARREELLRRRHARVPRHSRVHVGSLDRRARGGDWSGLAGRRRVPRSMPVGQGLQLQ

SEQ ID NO: 62185 - protein, 229 aa, Zea mays
  Clone ID: LIB3354-086-H10_FLI.pep
YIGLSIKQGSNQYADVNLNDSSVRQVKFYQYIVLMLNSPPLWMLATPREKKIREERAPALLELLDEGEVVEHLLDLLVPGVADEPAAGLEGGDERGGLAAGVGAEVAERAELELGEAVAAQRLADLAHGVGVLVAAESLHVLQRLLEHLRHLRRRVRLRRRVLLDLLVLVLQDDRHLAVHQALGLEELFADLELRGVLLLLARHRWWLVVLPTGAKSLAGVGRRGMGLG

SEQ ID NO: 62186 - protein, 100 aa, Zea mays
  Clone ID: LIB3354-088-C9_FLI.pep
AKNRGNKAMLSFLLLSFSLTTLFVALPRIPQVPQELGVHPLGGGLAVALGFLNAVLVRLERLVVRRVILRLGHFFRMPIRMRSSGVPENYRSDGSRETNG

SEQ ID NO: 62187 - protein, 163 aa, Zea mays
  Clone ID: LIB3354-090-F10_FLI.pep
RPCAISQGSMANSNLPRRIIKETQRLLSEPAPGISASPSEENMRYFNVMILGPAQSPYEGGVFKLELFLPEEYPMAAPKVRFLTKIYHPNIDKLGRICLDILKDKWSPALQIRTVLLSIQALLSAPNPDDPLSDNIAKHWKSNEAEAFETAKEWTRLYASGAL

SEQ ID NO: 62188 - protein, 294 aa, Zea mays
  Clone ID: LIB3354-104-C11_FLI.pep
LDSRIGSLASSSLPIDIIAMSGISLAVAPRSDPDHGSERQPTAMLGGVMGSLRVIELQLVAFIMVFSASGLVPLIDLVFPVATTVYLLAISRLAFPPLHATKSSKPDDAAGSPAASSQSSPEIFRGSKLFQAYVVVGTTVGLFLPLAHVLGGFARGDDAAVRSATPHLFLLSCQILTENVVGSLGAFSPPVRALVPLLYTVRRVFVILDWAYDAWASTAQDAAWVWFGRCLAAANLLYFSANLFVFLIPRFLPRAFEKYFRMRDELCAKTAEDKHAREGVVGAAKLEVSSKKAD

SEQ ID NO: 62189 - protein, 247 aa, Zea mays
  Clone ID: LIB3354-106-H12_FLI.pep
YNITHTLALCSFHCLVQNSDTSVALGCVASIMFLLGTRVACSAPQSGSDFWTDPTEAIRRAYHRTDRKLLKKTAGDDSGEGMKKGRRRGGSTAVTAILINGEELVVANVGDSRAVLCDAGGRARQLSVDHEPLRERRAIEARGGFVTEIHGDVPRVDAQLAMARAFGDRSLKEHISSDPDVAIEDVGDGAELLVLASDGLWKVMSNQEAVDEARGIEDARKAAVRLVDEAVRRGSKDDISCIVVRLH

SEQ ID NO: 62190 - protein, 175 aa, Zea mays; identical to SEQ ID NO: 36984
  Clone ID: LIB3354-108-D10_FLI.pep

SEQ ID NO: 62191 - protein, 168 aa, Zea mays
  Clone ID: LIB143-031-G3_FLI.pep
TTDKNMAGKAGGLKGVALIGGSANSTVAGVIHFFEDPSTRYTEVRGKVTGLTPGRHGFHIHVFGDTTNGCNSTGPHFNPHNKPHGAPFDDERHLGDLGNIVANEDGDAEVFIRDLQISLSGPHSILGRAVVVHADPDDLGRGGHELSKSTGNAGARIGCGIIGIQSSV

SEQ ID NO: 62192 - protein, 201 aa, Zea mays
  Clone ID: LIB189-021-H11_FLI.pep
PTTKGRRGTPRHRTGLDTWRKEKQRSGMGTSPVIPATMLVVALLVASSTVCFGATATDTDTDGAIRLPSSSGAVGRPWECCDYVTKEPFIRPPRWRCNDVVDKCSADCQECEESPAGDGFVCRDWIFSLLEPPVCTPRPWDCCDFAVCTRDYIPYCQCGDVVESCPSNCKACKLVESDPPRYRCLDVFHGYPGPKCTPWIS

SEQ ID NO: 62193 - protein, 104 aa, Zea mays
  Clone ID: LIB3059-062-F4_FLI.pep
YCSSYHLSPMAKCSSFQGLFWLLSMILLASFVAHARTTSGHTKEDSNARNMTMTKTRASGNILVSRNDDGPCYLDSGLNEYVCRKTNKCYKSLVLCVASCQPSS

SEQ ID NO: 62194 - protein, 216 aa, Zea mays
  Clone ID: LIB3060-046-G11_FLI.pep
KRYRYIFLVWKQLAGMDLMQRIEAINRHSTEPYEQAEKCLNTNYHGIKAVTKALLPLLQSSSHGRIVNLSSYYGLLRFFSGDELKEELSSIDGLSKQRLDELSELFLKDFKDGQLEAQGWPNEGGFAAYKASKALANAYSRILAKEHPSLRINCVHPGYVQTDMNFGSGHLTVEEGARAGSSHAGHGAQGRRHWRVFRPHRGCVLRVICSPLHSHR

SEQ ID NO: 62195 - protein, 361 aa, Zea mays
  Clone ID: LIB3060-062-H1_FLI.pep
TTTHATATRDTPVSAVASAMAANVALVLLSSCSPSTSAAAASLLPRRRFLPSRRRRASSRATTIMSALGDDPIREWILTEGKATQIKGIRSIGGGCINSAQRYDTDAGPFFVKTNSRIGPEMFEGEALGLKAMYDTKSIRVPLPYKVGSLPTGGSFIIMEFIEFGRSRGDQSDLGRKLAEMHKAAKSDKGYGFPVDNTIGSTPQINTWTDDWIEFYSKHRLGYQLELASRRYGDSAILEKGQRLIKNIRPLFDGAVIEPCLLHGDLWSGNISSDSNGDPVILDPACYYGHNEAEFGMSWCAGFGGDFYNAYFQVMPKQPGFEKRRDLYLLYHYLNHYNLFGSGYRSSAMSIIEDYLYVLAI

SEQ ID NO: 62196 - protein, 190 aa, Zea mays
  Clone ID: LIB3060-067-D10_FLI.pep
SAMALASGTCRPLLGGPASTARLHLAVSSSSTACSIRFPRGAGGGRAAVSLRAPAPPAAAAATSGSIAPAISLTEKALKHLNKMRAERNEDLCLRIGVKQGGCSGMSYTMEFENRADASPDDSVVEYDGFAIVCDPKSLLFMFGMELDYSNALIGGGFSFQNPNATKTCGCGKSFATGKESEAAAKACNN

SEQ ID NO: 62197 - protein, 146 aa, Zea mays
  Clone ID: 700334139_FLI.pep
EAASLLWLWYRMVFFSFRVLVSFDLVLCSHSLLLQVLQQGSSRAPWASCISCCGTHLHSPGTHRSLCGTDILYIKRGMNLRLLEMRTQALIFTALATIHRSLWHRSSETQSEENAVAGPGIQKELVISVIVAYRCNHPSCIAISIC

SEQ ID NO: 62198 - protein, 246 aa, Zea mays
  Clone ID: 700464583_FLI.pep
LQSRNPSRRSLRVLLCLPQSRNEEPSRHLSSSPERSPLPMDVRPSQLVCDAVEAARAAAVAASEARCAAVIAEKEAKAAVEFAAVAVNKVEAVKVSSNLENVDFKYHVNIKNSLRYSIQEMRRQCTMLQSVKKLCSTIPEVEGGKVGKVCGHLEHVCKMLENTSIVCEQDLETKNPTWDLYDNPSVDDEHPLDDDEIGDGYSTEDPELWEMVFDDLKWEENKANVSFEEHYRVINYRFEEINDRNM

SEQ ID NO: 62199 - protein, 215 aa, Zea mays
  Clone ID: LIB3205-122-F11_FLI.pep
LTSLDHPPVLSSPASLNITPASRQENGGHYSAPLAPGHRPPRRRRAGVRKRLHGRRLVRVEVRSGLRCLGQGQAVRHRRHALVPVQLGALGAGGERGGPRRVLAEQPAALAPGPEHHHPAHQGRHPLLHLRRPRTLRLGHEGRHHRLRRRRRQQQQRRQHRDAVGSLRAGDEHEAGVRWRDDDGRVGLQRGWQRRPPRDGPAVRGRGPRCNDGLN

SEQ ID NO: 62200 - protein, 219 aa, Zea mays
  Clone ID: LIB3206-117-D12_FLI.pep
FELLVLSPLSITQFLSRSRRRSPAGTQQSRAGSVGAAWGTARRRRRRRCCSSTRAGGWSGSTGQPAPPRSCAPTQATTSRSSRSASPRSGRTPPAASGAPCASRASSCSSPRRRCSSATSTASSPPRRWRGRCGRGRRRSRGKRSSCLSRGRVSRGARPRGRTTTTRQPWTPALISWRVRTTAAGAPVQGNGSGGRRCRASKRPRPDVSSAQYTHTTQP

SEQ ID NO: 62201 - protein, 243 aa, Zea mays
  Clone ID: LIB3227-026-C8_FLI.pep
SQLLVALLPTFVDGRRRRFLVQRTALTMAETVGFASGDAAAWRAALAAYDRRLAALDKPDLVAVDSFYRHDLPALLRCRDPDPFLAKPELVRLLQWKLSRGKWRPRLMDFVKGLDDAVVESASRKAFAALPDLRRAITELTVLKGVGPATASAVLAAYAPDVAPFMSDEAMVAALGNSKEYTLKQYLAFADKLQAKAKELSIGEESFTPSDVERALWSSAIASKSPPSGNPKRESKMHGKRKR

SEQ ID NO: 62202 - protein, 305 aa, Zea mays
  Clone ID: LIB3245-009-F9_FLI.pep
GVAPVSAAAVQRLVRAKQHAARDQVPEVAVVEGVGRLRLQRRQVGVAARVGADGAPEARREAGVGGGGVVVDVGAEHRAAGAPHRVRARQRRQVPRVQALGAERGQQRRQRRVRRRQVGVRRARARVPRVPPPQRHRPPRPAQQVDGVARCEGEDVGAGDGGLAGRLHLGLDGVDDLVPAQRVGVGPRVLLPGEVTGHVVQQDGGVAAIDEAVVEEEAEEGRPHARLRPDGARHAAAHDGLQPRARRVVEPRRQRRRRLRAGRERERRDNGRCEPERLEGQQGRTSHRRPRTHGVRVEAKAKATA

SEQ ID NO: 62203 - protein, 193 aa, Zea mays
  Clone ID: LIB3245-013-C3_FLI.pep
REEPASKAPTTTPQVPTQPTLSRIQVYQMTRHVSSRCFKCYNMLNNRQKVEWNNRGFSTVHALVAAAVSFYLIMISDLFNEDAHNSIIIDRKSWLSDCMFGVSIGYFLTDLTMIMLYFPSLGGNEYLLHHGLSMYAIGLALLSGKAHMYILMVLFTEITTPFVNLRWYLDVAGQKTCNLYLYNGVALFVGWLM

SEQ ID NO: 62204 - protein, 258 aa, Zea mays
  Clone ID: LIB3245-089-C10_FLI.pep
SYMHAPPSRARAAAAACCSQGARLHDGYLISKRQLGALESQDVGGAAGFCRRIQRLPGHDGVDLPEQREEGALDVVAAEGRRLREEEPLLLREGGGLVRVHRAAAGVAGQVGLVADEHDDDGLVGVGAQLGDPARDVVEGAAAGDVVDEHGAERAAVVGAGDRAVALLAGGVPDLGLDAVARDVDGACLELDADGRLGVQEELVAGEAPQQLRLPHRRVADHHDLEHVVLLHLRCTLLLTILLAAAANGFLLRPAGRL

SEQ ID NO: 62205 - protein, 193 aa, Zea mays
  Clone ID: LIB3245-093-A5_FLI.pep
AAKASPSPRSTPIKRYRRASQSPAPRGSRLHQPSKHPSFQRGDNPRSASPSPPNRNCVRSRKLPGSYQRRKGFYSLAWRNRTRGRATRREREIERERERAGYPSVSPAAMTSCSGNATVACRDDAQPHGDAPCVIVYPLLAKTGEVHIPVAGDEAPAVPVLTSKSPGRLATAVKEALSVSLGAAFPMTPLVSS

SEQ ID NO: 62206 - protein, 212 aa, Zea mays
  Clone ID: LIB3245-114-H4_FLI.pep
HTAKALCKIIIKLSSIIMAAITAGLLVLLAAAVAAPAHATDYTVGDSSGWSSGVDYATWASGKTFAAGDNLVFQYSAMHTVAEVSSADYGACSASNSIQSYSDQNTKIALTAPGTRYFICGTPGHCGNGMKLAVTVAAGTATTTPASSPPAADSPPETATPSGSTPTATTSPSAPTTKPTSSSTGAACGGEARLAMGVLAWAAGLAGLALMG

SEQ ID NO: 62207 - protein, 163 aa, Zea mays
  Clone ID: LIB3245-191-D8_FLI.pep
RARWMASGGAARGRLAEERKAWRKSHPLGFVAKPAMLPDGSVNLMLWNCVVPGKEGTDWEGGYFPVTLHFTENYPSNPPTCKFPRRFFHVNVYDSGDVCLSILGDAWAPSITVRQILIGIQELLENPNPASPAQDFAYDVFAENMPEYKRRVREQAKRYPSLV

SEQ ID NO: 62208 - protein, 288 aa, Zea mays
  Clone ID: LIB3245-210-D5_FLI.pep
IRNKSVRKEAPRWQNTHASLLYCTWSDSPPQSCHGGERHDAGRSSSDASWGPSRARGRRRRRRPRRSLSRRRIRHSIRRGLLLLLALRRGRGRRGDRRAVERPRQQHLADLVDDEPVPGVKRRGVERGVDDPRGDVDAGAVRGEVERVLAPAGVASLRPQRVADGLELRGGERRGHDVELHQRRLLLVGEGVERAGGERGEGAVGRREHREPAVGRLALELVGDLLRLPRRLQQLEELGELPGLAQDRRDGLGRRGGWGRRRRCLAARQRRHGRQQGDDGEEKGGGEA

SEQ ID NO: 62209 - protein, 155 aa, Zea mays
  Clone ID: LIB3245-279-E4_FLI.pep
RQPSDGSSSTHPRAATPAKNTRRRALPMATSDELAQIDISKEEKDKLVAEVMRYVLFKTHQSSDCPIKREELTGIITKNYRQRALPTLVINEAKERLAATFGYEMRELQRTRAPATRSGRPAQRQCKASFFFLSFIIILFLSSLYMSTTVVTGWQ

SEQ ID NO: 62210 - protein, 255 aa, Zea mays
  Clone ID: LIB3245-289-C8_FLI.pep
EHTSSLEQHRSSIRPRTPRDPIARVGLHRSATATMAMSYTTLHYFAVSCALLVASVSSLPPPAVFQVGDERGWTVPANGTETYNHWAKRNRFQVGDVLDFKYGANDSVLLVAHDDYKQCSTETPLGRFTGGDTKFALDRYGPVYFVSGVAGHCEAGQRMIVRVIRPGASAPRGAPVAAPATPPTASGSGRSGAPSPATSPAGSGSGSSSTSPSPSPSPSPLPQASGASRRVLVSSVAVGLVLLVACAITLSSVVA

SEQ ID NO: 62211 - protein, 211 aa, Zea mays
  Clone ID: LIB3245-307-A5_FLI.pep
RRVNHMKSKNEVTYFKIIVLGDIDVGKTSLLVRYVDKTFDSKTISTVSFDYKEPDVQINNAPVKVRLWDTAGQERFRTITTSFYRGAHGVVLAYDVTNRQSFENLSSWALDIDKYAQNGAKKLLIGCKIDNVAKRKVSFEEAKSFANENDLEYEETSAKEGTNVDNAFMKLIQKIYECPETNPNYANNNNNNIAKVGAHSFEKSSSNKCAC

SEQ ID NO: 62212 - protein, 367 aa, Zea mays
  Clone ID: LIB3245-311-F7_FLI.pep
DHHNPNSNMKLFIGLVLLFFVCSSFAGDVLELTPENFDTVLDGSRPALVEFFAPWCGHCKNLAPEYEKLATAFKKAGDKVVIASVDADKYRELGSRFDVKGFPTIFYFKSGNVAEKEQYNGDRSAEGMAKFINEQAGTNARIVKPPSFVKVLDATNFDSIVGDSSKNVLVEFYAPWCGHCKSLAPKYEELGAVYSNEKEVVIAKIDCDAEGNNAIASRFGVTGFPTLKWFPKGRKSEKEEEAYNGERTVEGFVNFINERAGTKRTIAGGFKEDYGRLSFFDDLVNTLVAGDNSAIAAAENKAKELTGQDREFADIYVRFMKVYQKRGSSFPKEEIQRLGRLLQGSGVTRAKRDEFVLKTNILTSFTD

SEQ ID NO: 62213 - protein, 143 aa, Zea mays
  Clone ID: LIB3245-316-H12_FLI.pep
EIRTGHECKITGGPARRSPPRTPPPARTPASPPRTATPPAAACPSSAPPHSIARRRRGAGRGAEERRPWRRNRTLLPLGSFPPSLPPGVRWSPGPALLAEATATLGPGTESTNHSTLERETERSEGERKTVPLMAREHAVLDL

SEQ ID NO: 62214 - protein, 245 aa, Zea mays
  Clone ID: LIB3245-342-B4_FLI.pep
GREAMAEMEPSIGNHMAEDQPTPAASTVEEAAMDADTSGERRSAAALVGLLRGFLAVQQRRAEAYSTLRRGFSEYMAYGGELAYQQLCGNITAEFNDCSKQVLEIISLLSMPEFSRSDLADLLKGVQAHEKEKLHLTAKIQVLKKAGRPSERLVNHADCRSRSMAQHVCVHVKEITEAAGTEDAEADAEYDAALKEAIQGVQVAVSSINEHMEEVRYEIDGLEAETIGSKWSEVEEAFPGTLSIK

SEQ ID NO: 62215 - protein, 174 aa, Zea mays
  Clone ID: LIB3245-360-F9_FLI.pep
KKNRHTSLFALSGRFCSIPPPASRKGIRRSGAMGEQVVTEQIQRKLEEVNATVQQHLAGVQDHINFTMQQAYFKCAYGCFDRRHTQEAISNCVENCSVPVLAANNIFESEMAKFQGMLNRSLRVCQDKFEAANPQKLKSDATRELESCVNRSIDDSLRVLPHVVDQIKSTLKIN

SEQ ID NO: 62216 - protein, 143 aa, Zea mays
  Clone ID: LIB3245-373-A11_FLI.pep
ATTKRAVQTFGKKKTAIAVAYVTDGKGMIRVNGQPLKLVKPEILQLKLWEPVLLLGKDAFSNIDIRVRVKGGGYTSQVYAIRQSIAKALIAWTQKYVDEATKATLRETLVTYDRNLLVADPRRCEPKKFGGRGARARFQKSYR

SEQ ID NO: 62217 - protein, 135 aa, Zea mays
  Clone ID: LIB3245-381-H5_FLI.pep
DKAPVQIRTRKFIRNVLLGRRQCIVDVIHPGRANVSRSELQEKLGQLFKVSETNLIYVFGFRTAFGGGSSTGFALIYDSVEAAKKFEPRYRLARNGLAKKREGSRKQIKEKKNRQKKVWGVGRRIARHKAKKNAD

SEQ ID NO: 62218 - protein, 254 aa, Zea mays
  Clone ID: LIB3245-382-A9_FLI.pep
VAAAPLATKAKTATKEVANPLFEKRPRNFAIGNDVQPKRDLTRYVKWPFYVRLQRQRAILKKRLKVPPAVHQFTRTLDKNTATQALRLLSKYQPESKVEKKARLAAMAAAKAEGKQVETSKPFNVKYGLNHITALIEAKKAQLVLIAHDVDPIELVVWLPALCRKMGVPYAIIKSKARLGALVHKKTATAVALTEVKPEHKQEFASLCQAIKANFNDKFDETRKHWGGGIMGAKSQAKMARRAAIANKDAELRQ

SEQ ID NO: 62219 - protein, 202 aa, Zea mays
  Clone ID: LIB3245-430-H3_FLI.pep
CKESKPTGGKDGSKLDVNTKQQPNVRPSGGDYDYLFKLLLIGDSGVGKSSLLLRFADNTFTESFISTIGVDFKIRTINIGGANVKLQIWDTAGQERFRTITSSYYRGAHGIIIVYDVTNSDSFTNVQKWVQEIERYATDSVQKLLVGNKSDLVSERKVDAAEARDFAQQLGLEFLEASAKNSTGVEEAFVKLANAIKRKEDD

SEQ ID NO: 62220 - protein, 156 aa, Zea mays
  Clone ID: LIB3245-491-B12_FLI.pep
SQTVLGGGCSVLGVIPRALMPLEISGASVGEVKVVSDMHERKAEMARQADAFIALPGGYGTMEELLEMITWSQLGIHDKPVGLLNVDGYYDPLLMLFDRGATEGFIKLDCRDIIVSAPTAHELLKKMEHYTRSHQEVAPRTSWEMSELGYGKASES

SEQ ID NO: 62221 - protein, 202 aa, Zea mays
  Clone ID: LIB3245-499-E4_FLI.pep
QVKMASTRFPQIGKPAPEFGGQAVVDGQFKNINLSDYKNKYVVLFFYPLDFTFVCPTEIIAFSEAAEQFRAINTELIACSNDSHFSHLAWVNLPRKQGGLGKMEIPLLADKSGKIARDYGVYIEEEGISFRGLFIIDGNGVLRQITINDLPVGRSVEETLRLVQAFQFTDEHGEVCPANWKPGKKTIKPSVENSKDFFQDSA

SEQ ID NO: 62222 - protein, 136 aa, Zea mays
  Clone ID: LIB3245-558-F6_FLI.pep
ELGNDLKVDNGFASGCAPQTVDDSDDDDILENWDDEDAGGGRSTGVANSIDDSEDEDFLNEMSQKDKKVDSLVKMGFPEDEAALAITRCGQDASISVLVDSIYASQTAGDGYCGNLSDYEGNSNGGRNKRRFMDGN

SEQ ID NO: 62223 - protein, 187 aa, Zea mays
  Clone ID: LIB3279-033-B1_FLI.pep
QNRCIEGYCYARMPSSPIRRHRFCREQIFHSREHRVVRWIIWMVLGWDLQNSRDGLVVAIHQKPYHVGNILTDEHNSNILPRSKFFERILDLFNCRLVVDEEVVGFLAQINIANAGHQEASDGVLVGDDCDEGGVVSGDVGPPRHGLWLWMLLPCLLVIEVLRPCCEPGGDQASAQAEIGSISIFEQ

SEQ ID NO: 62224 - protein, 166 aa, Zea mays
  Clone ID: LIB3279-034-G11_FLI.pep
KKRIPSTNTPPNLISRHHQYHSAWIITPKSAETISTNTNTPQIPATVTVRKGNQKSPNRYGEASRGSVAIGESGCRQMQSSECGGGRTGGAGIGVETVARANPTREAGYEEKVVVVCRGGWRGGSAKISKPPLPSWLPSPLVSLPRRAGGAEEKEGLRRDESAWRP

SEQ ID NO: 62225 - protein, 235 aa, Zea mays
  Clone ID: LIB3279-183-B6_FLI.pep
GGGGLCVQTPVRRLTPHPNSLPSPCFPPSWRGHAAGSRRFRTGSEGGGSAAAMFLRISRLGARLLRESGAETRAGNLLSSPGILYQAHLNQHSTRVRNVLFSTATSGDQDESSQAKDKISVTFVNKDGSEKTIRVPVGMSMLEAAHENDIELEGACEGSLACSTCHVIVMDVNYYNKLEDPADEENDMLDLAFGLTETSRLGCQVIAKPELDGIRLALPVATRNFAVDGYVPKPH

SEQ ID NO: 62226 - protein, 259 aa, Zea mays
  Clone ID: LIB3279-211-A4_FLI.pep
VFDHGSTSSPLHSSPAEAPHRHTAEAKTAGRPIGPGRHACPLPQVRRPAAVRDAPRRKRASAMDPVSEELERRSRYLNSLIRRTKLSATPAPPPQPEPEPEHEVAPQNPEPEPETAVGKREEAKADPVVVEEEKREAKVAGDGKGKEIKGKDDGGPKEDNSRKVSVRVRAADMPLPLQRRAVRLAYEAIVAMPRLDSKRLALALKKEFDTAYGPAWHCIVGTSFGSYVTHSLGGFLYFSVDKAYILLFRTAVEPLAHPR

SEQ ID NO: 62227 - protein, 136 aa, Zea mays
  Clone ID: LIB3279-219-E2_FLI.pep
KHIRQVFRIEEPTGELELNSLVEQAEAHVIIALFLGLFFLFFLLLFSGSSTTSSRGSSSSSWSTTSTRSDGKDEVIDAPLLQELGEERGPVGLNLDSGSLHHRRDLLGSDGDPVIVEDEGGKGAGDLAGRHGDGFS

SEQ ID NO: 62228 - protein, 190 aa, Zea mays
  Clone ID: LIB3279-234-D5_FLI.pep
HSSNSNSHDGACVGVVVAEHVDEPLLLRAGRRGSAVAGDGHDGVDPAHVARRRLPVVGRRGVRVRDEAVGHVGPDLGRLLPRGLHPLDHLVRLHVPLHRHLGLLPVDLHGMHPFHAGEGVPDLHLAAVAVHAHLELHRLELRPPPVVPAPAAAASAAQQVRQVLQRASHGSVSSKKGRGVEETAELMFLK

SEQ ID NO: 62229 - protein, 92 aa, Zea mays
  Clone ID: LIB3353-009-G2_FLI.pep
HCQLAPKREEDDAGCHCHCRAAPVSPPSAGTRRHHAVHAHRRRRRLRVPRLPVEAGRTERGRRQLRRMPDLQEHPAEEGRARQGARLAAQAG

SEQ ID NO: 62230 - protein, 258 aa, Zea mays
  Clone ID: LIB3354-017-D10_FLI.pep
VTRTHTRPEFRRTRHLRHGLTLHRTLCHSSPQTHQSLLETAMDLGLGRAGATSLGTTTVRTPFSKPALIPSTRTFSGSATARANSGLPRSATCHTVPSSSSSFPFSLAAGGAPLMVSTLPSSTWTLTSSLPSPGTLTRSTWEDGVSTQSMAAAAAEDQSTAWKGRAWKRRRNGLPKKKSDIGVEQGLGRRKLWLGPELDRWNGNCRRFSSSFFFLPWPGGELGKTAGTMSDGGGRRPVYDDHVIRPPAVTGWFQNQIA

SEQ ID NO: 62231 - protein, 262 aa, Zea mays
  Clone ID: LIB3354-070-A3_FLI.pep
RLIYIVKGFLMDGDKVKESAPDCASGAAEPTKKQDKRKRAYAEFDVVDKKSVSAEWQQEMDALYKYYKEVSGHQLNPEELSCTTNDSIIACLLEESSLSCAKLTDGIYKRMKLQYGVTESSVRTSVLNIGRRSSYGISAMDVNGLEDESDSSLWCWETEDLALLPLHLRSSLSIRRTARKLIHKRILVLSGKLATKDASNACSNQNSLMENAGEALDLDEIRSIIESKHKNDDDIKTEAQDFQAIRKAVKKQQMMVGHIQTE

SEQ ID NO: 62232 - protein, 172 aa, Zea mays
  Clone ID: LIB3354-106-F7_FLI.pep
AAMESLGVLLLHPLDTYLEQELDRRCRLLRLWEVPHDRRGEFLRAHASSIRAVVIGGGSGFGGNPALIDDLPRLEIIACYAVGYDCVDLTRCRERGVRVTNTPDVLTDDVADLAVGLAIAALRRIPHADSYVRAGLWKANDGHYGLTTRVRFCFYSLSILRFYAVSIASYYL

SEQ ID NO: 62233 - protein, 254 aa, Zea mays
  Clone ID: LIB3354-113-F8_FLI.pep
TEPCPVVIETPRNRRPIRAAPQQPLLRCLWRPPEPEEEEEGRSRSIQGGEYKMVSSSSPVVNVYPLANYTFGTKEPKMEKDTSVADRLARMKVNYMKEGMRTSVEAILLVQEHNHPHILLLQIGNTFCKLPGGRLKPGENEIEGLKRKLCSKLAVNSPSFPPNWQVGECVAVWWRPNFETVMYPYCPPHITKPKECKKLFIVHLSEREYFAVPRNLKLLAVPLFELYDNVQRYGPVISTIPQQLSRFQFNMVSS

SEQ ID NO: 62234 - protein, 138 aa, Zea mays
  Clone ID: LIB3354-114-A4_FLI.pep
IDLNLTGVFLCTQAATKVMMKKKKGRIINIASVVGLTGNAGQANYAAAKAGVIGFTKTVAREYASRNINANVIAPGFIASDMTAELGEELEKKILSTIPLGRYGRPEDVAGLVEFLALSPAASYITGQVLTIDGGMVM

SEQ ID NO: 62235 - protein, 222 aa, Zea mays
  Clone ID: LIB3356-029-H6_FLI.pep
FFCCVVPILFRHTVRFAVLRSARGKRSLVTMCWRRPTRAHSAEPRLPETSHSSSSARMLCSGALTEGSMARLGTADRDLALLPSGSSCDPSFTTGKSVLTLVLTEDIFSFHILPSCSIDGSGSGHFTGSSRLIGSTGRSTGLNSTPTSMPWGLSAGTAAAGSDSPVLMLGASVSTASATLLERRWAPAENLEKIPTIVSSPPLLWLQAFSGLNEAARFSCLH

SEQ ID NO: 62236 - protein, 152 aa, Zea mays
  Clone ID: LIB3357-056-B4_FLI.pep
HSASGWGEVRRAPQNASACVVAQGQPVCAFDSLLLQLGFRGFLGAERTAAAAAAMAAAEEEIAVKEPLDLIRLSLDERIYVKLRSDRELRGKLHAYDQHLNMILGDVEEVVTTVEIDDETYEEIVRTTKRTIPFLFVRGDGVILVSPPLRTA

SEQ ID NO: 62237 - protein, 182 aa, Zea mays
  Clone ID: LIB3357-283-C7_FLI.pep
MAAEVEAAKDIAEEKAVVPLPPSPAKPADDDSKAIVALVVKDAAAGKPSTAIIGGSTERDAYLAKIVSEKRLSLITAWEESQKARADNRAAKKLAFITSWENAKKAEMEAELRKIEEQLEKKKAAYEEKLKNKLAMLHRTAEERRAQTEARRGEETILAEEMAAKYRAKGEGPTKLFGLLKA

SEQ ID NO: 62238 - protein, 148 aa, Zea mays
  Clone ID: LIB3587-195-D12_FLI.pep
LAVRRSRRGLGLGRVRGQGLRRRRVGLGVRGAGLDKVEEAAAHLLGVGLQRLDPLLHGGSGASRGGHGVEGLGLDGARRGLGVGGRHGAVALAEDGVPRERLHEAPHHRVPRALRRRPDAEREGRRMVAPGWGGGGRSGDGSRLLVGH

SEQ ID NO: 62239 - protein, 277 aa, Zea mays
  Clone ID: LIB3587-195-D3_FLI.pep
SPTTSPPIPPPLPTLSFDVPMAPVDLTPKQPRKAYGGDGGAYYEWSPADLPMLGVASIGAAKLSLAAGGLALPSYSDSAKVAYVLQGTGTCGIVLPEATKEKVVAVKEGDALALPFGVVTWWHNGPAAPTPLTVLFLGDTSKGHRPGQFTNFQLTGATGIFTGFSTEFVSRAWDLPEADAAALVSSQPASGIVRASSSPLPAPSPRDREGVAINCLEAPLDVDIPGGGRVVVLNTANLPLVKEVGLGADLVRIDAHSMCSPGFSCDSAYQVTYIVRG

SEQ ID NO: 62240 - protein, 256 aa, Zea mays
  Clone ID: LIB3587-196-D2_FLI.pep
EEVAAFDGRRRLRQQQAKASAASGGGCGRGRRRPRGCGQGAARAGLRVHPHRRARGRRPPPRHRHLLPAVRGAERRRVGAGGRVHGQRRRVHGVRVPAGGRRAAVHQPPPPRSPRRRRPGAGRPRPARPQHPGVGGPDMASGPFHRGVQRSGVNSQSYHADNNQPIKTRGDVDSPSKHQEIRKAVERERERNKINRFHLITPPSTRNTKPTSSPDISLSNYSMLKDERRTCVSFLIGQLCQCPSVLSKTIDYYPVF

SEQ ID NO: 62241 - protein, 200 aa, Zea mays
  Clone ID: LIB3587-200-E8_FLI.pep
VFLGSVVGVHLLESPLLHPMAEGLFNLVLAWTLLFAPLLFTDCRRDRYKGSLDVLWGFQMFLTNTFLIPYMAIRLNGPEADRSPPRRSQLGSVMVNGAPAVGAVGGLVCVLSIVWAFSGRGDSGFGGIAERWQYLQSYLFSERLAYAFLWDMFLYSVFQPWLIGDNLRNVKADAAGLVSVVRFVPVVGLVAYLLCLEEED

SEQ ID NO: 62242 - protein, 148 aa, Zea mays
  Clone ID: LIB3587-207-B3_FLI.pep
PESTAIPVRLLSSSTHPCPPRRLRRRQVLPPPHLRTSPRLTRPCHLSSARLSSLYPSHRAYRTPWRRTTRSGRRRRPATPTSRTGCGDGCAGTRRRRRRTACCAASRRSATTSYTAGIRLRKGSWTMFEARSTSIVCTNHPLEKAWMV

SEQ ID NO: 62243 - protein, 289 aa, Zea mays
  Clone ID: LIB3587-231-B7_FLI.pep
LGSARAAPSSPTLYARTQHAPHPALSLLRSHLPSAAAGSEHIEDGLLLVRVRFVPSDPATMNIFKKKVDPKEALRTSKREMAVATRGVEREIGSLQMEEKRLVAEIKKTAKTGNEAATKILARQLVRLRQQILNLQGTRAQIRGVATHTQAMYAGTSISAGMKGASKAMSAMNKQMEPAKQIKVMKEFQKQSTQLDMTLEMMSDAIDETLDKDEAEEETEELTNQVLDEIGVDVASQLSSAPKGRIGATNKKVDNGQARPARNVAAPALEPSSAEVEDLERRLASLRRI

SEQ ID NO: 62244 - protein, 231 aa, Zea mays; identical to SEQ ID NO: 59623
  Clone ID: LIB3591-001-A9_FLI.pep

SEQ ID NO: 62245 - protein, 223 aa, Zea mays
  Clone ID: LIB3591-087-B4_FLI.pep
LGGSGSPDLGSMLGGSPDVSPFSQMLQNPAMIQMMQNIMSDPQTMNQLLNLNPNARNLMESNTHMREMFQNPEFLRQLTSPETLQQLLSFQQTLLGQLGQHQPSQGGNNAGSATGTRGNPSLDTLMSMLSGLGSGGGLGVPNTSSGEYIYTIVGELGCSYIISGLQLLLHDLISVPPEELYATQLTQLQEMGFIDTAENIQALVATAGNVHAAVERLLGNLGQ

SEQ ID NO: 62246 - protein, 269 aa, Zea mays
  Clone ID: LIB3591-113-D4_FLI.pep
PRPRCLSCCTCRTSRRRGPGWARRWRRGPASSRGRRGRRGGGCSGSPTPCGGSAWCRSRRRRSSPRGGAETTTTSTRRGSGTTSTWATRSGRSGRSSPTCSARTTASTSTEKTLSSETLSTHSRAWETTRGSSGRCASPAGSSSGRRGLKWSAYGSPPRTASCFAGPPTASLGCPGAGGTPPTPASTARPCTSSTGTARSTSTRCTTSLRTRRPSPRSCRSTSWSGHSVAPPLPNPHVLTSEAFVVAVMCHLISYYSRLISMDRMLRRD

SEQ ID NO: 62247 - protein, 271 aa, Zea mays
  Clone ID: LIB3591-114-F3_FLI.pep
KARNFATFRLFPRAGAADPNDRVFVRVDNNDYTVPGFADEDSFDPSRSDPSAGNGNFGSASGPLPEHVRREILELGLPDDGYNYLSHLRELRPAAAAASSFVPSSTGRPEPLPLDVKAYDASRVRIGLSEGELDEGKTMCKVAAKTAPVRRIEKAVDPDIARLLDESDVSHVGSEDEGLEEDFVIIANQAEEEEEDEDGDMEEKQEWNGVFSDVEEEEFDFEEDEPKPRVRRLLDEQFDLESPERGSLGFSLEKQLQQMASSSFMGKRNCQ

SEQ ID NO: 62248 - protein, 132 aa, Zea mays
  Clone ID: LIB3592-080-C10_FLI.pep
LRSLNDELKSSAFYLLLIDSIHQQQQHHHQQQGHGHLQIAVSGSGDANHELLQQPIMGGALPDGGGGGGGGGQVGGPAKPMSMAERARLARIPLPEPGLKCPRCDSTNTKFCYFNNYSLTQPRHFCRACRRY

SEQ ID NO: 62249 - protein, 114 aa, Zea mays
  Clone ID: LIB3594-022-G4_FLI.pep
SPPNQPTMRPSSRYPPQPALLALALALALAAAAPELRPLAAAVAVTVTPPSERTDEEVRRLYEEWRSENDAGPRRGATGGSLGLGDADAGEDDDARRLEVFRDNLRYIDAHNAE

SEQ ID NO: 62250 - protein, 322 aa, Zea mays
  Clone ID: LIB3594-059-H10_FLI.pep
LISNVKMSGGIDVLALKEEDVTKMLAASSHIGTDNANFQMEQYIFKRRADGPYIINLRRTWEKLLLAARAIAAIEHPAEVFVISSRPYGQRAVLNFAAHTGATAIAGRFTPGAFTNQIQAAFREPRLLVVTDPATDKQPITEASYVNIPVIAFCNTDSPLRFVDIAIPCNTKSHHSIGLMWWLLAREVLRLRGQIPRESKWDVVVDLFFYRDPEEAEKEEQAAKEVAAVPIKVETDYAAISSAANWDGEAAPVVGATENWDGEAAAPAAAGAAPVAPAAVDPATFVAAAAASDNWADEAWQAQPGAPAAAPATGSWGANAQW

SEQ ID NO: 62251 - protein, 232 aa, Zea mays
  Clone ID: LIB3595-048-D10_FLI.pep
LHISSYILTLTDRYRPQSTTLLAQSTHPHGQPLLPALRVGDRAHHRGRGAVGASRGGVPARAGRAVRRPGARRLHHLAVAAAHVRPPQAAHAQAVLRPAPAYAVPGRLPGVPDPPPVRRLPRALRRRVQDQARARHRRAVCALRRDVVGHLARRHQRRRHEVHLPWGHWRYGWWKPAPSTRSWTCWSARAAPSTSTRRHGASSRAAPRWSCSTPRPPPRSSARAPCKLSGFW

SEQ ID NO: 62252 - protein, 136 aa, Zea mays
  Clone ID: LIB3596-028-F10_FLI.pep
QTDSVQLSAQHDARAKVERNCIYFLTSRGPTLSPVALLCFTWDPSHSGNVPDLQHRQYAVSGLASSPVRTVSTTLSSSFRMAGFIPPPASARTATRPRRGLGARAAGGDGAGTARRQAAAAAQNGDAMALGWCLGG

SEQ ID NO: 62253 - protein, 149 aa, Zea mays
  Clone ID: LIB3596-036-G8_FLI.pep
YSLLRSFIFNNKLGLYPSGSSSSVQIVCGHHKLQGYLRFDWKLRCLLPTGVMERPIEILADLLEDVGGDLWEADLALARLREAAWGCEHVAEGVGDHGGLPVNNEFEALGADELDDACGVVVLFVLGLVVLTRRRHPATLSVCDGLVWD

SEQ ID NO: 62254 - protein, 168 aa, Zea mays
  Clone ID: LIB3597-068-C7_FLI.pep
NFKTQINKIFALFLSLNSSTMPSRYPGAVTQDWEPVVLHKSKQKSQDLRDPKAVNAALRNGVAVQTVKKFDAGSNKKGKSTAVPVINTKKLEEETEPAAMDRVKAEVRLMIQKARLEKKMSQADLAKQINERTQVVQEYENGKAVPNQAVLAKMEKVLGVKLRGKIGK

SEQ ID NO: 62255 - protein, 195 aa, Zea mays
  Clone ID: LIB36-013-D1_FLI.pep
SPSSQMATAMRGSSLLRFGFRHASCLLFQSPRCPAPSLGLNLAVGRTGLIRLRCSAAGAGDAGGKKVSARLALTQQVLRNAEERAASAGSDPAPKITLDHVTVNFARSGGPGGQNVNKVNTKVDMRFNVKEAHWLGERIKERILQAEKNRINKDGELVISSTKTRTQKGNIEDALQKIQAIIDAASYVPPPPTED

SEQ ID NO: 62256 - protein, 198 aa, Zea mays
  Clone ID: LIB3600-041-A9_FLI.pep
QRWVLGYLQETRVEGAEEQRRGEMNSGVDTQARAFADEVRGSLETKDWMLDLGHPLLNRVAESFAKAAGIGAVQAVARESYFMATEGEGGSVSGARKRSFPELNGTNSSSIKSAEAMVKSVSKESLQWGLAAGVHSGLTYGLAGVRGTHDWRNSAVAGAITGAAVALTSEHASHEQVVQCAITGAALSTAANVLSGIF

SEQ ID NO: 62257 - protein, 178 aa, Zea mays
  Clone ID: LIB3600-044-E8_FLI.pep
YYASHTRSLEPTTSDRLADALNQSTSVPKMSCSLKRRYSLSAASLTSVPPYSGRRTVSPSFRATGIRLPALSRSPGPTATTLAAFSCLDVSGRRMPPAVFLGCTSFSTSTRFRDGSSLFAIAAVLLLPFFLRSKPKGRKKKNSKLPLASTPTDQPEVLGFYGQTPAQRKNYEPAPLRS

SEQ ID NO: 62258 - protein, 149 aa, Zea mays
  Clone ID: LIB3600-056-B4_FLI.pep
PVLKAVMILCLVSTNTAFILVPINIHFFCSIFCSMVNHRGVHCPSDMLAHNHQILQGIFQYILCCISCCLKSYVHFLLRRMRDGISTKCYPWVLVEDESGRVGESVVLVHDGESRRRRVCQRPVLHRRAASLRSGEQRTGGRRTADGGS

SEQ ID NO: 62259 - protein, 186 aa, Zea mays
  Clone ID: LIB3606-008-F5_FLI.pep
IGVSGELGFRRVHPMASEAARRRQEMAEEGQRHLEETIAASFQILVSMNDELCNAGLWSSSSVSATAAAGYQHHHSATLPTPHSVDSDAADAGGAPSPGGSLDEARHRYKSAVAALRASISAVSSCAQDIGSTESEADHAEIERLEEHAAALRKEIESKNKQVKLLIDQLRDLIADIAMWQSPCSV

SEQ ID NO: 62260 - protein, 184 aa, Zea mays
  Clone ID: LIB3606-012-D5_FLI.pep
VNKPKGYICSCGEESKSVVSLFNDYLKGWNKIQPGLPKPRLFTVGRLDVATAGLIIVTNDGEFAQKLAHPSSNVTKEYVVTIDGAVHKKHLIAISEGTKIDGVMCIPDLVEPLAAQSDTRKTRLRIVVHEGRNHEVRELVQNAGLQVYALKRVRIGRFRLPADLGIGKFVELKQADIKALDGNN

SEQ ID NO: 62261 - protein, 173 aa, Zea mays
  Clone ID: LIB3606-058-F1_FLI.pep
EPPVIKAQLFCLHEIVEFISALAPAMAKPQLLLCFLLAASAPLIVATAKKSGDVSELQIGVKYKPESCSIQAHKGDKVKVHYRGKLTDGTVFDSSYERGDPIEFELGTGQVIKGWDQGLLGMCVGEKRKLKIPSKLGYGPQGSPPTIPGGATLIFDTELVAVNGEPTNQSDEL

SEQ ID NO: 62262 - protein, 178 aa, Zea mays
  Clone ID: LIB3607-003-C6_FLI.pep
GAKRTTQGCICLCLCMTKPRDEKQAGRGRSGRPPAVASASRARRLPTDVADRSPGLLVVAVVVLRSEVVRGRSLGPQLLGFLVEVPQQDVPRLRCYHLIGWRISPVGRNISGWCDIRGLCGWVGRDELAEVVRVVRRPPAQRTPHLRPTAVFFCSSSARRPQLRRCSLLFHGTPRVVG

SEQ ID NO: 62263 - protein, 209 aa, Zea mays
  Clone ID: LIB3607-012-C3_FLI.pep
RKEVEIIIISTAIPGAAASVLVVLEPAREGLKGQEHLLEALPGVGVDEVPVAVEKLGRLEEGEYEQFRLVDEMDVQEHPDLAQMVAGPAAAEVASRADDGDRLVCPAVHSSRSPVKRVLQWAGDGVVVFGRGEEEAVGMADLGAERLDGGREARTTVRLEVGVEHRQVGDVEVVDAQPRDAVLAHLRGGADEPAVPGGLANGAADGGHA

SEQ ID NO: 62264 - protein, 60 aa, Zea mays
  Clone ID: LIB3607-040-H2_FLI.pep
SHPEGRELVATRREEPEVVPNQTRKRVGSGASQPAATMRRASKKSLSSAATASAGAEQVN

SEQ ID NO: 62265 - protein, 251 aa, Zea mays
  Clone ID: LIB3608-011-C7_FLI.pep
AFAAHPAIGTTSPSVSKWSKEEQSAALSTATDSTAQELAEWNARYREKFGFVFMICASGRTAAEVLAELKRRYTNRPIVELEAAAQEELKITELRLTKLFSLEPTVPSTTIEGPTVQSDKAAGSSNRSRPPITTHVLDIARGSPASGIEVHLEMWKDCSAPPSFNNKDFSGWETLGYSVTNNDGRSGQLMDIVDNIAPGFYRISFNTGKYTPAGFFPYVSIIFEIKENQAAEHFHVPLLHSPFSFTTYRGS

SEQ ID NO: 62266 - protein, 179 aa, Zea mays
  Clone ID: LIB3608-028-E7_FLI.pep
LSFLHLIRIQDHPPAADTPNKNQPPTKPASTSPSRQTGREGNRERSAMGSFLSSLVTPPPAADDPNCAVVAAHSKATYDEQWAAHKSSSKLMVIDFSASWCGPCRFIEPAFKELASRFSDAIFVKVDVDELAEVARTWKVEAMPTFVLVKDGKEVSRVVGAKKDELERKIRMFTSSSSS

SEQ ID NO: 62267 - protein, 287 aa, Zea mays
  Clone ID: LIB3632-052-F9_FLI.pep
VLLLRRFAPFLFPRPRTSPPPDPATSHRRSPPSDPPRANSPPPSTRRIPDELGEVLIWIFVECAMVDFVRRLASALLKCCDLDIPNRPKGLEDPERLARETVFNVNEIEALYELFKKISSAVVDDGLINKEEFQLALFKTNRKDSMFADRVFDLFDTKHNGILEFEEFARALSVFHPSAPIDFKIDFAFKLYDLKQQGFIEKQEVKQMVVATLAESGMNLSDDIIEGIIDKTFEEADTKHDGKIDKEEWRSLVLRHPSLLKNMTLPYLRDITTTFPSFVFNSQVEDA

SEQ ID NO: 62268 - protein, 198 aa, Zea mays
  Clone ID: LIB3637-241-C8_FLI.pep
NRTTEIHPETTEKTCGAAGKRELSGEEEGGKITMLDHLVGLLKLRVVRGVNLAVRDLRSSDPYVVVRIGKQKLKTRVVKKSVNPEWDEELTLSIEDPAVPIRLEVFDKDTFVDDTMGNAEVDIRPLVEIVKMKLQDVADRTVVKKLVPNRQNCLAEESSIYISEGKVKQDMVVRLRNVESGEIELQLQWIDLPGSKGV

SEQ ID NO: 62269 - protein, 215 aa, Zea mays
  Clone ID: LIB3637-242-G3_FLI.pep
SVFRGTGACDTLLHTVFLFPDTERHILVFDHMHNLALHCKDKENNPVAEEYRPEDRNVKHREESHHKSYNKSFCDCIPELELGETPDEGLELVRPPGGQRRPLGGGGGVELGVDHGGEETDEEVEEVDPKPVGDDVEALRHVDPQRVDCRGGERAEPPPRGVRRGAVQVVLERPRRVAPPLGRRRHGATGAGAGAGRVAALHRIGWRRGWDGTLA

SEQ ID NO: 62270 - protein, 162 aa, Zea mays
  Clone ID: LIB3689-218-D4_FLI.pep
DHSQSAPASLSSGTRVPLMCAAMTRSMAPTSLPPMNTTGTTGAPAAEAPEAPRRQARARSSSRPRGSWSSSCTVGCTPMPQKRRFTAWHMQQVLTLNTTTALSDASRSTRSAAVSTADDGATTGMYDHACSAAAAPYCIVSGVATLVPMLLLSADDDRRAAG

SEQ ID NO: 62271 - protein, 241 aa, Zea mays; identical to SEQ ID NO: 47787
  Clone ID: LIB3732-027-E9_FLI.pep

SEQ ID NO: 62272 - protein, 288 aa, Zea mays
  Clone ID: LIB3732-028-D3_FLI.pep
WQLAGREMIKNTVATLMVRLHHLPLPRAAPAPTYRCRRHLALAPPLPRLRASAAVMSTAAEQTIADQKRTLRAEVRRALKALSADQRASEDLAIQTTILDSSWFKASKRLCAYISCQQLREVDTSKILAECLPSNPGQEELAKDLYVPRVEDKNRNMRMLKITTMDDLVKNSMNILEPSLVDATGNNREDVLSSSSPVDLFLLPGQAFDRTGRRLGRGGGYYDTFLLKYQELAKEKGWNQPLLVALSYSVQIMDEGIIPVNSTDVPIDALVSSSGVITISAAALQRMQ

SEQ ID NO: 62273 - protein, 269 aa, Zea mays
  Clone ID: LIB3732-035-B7_FLI.pep
RGGQVPAQQHHRRWLRLLRRLLQQYLLQAQLLPERGQGADQVQLQGELDVVRRAVPGSGAHHRPARRVQAGRAPRGRLRVPRGPRAPVGVPRHARPELLRRLQRPGPRGLHAAHRAPLPRHQRLLPQPQRAQLPPRQTGRRALPRPRGRRRVRLLAFLLALPAALLAAVQGPGRRRRRDGVVPVAVPGAGLAGAVPAATVLAIPALRAGAVTTAAVLPFPASPRSGFSALKSHEPRSLSRYAILAFLGIRLCVSDEKLIRGRVIFGPAP

SEQ ID NO: 62274 - protein, 270 aa, Zea mays
  Clone ID: LIB3732-041-B7_FLI.pep
PCLPAFLLVEDKQSKATVVVVSVPPLPALLACCLPSEQCLPPPPPPPVVRRRGRGWEEMSVTKFIKCVTVGDGAVGKTCMLICYTSNKFPTDYIPTVFDNFSANVSVDGSIVNLGLWDTAGQEDYSRLRPLSYRGADVFVLAFSLISRASYENVLKKWVPELRRFAPDVPVVLVGTKLDLRDHRAYLADHPGASTITTAQGEELRRQIGAAAYIECSSKTQQNVKSVFDTAIKVVLQPPRRREATPARRKNRCGSGCSIMNLMCGSMCAA

SEQ ID NO: 62275 - protein, 220 aa, Zea mays
  Clone ID: LIB3732-049-A8_FLI.pep
LAMAIRRLFLFISMLLAMACSCAIASDPSLLQDFCVADKTSQVRVNGFACKDAKDVVAEDFFLSGLHKAGNTSNRQGSAVTAANVAQIPGLNTMGISMVRIDYAPKGLNPPHTHPRATEMLAVLEGSLYVGFVTSNPNNTLVSKVLSKGDVFVFPKGLVHFQYNYGTDSAAALAALSSQNPGVITVANTVFGSGPLISDDVLAKAFQVDQKAVNWIQAQF

SEQ ID NO: 62276 - protein, 227 aa, Zea mays
  Clone ID: LIB3898-011-B1_FLI.pep
RIQESPSRQATNPNSKTFSPSHRRRSSPSPPMDLSAVQAALSDKSYSTLASLCDELLLQAASQGFTTDEWPYSVHLLAHLYINDLNSARFFWKSLPQEVKDTRPELAAVWRIGQCLWKRDYAGVNTAAQGFEWGPDLADFITAFLESYRQRIFKLLTSAYSTIRVADVAHFMGMSEEDATNYAAQNGWSLDAAAKMLTVKKPKSQTNQKLDASKLQRLTECVFHLEN

SEQ ID NO: 62277 - protein, 107 aa, Zea mays
  Clone ID: LIB3898-022-G6_FLI.pep
GHNSIIFLINNGGYTIEVEIHDGPYNVIKNWNYTGLVEAFHNGEGACYTAKVRTEEELTEALEAALGPKKDCLCFIEVIVHKDDTSKELLEWGSRVSAANSRPPNPQ

SEQ ID NO: 62278 - protein, 275 aa, Zea mays
  Clone ID: LIB3912-010-D3_FLI.pep
APGASRQPQPAGALADEQSRLAALQQYRSGAAQSAAGQPQPAGRGGRRAARVAARRHRVRGRARAASSGQRPAGHRPGQRRARADAHSTRPGPVTSRPAASVLYCCFTVPVPGFQVSGKREESGDHPDDDARWKAHGFDLSGSEVLQHGDICQQIIILYDRGRIQRYFFTIWHRRGSSTYERPPNWKDEGIWFCQIFIASRGRESCQGNGWQDSTWKIDLCGDGKRTRKQVGHPPHERISLNMKHESAISLCQMANIPNSQLMLQLIYKAQVNFS

SEQ ID NO: 62279 - protein, 243 aa, Zea mays
  Clone ID: LIB3912-012-G6_FLI.pep
GSSSREQARNKNSNELAAGRRRRRQRARFIRVGRHPRVRLRRRRVHRHPTRGLHHRARHLLLHAHLHARVRRRARAAAAGRRRRAGHRRGHARGVPGGGLRGGEEGGGEPGVLLPRLPRLLRRRRRGPGAPRLRPPVPPRLRRPLAPAAPHVPGLPHVAAAQPHAHAARRGHAAGVRAAVVRAVSFFSLARSCVWPLLLHSDCFVPSSLVPFHFYVHSTVCDQRANQQDVILSLKIMKFDHFG

SEQ ID NO: 62280 - protein, 184 aa, Zea mays
  Clone ID: LIB3912-016-E12_FLI.pep
ILHGRMSLYLTIAEACHQGHLRLAGEEDAPAATGSSSIAVIWWSGKRASHRCDLESPRSSSWCKQNIIKRAIFCILGCFNQEIFQSMSINSSCSDNGRSTMSNLLIERSLPLNFFSSSLTSLTWIFLKALRRRYGTWMTTAFLLPVTSIWIALLMYRSLRSLLSSWFPFSRSNKACRYNKPKST

SEQ ID NO: 62281 - protein, 246 aa, Zea mays
  Clone ID: LIB3912-021-A4_FLI.pep
GRRFIGQTLRAPVQQSQFHKAAMDGGGVDTATTAAWMEKHRHMYERATRHPFTVSIRDGTVDMSAFKRWLSQDYLFVREFVAFIASVLLKCCKQEDSSDMEIILGGVASISDEISWFKNEATVWGVDLASVSPLKANLEYHRFLRSFTEPEISYAVAVTTFWTIETVYQDSFGFCIQDDNKTPPELLGTCQRWGSAGFRQYCQSLQSIVDRCLANAPADAVQSAEEAFVRVLELEIGFWDMSSSRS

SEQ ID NO: 62282 - protein, 165 aa, Zea mays
  Clone ID: LIB3912-040-F5_FLI.pep
PFDCRRPPLAAARRSPRPMMARGRRGPGGRGRFGGGPLGDERPVRHGVRVEENPYFPLPRRASGWGVAPPSRHLWVGGLAPSVTASDLSELFLRCGDVEGVAREPGRNFAFVSFLREGDAVAAVRELQGARLAGAPVRIEFSKGVSVEHPLFIICLFNLTPSNYR

SEQ ID NO: 62283 - protein, 267 aa, Zea mays
  Clone ID: LIB3957-008-B7_FLI.pep
PKQTKTSTNSNSKLELGPESSISARGDYMSHKLFPPACGAGLVGRRVTWTRKPPPPLLVAAGDHAHGRVVAVAGQSEAAEGAGGDELQVLAVADLDHEAVRVPEEELVDGRPFLLVDGPLHVPHAHLPQPPLHGAHVLALERHVVVHGVQLRLLRPHVGGPPRVVALHEVDTHAVVEEPCAGEVERRRALDEHEAERLDVEPDGRVDGFAQAGDVVERHHRRRRHVLVQLRRDDRVVGYWVTDELLLRVTPSSSALFVLPQLLARSR

SEQ ID NO: 62284 - protein, 215 aa, Zea mays
  Clone ID: LIB3957-009-H5_FLI.pep
HLGVGQSSLELASGGWSSSSSSSMGRPPCCDKANVKKGPWTPEEDAKLLAYTSTHGTGNWTNVPQRAGLKRCGKSCRLRYTNYLRPNLKHENFTQEEEDLIVTLHAMLGSRWSLIANQLPGRTDNDVKNYWNTKLSKKLRQRGIDPLTHRPIADLMHSIGALAIRPPQPATSPNGSAAYLPAPALPLVHDVAYHAAGMLPPTPAPQRQVVIARVE

SEQ ID NO: 62285 - protein, 233 aa, Zea mays
  Clone ID: LIB3958-001-D12_FLI.pep
GAMGRSPCCEKGHTNKGAWTKEEDERLVAYIRSHGEGCWRSLPSAAGLLRCGKSCRLRWMNYLRPDLKRGNFTDDEDELIIRLHALLGNKFVVSDRRAAAGPDGQRDQELLEHAHQTQAPGPRHRPARAPPPAGAAPRGSSSPRPGPRREAEAEAGGVVRRRRAQQLQLQRQRQQRGGAAVPRPQPRPVRWSAGRAHLAAAAVPVPPRLGSVRLPGRLTAEAARVQIFFLLGS

SEQ ID NO: 62286 - protein, 161 aa, Zea mays; identical to SEQ ID NO: 46039
  Clone ID: LIB3958-023-A5_FLI.pep

SEQ ID NO: 62287 - protein, 219 aa, Zea mays
  Clone ID: LIB3958-023-G1_FLI.pep
HKNKSGSPLIIVPDERSEKCIHLLAVLIIQTYELATSSFLMHYALRSYLEGIVPPPRIQGHSATPLMVARLHSASVTRVAANPLCTSRGQPGRSSRRPSSCASGPGGIAPSMRMLSAVHRQYAGMSASSRQHLLFSSGHGRRGPMPQVRLVTYQRQLGSGLCGMAHPGTQEVPALALAAASTESRTAAARMRRRWLLLDDDAINSPVDGLSMDFLVQFA

SEQ ID NO: 62288 - protein, 237 aa, Zea mays
  Clone ID: LIB3959-012-B4_FLI.pep
QQAMAGREADKDPELKVLGVWSSPFVIRARVALNLKGLAYRYVEDNLDSKSELLLASNHVHGKVPVLLHDGRPVCESWVIVEYIDEAFPASGPCLLPADPYRRAVDRFWASYVDDKLFPTWIPVYNGRTSEDRVAAARQVVAVLEKFERAFDECSGGKAFFGGDAAGLVDVVLGGFLGWLRASEVMCGVRVIDPAKTPLLAAWADRFAALDGVREVIPDVQRLLEYNKIRRARRGLP

SEQ ID NO: 62289 - protein, 227 aa, Zea mays
  Clone ID: LIB3959-013-G11_FLI.pep
SPGLRPLLVSSRLRAELQCRQDSHCFAFNCNRALLFVHEAFGCELDDISSCRAAVRRRRHHPDVECLDSSNHLISDVHRRRKLERLARVHSARLNQQNPTIYQAKPHCEAPRSRAVGRNAGKKKYEAGSDDGREEGRHEHAVHHAASLEPAQLPGDGVVEVHRVAVTADRRVRRHVVPREQPALAQRVADAQHRRRRRRGRRGGADEGKDCPAAEAHRAAADWEGIL

SEQ ID NO: 62290 - protein, 239 aa, Zea mays
  Clone ID: LIB3969-011-H4_FLI.pep
GFDSAAMDAADVWGRSSSSSSSSAAAARRLQARYDLYMGIDDADAGLDEVTEPRGGAESYNCPFCGEDFDFVGLCCHIDDEHAVEAKSGACPICATRVGMDLIGHLTMQHGSYFKMQRRRRVRKVSSGSHSLLSLLRKDLRNGSLQSFLGGSSYVSNPPAAAPDPFVSSLICTLPVAEPSKDLHSDSSDNNFLLNKFPDEKPVERAEPSLSEKDQKERVQRSKFVRGLVLSTIFDDDNL

SEQ ID NO: 62291 - protein, 191 aa, Zea mays
  Clone ID: LIB3969-012-A11_FLI.pep
LDPTTRPFSRRLAGRLRSSFPLSLPSSPVYVSAEMAAPLRRSLPSLGRALLTPAPARMLSAEASDALVEIKPGEIGMVSGIPEEHLRRKVLIYSPARTASQQGSGKVGRWKINFLSTQKWENPLMGWTSTGGPYANVGEAGLTFDSAESAKAFAEKHGWNYVVRKRHAPLLRPKAYAENFKWRGPPKAEQA

SEQ ID NO: 62292 - protein, 149 aa, Zea mays
  Clone ID: LIB4071-003-H5_FLI.pep
KRKGRRRRSWSVKDPTSGLAMGRQILNDALRTMVNADRRGNASALLRPISGVMVSFLNIMKYRGYIKNFEVIDENRVGKIRVELDGRLKDCKALTYRQDLKAKEIERYRVRMLPTRQWGYVVITTPNGVLDHEEAIRQNVGGQVLGYFH

SEQ ID NO: 62293 - protein, 265 aa, Zea mays
  Clone ID: LIB4071-005-F6_FLI.pep
DSKQGLTVLERQTATSKFLSSCFGMEHKFSSPSHRQLAAICYHNLALRLPTLPAFSFDLVHNIHSRQHLAKHHMLPVQPTCCHCGDEKLGSVCISPGIGHGQKAWTSVLDLEVLIRKLQAVDRFTTPPVPESEVTSLEHEAGDDSVELTSLVVEGFATLADPFLSCAKSSEVLCRLRNSLPKKPHDNPACGLAVDLDVEVDLVGNLRQVLLSLGERQCGGGEREPQANRGRAPGDPRRRAPPPPARRHLRSTRAPPTPMRSREFC

SEQ ID NO: 62294 - protein, 213 aa, Zea mays
  Clone ID: LIB4073-001-A7_FLI.pep
QSPRSQSRSEFRHQEHRRHGSACCGDRRGGGGGGGGAGGDDLGGGHLLRAGELGHRALPVLRPGPGLRTLSRLLQRRQEPQLRRPHHRRQARRLQLPQERRPWHQRPQRRQRRQHPLQVRRQRPLHHQHLHRLLQGELNLNEDDRSMIHSAAVAVVVDRRRPEHRPWIEFVYYCYVVILNKNLSVCTYVRVVVYAVIRLHLSVCTYVRVYMCV

SEQ ID NO: 62295 - protein, 167 aa, Zea mays
  Clone ID: LIB4073-001-F5_FLI.pep
SLTGACMIYSLIYVSISLHASSMGGSHGHLVKQRLHADRHPTSMPHACPYDRSSVDLGAVDVGTNGHADGDAALGGDAGGVTHADAAAAAAEPARHALEAGAGGLAVGRRRRAAVERAHPGAARRGGGRRGAHRVPEARRHRGCHVAAAHRRRCRLRGRQQQRRQDR

SEQ ID NO: 62296 - protein, 314 aa, Zea mays
  Clone ID: LIB4073-002-A12_FLI.pep
YSCFIIPVEQTGSAPAFYYYCLLARSVAKLGFAKGAMPSIYLFWTSRATRSQRTRRRRSPSYLASEVGSGVDAELLAVLPVVAHPRVHLGSILAVALEGAVDGPDGGAEPLRHHPVHVVGPEPERRLERDHGVLRHPVRVPKPVEADVPPGRPVVVVPRDLQRAAPVVLLTRGTRPLPVARVAVGVVLVDLADVAEMSGLVRDVGEEGGDLALALHRPATEAFVRVGGAQERAPGVEVLALAPVPGLVLDAVEECVGDNASHVPTSTAAAARAARARLAPVAAVLVGRAAVTELAAAVTCLAAAVLRGGSAEEC

SEQ ID NO: 62297 - protein, 124 aa, Zea mays
  Clone ID: LIB4073-002-B12_FLI.pep
TTTHGEAAAGGGAADDAGAGCGDGVGGFVQRGAADGVRVGDVVRGGALGGVLLQPQGAAGVLVPVRQEPRLRALRQQPQRAQDRRLLRRRPAALLITLTVYIFKPPCITYGCCQRRSLGRICEE

SEQ ID NO: 62298 - protein, 186 aa, Zea mays
  Clone ID: LIB4073-005-E8_FLI.pep
KNNAALLEDAEEHHLVERVIRRGDERAHGLRRLREASQEGHVPAPRSELGGDRHGPAEGDGDGVRGPAGGAARGAADRQGGGVLAVAVRRRVLPVRDPVPGGQHVHGHRQVLPPRLQRPHDRVLPVPRLHACHRRRRARRLPRRQRPRLRRNVMHAPELTGLLLAKERDHLKHYIISSRGRTLTNR

SEQ ID NO: 62299 - protein, 105 aa, Zea mays
  Clone ID: LIB4073-010-E10_FLI.pep
QASHTCPGQSIIISSSTDLQFQFATDNRPATMSSTAAAAPECGGAKTSWPEVVGKSVEEAKKVILKDKPDADIVVLPVGSPVTMDYRTNRVRIFVDTVAQTPHVG

SEQ ID NO: 62300 - protein, 169 aa, Zea mays
  Clone ID: LIB4073-010-D12_FLI.pep
TLEGRLLMAQDLLATTETEHQVESGFLLDVVVCKGAAILQLLTSKDETLLVRGNALLVLDLCLHIVNGVRGLHLQGDGLAGEGLDEDLHTTTKTQHQVKGGLLLDVVVSKGAAILQLLASKDQTLLIRGDALLVLDLGLHVVNGVRGLNLQGDGLAGEGLDKDLHATTQ

SEQ ID NO: 62301 - protein, 107 aa, Zea mays
  Clone ID: LIB4073-014-E2_FLI.pep
TTTHGEAAAGGGAADDAGAGCGDGVGGFVQRGAADGVRVGDVVRGGALGGVLLQPQGAAGVLVPVRQEPRLRALRQQPQRAQDRRLLRRRPAALLITLTVYGRICEE

SEQ ID NO: 62302 - protein, 214 aa, Zea mays
  Clone ID: LIB4073-022-B8_FLI.pep
LISTLGYTLSQYVTLASTTAPAFRCFQEAAGPRHSGINDGITHTGGINDGSYLSCLRCLGPAIVLQREGQGQQQDGQGELQERGPGAGARRRGLLGPAGGVLGDDGVGELGRDGSRVDLADAVLRHQLLGGVGVADVLEIGGGVLSDARQQDLVAARVLLHERRDVVHLAGDDEPAILAIAVLAHLLERVNLASRHGDLASQAHRSSSRARLKG

SEQ ID NO: 62303 - protein, 220 aa, Zea mays
  Clone ID: LIB4073-024-G10_FLI.pep
SGLACAVAAGRAIYPIGFIHRSRHACIIYIMACYYMCTVVLDDGVGDESDHQSAGDELVVDVEVSHLVSLPVGVDLLEHRLVVQVEAAIAALVHDPRRDGRPRRAVRHPDALAAGGLPLLPRGPAEGRPAVLLPPRQRLAGVPGGAVGADGVEVPVVLLRVVVVVRRPHVRRLLRRRHGRHRAQHDGGHHQRRRPSSGDHHRRRHRCPLLLLALIEYSFN

SEQ ID NO: 62304 - protein, 247 aa, Zea mays
  Clone ID: LIB3061-118-B7_FLI.pep
NGAARVGRASISRSRVASRRVQSNPRSLTRADERELLPISPALPCPAAALSFASSPPPPPPSSAKRGARRGRERVVEMDSEAVQHGCAHYSRGCSVVAPCCGQAFGCRHCHNDAKVRWFPSFRFRFGSGSADVLKQPCPVPRQNSLEVDPRDRHEIPRHEIKKVICSLCSKEQDVSCLPKRTPTTVFQEHASFGCTTTANCMETAHSHRQVQQNCSSCGACMGKYFCKVCKFFDDDVSVLESQTMNK

SEQ ID NO: 62305 - protein, 159 aa, Zea mays
  Clone ID: LIB3062-045-H8_FLI.pep
RTNSCSDHELAEVDDGGCAEQQEDAAGGGGRAGGGGAAGFVRFGGDHLRAGGVVAGAVHPVRDGEGQRAPRVVLQRRQEPQQRGADQRGPPGGVPLPQEPRQQRQERQHGHRRHHPRQVRRLRRIPHQHVHRLQQDQLSYDDQANKPTERTRTPRALHE

SEQ ID NO: 62306 - protein, 100 aa, Zea mays
  Clone ID: LIB3066-044-G12_FLI.pep
ASPSPSFLQHERQLSEHDSCSVLQGRKKGDDGTSLNQQSLVIYIIIESRTTKAMGSNGRDHRRGVPRPPPLPLYRDWEEEEVVKAGRRRQSPLAQSSTSP

SEQ ID NO: 62307 - protein, 215 aa, Zea mays
  Clone ID: LIB3067-028-F8_FLI.pep
QNTPARLFVRPEDAMAMEEGSGAVEKGPAVGTVADASASVIGEGAVKEEAGGRRQPSAGYAAVVIGGTFDRLHQGHHLFLKAAAELARERIVVGVCDGPMLAKKQYADLIQPIEKRMQNAKDYIKSIKPDLDVHVEPIVDPFGPSIVDPGLEAIIVSKETLPGGHAVNRKRAERGLTQLQIEVIELVPEESTGDKISSTAFRKMEAERALQQQNK

SEQ ID NO: 62308 - protein, 225 aa, Zea mays
  Clone ID: LIB3068-008-D1_FLI.pep
FNRPVGQPASQPATQYCTLPSLSYGTAAYRASRPFAAALSISAGAMGGGGAALLLLVMWAGVASAAVYEVGGTIGWTVMGNPDYAAWASSKQIVIGDTVVFTYNKQFHNVLAVSKADYKNCIATKPTATWSTGNDSVVLNTTGHHYFLCGYPGHCAAGQKVDIRVASSAAPSAAPSPTPSGSKPSGGATAAPSPHPNAAPKALSASSVAAAVATSLLSLAAAVLA

SEQ ID NO: 62309 - protein, 81 aa, Zea mays
  Clone ID: LIB3116-005-D4_FLI.pep
YLKELMERHIEMPRAQHSSMRGAGKMLLQPQRKLHSAKLAHGSVLACICTTRMNLITTTTSIEAQSAKELIISCNMRWICP

SEQ ID NO: 62310 - protein, 253 aa, Zea mays
  Clone ID: LIB3152-021-H6_FLI.pep
HKNKSGSPLIIVPDERSEKCIHLLAVLIIQTYELATSSFLMHYALRSYLEGIVPPPRIQGHSATPLMVARLHSASVTRVAANPLCTSRGQPGRSSRRPSSCASGPGGIAPSMRMLSAVHRQYAGMSASSRQHLLFSSGHGRRGPMPQVRLVTYQRQLGSGLCGMAHPGTQEVPALALAAASTESRTAAARMRRRWLLLDDDAINSPVDGLSMDFLVQFALVTWKMEEHHVSGMYLLRKKDTEEARLAWQVIYV

SEQ ID NO: 62311 - protein, 223 aa, Zea mays
  Clone ID: LIB4148-012-A6_FLI.pep
PPVSLSGLHSSGRRDDDGGFAFVYFEDERDGSDAIRALDGYPFGPGRRRLSVEWSRGDRAARRDGNKPEVNTKPTKTLFVINFDPMDTRVSDIERHFAPFGNISSVRIRKNFAFVRFETLEEARKALEATHATMLLDRVISVEYAFRDDDERSDRYDSPRRGGGYGRRGDSPAYRSRPSPDYGRPASPVYGSYGRSRSPVRDRYRRSPAYRSRSPPANRRAYD

SEQ ID NO: 62312 - protein, 172 aa, Zea mays; identical to SEQ ID NO: 45169
  Clone ID: LIB4570-011-E10_FLI.pep

SEQ ID NO: 62313 - protein, 126 aa, Zea mays
  Clone ID: LIB4602-009-F5_FLI.pep
TMVQQVSLSFCSIQMQRSLSAQNGVDQWLHLSKVDDCIHHPATNYSCSHQGQMEQVCGGPAVAAEEREEGCGDAGEDKDERRRPEPHGRLRRPRRAPPAAAATRSLSLDRSVREGETRQKLLLADS

SEQ ID NO: 62314 - protein, 186 aa, Zea mays
  Clone ID: LIB4606-009-A3_FLI.pep
GAGVASLSLLLDPDESLTIRRREPGPELHVLEGRVLQEQHLVHVPHPDHVEVVAVLPLLAPEQEPLLPRLQPCHLPQHRLQLTCNRFFARPHKSAGSHDGDVVPGEAGGDPHGDDVHVPPAVVPLLHQHAARPDLPLDLPAAGAAGGIAVAAAAAGSAAALGGAPPEQLLRVPQLDHLRNDGELAS

SEQ ID NO: 62315 - protein, 181 aa, Zea mays
  Clone ID: LIB4665-001-E3_FLI.pep
AFHSGDTMGGCCCCCCSARASDSDRAPVRIYHRQNPEEHAPLSSAFDGPSPTSAIVAVDTNLDTSSLDTYRAPPAPLPYDVCFTVSENPDVEKSGIKIKTDGQQSPKVDEFESCEKGAPEDKADEEEDVCPICLEEYDKENPRSVTKCEHHFHLCCILEWMERSETCPVCDQITLIDGMYE

SEQ ID NO: 62316 - protein, 253 aa, Zea mays
  Clone ID: LIB4666-003-A8_FLI.pep
SRPAGLSLLYPTRRAAARADKEQAEEELCQATMGISRDSMHKRRATGGKQKAWRKKRKYELGRQPANTKLSSNKTVRRVRVRGGNVKWRALRLDTGNYSWGSEAVTRKTRILDVVYNASNNELVRTQTLVKSAIVQVDAAPFKQWYLTHYGVDIGRKKKTPAAKKDNAEGQEVEAAAEETKRSNHVTRKLEKRKEGRTLDPHIEEQFGSGRLLACISSRPGQCGRADGYILEGKELEFYMKKLQRKKGKSAVA

SEQ ID NO: 62317 - protein, 186 aa, Zea mays
  Clone ID: LIB4666-004-E5_FLI.pep
RTFSFLQFSSSWIAMANEFPDEVLKSVFPLLDGKDLVFCMLVCRQWHEIAKDDYFWKCICSRKWPSICKQPPSGANYKKLYLTFSKPREMQNLPVPRLTFEDIVFYIDMWLEGSLIFSQAVSGRTLRAGLQGAPPPGIPDILAAHLSSQDCILMLEVSPSWAVPMGPAITVSVLANRKDSNKMAAS

SEQ ID NO: 62318 - protein, 129 aa, Zea mays
  Clone ID: LIB4666-011-H3_FLI.pep
LARHPLPGCCPQRNDGQRKLPESIDRERERESMAGRSFLIRSPKEEESNAAVREAVLLGAKNAAIAGTVVAVPTLVGCRVLPWAKANLNYTAQALIISAACIAGFFITADKTILRNARQNTIGKLDKST

SEQ ID NO: 62319 - protein, 216 aa, Zea mays
  Clone ID: LIB4666-024-H5_FLI.pep
RKPPFWSLDSGGQPPHFPSVARNSCPGGRRAGMAGKGSYVPPQYIPLYSLDTEEDRVPAVEENHATRPKLNQDPTQWSSGICACFDDPQSCCIGAICPCFLFGKNAQFLGSGTLAGSCTTHCMLWGLLTSLCCVFTGGLVLAVPGSAVACYACGYRSALRTKYNLPEAPCGDLTTHLFCHLCAICQEYREIRERTGSGSSPAPNVTPPPVQTMDEL

SEQ ID NO: 62320 - protein, 174 aa, Zea mays
  Clone ID: LIB4666-029-B6_FLI.pep
RNNTRSTENICPLLRRLCIVLGESSDVAGPEKILPVPPIELPVLDVLQGTGVDAGHGDGHAVRVGPRGVEGGDAAGLAKGVLGRVRAEGVGGDELVSAGLQLELGGGDDEVGVRAHGTVGAVADPRHYARGGLDLPPQAPAVATAGVNDDRLGGHEGLQSASSCGLQLATRADS

SEQ ID NO: 62321 - protein, 180 aa, Zea mays
  Clone ID: LIB4667-001-E8_FLI.pep
PKLSKMFFIKLQNNFSLHGKRHVNELCSCFLQVRDEISTLLRLLQPREDHLGSRNVLFRVKQVLIQSVFFPDYSLVFVSRRVGVACSGTRLPPKKTVQVWTLLVAGALVDRVALRALGLKDLLAGFRVPGGSLRERRHRRTQRSEPRRRRGGRGQPQLPLCPLPFGLAANSQGGTPVVLL

SEQ ID NO: 62322 - protein, 211 aa, Zea mays
  Clone ID: LIB4667-005-A7_FLI.pep
INMRRGYSYSPSPPRGYRRRARSPSPHDHYGGRGRDLPTSLLVRNLRRDCRPEDLRRPFGQFGRVKDIYLPRDYYTGDPRGFGFVQYYDPADAADAKYYMDGQVVLGRQITVVFAEENRKKPQEMRARDRVRGHSYDDRRYSRSRSPRYYRGRSPSRSQSYSRSPPQNPRHRLRERSYSGSPVDSRSRSGSPYEDGYRRSSRRERSLSVSG

SEQ ID NO: 62323 - protein, 127 aa, Zea mays
  Clone ID: LIB4667-008-C3_FLI.pep
FRPNLCVRISRETVTAMAAAGGVSTDDVPILQAENLTSNVKSVYYSRAFLSIIGGVVAGIWGFTGLMGFVFYFLIMMVASIGLLAKSKFSVQAYFDSWTRISIEGVFGGLMSFVLFWTFAYDIVHIF

SEQ ID NO: 62324 - protein, 159 aa, Zea mays
  Clone ID: LIB4667-011-E10_FLI.pep
YISSSAVPLWRLRGQCFLFLPAAAMASGNNNKQRSEEEWRVVLSPEQFRILRLKGTELPGTGEYNKFYGDGVYNCAGCGTPLYKSATKFDSGCGWPAFFEGLPGAINRTPDPDGRRVEITCAACGGHLGHVFKGEGFKTPTDERHCVNSVSIKFSPGSS

SEQ ID NO: 62325 - protein, 146 aa, Zea mays
  Clone ID: LIB4667-021-A11_FLI.pep
GEVANMENLALLWGIIGPGVSGAIFGAGWWFWVDAVVCSAVQVSFLHYLPGIFASLAALMFNCVNKDEIGYDYYSPYGDDSEWGVKLWLFVAYVVSFVCLAGSVGLLVQDALTNKGPSVWTGVAGVLQCVLVLISGLVYWTCHSED

SEQ ID NO: 62326 - protein, 202 aa, Zea mays
  Clone ID: LIB4667-025-E7_FLI.pep
SRRRRRDRRKEQQRQGRPGDLFCCVRRGSKRSRDRMHSFGHRANAVATFAVTILAAICFAASFSDNFNTPTPTASVKILNLNWFQKEANGNDEVSMTLNISADLSSLFTWNTKQVFVFVAAEYETPQNALNQVSLWDGIIPAKEHAKFLIHTTNKYRFIDQGSNLKGKEFNLTMHWHIMPKTGKMFADKIVMTGYRLPELYR

SEQ ID NO: 62327 - protein, 149 aa, Zea mays
  Clone ID: LIB4669-003-E7_FLI.pep
PCLNTNSIFNQDKQNCNLITRLTTLKTGSQKFKHSTNSKTPKTKQEPTKNARASAQPPGLPLGLEQGEDVTLADGPLDIPHDEPVLVIQELNSDLGHLTPGAGPAHHLHHNSKLHLGVHALASRVDGSRRAFSHARRVGAAAALGHNTG

SEQ ID NO: 62328 - protein, 179 aa, Zea mays
  Clone ID: LIB4669-004-D3_FLI.pep
RGRPGSKPKQSTTDKNMAGKAGGLKGVALIGGSANSTVAGVIHFFEDPSTRYTEVRGKVTGLTPGRHGFHIHVFGDTTNGCNSTGPHFNPHNKPHGAPFDDERHLGDLGNIVANEDGDAEVFIRDLQISLSGPHSILGRAVVVHADPDDLGRGGHELSKSTGNAGARIGCGIIGIQSSV

SEQ ID NO: 62329 - protein, 302 aa, Zea mays
  Clone ID: LIB4669-008-A3_FLI.pep
RGRPGSHRIDPPICAPASLFAAPPQVTGKMMPLSQTDFSPSQFTSSQNAAADSTTPSKMRGASSTMPLTVKQVVDAQQSGTGEKGAPFIVNGVEMANIRLVGMVNAKVERTTDVTFTLDDGTGRLDFIRWVNDASDSFETAAIQNGMYIAVIGSLKGLQERKRATAFSIRPITDFNEVTLHFIQCVRMHIENTELKAGSPARINSSMGVSFSNGFSESSTPTSLKSSPAPVTSGSSDTDLHTQVLNFFNEPANLESEHGVHVDEVLKRFKLLPKKQITDAIDYNMDSGRLYSTIDEFHYKAT

SEQ ID NO: 62330 - protein, 163 aa, Zea mays
  Clone ID: LIB4699-004-C11_FLI.pep
SRPAGIYSTPPDLTRRASTGSARPTRLPVCPVGDNPPPSKAAEPSRWRWRWPGSPTPLPASCLVSASLPSALSAPQLRPAMPRSGCWYCTPSRGAASAMDSRRSSTPRPCLLARPTHSRLSSSRRGTSRRIRSGSGSTSTRFQCWPRCSPTGPRKYFPDYRHV

SEQ ID NO: 62331 - protein, 186 aa, Zea mays
  Clone ID: LIB4720-009-D2_FLI.pep
TEINDDIALLYQATHLYHFACGCEAMKSTATLTESILSASLSGISNLNSSSRAMTTSTASKLSRPRSFLKWASGVTLEGSSIFGKLLTTLMMRSVTSLLSRKEPLASSEDIHRCPHRASCNDAVGLTDAADGAAAKRRCLRSRLLAAAIRAWMNWFCSLGRGSEAAAREGNGCCGGGAEAGEHFFF

SEQ ID NO: 62332 - protein, 186 aa, Zea mays
  Clone ID: LIB4721-014-A5_FLI.pep
TPVPPTAAATNRAGAAAMAAAVESVVVVHNVAKRHNVGTLARSATAFGVAEVVVVGRRDVSAFGGHGATSHLRFRHFVSLALARAYLKDERGCDICGVEITDDAQPVTAHPFRRSTAFLFGNEGTGLSQKECEICDFFVYIPQYGGGTASLNVTVAASIVLHHFGGKNPLYSSHHSTLFFCNILKC

SEQ ID NO: 62333 - protein, 133 aa, Zea mays
  Clone ID: LIB4726-022-F6_FLI.pep
RGRPGKKKNRIPQGPLRSQPSPAMATATRRLLPALLKTLAPAGARGLSTEKAVGAAAVVGSHTAKWMQDTSKKSPMELINEVPPIKVDGRIAVCEGASEGVGLGHPIEYICLDLEAPNVCKYCGLRYVQVHHH

SEQ ID NO: 62334 - protein, 194 aa, Zea mays
  Clone ID: LIB4726-023-E3_FLI.pep
SRPAGHQGNSQSDTSPYQSILPETLLQSTEFCLLRRIELASTMSLVRRSNVFDPFSMNLWDPFDTMFRSIVPSAASTDSETAAFASARIDWKETPEAHVFKADLPGVKKEEVKVEVEDGNVLVISGQRSKEKEDKDDKWHRVERSSGQFVRRFRLPENAKVDQVKAGLENGVLTITVPKAEEKKPEVKAIEISG

SEQ ID NO: 62335 - protein, 84 aa, Zea mays
  Clone ID: LIB4726-023-H9_FLI.pep
QTTMRIVYMAAVMFLVLATMSSTSPSFCQAGGCIGCPRAPPPPSDETCYEDLKCSASRCHLGCIHRGYKGTGSYCRGRDCCCKH

SEQ ID NO: 62336 - protein, 118 aa, Zea mays
  Clone ID: LIB4728-009-G12_FLI.pep
LEAGRDNSQVPTALSPTLPSSRPPHRRSLAPRRQENSRMPATPTIIGALLGLGTQMYSNALRKLPYMRHPWEHVLGMGLGAVFVNQLVKFDEKLKEDLDKMLERARLANEQRYIDDDE

SEQ ID NO: 62337 - protein, 189 aa, Zea mays
  Clone ID: LIB4728-018-H11_FLI.pep
PPSAAHRPPALRRASDGAEGRGTMRLEKCWFCSSTIYPGHGIQFVRNDAKVFRFCRSKCHKNFKMKRNPRKVKWTKAYRHLHGKDMTQDTTFEFERKRNRPERYDRNLTEQTLKAIPLITKIRHDRMGKHISNRHKPGKRKEMEKDSKELEQDIGMLPKKLIINHLAAEKTKVKVEVVQQQTEDNAMEE

SEQ ID NO: 62338 - protein, 174 aa, Zea mays
  Clone ID: LIB4730-008-E7_FLI.pep
PPLSSRVSRVFQEEEMASDRVLGTVKWFNGTKGFGFITPDDGSEDLFVHQSSIKSDGYRSLNDGDAVEYTVGSGNDGRAKALDVTAPGGGPLAGGERPDGGNGGGRGGYGGGDRGYGGGGDRGYGGGGDRGYGGGDRGYGGGGDRGYGGGGDRGYGGGGGYGGGYGGGGGGGGP

SEQ ID NO: 62339 - protein, 106 aa, Zea mays
  Clone ID: LIB4737-002-F8_FLI.pep
THGTKHLHDHLKICVLRKIKLTSQNKTMSQSSLRFSSQEGGKVSVESYTFDPEVARKELAAMIALHEYPLCIAEHIGFRRFVSACQPLFKMVSRNTIRKDIMDAYT

SEQ ID NO: 62340 - protein, 155 aa, Zea mays
  Clone ID: LIB4740-008-F1_FLI.pep
NGESGGENLDSLCICCFDLGLHQTYSSSVLTGPEEGAHGELPLPAKVPGDGEAVLAEQAVDAPLRHGLVVRLLVPRVVQRHPERRPAAVAALLLQLVAAAARCRRFAGLGLLLLFLQGHHARTQGAHAHGCLGCYDSCCFFFFGIGRWFVPGRPR

SEQ ID NO: 62341 - protein, 185 aa, Zea mays
  Clone ID: LIB4740-013-F6_FLI.pep
EAGRGFRFFLFPPRAPPRPSSIPSPNAPASPRDPAAAPSAFAPPPAGSERQRRRGMAKARSLAKQKQAQQSNGGGGHALSSKLARYLDPEASLDKDQLLDAVHWIRQAVGLICGLLWGAVPLVGAVWIALFMAISTGIIYWYYTYLLKVDEEEYGGHGALLQEGLFASFTLFLLSWTLVYSLAHF

SEQ ID NO: 62342 - protein, 138 aa, Zea mays
  Clone ID: LIB4742-020-H1_FLI.pep
DPKDRPPPPTGSSPFATKPFEPPTSPRLVPHLLRLLARAAARRLPLVSAPRAVVHPCAAKMTAGYIVGSLVGSFAIAYLCDTFISDKKAFGGSTPKTVSEKEWWQATDTKFQAWPRTAGPPVVMNPISRQNFIVKSTE

SEQ ID NO: 62343 - protein, 184 aa, Zea mays
  Clone ID: LIB4744-005-F12_FLI.pep
RGRPGAASQIPKPPTPFLSPSAAAAHAGNKRHGRLHLCVPQQRRRVDRQAALRRDRGFRRYPIRAAAPPRRCRLRGRLCLRRPVVLLHGHPQLRRVPGDRRCCRWWCNDGERRWRRRCCCIWWCCCRGSQGGEEGRGEGRERRRHGILPVRLELCVSSGSQKWWFGPVAVVNFAVLSVNLKNSW

SEQ ID NO: 62344 - protein, 212 aa, Zea mays
  Clone ID: LIB4762-021-D11_FLI.pep
TLEAGRGPIASPARALSVHDHHHHHSLQRPALGRDCERAVAARSSAVVAPPPLPPPPPLPKMPSPTIRRLDVASPVPADIDIANSVEPLPIADIAAELGLRPEHYDLYGKYKAKVLLSVLDELKAQQDGYYVVVGGITPTPLGEGKSTTTVGLCQALGAFLDKKVVTCLRQPSQGPTFGIKGGAAGGGYSQVIPMDEFNLHLTGDIHAITAT

SEQ ID NO: 62345 - protein, 215 aa, Zea mays
  Clone ID: LIB4826-002-C8_FLI.pep
ITVHVIYYGHSTQMEPERETGSVSSQYSVAASAEEGVNLVLEVRLVVPEAGGGGAILPADQRWHALEPEPGVHPPRVRRVAPSGLVPDVGAQEHRVLALQCLQPLVDHRLRHVAVGAPGEGGVRLAVGQEEQQLHLAVGGGVRGSEEAIEVGFEVGKPRVHLLHRHLALLSPSAGRVKRADWSSKKDWETDWWKWNDLGGSTRDGVPCDSFLPAG

SEQ ID NO: 62346 - protein, 152 aa, Zea mays
  Clone ID: 700168518_FLI.pep
RRRRPTAQIFVVIFSGNEHPKMVVLQPDRFLSELTSMYERSTEKGSVWVTMKRSTLKGKAQLRKMENKGQEVEHRCLVRASNGKKNISTSVSLKEYTKFQASYATVLKAHMHALKKRERKDKKKTADAEKAIETAPKKQKKASSKKSSGSKS

SEQ ID NO: 62347 - protein, 128 aa, Zea mays
  Clone ID: 700213505_FLI.pep
LAFSRHQAAPNRSQEPPMAATGCRDLGGAGGGRSSFHSMHGREERTRRRCCCRLGLGWIGGRASGTYQLFLGVCLSGLRRRLEGGGRKQQSNRQGNCRVLQHLCVRVCASGTDPLAGWPSCSALLLLQ

SEQ ID NO: 62348 - protein, 189 aa, Zea mays
  Clone ID: 700214790_FLI.pep
HSMALVADDDAELKAKAKAKAEVYYGDEACQLCAQLLLREAGLPNGLLPLEDLTECGYVQETGYVWLKQGRRVDHVFRSLGRLVSYGAEITGYAEKGRIRKVKGIKTRELMLWVPVEEIAALGDPAAGGKLVCKSVAGITRTFPASAFHVPEKAAAAEEVKVDCARAPPATPVLVLMDRSGAPPVVKNN

SEQ ID NO: 62349 - protein, 124 aa, Zea mays
  Clone ID: 700453147_FLI.pep
ASGHLPRTTVPPHRNSEGEAEAPRGSSDGGGVGATEQQQNVRRLQPPFPPPERHPRLRNDLLHLPAPVPGVQHIRAVLALGPHLYRREFHHEGRAAAANGIALVTPDTSPRLLGRSGFQLKLLV

SEQ ID NO: 62350 - protein, 160 aa, Zea mays
  Clone ID: 700801366_FLI.pep
RSMQRLHAVLLLLLIFIAVTLHDTTLHACTVRRLCTASQGCYLVLPQFSSGKPRVFQELCLARLLAPAVAEVAVAGGPPAVLLDALVAAEAVGDAGERVVLALAHAHPGLRHHRRRRPAVVVREQEQRQEERAHGRPGLDELHRRPAWIGSVLLRTGPET

SEQ ID NO: 62351 - protein, 113 aa, Zea mays; identical to SEQ ID NO: 50843
  Clone ID: 700430993_FLI.pep

SEQ ID NO: 62352 - protein, 50 aa, Zea mays
  Clone ID: 701158434_FLI.pep
NLSHHEIAQVTKRGLKNGHLSTKSEPMYTEATLFYSISQSATYICTKSKS

SEQ ID NO: 62353 - protein, 85 aa, Zea mays
  Clone ID: 701164761_FLI.pep
SNKNPDETQNPHRTQPKISPSLLDPAPRRRAMADSATNDAPLVASNQPTEEEVTVERAAATEEQEEERLRYLEFVQQAAAQALVL

SEQ ID NO: 62354 - protein, 126 aa, Zea mays
  Clone ID: 701179627_FLI.pep
RTTERSFLQIKSNALCLPERYRSHSAQGLPNRNPNPPEDHRCLLNLYSYYRDRSIHLRCPRWNVSLQFFSVWFHLDRRMFRFDCFSSYASRSKKRDQGSLGRACVCRLRSLQPYFVPRCSQFHGLN

SEQ ID NO: 62355 - protein, 161 aa, Zea mays
  Clone ID: CC-ZMPO148016G05_FLI.pep
ACRPPPLIVVHHANSEKTILQGKRMQERRHIYRGVAASRRWNRRLDPETERDQLQKLLAHWPPEWAAVQVWIACEEDASAGGGPVPVDAGEGEGGAGGGDEPIPAPLLRVHGDHVPVGALPGGHDGHVPERPLHRGHLLPLLRGVVGRAALGAADPGVGVA

SEQ ID NO: 62356 - protein, 121 aa, Zea mays subsp. mexicana
  Clone ID: UC-ZMFLTEOSINTE019A01_FLI.pep
QQHSSSSLAGDKRNFFGDMSAERAPVLVRHGGGGVEALRQLPPGFRFRPTDEELVVQYLRCKAIGVPLPAAVIPVFRDLYSRDPWDVVAVSAPDTRSEGEKYFFAVRPASDGKSSGAGTGS

SEQ ID NO: 62357 - protein, 314 aa, Zea mays
  Clone ID: UC-ZMFLMO17019E02_FLI.pep
SPVMAQAPARAASALRLFDAHCHLQDPRIAAVAPALIRAAGASGVARFAVNGTSEKDWHLVKQMAEDHPAVVPCFGLHPWCVPERSPDWMNLLRGFFAETPEAAVGEIGLDKGSHGKTINFGEQVEVFQRQLELAKELERPVSVHCVRAFGDLLEVLKQTGPFPAGVLLHSYMGSAEMVSALANLGCYFSLSGFLTGMKSTKAKHVLKSIPLDRILLETDAPDALPRLDNVSVSPVHVHSSDADTEKRHMDSESQAANASNESLNHPENIHIVLEYVASLLEMPESELAELSYKNATKLFSYPGSKVQDEPKHI

SEQ ID NO: 62358 - protein, 365 aa, Zea mays
  Clone ID: UC-ZMFLMO17199G09_FLI.pep
LLSPGTGVRSMVFHPDGKTLFCGLDQSLKVFSWEPVRCHDVVDMGWSNLADLSIYEGKLLGCSYHECRVGLWAADISLIGPYALGVLPKANFFAELVQSMEDNPVKPVDSTANSRPASAMAHSRSSYKIKESGIAQSRVRGSHLTPASTDKTKKDRSSTIPRRPDSSLKSSVQSTTLMRRMKLVDSPSTNTKNVERNVGQRDISLASRAVMANNSATAKKSNLTESALVKDIYTTSQAVSAPIVVPRDILEDKTVSNVRRGTGETAAVPDDFRIPVHRRKPSLSGSAADSDSSSRSVFTEPDVCSEGLSSLKFSFGLTPYHKKEEFGDVDNEGIAQIAEKMERTVSLDHSQQLNDDKCTAISLCS

SEQ ID NO: 62359 - protein, 681 aa, Zea mays
  Clone ID: UC-ZMFLB73004D08_FLI.pep
IIENSTKLSSGVSTPRLLSSFCIYTDACKTGVGAVLMQRGHPLAFLSKALGPKNQGLSTYEKEYLAILIAVNQWRSYLQLAEFHIYTDHQSLVPLNEQRLNTVWQQKLYTKLAGLQYRIIYKKGCDNVAADALSRYPTSEQLLHISQCTPTWIDEVVQGYQHDSQAQELLTQLTISSNNDNSPFTLVQGVIRHKGRVWLGNNTTLQLKIIAALHDSALGGHSGFLVTYRRIKQLFYWKGMKKDIHAYVQTCNICQQAKPDRTSYPGLLAPLPVPPHAWHSISMDFIEGLPKSGTMDCILVVVDRFSKYGHFLALAHPFSAAKVAKLFLDNIYKLHGMPDNIVSDRDRVFTSLFWQQLFTLSGTQLCMSSAYHPQSDGQTERVNQCIETYLRCFVHACPSKWYQWLAVAEFWYNTNFHSALNCSPFEVLYGQPPRHFGLQPGSAVTVSDLSTWLHDREVVSKLVQQHLLRAQDRMKRQADKRRSERIFSVGDQVYLKLQPYVQSSVTTRANQKLAFRFFGPYKILQRIGPVAYKLQLPASSQIHPIFHVSQLKSAVNRPQHIVPLLPETNDSLQVPIQVLQRRLIRRGGSMVTQVKVAWSGMDTAMATWEDVDALKARFPYAPAWGQAAFQDRGNVSSAVPEDTRTMAKKDLTAKTEGGDVSARPRRIKRGSVRVTGPEWAN

SEQ ID NO: 62360 - protein, 882 aa, Zea mays
  Clone ID: UC-ZMFLMO17300B10_FLI.pep
FTCDEPASPEFISAQAPATPGLMEETVPSRVHESPVLSPQRKASPSTNDETAKADTPAAPASDFLHSATGNASDVVGAEMTELGLAKPVQVESSVVQDSDASVQQHTSEGLPSQGQASHLEAAADKLVGSDGIAASVDETVTVNATIEDVPLAVNDSEPCVDGSAGPSVVNLVQMDGPLFDAQVLSADFQHEVQAMQQVVASNDRLNELSTSEFAEPEKMLTAPNAEFNHAIDLGQITAEKGTIESDGSNIIGSLTSRKRHLEYSLPALESETTKKLPSRPHVKRTNDFVPHDDDILASILVGRTPGFTLDSTPLPPRESSLKRPRLGSKMGTLKRKVQIDDAMVLHADTIRQQLINTEDIRRIRKKAPCTRSEIWMIEKGSLEDDLFHEPIFSCLSEELNNLHNRTYETIVHPAVQSMELRGQLDMPETIPEYRNIAGFGSATIDGPLHIPDGIQSDAMLSGANVAYGATAAFGLQIPPDYQVNRASNDFVVGTQFQEVAKPFIGNEHEVAPPDREHAQVDTLYSDHFQGVPSDLQRSNDANVSSQDVVLDNSGQACAHAVDGMTREFNHFAHRDANLFGSTEVPASEITGVEYNQDASGFPRQTEDDNTVEYNQDASGFPRQTEDDNTVEYNQDASGFPRPTEGENAVEYNQDASGFPRPTEDENTVEYNQDVSGFPRPTEDENTVEYNQDASGFPRPTEDENTVEYNQDASGFPRPTEDENAASATGDNSGFQENNTGSHMDLDMMNDYEVKECNDFGSAIHGVDTDFLNYGDDDNDDDFDDDFEPNPSEFQSLDNSGWSSRTRGVARYLKTLFDEDSGLGRKSVAIDHLVRGKTRKEASRMFFETLVLTTKDYISVDQPNPFDFVSVKPGPKLLMSEF

SEQ ID NO: 62361 - protein, 691 aa, Zea mays
  Clone ID: 700346690_FLI.pep
SAAAALLPRPPPPNPAATVHSLFAYLSDPAALHHLPAPLLAFSQLRHLLPPAAATQLLLRPIASLLQLHRSDLRIGLQLHGLSLSLGLSCYSHLLPRLLSFYSHHPSLLPAASSLAAGSTCPEPYNVLISNCLNHGLPHHALAAYHEMIDKDAVPPDAFTYPKVLRACAETGNLALGRAVHVRAVDAGMDGHLFFQNALVSMYAKCWDLAAARTVFDGMEHRDVVSWNSMISGYAASGQWRKAVELFLRMQAEGAEMNSVTWNTIAGGYIQMHDYRAAVGLIRDMVRGGASIDFVTLVIGSNACSRAGWLRLGKEIHGLAVRMQCHEIDSVINAVITMYARCNDMERALMLFKMIRCPGLVAWNTTIAGFALLDDAEAASRLFREMVVCGDVQPNYVTVVTYLALCARVANLQHGRELHTHIVKQGFKGYRLLWNSLIDMYSKSGRLSVAQNVFDTMDDPDMISFTSMIAGYGMQGKGIISLRFFKQMIDSGIMPDAIIMVTVLSACSHSGLVGEGEELFDKMVKSYGIKPQMEHYSCMVDLYARAGLLEKAEELLNQTPFPPTSTMVAALVGACHEQGNIIIGERSARRLLEMKTENAGHFVLIANMYAAAGCWNELATVRKLMRDLGVMKAPGLAWADLGNGFTPFLVGDRSNPLAPEIYEVLDELTEQMSNMNNCSDPDILSMEEHME

SEQ ID NO: 62362 - protein, 863 aa, Glycine max
  Clone ID: 700680194_FLI.pep
KVAKMTGGMFGRKGQKIKGTVVLMPKNVLDFNAITSVGKGSAKDTATDFLGKGLDALGHAVDALTAFAGHSISLQLISATQTDGSGKGKVGNEAYLEKHLPTLPTLGARQEAFDINFEWDASFGIPGAFYIKNFMTDEFFLVSVKLEDIPNHGTINFVCNSWVYNFKSYKKNRIFFVNDTYLPSATPGPLVKYRQEELEVLRGDGTGKRRDFDRIYDYDIYNDLGNPDGGDPRPIIGGSSNYPYPRRVRTGREKTRKDPNSEKPGEIYVPRDENFGHLKSSDFLTYGIKSLSQNVIPLFKSIIFDLRVTSSEFDSFDEVRGLFEGGIKLPTNILSQISPLPVLKEIFRTDGENTLQFPPPHVIRVSKSGWMTDDEFAREMIAGVNPNVIRRLQEFPPKSTLDPATYGDQTSTITKQQLEINLGGVTVEEAISAHRLFILDYHDAFFPYLTKINSLPIAKAYATRTILFLKDDGSLKPLAIELSKPATVSKVVLPATEGVESTIWLLAKAHVIVNDSGYHQLISHWLNTHAVMEPFAIATNRHLSVLHPIYKLLYPHYKDTININGLARQSLINAGGIIEQTFLPGKYSIEMSSVVYKNWVFTDQALPADLVKRGLAVEDPSAPHGLRLVIEDYPYAVDGLEIWDAIKTWVHEYVSVYYPTNAAIQQDTELQAWWKEVVEKGHGDLKDKPWWPKLQTVEDLIQSCSIIIWTASALHAAVNFGQYPYGGYIVNRPTLARRFIPEEGTKEYDEMVKDPQKAYLRTITPKFETLIDISVIEILSRHASDEVYLGQRDNPNWTTDSKALEAFKKFGNKLAEIEGKITQRNNDPSLKSRHGPVQLPYTLLHRSSEEGMSFKGIPNSISI

SEQ ID NO: 62363 - protein, 478 aa, Zea mays
  Clone ID: LIB3137-021-G4_FLI.pep
SLSLSLSLSDPNCQRTSRARGTSPAPAMASALLAGQGGARHHGWGETRAPLAPIPPNPNPSQPHPRADGSKSKPRAAASSPAAGYVTFRPASLGPREARALRDRLAGELTQVRALLSRIDTWQQQGPPPAGLRGEVRKRCGQILTRLRKDKRSVWFNAPVEVERLGLHDYHAVIKRPMDLGTVKEGLAAGRYASHDDFAADVRLTFTNALRYNPVGHEVHTFAGALLAYFERMYKEALACFEEDCKRPEPPRPVPPQLTPPPAAEPVEAKVKPRAGNVRMRKPKAREPNKREMSLEEKNMLRVGLESLPEEKMHNVLQIVRKRNNNPEMLGDEIELDIDEMDVETQWELDRFVTNFNKALKKSQRAVLMNGGAADVTSAAVAENDTAPVSNVLALVDNDDVEREKPVRSATMAEQVDEYVDIGDEMPTATYQSMEIEKDAEGATGSRGSGSGSSSSSGSESRSSGDSASGAGNAHSLA

SEQ ID NO: 62364 - protein, 421 aa, Zea mays
  Clone ID: LIB3137-008-E5_FLI.pep
PLSLTQRRPAADHAGSSGVPGVGTPPRPLRPAAVRLRRADCPVEVNAGVLRLLQRLPGAALLHAVRGPEACGAGRAVRGRPAGHPGRQRHGLRGPGPGGPHPPGGARAARAGAVRLLRRHPQGHLRAVRGAGGGHAGVRAGSVYGGLTTADWIRDSNGMAEEEDAALDAGTTLFVPLHCACFGGADSGAPAVFLTYPVAEGDTVPAIARRFRTTGNDLMSVNDLATADVAAGDIIVVPLPACASSFPAFASDAGLAVANGTYAVTANRCVQCSCGPGNLDLFCVPAPLADSTCSSMQCSNSSMMLGNFTLLMTSAGCSVTSCSYGGYANGTILATLTTSLKPQCPGPHQFPPLMPPPTSSFFETYLGPSPTPMASEGGMGPQMAGMAPTSSPPVSSGPPTAGSHVGIAQVAYLCLVASLLW

SEQ ID NO: 62365 - protein, 327 aa, Zea mays
  Clone ID: UC-ZMFLMO17077B08_FLI.pep
LHPSFLHLVVPMAAAIDMYKYCNTSAHLIASSSPSDQELAKALEPFITSASSPYHRYSLAPDSYMPTPSSYTTSPLPTPTSSPFSQLPPLYSSPYAASTASGVAGPMGLNQLGPAQIQQIQAQLMFQHQQQRGLHAAFLGPRAQPMKQSGSPPAQSKLYRGVRQRHWGKWVAEIRLPKNRTRLWLGTFDTAEGAALAYDEAAFRLRGDTARLNFPSLRRGGGARLAGPLHASVDAKLTAICQSLAGSKNSSSSDESAASLPDSPKCSASTEGDEDSASAGSPPSPTQAPPVPEMAKLDFTEAPWDETEAFHLRKYPSWEIDWDSILS

SEQ ID NO: 62366 - protein, 74 aa, Zea mays
  Clone ID: LIB3157-002-D9_FLI.pep
SAKWMSCGNMVHNMTPFDNTEALQKNPISVQFLLRAGNIRIQASSFSDGSVCNMDYVSKSKSPLQGKPPWRNII

SEQ ID NO: 62367 - protein, 104 aa, Zea mays
  Clone ID: LIB3088-011-C4_FLI.pep
SSGRSTALNSIVAADSGLTKQVGMLQVACDMKPESMDFRPNQYHNSFDLGREVTYMIIQLHLDSSFGGFILSEFLVIPDAEHTGEESFATASFSVVSVVVVSPS

SEQ ID NO: 62368 - protein, 753 aa, Zea mays
  Clone ID: 700084030_FLI.pep
ELDRKYKQVDMTRWDIQQFGNELHEFLQHKRYLIVVDDIWDARSWETIRYALKDNNRGSRIIMTTRNFGVVTKVEEVYKLKPLSNGNSKKLFYKRIQSHEGESLDGELSTKIIDKCGGIPLAIIAIASLLVERPCEEWSKVYDSIGLGNEDNTTKILSYSYYDLPSYLKPCLLQLSIFPEDYIFDTKAAIWMWIGEGLVHLDKEEGSLFEVGERYFKELVNRSMIQPIEGIYARFVEEFRIHDIVFDLIRKLSKDEDFITLLDCSGLLLFPVSLRREKKTGVPHSDCKLRRLAVRNHRMLCFEDTMDTSEVLRSLNIIYCNIMIKPPLHSFKVCRVLCIEYNILHINLKHLGNLLHLKYLKLYDTPVDELPKEIGHLRSLQTLILIKTRLDELPPAVCSLTRLMCLIANGFERLPADRMGNLTSLEELRLKSVVGRSATQALVAELGKLTRLRVVNITFSEELEESLQEALVQSLFNLRGLQELVLSSEMWQSSSKMWHLSSKMWPQGSPMWGDWEPPRQLRRLTIEGIIFSRQPRWINRSCLTRLNFLSLMVHAVEAEDLDNLVRLPELQYLKLDGLSWPPRYAVGPDDFRNLRFCYVGTMLEFHMGAMPPRLEELQFGVYAGYCSWKHNGVLLEQFPTMDVIEDLDLGLDNLLSLEQVRVEVDCRGATAARVLEVEAVVMRAVENHANRPTIKMVRVYEESNLSIEEQETWVRLFSSSLLKKICCLNYICSWVLLTHLYVCVLHFSASATD

SEQ ID NO: 62369 - protein, 139 aa, Zea mays
  Clone ID: 700087586_FLI.pep
TPDDAPLNYLPQKRLILTSQLIQQLLPAIPATILRGQAVSTYGSATYTLSMLTLRDACSMVASLSSSYNSCSPVEDENNPSEQTSAKKMEDRVSKVVEVFAGRIQKMENDFISDSLTVVSFTKEGCEATLLSSNKAKVV

SEQ ID NO: 62370 - protein, 480 aa, Zea mays
  Clone ID: 700073171_FLI.pep
EKGKSLHPDPVRPARSRLRSASPHLPHLDLAAMGLAAAARAVLFLLAVAGVIFRPAVAEIKQEFFKDDSRGSILFEKFGFGPHGMVSISVTGAKASSALAKPDPAQLGFFLLSDESLFEAIYDQPAPTDLNPNPESSPTCVLSSPYVKPLFTFAELDDKGFHNQTFPITHPDEYSLFFANCAPETSVTMEVRTDMYNTNLDGTKDYLSVGMASVPAIYAFFAVCYVVFLAGWLYVTLYRNRLSAQRIHHLMSGLLVARMLYCISAAEDQHYIRTAGTPHGWDIMFYLFQLVKGVILFAVIALIGTGWSFLKPFLQDKEKKVLMLVIPLQVAANIAAAVVGETGPFLQGWVTWNQIFLFVDVACCCAVLFPVVWSMRSLRESSKTDGKAARTLAKLMLFRQFYVVVIGYLYFTRIIVYALRTITNYKYRWVSVAAEEVSTMAFYMFMFYMFRPAERNQYFALDEDDEEAAEMVLREQEFEL

SEQ ID NO: 62371 - protein, 522 aa, Zea mays
  Clone ID: 700082038_FLI.pep
ITWNGIQHRKNCWQDGVLGTNCPIPPGWNWTYEFQVKDQIGSFFYFPSTGLQRAAGGFGGIVVNNRDVIAVPFARPDGDITIFIGDWYNKNHTDLRKMLDKGKDLGIPDGVLINGKGPYRYNDSLVPPGIEYETFNVHPGRTYRIRVHNVGTSTSLNFRIQGHSMVLVETEGSYTSQQNYTNLDVHVGQSYSFLVATDQNASSDYYVVASARQVNESQPLWRRVTGVAVLRYSTSGGPASGALPDPPQDQNDRAFSMNQARSVRWNLSAGAARPNPQGSFRYSAISVTQAYLLRGAGPVWIGGRRRAALNGLSYAPPETPLRLADAYGVEGVYTLDFPERPPLRASAPRIARSVINGTYRGFMELIFQNNDTRMQSYHMDGYAFFVVGMDYGEWTEDSRGTYNKGDGVARSTIQVYPGAWAAVLVSLDNVGVWNVRSQNLDSWYLGQEVYVRVVNPEDTGNKTEMAIPANALYCGQLHKYQKEQTPHHKMGASAAAPRSLVSLARRLLATALLLAGSFVLAP

SEQ ID NO: 62372 - protein, 187 aa, Zea mays; identical to SEQ ID NO: 46576
  Clone ID: LIB3079-026-B1_FLI.pep

SEQ ID NO: 62373 - protein, 162 aa, Glycine max
  Clone ID: LIB3050-004-G8_FLI.pep
DTLKSYKLKHNKKFHSNDGVSCTCNPRPQISTLFSNGTSDSRTFHFSLGIDNNTSIIFEVHVDAVLSAPWLALANDDSWQDLLPQIGFSLLHGGHHHVANAGRGKTVQTAFDPFHRNDVEVLRPRVVGAVHRRRHWKTQRHAELVPRRTTTTTLRHLSLSFS

SEQ ID NO: 62374 - protein, 211 aa, Zea mays
  Clone ID: LIB3116-016-H10_FLI.pep
YNLLLRTTPSTRPLTLAWREYPKKREELYSGVDTPKLTTGRGPTRHEQSIVRAKKAGVAGASKKAREQQRTSISMVQQHVVVQVHVVVYRCIGTVQSVRGGLQAEQNEQRRRESPAVRWPLAAASLGSPEQQVHHLGRLAVAVEVVLAPAPRRRRRRRRRRAGPRQPKLLRGVARQRAQRGQLEPPAGGSALAPAAHGRRRRRARPPVASN

SEQ ID NO: 62375 - protein, 126 aa, Zea mays
  Clone ID: 700172885_FLI.pep
AASCELKMNSPVLESNIHRSEAKWRVPPQHGPVLEDVQGGGSRHHNVLRVIVSPAGNTLRWYRRVLCFLGVCFCALSCAIDWLCQLLILKEKGELKIIVENKHVTVRSHQLCQLPIISLIRICRCS

SEQ ID NO: 62376 - protein, 159 aa, Zea mays
  Clone ID: 700209022_FLI.pep
FECPEHEKYYLKSSIWNNLHPNQVIGQPAAIKEIDCLTATVDEIREVRAQVTLPIRMEARLSALAGWFDVHFRGSAQNPGVEEVELTTAPDEHGGTHWGQQVFLLTPPLSVTKGDNVNVSFSMVRSKENHRLMDMEFTYELHELSGRKHPAVKTKMYLE

SEQ ID NO: 62377 - protein, 604 aa, Zea mays
  Clone ID: 700382541_FLI.pep
YLQATSQAKQNPKKPTLPPVSSTPAAAAAITTQSTPSPPHPVPMAADAAAAAMSATSLCDDLEPATVRTRIRDVLAAGAARAGDRVVVGGWVRTGREQGKGSFAFLELSDGSCAATLQAIVDAAVHPLARLTATGTSVLVEGVIKEPPEGTKQNVELKVSRVLEVGEVDAAVYPLPKGKVKLTLEKLRDVVHLRSRTNTIGAVARIRHQLAYASHRFFDENGFLYVHTPIITTSDCEGAGEMFQVTTLFSQAEKTEKELRENPKPSDSEIEAAKVLVKEKGDVVAQLKAAKASKQEISTAVDELNRAKEIVSKLEERFKLKPGIPRKDDGSIAFENDFFKRQAFLTVSGQLQVETYACALSSVYTFGPTFRAENSHTSRHLAEFWMVEPEIAFANLQDDMNCAEKYVQYLCKWLLDHCQEDMEFMVKNYDKSAIERLELVSSTPFVRISYTKAVELLKNVTDKKFDNKVEWGIDLASEHERYLTEDIFKKPVIVYNYPKGIKAFYMRLNDDDKTVAAMDVLVPKVGELIGGSQREERLDVLKQRILDAGLPLEPYEWYLDLRRFGSVKHSGFGLGFERMILFATGMENIRDVIPFPRYPGRADL

SEQ ID NO: 62378 - protein, 544 aa, Glycine max
  Clone ID: 700561808_FLI.pep
AIQATKVVFNHLYDPVSLVRDHNIKEKLVEQGISVQSYNGDLLYEPWEVNSESGRAFTTFNAFWKKCLHMQMDIVSVVPPWQLIPAEGKIEECSLEELGLENESEKPSNALLGRAWSPGWRNADKALREFVELHLLHYSKKRLKVGGESTSLLSPYLHFGELSARKVFQVTCMKQILWTNEGNSAGEESANLFLRAIGLREYSRYLCFNFPFTHERALLGHLKFFPWNPDPDIFKTWRQGRTGFPLVDAGMRELWATGWIHNRIRVIVSSFAVKMLLLPWKWGMKYFWDTLLDADLESDILGWQYISGGLPDGHELERLDNPEIQGAKFDPEGEYVRQWLPELARMPTEWIHHPWDAPLTVLRAAGVELGQNYPKPIIDIDLARERLTEAIFKMWESEAAAKAAGSEPRDEVVVDNSHTVENLDTQKVVVLGKAPCATISANDQKVPALQDSKNEPPTRKRPKHMIEEGQNQDHSQNHNKDTGLSSIDQDICSTADSSSCKKQCASTSSYSFSVPQQCSSSSNLKWPWQEKIDMEQSSSKDGAM

SEQ ID NO: 62379 - protein, 752 aa, Glycine max
  Clone ID: 700673077_FLI.pep
TPDDGLDFITDEREWGARMTKASLVPPVTRKYDVIDQYIIVADEEDVRRKMRVSLPDGYAEKLSVQKNGIDESDMELPEVKDYKPRKQLENEVVEQEVYGIDPYTHNLLLDSMPKELDWSLQEKHLFVEDKLLRMLNKQVNHFTGTGNTPMSYPLQPAIEEIERYAEEQCDVRTVRMCQGILKAIASRPDDKYVAYRKGLGVVCNKEEGFGEDDFVVEFLGEVYPVWKWFEKQDGIRSLQKNSNDPAPEFYNIYLERPKGDAYGYDLVVVDAMHKANYASRICHSCRPNCEAKVTAVDGHYQIGIYSVREIQHGEEITFDYNSVTESKEEYEASVCLCGSQVCRGSYLNLTGEGAFEKVLKEWHGILDRHYLMLEACELNSVSEEDYNDLGRAGLGSCLLGGLPDWLVSYAARLVRFINFERTKLPEEILKHNLEEKRKYFSDICLEVERSDAEVQAEGVYNQRLQNLAVTLDKVRYVMRCIFGDPLKAPPPLEKLSPEAVVSFLWKGEDSFVEELLQCLAPHVEESTLNDLKTKIHARDPSSSGDIQKAVQKSLLWLRDEVRNLPCTYKCRHDAAADLIHIYAYTKYFFRIQDYQTITSPPVYISPLDLGPKYADKLGAGFQEYRKIYGENYCLGQLVFWHNQSNAEPDCTLARISRGCLSLPDISSFYAKAQKPSRHRVYGPRTVRSMLARMEKQPQKPWPKDRIWSFKNSPKFFGSPMLDAVINNSPLDREMVHWLKHRPAIFQAMWDQ

SEQ ID NO: 62380 - protein, 177 aa, Glycine max
  Clone ID: 700681839_FLI.pep
PCSKISIIPRGQAGGLTFFAPSEERLESGLYSRSYLENQMAVALGGRVAEEVIFGQENVTTGASNDFMQVSRVARQMVERFGFSKKIGQVAIGGPGGNPFLGQQMSSQKDYSMATADVVDAEVRELVERAYSRATHIITTHIDILHKLAQLLIEKETVDGEEFMSLFIDGKAELYVA

SEQ ID NO: 62381 - protein, 979 aa, Glycine max
  Clone ID: 700747049_FLI.pep
RKLARREVFSIFWTSCRMPSEIMEKRGASASSRFLDDISYVSEKNTGLRKPKSIHDHFLQGKSEMAASPGIIFNTSSPLETNSKTGLSISQTTLSREITEDLHFGRETGNTDMLKDSTTESLNYHKRSWSNVYRQSASGSYGLIGSKIVTNAASRESSLFSSSLSDMFSQKLRLLGNGVLSGQPITVGSFPEEEPYKSLEEIEAETIGNLLPDEDDLFSGVTDELGFSTGTRMNDDFEDFDLFSSSGGMELEGDEHLISGKRTSCGDEDPNYFGVSKGKIPFGEKSSRTLFVRNINSNVEDSELKALFEQYGDIRTIYTACKYRGFVMISYYDLRAAQNAMKALQNRSLRSRKLDIHYSIPKGNAPEKDIGHGTLMISDLDSSVLNDELKQIFGFYGEIREIYEYPQLNHVKFIEFYDVRAAEASLRALNGICFAGKHIKLEPGLPKIATCMMQQSQKGKDEPDFGHSLSDNISLRHNKGVSSGFIASGVSLENGYNQGFRSETQLPAFMDNSLFHVNSSIHKTTRGASAGKVSGVFEACNAIDAMKFASISRFHPHSLPEYRESLANGSPYNFSSTINMAANIGTGSTESSDSRHIQGMSSTGNLAEFNAAGNGNRPHHGLYHMWNGSNLHQQPPSNSMLWQKIPSFVNGACSPGLPQIPSFSRTPPHVLRASHIDHQVGSAPVVAASPWDRQHSFLGESPDASGFRLGSVGSPGFHGSWQLHPPASHNIFSHVGGNGTELTSNGGQGSPKQLSHVLPGRLPMTLVSKNLYSRRSEPNTNNNADKKQYVLDLGRILRGDDNRTTLMIKNIPNKYTSKMLLVAIDEQCRGTYDFLYLPIDFKNKCNVGYAFINMIDPGQIIPFHQAFHGKKWEKFNSEKVAVLAYARIQGKSALIAHFQNSSLMNEDKRCRPILFHTDGPNAGDPEPFPLGNNIRVRPGKIRMNGNEENGSQGNPSSLASGEESGNGTESTSSSSKSSD

SEQ ID NO: 62382 - protein, 445 aa, Glycine max
  Clone ID: 700870833_FLI.pep
HVQGMMNNCWFRVKTNVCRPHKGEIGIVFEHPTQPGNQSGGWMAKEKHLEKSSESNPTLKKSVSSPFMNTTSKTYTMSEVRRHNNADSAWIIVHGHVYDCTRFLKDHPGGTDSILINAGTDCTEEFEAIHSDKAKQMLEDYRIGELTTTCYNSDSSSSNPSVHGSSDTIPLTPIKEVITPMRSVALNPREKIPCKLISKTSISHDVRLFRFALPSDDLLMGLPVGKHIFLCATVDEKLCMRAYTPTSSVHEVGYFDLVVKVYFKGVHPKFPNGGIMSQHLDSLPIGSVLDVKGPLGHIEYTGRGNFLVHGKPRFATRLAMLAGGTGITPIYQVVQAILKDPEDCTEMHVVYANRTEDDILLKEELDEWAKKYDRLKVWYVIQESIREGWEYSVGFITESILTEHIPNASPDTLALTCGPPPMIQFAVQPNLEKLGYDTQNNLLVF

SEQ ID NO: 62383 - protein, 428 aa, Zea mays
  Clone ID: 701166388_FLI.pep
VGRRKKTKQDHRTMESLTLRASTAASPLQRRRLLPGRQRATYVRATASAGEPDLSVRVNGLQMPNPFVIGSGPPGTNYTVMKRAFDEGWGAVIAKTVSLDAEKVINVTPRYAKLRAEPNGAAMGRIIGWQNIELISDRPLETMLNEFKQLKKEYPDRILIGSIMEEYNKAAWHELIERVEESGVDALEINFSCPHGMPERKMGAAVGQDCDLLEEVCGWINEKATVPVWAKMTPNITDITQPARISLKSGCEGVSAINTIMSVMGINLKTLRPEPCVEGYSTPGGYSARAVHPIALAKVMQIARMMKEEFADGQSLSAIGGVETGNDAAEFILLGADTVQVCTGVMIHGYPLVKKLCAELQDFMREHNFSSIEEFRGASLPYFTTHTDLVHRQQEAVRQRKAIKKGLQSDKEWTGDGFVKETESMVSN

SEQ ID NO: 62384 - protein, 370 aa, Glycine max
  Clone ID: 700966852_FLI.pep
GGLINSLVMAESRANHTVSVFGWAAHDSSGKITPYSFKRRQNGVNDVTIKILYCGICHTDLHCAKNEWGITMYPVVPGHEIIGEVTKVGTNVKGFMEGDRVGVGCLAASCLECHHCKTDQENYCQDLQFVYNGIFWDGTITYGGYSQIFVADYRYVVHIPASLPMDAAAPLLCAGITVFSPLKEHDLVATAGKRIGVVGLGGLGHIAVKFGKAFGHHVTVISTSPSKEPEAKQRLGADHFILSSNPKQLQAARRSMDFILDTVSAEHSLLPILELLKVNGTLFLVGAPDKPLQLPAFPLIFGKRSVKGGIIGGIKETQEMLEVCAKYNITSDIELITPDKINEAMERLAKNDVRYRFVIDIANAVTSNNK

SEQ ID NO: 62385 - protein, 871 aa, Glycine max
  Clone ID: 701047409_FLI.pep
SIKLAKMFGILGGNKGHKIKGTVVLMSKNVLDFNEIVSTTQGGLVGAATGIFGAATGIVGGVVDGATAIFSRNIAIQLISATKTDGLGNGKVGKQTYLEKHLPSLPTLGDRQDAFSVYFEWDNDFGIPGAFYIKNFMQSEFFLVSVTLEDIPNHGTIHFVCNSWVYNAKSYKRDRIFFANKTYLPNETPTPLVKYRKEELENLRGDGKGERKEYDRIYDYDVYNDLGNPDKSNDLARPVLGGSSAYPYPRRGRTGRKPTTKDPKSESPSSSTYIPRDENFGHLKSSDFLTYGIKSIAQTVLPTFQSAFGLNAEFDRFDDVRGLFEGGIHLPTDALSKISPLPVLKEIFRTDGEQVLKFPPPHVIKVSKSAWMTDEEFGREMLAGVNPCLIECLQVFPPKSKLDPTVYGDQTSTITKEHLEINLGGLSVEQALSGNRLFILDHHDAFIAYLRKINDLPTAKSYATRTILFLKDDGTLKPLAIELSLPHPRGDEFGAVSRVVLPADQGAESTIWLIAKAYVVVNDSCYHQLMSHWLNTHAVIEPFVIATNRHLSVLHPIYKLLLPHYRDTMNINGLARQSLINAGGIIEQSFLPGPFAVEMSSAVYKGWVFTDQALPADLIKRGMAVEDPSSPYGLRLVIDDYPYAVDGLEIWSAIQTWVKDYVSLYYATDDAVKKDSELQAWWKEAVEKGHGDLKDKPWWPKLNTLQDLIHICCIIIWTASALHAAVNFGQYPYGGFILNRPTLTRRLLPEPGTKEYGELTSNHQKAYLRTITGKTEALVDLTVIEILSRHASDEVYLGQRDNPNWTDDTKAIQAFKKFGNKLKEIEDKISGRNKNSSLRNRNGPAQMPYTVLLPTSGEGLTFRGIPNSISI

SEQ ID NO: 62386 - protein, 372 aa, Glycine max
  Clone ID: JC-GMFL02220063A03_FLI.pep
ILWEMATLVEPPNRIKPKGKHYYTIWQTLFEIDTKYVPIKPIGRGAYGVVCSSINRETNEKVAIKKIGNIFENSIDALRTLRELKLLRHIRHENVIALKDVMMPIHRTSFKDVYLVYELMDTDLHQIIKSSQPLSNDHCKYFLFQLLRGLKYLHSANILHRDLKPGNLLVNANCDLKICDFGLARTNGVDGQFMTEYVVTRWYRAPELLLCCDNYGTSIDVWSVGCIFAEILGRKPIFPGTECLNQLKLIISVLGSQHESHLEFIDNAKARRFIKSLPCTRGRHFSQLYPQADPLAIDLLQKMLLFDPTKRITVLEALQHPYMAGLYDPRCNPPAQVPISLDIDEHWGEPMIREMMWNEMLHYHPEAASTNA

SEQ ID NO: 62387 - protein, 828 aa, Glycine max
  Clone ID: JC-GMFL02220065A08_FLI.pep
ENILSGRPDADQVEIEEAARVANAHSFIIKLPDGYETQVGERGLQLSGGQKQRIAIARAMLKNPAILLLDEATSALDSESEKLVQEALDRFMIGRTTLVIAHRLSTIRKADLVAVLQLGSVSEIGTHDELFSKGENGVYAKLIKMQEMAHETAVNNARKSSARPSSARNSVSSPIIARNSSYGRSPYSRRLSDFSTSDFSLSLDASHPSYRLEKLAFKEQASSFWRLAKMNSPEWLYALIGSIGSVVCGSLSAFFAYVLSAVLSVYYNPDHRYMIREIEKYCYLLIGLSSTALLFNTLQHFFWDIVGENLTKRVREKMLMAVLKNEMAWFDQEENESARIAARLALDANNVRSAIGDRISVIVQNTALMLVACTAGFVLQWRLALVLVAVFPVVVAATVLQKMFMTGFSGDLEAAHAKATQLAGEAIANVRTVAAFNSETKIVGLFTTNLQAPLQRCFWKGQISGSGYGVAQFALYASYALGLWYASWLVKHGISDFSKTIRVFMVLMVSANGAAETLTLAPDFIKGGQAMRSVFELLDRRTEIEPDDQDATLVPDRLRGEVELKHVDFSYPTRPDMPVFRDLSLRARAGKTLALVGPSGCGKSSIIALIQRFYDPTSGRVMIDGKDIRKYNLKSLRRHISVVPQEPCLFATTIYENIAYGHESATEAEIIEAATLANAHKFISGLPDGYKTFVGERGVQLSGGQKQRIAVARAFLRKAELMLLDEATSALDAESERSVQEALDRASSGKTTIIVAHRLSTVRNANLIAVIDDGKVAEQGSHSQLLKNHPDGIYARMIQLQRFTHSQVIGMASGSSSSTRPKDDEREG

SEQ ID NO: 62388 - protein, 777 aa, Glycine max
  Clone ID: JC-GMLE01810087C02_FLI.pep
VAPRPNPHVTMVAVDSATLGFPRMGPNRELKFALERFWRNQISEDELFQVAHAVEEANWRKQIDAGVSRVGVGLFSLYDHVLDWTYYLGLAPERFAKVPMGLSQYFAMARGVDGIPALDMTKWFDSNYHYEVPELSAKSTPKANFSSYLSNMKRALAIVGTNKVVPIILGPLTYLALSKYDGATLDDLLVKILPIYTVLLNELAALGVTEVQVHEPSLVGTSADQLAKHLATVYGSKDQKGAIQHEKIALNLTTYFEEINHDVYQWFATSPVSAISLDFTRGDNLSVLQKFGFPAGKRLGAGLVDGRSVWKFNPDTILSQVTEIKKVLAVSDNTSLTIQTSSSLQHVPYTTDPEKTLNAGETDGLLDVLSFAYEKLAELEVVKKIAEFGEEAAKAEIDAAKKAWSVYYEKNPAKTAVQSRLAAVTEADFKRPSPFAERRPLQLKGLPVLPTTTIGSFPQTPQIRALRRKLKAGDITLDHYRGKIDEQIAYNIGIQEALGLDILVHGEPERTDMVEYFAEKLNGFAFTQSGWVQSYGSRCVRPPIIFADLERPVDMTVREFVVAQSFTTKPVKGMLTGPVTILNWSFPRKDISRKEQAFQLALCLRDEVADLEAAKCTVIQVDEPALREGMPLKSSKKDEYLNWAVDAFRLSTGVAKNETSIHTHMCYCEFADCMHAIDAIDADVNSIENARSDDETIREFKSIGYKRDLGPGTYDIHSPVVPPKEEIVKKLKSFLNLLPAEQVVVNPDCGLKTRKWPETIAALRNMVDATLEVRATL

SEQ ID NO: 62389 - protein, 471 aa, Glycine max
  Clone ID: UC-GMFLMINSOY103F05_FLI.pep
IVILSTTASSSKKKQLESSRVFFFLFFVCFTFKMGEKSNVGGDAINTTLLHGKYELGRLLGHGTFAKVYHARHLKTGKSVAMKVVGKEKVVKVGMMEQIKREISAMNMVKHPNIVQLHEVMASKSKIYIAMELVRGGELFNKIARGRLREEMARLYFQQLISAVDFCHSRGVYHRDLKPENLLLDDDGNLKVTDFGLSTFSEHLRHDGLLHTTCGTPAYVAPEVIGKRGYDGAKADIWSCGVILYVLLAGFLPFQDDNLVALYKKIYRGDFKCPPWFSSEARRLITKLLDPNPNTRITISKIMDSSWFKKPVPKNLMGKKREELDLEEKIKQHEQEVSTTMNAFHIISLSEGFDLSPLFEEKKREEKELRFATTRPASSVISRLEDLAKAVKFDVKKSETKVRLQGQEKGRKGKLAIAADLYAVTPSFLVVEVKKDNGDTLEYNQFCSKELRPALKDIVWRTSPAENPTLA

SEQ ID NO: 62390 - protein, 99 aa, Glycine max
  Clone ID: 701053982_FLI.pep
DQLTIVFFFFSLLLFQNHFSCKRRIVSCEQMLQEIVAVEKCWNKTKCAKAARWRKGCFCSDLKWCGAGNTRKVALDAFWNWSLHLHVYLFFSIIYFFCW

SEQ ID NO: 62391 - protein, 326 aa, Glycine max
  Clone ID: 700895076_FLI.pep
LFWSFLFRSLSFTRVFEFHSEVVGGFQKMENMQSFWQLGDELRGHSKASEDHKWLMVASKLAEQTRLKGERVNNLDLSKGPIETRSRDKFGFQEENKFDSLNLSMLNLDSKFTENVSKSSLRNGVYGMNAVYQKNNANLVSNVISNKYNGNILHNKEINNNTNNESNNTNATDKRFKTLPAAETLPRNEVFGGYIFVCNNDTMQEDLKRQLFGLPPRYRDSVRAITPGLPLFLYNYTTHQLHGIFEAASFGGSNIDPTAWEDKKCKGESRFPAQVRIRVRKLCKALEEDSFRPVLHHYDGPKFRLELSVPETLDLLDLCEQAGSAA

SEQ ID NO: 62392 - protein, 121 aa, Glycine max
  Clone ID: 701137888_FLI.pep
VCTGAKSEQQSKLAARKYARIIQKLGFPAKFKDFKIQNIVGSCDVKFPIRLEGLAYSHGAFSSYEPELFPGLIYRMKQPKIVLLIFVSGKIVLTGAKVRDETYTAFENIYPVLTEFRKNQQ

SEQ ID NO: 62393 - protein, 308 aa, Glycine max
  Clone ID: 700682412_FLI.pep
TPILLETENLSVFRFLDKAAIKEVSAGSTRVPLTVSQVEGAKLIFGMALVWLVTLIPSTIWAQINTLFVKQGTTLDRNLGPHFKIPSASLGSFVTLSMLLSVPMYDRFFVPFMRQKTGHPRGITLLQRLGIGFSIQIIAIAIAYVVEVRRMHVIGANHVASPKDIVPMSIFWLLPQYVLIGIADVFNAIGLLEFFYDQSPEDMQSLGTTFFTSGIGVGNFLNSFLVTMVDKITGRGDKKSWIGDNLNDCHLDYYYGFLLVMSSVNMVVFLWVSSRYIYKRESIRVKEGLCVQMEGGNPTLDASLGLQV

SEQ ID NO: 62394 - protein, 351 aa, Zea mays
  Clone ID: 700381851_FLI.pep
PVSVVSSPLLTSPAMGKIKIGINGFGRIGRLVARVALQSEDVELVAVNDPFITTDYMTYMFKYDTVHGQWKHSDIALKDSKTLLFGEKPVTVFGIRNPEEIPWGEAGAEYVVESTGVFTDKDKAAAHLKGGAKKVVISAPSKDAPMFVVGVNEDKYTSDVNIVSNASCTTNCLAPLAKVIHDNFGIIEGLMTTVHAITATQKTVDGPSAKDWRGGRAASFNIIPSSTGAAKAVGKVLPELNGKLTGMSFRVPTVDVSVVDLTVRIEKGASYEEIKKAIKAASEGPLKGIMGYVEEDLVSTDFTGDSRSSIFDAKAGIALNDHFIKLVSWYDNEWGYSNRVVDLIRHMFKTQ

SEQ ID NO: 62395 - protein, 364 aa, Zea mays
  Clone ID: 700457187_FLI.pep
SSHIRSPTSPASPVSVVSSLLLTSPPAMGKIKIGINGFGRIGRLVARVALQSEDVELVAVNDPFITTDYMTYMFKYDTVHGQWKHSDITLKDSKTLLFGEKPVTVFGIRNPEEIPWGEAGAEYVVESTGVFTDKDKAAAHLKGGAKKVVISAPSKDAPMFVVGVNEDKYTSDVNIVSNASCTTNCLAPLAKVIHDNFGIIEGLMTTVHAITATQKTVDGPSAKDWRGGRAASFNIIPSSTGAAKAVGKVLPELNGKLTGMSFRVPTVDVSVVDLTVRIEKGASYEEIKKAIKAASEGPLKGIMGYVEEDLVSTDFTGDSRSSIFDAKAGIALNDHFIKLVSWYDNEWGYSNRVVDLIRHMFKTQ

SEQ ID NO: 62396 - protein, 954 aa, Glycine max
  Clone ID: 701044945_FLI.pep
FLPLPPPPTTPFSLPISLLCPTQSISLASADSSGIMARVLVQSTGMPGLLSGQRHGKHKGSGKSKRSVKMMSTLRMPALRMSSFSGLRTLNPMDSLSRPRHTFPLNTTSRRERAKRCVPKAMFERFTEKAIKVIMLAQEEARRLGHNFVGTEQILLGLIGEGTGIAAKVLKSMGINLKDARVEVEKIIGRGSGFVAVEIPFTPRAKRVLEFSLEEARQLGHNYIGSEHLLLGLLREGEGVAARVLENLGADPNNIRAQVIRMVGEGADSVGATVGPGSSNNNKMPTLEEYGTNLTKLAEEGKLDPVVGRQQQIERVTQILGRRTKNNPCLIGEPGVGKTAIAEGLAQRIANGDVPETIEGKKVITLDMGLLVAGTKYRGEFEERLKKLMEEIKQSDEIILFIDEVHTLIGAGAAEGAIDAANILKPALARGELQCIGATTLDEYRKHIEKDPALERRFQPVKVPEPTVDETIQILKGLRERYEIHHKLRYTDDALVAAAQLSHQYISDRFLPDKAIDLIDEAGSRVRLQHAQLPEEARELDKEVRQIVKEKEEFVRNQDFEKAGELRDREMDLKAQISALIEKGKEMSKAESEAGDEGPMVTEVDIQHIVSSWTGIPVEKVSTDESDRLLKMEETLHKRVIGQDEAVKAISRAIRRARVGLKNPNRPIASFIFSGPTGVGKSELAKALAAYYFGSEEAMIRLDMSEFMERHTVSKLIGSPPGYVGYTEGGQLTEAVRRRPYTVVLFDEIEKAHPDVFNMMLQILEDGRLTDSKGRTVDFKNTLLIMTSNVGSSVIEKGGRKIGFDLDYDEKDSSYNRIKSLVTEELKQYFRPEFLNRLDEMIVFRQLTKLEVKEIADIMLKEVFDRLKAKEIDLSVTERFRERVVDEGYNPSYGARPLRRAIMRLLEDSMAEKMLAREIKEGDSVIVDADSDGNVIVLNGSSGAPDSLEEALPV

SEQ ID NO: 62397 - protein, 527 aa, Zea mays
  Clone ID: UC-ZMFLMO17265B01_FLI.pep
VVILSPHGYFAQSNVLGYPDTGGQVVYILDQVRALENEMLLRIKQQGLDITPKILIVTRLLPDAAGTTCGQRLEKVIGTEHTDIIRVPFRNENGILRKWISRFDVWPYLETYTEDVSSEIMKEMQAKPDLIIGNYSDGNLVATLLAHKLGVTQCTIAHALEKTKYPNSDIYLDKFDSQYHFSCQFTADLIAMNHTDFIITSTFQEIAGSKDTVGQYESHIAFTLPGLYRVVHGIDVFDPKFNIVSPGADMSVYYPYTETDKRLTAFHPEIEELIYSDVENSEHKFVLKDKKKPIIFSMARLDRVKNMTGLVEMYGKNARLRELANLVIVAGDHGKESKDREEQAEFKKMYSLIDEYKLKGHIRWISAQMNRVRNGELYRYICDTKGAFVQPAFYEAFGLTVIESMTCGLPTIATCHGGPAEIIVDGVSGLHIDPYHSDKAADILVNFFDKCKADPSYWDKISQGGLQRIYEKYTWKLYSERLMTLTGVYGFWKYVSNLERRETRRYIEMFYALKYRSLASQVPLSFD

SEQ ID NO: 62398 - protein, 403 aa, Zea mays
  Clone ID: UC-ZMFLMO17269H11_FLI.pep
ILKIQQLYDGSSCIFSHGQQRFRLLRHWLDVDGVPWGEVQIIEEDTPQRTPRDAFAQLAAPNSFRQCASSIMPSLHVYCSTQLDHVDSDMDRDSLSPTSTSSDHSITDKRIYLLGSRSSDLVRCGIADESSNEGQNSVHEQSCQSHDSVKEIDGYGQPDKNTNTGDEDNLCFISSKSFQRTRKKDTKQQKHYFTTKNASQAPLSFWPHWAYEMYDSYSLSRRAADLWRQVILNPSMDDHVRKPNYLSYCIGSKLPISESLRQELLEIDGVSYRLQREIQLLKAFNIIRCRNCLIHIARRSDMVVTSSDSPMSLHSRPHGFVKEIITVYNATGLALRGDPSKTHSWFPEYTWTIALCNACQSSIGWLFRVDDKNLHPGSFWAIRSSQISDDTQSRDRTDQTIHV

SEQ ID NO: 62399 - protein, 302 aa, Zea mays
  Clone ID: UC-ZMROB73066F09_FLI.pep
RAEVDFLGNLQHPHLVKLVGYCIEDDQRLLVYEFMPRGSLENHLFRKSLPLPWAIRMKIALGAAKGLAFLHEEAERPVIYRDFKTSNILLDADYNAKLSDFGLAKDGPEGDKTHVSTRVMGTYGYAAPEYVMTGHLTSKSDVYSFGVVLLEMMTGRRSMDKNRPNGEHNLVEWARPYLGERRRFYKLVDPRLDGNFSIKGAQKTAQLAHACLSRDPKARPLMSQVVEVLKPLQNLKDMASSSYYFQSMQHERRTALANPYGSQSMKAQSTFARNGQQPMRSLSYGPHASPYRQSPRLDSKRQ

SEQ ID NO: 62400 - protein, 462 aa, Zea mays
  Clone ID: UC-ZMFLMO17060D03_FLI.pep
LSEGEHVTLGWNEREDLKAVVNYLRTDGNVSCIGLWGRSMGAVTSLMYGAEDPSIAGMVLDSPFSNLVDLMMELVDTYKYPLPKFTVKLAIQHMRKIVKRKASFDIMDLDTIQVAKQCFVPALFGHATEDDFILPHHSDKIYESYIGDKNIIKFDGDHNSPRPQFYFDSITIFFHNVLNPPEVAEDHYFMTPHGSLGQGHWDTEQDIEYRFSQSPTGTANATTTEDAIAQLRSRRLMSRMEVPSGATTEDRTDRTEGFDSDLGPSSSSVSTATPPNGRNGRLLTPTSDDGEYVEYSIDSLSDMPHTVEDEDRMLMQAILESLKDYEQSNTKNVQSTASDPASKANGTVKDCNGVAAAALEQDASSFDAPDKHTNVPNSGEKVSEGQSTDCNAGKSSASVSASGSSEPLAPTQMVNGQPASVDSQKVTQNANGEDGTRATLVVQKSRTGGLIEKWGSFFKNND

SEQ ID NO: 62401 - protein, 751 aa, Zea mays; identical to SEQ ID NO: 51691
  Clone ID: UC-ZMFLMO17212G02_FLI.pep

SEQ ID NO: 62402 - protein, 136 aa, Zea mays
  Clone ID: LIB3079-030-A7_FLI.pep
TIVLLQVDPLGKVDPEVEDLLLEIADDFIDSVTAFACTLAKHRKSSVVEAKDVLLHLERNWHLSVPGFSREDKNPQRNSVKPLVDPQQSESDVTGIRGTSNKLGANNSVGNHQIRPPMAETSAVPTVGSLSKAPRF

SEQ ID NO: 62403 - protein, 204 aa, Zea mays
  Clone ID: LIB3116-022-D9_FLI.pep
LLHPGSDDSAQLSQIEIEKLLAQLVETEMDKRLVLGHVCYHIVAAGLNGYMATVTNLKSPVNKWKCGAAPITSMMTVKRWSRGAATSQIGKPAVHMASVDLKGKAYELLRQNSSSFMMEDIYRNPGPLQFEGSGADTKPISLCVEDQDYMGRIKKLQEYLEKVKSIVKPGCSQDVLKAAVSAMASVTEMLTIMSSLSFSGQATI

SEQ ID NO: 62404 - protein, 172 aa, Glycine max
  Clone ID: 700953859_FLI.pep
MALQLPPLPGRAMRFNSSVCSLPARKSSTFATLSQPRSDWVEATNSFFDQDKRPIMLFDGVCNLCNGGVKFVRDNDRNKTIRYEPLQSETGKILLRRSGRAPDDISSVVLVEKERSYIKSEAVLKIMEYIDLPFPQLAILLQFVPLFIRDFVYDNVANNRYLIFGRSESCEI

SEQ ID NO: 62405 - protein, 623 aa, Zea mays
  Clone ID: 700444114_FLI.pep
QASLRSLRPRPPSHPKPSARLSRQRRPTRAMSASPAAAAVLLILFALGAAGGVAADGSDHRYKMYEPVPLYANKVGPFHNPSETYRYFDLPFCSPEKVKEKSEALGEVLNGDRLVDAPYKLDFRSEVESKAVCSKKLTKEDVVKFRNAVAKDYYFQMYYDDLPLWGFIGKVEKGGKADPSEWKYYLYRHIIFDILYNNDRVIEINVHTDQSALVDLTEDKETNVDFLYSVKWKETPTPFEKRMEKYSSSSNMPHHLEVHWFSIINSCVTVLLLTGFLATILMRVLKNDFVKYAHDEEAADDQEESGWKYIHGDVFRFPKNKSLFSAALGTGTQLFALTTFIFLLALVGVFYPYNRGALFTALVVIYALTSGIAGYVATSFYSQLEGTNWVRNLLLTGCLFCGPLLLTFCFLNTVAIAYSATAALPFGTICVIVLIWTLVTFPLLVLGGIAGKNSKSEFQAPCRTTKYPREIPPLPWYRRTIPQMAMAGFLPFSAIYIELYYIFASVWGHRIYTIYSILFIVFIILLIVTAFITVALTYFQLAAEDHEWWWRSFLCGGSTGFFVYGYCLYYYYARSDMSGFMQTSFFFGYMACICYAFFLMLGMVGFRAALFFVRHIYKSIKCE

SEQ ID NO: 62406 - protein, 684 aa, Glycine max
  Clone ID: 700658146_FLI.pep
FPISQRQWQKPRNPNPKTPFSKFSTVFKSHGAMDFDHHLTELSASSPFIPSGEDFHFYYKFRNFRRPIEEIARRTQSMLDRIGSAENIWGRGSAFPGDVDDAYEWLVNANDDVLELVEELVDELRMLKKDEGEECDGANPKVPFHIPTIKKPQYAYNIVVDNSNEPFEHILLEKSDDGQRYIHPLEKLSVLDFVDKENLENLVPVEPPSIECTPFKLVEDVKGLKEVAAMLSSVNEFAVDLEHNHYRSFQGLTCLMQISTRTEDFVIDTLKVRNHVGPYLREVFKDPTKKKVMHGADRDIVWLQRDFGIYVCNMFDTGQSSRVLKLDRYSLQYLLQQFCGVTANKEYQSADWRLRPLPDVMLRYGREDTHYLLYIYDLMRIKLFALSKESEGSDNPLLEVYKRSYDVCMQLYEKELLKEDSYLHIWGLRGAGFNAQQLAVVSGLWEWRDGLARADDEGPGYVLPNRIILEIVFFFFTHFKANQMPVIISNLRRIVGRTKHPYVERSLDVIVNIVRHSMQNAAAFEEAALRLKEEHAASLSNVIPVKDGTEVPHTLQKDGCAARGSMGIENGSCVDITQNCMLSYDQEEKSFQHQVEDGLSDCLNSDLLRVKKEIKPEQSRSSLNIPSPLLLGNNEKSRLVAETPSVTYETSYSREKLVSGSPSTSNPIGMVMVDSAKEKKMNDE

SEQ ID NO: 62407 - protein, 57 aa, Zea mays
  Clone ID: 700153536_FLI.pep
APTPTKKKKVSCYLCSISRHDVIVLSVYFYFFYLFHFNQWKIMLPNYMVGHGSPPPS

SEQ ID NO: 62408 - protein, 648 aa, Zea mays
  Clone ID: 700381811_FLI.pep
RAASETAAATMATTAAASTALTGATTAAPKARRRAHLLATRRALAAPIRCSAASPAMPMAPPATPLRPWGPTEPRKGADILVESLERCGVRDVFAYPGGASMEIHQALTRSPVIANHLFRHEQGEAFAASGYARSSGRVGVCIATSGPGATNLVSALADALLDSVPMVAITGQVPRRMIGTDAFQETPIVEVTRSITKHNYLVLDVDDIPRVVQEAFFLASSGRPGPVLVDIPKDIQQQMAVPVWDKPMSLPGYIARLPKPPATELLEQVLRLVGESRRPVLYVGGGCAASGEELRRFVELTGIPVTTTLMGLGNFPSDDPLSLRMLGMHGTVYANYAVDKADLLLALGVRFDDRVTGKIEAFASRAKIVHVDIDPAEIGKNKQPHVSICADVKLALQGMNALLEGSTSKKSFDFGSWNDELDQQKREFPLGYKTSNEEIQPQYAIQVLDELTKGEAIIGTGVGQHQMWAAQYYTYKRPRQWLSSAGLGAMGFGLPAAAGASVANPGVTVVDIDGDGSFLMNVQELAMIRIENLPVKVFVLNNQHLGMVVQWEDRFYKANRAHTYLGNPENESEIYPDFVSIAKGFNIPAVRVTKKNEVRAAIKKMLETPGPYLLDIIVPHQEHVLPMIPSGGAFKDMILDGDGRTVY

SEQ ID NO: 62409 - protein, 215 aa, Zea mays
  Clone ID: LIB3587-224-H4_FLI.pep
EQQDRLKKLKSEHGKVQLGNITVDMVLGGMRGIIGMLWETSLVDPEEGIRFRGLSIPECRKVLPTAVEGGEPLPEGLLWLLLTGKVPTKDQVDALSKELLARSTVPAHVYKVIDALPVTAHPMTQFTAGIMALQVESEFQKAYGNGLPKSKLWEPTYEDCLNLIARLPPVASYVYRRIFKDGKSIEADNSLDYAANLSHMLGFDDPRMLELMRLH

SEQ ID NO: 62410 - protein, 278 aa, Zea mays
  Clone ID: LIB3608-019-G10_FLI.pep
TLFSEKTQQKPSLASLVRSPRCGASFGHGDTAAIPAMEYVNPLTGFRVDGRRPNEMRQLKGEVGVVARADGSALFEMGNTRVIAAVYGPREVQNKGQQVNSKEALVRCEYRMAEFSTGDRRRKPKGDRRSTEISLVIRQTMEASILTHLMPHSQIDIYVQVLQADGGTRSACINAATLALADAGIPMRDIATSCSAGYLCSTPLLDLNYLEDSAGGSDVTVGILAKMDKVTLLQMDAKLPIDTFENVMGLAIEGCKAIATYIREVLLENTKKLECQRG

SEQ ID NO: 62411 - protein, 250 aa, Zea mays
  Clone ID: LIB143-039-E2_FLI.pep
DARPRPVRFVTSKIIARSLEDILLDKVRKVPCIPLSDGSFTSISDGRIWLPYDVANSIPECSSIPNFLALYGNLRTVSPNLLPACCKNKYLMEEVRINDLADMLQRIGVRKLSGHDIVKNHIMVSLRNSLDANVADIVIREYVSFIMVHLQSSCTSCNFERGEIVSELRKSPIFLTNHGYKSPADEPIHFSKDYGNFGDATRLLQNVEISWIELDSTYLQHHGSQSSSFALEKWRQFFEEMGVTDFVQSS

SEQ ID NO: 62412 - protein, 157 aa, Zea mays
  Clone ID: 700577857_FLI.pep
HRLGNSDVVSADLAAAAVCGGQRLGSSTIPSWARWVLGGVVYTLVPFYNRVRHLEDETVGFVENAVEVVEHLAEVTEKLAANVAKQLPEDGSLQKAVEEVEHIAEVVDDDAEKVEAVTEKIDKVSDEIDAAVEPVIAELEKELDQSTASDDGVDTKN

SEQ ID NO: 62413 - protein, 461 aa, Zea mays
  Clone ID: LIB3354-029-H11_FLI.pep
VWWNMIKQILGRLPRKPGKAGDSREAAAAGNGTEPSNSYSVVRGMDPGNKRAGNGDYPVPSGLTSNPVMNGAVVYHSSEPLPAFKDVPASEKQNLFVKKVNLCCAVYDFADPTKNLKEKEVKRQTLMELVDYITSANGKFSEVVMLEITKMVSINLFRSSSPTPRENKAIEGVDLEEDEPLMDPAWSHLQIVYEVFLRFVASQETDAKLAKRFIFETEKHNGVAELLEILGSIINGFALPLKEEHKLFLVRALIPLHKPKCVSMYHQQLSYCITQFVEKDCKLADTVIRGLLKYWPVTNSSKEVMFLGELEEVLEATQLAEFQRCMVPLFRQIARSMNSSHFQVAERALFLWNNDHIENLIKQNYKVLLPIIYPALERNSRDHWNQAVRSLTLNVRKIFSDHDSAFFGECDQRFSDEELKQEESDSKREALWMRLEEMAASKPRENSPLGAPNGKPSQAAG

SEQ ID NO: 62414 - protein, 237 aa, Zea mays
  Clone ID: LIB3607-020-C4_FLI.pep
DGRRRHSSERWSCRRPRREPDAVGVHDLPCGCLGRPHLRLRHRHLRRRLRDGAVPAALLPARPGADGVGQGERVLPLRQPDADGLHVVAVRGRAAGVARGQPRDQGHGPAGRHAHGRRPVLRRGSRDRRRRQHRHARRRPHAARLRRRVHQPSQSQSAVPHHPELGASRQLCVLLLLLCDASRAWHVFTGVIGPCGRHLPLQRVHDRVPPLVQRSSIVAVVNLFIVAFFVTASARGQ

SEQ ID NO: 62415 - protein, 416 aa, Zea mays
  Clone ID: LIB3732-004-H8_FLI.pep
GPCHSGGAGTGHDAHTYGGMSNTFKLLIVLGLLVCSIAFAAMAILKARSLKKASEARAWRLTAFQRLEFTCDDVLDSLKEENIIGKGGAGIVYKGTMPDGEHVAVKRLSSMSRGSSHDHGFSAEIQTLGRIRHRYIVRLLGFCSNNETNLLVYEFMPNGSLGELLHGKKGGHLHWDTRYKIAVEAAKGLSYLHHDCSPPILHRDVKSNNILLDSDFEAHVADFGLAKFLQDSGASQCMSAIAGSYGYIAPEYAYTLKVDEKSDVYSFGVVLLELVTGKKPVGEFGDGVDIVHWVRSTTAGASKEQVVKVMDPRLSSVPVHEVAHVFCVALLCVEEQSVQRPTMREVVQMLGELPKPAAAAAAAGQGDEVPGSGDGDECSAAPSGAPAADESVEAPHGEATKEPSSQSSPTTDLISI

SEQ ID NO: 62416 - protein, 310 aa, Zea mays
  Clone ID: LIB3595-035-F10_FLI.pep
LITAAAAAAMEASSKKLQAFILTLLLVLSTAVTPILSLSVPDDEVACDCDKPKAPKPSHPPKTKPSHPSPSPKPKNPKPPKGSTGYPAPGHQPPKSPSYPPVVGPPKGPVTRPPVMRPPVVGPPKGPVTRPPVTRPPVVGPPVTYPPITGPPTTPPVVGPPVTYPPITGPPTTPPVVGPPVTYPPITGPPATTPPVTGPPVTYPPGGGGGSSTPCPPPPSPTPTPSSPTCPADSLKLGACVDLLGGLVHIGLGDPVVNKCCPGLVELEAAVCLCTTIKLRLLNINLYLPLALQLLLTCGKTPPPGYTCTV

SEQ ID NO: 62417 - protein, 1009 aa, Zea mays
  Clone ID: UC-ZMFLB73001F11_FLI.pep
VEQGPMGEEAESNCKRKAPDSSVEEQPSLAPAPAQSQADPAAKRPNISRSCVHEVAVPNGYESVKDEAVHGTLASPAFNGEMAKQYPFKLDPFQSVSIACLERNESVLVSAHTSAGKTVVAEYAIAMAFRDKQRVIYTSPLKALSNQKYRELSQEFTDVGLMTGDVTLHPNATCLVMTTEILRAMLYRGSEVIKEVAWVIFDEIHYMKDRERGVVWEESIIFLPPAIKMVFLSATMSNATEFAEWICSLHKQPCHVVYTDFRPTPLQHYMFPIGGSGLYLVVDENGQFREDNFAKLQDSFAKPNNQLDGRKGGGPKASGRIAKGGSASGNSDIYRIVKMIMERKFQPVIIFSFSRRECEHHAMSMSKLDFSTEEEKECIEQVFCNAIGCLVEEDRSLPAIELMLPLLKRGIAVHHSGLLPIIKELVELLFQEGLVKALFATETFAMGLNMPAKTVVFTSVKKWDGDSNRYIGSGEYIQMSGRAGRRGKDERGICVIMIDEKMEMSVIKDMVLGKPAPLVSTFRLSYYTILNLMSRVEGQFTAEHVIRHSFHEFQYEKALPEIAQKITRLENEATLLDSSGETDLAEYHKLGLDISELEKKIMSEMIRPERALLYLVPGRLVRVRDGSTDWGWGVVVNVVKKPPASGTLPPALSASRSNNYTFDTLLHCSSNSSENGSRSKPCPPRPGEKGEMHVVPVPLPLVSGLSSVRINIPPDLRPPEARQNILSAVQELGKRYPQGLPKLHPINDMGIQEPELVDLVHKLEDLEQKQCSHRLHKSGQSEQELSWYQKKADLNTEIQQLKSKMRDSQLQKFRDELRNRSRVLKMLGHIDADGVLQLKGRAACLIDTGDELLITELMFNGTFNDLDHHQVASLASCFVPCDKSSEQIRLRNELSRPMMQLQEAARKIAEVQRECKLEVNVEEYVESTCRPYLMDVIYCWSRGATFAEVMEMTDIFEGSVIRLARRLDEFLNQLRAAAEAVGEVNLEKKFKNASESLRRGIMFSNSLYL

SEQ ID NO: 62418 - protein, 301 aa, Zea mays
  Clone ID: LIB3689-260-G9_FLI.pep
PLFSSSDHLLLLALRLPNLAAVSWAWDSRSAICVRVWPATAPPEAALPSAPLREAWPSPTSSPTRDAAAAPAPTPATAPSRLAPTPLKWYCPSCVEPDVALKHKNHGRSHEGCDVCEWLVVKPEEPAEDVSEPELAVKTQESSVSSMGEDSEPDLSTTALANLCKNCGTCEDEDRKFMVCGHGLCSFKFYHVLCLKERQIASEKQKNLKCWYCPSCLCRRCFKDKDDEKIVLCDGCDEAYHIYCMDPPCESVPRGKWFCTRCSARRSVQGMQRYEKSILEKVKRAPGANGPKVQASAGPEK

SEQ ID NO: 62419 - protein, 346 aa, Zea mays
  Clone ID: LIB3607-008-C8_FLI.pep
KNTQGTMCGGAILAELIPPTRRVASKPVTEGHLWSASSKKAGSGRDKRHQHEYADDDFEAAFEDFDDDFDVHEDDEDGHFVFSSKSALSPALHDGRAASQKKQRGRQFRGIRQRPWGKWAAEIRDPHKGTRVWLGTFSTAEDAARAYDVEARRLRGSKAKVNFPAASGRARGRARPRRGDDGNPRTAPETQHPAQPALLPRGERETQRKEGIAAVKPEATESFDVGGGLFFDMAFPTFPASPPPQAVDTSFAGSTATSETGSPAKRPRCDEDSSEGGSGSALELADELAFDPFVLLQMPYSGGYDDDSLDGLFAADEAVQQDVGNGMDGVRLWSFDEFPAVDGSVF

SEQ ID NO: 62420 - protein, 419 aa, Zea mays
  Clone ID: LIB3591-077-E5_FLI.pep
LAHPVGQPKPSRNRKDLARPPFPSSSLCRSCHPPSVHPTNNPSATTPRCGDVRRRHPLGFHPAVRGAGGGSGGQEETAAARLAFAAAVGAPRTAVDGVMTPKDGEGDMPTTATNSAANKRRRKNQYRGIRRRPWGKWAAEIRDPSKGVRVWLGTYSTAEEAARAYDAEARRIRGKKAKVNFRDEAAAAAGAQKAPAATTPTACGNAARLGPPPPPPKFRADEVFGNMNGGTGSNDLFAIMFAFSDSSSKVVRVEPGEGAAGFLPADLLPGSKRSAANMLLLSDQSSDSYGSCDLGWEWDWDDDTMTSDYASVFAPAAPSNVVPAWYTQGGPVSKRTRSSYGYGAAMPGGFDPETNYQYQPLPYVVESSPSDGASTDDMDCLQMMRAGDVPQDGASSGGGGGDGGDIWSLDELLMAAGAY

SEQ ID NO: 62421 - protein, 328 aa, Zea mays
  Clone ID: LIB3354-048-E2_FLI.pep
DFLAARRVQYGYENSRAGKPVAGRQRGGRGDGEPRRRPLAAAGSPPRLRPLPVSRRRGSRQQQQQQQRRGRRVAPAAFRGGRRSSPAAREAPGVQEQAEAARGGDAGEPQRDALPRAGDRQRRRHRRRHRGLLPPPPARSLRPQRHGRGHQRHAAGARGGRRGSGRRAARPVRDTVHVRGFPPGAGAAGGHGAHRVPGGGAGAGGGRERHGGAHRVGPRHGDRRNVRQRHLREAAAGPGRRRGGRRAVRLVRGRHRAAAGAAAEQRGSRRAAVHVRRPADAAAPARHVRPVGARGCDAPTADVVLASARCTSCDLHRLPARRIPSPPF

SEQ ID NO: 62422 - protein, 259 aa, Zea mays
  Clone ID: LIB3354-046-G6_FLI.pep
GGPYGDHDGGSSSSGPAGDGHGGSGGNGEMVARRPRGRPAGSKNKPKPPVIITRESANTLRAHILEVASGCDVFESVSTYARRRQRGVCVLSGSGEVTNVTLRQPSAPTGAVVTLHGRFEILSLSGSFLPPPAPPGATSLTIFLAGGQGQVVGGNVVGALYAAGPVIVIAASFANVAYERLPLEEEEAAQQAAPPGLQMQPPSSGVDGAGGMGGGPFPPDPSAAGLPFFNLPLNNMTGGGSQIPPGADGHGWAGARPPF

SEQ ID NO: 62423 - protein, 258 aa, Zea mays
  Clone ID: LIB3180-012-D8_FLI.pep
GPYGDHDGGSSSSGPAGDGHGGSGGNGEMVARRPRGRPAGSKNKPKPPVIITRESANTLRAHILEVASGCDVFESVSTYARRRQRGVCVLSGSGEVTNVTLRQPSAPTGAVVTLHGRFEILSLSGSFLPPPAPPGATSLTIFLAGGQGQVVGGNVVGALYAAGPVIVIAASFANVAYERLPLEEEEAAQQAAPPGLQMQPPSSGVDGAGGMGGGPFPPDPSAAGLPFFNLPLNNMTGGGSQIPPGADGHGWAGARPPF

SEQ ID NO: 62424 - protein, 371 aa, Zea mays
  Clone ID: LIB3357-058-F2_FLI.pep
IRVSFPFLLAPSTPLHSATPPTSRLPDPAMEKMLHSAPAHGRLPECFIFPADKLPQAKATSATVSLPIVDLSLGRDEVRRAILEAGKEIGFFQVVNHGVSLEAMQDMETVCQEFFRLPAEDKAGLYSEDTGRATRIYSSTMFDTGGEKYWRDCLRLACSFPAVGDSAAAWPDKPRRLREVVERFTVQTRGLGMEILRLLCEGLGLRPDYLEGDISGGDVVLHVNHYPPCPDPNATLGLPPHCDRNLLTLLLPSMVPGLEVAYRGDWIRVEPVPGAFVVNFGCQLEVVTNGILKSIEHRVMTNLGVARTTVATFIMPTTDCLIGPAAEFLSDDNPPCYRTLTFGDFKRIYSVVKLGSSLNLTTNLKTVQKEL

SEQ ID NO: 62425 - protein, 286 aa, Oryza sativa; identical to SEQ ID NO: 58479
  Clone ID: UC-OSFLM202012A10_FLI.pep

SEQ ID NO: 62426 - protein, 259 aa, Zea mays
  Clone ID: JC-ZMSHLIB3569P056D11_FLI.pep
QSFSSILISLSRVKSRAATKQALLSLPIHGARCRQPERHRAPPRPAWDQQQQQRRLAEEAVALRRGQARSGRRHQERGLGDQHGRRRPRLRPRHRRASQVRTRPPCTRHAPFVGTACIKIQETGVHGLINLPFSLRQGASGRVAAGEGVQEEHLPGGGGQKGRAEAAAGRPVREGEHGRRAVPQEGGPPDVQGVQGAQGGSGRALHQLLLRGGGRGRRRPPARHRLRGQGRRPHARRRRALGYVHLFVQEAEDNEGLCL

SEQ ID NO: 62427 - protein, 603 aa, Oryza sativa nipponbare
  Clone ID: JC-OSROLIB3475021B12_FLI.pep
LRPHLCFLSLLLLPRLFLGSRPRTAGGMKAGERPKLVRGVRQESRRFRLLVIVVGFFLVSLTFVFVSKPDAILFSLNGKLPVEQAPTSILIQQKVNEPSGESRKTSTDALRGDPKVVDDEADAKPKGTGGGSEEEEGRVLSEPDPTSGMMEPTHNKDGNGHKSHQETLGGGGDGESKGNDEEGEHAEQKHKVTLPTVSNYTIHDAAEDTENAKQEGMNNVQQGSKPLCDFSNFRANVCEMRGDVRIHPTATSVLFMEPEGSQRDEVWKIKPYPRKGDEFCLSHITEVTVKSSKVAPECTKYHDVPAVIFSLTGYTGNLFHDFTDVLVPLFTTASEFNGEVQFLITDMALWWTIKYQTVLQKLSKYPVIDFSKDDQVHCFKHAIVGLHAYMEFTIDSTKAPHNYSMADFNRFMRGAYSLGRDSVTVLGEYPKIKPRLLIIKRHRTRMFLNLDEIISMAEELGFEVVIDEANVSSDISRFARLVNSVDVMMGVHGAGLTNCVFLPQHATLIQIVPWGGLDWISRTDFGNPAELMGLRYKQYSIGVDESSLTDQYPRDHEIFKNPISFHQRGFDFIRQTFMDKQNVKLDCKRFRPILLEALDNLNP

SEQ ID NO: 62428 - protein, 163 aa, Zea mays
  Clone ID: 700050415_FLI.pep
FKRSMLSFHNALFKQRTHKKNIPANTWLLALRHTSNDVFSQGQDLEVLLLPQLVGDGAEDTDADQLALLVHEDHLVVVELDLAVVAAPFLHGDADDHAVDYVSFLDLATRLGLLYGSDDHVPEPCSFLPPQGLDAHHPLGPGVIDHLQVSPRLDECSDLLKMG

SEQ ID NO: 62429 - protein, 545 aa, Zea mays
  Clone ID: 700204782_FLI.pep
AAGLLSRLPSSRALLLGLASAAACSSGRHPAPCIFAAARGYTMEGAGRDANPLGGYRIGKTLGIGSFGKVKIAEHILTGHKVAIKILNRRKIRSMEMEEKVKREIKILRLFMHPHIIRLYEVIDTPADIYVVMEYVKSGELFDYIVEKGRLHEEEARRFFQQIISGVEYCHRNMVAHRDLKPENLLLDSKCNIKIADFGLSNVMRDGHFLKTSCGSPNYAAPEVISGKLYAGPEVDVWSCGVILYALLCGTLPFDDENILNLFKKIKGGIYTLPSHLSPSARDLIPRMLVVDPMKRITIREIREHVWFKIQLPRYLAVPPPDTAQQVKKLDEETLNDVIKMGFDKNQLIESLHNRLQNEATVAYYLLMDNRLRTTSGYLGSEFQESMDPSFSQVHAETPTSATEHRQHVFTESPGSGLRQHFASERKWALGLQSRAHPREIISEVLKALQELNVYWKKIGHYNMKCRWSPGCLESMMHNCDGFSAESAIIETDDLIAKSTRIVKFEIQLYKTRDEKYLLDLQRVSGPQLLFLDLCSAFLTQLRVL

SEQ ID NO: 62430 - protein, 184 aa, Zea mays
  Clone ID: 700151154_FLI.pep
ASNRSLPLVTSLPLPAPLRPPRHRPFARQETGPETMADQLTDDQIAEFKEAFSLFDKDGDGCITTKELGTVMRSLGQNPTEAELQDMINEVDADGNGTIDFPEFLNLMARKMKDTDSEEELKEAFRVFDKDQNGFISAAELRHVMTNLGEKLTDEEVDEMIREADVDGDGQINYEEFVKVMMAK

SEQ ID NO: 62431 - protein, 555 aa, Zea mays
  Clone ID: 700083193_FLI.pep
FPSTTPPVHGFQQSIPEGGGAMWHEARRSERKVHDLMDAARRRAQRRAVYLARRRGDPQQALQVSGTRCRVHRDDALYQATEDQQGLIQWNGKQDVLIDRFDGRALLDFIRDSSSRPFRVQGKSEEEEELEEFVNFERYRDLIKHRRRGFSDEAGLQHVVQELEAKALLPFSFDKPQSSQPPASKGAYSQVGYSYKGDGNEESEDLDSDDDDEEEEVDDDDKDFSSDDSSDERMESIAKEFGIKRYNWLVYMDKKNKEQEKRQKEIVKGDPSIKKMSRRERRKASQIEREKEREAARSVGRVSYRDPYREQRRSPSYEAYSRGRRSRSRSRSRSPSHSRRHGRGIHAESNYWSKQKAPRVEYITEFGGSDDTSEPKVSGISPPSSPIRIDIPNRLSGGQILEALHSDPASSLSVEQERTAKLLKPSPSTSSALAKLSKVASGGTGKTPQTEKKETPQERLKRIMSKQLNKQIKKDTAAEIAKKREQERQRQEKLAEVGRYKRRSRSRSLSRSPPRRRRYSRSRSRSRSPRRYRSRSLSSSRSPSRSPRYRSRSRH

SEQ ID NO: 62432 - protein, 201 aa, Zea mays
  Clone ID: 700224560_FLI.pep
KPTLSQIHRRLGSPIFAPSTESPMARTKQTARKSTGGKAPRKQLATKAARKSAPATGGVKKPHRFRPGTVALREIRKYQKSTELLIRKLPFQRLVREIAQDFKTDLRFQSSAVPRCRRPPRPTSWGSSRTPTSAPSTPSASPSCPRTSSSRAASGARGLDLPLSSSTLLGLSSVSLLVESLLLFGSFCSHDGVRSVRSCIF

SEQ ID NO: 62433 - protein, 974 aa, Zea mays
  Clone ID: 700207535_FLI.pep
PRSRWRQRQRRRWGAMALNMKTLTQALAKASAVIEKTVSTTVQEVTGPRPLQDYELLDQAGSGGPGLAWRIYTARPRDGAPSAPYPVVSVWVLDKRALAEARARAGLSKAAEDAFLDLVRADAARLVRMRHPGVLHVVQALDETKAAMAMATEPVFASVANALGCLDNVGKVPKELKGMEMGLLEIKHGLLQVAETLDFLHNNAHLAHRAISPETVFITSNGSWKLGGFGFALSVDQATGGLTSSQLFHYSDYDVEDTALPLQPSLNYTAPELVRSGDSKVGSACDMFSFGCLAYHLVARRPLLDCHNNVKMYMNALTYLTSEAFSNIPSDLVSDLQRMISMDAVSRPSAVAFTGSSFFRDDTRLRALRFLDHLLERDNMQKTEFLKALSDMWKDFDSRVLRYKVLPPLCAELRNMVMQPMILPMVLTIAESQDKGDFELATLPALVPVFTSASGETLLLLVKHADLIINKATQEHLISHILPMLVRAYDDNDPRLQEEVLRRTVSLSRQLDTKLVKQAVLPRVHGLALKTTVAAVRVNALRCLGDLVPSLDKEGILGILETVRRCTAVDHTAPTLMCTLGVANAIYKQCGVEFAAEYVIPLIFPLLTAHQLNVQQFAKYMLFVKDITSKIEEKRGVTVTDNGNTEVKASPSLANGIHSEPMPGQIPAAKSSPPWDEDWGPSKKTGVPSLSVDSSAQTKQPSVHPFDFSTQTKQSTPLPFDLSTRAKQPSLVSHATAATIPPAQPQPVQSLVPSSGPQTSGSCAPVDIEWPPRRSSSSDFNASLSISKENESGRLSSDGLDDIDPFADWPPKPSNVTSITATEHRPSINQNISGFSSGNIGFGGNGNSIGQAKSNQMSWSNTSNLMGMNSTGSYLNQGSAALGFGNPIGGLSTGLSNPSSSSTGLSMMQRKSDFGSLSMSANNAANGPPRLAPPPSTSVGRGRGRNQGQSALSRASRPPHSNSSSGQQPILDLL

SEQ ID NO: 62434 - protein, 144 aa, Zea mays
  Clone ID: 700258323_FLI.pep
SYAHVWSPTRVLGRRLTALHYSGHTCQTRSGTSYDYPTTTTTLHSCSYVLHAKRGHASDLGLGPELGLVDLDALPGGALAAGLLHGAQAALPPHLAVPFVAQLLFAGLPALAAHLAVPLMAQLLTPGLPAVTAPCTNRPTQSFN

SEQ ID NO: 62435 - protein, 449 aa, Zea mays
  Clone ID: 700331973_FLI.pep
FLSTKILYSYTSFVLLQENSFCIFSYCMHFQRIKTKKNRNWKRVTDKCWFHCCITDGGENQKGMMWLVLESYPATQLLPFTLKILSSSDVICRTAGEQPLCMSSSSLVSPLSHAAAAATARRSRYRWHTAHSTDTAASAPAIPPFIILDTTTGTADPADSQTAARPSAHPTAASSTRSAWLWEPASASRMRTAAGTAPRRTISARARRVAAMAARHDSPAATACLSRPPLSSAGPTRRMSSPSSSSESATVARAAGAALRSSDSASLAASTRASSEVALRSTRARAAAVDGASAASAAATRLLLSSSMQSDAAMAASTRTAASAASLPARRSTDAMVSAAPPARASAFLSNSSTSSSERKAASFRSGGQGSAAGSATRRRSSAAAAAGVGPTAGDEEEEGEEGAAVDAQSAMRRRRVRLGTRSVEGSESMVAGHVVLPESSQRWMEARS

SEQ ID NO: 62436 - protein, 963 aa, Zea mays
  Clone ID: 700282231_FLI.pep
TPHLDIWWWQGNANLPCCCFECSGGCRMDRRSWLWKRKSLDKSPGESDSSGSASSHSEPSFDDQEPKPVSSNSSPNHSHSPDVSSRIIYNENQEAERAESLNEKLVLATSSNDSSPQHDQSMKPDIYQSPLLFPNIRNDDVPDSVKNLNEKVSPKFKVDDVQDSVKSLNEKLSAALLTINDKDDLVKQHTRVAEEAVAGWEQAEAEVASLKQLLETASKKNTSLEDQVSHLDDALKECVRQLRQAREEQENKIHETVAKKSKELESEKFELQHHIAELSKQLQATKLEATTVRVQRDLQEKLQIVEKENKDLKVELLALSKDLKILARERDLSNQAAETASKLHLESVKKITRVEAECLKLRHLTRRTSLTNDSRLITNSACMESQTDSQSDSGEHMLVDEMKNSDSWATALIAELDQFKNANNDTRNLVNNSVEIDLMDDFLEMEKLAALPEVDCVSSSFGAETDSDQGVSRDKSSKVKTEPLQCQVTDLHAKIEKIEGEKRELEMALADARVQLGTSCDALMVANNRLIDLQMQLDLANESKHAAFGEAERLNGERKDLALQLESRSSQVDELQLMVASLEKNVDRKVLELQLELVSVEAADLRKTVASLEEKIDAEITLSMQHKTNADLAEASKESLEAQLQSANTEIGKLNGIVQTLENEVRKETDSREELLKQIEAMKIESERSLSVVSTKESLEVQLQVANSEVAKLRGMVNALECDAANEKAYSSDLQMQLEAVEGIRKVLESELESSHQEVMRLKEKVSSLEARIKDQTSLLVEYTAKSEDAVSRKKAMEGQLEAANLEVTKLRNKVSLIQGKVEQEKLLSEEYEAKCRKLEAQVLRDSREAKLWRLTNSNGDLKVKQEKELVSAAGKLAECQKTIANLGRQLKSLTDLDGVVADPEKLESRDTHLDFRDGGDVADGLYELGLPKRNGSCLSPLRSDPSPRGLPSLSSYLSKTKR

SEQ ID NO: 62437 - protein, 1086 aa, Zea mays
  Clone ID: 700348044_FLI.pep
SSGSTTFTKIVNKWNTALIGLMTYFREATVHTQELLDLLVKCENKIQTRIKIGLNSKMPSRFPPVIFYTPKEIGGLGMLSMGHILIPQSDLRYSKQTDVGVTHFRSGMSHEEDQLIPNLYRYIQPWESEFIDSQRVWAEYALKRQEAQSQNRRLTLEDLEDSWDRGIPRINTLFQKDRHTLAYDKGWRVRTDFKQYQVLKQNPFWWTHQRHDGKLWNLNNYRTDVIQALGGVEGILEHTLFKGTYFPTWEGLFWEKASGFEESMKYKKLTNAQRSGLNQIPNRRFTLWWSPTINRANVYVGFQVQLDLTGIFMHGKIPTLKISLIQIFRAHLWQKIHESVVMDLCQVLDQELDALEIETVQKETIHPRKSYKMNSSCADILLFAAHRWQMSKPSLVSESKDVFDQKASNKYWIDVQLRWGDYDSHDIERYTRAKFMDYTTDNMSIYPSPTGVMIGIDLAYNLHSAFGNWFPGSKPLLQQAMNKIMKSNPALYVLRERIRKGLQLYSSEPTEPYLSSQNYGEIFSNQIIWFVDDTNVYRVTIHKTFEGNLTTKPINGAIFIFNPRTGQLFLKVIHTSVWAGQKRLGQLAKWKTAEEVAALVRSLPVEEQPKQIIVTRKGMLDPLEVHLLDFPNIVIKGSELQLPFQACLKIEKFGDLILKATEPQMVLYNIYDDWLKSISSYTAFSRIVLILRALHVNNEKAKMLLKPDKTIVTEPHHIWPSLNDEQWLKVECALRDLILSDYAKKNNVNTSALTQSEMRDIILGAEIAPPSQQRQQIAEIEKQSRETTQLTAVTTRTTNVHGDELIITTTSPYEQQAFASKTDWRVRAISATNLYLRVNHIYVNSDDIKETGYTYIMPKNILKKFICIADLRTQIAGFLYGLSPQDNPQVKEIRCIAIPPQHGTHQMVTLPSNLPEHEFLNDLEPLGWMHTQPNEAPQLSPQDLTSHAKILENNKQWDGEKCIILTCSFTPGSCSLTAYKLTPSGYEWGRSNKDNGSNPHGYLPTHYEKVQMLLSDRFLGFYMIPDNTPWNFNFMGVKHDPQMKYNMKLGMPRDFYHEDHRPTHFLEFSNIEEGEVAEGDREDTFT

SEQ ID NO: 62438 - protein, 1070 aa, Zea mays
  Clone ID: 700355972_FLI.pep
ELALGGGGGAAAKMTAPRGGGDEPPPSSAAAGHAAGNEPVTPTSALVSGLNRRGSRGAGMATFSMEVFDNEVVPSTLNSIAPILRVAAEIEHERPRVAYLCRFYAFEKAHRLDQNSIGRGVRQFKTALLQRLEKDNSPSLAKRVKKSDAREIESFYQQYYENYVRALDKGEQADRAQLGKAYQTAGVLFEVLCAVNKNEKVEELNPEIIRLHKDVQEKKDIYTPFNILPLDAASASQSIMQLEEIKAAVAALRNIRGLNWPSTFEPQRQKGGDLDLLDWLRAMFGFQRDSVRNQREHLILLLANVHIRLEPKPDPLSKLDDRAVDVVMTKLFSNYRKWCKFLSRKHSLRFPQGAQPQEIQQRKILYLGLYLLIWGEAANIRFMPECLCYIFHNMAYELHGLLAGNVSIVTGENIRPSYGGDEEAFLKKVVTPFYRVIRKEAGKSQHGKTPHSAWSNYDDLNEYFWTSDCFSLGWPMRDDGDFFKSVHDSRPVTTAGSSPQKDSTKSTGKTNFVETRTFWHIFRSFDRMWTFYILALQAMLIFAWNDYSVTEILRKDLLYYLSSVFVTAAFLQFLQSILDFILNFPGSHRCKFVDVMRNVLKMIVSAMWAVVLPFFYISTASKVNLLPFKDLEKWLRYVNGVPPLYILAVAVYLIPNILSAALFLFPMFRRWIENSDWHIVRLLLWWSQKRIYVGRGMHESQVSLFKYTFFWILLLCSKFSFSYFVQIQPLIKPTKDVMGVHNIHYEWHEFFPNASYNIGAIMSLWAPVLLVYLMDTQIWYAIFSTIFGGMTGALGRLGEIRTLGMLRSRFHSLPGAFNTYLVPSDKSKNRRFSLSKRFAEVSPNKRTEAAKFAQLWNEVICSFREEDLISDGEMDLLVVPYSSDPSLKLMQWPLFLLASKIPIALDMAAQFRPRDSDLWKRICADEYMKCAVLECYESFKLVLNLLVVGENEKRIIGIIIKEIEGNIGKNTFLANFRMSALPVLCKKFVELVSTLKERDASKFDNVVLLLQDMLEVITRDMMVNEIRELAEFGHGNKDSVPRRQLFAGSGTKPAIVFPPPVSAQWEEQVI

SEQ ID NO: 62439 - protein, 115 aa, Zea mays
  Clone ID: 700467150_FLI.pep
MLSRNSSPQRGDPFLVEHLHCAVFISFSIKSVVLGQISNFFLLQRNSITSPQLKVIKPNLNIPLVPTGQRCLKNMNKCCLLCYLHLASAAKQFNLTMAEPSEGSPVCGEYEPMSG

SEQ ID NO: 62440 - protein, 1142 aa, Zea mays
  Clone ID: 700468301_FLI.pep
CKCGYDICVWCWHHIIDMAEKEETVGRCPACRTCYDKDRIVKMAATCDRTVAEKNAEKKHRTQKVKPKAAPSAAATSTVESKKHLASVRVIQRNLVYIIGLPAHLCNESVLECREYFGQYGKILKVSVSRPTGPPSQQASANSNISVYITYAKEEEAIRCIQAVHNFVLEGKVLRACFGTTKYCHAWLRNMTCGNPDCLYLHDVGSQEDSFTKDEIISAYTRTRVPQMASGVSQRRTGTVLPPPGDDFSYSAVVSAKHTFKNGTLNTTSQPRLSPPNSSSGRSTLPSAASWGQRDLNARTTATGATSSQSHTKPKSESQSNPFSSSSVFSCTKTPSSWNDDTSTAAKISEGQQLSEKESRTLQPYKPGISKETQALSSLESSLDIDFSTIPSAWNDDDIVVPDVMPKGSDENQVANKNGELTHPASKSLVLSKKDIKMNITSKTPSDFVSSPAISKSDVSTSDGDHSLTNITPKCLASNAVECQSSHTAVEKMLEDIGSKDTDMEKLSAQISSVTLGGNDEIQSMAGNQQPDVMPCTSVDVLMDQNFGRDLAHPNPDELLLPSENKDSIVSCQYSSDKRLDWSLEMQNCSVTPLNDRMDSALLTDKIHSRQLDGSEQSSYSSFVEFPSTVDTSLWNDTENNAALTIDNITSSQMQPGFSSTDNTYALLNGGQDGLGTVYTHDNVSVYTHGNVSGHPGMGSHHHRAMGSLRNNSIGSFDKTISVNKYERRIISDTLSEFNPWDDSYSTANNFARMLRESKNNDVHCIAPSWKSGTGIKESRFSFARQDNQGNLFDSSLRNCGTGTEQNFSLLPQNSRGNIYQNGLAFQSLENEFSNNNSPGVLDMATTGTSMSKISAPPGFSAPTRVPPPGFSTAFPSQDSLNPTPVFPSGILCHGGSIPPPRFSSFSSGISTQEVSKPPTRPPSPFSSRFSSQDGLDPSSRFPFSSGFSSHDGSNQSYGSTNPENLLRGTVQGGNSNHYQSQFGRHSSDMEFDDPAILAMGKGLMPGIGDSGLEMKNTPAFQAQLQPASSDPRFQLHVQPNVQSRQNMRFTDPMQDGLNHMNDNYLASRFLAQNQGPLSPYVQIPQQPRNSQVINGHWDGWSDLRQGNNAPMSDMSRILYPSEVNKLHMLGSNDVHNRAFGM

SEQ ID NO: 62441 - protein, 684 aa, Zea mays
  Clone ID: 700449070_FLI.pep
KDSDPSSSSAAADSSMASLIERATSTTAHAVDPVLLRAIKSSARASDAAIRDAFRLILSLMSKPHSHVRLLAFSIADELFMRSKLFRSLLADSLDGFLPLAVGFRRANPLPPPTTSAALLRKAAVQALERWHHLFGAHYRQLRLAVEYLKESARVQFSGLRATVDARAAREARMQEIYAGKVEQLRENLASIKAEIRSTIDEIRNGLEIIRAEHKKFEGYYVDDEEEIASLSMRSIRTASLMAGEWVPETQENEAVFDALREAHRLLVSKHLVTVQEWITVLVRVNLPDNRFRDSALKDFIDVKNEIRAVRDHCSELGLDLDNFHRRKGDQEEEDNEFWVEGNIEAPNRARVQSSLDVASTSKDTEKGKWVVGGVSHIGKAPVAANGTRNLDPEKSKLLAEAPVLPWSSVLDRWGSSGDVHVNQRGLEVESHWGRVDNDATIPAAKIAELNVHCSIYREDPVEILPCHAPLKKGGLCQRRDLRVCPFHGPIVPRDAEGNPIEQNSGSSDAEVNPVEHLDIGGHSNELNGISDDDCMEGTSSRMAGVNNDYGDIAGTCDLGKITAEQLARQSVKNVRKREMDRKAQERAQRARIRQHNEDVLRNAALASTSYSAAAYEQPTEAHGRRGRRGKAKAPTLASMLKKKVTTKDRIAERLLNARATDATVRDVSHNEDMSYREAFPNQW

SEQ ID NO: 62442 - protein, 193 aa, Zea mays
  Clone ID: 700449336_FLI.pep
FKRSMLSFHNALFKQRTHKKKHSHKHLAMRHTSNNVFSQGQDLEVLLLPQLVGDGAKDAGADQLALLVHEDHRVVVELDLAAIAASFLHGGTDDHAVDYVSFLDLATRLGLLYGSDDHVPEPCSFLPPQGLDAHHPLGPGVIDHLQVSPHLDECSDLLTDSIAMRRPCYCPNRRVGSPKQTISKASHQSTSNW

SEQ ID NO: 62443 - protein, 148 aa, Zea mays
  Clone ID: 700574493_FLI.pep
SEIGDHRGGVEAGGASRRQVLCYSLHGHDVLEVGSQAAAPGDVHAACDATVPSVMVAKILLSVQLHCMPTRSEHGRKEGSKHSAQGYARVEVEAAVGDALDDGGAGREEGAELVAVQYHRQTARGAAGEQHLVSIGHPNGEEVPDDRV

SEQ ID NO: 62444 - protein, 166 aa, Zea mays; identical to SEQ ID NO: 60911
  Clone ID: 700578933_FLI.pep

SEQ ID NO: 62445 - protein, 142 aa, Zea mays
  Clone ID: 700615454_FLI.pep
RAATATARMPFKRFVEIGRVALVNYGEDYGRLVVIVDVVDQNRALVDAPDMVRCQVNFKRLSLTDIKIDIKRVPKKTALIKAMEEADVKTKWENSSWGKKLIVQKRRASLNDFDRFKVMLAKIKRGGAIRQELAKLKKASTA

SEQ ID NO: 62446 - protein, 233 aa, Zea mays
  Clone ID: 700704013_FLI.pep
IPPPHAKSARSSSSPEDQACAPEMSYAYLFKYIIIGDTGVGKSCLLLQFTDKRFQPVHDLTIGVEFGARMITIDNKPIKLQIWDTAGQESFRSITRSYYRGAAGALLVYDITRRETFNHLASWLEDARQHANANMTIMLVGNKCDLSHRRAVSYEEGEQFAKEHGLIFMEASAKTAQNVEEAFVKTAGAIYKKIQDGVFDVSNESYGIKVGYAIPGQSGGAGSSSSQGGGCCS

SEQ ID NO: 62447 - protein, 152 aa, Zea mays
  Clone ID: LIB143-065-H4_FLI.pep
FNHEFLSLSLSSEGAQLIGVAFGRSDLGLHSSIIPSFSFRQSSNSTASNMELCQTCATFQVVIDFTAAWCGPCRAIAPLFVEHAKKFTQVVFLKVDVDEVKEVTAAYEVEAMPTFHFVKNGKTVATIVGARKDELLAQIEKHAAPAPASASA

SEQ ID NO: 62448 - protein, 104 aa, Zea mays
  Clone ID: 700622608_FLI.pep
IRHETDMTASTLQMNMNPRSDHGSIMAGAVDRILFRRRYYIYTTRRRPLDSRAPSPDRLSCSCSRSSRSWCRSCRCCSRSRRPRWPPRSRRRWPWWSARRGPWS

SEQ ID NO: 62449 - protein, 653 aa, Zea mays
  Clone ID: 700623223_FLI.pep
KKKSSHTAHPHLSHHSAPPAPTNEATKPSRKLDRRQVQRSPRWILTTACRASCRRCRRSARSTSPRCPPASRVEYGDAAIAADQAGAHVISHAFPHTYGQPLAHFLRKTAVVLDAKVISEHPVVRVGIVFCGRQSPGGHNVVWGLYEAIKAHNQNSKLIGFLGGSDGLLAQRTLEITNEVLASYKNQGGYDMLGRTKDQIRTTEQVNGAMASCQALKLDALVIIGGVTSNTDAAQLAETFAEAKCATKVVGVPVTLNGDLKNQFVETTVGFDTICKVNAQLISNVCTDALSAEKYYYFIRLMGRKASHVALECALQSHPNMVILGEEVAASKLTIFDITKQICDAVQARAEKDKNHGVVLIPEGLVESIPELYALLQEIHGLHGKGVSVENISSQLSPWASALFEFLPPFIRKQLLLHPESDDSAQLSQIETEKLLAQLVETEMNRRLKEGTYKGKKFNAICHFFGYQARGALPSKFDCDYAYVLGHVCYHIIAAGLNGYMATVTNVKSPVNKWRCGAAPISSMMTVQRWSRGPSATQIGKPAVHMASVDLKGKAYDVLRQNSSRFLLEDVYRNPGPLQFEGPGADSKPISLCVEDQDYMGRIKKLQEYLEKVKSIVKPGCSQDVLKAALSAMSSVTETLNIMTSSSTGQTAL

SEQ ID NO: 62450 - protein, 136 aa, Zea mays
  Clone ID: 700570172_FLI.pep
QKLSISPTPRKKRSMASEQGVVIACHSKAEFDAHMTKAQEAGKLVVIDFTAAWCGPCRAIAPLFVEHAKKFTQVVFLKVDVDEVKEVTAAYEVEAMPTFHFVKNGKTVATIVGARKDELLALIEKHAAPAPATASA

SEQ ID NO: 62451 - protein, 171 aa, Zea mays; identical to SEQ ID NO: 48228
  Clone ID: 700570625_FLI.pep

SEQ ID NO: 62452 - protein, 135 aa, Zea mays; identical to SEQ ID NO: 58363
  Clone ID: 700574660_FLI.pep

SEQ ID NO: 62453 - protein, 76 aa, Zea mays
  Clone ID: UC-ZMFLMO17330H01_FLI.pep
YTDTCARSLVCRTRGSLYENVTNNHQHKGKQRARSSFSFCLVRFCPQGSSAGRGLTEFGASTYHQIQQFRCLHAQK

SEQ ID NO: 62454 - protein, 620 aa, Zea mays
  Clone ID: UC-ZMFLMO17336B10_FLI.pep
LPLFLPFPLLPLPFSFPFFLHTSKALNLPPGKNPRPAMSVPGAPAGGGSRSFDFGADDVLCSYDDFAASSEPKRPDPADSVPDFHDSRLGRPFVKPYEQESYGKEDVLSAVEKCMKKYADNLLRSLEGITSRLSQLEIYCYKLERSIGELRSDVLRDETDHRLKSLEKHLNEVHRSIQILRDKQELAEAQKELAKFQLTQDTSKKKEDVPTFIPEQKKPEENPDTSNQQLALVLPHQVNLPSLAPRASESVQQYKNQPVQPSDPTPPVPQQDRYVLSQAIVYYPQRQAPGIQDTQGQKLQPEVQYLPARPPAQDVPVHAPSQPPQAGNQTQPQPYPPYQQQWHQQSSQPAPAPVAQTQQTFSQTFPPPAQQPQLSNVQQFPPQPVQQPQSNAQQYPPPVQPQQSSPQLPQAMQPQHPPMQTQMRPQTPPNYPHYPPHQPLNPTPETLPGNVAMQGSYNTSVPSGANRPELPYSYGGAGIPLSQPLPQHNMQRHQLPPSSQGSFGPPPPSKGSYAGSPQYAPQGNPQGYSTGYAYPPNGPPAVQPQQMPPGGVGMSHPGSHMMRGHPYGEMMEKAITMGYPRDQVLNVTQRMAESGQSMDFNTLLDKLNEAGSGAPPPRAW

SEQ ID NO: 62455 - protein, 871 aa, Zea mays
  Clone ID: UC-ZMFLMO17344F09_FLI.pep
PPHRSCALFLVAGVRPPASGNRQPATTMEAALGALCRAGGWSYAAVWRFHPQDPRLLTLGDCYCEDEAKAMVQEMLNLVEVVGEGILGQALVSGECQWIYDDTCHALNQTSHADNGDLHLGYTWWQHQFLSGIKTIALLPLQLHGLVQFGSTRKVPRSSVFLNQVRDIFDRMKNASSDGPMEYTQNNSLACGQQPILTSSRPVNDMLVHSKVNPLQTEKLLEDIERTESIRSSICSPSNSQRSLNDLTSHGTGNSSMDTNILAMPVNSKSIYDLKRFDNVTELFHRSSNDRIGFQVNSSKEPGSTIAGVMSGYKSLNNIHMTENDSCDQNIEYTPYLYTTTNSSNSGLDELSYSGVALSSSFTAVSGKVKDCLQTESDKFLCKSVSFGSNPCASKFQENRLSPYHALMHEQSLIPDPGESVRLLSQEESFIVQGDSSQFKDTADFTSQGNSTFPELPNRSPEEATAETLENNMKDCSGNNSLLETMMLDLSTNSFVQDWWDNSVLLAENLPNSSEKDPEPAMELANRHSLPTGERGSPFIPVIEQMLGDVAHPPTPTGHSSLEAEATALAGRISDYQLPQFAFRDCLTVDNAQIPALACSNYTCRSRSAQNGSSEVPSANVSVDDTCSLNTANSNGSQSSNPEGTKVAKRRARAGESTRPRPKDRQLIQDRVKELREIVPNGAKCSIDALLERTIKHMLFLQSVNKYAEKIKQADEPKIIDKGSGVILKDNPVAGTNGGATWAYEVAGQTMVCPIIIEDLSPPGQMLVEMLCEEQGLFLEIADNIRGIGLTVLKGRMELCDGKIWSRFLVEANREVTRMDIFLSLVQLLEQNSLVRSTDQMAKVMNNGVPSFANHQRSPLLVPVGIPERLQ

SEQ ID NO: 62456 - protein, 281 aa, Zea mays
  Clone ID: UC-ZMFLMO17153B09_FLI.pep
MKGRGFLRRSLSSTESNVSRSKAANFENNDMTSTRQSTTDEFHNADVVPAELITSVPHMLIEKQKHHVGKGTAETIGSNSKNGCETGQHDGYCSTSGEIRDPLGAASGYLSRSSSITLSCGTEYDHDTHHLEEPCDPCDDRVVNEPDPLSVHNTRTDEAATTDRTSGIVDTYPVRQRRLCSVDGKLKIKTRNATSAKGDEKETLAICSISNVADKELSRTLRSLGESMVENIQDIELLLKPNSLSTSVEKLEEAIPGSTEQAKAVAALKELRKISDLLRQI

SEQ ID NO: 62457 - protein, 278 aa, Zea mays
  Clone ID: UC-ZMFLMO17158D12_FLI.pep
QNLGESSSDPHPDYFNFGINESEGCSLLSEEEPCIKIRNSTAQWCIEQNIEYIEACASNADFDKCLSVDGDSQGLERLLGALSAHMWPGMILKSGNRITVPSLVEKQESTDDESNYDFEYEVLSHGSDDQWEFIGETSTSRRFERPNEPDGAQDHTHQVVNAGTDSSASNSPPTNTPTETAEENTVTQSNKTDNSDHVDKTTAYSTEDHQSDLREANHLFEDEHYGLDDLEKIMSEIGNMRSNLRLMPDFQRREMAAKLAMKMAAMFGDDDEEAFDDI

SEQ ID NO: 62458 - protein, 95 aa, Zea mays
  Clone ID: UC-ZMFLMO17168A04_FLI.pep
AGPNQCCHSFQTDCNSRNIELPLSYMNENVHTCIQPEIFPGSGYERKFMCFRTQYKYLESQLLVHVYFFQSPGPSTTVTVSTSLAYSLQSSFSAN

SEQ ID NO: 62459 - protein, 423 aa, Zea mays
  Clone ID: UC-ZMFLMO17099E05_FLI.pep
ERAQARLVSLEREKGDLRSQLQTTNEDASKSSDYLESSDILESSLNAKEKIISELNAELRNIESTLSSEREMHVNELKKLTTLLTEQESALMELKKELQERPTQKLVDDLKKKVQILQAVGYNSIEAEDWELATNGEEMSKLEALLLDKNRKMEHELTQLKVKISEKTSVLEEAEKRIVELTSKVEEQQKLILKLEDDILKGYSSTDRRGSLLNDWDIQEIGSSEASEGSDPRHASADQDQSSMLKVICNQRDRFRARLRETEEELRRLKEKHEMLTVELEKTKADNVQLYGKIRYVQDYSHDKIVSRGPKKYAEDIESGSSDVEAKYKKMYEDDINPFAAFSKKEKDQRYKELGLRDKITLSSGRFVLGNKYARTFIFFYSIGLHLLVFTLLYRMSALSYLNTTQQDEIILDAGNQRLTHML

SEQ ID NO: 62460 - protein, 158 aa, Zea mays
  Clone ID: UC-ZMFLMO17116D09_FLI.pep
WFQEESGDHPDDDARWKAHGFDLSGSEVLQHGDICQQIIILYDRGRIQRYFFTIWHRRGSSTYERPPNWKDEGIWFCQIFIASRGRESCQGNGWQDSTWKIDLCGDGKRTRKQVGHPPHERISLNMKHESAISLCQMANIPNSQLMLQLIYKAQVNFS

SEQ ID NO: 62461 - protein, 370 aa, Zea mays
  Clone ID: UC-ZMFLMO17138G05_FLI.pep
LTDDSICSDFDIYVRKLQDKYGLQCHHPRQMTSKAHRYQVLDALVDLFCRSKVSADVRLVGGWLFRQLLPHGEEEFTAFHLRRLKDSHKDCSSKLSEESGGCWCDMLLPIVKEAWRNCKKAIEASSPPKGSKSIIVPMDLCSFEGDSSVAIAEALYEMVKGFVLQHQVILFCLGETFTELPPIYPLVDLPINTRASAADFGGSVPKPGLEVNLVDAVPCRIAFERGKERHFCFLAIAHGTSGWILLLEELPLKRERGIVRVMAPLAGSDPRIDTKHGKWLHLRIRPSSVPFLDTEKHKAKTKKYLVDGRWTLAFRDEQSCKVAESMVIEEMKLQRGAVAEQLKPLVEFDMPEDGMQHPQTSHETPSDDGS

SEQ ID NO: 62462 - protein, 70 aa, Zea mays
  Clone ID: UC-ZMFLMO17300D05_FLI.pep
HWTSQASKEQKAKHDHKRRDNLQENKLNLILESEIPQDSHHAVTSLILGTLKMSLSCFLLLLFSCSQLLR

SEQ ID NO: 62463 - protein, 371 aa, Zea mays
  Clone ID: UC-ZMFLB73243G12_FLI.pep
NMVISIQVLRNVTNNFSEDNILGRGGFGTVYKGELHDGTKIAVKRMEAGVMGNKGLNEFKSEIAVLTKVRHRNLVSLLGYCLDGNERILVYEYMPQGTLSQHLFEWSENNLRPLEWKKRLSIALDVARGVEYLHSLAQQTFIHRDLKPSNILLGDDMKAKVADFGLVRLAPDDGKCVSIETRLAGTFGYLAPEYAVTGRVTTKADVFSFGVILMELITGRKALDETRPEDSMHLVTWFRRMQLNKETFRKAIDPVIDLDEETYASVSTVSELAGHCCAREAHQRPDMGHAVNVLSTLSEVWKPTDPDSDDSYGIDLNMTLPQALKRWQAFEDSSHFDGATSSFVASLDNTQTSIPTRPPGFAESFTSADGR

SEQ ID NO: 62464 - protein, 192 aa, Glycine max
  Clone ID: 700852284_FLI.pep
NDRLKIALGSAQGLAYLHHECSPKVVHCNIKSSNILLDENMEPHISDFGLAKLLVDENAHVTTVVAGTFGYLAPEYLQSGRATEKSDVYSFGVLLLELVTGKRPTDPSFVKRGLNVVGWMNTLLRENRMEDVVDKRCTDADAGTLEVILELAARCTDGNADDRPSMNQVLQLLEQEVMSPCPSEYYESHSDH

SEQ ID NO: 62465 - protein, 128 aa, Zea mays
  Clone ID: UC-ZMFLMO17340H09_FLI.pep
GASARSSSPSSPSPRPFSSPSPTVSRTSALTPAPRTRAASARARPPPPPGTVGATIASPTTDLSYAAPLRVDGPPPTSASSHASPTSPDAVKKSIQAYSTFCSSLVSPPPSRNSVSSDSVSIELNWTK

SEQ ID NO: 62466 - protein, 64 aa, Glycine max
  Clone ID: 700788924_FLI.pep
LGGLHRSVILKGVGSSAISQLHNNRSYPLSDVMPLDSPNIIEATEGTRGADIQALIEKVGYLTG

SEQ ID NO: 62467 - protein, 216 aa, Zea mays
  Clone ID: UC-ZMFLB73094G09_FLI.pep
MFQISQKLMVQGYSGNVRYKGGIDVARKVIKADGIRGLYRGFGLSVMTYAPSSAVWWASYGSSQRIIWSALGHLHNKEEAPSQLKIVGVQASGGIFAGAVTSFVTTPIDTIKTRLQVMDNENKPKAGEVVKRLIAEDGWKGLYRGLGPRFFSSSAWGTSMIVCYEYLSMFRLPLPNLYLCSWFLNHCIESTCMCICSGICYCIPCRLILSIQALLI

SEQ ID NO: 62468 - protein, 252 aa, Zea mays
  Clone ID: UC-ZMFLB73261G06_FLI.pep
AGGRRVSRAGGGRLGDGPALGRLPGGGRRGRRGLDAEQVVGQQHLVDGVDGEGLLRAQGLADAGGDEARGHVGLAAAVGGDVERVGPVGARRLRTHGVAGGLEGVERVELRQDVVLHQRHLLLLRQLVQRAGLEAGEGAVGGREHRVPAAERVVQLAVQLRVLLRRLHQPHERRVLPALLQDRRNVRRALVGRRRRRGAWRLAEHRRHRRQRQERRREQAPCPCRRHYWCRVVTANAKVVAAAVLTAQFPLN

SEQ ID NO: 62469 - protein, 904 aa, Zea mays
  Clone ID: UC-ZMFLB73031D10_FLI.pep
EAEATTLKGLLEASCQKNASLQDQVCHLDEALKECVRQLRLAREEQEDKIREIVSKTLVPQSENPELQKHIGELRKRLEVTRLEASSSMLLQHDLQERLQAIERENLGLKAKGQAIERENLDLKAKLLVQSNDLKIVMLERDLSNQAAETASKQHLEGVKKIARVEAECRRLQHLMRKATLINNSRSAQNSCCMESLTDSQSDHGEHMVAVDNDLQNSDSWALALIAELDQFKNGKDGSRNIVNNPVEIDIMDDFLEMERLAALPESDGTSSNFEMETDSDKAIARSSSLKIKSEELQNKVANLQEKFEAIASEKRELEMALMEVRNQLDISCDALVAATNRLVEMQMQLESANDSKLSALEDVERLDSERKALELQLESKSVEVEELLMAVTSLEENTEQKELESQLELMSAQATELRLTVASLEERVQAERNISMQQKENAEAMLSTKEELEAQLCSATTEMGKLRDMVKALENEVKTEKALHEELTAHIQIKVEAAVDAVKEPLEAQLCSTNTEAEKLRDVVKALEDQVEKEKALCEELAAKVELKTKAARTAEAVQESLEAQLSSANAEIQKLEEITKQLQSELEKEKTLHEEFSAQLEMKIEAERARSMESAKESLEEQFQLVNSETAKLRDTVHALEHDVEKEKVFSAELQMQLEALEAVKKVLESEAESAHQDAKILSQKVESLEAKLTEHMLVTDEFTANVESLQSDRIAMEHKLKTADRELIKLTNKVSLLHREIEQERLMSEEYEQKCQKLEDQLSRDSRDAKLWRLANSNGDLKVKKEKELANAAGKLAECQKTIASLERQIKSLTDLDGVVLEPERLESSRDMPLPLDFRNSDAEFAMFTDDLYDFDLPNDSKSFFSPLPSIQTSSPPSEMSVFAGGLSTLSSYRSKRASRR

SEQ ID NO: 62470 - protein, 264 aa, Zea mays
  Clone ID: UC-ZMFLB73145F02_FLI.pep
LLGHLTPKQKDIIYKLEAHDRFKRNAVGSALYIHPCLSELSEVNAEHRANTFRDDLVDSLVDSITVRDGVKANFFMNILSLANSAGEKVLAFSQYISPMIFFERLLVKKKGWHVGKEIFMISGDTSQEDRELATDHFNNSADAKIMFGSIKACGEGISLVGASRVVILDVHLNPSVTRQAIGRAFRPGQQKKVFVYRLVAADSDEVKVHETAFKKEVIPKLWFEWSEHCTTEDFKLGQIDIDDSGDELLDTKAIRKDIKALYRR

SEQ ID NO: 62471 - protein, 458 aa, Zea mays
  Clone ID: UC-ZMFLB73202E06_FLI.pep
THSPPPRRHLPKSPQTLPPIRAQIAMAAPNSNDAASASGTGPAGEEDISIEALARRVQEHMTLNSNPAARRHKFWETQPVGQFRDAADASLPNGPIEPPTPLSEVRADPYPLPAAFEWLTCDLDDDALLADLYSLLAHNYVEDDENMFRFNYSPAFLRWALKPPSFFRAWHIGVRAKESKKLVAFISGVPARIRARDDVVRMAEINFLCVHKKLRSKRLAPVLIREVTRRVHQENIWQAAYTAGIVLPTPITTCRYWHRSLNPKKLIDVGFSRLGPRMTMSRTVRLYKLPDAPLTPGFRRMELRDVAAVTRLLRAYLARFVVAPDFDEVDVEHWLLPQEDVVDSYLVESPETHEVTDFCSFYTLPSSVLNNANYATLKAAYSYYNVSTKTPLQQLMNDALIVAKRNNYDVFNALDVMENESFLKELKFGPGDGQLHYYLYNYRIRNGIKPSELGLVLL

SEQ ID NO: 62472 - protein, 277 aa, Zea mays
  Clone ID: UC-ZMFLB73219B07_FLI.pep
SFKTLQGTSFRQALDSFTSLSLFRHLSCATCPLTTGGEICSRHTFSATMDDGADLPCQLLFSHPEMPDSFDEFFNSATTTCTHTHSCNPPGPSVAMHTHTCLHAHTLVLGSGGEDDDDAREDSAKPRRPLGNREAVRKYREKKKAHAAFLEEEVKKLRAANQQLQRRLQGHAALEAEVARLRGLLLDIRGKIDAEVGGVLPFQKPCSVGSVACADPALCFNGNSEVGGGWEESSRPAAADCRIDEVRGMSREIDVPEGLRHSMDVVASFVSSDPLAE

SEQ ID NO: 62473 - protein, 306 aa, Zea mays
  Clone ID: UC-ZMFLB73298B10_FLI.pep
GGEMARRAVALLVAVALATVLLHTAEVAAGQKKPATAARREDIPYIRCQVCERIAREISAQVAKKHQALPPSKKVPEIEIIEVAENVCNLKKQEADWMLRIDIVEKGDKLELVEQDEEGHCNAECKTIERACQEVIGYADTDVAEFVYKNNPSVDQLMKFLCKDLSKACAKDPPPVPKDRVPGEPFARKPSKDAEMEKILRSMEGMPGAPSMKMYSRDDLMKNNFGTEDDDEEDDEDEDDNFPKNLGKALKNKGSQKKDLKQQVVQQFKDTSKKLKGHVNKVSGMVKKWWKGAKKPAKSSKSKTEL

SEQ ID NO: 62474 - protein, 364 aa, Zea mays
  Clone ID: UC-ZMFLB73309A09_FLI.pep
QQIKRMNNEKSDDSSDESSDESDEEPPQKKTKNSAPSGAAKAATNVSKKKSSSDEDDESSEESSDDEDTEQVETKETSVVTTQKPAHNEPKTPAKSQSQATGSKTIFVGNLAYSIEREQVKEFFEEAGEVVDVRLATFDDGSFKGFGHVEFATVEAAQKALEFVGHDLMGRPLRIDMATERGAYTPSSGKDNGSFKKFAPRSGNTVFIKGFDTSGGEDQIRTALEEHFGSCGDITRISIPKDYDTGVSKGMAYMDFKDPDSLNKAYELNGTDLGGYSLYVDEAKPRPDNSGGFSGDRGGGRGRSGGFSGGRGGRSDRGRGGSRGRGFGGRGGRGDRGRGGRGTPFRQTAGTASTGKKTTFGDDD

SEQ ID NO: 62475 - protein, 194 aa, Zea mays
  Clone ID: UC-ZMFLB73397H04_FLI.pep
KNFVDENQGNGLGSYDLSLVYPKRVFFEQDMEATLSELGIQNRHAMIVVPHRQSGQVSRRHSSASYDMGVNSGADDVGGNSGAGGYFGYLRTVLSYVNPLSYLRGNTNSSNTELQSNEGLRQLRHGSGPWSEPRPLGNRGHEVTDADSANTLRRRPRPFGANIHTLGSEDHGPSDERNVFWNGNSTEFGGDDRK

SEQ ID NO: 62476 - protein, 121 aa, Zea mays
  Clone ID: UC-ZMFLMO17025F04_FLI.pep
LQALQEEGNGVWKQLQGPHSVCAGTIQRVGPRTWQHDDRFHAGGEAAETNGGHCGGSLQQRKVQEKSSRWKFDSHPTHRPQMMRARQAAGDHLYMRSACSSVSHGVRSRISVGRLSDMDCT

SEQ ID NO: 62477 - protein, 151 aa, Zea mays
  Clone ID: UC-ZMFLMO17001B08_FLI.pep
ASIRRARRPPAHQGTMASATRALGALLHRASSLSSSAPALRGASLLRGDGPIGSAGLFRRHAARRRISSFQPLCMGRRSCKIAGRKVMFSCHDAQCHINEVRDGWLCIFWLAKPWKYPVQSIMLCMRAIKQSNSSNENPIVTASLPLTPSA

SEQ ID NO: 62478 - protein, 115 aa, Zea mays
  Clone ID: UC-ZMFLMO17244F03_FLI.pep
LTSPYDIPYKHFHACSVLYKLKRGTDSDARDKRQHTLFLYIWFLSSLQCSLQAQIGKLESNTTSQFTHDEFTNLVAFDSKQDTGLNLHARLWRGMLVATILKVLKNNDSIEAMLA

SEQ ID NO: 62479 - protein, 373 aa, Zea mays
  Clone ID: UC-ZMFLB73110G06_FLI.pep
FSPPFASCAIPAAAPFSLSMDSDYVASLLMGMGSSAPALDFAALDAGFLETLCGGGGGLFGVSGVAAGAGCGGVSPEGSSVSDPAWARARGDDNVRKRKAPPTGSAGGKEACPGKAAEAKGPDGKRCRVGGSDSPVKPKVEEVAASDASVELKAQKKGKGKTAKPAVEPPKDYVHVRARRGQATDSHSLAERVRREKISQRMKFLQDLVPGCNKVVGKALMLDEIINYVQSLQQQVEFLSMKLATVNPQLDFSNLSTLLHKDMYQPCGPSANSVFPLESDGAAFPFCDQADLFHSFGSGSAAMEDQCSLSLLDTALPHAANPQFAFQKQQRDFWEDGLQNALPTGSEQRQEEDGLLVPNFDGQLHADQTKVEF

SEQ ID NO: 62480 - protein, 82 aa, Zea mays
  Clone ID: UC-ZMFLB73097G08_FLI.pep
LPFSLARVPTSLFFWPLIQPEGAASDDIALGIAVGSTGRGNLPGSTSDIRAALLLLLIGKCTADQEALKEVEGNGVLQGPSG

SEQ ID NO: 62481 - protein, 167 aa, Zea mays
  Clone ID: UC-ZMFLB73105C12_FLI.pep
VLSHPLRSQPLPLPPAMSSSSPPPRPDDDDGAQEVGASDGRSLGYGEAEYWDARYVEEGGAPYDWYQRYDALRPFVRCFAPPASRILMVGCGSALMSEDMVTDGYVEIVNIDISSVVIEMMRKKYFDVPQLQYLRMDVRDMSMFPDESFDCAIDKGTLDSLMVSRSR

SEQ ID NO: 62482 - protein, 214 aa, Zea mays
  Clone ID: UC-ZMFLB73106A02_FLI.pep
SDGPDQSPPPLQERQPVVLTACNLQRAVHAANDGRPEAEGLLRPGAAPALHAHDGAQAGAGRLHDNYFAERHPLPRSAAAAGELGALLGRALRPHLGLGRLRARHVVRAGVERRRVARDGLGRGGRRVRLQVPRRALRRGRPCLLQHAPVVVRELARGRHGDAPRPGGQVARQRRGRGVVGAPLLAAAAAAAAGVQQRGAGAARGRPRLGAAGV

SEQ ID NO: 62483 - protein, 296 aa, Zea mays
  Clone ID: UC-ZMFLB73117F05_FLI.pep
QTEPTHFMQKEKEREILQGFRSTTKEAKKQTPNLDACRNGEKKERKETNKTHISQQLTIKLFYSGPVHVEMLRPSPCHERVMVVPPLGAAAPPLAANAQPHLSHSTVPVVTFLFEPDGDLTCPQLLLSSTLQVTVTNEYEATICRKVERYPPLLTTPQLSKPDHSAMLPYPQLGVAYHAAKQPREELLKLMHDKSTPHTEPEPDMELVDWDAGVVHVHTTNTVADWMIRQVKDAVARVPMRPVLQYLEALVQSPYWISPTNTAKVFDNLQRHSFCMGRHPAQGESTGCSGGIRDDG

SEQ ID NO: 62484 - protein, 181 aa, Glycine max
  Clone ID: 700894978_FLI.pep
IKDFASGEIKQASSLFDCDVQLDEYLIKSYYKTASLIAASTKGAAIFSGSDSSVTEKMYEYGKNLGLSFQVVDDILDFTQSAEQLGKPAGSDLAKGNLTAPVIFALEKEPKLRDIIESEFSEVGSLDEAINLVKSCGGIERAQELAKEKADLAIQSLQCLPQSVFRLALEDMVAYNLQRIA

SEQ ID NO: 62485 - protein, 180 aa, Zea mays
  Clone ID: UC-ZMFLB73139A04_FLI.pep
SSRQERNRYQRNSWREPRVLFTFGTRANTGSSTRVLDEIAIEVGRHGASEDGRSFVPASGEDRGGKQGDSPTHGGDSGGGGKYGGGGQGVQVTLPAGAVTELLLLSVESQATPAGQSVDPKVQAVLDQFVEVFEDPVGLPPSRTCDHTIPLVPGTNVCVLPLSSKVFRDCSCILPLSFKV

SEQ ID NO: 62486 - protein, 191 aa, Zea mays
  Clone ID: UC-ZMFLMO17036E04_FLI.pep
RRRGGGRGSVRPAGPPPPRARAAAAAAAAAEDELGQHLRHGVHGVAASPSQVSARASRLPSGDAKSRQAPVLKLRYRRRDLQTVLVIFFFLLTKRRTELVLLRRKGLSRHYEGKAQSFACMSEVRCLDDLRKKDSPYKQKKVKSSCKGYVALGGMMMANKPPSSGSCAGLGLAAANGFRTSPIQDGYQYHQ

SEQ ID NO: 62487 - protein, 206 aa, Zea mays
  Clone ID: UC-ZMFLMO17320E10_FLI.pep
KDTYSLQATRSPAGERALGRPRHVVEGFLGLVLCPRRALGAEEWRRVLLAHLRGDRQRASVLGLLPALDDGVVGVEAHAEDGDEDAHHVARAEGVFEDDVAEGEHQTRLEVAQHLVRHGRRRADHQERAEVYAHRDRARQQDEHHDLGGVAEREDVTLGEELVHERPGDEQHRGLVRRRLVQQLRRRNLQPPLDLVGQNLPDACRS

SEQ ID NO: 62488 - protein, 297 aa, Zea mays
  Clone ID: UC-ZMFLMO17342A09_FLI.pep
IGRRRLWGEYRLLLLVPAPIPMVASSQLCERRRLELLVVPEDALAVLGLDVDALPGLAPGRLGNRGRVEVVVVAEDGPDRLGGLHGVVVRHGGEEVVRDVRVRDVVEHAVEDAVVAVHGGQRAAQPVPLARVVVGERRVGVLQVGDEHQPRVHDQQRHGVHAHHPPDPERRRQLVQPERHGHDAGVRDEDLGALPVVVDGAVGVEVAGEARVRPPRRVGRQVQRPPEGELHHDVHQPADRVVVHVRGVPRQRLLLLGHEHLVALQGPRVGVVAPVAVLPREVGHHERRVQHQADHVV

SEQ ID NO: 62489 - protein, 174 aa, Zea mays
  Clone ID: UC-ZMFLMO17010F02_FLI.pep
YSKPSKETPTFFQCLAAGTALRYARRSCPAAKVPVRGRQLKWNGVTWPANERNETSKGKERPFHRSRKPVVRHTALRTRRRSRPLSVRPAPSMTDAAAAARRAAISCGGTTGSPSSSSSSAACSSASRRRLSAAVIALGQAGTATGADWWHGRGACCFCGRAAAGTGAVGAWWS

SEQ ID NO: 62490 - protein, 152 aa, Zea mays
  Clone ID: UC-ZMFLMO17330B02_FLI.pep
YVLLSFPSFPVCPHSAPCHLVWCVTRKPQLPSWNCKEHMRLRVAHTHLLLRLTLFTSSCFTRLSIFIFLLTFLQRQIQTFISEAKPRATGRFSVACILEGKWRQFYENNVMVVGAHCVPICISNCSGDLAWCTNCTGSSCGRLAMIRQGCGS

SEQ ID NO: 62491 - protein, 407 aa, Zea mays
  Clone ID: 700455716_FLI.pep
VEVDALAKALAGQKDEAYFAANAAAQASRKSSPRVTNEEVQKAAAALKGSDHRRATNVSARLDAQQKKLNLPILPTTTIGSFPQTVELRRVRREYKAKKISEEEYVTAIKEEINKVVKLQEELDIDVLVHGEPERNDMVEYFGEQLSGFAFTANGWVQSYGSRCVKPPIIYGDVSRPNPMTVFWSKTAQSMTSRPMKGMLTGPVTILNWSFVRNDQPRFETCYQIALAIKKEVEDLEAGGIQVIQIDEAALREGLPLRKAEHAFYLDWAVHSFRITNCEIQDTTQIHTHMCYSNFNDIIHSIIDMDADVITIENSRSDEKLLSVFREGVKYGAGIGPGVYDIHSPRIPSAEEIADRIDKMLAVLDTNILWVNPDCGLKTRKYTEVKPALTNMVSAAKLIRTQLASAK

SEQ ID NO: 62492 - protein, 389 aa, Zea mays
  Clone ID: 700455883_FLI.pep
ENGQRVPIQASTKYQCTNNSLRAQHRQIYYEKDNTTICLFTLTPDAKDHMIPYRQQNVSLQDRVYLSISKPQFGELEVGLFVVIKESLLIRSIFLDKRAENRVAQQGFVTWELKKALLITTQKFLEVRVVKDQRVCSPGPLETRPLFVAPSQGVATREGNNVLIAQAHLLAKNLPQVVRTLSGVRKAALRWGLRLVLPTGVEGNLRPTGDLHGHNSRELVEIGVREDWELLLDGLEQPHRDVQPRVSAVSQFRLMLHRAEWTAGPRRHVERPRGVPREAEHERGAALLGDEGSELAPGLLHSLAVLGAHGRVVLRHGCEQRELWIVGCDATRLREGRKRPIRHPLDHKAHKLLRFPSHPPLQNNFHAKHRRVQGQKIHTQQETWQYVKQ

SEQ ID NO: 62493 - protein, 662 aa, Zea mays
  Clone ID: 700450071_FLI.pep
FWFLLSFERAFLVAMAKSEGPAIGIDLGTTYSCVGVWQHDRVEIIANDQGNRTTPSYVGFTDTERLIGDAAKNQVAMNPTNTVFDAKRLIGRRFSDPSVQSDMKLWPFKVIPGPGDKPMIVVNYKGEEKQFAAEEISSMVLIKMKEIAEAYLGSTIKNAVVTVPAYFNDSQRQATKDAGVIAGLNVMRIINEPTAAAIAYGLDKKATSSGEKNVLIFDLGGGTFDVSLLTIEEGIFEVKATAGDTHLGGEDFDNRMVNHFVQEFKRKNKKDISGNPRALRRLRTACERAKRTLSSTAQTTIEIDSLFEGIDFYSTITRARFEELNMDLFRKCMEPVEKCLRDAKMDKSSVHDVVLVGGSTRIPKVQQLLQDFFNGKELCKSINPDEAVAYGAAVQAAILSGEGNEKVQDLLLLDVTPLSLGLETAGGVMTVLIPRNTTIPTKKEQVFSTYSDNQPGVLIQVYEGERARTKDNNLLGKFELSGIPPAPRGVPQITVTFDIDANGILNVSAEDKTTGQKNKITITNDKGRLSKEEIEKMVQEAEKYKAEDEEVKKKVDAKNALENYAYNMRNTIKDDKIASKLPAEDKKKIEDAVDGAISWLDSNQLAEVEEFEDKMKELEGICNPIIAKMYQGEGAGMGAAAGMDEDAPSGGSGAGPKIEEVD

SEQ ID NO: 62494 - protein, 238 aa, Zea mays
  Clone ID: 700450353_FLI.pep
KQGHQKFPCHVRSFILTLLVSGGGGSSVLVAEDALAEVGDHEGKALTQGDLRLPPKELLGAADVGLALVRVVLGVLAELDPCVGVDGVLDNLGKLKHGELARVTQVEWPHMLAFHQLHQTLNQIRNILETPGLLSITINRQGLLPQCLSNKVTDNTAIVNAHARAICIEDTCDPNLKVGTTVVIHGQRFSCTLALIVTAPDTDGIDIAPVSLHLRVLERITIDLTGTGEEEPGVDPLC

SEQ ID NO: 62495 - protein, 264 aa, Zea mays; identical to SEQ ID NO: 40375
  Clone ID: 700451260_FLI.pep

SEQ ID NO: 62496 - protein, 737 aa, Zea mays
  Clone ID: 700452004_FLI.pep
PSLTDAPLPDLRPDLAASPAPAREPPSTATAMGTANGQQPAEGAPSDKLRHVESMSELPSGAGKISGINAVVLGESLAAEENDLIVPSPEFSASALVSSPKQYREMYERSIKDPAGFWSEIAETFYWKEKWNPAEVCSENLDVTKGPVQINWFKGGKTNICYNAVDRNIESGNGDKVAMYWEGNEPGQDGKLTYSELLEKVCQLANYLKSLGVGKGDAVIIYLPMLLELPIAMLACARIGAVHSVVFAGFSADSLAQRIVDCKPKLVITCNAVKRGVKPIFLKDIVDAALVESEKNGVSVGLCLTYENQSAMKRENTKWQAERDVWWQDVVTKFPTKCDVEWVDAEDPLFLLYTSGSTGKPKGVLHTSGGYMVYTATTFKYAFDYKPTDIYWCTADCGWITGHSYVTYGPLLNGATVLVFEGTPNYPDSGRCWDIVDKYNVTIFYTAPTLVRSLMRDGTEYVTRYSRKSLRVLGSVGEPINPSAWRWFYNTVGDSRCPISDTWWQTETGGFMITPLPGAWPQKPGSATFPFFGVQPVIVDEKGQEIEGECSGYLCIKKSWPGAFRTLYGDHERYETTYFKPFAGYYFTGDGCSRDKDGYHWLTGRVDDVINVSGHRIGTAEVESALVSHPQCAEAAVVGVEHEVKGQGIYAFVTLVDGVPYSEELRKSLIMTVRNQIGAFAAPDKIHWAPGLPKTRSGKIMRRILRKIAARQLDELGDISTLAEPAVVDQLISLSNC

SEQ ID NO: 62497 - protein, 132 aa, Zea mays
  Clone ID: 700438651_FLI.pep
VIKSSHIFCGSQLHIIYQPPRRLQRCTPTYCMIVSEKTSSEYLTTPKSTNAPFLMREPTFRSSSAKVGPHNIHHHTQRHNRGCDCEPYSQTAVLLLCKVVYEQEDSNEGCHHGRHPPARFRLENHLELVHRP

SEQ ID NO: 62498 - protein, 453 aa, Zea mays
  Clone ID: 700438729_FLI.pep
RTPTTMATPGEQPAEVVSVEMPAPDGWTKKFTPLRGGRSEIVFVSPTGEEIKNKRQLSQYLKAHPGGPAVSEFDWGTGDTPRRSARISEKVKVFDSPEGEKIPKRSRNSSGRKGKQGKKETPETEEAKDAETGKEAEEAPSEDAAKETDVEMKPAEEVKGASAETEDADMADAPAPAPMEEDKKQTEELAEAIAAPPVPSEEKKDVKPAEPEAAASNPTEDSAPAPAEPADVAAPAAEPKSDAKPAAVAAPVPETKSDAEPAAVAAPAPETKSDAEPAAVAAPAPETKSVAEPAAVAAPAPETKSDAEPAAVAAPVPETKSDAEPAAVAAPVPETKSDAEPAADAAPVPEMKSESEPAAVAAPASETKSDAEPAAVAAPAPETKSDAEPAAAAAPVPGTNSDAAATDPAPGTKATAADPAPGAPAENSTDKDGSQESQPVNNGQLPHSTVKCT

SEQ ID NO: 62499 - protein, 99 aa, Zea mays
  Clone ID: 700439009_FLI.pep
QQIREDLSRLPPQIQGNSCFFAANFGVILLSLSAPARARVQMLGDEIGKGAYGRVYKGLDLENGDFVAIKQVSLENIPQEDLNIIMVTFFLTYHIMHRK

SEQ ID NO: 62500 - protein, 381 aa, Zea mays; identical to SEQ ID NO: 51808
  Clone ID: 700441589_FLI.pep

SEQ ID NO: 62501 - protein, 172 aa, Zea mays
  Clone ID: 700209548_FLI.pep
LTRALNLIGTSKTTPRTLPLMAVQRQTAASKSARPLMRLQHGSAGTLPASPLTRPSALTHTPNLSAFSGHFPLEDEGGGVAGGGGGGSTGGVGVGQLPQALATVKNRRLRAKKRTPLDAMPQSLIWLPSSPSLLGSAWPIERWRGTQDFSLLLAEFAAELPASVRSRWLLAS

SEQ ID NO: 62502 - protein, 156 aa, Zea mays
  Clone ID: 700210842_FLI.pep
ARANQADPSRRSEVVAGAGGRARSNMSWQAYVDDHLLCDIEGQHLSAAAIVGHDGSVWAQSENFPELKPEEVAGMIKDFDEPGTLAPTGLFVGGTKYMVIQGEPGVVIRGKKGTGGITIKKTGMSLIIGIYDEPMTPGQCNMVVERLGDYLIEQGF

SEQ ID NO: 62503 - protein, 437 aa, Zea mays
  Clone ID: 700210962_FLI.pep
FDLCSRSEVPGDREAASIVGMALVLHSGAGNKNAFKALIAAEYSGIKVELTKDFEMGVSNKTPEFLKMNPLGKVPVLETPDGPVFESNAIVRYVARLKDDNPLFGSSRIEQAHVEQWMDFAATEVDPGVAWYLYPRLGYLPYVSTTEETAISSLKRSLGALNTHLASNTYLVGHAVTLADIVMTCNLYHGIARILTKTFTSDFPHVERYFWTMVNQPNFKKVIGEVKQAESAPPIPKKAAPSKEPKAKDVKKEAPKEAPKPKVVEAPAEEEAPKPKPKNPLDLLPPSKMVLDDWKRLYSNTKTNFREVAIKGFWDMYDPEGYSLWFCDYKYNDENTVSFVTLNKVGGFLQRMDLCRKYAFGKMLVIGSEPPFKLKGLWLFRGQDVPKFVMDEVYDMELYEWTKVDISDEAQKERVNAMIEDQEPFEGEALLDAKCFK

SEQ ID NO: 62504 - protein, 221 aa, Zea mays
  Clone ID: 700211552_FLI.pep
GGASPSRSPPPVAFVPSISGCVAGEPDTANRIRRQGEREKMGLTFTKLFSRLFAKKEMRILMVGLDAAGKTTILYKLKLGEIVTTIPTIGFNVETVEYKNISFTVWDVGGQDKIRPLWRHYFQNTQGLIFVVDSNDRDRVVEARDELHRMLNEDELRDAVLLVFANKQDLPNAMNAAEITDKLGLHSLRQRHWYIQSTCATTGEGLYEGLDWLSSNIATKF

SEQ ID NO: 62505 - protein, 623 aa, Zea mays
  Clone ID: 700211822_FLI.pep
PRRREMNADFGAPKELAGGLQQRRALYQPRLPPCLQGPTVRAEYGDATTTIDPTCAQAVAQAFPHTFGQPLVSFVAPAAGAGAVEERHPIRVGVVFSGRQSPGGHNVVWGLHDALKAYNPQSLLYGFVGGTEGLFANKTLEITDDVLASYKNQGGFDLLGRSIDQIRTTKQVNAAMTTCHSLNLDGLVIIGGVTSNSDAAQLAETLIQNNCKTKVVGVPVSLNGDLKNQFVETTVGFDTVCKVNSQLVSNVCLDAISAGKYYYFVRLMGRKASHVAFECALQSHPNMLILGEEVALSKLTLMEIISKICDGVQARAKLGKYHGVLVIPEGLIESIPEMYALIQEINILHNSNVPVAEMSSQLSPWAAALFQFLPPFIRRELLLHQESDNSAQLSQIDTEQLLAHLVETEMIKRTKEGRYKGRKFSSVCHFFGYQARGSTPSNFDCDYAYALGRISLHMITVGLTGYMATVANLKDPVEKWRCAAAPLTAMMSVKRHLRGPGAIPIGRPSIHPSPIDLKGKAYELLREKASSFLLDDFYRTPGGIQFEGPGSDAKPITLTIENQDYMGDIEILKEYLGKVRTMVKPGCSREILKAAISSMVSVTDVLTVMSHPLNAELPLYHFK

SEQ ID NO: 62506 - protein, 102 aa, Zea mays
  Clone ID: 700217948_FLI.pep
QTAAISAVLLSSPSLAAPTPLGSRLAAGVSDPSPTGAQSRPSPPCHWHSIARPTRPCIRRSTPPWPSSDCSGPASFSPPRCPHPPFRPRPSVASTTIHTIAT

SEQ ID NO: 62507 - protein, 164 aa, Zea mays; identical to SEQ ID NO: 61428
  Clone ID: 700184910_FLI.pep

SEQ ID NO: 62508 - protein, 60 aa, Zea mays
  Clone ID: 700193602_FLI.pep
IGSDLTRTRELPELQQNVSMQSGQEDFAVDKDSSRTLTSVREVYTQYDLPVVKKCYSLGS

SEQ ID NO: 62509 - protein, 59 aa, Zea mays
  Clone ID: 700167615_FLI.pep
KLFRAWVIVTALGNYLEKYYAYPFRQIKSSTLCRWTNNSHFILNCKCGIMSIVMLSNDA

SEQ ID NO: 62510 - protein, 138 aa, Zea mays
  Clone ID: 700168513_FLI.pep
FQCPPSCARYPSPSRPLPAKSAQSPTRMKFVAAYLLAVLAGNSSPSAEDLTAILESVGCEVDNEKMELLLSQLSGKDITELIAAGREKFASVPCGGGGVAVAAAAPAAGGAPAAEAKKEEKVEEKEESDDDMGFSLFD

SEQ ID NO: 62511 - protein, 488 aa, Zea mays
  Clone ID: 700172331_FLI.pep
RLAYTTALTTLFSYGLLFAFGQLRDLFRHLLGCFRPNKDDDVKQGYAPICVGLEDFFVRRLYLRVQDCFGRPIASAPDSWFDVVERTSDDNNKTLQRTSKTTRCLNLTSYNYLGFAAADEYCVPRVVDSLKKYSASTCSARVDGGTTKLHTELEELVARFVGKPAAVVFGMGYVTNSATIPCLIGKGGLIISDSLNHNSIVNGARGSDATVRVFRHNCPAHLEKVLREQVAGGQPRTHRAWKKIVVVVEGIYSMEGELCKLPEIIAVCKKYKAYTYLDEAHSIGAVGRSGRGVCELLGVDPADVDVMMGTFTKSFGSCGGYIAASEEIVQHLKHTCPGHLYATSMSPPAVQQVISAIRVVLGEDGSSRGAQKLARIRENSNFFRSELKKMGFEVLGDNDSPVMPIMLYNPAKIPAFSRECFRQKVAVITVAFPVTPLLLARARFCISASHTREDLTKALDVISRVGDLVGIKYFPAQRPKIAEAGHGN

SEQ ID NO: 62512 - protein, 316 aa, Zea mays
  Clone ID: 700083024_FLI.pep
GRLWRSRFTDSSSSMVGGAAGGEVIGGGGCSGEVVVVVVGRAEIDTRAPFRSVKEAVALFGERVLAGELSAGRRGPLSSVTEPTRSSIAQNRVAATRPKHHAMSPATGAVTTAALRAVPPVVVTAGQLEEAKQKLEKEREEKQKMAGCIQTLQEELSHAMEELKRLKARDDEEAAGTKVIDLEIDEGLYFTEAAEKQMAPPPQGAAGGAGELQKKRYVTFADPPTVATTAAAACRAPPLPDVVMEVHRAPPHQLHQPHPHYYREPRFQRQMSAGHEAAKAMADEGRKKKKPLIPLVGALFMRRKKSSKSFHDDVAF

SEQ ID NO: 62513 - protein, 344 aa, Zea mays
  Clone ID: 700083831_FLI.pep
PVYSVDPSKRHAYAQSGNNVFVPVERELIFDIDISDYDDVRYCCSGADVCRDCWPLMTIAIKILDTSLRDDFGFSHILWVYSGRRGVHCWVCDSRARKLSNEQRAAIADYFRVYKGGENALKKVSLAGPVLHPFLARSYMDVLKTFFEDRLLLNQQLFASEERCRKILDLIPDESVASEVHDKWQGNRRSSISKEDVNATRWEQLKMTLQSGKKAQGLRRCVEEIVFSYTYPRLDMEVSKHMNHLLKAPFCIHPKTGRVCVPIDPSNCDDFDPAAVPTLSQLLGELNATGFQTDPENNWERTSLGKSISFFRTSFLHPLLKACKEELESAYSAKLQQSKNSLDW

SEQ ID NO: 62514 - protein, 527 aa, Zea mays
  Clone ID: 700084695_FLI.pep
PPPRHAMLPLLLALLTGAAPTVSASGDGCRVGCPLALAAYYFSAESNLSFIASLFGIADHNKLLPYNPGIVDPNYIVTGERVSVPFPCSCLGLPADPASTFLAGSLPYTLSGGETYDDVASEFANLTTASWLGVTNADPAGKLPAAGKINVTVNCSCGDKRVSPRYGLFLTYPLWEGETLSSVAEQYGFSSPAQLELLRRYNPGIGMDRASGKGIVFVPVKDADGSYRPLESDAGNILSGGAVAGIVIACIIILIAGIWLFAMYYRKQKMRKAIPLTCLEDSVQLSKVSQDEGIKVDRSIEFSYEELSDATNNFSMDHKIGQGGFGSVYYAELRGEKAAIKKMDTKASQEFLNELKILTRVHHTNLVRLIGYCVESCLFLVYEFIENGNLSQHLHGTGYEPLSWTSRVQIALDSARGLEYIHEHTVPVYVHRDIKSANILIDRDLRAKVADFGLTKLSEIGTTSQSLPSLRVVGTFGYMPPEYARYGEVSPKVDVYAFGIVLYELLSAKEAIVRLSACQTPWKLFRK

SEQ ID NO: 62515 - protein, 208 aa, Zea mays; identical to SEQ ID NO: 47551
  Clone ID: 700085735_FLI.pep

SEQ ID NO: 62516 - protein, 275 aa, Zea mays; identical to SEQ ID NO: 48274
  Clone ID: 700218691_FLI.pep

SEQ ID NO: 62517 - protein, 306 aa, Zea mays
  Clone ID: 700930330_FLI.pep
ESMGGGGALTPTSTPSSPSSPSESFPPEFVECVAVSPVSDDDESDDCCVCDGDDVDSIRYFNRQLREAKEFIRRYKPGDWIEGVGSAKAGHFVLPEVTTLLLVGPRGSGKSTLVNRITRVFDKDDDPFAPDRAQVSCNSKSNGTMFLREYPIPRNSSAVCIYDTRGWSNDLEKNFKMLHQWMTKGISHGETTMWDDDEGNKIGNMKPLGRQYSFLRYKIRKVNFVLFVVDGVAVLESMDDSNKGYTEILRQTFMYPFLSIGDDKPVVVVTHGDRLSIQQRVHVQAELAELLDIPAQQIYDIPGAWA

SEQ ID NO: 62518 - protein, 132 aa, Zea mays
  Clone ID: 701184133_FLI.pep
AGQERVVDNLEGTLRTRATLLIGGNDSRWPDLGQLHATDIAHTELSQEVDVGEINDVEARDLHGHGDGGGMVLVSGRGEREGPGVRGGGGGAGPAMCSEMRSKAAVAVGRAGFLVRADLDLGRGRCLDLVAC

SEQ ID NO: 62519 - protein, 285 aa, Zea mays
  Clone ID: 701169030_FLI.pep
AVPEFSGRGAGGDQDQDPPAAASEVQSDSRQTPDEKKSKGCQSCRDPFCSCSGGTPHSELFPPHPAKMMILEFLIASLRHPTRTHNVSDLDDLIADGVSQGSVVNLGPSEKKVLESLHAMVNAKTRPKSPSPFMAGSKLRKIRSKSHVITQSEILKLISPETWEASSFPGASPMIGGGTAEDGVHGNKPPPPCCSSVSSNQHVLSRCPSSLSACLLQCIWKDGLPHFELSLDDHPIAVYAASPVRVLEKDRAFDYVYMIHSGEQGRKDWMGHSSNVSRLVGKVKV

SEQ ID NO: 62520 - protein, 264 aa, Zea mays
  Clone ID: 701165517_FLI.pep
FPARNRKHPHQSLRLFVFGCAAAAAAEEVEEMLSGDIPPSQTIYLNNLNEKVKKEELKRSLYALCSQYGRILDVVALKTQKLRGQAWVAFSEITAATNAFRGLQDFDFYGKKMRVQYAKTKSDCIAKEDGTYAPKEKRKKQEEKAAEKKRRTEEAQQAGLNAAAAQSNGTGYQASRLGKASQEPPAPPNNILFIQNLPDQTTSMMLQILFQQYPGFREVRMIEAKPGIAFVEFEDDGQSMVAMQALQGFKITPENPMAISYAKK

SEQ ID NO: 62521 - protein, 335 aa, Zea mays
  Clone ID: 700423405_FLI.pep
INVIWCSLAGILGGGFLLGSVVMIMEDTDAPHHLLLLRCFMSQGVVHKQPLLFSGAMKEPVLFLGTLPAPVSSSKEDGRHRAMGPAASSDGRANDEGLRIAWQYKKYFGGDKTSRAEHKDNKQEFSNDFDLRKPLERHLLNGQNIECVSTQDADTLSSLQDCCSAFLSKLPRKDGGSSTAGRIAIQSLCAPQCRYFEKDWDMVSFIRSLKAMVRSSNSVAVVTFPSTVLSNSFCKRWQHLADTLLSIKAIPDEDKDLAKLLTGYQDMVGFLHVHKVAQPNSQVPVILEASTLSLKLRKRRSLVLERLNQAPVDGSSGPSSAASSSCSSQGSQLDF

SEQ ID NO: 62522 - protein, 954 aa, Zea mays
  Clone ID: 700802816_FLI.pep
VPSPRRRGCAGGERSGRTEIRPPRAPLRRLKMIAMVSAVEELSWLTSKELGEMLRESDNFVLQSKIEDGGPKQVLVDMEKVVPSLPLHLLAVCLELGQGPDLTYVLRGIRFLHSLSDLASRHTRLEQVLLDDVKLSEQVMDLIFFLLSILAEQKENNNVGASPLVHASLVAGSLHLLTNYFSSQWHELVHILLAHPKVDIFMDVAFDSLHEDVRLLSIRLSSMGFGFFPVGSLESRLAHFICQQCEASLQFLLLLCQQKLFRDRILKNKELSRNGGILSLSHTILKLVVPECLKQSTDLVASISRLKAKILSILLQLCEAESVSYLDEVATNPNNMRLGQTLALEVLNLLKISFGRKINITSDSHDKGKIYPMGSVLISALRLVDVFSDDSNFRSFFLTNTVPFLIQILAAPHDEFVSSWCAVNLPTIEEDASLDYDPFGASEVALLASDNMLTEAKANYSCPFRPSVPSMAYAQTRTSCVVKIIANLHVFIPNICEEQERDLFLQNFQKHLASGSPKLSADLPASSDFKATKVCRNLGFLSDYAKTLVPNLLNGEDLVLLSDFADKLQSWCKSQVAVKVVQNDIPPESMDAMCPVQQLLPTRTSTPASKMNNLPKDAQNMEVSTPVPPINPEGNDEDETPKNTVSRNGGFLQNAVGQDLVHLGVARTTSGGPSAVASGVSTGHQHNRMDLDPASSSVDNFKTPELTKENGLEEDGKGESSMYDERQPKRRKRTLMNNEQIDELEKALVDEPEMHKNPVLLQSWSEKLSLQGPEITASQLKNWLNNRKAKLARIAKERAENADKPSTSHPGESSESAGEDNYLPPAGVMTVLSKGGSLLSPDCTEQTSQAELSPNTTMMVRPFTRSFSLEPGRLVSLVDSDGKEVGRGKIFQAPGKSTTESRVCVVDVTELRTEKWRELPHPSEAFGWTFQEAEARNGGIIRVSWDAVRLFPVA

SEQ ID NO: 62523 - protein, 375 aa, Zea mays; identical to SEQ ID NO: 38457
  Clone ID: 700620721_FLI.pep

SEQ ID NO: 62524 - protein, 448 aa, Zea mays
  Clone ID: 700466268_FLI.pep
STQQNRPKFVSAFCQSNCGDVSPNVLGTFCIDTGLPCDFNHSTCNGKNELCYGRGPGYPDEFESTRIIGNRQFQKAVDLFSSASEEIQGKIDYRHTYLDFSQLEVNVRTSTGGQQVVKTCPAAMGFAFAAGTTDGPGAFDFKQGDVKGNPFWRLVRNLLKTPGKEQVECQAPKPILLDTGEMKEPYDWAPAILPIQIIRIGQLAILCVPGEFTTMAGRRLRDAVKAVLTSDNSGEFNNIHVVLAGLTNTYSQYITTFEEYEIQRYEGASTLYGPHTLSAYIQEFQKLATAMVANKEVPTNFQPPDMLDKQIGLLPGVVFDSTPPGVEFGDVSSDVPASSTFRKGSVVNATFYSACPRNDLLTDGTFALVEKLDGSNSWVPAYDDDDWSLRFKWSRPSKLSPRSFATLEWTVPGDAPSGVYRLRHFGASKPLIGSIKHFTGTSRAFAVR

SEQ ID NO: 62525 - protein, 596 aa, Zea mays
  Clone ID: 700466320_FLI.pep
KAEEYLLSVPQDTPYSEFNHRFQELGLEKGWGDTAKRVLDTLHLLLDLLEAPDPANLEKFLGTIPMMFNVVILSPHGYFAQSNVLGYPDTGGQVVYILDQVRALENEMLLRIKQQGLDITPKILIVTRLLPDAAGTTCGQRLEKVIGTEHTDIIRVPFRNENGILRKWISRFDVWPYLETYTEDVSSEIMKEMQAKPDLIIGNYSDGNLVATLLAHKLGVTQCTIAHALEKTKYPNSDIYLDKFDSQYHFSCQFTADLIAMNHTDFIITSTFQEIAGSKDTVGQYESHIAFTLPGLYRVVHGIDVFDPKFNIVSPGADMSVYYPYTETDKRLTAFHPEIEELIYSDVENSEHKFVLKDKKKPIIFSMARLDRVKNMTGLVEMYGKNARLRELANLVIVAGDHGKESKDREEQAEFKKMYSLIDEYKLKGHIRWISAQMNRVRNGELYRYICDTKGAFVQPAFYEAFGLTVIESMTCGLPTIATCHGGPAEIIVDGVSGLHIDPYHSDKAADILVNFFDKCKADPSYWDKISQGGLQRIYEKYTWKLYSERLMTLTGVYGFWKYVSNLERRETRRYIEMFYALKYRSLASQVPLSFD

SEQ ID NO: 62526 - protein, 231 aa, Zea mays; identical to SEQ ID NO: 52187
  Clone ID: 700469036_FLI.pep

SEQ ID NO: 62527 - protein, 481 aa, Zea mays
  Clone ID: 700470940_FLI.pep
SFGSRSLFSPFPRLVRDLPYDQFRGVYWLLPVLQCGRMSEPSKVIHIRNVGHEIAESDLLQLLQPFGVVSKIVMLRAKNQTLLQMEDIHASVSALQYYTSVQPSIRGRNVYMQFSSHQELTTDQSSHGRNSDQESEPNRILLVTIHHMIYPITVEVLHQVFKAYGFVEKIVTFQKSAGFQALIQFHSRQEAVEAFGSLHGRNIYDGCCQLDIQYSNLSELQVHYNNDRSRDFTNPSLPTEQRPRASQQAYPDPANLYAFQQAGASYAQMGRAAMIAAAFGGTLPHGVTGTNERCTLIVSNLNNDKIDEDKLFNLFSLYGNIVRIKVLRNKPDHALVEMADGLQAELAVHYLKGAILFGKKLEVNYSKYPNITPAPDAHDYLNSSLNRFNSNMVKNYRHCCSPTKMIHISALPQEISEEAILNHLSEHGTVVNTKLFEVNGKRQALVLFETEEAATEALVSKHASTLEGNTIRISFSQMQSI

SEQ ID NO: 62528 - protein, 690 aa, Zea mays
  Clone ID: 700474755_FLI.pep
FYQARSPSHCATSGDPAMASWLKVAEDLLEVVDRRAKIVATELSDEQSTSQPSGPNNQEVQAKKGKPREKGPLKLTNADGGNKISAQKEKRSRQRPRERMKIEKIRPSPPAGSSSVDTSASEPEVTPIDVKEVGNEGTLEKGEKGTDGLKTDGSGIVNTMVEVQLMQKNSDNATLDGVTHTNSEIAVESYFSVMDAKSESSSSNQTSEIGSVINLEERDSTVAVIQDTNASELPNTEVTGKLQESKKASVSDSSESIEDRRKQKSDTISVKEQDQLEEAQGLLKSAVKTGQSKEARLARVCAGLSSRLQEYKSENAQLEELLVQEREKSTLHEAHIKQLQQELSMSRVEGSRAELNMVDALTAKNAEIESLVKSLDSWKKRAATSEEKLASLEEDIDGLKRNCELTETRVIQALREELATTERRAEEERIAHNATKMAAVEREVELEHRAVEASSALARIQRAADQSSSRVLELEHKLAVLEVECASLQQELQEMEARNRRVQKKPSEEANQVLQMQAWQEEVERARQSQREAEAKISSLEAELQKMRVEMAGMRRDAEHYSRQEHVELEKRYRELTDLLYHKQTQLESMASEKAALEFQLEKSLKQFHEVQIEAERSKATRRSASSWEEDADIKALEPLPLHHRHMATANQQLQKAAKLLDTGAVRATRFLWRHPVARVSLLFYLARTT

SEQ ID NO: 62529 - protein, 479 aa, Zea mays
  Clone ID: 700475643_FLI.pep
VTLNSVVFCINGVRPRPNLSSSEQPNTPAAILRPAAQVGRTLCRRRAHATAEQREARDPMAAAEGQWVLMATGRTPTNIAVIKYWGKRDEALILPINDSISVTLDPDHLSATTTVAVSPSFPSDRMWLNGKEISLLGGRFQSCLREIRKRARDFEDKEKGVKIKKEDWDKLHVHIASYNNFPTAAGLASSAAGLACFVFTLGKLMNVKEDYGELSSIARQGSGSACRSIYGGFVKWCMGEKDDGSDSIAVQLADETHWNDLVIIIAVVSSKQKETSSTSGMRDSVETSPLLQYRAQTVVPGRVLKMEEAIKNRDFESFAKLTCADSNQFHAVCLDTSPPIFYMNDTSHRIISLVEKWNHSEGTPQVAYTFDAGPNAVLIAQNRKTAAHFLQKLLYYFPPQDNDLSSYLVGDKSILGDAGLHSMKDVEALPAPPDTKIPDQKFKGDVSYFICSRLGAGPKVVVDEGQALIDSVTGLPKGV

SEQ ID NO: 62530 - protein, 394 aa, Zea mays; identical to SEQ ID NO: 56351
  Clone ID: 700476487_FLI.pep

SEQ ID NO: 62531 - protein, 653 aa, Zea mays; identical to SEQ ID NO: 56213
  Clone ID: 700476808_FLI.pep

SEQ ID NO: 62532 - protein, 653 aa, Zea mays; identical to SEQ ID NO: 56213
  Clone ID: 700477624_FLI.pep

SEQ ID NO: 62533 - protein, 382 aa, Zea mays
  Clone ID: 700355939_FLI.pep
EIRLLAAKMSGGAKAYAAVVLIRIMYSGMHVMSKVALDQGMNPLVFLFYRHTTAALVLIPVTFVVERRKAKPVTFKIGWKMFIHALYGVTACGDLFNLGLNYTSATSSSALYNVQPVVTFILAVIFGMETLKLTRFHGKVKFAGILFCVAGVTILAFYEGPMFRSFNHHHLFQNGGGGGGSSAAGAGDTHSKKQWVLGIFLMTLSNVLAGLWTVLQGPLIEDTSKLMNTTLQISWASLQAFLVAVAVERDFSKWRLGWNVGLAAIIYSGVIVTALSYYMQMWTIAKRGPVFLAMSMPLTFVFTIVISSFVIGDAVSLGSIFAGALLVGGLYNVFWGKSIEERDDDDLMNKISGPGKAGQQDKAADNNPASSQVPDDGAEAKV

SEQ ID NO: 62534 - protein, 480 aa, Zea mays; identical to SEQ ID NO: 60493
  Clone ID: 700356467_FLI.pep

SEQ ID NO: 62535 - protein, 144 aa, Zea mays
  Clone ID: 700357430_FLI.pep
ERRNPIHPSQAKAEKKKRRKKKHRQHVGGDCQLRGHPDRHHPASAGGVPQVRVRPRVLDLPPPHLPRLHPRHHLRHLRHHQEHLASHPCRRRSMSLYLCLFICLMPTCAVCSCLNSVVFLFCYRTHPMHHLSPRRNNHSNNKFR

SEQ ID NO: 62536 - protein, 136 aa, Zea mays
  Clone ID: 700348162_FLI.pep
CHCKSKHSANNIIHKSRNERVTTFLGGDHCKQKLTIAITWIYTYIHTKFSSFWIHKRSALKCTELLWNKVGLMECSATKRIIIIILPQFNISEDTLHIYMQIEKWVATYMQIEKERMDTCRLIELECTKKFLMHVN

SEQ ID NO: 62537 - protein, 253 aa, Zea mays
  Clone ID: 700349560_FLI.pep
RADWTISEADKSNGAYGSISTACHGASSSGSASHSAPYGTVGLPITPWGSAETHKLQGALSTNWFHSSGTETKGHQSTVFVNGASQSLSCSDHMLPLRVQQSHTGGNLSNGSKANVHTGAPPPWLKANEHDPKNLSLKSCGLSSRKGKLRKLNPNRVGAAWAERRRAEMEMEKQGEIVPATSDSSWLPNFGSVWQSGTRKESRKEFEKSHKIHDTKSDHDLSLEIKPYISKRMRVGAEKASDKAEELGSHLPQ

SEQ ID NO: 62538 - protein, 465 aa, Zea mays
  Clone ID: 700350083_FLI.pep
QFLIASSSNLSHHGSLLQFCRYYVSLAYIASFFPVAWMFRVAKTFDVLCSTAALRSTNVILAMVCAVLIHDLLLCIRPGIGERKATAYAILVALYPVHWFFTFLYYTDVASLAAVLAVYLFCLKKQFWISTMFGVFSILFRQTNVIWIIFFAANGAITYVKDLYPKDNASHENSEPIHQSKKASARDNKTSVQSLRRRRINSPINKVIVCESANPYNSLTEEVCDISLKLWNSKCEILIAFAPFVVVMAAFVAFIIWNGGIVLGAKEAHVVSPHFAQFLYFGLVSAAALLPWHFTPNRVLDLFHLSGKNKTCGSLAVLMGLGLSFVAVHFFSIAHPYLLADNRHYTFYIWRKVIQVNWMMKYMLIPLYVYSWLSIINILGKSQTRIWVLSFVLSVALVLVPAPLVEFRYYTIPFVILVLHSPSIGNGKLLAMGSLYAAVDLSTLVMFLFRPFRWEHEPGTQRFMW

SEQ ID NO: 62539 - protein, 142 aa, Zea mays
  Clone ID: 700350290_FLI.pep
QASTHSPTSSRTQVSRDKTVDMARTQSAVAVAVVAAVLLLAAAATTSEAAITCGQVSSAIAPCLSYARGTGSGPSASCCSGVRNLKSAASTAADRRAACNCLKNAARGVSGLNAGNAASIPSKCGVSIPYTISTSTDCSRVN

SEQ ID NO: 62540 - protein, 731 aa, Zea mays
  Clone ID: 700350848_FLI.pep
AVARGDAREAGELLAAGRADVNYAGVVWLRARRVAEAEPREDAAAEARAVHEEIRADVSPLFLAAGNGDVALVRALLAKGADVNGKVFRGYPTTAAAREGCAEVAELLVRAGASQPACEEAVVEAALQGQAALAAIFMGSDLVRPRVAAHALVSAAARGFVDVVDTLIKCGADPNATARVLLRSLKPSLHANVDCTALFAAIVSRQVAVVRHLLQAGVKRDTKVRLGAWSWDASTGEELRVGAGLAEPYDAVWCAVEYYESTGSILRMLLRSGFTSTAAHLGRTLLHHAILCGSAGAVQTLLASGADSEAPVKTTRSNRSRPVHLAARLGQPEILRMLADRGCDLNARAEAGDTAAIICSRHKREDCLRVLVSAGADVALLNSAGDSSASVASSGGWKTGFERAVIGAIRCGAVPRSSERSVFSPLMFGALCGDATAMEVLLSQPDVDVDEQDSDGCSPIMAAAKMGNVEAFRALVFAGANVKLSNKRGETAIGLAQQSKKRDLFEQVMLELALEKGMPGGFYALHCASRRGDTAAVRHLASTGCDVNIPDGDGYTPLMLAAREGHAGVCELLISYGARCDLRTPRGETALSLARAALATAAFNKAEDVIMDEMGRQAVLQGARVRKHTKGGRARPHGKSLRMVAAAGVLRWGGSSRRNVICREAEVGGSSAFQRHRQRKGDAYEPGLFRVVTATGREVHFVCQGGKEAAELWVRGIRAVTRAAFGKRGKE

SEQ ID NO: 62541 - protein, 517 aa, Zea mays
  Clone ID: 700351339_FLI.pep
YALLSLLAVRAQGLPPETGAGRKRPGSRRQHALAVQQHYQGACRGSGRLPQVRSSRRRRPSVSEMKERGGSRAAVDERYAQWKSLIPVLYDWFANHNLVWPSLSCRWGPQFEKATYKNRQRLYLSEQTDGSVPNTLVIANCEVVKPRVAAAEHISQFNEEARSPFVKKYKTIVHPGEVNRIRELPQNSKIIATHTDSPDVLVWDVEAQPNRHAVLGASESRPDLILTGHQENAEFALAMCPAEPYVLSGGKDKFVVLWSIQDHISALGDSSSSPGASGSKQSGKIANEKESPKVDPRGIFHGHDSTVEDVQFCPSSAQEFCSVGDDACLILWDARTGTDPAVKVEKAHSGDVHCVDWNPLDVNYILTGSADNSVRMWDRRNLGSGGAGSPIHKFEGHKAAVLCVQWSPDRASVFGSSAEDGFLNVWDHEKVGKKKNSNVPAGLFFQHAGHRDKIVDFHWNSSDPWTIVSVSDDGESTGGGGTLQIWRMSDLIYRPEDEVLTELENFKAHLASCAPRN

SEQ ID NO: 62542 - protein, 374 aa, Zea mays
  Clone ID: 700351389_FLI.pep
GMSRYPAPYPMIRPGFVPRPMPPPGVVPIQRPTIISGIRAIPPLVAPTARPPAPAVKLADKPPTAVYVGKIAPTVDSDFLLSLLRLCGSVKSWKRAQDPSNGKPKGFGFCEFESAEGILRATRLLNKLSIDGQELVININDATKEYLKKHVEGKKRAQEKEKETEDASGDGTTAVAENESSKPVPDELDETGDAGDKYREDNTDKFGIVTDEDSQTDKDVAEKISNMIEEWLKTRPPPPPSPVQPSADSSGVDKAKNDSDDKNAADADKRAANETERSETASPDKRKDREHDKDKRDKDLERHDRERERVRRDREKDHKHREADRLYRDRLKEWESREREREYQRYSEKEKERDRDHNRRREILKQEDESDDED

SEQ ID NO: 62543 - protein, 311 aa, Zea mays
  Clone ID: 700550419_FLI.pep
SWIIGTMPPHKIETGHQDVVHDIAMDYYGKRLATASSDNTIKIIGVSGTSHQQLATLSGHQGPVWQVAWAHPKFGSMLASCSYDGRVIIWKEGSKPDEWALAHTFAEHKSSVNSIAWAPHELGLCLACGSSDGNISVFAARSDGGWDTTRIDQAHPVGVTSVSWAPAMAPGALISAGSSGQFEYVQKLASGGCDNTVKVWKLNNGSWRMDCFPALQMHKDWVRDVAWAPNLGLPKSTIASASQDGTVVIWTAAKEGEQWDGRVLYDFRTPVWRLSWSLTGNILAVSDGNNNVTLWKEAVDGEWQQVTTVEP

SEQ ID NO: 62544 - protein, 169 aa, Zea mays; identical to SEQ ID NO: 50724
  Clone ID: 700342634_FLI.pep

SEQ ID NO: 62545 - protein, 190 aa, Zea mays
  Clone ID: 700344150_FLI.pep
SQEPSTSTPSVREVLPTSGPTQDADNISYCSERRNVVKIRVKLTASSSKASDADHRGHSDGARNENEPGQCSSMSMDAPMAGAANEPLNVSNHNIEEQNSCHDLGSRMSASVSNAKLMDRHDISKELQCTADSRLDTVPKDQFCPAINPPEVLDKPGSQLEGVSNYDVNQAPETERSGNRREKKTRKIKS

SEQ ID NO: 62546 - protein, 246 aa, Zea mays
  Clone ID: 700379670_FLI.pep
DPPTLPSSLFSLLAPTTTSHRTPIKVNLFAAPPEAEVELFTAASMHHDPNPFDEGADENPFSNGGGGARGGGVKPQYGFRPTEPAGFGGGRGDATTDIPLDTMNDSKGKAKELSQWESDLRRRESDIRRREEALKSAGVPMEDKNWPPFFPIIHHDIANEIPANAQKLQYLAFASWLGIVLCLFWNFIAVIVCWIRGGDSKLFFLATIYELTVLSALDGFSFVTCSILVFAYLLPLLLQLYSVENH

SEQ ID NO: 62547 - protein, 45 aa, Zea mays
  Clone ID: 700341644_FLI.pep
RTDVAVGPFRVYRRVHRIVFDPSSLDNVGPKVIIFVIKTQKVSLS

SEQ ID NO: 62548 - protein, 381 aa, Zea mays
  Clone ID: 700223602_FLI.pep
FPPNPVIPSLFSTSTGTSQRLPEGSSDPRRFRATRGEIQELPAMVKDSAYYDVLGLSVDASPAEIKKAYYIKAKLVHPDKNPGNPDAALKFQELGEAYQVLSDPGKKEAYDNYGKEGIPQDNMVDPAAVFGMLFGSDYFEDYVGQLALASIASVEVEENSNSQEARAKVQEKIKELQREREQKLTQSLKDRLQSYVDGRNDEFVSYASAEARRLSEAAFGEAMLHTIGYIYVRQAARELGKSRIYMGVPFIAEWVRDKGHHIKSQVNAASGAISLIQLQEGMKKMEGSEDSEEQLMKSFEEKKDAMLSSLWKINVVDIESTLSRVCQAVLRDSMVSKDVLKLRAKALKKLGTIFQGAESMYRRENSLRVETSTDQQAASSH

SEQ ID NO: 62549 - protein, 465 aa, Zea mays
  Clone ID: 700103394_FLI.pep
MLHCTTTSSIHAGVRVQLLQATDPLEYLTRHVSSCFVMLNCSSDRDEVGRSEPWSVVQRSDHGLGLQVLVERVHAHVLAEPAHLVPAERRVRVEREVAVDPDGAGADGPRHGVGDVDVLGHDAGGQAVPGVVRFLDHLLHGLEFHESHHRPKDFILCDRHVVLDVREDGGLDVVALVAAGLPSGDQRGAFALPDVNVPEDLLVLVLVNLGALADTRVERVSDHGLAGELGGLLHELVVDPFLHVDARAGHTDLALVGVGGEVDEVNGHVEVGVVEDDDGRLAAQLERHGLEVALGRGPHDEAADLRGPREADLVDVHVGGDGGPGRGPESRHDVEHAGGDAGLPGEVRVEERGQRRLLGGLDDDGAAGGERGPYLEEEHGGGVVPGHDVAHHAHGLLERVPVHPLRHLERRAVHLVGGAGVVAQQVRGARDVPRLAHGEQLAGVHRVQRRQLLHVLVDQVREPVE

SEQ ID NO: 62550 - protein, 369 aa, Zea mays
  Clone ID: 700105137_FLI.pep
GFARRGAMEPTSSASIARQTWELENNIPAAASDPDAMDAIYRYDDASQARAQQEKPWANDPHHFRRTKISALALLKMVVHARAGGTIEVMGLMQGKCEGDAIIVMDAFALPVEGTETRVNAQADAYEYMVDYSTINKQAGRLENVVGWYHSHPGYGCWLSGIDVSTQMLNQQFTEPFLAVVIDPTRTVSAGKVEIGAFRTYPKDYKPPDEPVSEYQTIPLNKIEDFGVHCKSYYALDITYFKSSLDSHLLDLLWNKYWVNTLSSSSLLGNRDYVAGQIFDLADKLEQAEGQLAHSRFGGMIMPSQRKKEQEESPLAKVTRDSSKITAEQVHGLMSQVIKDILFNSVHPSSKASTSAPPDSSGPEPMVEA

SEQ ID NO: 62551 - protein, 395 aa, Zea mays; identical to SEQ ID NO: 58778
  Clone ID: 700236518_FLI.pep

SEQ ID NO: 62552 - protein, 534 aa, Zea mays
  Clone ID: 700238245_FLI.pep
ASTSETSSKSIFRYSALRLPRLLRNPIRRPAAMDPAPQTHPILSYVLSRIPNLSMTKTPTAEFDIEQPPVHTPSPRTPSSAGEFELVERMPGLRHPSVLRAMTRAVADVSAARSALQVLGPRPDHELVDSSRAIVAAAEAGDSRIPAGDVEACRAVVRLDETHDAYEALLHEAESRLERVYRSAMEGTDLDDEAAESVKDQGPVAGPEGGDAAVGEEVVAVLKQAEEGKPVESVRLVDRQLRHLPEAFGRILGLRVLDVSRNQLEVIPDAIGGLGHLEELFLTANDLVSLPDTIGLLSNLKILNVSSNRLRALPDSISKCRSLVELNVSYNGLTYLPTNIGYDLVNLRKLWIHMNKLRSLPSSVCEMRSLYLLDAHFNELCGLPSLFGKLSGLEILNLSSNFSDLKELPPSFGDLLNLRELDLSNNQIHALPDTFGRLDKLEKLNLEQNPLVMPPEDIVNKGVDAVKEYMSKRWLDILLEEEQRRIAAETPEMSSTPKAWLTRSVSWVTDVSESLAGYLGGNKSEKDAYLDQQF

SEQ ID NO: 62553 - protein, 347 aa, Zea mays
  Clone ID: 700097332_FLI.pep
QLQIVSWATGYIPSSQPNPHHQPTSSNSSSSVHPSSSAAAEREQMTSSGTVAQQLPRTEARSLSGHEGAVLAVRFNRDGNYCLSCGKDRTLRLWNPHTGAQVKTYKSHAREVRDVHSSSDNAKLVSCGADRQIFYWDVASGRVIRKFRGHNSEVNSVKFNEYNAVVVSAGYDRTVRAFDCRSQNNDPIQTIDTFQDSVMSVNLTKTEIIAGSVDGTVRAFDIRMGRETVDNLGHPVNCVSLSNDNNCLLANCLDSTVRLLDKSSGELLQEYKGHTCKSFKMDSCLTNDDAFVVGGSEDGYIFFWELVDAPVVARFRAHSSVVTSISYHPTKACMLTSSVDGSIRVWT

SEQ ID NO: 62554 - protein, 455 aa, Zea mays
  Clone ID: 700098077_FLI.pep
YTLPVRATTSSIVASLATPAPSSSSGSGSGRPRPRLIRNAPVFAAPATVVGMDPTVERLKSGFQKFKTEVYDKKPELFEPLKSGQSPRYMVFACSDSRVCPSVTLGLQPGEAFTVRNIASMVPPYDKIKYAGTGSAIEYAVCALKVQVIVVIGHSCCGGIRALLSLKDGAPDNFHFVEDWVRIGSPAKNKVKKEHASVPFDDQCSILEKEAVNVSLQNLKSYPFVKEGLAGGTLKLVGAHYDFVKGQFVTWEPPQDAIERLTSGFQQFKVNVYDKKPELFGPLKSGQAPKYMVFACSDSRVCPSVTLGLQPGEAFTVRNIAAMVPGYDKTKYTGIGSAIEYAVCALKVEVLVVIGHSCCGGIRALLSLQDGAPDTFHFVEDWVKIGFIAKMKVKKEHASVPFDDQCSILEKEAVNVSLENLKTYPFVKEGLANGTLKLIGGHYDFVSGEFLTWKK

SEQ ID NO: 62555 - protein, 728 aa, Zea mays
  Clone ID: 700099215_FLI.pep
SRMDGRKRKGKFRNSLRRMAMECLCSGEQLKASDETMRSSDSTITKDFSASGYSSRNGEIEQYLDNGNIEEAELSLREGICLNYEEARALLGRLEYQRGHVEAALRVFDGIDISALVPKMKISIARKTDRRKTHSQWDSPPMPLHAVSLLMEAIYLKARALHDLGKDKEAAQECRMILDIVEAAVPEGLPAGFGKGCKLNEIICKAVELLPELWKSGGFSLETISSYRRSLLNNWNLDGETIARIQKKFAVFLLYSGCEARPPNLHSQLDGSFVPRNNIEEAILLLMILLRKSNLKRIEQDPSVMHHLTFALSMSGQLIPLAGQFEELLPGVLDKKEWLYSVALCYLAEEDDLSALNLLKIILKSGEDSVQLIELLLASKACIEMSIHTEGAFYARRAIANMQGGCKPMAGLANLLLGVALSNQARSAISDTDRASWQCEALEALGNAEKNIHGKDSRALYSLSLENAVQRKLELAAFYAKRLVKLEAGSELRSWLLLARILSAQKLFADAETVVDAALDQTGKWCQGDLLRTKARIQAAQGQFREAVETYTQLLAIIQLRTKSLTAGVCLPKGNKDDKGLETETWYDLALLYLGMAQWRDAEVCVLKIRSISPYSALAWHATGKIYEAKGLRKEALGAFFRALDLDPKHVPSLISTATVLQQLGDRPLPSIRCFLTDALQLDRTNHVAWFNLGLLYKEEGGRSAAEAAECFQAAAFLKETAPSEPFR

SEQ ID NO: 62556 - protein, 156 aa, Zea mays
  Clone ID: 700101153_FLI.pep
VSIRIVAPDEVGASFERADEVIFEEEEDDGQTTRTRPEDPSPITSGVESGRESSFFVLTVRYTTGELGTEPAKLQVEEIPSQAEQVLIQNQQLPAMEKEKQSVPECSLQKSVSSGCLNSADWMNGPARPNFLDFQGLDFEAAFGLRRAYSEGDIQI

SEQ ID NO: 62557 - protein, 327 aa, Zea mays
  Clone ID: 700094715_FLI.pep
LRAVQAQGGAQLCHHHREAQRQVERRCWPRERQASLQEAVILPVKFPQFFTGKRRPWRAFLLYGPPGTGKSYLAKAVATEADSTFFSISSSDLVSKWMGESEKLVANLFQMARENAPSIIFIDEIDSLCGQRGEGNESEASRRIKTELLVQMQGVGHNDDKVLVLAATNTPYALDQAVRRRFDKRIYIPLPDTKARQHMFKVHLGDTPHSLTESDFESLARRTDGFSGSDVAVCVKDVLFEPVRKTQDAMFFFKADGDMWMPCGPKQPGAVQTTMQELASKGLAAKILPPPISRTDFEKVLSRQRPTVSKKDLEVHERFTKEFGEEG

SEQ ID NO: 62558 - protein, 286 aa, Zea mays
  Clone ID: 700095219_FLI.pep
PPQRATLTRFGRFLLCLPLTLVQPPEICSARAAMAETLDMTLDDIIKNNKKSNPSSGGARRSRGGSAPGGGSGGVGPTRRSFKRAGNRQAPYQPPKAPDAAWQHDMYPAVAAGGGGGGRVSALETGTKLYISNLDFGVSNDDIKELFSELGDLKRFSIIYDRSGRSKGTAEVVFARRSDAVAAVKKYNNVQLDGKPMKIEIVGTNTPTASAALPVSNGGHARNAVRSAPRGAAPAGMPQRRPHQRGGRRSGGSGGGRRGKERSKPKSAEELDADLEKYHADAMQTN

SEQ ID NO: 62559 - protein, 525 aa, Zea mays
  Clone ID: 700096728_FLI.pep
MERVLKDDAVEEKGDRARMASFVGAMAISDLAKTTLGPKGMDKILQSTGRGRNVTVTNDGATILKSLHIDNPAAKVLVDISKVQDDEVGDGTTSVVVLAGELLKEAEKLINMKIHPMTIIAGYRMALECARNALLQNTMDNKENTDKFRADLMNIAMTTLSSKILSQDKEYFAELAVDAVLRLKGSTNLESIQILKKPGGSLKDSFLDEGFILDKKIGIGQPKRIENAKILVANTAMDTDKVKIYGAQVRVDSMSKVADIEAAEKQKMREKVQKIIAHGINCFINRQLIYNFPEELFADAGILAIEHADFEGIERLALVTGGEIASTFDNPDSVKLGHCKVIEEIMIGEDRLIHFSGVAMGQACTIVLRGASEHVLDEAERSLHDALCVLSQTVNDTRVLFGGGWPEMLMAKEVDELARKTPGKRSHAIDAFSHALQAIPTIIADNAGLDSAELISQLRAEHHKENCTAGIDVITGTVGDMQRLGIQESFKVKQAILLSATEAAEMILRVDEIISCAPRRREDRM

SEQ ID NO: 62560 - protein, 652 aa, Zea mays; identical to SEQ ID NO: 38995
  Clone ID: 700072802_FLI.pep

SEQ ID NO: 62561 - protein, 167 aa, Zea mays
  Clone ID: 700073575_FLI.pep
SQPKACLRSGHPSLHATMSRRKTREPKEENVTLGPTVREGEYVFGVAHIFASFNDTFIHITDLSGRETLVRITGGMKVKADRDESSPYAAMLAAQDVAQRCKELGITALHIKLRATGGNKTKTPGPGAQSALRALARSGMKIGRIEDVTPVPTDSTRRKGGRRGRRL

SEQ ID NO: 62562 - protein, 405 aa, Zea mays
  Clone ID: 700155715_FLI.pep
SSSRFTMPPCCSPTTSAVTAAAASPGASRSGGLLRRSRPAPAAVNCKKIDSLRSINGAPPCIPVSNRSLLTPVTLPVFRDPNMRNDTRLRIFSGTANPSLSQEIASYLGLELGKITIKRFADGEIYVQLQESVRGCDVFLVQPSCPPANENLMELLIMIDACRRASAKNITAVIPYFGYARADRKSQGRESIAAKLVANMITEAGANRVLVCDLHSSQAMGYFDIPVDHVYGQPVILDYLASKTICSDDLVVVSPDVGGVARARAFAKKLSDAPLAIVDKRRQGHNVAEVMNLIGDVRGKVAVMMDDMIDTAGTISKGAELLHQEGAREVYACCTHGVFSPPAIERLSSGLFQEVIITNTIPLKEEKSFPQLTILSVANLLGETIWRVHDDCSVGHEPYSSLDID

SEQ ID NO: 62563 - protein, 274 aa, Zea mays; identical to SEQ ID NO: 38967
  Clone ID: 700048766_FLI.pep

SEQ ID NO: 62564 - protein, 368 aa, Zea mays
  Clone ID: LIB4074-017-G11_FLI.pep
KKGPLQQTDPPSIPVDELFPSGEFPEGEIQQYKDDNLWRTTSEEKRDLERLQKPIYNSVRQAAEVHRQVRKYMRSIIKPGMLMVDLCETLENMVQKLIKENGLQAGIAFPTGCSLNWVAAHWTPNAGDKTVLQYDDVMKLDFGTHIDGYIVDCAFTVAFNPMFDPLLQATRDATNTGIKEAGIDARLGDVGAAIQEVMESYEVEINGKVFQVKSVRNLNGHSIGPYQIHAGKSVPIVKGGEQTKMEEGEFYAIETFGSTGKGFVREDLECSHYMKNFDVGHVPLRLAKAKQLLGTINHNFGTLAFCRRYLDRLGETKYLMALKNLCDNGIVQPYPPLCDVRGSYVSQFEHTILLRPTCKEVISRGDDY

SEQ ID NO: 62565 - protein, 132 aa, Zea mays
  Clone ID: LIB4073-015-A8_FLI.pep
PCPRRPTPPRSFRNPFTGPSRWTPRHRLLAPMASTVDSPGSSSDFAKRIDRAWLISQQPRPVSCSSCQSAGHVECKWCAGTGFFILGDNMLCEVPSRNSKCVICSGKGFTSCADCQGTGFRAKWLEEPPINK

SEQ ID NO: 62566 - protein, 366 aa, Zea mays
  Clone ID: LIB3969-003-B3_FLI.pep
PVLFQQPHTPRHRTGNAKQPHTAHADTLCTTTCRPFPARRCRCALALTPPPAQVHRAEKPMAPSPILVRPPALANSPLPPPRCVAAVAAAPAVRTAPAAPFSRLRTKCRFAASDVREDYSSTPIDIVADVKTEKIVVLGGSGFVGSAICRAAVSKGIEVVSFSRSGRPSYSDPWVDQVNWLPGDVFYARWDEVLVGATAVVSTLGGFGNEEQMKRINGEANVIAVNAAKENGVPKFILISVHDYNLPSFLLTSGYFTGKRKAESEALSKYPASGVVLRPGFIYGKRKVNGFEVPLDAVGQPLEKLLSSVENFTKPLSSLPASDLILAPPVSVDDVAYAVINGVIDDSFFGVFTIEQIKEAASKVRV

SEQ ID NO: 62567 - protein, 524 aa, Zea mays
  Clone ID: LIB3969-010-D2_FLI.pep
PSPTSGKRARGGGRNRRLLRAALRDLGERASAAMGARCSKLSVCWWPPRFKSPMLENGAAEDDGSGVPVFAEYSLAELRVATDGFATDRIVSEHGEKAPNVVYRGTLFSSGRTVAIKRFGRSAWPDSRQFLEEARAVGQLRSRRLANLIGCCYESGERLLVAEFMPHETLAKHLFHWETNPLSWAMRTRAAFYVAQALEYCSSKGRALYHDLHAYRVVFDAEGNPRLSCFGLMKNSRDGKSYSTNLAFTPPEYLKTGRVSPESVVYSFGTVLLDLLSGKHIPPSHALDLIRGKNFLVLMDSCLEGHVSSSDGTDLMRLASRCLQYEARDRPNLKTVVSGLECLQKDVSTPSHTLLGIQHDNKNSGRISLSAIGKAFARADLNEVHEILLHDGYDEDDTANAELSLQSWNDDVSESFVVKRHADNAFRSKDYSTAIECYSRFIDSGAGVAPTMLGRRCFAYVVAGNPQEGLEDAKRAEVIASDWPMGHYLQALALHNLGREAESQEALKNGTALEAAMNSRARTV

SEQ ID NO: 62568 - protein, 516 aa, Zea mays
  Clone ID: LIB3960-017-G12_FLI.pep
EGRKGKMFIESFRVESPHVRYGPTEIESEYRYDTTELVHEGKDGASRWVVRPKSVKYNFRTRTAVPKLGVMLVGWGGNNGSTLTAGVIANREGISWATKDKVQQANYYGSLTQASTIRVGSYNGEEIYAPFKSLLPMVNPDDIVFGGWDISNMNLADSMTRAKVLDIDLQKQLRPYMESMVPLPGIYDPDFIAANQGSRANSVIKGTKKEQVEQIIKDIREFKEKNKVDKIVVLWTANTERYSNVCAGLNDTMENLLASVDKNEAEISPSTLYAIACVMEGVPFINGSPQNTFVPGLIDLAIKNNCLIGGDDFKSGQTKMKSVLVDFLVGAGIKPTSIVSYNHLGNNDGMNLSAPQTFRSKEISKSNVVDDMVSSNAILYEPGEHPDHVVVIKYVPYVGDSKRAMDEYTSEIFMGGKNTIVLHNTCEDSLLAAPIILDLVLLAELSTRIQLKAEGEDKFHSFHPVATILSYLTKAPLVPPGTPVVNALAKQRAMLENIMRACVGLAPENNMILEYK

SEQ ID NO: 62569 - protein, 788 aa, Zea mays
  Clone ID: LIB3960-019-E8_FLI.pep
CAARCGKRTGRRFLGIFVRAPWSEVPRPPGSPRRPMGCVSSKQFHGGDDHGDGKPRRRPSSNSLKRLVSYSSSKRHEELEEEDEVGAAVAATSSSGGRRAGNDASTARLIRKPPALVVEAVPALSEEAATLAVGVVDAERAVAAATGNRKRPPADVHINGAAEQGLSSVGVRTEGEAKPRIRDVPNGVQGEHVVAGWPRWLTEVAAEAVRGWQPRRAESFEKLDKIGQGTYSSVYKARDLENGKIVALKKVRFANMDPESVRFMAREIHILRRLDHPNVIKLEGLVTSRMSSSLYLVFEYMEHDLAGLAATPGLKFSEPQVKCYMQQLLSGLDHCHNRGVLHRDIKGANLLLDNNGILKIADFGLATFFNPKQKQHLTSRVVTLWYRPPELLLGATNYGAAVDLWSAGCILAELLSGKPIMPGRTEVEQLHKIFKLCGSPSEEFWANLKLSRATIFKPQHPYRRCVNDVYKDFPTTALTLLDHLLAVEPGNRGTAASALDSEFFTTKPYACDPSSLPKYPPSKEYDAKLRDEEARRQRAAAKGQEAEAGRRKQPPAPDGNSGLQHRRVQMNPKSSSYKFTPKEDAVSGFPIDPPARAAADNGYPQRVPLMQAGRSSSTLGRSSGMDPKAQRFHTSQIVTTEMSGQSTASGQRGNAPKMSNLGESARRQYLREHRSSSRYSQLTAADPSDRPEWNHQFQERPSSSHRKDDAVANKEHTVVNGTKKNRIHYSGPLMPPGVNMDEILREHERQIQQAVRRARLDKGKGKHSGERDQSESLLCTTGNLRADR

SEQ ID NO: 62570 - protein, 513 aa, Zea mays
  Clone ID: LIB3960-023-C12_FLI.pep
PPPPFRLIAPSSSVVATTPPSHPLRVAPIPSWPGHLGCLAPFPRSRTRRVAGRTSRPPALPPSLPPLPASICDRRAIQRQGEGGRRVLVGFILGRRLHMPTTPRSRSQARTTRPWILSGMDFADSRRKPNFTGKIAVAAALTVMCIIVLKQSPSFSGTSVFSRHETGVTHVLVTGGAGYIGSHATLRLLSDKYRVTIVDNLSRGNMGAVRVLQRLFPEPGRLQFIYADLGDAKAVKKIFSENAFDAVMHFAAVAYVGESTMEPLRYYHNITSNTLTVLEAMAAYNVNTLIYSSTCATYGEPDTMPIVETTPQNPINPYGKAKKMAEDIILDFTKSKKQSDMAVMILRYFNVIGSDPEGRLGEAPRPELREHGRISGACFDAALGIIPGLKVRGTDYSTADGTCIRDYIDVTDLVDAHVKALGKAQPGKVGIYNVGTGQGRSVTEFVEACKKATGASIKVEYLARRPGDYAEVYSDPSKILRDLNWTAQYTDLGQSLAQAWKWQKAHPNGYASA

SEQ ID NO: 62571 - protein, 255 aa, Zea mays
  Clone ID: LIB3959-003-F10_FLI.pep
LFFPVCSDFDSMKTMSRRNSRTIYVGNLPGDIREREVEDLFYKYGRILDIDLKIPPRPPGYAFVEFEDPRDADDAIYGRDGYNFDGYRLRVELAHGGRGQSYSYDRSSSYSSACRGGVSRRSDFRVMVTGLPSSASWQDLKDHMRRAGDVCFSDVYREAGETIGIVDYTNYDDMKYAIRKLDDSQFRNAFSRAYIRVREYDARSRSRSRSHSYSRSPSYSRSRSPKSVSQSPSSVDERFAFVFPRFGHAAIWGLH

SEQ ID NO: 62572 - protein, 442 aa, Zea mays
  Clone ID: LIB3958-005-D5_FLI.pep
LFKWPFFGNSVCRGSIYRGLGLMVAASPCALAVAPLAYATAISSLASKGILLKGGHVLDALSSCQSIAFDKTGTLTTGKLMCKAIEPIHGHLGVKSGRSNPSCCTPNCESEALAVAAAMEKGTTHPIGRAVLDHSVGKELPVVAVESFECLPGRGVVATLSGVKVRENENELSEASIGSVDYISSLYRSNGESEQIRAAAKSSAYGPEFVQAALSVDKKVTLFHFEDEPRSGVCEVISTLREKAKLRIMMLTGDHESSAQRVAKAVCIEEVHFSLKPEDKLNKVKAVSREGGGGLIMVGDGINDAPALAAATVGMVLAQRASATAVAVADVLLLQDNICGVPFCIAKARQTTSLVKQSVALALTCIVFAALPSVLGFLPLWLTVLLHEGGTLLVCLNSIRALNTPTWSLVDDIRKLVDSLRNYFPSKFNSSPSSYTANTAPL

SEQ ID NO: 62573 - protein, 141 aa, Zea mays
  Clone ID: LIB3912-009-B7_FLI.pep
KQKKTYYIEGNSARERTTTLKLSNLTATRAFLFQTTCAHVHVRTGYPLQLTSRYRYCRRTARIDLLGRYVHKNASATTTLASLIRRSHLDVLARRRVRVAGGRVRGVDGRASAVVAVRAGEGHARAVVASGGVRSVVGLLL

SEQ ID NO: 62574 - protein, 455 aa, Zea mays; identical to SEQ ID NO: 40951
  Clone ID: 700261008_FLI.pep

SEQ ID NO: 62575 - protein, 557 aa, Zea mays
  Clone ID: 700263082_FLI.pep
VEMDSVRSWFQKFQPRDKSKRPVVAARHGKDPGKPPMDDAPSSATKQRVAAAKQYIENHYKTQMKSLQDRKERRWMLERKLQDAEVPVEEQNNILKHLEKKETEYMRLQRHKMGVEDFELLTIIGRGAFGEVRLCREKASKNVYAMKKLKKSEMLRRGQVEHVKAERNLLAEVDSAYIVKLYYSFQDEEFLYLIMEYLPGGDMMTLLMRKDTLTEDEARFYIAETVLAIESIHKHNYVHRDIKPDNLLLDRSGHLKLSDFGLCKPLDSSNFPNLNEPDYMSGKVTTPLPDTTRLSNPSAPRRTQQEQLSHWQKNRRMLAYSTVGTPDYIAPEVLLKKGYGTECDWWSLGAIMYEMLVGYPPFYSEDPMSTCRKIVNWRSHLKFPEEAKLPPEAKALISKLLCNVEHRLGTKGAHEIKAHPWFGGVQWEKLYQMKAAFIPEVNGELDTQNFENFEEIGTQIQSSSKSGPWRKMLPSKDANFVGYTYKNFEIVNDDEVAGIAELKKKSSKPKRPTIKTMFERMDGEEPVQGSFLSMLPPEGQPSSHSSVPQEKYQPRRK

SEQ ID NO: 62576 - protein, 256 aa, Zea mays
  Clone ID: 700264220_FLI.pep
QNRCASSGRSVRIRTARRQAAAPATASARPMASLSPSLHLPCNSRTGFLGKTRGIRPCVFPAGRVGFVRTVVECKESRIGKQPIEVPSNVTLTLEEQFVKAKGPLGELSLSFPGDLKIVKEESGNLRVYKTAETKRANQMHGLFRTLTDNIIVGVSKGFDKKLQLVGVGYRAAVEGNDLVMNLGFSHPVRMAIPEGLAVKVEENTRIIVSGYDKSAIGQFAATIKKWRPPEPYKGKGIRYMDEVVRRKEGKAGKKK

SEQ ID NO: 62577 - protein, 255 aa, Zea mays
  Clone ID: 700265503_FLI.pep
PASSTTTSPHARHRCRRTRRLRLPCHPASTRQLPRVALPCPAHRRARRPARAPLRRHRSLAPRPRCSTRWGRRFVATGYAPTRRRWPSRRHASYGYCTASCYRLPVSLRARSMQNVHIRLVYVSHVEGTGKRLRPKTGNDRRWVPCAAEEEGLIRRSKAKAIGGVHAAYDLQPLAFTGVDHVEGGAGVDVEDVAHLELPLHELVLVNIPNLRFPCSSSQYHAIASHIDRERTTRSSTTRIDRNNNNSMYPAARRE

SEQ ID NO: 62578 - protein, 211 aa, Zea mays subsp. mexicana
  Clone ID: UC-ZMROTEOSINTE024B07_FLI.pep
PCVAPLSLSLKSCCWSHLPSLRPPTMDEAQVVESKDGTISVASAFAGYQEAVQDRDHKFLTKAVEEAYRGVDCGDGGPFGAVVVCNDEVVVSCHNMVLKHTDPTAHAEVTAIREACKKLGKIELSDCEIYASCEPCPMCFGAVHLSRIKRLVYGAKAEAAIAIGFDDFIADALRGTGFYQKANLEIKKADGNGALIAEQVFEKTKEKFQMY

SEQ ID NO: 62579 - protein, 228 aa, Zea mays subsp. mexicana
  Clone ID: UC-ZMROTEOSINTE103B05_FLI.pep
LAEWFKRDVVTSPFEELHGATLFHESMGSLDADFHDMASEALDAHDNFGIEIAMREFRDLFEGIQSMTYCCGNFGDDKGARAIVKAFPHIKCTVLAPPKIIATKPADGAMINYVEGDMFSFIPPAQTVVLKLVLHHLTDEECVKLLAQCRKAIPSRKDGGKVIIGDIMIDHSGPMLETHLLMDIGMMTMTKGRQRDEKEWSELFTKAGFSEYKILKEFGARVAFEVYP

SEQ ID NO: 62580 - protein, 286 aa, Zea mays subsp. mexicana
  Clone ID: UC-ZMROTEOSINTE065F10_FLI.pep
SIEIEENWDKVKTIFLPTEKQMTPDACAPLIATLPLEVRTKIGDFIRAVFSVFQDLDFSFLEMNPFTLVNGEPYPLDMRGELDDTAAFKNFNKWGNIVFPLPFGRVLSPSESFIHELDEKTSASLKFTVLNPKGRIWTMVAGGGASVIYADTVGDLGYASELGNYAEYSGAPKEEEVLQYARVLLDCATSDPDGRKRALLIGGGIANFTDVASTFSGIIRALREKESKLKAARMNIYVRRGGPNYQTGLAKMRTLGAELGVPIEVYGPEATMTGICKEAIDCIMAA

SEQ ID NO: 62581 - protein, 103 aa, Zea mays
  Clone ID: CC-ZMLE189109C09_FLI.pep
NCEQRKRGHCCRHDSERLDCLLWLGHDSHRALSHRKRLQAERRAAHCDCGGHEEVSDRQLRVTGGPADVGQSLPLLKDVLQAIVELSVAQHNPLICSWFIRGF

SEQ ID NO: 62582 - protein, 292 aa, Zea mays subsp. mexicana
  Clone ID: UC-ZMROTEOSINTE002B01_FLI.pep
AQNGINIAIIDFYSHIGYKHKYHKICVGRDSNGQPCMKILIIQSFKVNDKGILSLLELKFRNEMWPQIMTSPTMSMLPRVDILPQLQGNSGLGFLGHGQALPEIILHEHQAVPQDDLGLPSQNFLRLCDVRLPLAGVIRSVLGHRHCHIWVDQLLHILSKFQHGEFTWVPQVNRSSVVSIHQLNKTINHIGNIAETPSLCSWPLDSEGLTAHSLSNEVANNTAIINVHPRPIGVENPGNPDFNAMLPVIVEHQRLCYTLTLIITTPNTNRVNIAPVGLSLRMLKWITINFRG

SEQ ID NO: 62583 - protein, 121 aa, Zea mays subsp. mexicana
  Clone ID: UC-ZMROTEOSINTE003D05_FLI.pep
RKGERIKDCLMIVGICLLQYTAFDQLKKRIIQRQRRKNAATAEDNSIVALSAFSAFLLGAVSKSIATVLTYPLIRFANFYLTTEVYLGLTTCFCLLFFLDGFLYVCVFLAPVRGFLYWAFL

SEQ ID NO: 62584 - protein, 154 aa, Zea mays
  Clone ID: CC-ZMLE18900080H12_FLI.pep
GQVFVRGKAGERFAVRNSLCQAVVEGTGDHCCEYMTGGCVVVLGKAGRNVAAGMTGGLAYILDEDDTLVPKVNKEIVKMQRVNAPAGQMQLKGLIEAYVDKTGSEKGIAILREWEAYLPLFWQLVPPSEEDSPEACAEFERVLAKQATTQLSAK

SEQ ID NO: 62585 - protein, 278 aa, Zea mays subsp. mexicana
  Clone ID: UC-ZMROTEOSINTE076D08_FLI.pep
SPQVSTSVVEPYNSVLSTHSLLEHTDVAVLLDNEAIYDICRRSLDIERPTYTNLNRLVSQVISSLTASLRFDGALNVDVNEFQTNLVPYPRIHFMLSSYAPVISAEKAYHEQLSVAEITNSAFEPSSMMAKCDPRHGKYMACCLMYRGDVVPKDVNAAVATIKTKRTIQFVDWCPTGFKCGINYQPPSVVPGGDLAKVQRAVCMISNSTSVVEVFSRIDHKFDLMYAKRAFVHWYVGEGMEEGEFSEAREDLAALEKDYEEVGAEFDEGEDGDEGDEY

SEQ ID NO: 62586 - protein, 810 aa, Zea mays
  Clone ID: UC-ZMFLMO17284B02_FLI.pep
NAAALLRPPTQMKMQLVEPEGSKGMGSPGCSEIVELVDEPKDARSCGLTHLRVRVKPVGQELGARSCSVEDDLDQLIRSINVRTSARASGQTSTDRRLIALGKSPVSSSEIVESVSLKQALRKMCISQASEMAAMKRLSKPTGVSTPSDSGAIKKLHGSVAVQTNEEQDDNSKAGKVSVKPEKSTGSSVGKPSEISKGQSKSSAKKNLRSASPTIGNVHKTRIQDVISNKSSEGVEGISVEVTLPKQRKGKSMKTSSPRAVPVGGSRLVRPMFRNKTSTKKKVKPEPAIVPASHKHCETKGPKSHTSKHQESLQDEPRTPAPTDKKATVSSTTVDGADFGTKGCGVGVIHGSKVGELLRSKEKGECSQSSKSSIGDYSTSTSISEDSYGSFSANRSRPHMSKDVRWGAIRRMAIQQGSLGLKNFKLLKQLGCGDIGTVYLAELVGSDCMFALKVMDIEYLISRKKMLRAQTEREILQMLDHPFLPTLYSHFTTDNLSCLVMEFCPGGDLHVLRQKQPTKTFSEAAARFYVAEVLLALEYLHMLGVIYRDLKPENILVREDGHIMLSDFDLSLRCSVSPMLVRTSSVDRDEPSRPSGPCAQSCIDPLCIQPSWSNSSCFTPSLVSSTPSRTRRPRAEPLKKPSLPQLVVEPTEARSNSFVGTHEYLAPEIIRGDGHGSSVDWWTLGIFLYELLYGKTPFRGPDNDETLSNVISQGLKFPDSPALSFHARDLIRGLLVKEPEYRLGSSRGAAEIKRHPFFEGLNWALIRWTSPPETPKNIDTAATLAGTRKKKEGKCLEFRLNGDDIEFELF

SEQ ID NO: 62587 - protein, 421 aa, Zea mays
  Clone ID: UC-ZMFLB73005C07_FLI.pep
SPVLAHPPGLATMRGLLACATLARRAAASSAPARVRHLAGAAEAAEAELKRTALYDFHVAHGGKMVPFAGWSMPIQYRDSIMDSTVNCRANGSLFDVAHMCGLSLKGRGAIPFLESLVVADVAALRDGTGTLTVFTNEQGGAIDDSVIAKVTDHHIYLVVNAGCRDKDLAHIEAHMEAFNKKGGDVKWHIHDDRSLLALQGPLAAPTLQLLTKEDLSKMYFSDFKMIDINGYACFLTRTGYTGEDGFEISVPSENAVDLAEAILERSEGKVRLTGLGARDSLRLEAGLCLYGNDMEQHITPVEAGLSWAIGKRRRAEGGFLGADVILKQLQEGPKIRRVGMVTQGPPARSHSELVSGSGERIGEVTSGGFSPCLKKNIAMGYVKSGMHKAGTELKVVVRGKSYDAVVTKMPFVPTKYYKPS

SEQ ID NO: 62588 - protein, 489 aa, Zea mays
  Clone ID: UC-ZMFLB73044E04_FLI.pep
SIIPYRRRRHHHFLLSPPPPTVSLPRHRFGRCEMALSASDVPTMYTVLVNSLSADEAARRPAEAALAQCETRPGFCSCLLEIISARGLACREDVRLLATVYFKNSINRYWRHRRDSYGISNEEKDHLRKNLLLNMREENSQIALQLAVLISKIARLDYPKEWPELLSVLAQQLQSADVLASHRVFMVLFRTLKELSTKRLAVDQKNYAEITGHLFEYTWNLWKSDVQTILQNLSMLSQRNDIDSVFEQSNDLALICDRWLLCLMIVRLLIFSGYASDSRTAQEVWQVREVCPTVLTAIKSLLPYYDTFKDKHAKLCDFAKRACTKLMKVLVTLQGRHPYSFVHETVLSATVDFCLNMITNPEQTGTTFEEFLIQSMVLVKSVLECKEYRPSPMGRVINENEPLSLEQRKKNFAAVASDMLKVILSGDRVVLLCNILVRRYFIFTAKDLEEWSENPESFHHEQNLVQWTEKKRPCAEALFIVIFEKYREV

SEQ ID NO: 62589 - protein, 677 aa, Zea mays
  Clone ID: UC-ZMFLMO17333G08_FLI.pep
KYWIDVQLRWGDYDSHDIERYTRAKFMDYTTDNMSIYPSPTGVMIGIDLAYNLHSAFGNWFPGSKPLLQQAMNKIMKSNPALYVLRERIRKGLQLYSSEPTEPYLSSQNYGEIFSNQIIWFVDDTNVYRVTIHKTFEGNLTTKPINGAIFIFNPRTGQLFLKVIHTSVWAGQKRLGQLAKWKTAEEVAALVRSLPVEEQPKQIIVTRKGMLDPLEVHLLDFPNIVIKGSELQLPFQACLKIEKFGDLILKATEPQMVLYNIYDDWLKSISSYTAFSRIVLILRALHVNNEKAKMLLKPDKTIVTEPHHIWPSLNDEQWLKVECALRDLILSDYAKKNNVNTSALTQSEMRDIILGAEIAPPSQQRQQIAEIEKQSRETTQLTAVTTRTTNVHGDELIITTTSPYEQQAFASKTDWRVRAISATNLYLRVNHIYVNSDDIKETGYTYIMPKNILKKFICIADLRTQIAGFLYGLSPQDNPQVKEIRCIAIPPQHGTHQMVTLPSNLPEHEFLNDLEPLGWMHTQPNEAPQLSPQDLTSHAKILENNKQWDGEKCIILTCSFTPGSCSLTAYKLTPSGYEWGRSNKDNGSNPHGYLPTHYEKVQMLLSDRFLGFYMIPDNTPWNFNFMGVKHDPQMKYNMKLGMPRDFYHEDHRPTHFLEFSNIEEGEVAEGDREDTFT

SEQ ID NO: 62590 - protein, 551 aa, Zea mays
  Clone ID: UC-ZMFLB73049A11_FLI.pep
LSAANAMGSTAAASVLPVSAGSGENLVLILDYGSQYTHLITRRVRQLGVLSLCVSGTAPLASLEGLRPRAVILSGGPHSVHAPGAPAFPEGFLGFAAAAGAHVLGVCYGMQLLVQSLGGAVVSGERQEYGKMDVEVTAASSALYGQAETGKRQTVWMSHGDEVVRLPEGFEVVARSVQGAVAAIENRENRFYGLQYHPEVTHSAQGMETLRRFLFDVCGIKADWKMQDVLDEEIKTIQSTVGPDEHVICALSGGVDSTVAATLVHKAIGDRLHCVFVDNGLLRYKEGERVMTTFESDLHLPVTCVDASEQFLSKLKGVEDPEKKRKIIGREFIAVFDDFAHKLEQKIGKRPEYLVQGTLYPDVIESCPPPGSGRTHSHTIKSHHNVGGLPKDMKLKLIEPLKLLFKDEVRKLGGILNVPDSFLKRHPFPGPGLAVRVLGDVTQGNALEVLRQVDEIFVQSIKDAGLYDKIWQAFAVFLPVQTVGVQGDQRTHSNAVVLRAITSEDGMTADWYYFEHAFLVDVVNKICNNVRGINRVCQDITSKPPATVEWE

SEQ ID NO: 62591 - protein, 809 aa, Zea mays
  Clone ID: UC-ZMFLMO17275G09_FLI.pep
KTLSATMACTSAGGRAATQKKKEQRHTRTHTYGSINTTKNQQRRTIDGTRSGHTRVQVLFFFPRISSPPSSSPWRSLLDVDGQRLAVPLLEALEHGVHELALADADEHLVALLAGGLEPLAGQEHAAELLAHEAVQRERPAVRDPVRHGGGALGDRHAGGLHLLGQHRAELLLEPGDLGEHGGLPLRVAAAEGVVHQHGAQLLHQRQAAAGRVLRVREHGLAVDGADQLLLAEAGAGELARGVHGQHLLGHLGHGVLHRRLDVLLEVAQVHGLAQRHDVGGRHELQDVDRLGGLPGRDEAQGVHVLVVLLRALHVVGDGVAQVLELGAVGGHGDLGALEAVVQAGVAAAGQVGGEPVVVELVDELGELREHELADVGDGEAGVVHGHADGGALEVAAVQRLAAVDVDDRVVVHGVDLALDGLGGGADDLDLGAQPLRRRAERVPVLLGLQQRVQLVQLLGLLHEGAAIQDVLHDGRGLDGPRVVLQLVGQVVRVLGLAVHDLAEDGGQDLRQDGQDVGVVHHGGRERGAHGRAVDDGEALLGVELEEAALDAGDLERLGGVHLPPVDGDGLRVGAARDEAGDVGERDQVARRGDGAPERQAGADTGVEQLRDGLEDLEADAGVALEEGVDAHQHRRAGDLRRQRVPVAAGAEDSGVEMPEQLDLERGPVLGAAVGGAAEAGGDAVDVAAVGDAVEDPLAAGLDAGAGLLVELDGDAGRVLGGGDGGHLADAEGGALDLDHGLPGLRHHALHLVQVTPGQLRRRRAPVQRVALHDGAVARHCCAAVWLVGAARWQEVVDWCRWRRRAGGV

SEQ ID NO: 62592 - protein, 469 aa, Zea mays
  Clone ID: UC-ZMFLB73009G01_FLI.pep
SAGPPALTAASLPLRYCSSPPHSPAGAAAAAARSYPTSASGGGTAGGKGKMFGRAPKKSDNTKYYEILGVPKSASQDDLKKAYRKAAIKNHPDKGGDPEKFKELAQAYEVLSDPEKREIYDQYGEDALKEGMGGGGSHVDPFDIFSSFFGPSFGGGGGSSRGRRQRRGEDVVHPLKVSLEDLYNGTSKKLSLSRNVICSKCKGKGSKSGASMRCPGCQGSGMKVTIRQLGPSMIQQMQQPCNECKGTGESINEKDRCPGCKGEKVIQEKKVLEVHVEKGMQHNQKITFPGEADEAPDTVTGDIVFVLQQKDHSKFKRKGEDLFYEHTLSLTEALCGFQFVLTHLDNRQLLIKSDPGEVVKPDQFKAINDEGMPIYQRPFMKGKLYIHFTVEFPDSLAPEQCKALETVLPPRPSSKLTDMEIDECEETTMHDVNNIEEEMRRKQAHAAQEAYEEDDEMPGGAQRVQCAQQ

SEQ ID NO: 62593 - protein, 628 aa, Zea mays
  Clone ID: UC-ZMFLB73065B01_FLI.pep
DSQYEDGELRESGDCYWVDDGYEDVKHANWHYQVSDYKNEEATPGLTSLHTDSVANNVVIPVANDNGPQSRKEDIAVSPVSSKCSWLTNCLDGGSIADGKSQSIHLRGDTNMYGSNPSRVAVRSATTVSQSERCNDALGDMLNIRMKNTGWDMMPEDQKHSQHDARDVTDSSNRCVLSSDAARDDDSLQKKGLLNRDLQGVERQKSFDRPQRNELSRSDDGYGSGSKSGRAMDSHGSHDMYGTSRHVQTSARVEWVESSKRPRSTRHKSPEYYNYGTSGPRNAAEAAVAKMQSSGFVVARDGTLVRAVDAANAGQMPRRMRNPLSSSCHLISGWGSPVDRDEACGMSRGPVHARKASPERHFGANSNRSSRYGSEMEKNHTTDANLSSVHCSLSSRQRGTPTSRASLNLSRAHSRSPSGSRSRSPHDWAPRNRGKIMANGGSTLWKHSRSPPNHMTKGEIGRMASPRRQPGYDDRAMCYSPLSRNNTYSKNASTWVDGRNGSAVDISDDHNKRYSRRSSPLRITSRNDRFDVMDSQGRPRSGEFYRPTQGRLLYGYNRENKHGRNGEDGRECTDRYANNSVKRYDRSGAVKQFRNDTGDKFRTRISAPRSPDLQRGVSPRRFDRSFER

SEQ ID NO: 62594 - protein, 381 aa, Zea mays
  Clone ID: UC-ZMFLMO17065D11_FLI.pep
RIAPRSLAGSFAEGPPASPRFTTEMASELTYRGGGTSTAAGAGAGGYSPKPSKPLAWLPRAARYAVAEHRPLFALAGMLIAAAVISIASPSASSSSSTSTSTGGAASSYSNNNNPLARFPVEPAHHRDVATRHFVGGKVPLGLKRKALRVLVTGGAGFVGSHLVDRLLERGDSVIVVDNFFTGRKDNVLHHLNDPNFEMIRHDVVEPILLEVDQIYHLACPASPVHYKYNPIKTIKTNVVGTLNMLGLAKRINARFLLTSTSEVYGDPLQHPQVETYWGNVNPIGVRSCYDEGKRTAETLTMDYHRGANLEVRIARIFNTYGPRMCIDDGRVVSNFVAQALRKEPLTVYGDGKQTRSFQYVSDLVEPRQGVPRVGAEDPPA

SEQ ID NO: 62595 - protein, 1145 aa, Zea mays
  Clone ID: UC-ZMFLMO17079E04_FLI.pep
QIISDRFILSMLGTDFNDFIYLPSVGAAGGILVAWRRHLGFTGQKRLDNYSVSVQFCNSRGNEWWLTCVYGPQGGNEKILFLQEIREIRAECLGPWMLAGDFNLIYKDSDRNNSNYDRAMMGRFRRLIEDMTLKEIPLHGRQYTWSNQRNVPVLVKLDRVFCSVDWEFLFPNVLLQSTASQDSDHCPLILGLRDNKSGKRRFHFESFWTKLEGFQDIVLATWNSIESATCPFKSLEMKLQGVAKSLQAWSEKQVGHVRSQLALAKEILHMLEIAQDGRVLSPAERWLKFRLKKQALLLSSCKRSIARLRARISWLKDGDANTKLFHLHARHRKRKNFVACLVEGEQILTSHEEKAECVDHFYTMLLGNSTDRERAIELEALGMPNFDLTVLEAPISEQEVWDAIKCLPSDKAPGPDGFTGRFYKVCWTIIKADIMAAISAVWGRKFANFGRLNTAYITLIPKKDGADNIKDFRPISLVHSFAKLVTKILANRLASKLNEMVSPNQSAFIKGRFIQDNFMLVQQTSRLLHQQNKASLLLKLDITKAFDSVSWPFLIEVMKKLGFGQIWTDMICGLLATSSTQIILNGFPGRHIKHRRGLRQGDPLSPMLFILVMDVLVYMFSKAENDGLLQQLSSSKKLHRVSMYADDVVLFLCPTPTDIDLTLSILHLFGDASGLHNNVQKSNVYPIRCSEEVLLEVQSLLPCEISTFPCRYLGLPLSLHKLTRQQFQPFVDKIADQLPNWKADLMTRAGRRVQVQHVLTSMIVYLAMAVDIPQWGLDAIDKIRRGFLWRGRKEAKGGHCLVAWGKVCRPLKLGGLGISSFPELCWALRLRWLWLQKTDHSRPWSGLQIQIPKKARAFFSEVVTTEVGNGINTKFWKDKWLNGKRIADLFPRLIGAIPKRLINCRTVQEAIVSAKWISDIRGALSVGVLTDYIQLWELISGIELQPEVEDRHIFSIAPNGVYSAKSAYEGLFLGSVSFGHYKRIWKSWALPKCRFFLWLVAHKRCWTADRLAKRGLNHPDKCLLCDQEEETIDHLLVQCSFSREFWYLLLRKFGLHSLAPQPTANSFLDWWEVVEGAVIGLTKKGLNSLIILGAWTLWNHRNNCIFDGCNPSLSLSLRAADEERRKWEVAGAKGLVHLAAPVIEA

SEQ ID NO: 62596 - protein, 554 aa, Zea mays
  Clone ID: UC-ZMFLLIB3205468C03_FLI.pep
VGNAHTARSPISDPRSPRRSKMQIFVKTLTGKTITLEVESSDTIDNVKAKIQDKEGIPPDQQRLIFAGKQLEDGRTLADYNIQKESTLHLVLRLRGGMQIFVKTLTGKTITLEVESSDTIDNVKAKIQDKEGIPPDQQRLIFAGKQLEDGRTLADYNIQKESTLHLVLRLRGGMQIFVKTLTGKTITLEVESSDTIDNVKAKIQDKEGIPPDQQRLIFAGKQLEDGRTLADYNIQKESTLHLVLRLRGGMQIFVKTLTGKTITLEVESSDTIDNVKAKIQDKEGIPPDQQRLIFAGKQLEDGRTLADYNIQKESTLHLVLRLRGGMQIFVKTLTGKTITLEVESSDTIDNVKAKIQDKEGIPPDQQRLIFAGKQLEDGRTLADYNIQKESTLHLVLRLRGGMQIFVKTLTGKTITLEVESSDTIDNVKAKIQDKEGIPPDQQRLIFAGKQLEDGRTLADYNIQKESTLHLVLRLRGGMQIFVKTLTGKTITLEVESSDTIDNVKAKIQDKEGIPPDQQRLIFAGKQLEDGRTLADYNIQKESTLHLVLRLRGGQ

SEQ ID NO: 62597 - protein, 215 aa, Zea mays subsp. mexicana
  Clone ID: UC-ZMFLTEOSINTE019H05_FLI.pep
FGAQISASIRTPLFSSAIRSAMMIPWGGVGCCLSAAALYLLGRSSGSDAEVLRSVARAGSMKDLAAILDTASKVLPLVVAISGRVGSDTPLICQQSGMRGVIVEETAEQHFLKHNDAGSWIQDSAVMLSVSKEVPWYLDDGTGRVYVVGARSAAGLILTVASEVFEESGRTLVRGTLDYLQGLKMLGVKRAERVLPTGTSLTVVGEVLFLLSIGH

SEQ ID NO: 62598 - protein, 427 aa, Zea mays; identical to SEQ ID NO: 59379
  Clone ID: UC-ZMROB73061H08_FLI.pep

SEQ ID NO: 62599 - protein, 351 aa, Zea mays
  Clone ID: UC-ZMFLB73416E09_FLI.pep
TNKCFSIECMIQLGQRDPGTTMQAINQPKLLHQTMQNINKRISTANGTAGTRGFIRNTVCAMLPVPHPSMDASPRIQQLAGWYSTDTTSSASGVGGEPVGRVGERAVGPALVDLLRLRGVPGGAERDVQRVEVVRPRVRHPRVRRLLLVPLHVLVPSVEERVLEPGVELGGPLRHGRVGRANLAQVVRGATGAEDEDAFLPQGRQRLAEVVVVRAVAVGLHRELAHGDAGVRVHEHQRHPGAVVEPAAVVLLHGAEPGLLQELYGPQGQVRSARSRVLELVHGLGKAIEVVDGVVAAADDIDRRRGRLPVSRDDEDGARGLVARDLRRHPRLEEVPRRDTVVDGERGRAVR

SEQ ID NO: 62600 - protein, 464 aa, Zea mays subsp. mexicana
  Clone ID: UC-ZMFLTEOSINTE008F02_FLI.pep
DKSPQLLPPTPPSSVSLSAAATAQEASSCLYRPGMAMLSRAASSAARRPLLPPPRLLAVRAMASSLFGHVEPAPKDPILGVTEAFLADPSSDKVNVGVGAYRDDNGQPVVLSCVREAERRIAGNLNMEYLPMGGSVKMIEESLKLAYGEDSDFIKDKRIAAVQALSGTGACRLFADFQKRFLPDSQIYIPTPTWSNHHNIWRDAQVPQKTFTYYHPESRGLDFSGLMNEIKNAPDGSFFLLHACAHNPTGVDPTEEQWREISHQFKVKKHFPFFDMAYQGFASGDPERDAKAIRIFLEDGHQIGCAQSYAKNMGLYGQRAGCLSILCEDEMQAVAVKSQLQQIARPMYSNPPVHGALVVSIILSDPELKSLWLKEVKGMADRIIGMRKALKENLEKLGSPLSWDHITNQIGMFCYSGMTPEQVDRLTNEYHIYMTRNGRISMAGVTTGNVGYLANAIHEVTKPN

SEQ ID NO: 62601 - protein, 300 aa, Zea mays subsp. mexicana
  Clone ID: UC-ZMFLTEOSINTE014A06_FLI.pep
APAHRLRQEEVHEHPACGGDARVQVEAAGDGDGVGEREEGHGGGAAHDPVEPRADGSSLRAQPQRVDLGAVDPGDGAQAGRERRHERQHGRDAHRAQSRGLPLGAAVHHVQGRGQREEEDGHPAAAGQQQRAAADAVQEQSGDGYEEGLARAHRHGRAQRVGLGLDARPLEHPRAVHHHAVHARGLLDEHEAEPRHEHAAHGAGRVDEQLLPHPVVARRRRRCLAAGADDGGHVVGVGDALGDADHLLDVEQACYVSLPLASRSLFSVARFVSLSHTHAARLLVYLPAANAAGVTVSSHS

SEQ ID NO: 62602 - protein, 370 aa, Zea mays
  Clone ID: UC-ZMROB73004D10_FLI.pep
PRAARDRARGMARDWKEAAEKKGGVEGAKPPDAHAFLQLVATFAVAEREDRPLYRRIVVSFSWRRQMPRLALTLGLEEQMADIIEELIAKRQQLDAVNFAYEAGLQEKFPPVPLLKSYLEDSKKTSTAASDNSSTSSGQSGSNVNKKEQSALRAVIKCVEDRKLEAEFPLEGLRKQLEELEKAKTEKKKAASSATSGGSGGPATKRIRASTGGPMPPAKAGRLTNNACVSSLPAPTTLTQSPSHASYANTSPSRTSYANTSPSHASYATVSPTHASYATPSPPHASYATASPYPYDRPVGHGVYCTRSPPVIREPYVYPAEEVATVNVGIPMAYSTPPMSYPAAPYGGYGNGMPAYTNGMAPAFHQAYYR

SEQ ID NO: 62603 - protein, 530 aa, Zea mays subsp. mexicana
  Clone ID: UC-ZMFLTEOSINTE085D05_FLI.pep
TSRRRQRASLLSHASRQGRERDRRSPSRRRWCGCPPFSSEICLVTDLSDKMVKICCIGAGYVGGPTMAVIALKCPDIEVVVVDISKPRIEAWNSDTLPIYEPGLDDVVKQCRGRNLFFSTDVEKHVAEADIIFVSVNTPTKTRGLGAGKAADLTYWESAARMIADVSKSDKIVVEKSTVPVKTAEAIEKILTHNSKGINYQILSNPEFLAEGTAIEDLFKPDRVLIGGRETPEGRKAVQALKDVYAHWVPEDRILTTNLWSAELSKLAANAFLAQRISSVNAISALCEATGANVTEVAYAVGKDTRIGPKFLNASVGFGGSCFQKDILNLVYICECNGLPEVANYWKQVIKINDYQKSRFVNRVVSSMFNTVAGKKIAVLGFAFKKDTGDTRETPAIDVCKGLLGDKAQISIYDPQVTEDQIQRDLAMNKFDWDHPMHLQPTSPTAVKQVSCVWDAYEATKGAHGLCILTEWDEFKTLDYQKIFDNMQKPAFVFDGRNIVDSEKLREIGFIVYSIGKPLDAWLKDMPAVA

SEQ ID NO: 62604 - protein, 324 aa, Zea mays subsp. mexicana
  Clone ID: UC-ZMFLTEOSINTE77E09_FLI.pep
PTGRRVPLSPRSSRAPSGDRAMEAGGVGLALQTRAAAFGSGQRRGGLQSPIGRLRVAEPAGAAVAVRVRGSKPVVPLRAKKSSGGHENLHNSVDEALLLKRKSEEVLFYLNGRCIYLVGMMGSGKSTVGKIMSEVLGYSFFDSDKLVEQAVGMPSVAQIFKVHSEAFFRDNESSVLRDLSSMRRLVVATGGGAVIRPVNWKYMKKGLSVWLDVPLDALARRIAKVGTASRPLLDQPSGDPYTMAFSKLSMLAEQRGDAYANADVRVSLEEIASKQGHGDVSKLMPTDIAIESLHKIESFVIEHAADNPASDSQAESQIQRIQTL

SEQ ID NO: 62605 - protein, 589 aa, Zea mays subsp. mexicana
  Clone ID: UC-ZMFLTEOSINTE058G05_FLI.pep
PHLASDANAESWHSNDIKGATGSEEGDKSPCAILDDDNSRTPDHSVKDAHASRAACSSYMNEKGVSETKVGTSFSPMNALIEIKYSEASHSLQAGDDTAMNLLASVAGEISKSELASSPSTSVKKLVCEGVNTGKVKVESDMGPSHPGQADAKKVAMGNEVKNDACLVPKEEQHQTAPSPELADSKAVKSSAKIEIHEGHANKCNSQHASIDSKGENRDGCTAHGKVEDGSTNKDGAMESAFGSQRSLVVSSKNSRLVLAGESSLSAADKQTQGLLKSTNHKHLLSVSDNPGAFDRHDSLAGKLDLMAAEVKKADVVGNSSVLQNDTEKKEHVSPSSADVPKLVPAASPVGVANGNNEMKESNGSSSESNSHVKSEGVNSQQSEQSAKQSSKKSSDGVCGKEDGKEDHVLSDEEGSSLAAHTKSNATAKLDFDLNEGIPGDDGHQSETTASPVVCSSAIHLTGLLPFTSPTTSGLPPAPITVAAPAKGPFVPPENLLRAKPEIGWKGSAATSAFRPAEPRKILEMPAATRDIPVSHAAGKQSRPTLGFDLNVADDQTLEEDFPQSFCTDYLFRIWKYEKSRWLVTKCWY

SEQ ID NO: 62606 - protein, 268 aa, Zea mays subsp. mexicana
  Clone ID: UC-ZMFLTEOSINTE099E06_FLI.pep
HSKLLPSLSLCPDQISTWNPQQKGRIWSREVTVHSDLAEICTPWRSNRPLNLGRRNHPRVRRMLAPGGALSARRCANPRAPAATRDHARAKAIKPAPALGCFPRCLVRTSPDLPEPAVASGDLPATRQCRPNATAVANPSPAILRSIQAPRKFPGEAVNLAQALPGSPRHRRGQIALTGVKELAGARGPGKPLRHFPIPRAYGLCVIPWSSSCPLIELPRRGLAGAGIAVDLRRLRTWTEQLLAPSPSPVSFQTPPQYIPSRSETPRT

SEQ ID NO: 62607 - protein, 640 aa, Zea mays
  Clone ID: LIB189-023-F8_FLI.pep
SLVTLIAMEPRHGRSAFTISFSNPNGFANQCTAIPAVSYSAAGSSQLDVLAPTRGCKRKWTELALGLGDTSSSDSSKQSMGTGCTVSSLKGSDDVSCMDYDISFKLSLGNEDTSKLHKQACGSKRTMEKPRLDLKLSLAPSQSDVTDADLIRSSAPQDMFVQPYLMSSVPTVDEGSTSARHPSGGMVVSFLNQAGISPNQLPPLNSHLVQGPACSAPTVLQLPKSSAATSSGFVRPQQRNGSTKICSEPGCAKGARGSSGRCIAHGGGRRCQKEGCNKGAEGRTIFCKAHGGGKRCERLGCTKSAEGRTDFCIAHGGGRRCSHDGCKRAARGRSGLCIKHGGGKRCQTLNCTKSAEGRSGMCIAHGGGRRCQYAGCGKGAQGSTNFCKAHGGGKRCTHPDCSKGAEGSTAFCKAHGGGKRCSADGCTKSVHGGTQFCVAHGGGKRCVVEGCGKSARGRTDRCVGHGGGKRCHSAGCGKSAQGSTDFCKSHGGGRRCSWGHPGSDLGSGGAPCDRLARGKKGLCDRHNPLVHDNSVHGGASFGGFSVVSAAALSEGDGSPSPGTETSMRSFFMHAVEAPRCVAASAHEGRVHGGNFMPIMLDGGVGLGKRPADNADAGASAPPRSWKSMEKACGSAPRSWL

SEQ ID NO: 62608 - protein, 477 aa, Zea mays
  Clone ID: LIB3059-038-F8_FLI.pep
EMSLGYAEKLSYREDVGTVGMPEIFETPELVQNKIEELAAMVQKSKHLVVFTGAGISTSSGIPDFRGPMGVWTLQRAGKGIPNASLPFHHAVPSLTHMALVELERAGFLKFVISQNVDSLHLRSGFPREKLAELHGNSFKEICPCCKTEYLRDFEIETIGLKDTPRRCSDKNCGARLKDTVLDWDDALPPEEMNLATEHCRSADLVLCLGTSLQITPACNMPLMSIKNGGRVAIVNLQATPKDKKASLVIHGLVDKVIAGVMSKLSLRIPPYIRTDFVQLTLRHSLKKKCVRWTLRVTSIHGLRAPLPFLQSVKVSFPERPDLKSVVLKEQPFSLQRETSMNKPFFMLLTLNFSDGCSCLSSSIGWPVDFQKRKDSFVRDRALVLRELYSAAQRESCIGQQEILERENLPRAETSIHGIVTNIVRYDTEDEKLAPPKNDLMNHSRSNPAKRHVEGTDCHSSLPKKLKYFLKDKKLNC

SEQ ID NO: 62609 - protein, 553 aa, Zea mays
  Clone ID: LIB3060-057-G8_FLI.pep
FCSERTHSPVPDLRSPRRSKMQIFVKTLTGKTITLEVESSDTIDNVKAKIQDKEGIPPDQQRLIFAGKQLEDGRTLADYNIQKESTLHLVLRLRGGMQIFVKTLTGKTITLEVESSDTIDNVKAKIQDKEGIPPDQQRLIFAGKQLEDGRTLADYNIQKESTLHLVLRLRGGMQIFVKTLTGKTITLEVESSDTIDNVKAKIQDKEGIPPDQQRLIFAGKQLEDGRTLADYNIQKESTLHLVLRLRGGMQIFVKTLTGKTITLEVESSDTIDNVKAKIQDKEGIPPDQQRLIFAGKQLEDGRTLADYNIQKESTLHLVLRLRGGMQIFVKTLTGKTITLEVESSDTIDNVKAKIQDKEGIPPDQQRLIFAGKQLEDGRTLADYNIQKESTLHLVLRLRGGMQIFVKTLTGKTITLEVESSDTIDNVKAKIQDKEGIPPDQQRLIFAGKQLEDGRTLADYNIQKESTLHLVLRLRGGMQIFVKTLTGKTITLEVESSDTIDNVKAKIQDKEGIPPDQQRLIFAGKQLEDGRTLADYNIQKESTLHLVLRLRGGQ

SEQ ID NO: 62610 - protein, 301 aa, Zea mays
  Clone ID: JC-ZMSHLIB3587P023D07_FLI.pep
VFFLEQCRRAACNFIKNMIFNLRRKSILLLENISCLLQVDGGSNTENLGLQNIQARIRMVLAFMMASLMPWVHNKSGFYLVLGSSNVDEGLRGYLTKYDCSSADVNPIGSVSKQDLRAFLRWAAIHLKYSSLAEVEAAPPTAELEPIRANYNQLDEIDMGMTYEELSIYGRLRKIFRCGPVSMFQNLCHSWCGRLSPSEVADKVKHFFKYYAINRHKMTVLTPSYHAESYSPEDNRFDLRQFLYNSRWPYQFRKINELVQEMDKDGKWETSAEEKLGAQTGAQGTGMGVVAAGSANPSAGF

SEQ ID NO: 62611 - protein, 346 aa, Zea mays
  Clone ID: UC-ZMFLB73094F03_FLI.pep
GLCLQGETGRGGRGGSGAREKRTGEEGGRMLSVVRVHLPSEIPIVGCEITPYVLLRRPDGAVSTNDVPETAPADGQFMRYRWYRIQSDRKVPICSVHPMEQATIQCLGCLKSKIPVAKSYHCSAKCFSDAWQHHKVLHERASSALNENGAEEEELFGRFGSGGSGVLSTAGSGSLSNFGQSPGVNNGPVPFYPSGTDKNSGETWFEVGRSRTYTPTADDIGHALKFECVAVDSEKKSPIGPSTSIMTSRVIPAPTPTPRRLIQVNGDVLGHLDLDSQISSLGTFTVLSYNILADAYATTDAYSYCPTWALTWNYRRQNLLREIIGYHADIICLQEVQVNHFEDFFT

SEQ ID NO: 62612 - protein, 189 aa, Zea mays
  Clone ID: UC-ZMFLB73160G04_FLI.pep
IARYNATVEALTPNGYYVAYDGWGNSEEVDPDNVRLLEEEAADALGQAEKEAEATKMAIKRKIEQAATSDFQARSLPAKLRIEPSDPEDVKAAKRKKIHAFKSKSRFEQLEFAQNKRQNAWQQFQTKGKAKKVGFFSGRKKESIFKSPDDHRGKVGVTGSGKGLTDFQRREKHLHLKGGSGDAADDDEE

SEQ ID NO: 62613 - protein, 581 aa, Zea mays
  Clone ID: UC-ZMFLB73178E09_FLI.pep
SEQEEEESQRPSLRFQGKEDLRPRRSVTTTKSVRMSREDTLKVQTLELKVNIHCDGCLKKVKKVLHKIDGVYQSTVNAAEGKGDGVRAHGPGHRHQEAAQGREAGAAVGRHRQACRGDPARETAAQGCRGQGPGPAAQERRRQGSAAQERRRQGPGPGPEAAAAQGWSGRRRRRRESGGAAALAADAAAADADAAADADERDEVCSSGAHGHGRRSHADADAVPGGSAGAGAGRRGQGPQDRQVRPPGGRGVRGRRQRPRRRVRRTRRRGFRGRRPRRRRRRRPVRRPRDGDEAHGHAPGRCCRWRQRKRRRQEGWRRERGPGSDQWERQQRRRGEAERGRQKRGQERQGRRRRRRRRCPGRREPGWAGQAERRLPRRRRSRRADDGRRAAAACGHDDEAAEHDGRRGRFPRHGPDGRPPPHGWRRHAAGRRGRRARHAGWWQHQHGRWRNAWGRVLSARRWRRHAGRRGDAGHVAAASAAAAAHGGGDAAAAAAHGCDHAAAAATDDDDERARPRPRPPWPRRVRVRAPGDAAVPAAAGVLLPDAAAPPARQHVQRREPQRVLGDVRRGAAAACGGLRRK

SEQ ID NO: 62614 - protein, 468 aa, Oryza sativa
  Clone ID: UC-OSFLCYP023A10_FLI.pep
PASHLEMSFRSIVRDFRDSFGTLSKRSFEVKISGFSGRHRGKSIGPSSELDDTPVVAQQSKWAGLPPELLRDVMKRLEEDDSNWPSRKDVVACASVCTTWRDMCKDIVRNPEFCGKLTFPVSLKQPGPRDGVIQCFIKRDKSKLTYHLYLCLSSAVLDETGKFLLSAKRSRRTTHTDYIISMDSKNISRSSSGYIGKLRSNFLGTKFIIYDTQPPYNARTLCSQERTSRRFSSRKVSPKVPTGCYPIVQVNYELNVLGTRGPRRMQCAMHSIPASAVEPGGIVPGQPKELLPRLFEESFRSMATSFSKYSITDHSTDFSSSRFSEFGGGALQGQEQEQDGDDVNKERPLVLRNKAPRWHEQLQCWCLNFRGRVTVASVKNFQLIAAAPQPSSGAASEPSQAGQAAQQQTQPFQPSSSSSSSSSNHDTVILQFGKVAKDMFTMDYRYPLSAFQAFAICLTSFDTKLACE

SEQ ID NO: 62615 - protein, 193 aa, Zea mays subsp. mexicana
  Clone ID: UC-ZMFLTEOSINTE107A07_FLI.pep
RSRTQDLAVVPPNSTVIYEVELISFVKDKESWDLNNEEKIEAAGKKKEEGNALFKSGKYARASKRYEKAAKYIEYDTSFSEDEKKQSKQLKISCNLNNAACKLKLKDYKEAAKLCTKVLELDSQNVKALYRRVQAYIQLADLELAEADIKKALEIDPDNRDVKLEYKILKEKIKEYNKKDAKFYSNMFAKMTK

SEQ ID NO: 62616 - protein, 151 aa, Zea mays
  Clone ID: 700202758_FLI.pep
LKRAQAENEGKTVESKKPIVVKYGLNHVTYLIEQNKAQLVVIAHDVDPIELVVWLPALCRKMEVPYCIVKGKARLGSIVHKKNASVLCLTTVKNEDKLEFSKILEAIKANFNDKFDEVRKKWGGGIMGSKSQAKTKAREKLLAKEAAQRMT

SEQ ID NO: 62617 - protein, 272 aa, Zea mays
  Clone ID: 700206702_FLI.pep
RRTSTASSTTIDDCSIPASRRPAATSCNTRTSAASYSPFEMPEIDWNLENTQIVCKLFVEQVGKGNRPNTYLNSVGYAEVEKGFKDRTGIDVTKSQLKNKWDKLKEDFKAWRKLKLRQTGTVGTVKRALLIWMMIGGKELERIYQDVESSGSLAFKMKMRWLGALETSQILVVITGLLVLQMILLQLMLSNRTLYQCLKHRMRNSFLQLKIMKTMLALHLQVVGKGWLGQFKEKERKLRQEMHSSSKKQSQAWLARPMNLLPRKMENILLIK

SEQ ID NO: 62618 - protein, 250 aa, Zea mays; identical to SEQ ID NO: 48023
  Clone ID: LIB3061-056-E9_FLI.pep

SEQ ID NO: 62619 - protein, 88 aa, Zea mays
  Clone ID: LIB3068-009-B1_FLI.pep
FEVHCRWSVKTISSSLCSLNISAGAHFKKWCIMQSKIKSGAVDELKKEVKEMLDFAQGYMLKVRSPDQENSNLAQQDNVAPDAVSGDQ

SEQ ID NO: 62620 - protein, 333 aa, Zea mays
  Clone ID: LIB3075-001-D7_FLI.pep
PPSVRLSLSLVVLLLLLLLPGRAASFSTSCWCQGREGVAEVARMGLAGDGSADTAHLSNNENGRFIYGVASSPGKRASMEDFYEARIDDVDGEKIGMFGVYDGHGGVRAAEYVKQHLFSNLIKHPKFITDTKAAIAETYNLTDSEFLKADSCQTRDAGSTASTAIIVGDRLLVANVGDSRAVISKGGQAIAVSRDHKPDQTDERQRIEDAGGFVMWAGTWRVGGVLAVSRAFGDKLLKQYVVADPEIKEEVVDSSLEFLILASDGLWDVVTNEEAVAMVKPIQDPQEAANKLLEEASRRGSSDNITVVIVRFLYGTTGDKSGADKETTNDQNS

SEQ ID NO: 62621 - protein, 161 aa, Zea mays
  Clone ID: LIB3150-001-H4_FLI.pep
RTKKMQASRARLFKEYKEVQREKSADPDIQLICDDSNIFKWTALIKGPSETPYEGGVFQLAFAIPEQYPLLPPQVRFLTKTFHPNVHFKTGEICLDILKNAWSPIWTLQSVCRAIIALMAHPEPDSPLNCDSGNLLRSGDIRGYQSMARMYTRLAAMPKKG

SEQ ID NO: 62622 - protein, 363 aa, Zea mays; identical to SEQ ID NO: 42242
  Clone ID: LIB3150-043-C7_FLI.pep

SEQ ID NO: 62623 - protein, 697 aa, Zea mays
  Clone ID: LIB3180-023-C11_FLI.pep
IWNMEHVLSSRRFPTDPNEYKLYEEIGDGVSATVYRALCVPLDILVAIKVLDLEKCNNDLDGIRREVQTMSLIDHPNLLRAYCSFTNGHQLWVVMPYMAAGSALHIMKTSFPEGFDEPVIATLLREVLQALVYLHSQGHIHRDVKAGNILIDTNGAVKLGDFGVSACMFDTGNRQRARNTFVGTPCWMAPEVMQQLHGYDYKADIWSFGITALELAHGHAPFSKYPPMKVLLMTLQNAPPGLDYERDKRFSKSFKDLVATCLVKDPRKRPSSEKLLKHSFFKHARSAEYLARSILDGLPPLGERFRELKSKEAELLLNNKLGQESKEQLSQKEYIRGISGWNFNLEDLKNAAALIDSSNGTCYLDVRENRVKDDSQEAYNGPEHIYQERLNHVASRRPEEDEIQEVEALNDAVSSSFSSRSLEALKSCFDVCGVDDPSPTATDSRAQPSVGTLPFQQLQKLEHCKSGDCNGESLERSVSVPTNLVTSGYHKHSSGSLIPEQVLSPYLSSDLERDGFRQKNLSSRNCSGPLLFRQMKDSRTHQSVAPDESSEGKIIHRRGRFQVTSDSISEKVATSSCNSSRINLPIDAARSSPKLSAILPTLQFLMKQNTMQKEVLSRLISSIEETSDDSEATGSSSYQSSGGPAREKELHLYVLQLQRSVTELAEEVQRLKLQNNKLEHQINILSRKDERSSTQDN

SEQ ID NO: 62624 - protein, 169 aa, Zea mays
  Clone ID: LIB3279-186-F4_FLI.pep
KLRLISHNTAQKLKLTSQKSPADQTIQAYLCAHKLEQTFQHFCHFQWHLLKRIDSIRLDYRYLEALQYYHSSHHTTQHEQRIKKSESEACTFIGRLRRPKDHNVEVAHVLLRGRRADPRCWLAEQPLSLLDDPPREVAVGHRIRAGVRASSAMLRRRRCLEAGAGEGEQ

SEQ ID NO: 62625 - protein, 425 aa, Zea mays
  Clone ID: LIB3279-201-C10_FLI.pep
LGAPGRAEPSESSTLHSARHAHAPSSLPSPTIQGHRAAGGGSNPLWGRRGVQFCSARRWDPPAGEAGKGRGAEIGEYKQGKMSDALINGLAGAGGGIIAQLLTYPLQTVNARQQTERDPSKPAFKDGAARQLYLVVKNEGWERLYGGLMPSLVGTAASQGVYYYFYQIFRNRAEARALERSRRGLGDGSVGMLQSLTVAALSGCVNVLLTNPIWVVVTRMQTHRKAIKQQRPQGLNCALDKSLEAATAENAPYKTIDVFQELYKESGVLGFWKGVIPALIMVSNPAIQFMLYETLLKKLKKRRASNFKGADGLTALEIFLLGAVAKLGATVVTYPLLVVKARLQAKHMINDDKRHRYKGTLDAFTKMVRYEGLSGMYKGMGTKIVQSVFASALLFMIKEELVKGARLLVTGNTSLVKKLPSKSSR

SEQ ID NO: 62626 - protein, 223 aa, Zea mays
  Clone ID: LIB3354-112-D11_FLI.pep
LVDFVVSDNVRRSHHRRLRPRRRPAPGNRRHHVRLHPLRYYVARTIRSCRCRPRGARRRTAGSGAAPGAGGRRRSATRGRAPACGSAPTPPRRTRRAPTTWRRARSAGPRPSSTSRPPWAAAAAARARRRRLLPRGAASPRRPRRARPRLLRRRRRRPSWRAAGRRRCATACLGSRRSWGCRTPTRVAASRRGTPWTSCWRRPYAVAGGLWPSPSPSARVPSL

SEQ ID NO: 62627 - protein, 180 aa, Zea mays; identical to SEQ ID NO: 52264
  Clone ID: LIB3356-037-F4_FLI.pep

SEQ ID NO: 62628 - protein, 366 aa, Zea mays; identical to SEQ ID NO: 61069
  Clone ID: LIB3357-033-C3_FLI.pep

SEQ ID NO: 62629 - protein, 671 aa, Zea mays; identical to SEQ ID NO: 54321
  Clone ID: LIB3591-002-H3_FLI.pep

SEQ ID NO: 62630 - protein, 741 aa, Zea mays
  Clone ID: LIB3357-043-E10_FLI.pep
DPRAFDQQIPPRPRKETLMGKGQILAVLQIGGEFNTDEDGHMSYSGGEAHAMHVQSDWTFSAFKQEISSTLNNLKLDQFAFKYFLPKNDKTLISISNDKDLRRMVEFHAESDSTYIYVMKKADNRSKNIVAVLDTPTDAFAIVPTTQDGSKRQKVCASWKNVITGVGQVFEGPKDFRDALHKYAIAHRFHYRFIKNDSSRVTAECTGEGCPWRIHASKSPAKKEFMVKKISESHTCESETVKSNRLASQRWVASVIKEKLRDSPNYRPRDIANDLQREYGLCLNYSQAWRGRSIAQKELYSTHEEACSQLPWFCERIVETNPGSVATVVALEDSKFRFFVAFHASLHGFEHGCRPLLFLEAITAKPNKHWKLLAAASVDGEGDVFPVAFGVVDDESRENWHWFLEQLKSSLGTSRTITFISNGEHGLWDVLSSVFQECHHGYCVESLIEEFKMQLDDAWTEELKDSMVEHLKKAINSCTADEFNQYIELIKSGSDKLADWLLEIKPERWSDAFFKGSRHGQYSCNIFGTVSEWIPTRYELSVVQLVDTIRCKLMEMMYTRRESSNAWTEVLTPAANQKLQEEVNKAHTLNVLPAENGENGNVFKVCDDSVNVVNLDTWECTCQRWHISGLPCMHVIAVLERTGQYAYDYCVKYFTTECYRLTYSLSINPIPDVIVPPTLIDLAQSPATYPCPLRTRRRVGRPKEKPADPRIAIKRAVRCSRCKGYGHNKATCKVPISSFST

SEQ ID NO: 62631 - protein, 230 aa, Zea mays
  Clone ID: LIB3587-230-F8_FLI.pep
VSVASVVAMSMFNRIFGKPKEQANSNALATLDKLNETLDMLEKKEKVLEKKANAELERAKEFSKAKNKRAAIQSLKRKKLYEQQIEQLGNFQLRIHDQMIMLEAAKATTETVDALRTGAAAMKAMQKATNIDDVDKTMDEINEQTENMKQIQDALSAPLGAFADFDEDELEAELEELEGAELESQLLEPVAAPPVHPVHVPANKQPARPAPQKVTAEDDELAALQAEMAL

SEQ ID NO: 62632 - protein, 146 aa, Zea mays
  Clone ID: LIB3591-114-C1_FLI.pep
LSPLVFRAQYDFVSHCNILNNDFTSYNKHYYGCPDDKTFQHMASVYSRSHYNMSLSKEFEGGITNGAFWYPIYGGMQDWNYIHGGCFELTLEISDTKWPKADELPIIWEHSRMSMLNLLASLIKIARTGLLSKLRFQWPIPSYTGH

SEQ ID NO: 62633 - protein, 66 aa, Zea mays
  Clone ID: LIB3595-030-D1_FLI.pep
LARSREAPPLRRTTTSRPRRLGSPARSRRSPARTNKPFCLFNSSISSILMLNNHDHVGLGVVLTSM

SEQ ID NO: 62634 - protein, 202 aa, Zea mays
  Clone ID: LIB3597-050-B7_FLI.pep
AEEEEEEEEKQQRSRRRESEDAPRRAVARRRRVRAGGAGCRGRLVQGRQVRGRRALRRAPGRARRRAGGRPGERARAGGPHRAWVDLPPRLRRGRLGRRLRGLHGRRGLRGARHGQGALPVQGHRRIQARRAGLHGHRQPHPRRLPEHLLPHEARRHALRPARRRRLARRPAQEEARAPPHAAPVSAASTCTTPGRTAQAMV

SEQ ID NO: 62635 - protein, 746 aa, Zea mays
  Clone ID: LIB3608-003-D8_FLI.pep
EKFRKCQEELEQRNLELSALRRKINGLHSNELEVCESGATWKYQARIADLEDTEPETDTLKARFELQLQENDDLRRSKVEMQNFISEFQAEKSQLEERLSASLKESSITSKCLDEVRKDILVLSSSIDSHVSTNKLLERNLVELESCKAELELHVSELEQENVELSERISGLETQLTYVTNEKESSELQLHDSRSLIINLKDKVECQQSEMETQRLQFKQKQQESQRRLCEAQDDSEVLRRSNCKLQSTVESLIEECSSLQNLIADLKRQKLELHGHLTQKEQELDESKKKNFEFSKTVEFLEAKLLSLQKDISSKEQSLLSELENIFQEHMEQEERINRAHFMLNKIEKEKTLEVENLEREVVSLAAQVSSTHEERESATLNAIQEVSVLRADNAKLEANLQDVSEQLRCYESQLEDLRKESKSKIKGLVDSLNASKQSEEMLTSDAEHMKKLMEAAKSNEDALRKTSNELELKLKSSDYVKQQMLEEISGLKLQVQKIMNLQDEVSKLQSSLDEAKFEKGKLEEFLRSVTEECQELKAQKAMLTDKVSYMQETLRNGEEENRNRIAMHAKLMRLESDLTALEASHVHEAELKNELSRIKRSNSEYQRKIQSLGQENEDLTRRVQIMEKGFERMSHAKENLGKQEIGGDNQEAIQSTIQLLEIKLAEALEENKIYRAQQKSSMSEGQPAGGDGKEGNTDRILQLEGELRDMKERLLNMSLQYAEVEAQRERLVMELKAIKKGRWF

SEQ ID NO: 62636 - protein, 618 aa, Zea mays
  Clone ID: LIB3632-018-G3_FLI.pep
LQPTTSGLGFGFGDMAEVVDKLKDYDIKKEGEAEILLHKKNSVFFNPVQVHNRDMSIAVLRTFVAKRKEEHEALVDKRNTSHKKNKQSETSNQNGEDASTGQQDEMDVVCEKELNKAEDQIDDLSKEATEPSWKVTRELKPPLVLEALAATGLRSLRYAREVEGLGKVVALDNDKASIEDCKRNIKFNGASATSKVEAYLVDARIHMLTHPKEFDVVDLDPYGSPSIFLDSAVQAVADGGLLMCTATDLAVLCGTNGEVCYAKYGSFPTKGKYCHEMALRILLASIESHANRYKRYIVPVLSVFMDFYIRVFVRVFTSASEIKNTPLKLSYIYQCVGCDSFHLQCLARTVQKKNNGVKHAPAIGPVVPQECSDCGKKFNVGGPIWSAPIHDQDWVLSTLTGVKSMKDRYPAYDKITSVLNTMSEELHDVPLFFSLHNIAGTVKCTSPSLVTFRSAVLNAGYRISSTHVNPLGIKSDAPWDVIWDIMRCWVKNHPIKEQPRDSPGTVILSKSPKLEANFSRAVAALSKAQTNKIKRFLPNPERHWGPKVRAGRKITSKHVSLLGPDAIKGAVNGDDCQKEGNGAEPDSTASEPEGIKDVEDEPSNKRQKTSDGEPASEP

SEQ ID NO: 62637 - protein, 492 aa, Zea mays
  Clone ID: LIB3632-033-E6_FLI.pep
GRGKMVRLPYTTALTTLFSYGLLFAFGQLRDFFRKFVDWFKAKNVKGYAPICLGLEDFYVRRLYLRIQDCFGRPIASAPDSWFDVVERTSNDNNKTLQRTSNTTKCLNLGSYNYLGFAAADEYCTPRVIDSLKKYSASTCSVRVDGGTTKLHTELEELTARFVGKPAAILFGMGYVTNSAIIPCLIGKGGLIISDSLNHNSIVNGARGSGATVRVFQHNSPAHLEEVLREQIAGGQPRTHRPWKKIIVIVEGIYSMEGELCKLPEIIAVCKKYKAYTYLDEAHSIGAVGQSGRGVCELLGVDPADVDIMMGTFTKSFGSCGGYIAASKEIIKHLKHSCPAHLYATSMSPPAVQQVISAIKVILGEDGSSRGAQKLARIRENGNFFRSELKKMGFEVLGDNDSPVMPIMLYNPAKIPAFSRECLRQKVAVVTVAFPATPLLLARARICISASHTREDLMKALDVISRVGDLVGIKYFPAEPPKIAEAGHDKLE

SEQ ID NO: 62638 - protein, 350 aa, Zea mays; identical to SEQ ID NO: 61017
  Clone ID: LIB3632-055-A7_FLI.pep

SEQ ID NO: 62639 - protein, 186 aa, Zea mays
  Clone ID: LIB3632-056-D9_FLI.pep
QKDSDKFASSFELLKVQKFSLVTALEIVDHIIRNRSDCLECSTLNHEARFGSHRLPLGADHLTAGLGIRLELVILGFPQAELLRATGGLHMLHADMDPLPDDAAINLLVDLDADGALGDVPDAPGAAVVELVRHALVHGAVNLDVDVVADLVGAQVRGEWDVPLLAEGPREQVAGPRPQPVPRRHL

SEQ ID NO: 62640 - protein, 710 aa, Zea mays
  Clone ID: LIB3635-002-G10_FLI.pep
LLGASSTSRLSHPPTPSAPAPAEPRVVYVTLLLQQDSKSNHTGAMARPYKPKNILITGAAGFIASHVAIRITKKYPDYKIIVLDKLDYCSNLKNLLPVSSSPNFKFVKGDIASVDLVNFLLVTENIDTIMHFAAQTHVDNSFGNSFEFTKNNIYGTHVLLEACRISGQIKRFIHVSTDEVYGETDEDAVVGNHEASQLLPTNPYAATKAGAEMLVMAYGRSYGLPVITTRGNNVYGPNQFPEKLIPKFILLAMRGEPLPIHGDGVNVRSYLYCEDVAEAFEVILHHGEVGHVYNIGTKRERTVLDVAKDVCRLFNLEPDKVIMLVENRPFNDQRYFLDDEKLKSLGWAERTPWEEGLKKAMEWYVAKSDYWGDVSGALLPHPRTLMMPGCEGSEEIKGILSRFNNIQTKVGSTSDNAPEPHAFKFLIYGRTGWIGGLLGKICEKKGIPYEYGNGRLQERSSLVLDIQTIKPTHVFNAAGVTGRPNVDWCESHKPDTIRTNVVGTLNLADVCRKHGLLMMNYATGCIFEYDAHHPEGSGIGFKEEDTPNFTGSFYSKTKAMVEELLKEYENVCTLRVRMPISSDLSNPRNFVTKISRYNKVVNIPNSMTILDELLPISVEMAKRNLRGIYNFTNPGVVSHNEILEMYKQYIDPSFKWTNFTLEEQAKVIVAPRSNNEMDATKLKNEFPELLSIKDSLIKYVFEPNRKVPTD

SEQ ID NO: 62641 - protein, 295 aa, Zea mays
  Clone ID: LIB3637-209-G11_FLI.pep
YKIKIHAGKIFLIYIRWLMLRNANLGLVSLGSSSSSLAPKTTSSPCGNKTNLLARRSITADSGGMTNVLVVTSSMRMLNRVHGHTTHLRPAVPLDAVLVVGIASLQHWLLSPATTSDLPNHGTAATWDNLLSTRGELDPRCAVVWVMADNDRVVPRRPGEDTAIPDVVLNVADNGTLRDPPERQDVANGECSTASAVNELASVHALSSHEQLLLVLVPEWMAEGDLGQRRAAARVVDDVGDHALQVPVALAEVEGPEPGRALAVMGMGLEHGPRTLALSANHAAHLAGGEVSGGG

SEQ ID NO: 62642 - protein, 994 aa, Zea mays
  Clone ID: LIB3689-211-A2_FLI.pep
GIRNPRTSPCTHATPEMSVAVGKRVLDTGWLAARSTEVALTGVQLTTTHPPAADPAPAAPWMSAAVPGTVLGTLLKNKLIPDPFYGLNNQAIIDIADAGREYYTFWFFTTFQCALSGNQHATLNFRGINYSAEMYLNGHKEVLPKGMFRRHNIDITDILHPDGNNLLAVLVHPPDHPGKIPPQGGQGGDHEIGKDVATQYVEGWDWMCPIRDRNTGIWDEVSISISGPVNITDPHLVSTFHDDFKRSYLHCTLQLENKSSWIADCTLKIQVSTELEGNICLVEHLQSYAITVPPQSDIEYTIPSLFFYKPNLWWPNGMGKQSLYNVEISVDVKGFGESDSWSHYFGFRKIESTIDDSTGGRIFKVNGEPIFIRGGNWILSDGLLRLTKKRYMTDIKFHADMNFNMLRCWGGGLAERPDFYHFCDVYGLMVWQEFWITGDVDGRGIPVSNPNGPLDHDLFLLCARDTVKLLRNHASLALWVGGNEQVPPVDINKALKNDLKLHPMFVSYQTSKSEVIYLSEESTDPSKYLDGTRVYVQGSMWDGFANGKGDFTDGPYEIQYPESFFKDSFYKYGFNPEVGSVGVPVAATIRATMPPVGWSIPILKKRIDGYIEEVPNPIWDYHKYIPYSKPGKVHDQIELYGAPKDLDDFCEKAQLVNYVQYRALLEGWTSFMWTKFTGVLIWKTQNPWTGLRGQFYDHLQDQTAGFYGCRCAAQPIHVQLNLATYFVEVVNTTADELKDMAVEISVWDLDGACPYYKVTEKIVIPPKKVKQIIEMKYPKMKDAKPVYFLLLKLFRLSDNGTISRNFYWLHLPGQDYKSLEQYRQKKIPLKIDSDVSVSGTSHKVRMTVENISKKSVADSTRSLSAMDLGDASGSHSTRKETTRKGNGSDGLWRKIRSGLGVARPSDNRRTLEVNGTDSGVAFFLHFSVHTSESSTDGEEYNDTRILPVHYSDNYFSLTPGENMAVDISFEAPQGSSPRVVLRGWNHHLDHAVMI

SEQ ID NO: 62643 - protein, 463 aa, Zea mays
  Clone ID: LIB3689-232-H9_FLI.pep
AASQPNRHSLEALLGVRSLRIYHTMPPPLRCLLLAFVVVLSGFPRLAHPFTALESDQIARFQEYLRIRTAHPSPDYAGASAFLLHYAASLGLHTTTLHFTPCKTKPLLLLTWRGSDPSLPSVLLNSHMDSVPAEPEHWAHPPFAAHRDPTTGRIYARGAQDDKCLPVQYLEAIRGLQAAGFAPARTIHISLVPDEEIGGADGFDKFARSEEFRALNIGFMLDEGQASPTDVFRVFYADRLVWRLVVKAAGAPGHGSRMFDGAAVDNLMDCVETIAGFRDAQFRMVKSGEKGPGEVVSVNPVYMKAGIPSPTGFVMNMQPSEAEVGFDLRLPPTEDIEQIKRRVEEEWAPSHKNLTYELVQKGPATDVSGRPVSTATNASNPWWLTFEKAIASAGGELSKPEILSSTTDSRFARQLGIPALGFSPMTRTPILLHDHNEFLEDRVFLRGIQVYEHVIRALSSFQG

SEQ ID NO: 62644 - protein, 554 aa, Zea mays
  Clone ID: LIB3689-260-A8_FLI.pep
SFCSERTHSPVPDLRSPRRSKMQIFVKTLTGKTITLEVESSDTIDNVKAKIQDKEGIPPDQQRLIFAGKQLEDGRTLADYNIQKESTLHLVLRLRGGMQIFVKTLTGKTITLEVESSDTIDNVKAKIQDKEGIPPDQQRLIFAGKQLEDGRTLADYNIQKESTLHLVLRLRGGMQIFVKTLTGKTITLEVESSDTIDNVKAKIQDKEGIPPDQQRLIFAGKQLEDGRTLADYNIQKESTLHLVLRLRGGMQIFVKTLTGKTITLEVESSDTIDNVKAKIQDKEGIPPDQQRLIFAGKQLEDGRTLADYNIQKESTLHLVLRLRGGMQIFVKTLTGKTITLEVESSDTIDNVKAKIQDKEGIPPDQQRLIFAGKQLEDGRTLADYNIQKESTLHLVLRLRGGMQIFVKTLTGKTITLEVESSDTIDNVKAKIQDKEGIPPDQQRLIFAGKQLEDGRTLADYNIQKESTLHLVLRLRGGMQIFVKTLTGKTITLEVESSDTIDNVKAKIQDKEGIPPDQQRLIFAGKQLEDGRTLADYNIQKESTLHLVLRLRGGQ

SEQ ID NO: 62645 - protein, 210 aa, Zea mays; identical to SEQ ID NO: 48012
  Clone ID: LIB3732-019-B11_FLI.pep

SEQ ID NO: 62646 - protein, 295 aa, Zea mays
  Clone ID: LIB3959-020-H3_FLI.pep
GGCGGARRRRRRSSSSRRRRGAASHSVLATMARGLKKHLKRLNAPKHWMLDKLGGAFAPKPSSGPHKSRECLPLILIIRNRLKYALNYREVISILMQRHVLVDGKVRTDKTYPAGFMDVISIPKTMENYRLLYDTKGRFRLHPIRDEDAKFKLCKVRSVQFGQKGIPYLNTYDGRTIRYPDPLIKANDTIKIDLETNKIMDFIKFDVGNVVMVTGGRNTGRVGVIKNREKHKGGFDTIHVEDSMGHQFATRMGNVFTIGKGNKPWVSLPKGKGIKLSIIEEQRRRDFAAQAAAKA

SEQ ID NO: 62647 - protein, 460 aa, Zea mays
  Clone ID: LIB3969-002-H6_FLI.pep
RLLFFLLFSTTALYRSSTSSSSAAVLRATTTTTTTTTTTTTTTNTFTLSFAAANTPPSTPANRTALDVADKGAASGNPQSHVVVGRHGIRIRPWPHPDPVEVMRAHRIMERVQEEQRRWYGVKEPRQVLAVTPTYSRAFQALHLTGLLHSLRNVPYPLTWIVVEAGGTTNATASMLARSGLTFVHIPFPDRMPHDWADRHATENRMRLHALRVIRERKMDGVVVFTDDSNVHSMELFDEVQKVQWMGAVSVGILAHTGTADQLRLSEEDKQNMPLPVQGPACNSSGHLIGWHTFNSLPFSGKTATVVGEAAPVLPRGLEWAGFVLNSRMLWKEADGKPDWVKDLDAVGENGEEIENPLTLLNDPSSVEPLGNCGKKVLLWWLRVEARADSKFPEGWVIEPPLEVVVPAKRTPWPETTTELPAELLDDKQEQEDRRLSRANKSSRPRGTTKRKGDPQGQDN

SEQ ID NO: 62648 - protein, 315 aa, Zea mays
  Clone ID: LIB3960-010-D2_FLI.pep
LVEICLQNVHQGNLRGTLMRFLKAREWSVPKAYKMLMDCLNWRVQNEIDIVLAKPILPSDIYRVIRDTLLVGLTGYSKQGQPVYAFGVGLSTFDKASVNYYVQSHIQMNEYRDRVVLPAASKKFGRQINTCLKVMDMTGLKLSALSQIKMLTMITTVDDLNYPEKTETYYIVNAPYVFSACWKVVKPLLQERTKKKIQVLYGSGRDELLKVMDYESLPHFCKREGSGSSSDSLDGVDCYSYDHPFHQQLYNYMKQQQSLNQDSVGPRKQGSVHVDVPSPGLEEAKIAETIKAELQNLRGTGGLAHSFSSIQIEGP

SEQ ID NO: 62649 - protein, 815 aa, Zea mays; identical to SEQ ID NO: 39399
  Clone ID: LIB3960-014-G11_FLI.pep

SEQ ID NO: 62650 - protein, 670 aa, Zea mays
  Clone ID: LIB3960-019-F5_FLI.pep
EAAQPGQRKRGRPEPSPGFLPRRILEIKRMGSLEARYRPAGAAEDTAKRRTQKSKSFKEVEKFDVFVLEKSSGCKFRSMQLLLFAIMSAAFLTILYTPSVYEHQLQSSSRLVNGWIWDKRSSDPRYVSSASIQWEDVYKSIQNLNVGEQKLSVGLLNFNRTEFDAWTHMLPESDFSIIRLEHANESITWQTLYPEWIDEEEETEIPSCPSLPDPSVPRATHFDVIAVKLPCSRVAGWSRDVARLHLQLSAAKLAATTARGNSGIHVLFVTDCFPIPNLFSCKDLVKREGNAWMYKPDVKALKEKLRLPVGSCELAVPLNAKARLYTVDRRREAYATILHSASEYVCGAITAAQSIRQAGSTRDLVILVDDTISDHHRKGLESAGWKVRIIQRIRNPKAERDAYNEWNYSKFRLWQLTDYDKVIFIDADLLILRNIDFLFALPEITATGNNATLFNSGVMVIEPSNCTFRLLMEHIDEITSYNGGDQGYLNEIFTWWHRIPKHMNFLKHFWEGDEEEVKAKKTRLFGANPPVLYVLHYLGRKPWLCFRDYDCNWNVEILREFASDVAHARWWKVHNRMPRKLQSYCLLRSSLKAGLEWERRQAEKANFTDGHWKRNVTDPRLKTCFEKFCFWESMLWHWGEKSKSNSTTTRNSAVPATTTTTPAAASLSSS

SEQ ID NO: 62651 - protein, 355 aa, Zea mays
  Clone ID: LIB4073-008-A9_FLI.pep
LPSSRASPISVVLVLQLAMGKIKIGINGFGRIGRLVARVALQSEDVELVAVNDPFITTDYMTYMFKYDTVHGHWKHSDITLKDSKTLLFGQKPVTVFGIRNPEEIPWGEAGADYVVESTGVFTDKDKAAAHLKGGAKKVVISAPSKDAPMFVVGVNEDKYTSDINIVSNASCTTNCLAPLAKVIHDNFGIIEGLMTTVHAITATQKTVDGPSAKDWRGGRAASFNIIPSSTGAAKAVGKVLPDLNGKLTGMSFRVPTVDVSVVDLTVRIEKGASYGDIKKAIKAASEGPLKGIMGYVEEDLVSTDFVGDSRSSIFDAKAGIALNDNFIKLVSWYDNEWGYSNRVVDLIRHMFKTQ

SEQ ID NO: 62652 - protein, 202 aa, Zea mays
  Clone ID: LIB4074-016-C3_FLI.pep
FRMDQEAKDSRPSRSPSEPNLFLQWGSRKRLRCVKTRDDGSPSPSPSQGLRRAIPRATRPLLGADIATFRSPRRPSTLNRRKSDLLVNEYKHTMALSPEKDKYYTTRGSPFPFEGNGFDFGTITEDKGTTSLPRFFIALSNKEKEEDFMAMKGSKLPQRPKKRPKLMQKCLLMVSPGAWLSDLSHERYEVREKKSSKKVPCI

SEQ ID NO: 62653 - protein, 536 aa, Zea mays
  Clone ID: LIB4148-002-G10_FLI.pep
LHVSSPPLLPSTRAVASPIRSATSSRLARSFPTPQRSLSAARSRSRFFSMGLVKEGIDMEEGTLEIGMEYRTVSGVAGPLVILDKVKGPKYQEIVNIRLGDGTNRRGQVLEVDGEKAVVQVFEGTSGIDNKYTTVQFTGEVLKTPVSLDMLGRIFNGSGKPIDNGPPILPEAYLDISGSSINPSERTYPEEMIQTGISTIDVMNSIARGQKIPLFSAAGLPHNEIAAQICRQAGLVKTLEKGKHAEGGEDDNFAIVFAAMGVNMETAQFFKRDFEENGSMERVTLFLNLANDPTIERIITPRIALTTAEYLAYECGKHVLVILTDMSSYADALREVSAAREEVPGRRGYPGYMYTDLATIYERAGRIEGRTGSITQIPILTMPNDDITHPTPDLTGYITEGQIYIDRQLHNRQIYPPINVLPSLSRLMKSAIGEGMTRRDHSDVSNQLYANYAIGKDVQAMKAVVGEEALSSEDLLYLEFLDKFERKFVTQGAYDTRNIFQSLDLAWTLLRIFPRELLHRIPAKTLDQYYSRDASH

SEQ ID NO: 62654 - protein, 503 aa, Zea mays
  Clone ID: LIB3066-034-F12_FLI.pep
LLSVVLLAAPAAGAGTGSEFDDGTSPKFPGCDNTLQKVKVTYWVDGDERSSLTGISARFGAVLPDAAPDDEKQRAAVPSPESGCAKSSTPLAGSVAVAVRGECTFIEKAKAAEAGGAVALLLVNDEDDLQRMVCSDKDSPPNIGIPVVMVSKSAGDKVQSAIGDGSKVDILMYAPLKPSFDGAIPFLWMMAVGTVACASVWTVVVVGEEPTKQGDVSLGGEENPDAEVVELQANTALVFIVTSSLVLLFLFFFNSNWSAWLLVCLFCLGSLQGMEFVVSSLVVRLCQRCREAKVKLPALGNVKVVTLVVLPLAFIFAVTWAAHQDSPVAWVGQNLMGICMMILVLQVVHMPNIKVASALLVSAFFYDIFWVFISPLIFKKSVMITVARGSDDGPSLPMVLKMPKEFDSWNGYDMIGFGDILFPGLLVAFSFRYDRTHGKDLTDGYFLCLMIGYAFGLSCTYVGLYLMNSGQPALLYLVPSTLGVIVLLGARRGELGQLWNAKV

SEQ ID NO: 62655 - protein, 458 aa, Zea mays; identical to SEQ ID NO: 53318
  Clone ID: LIB3075-022-B9_FLI.pep

SEQ ID NO: 62656 - protein, 653 aa, Zea mays; identical to SEQ ID NO: 56213
  Clone ID: LIB3912-037-G4_FLI.pep

SEQ ID NO: 62657 - protein, 281 aa, Zea mays
  Clone ID: LIB3732-033-D2_FLI.pep
MPANFFCNSSILLRFIAQPCRNRNVHLPVLAARRPGTPPSSSGLPKHCFKLLLGFMDMSQEQEQDFGVLLKQGAEGRVFASTFVGRKCVIKERFSKKYRHPLLDSKLTLKRLNAEARCMTKARRLGVPTPVLYAVDPVLHTLTFEHVDGLSVKDILLRFGSDGVNEERLNDIATQIGNAIGKLHDGGLVHGDLTTSNMIIKNSNNQLVLIDFGLSFTSTIPEDKAVDLYVLERALISMHSSCGDVMEKILAAYRKASKQWCSTQNKLAQVRQRGRKRTMVG

SEQ ID NO: 62658 - protein, 245 aa, Zea mays
  Clone ID: LIB3732-037-D9_FLI.pep
QVSFLHLPPPLHSQVPTTPNPVSPLRRRLRFGSARLEQKKMQRAVQAVRSHGNVLKYAVLQHISAPKPAMLPAAFSRFMSVSSARLEDRGFETATVADVLKSKGKSADGSWLWCTTEDSVYDAVKSMTQHNVGALVVVKPGQNKSIAGIVTERDYLRKIIVQGRSSKSTKVGDIMTEENKLITVNPDTKVLQAMQLMTENRVRHIPVIDGTGMLGMVSIGDVVRAVVAEHREELNRLNDYIQGGY

SEQ ID NO: 62659 - protein, 922 aa, Zea mays
  Clone ID: LIB3689-002-A10_FLI.pep
TAMTTNTKRAYKLQEFVAHSSNVNCLKIGRKTSRVLVTGGEDHKVNLWAIGKPNSILSLSGHTSAVESVGFDSTEVFVAAGAASGTIKLWDLEEAKIVRTLTGHRSNCMSVDFHPFGEFFASGSLDTNLKIWDIRRKNCIHTYKGHTRGVNTIRFTPDGRWVVSGGEDNIVKLWDLTAGKLLHEFKCHEGQIQCIDFHPHEFLLATGSADKTVKFWDLETFELIGSTGPETTGVRSMTFNPDGRSLLCGLHESLKVFSWEPIRCHDTVDVGWSRLADLNVHEGKLLGCSFNQSCVGIWVVDLTRLEPYTMGTSTKVNGHSELKTVSSGTLPLQNDSGSRANIGRSSVLQNTENNLKTTSGRLSASQNSDSAPKETNSAPSSGLIPSTPHRAGVGSHNRSVGNSAFQSGGTTLKRSSLRNNSASNVHNFSKADVVPVIVPRTSSGGELATDSRSDAADVAPVLPKVTRRVEPATDSRKESNDVELVVPRASSRMEIADLAPISSSKSGRRLESAPDSKEESADTAPVVVSNPRANVRMEIVSDSAPALSKSNRKLDSGTNSKKESADAVIVPRTNSRMEMISDSRREPSAGRISPFRIQSRYAEPRKLAHARTDSNKVDSRSKITETEDFNCQIFLPRRNSVFQTISSEEPREDVKCGPVDRVGFSNSSEPNASVRNENYVPRMRKPGDNCYIEVSRAGRARSSVSNWEGRDQPPSHEEPTTSSSTLAPTGHPYSSRGSNQASEAPIIASDEDVLSLIMERHDLFLSSTKSRLMKLQIIHQMWERNDIRGVLSAMDRMGDHAVCADMASVLMEKSETITLDLCTSILPVVTDLLESKIDRHLVVALELLVKLVRTFGPMIHSTVSSGPCVGVDLEAEQRRERCNLCFIELEKAKNKLPSLTRRKGAVANAAQELALVFQEIMS

SEQ ID NO: 62660 - protein, 758 aa, Zea mays
  Clone ID: LIB3689-203-G5_FLI.pep
PSMWRLKIGERPSNPLLRSPNGFLGREVWEFDPAAGTPEERAEVDRLRQEYTRNRFTRRQCSDLLMRMQYAKQNLHNTNLPAIKIDQDSDVTEETILITLRRALNQYSSLQGPAGHWPGDYGGISFILPLMIFALHVTRSMDEVLSIEHIREICRYIYNMQNEDGGWGTHTLGPSSMFGTCVNYATLRILGEVLDGENDALSKGRSWILSHGSATAAPQWAKIYLSMIGVYDWAGNNAIIPELWMLPHFLPIHPGRFWCFCRMVYMPMAYIYGKKFVGPITTTILEIRNELYNIPYNKINWNKACNSCAKEDLIYEPSWLQSIAMAYLNKFIEPLSNLWPMNKLRERAMSDLMEHIHYEDETSNYVGLCPINKALNMICCWIEKPNSNEFRQHLPRIHDFLWLGEDGMKSKVYVGCHSWETALIVQAFCSTGLTEEFCSTLQKAHQFLKNAQVIENIPDYKSYYRERTKGSWTLSNGENFWPIADTTAEALKAILLLSNIPSELVGDPIKQERLYDAVDCLLSFVNKDGTLSSAECKRTTSWVEFINPSESFRNIIVDYPYPECTSSLIQALVLFRGKHPIYRRDEIDKIIKSGASFIEKVQRKDGSWYGSWAVCFTYATFFAIKGLVAAGRTYRNSLAIRKACNFLLSKQLGTGGWGENYLGCQIEEYVDSGSPHGVNTAQAMLALLYAGQVEQDPAPLYRAAKELINMQMENGEFPQQEIVGNFNSSLFFNYPNYRNLFPIWALGEFRRRLVAKKG

SEQ ID NO: 62661 - protein, 1013 aa, Zea mays
  Clone ID: LIB3689-204-E7_FLI.pep
TPKTVLLQSPPEAGGVGFRRGMAGGGGGRGMAGGGGGRGESSPAIKPISKAVVHRICSGQVIFDLSSAVKELVENSLDAGATSVEVSLKAYGEEWFKVADNGCGISPSNFRALALKHHTSKISDFSDLGSLVTFGFRGEALSSLCALGKLTVETRSKDELVGTHLEFEHSGVVVSERKTARQVGTTVTVEKLFSTLPVRSKEFSRNIRKEYGKVISLLNAYALIAKGVRLLCTNTVGKNSKMVVLRTQGSSSMKDTIITVFGPNTFKCLEPFSVTTSDGCQIEGFLSKPGPGTGRSSGDRQFFYVNGRPIDMPKVTKLVNELYKSSNAKQYPVVILDFHIPTTSYDVNIAPDKRKVFFSSESMILQSLRETVENLYSPQQCSFSVNHIKDPEKEGDAVTDRHNEDTNAIVMVNVPSYYNNDDNEETDNEDQVSPENQKLPSVARDASPLSGGTTTQADRSAWLPSFAYDQPKRSPKEGRSLVLGRNCFRTGLAAKPTHSSTVQSSLLNFVSLNKRKHEDDCTLISEAAVLRRETCSEHMRRSSLEANFVTPNKQNHEDDCIISESPVLRSGTCSELYKRTSLEVNFPSPNKEKHDDNCTLISETPVLRRRTNSEQARGTSLEANSAPEFNLPLETNSLKQHSSQYFGSVRTDVSPQHSKQPNIVTIGAGVTGPCDVDTTESDMDQQCGRCHSASGAPNKYSESRHQNALADSPLPDAQDYGDGAAVCYASVQYPIIQFTVAELRRRRKNCFMISHINKSYCLEKTTRCYKAATLDITVPLADEAKSNSLAAATNELDRLFSKHDFREMEVVGQFNLGFIIGKLGQDLFIVDQHAADEKYNFECLSQSTILNVQPLLEPLRLDLSPEEEVIVSMNMSTIRKNGFILAEDLHASPGNHYLLKAVPFSKNNTFGVQDVKELISMLADSQGDCSIISSYKLDTADSVCPSRVRAMLASRACRMSTMIGDPLTKAEMKKILKNMAGLRSPWNCPHGRPTMRHLADLRTMKAKDIAFKR

SEQ ID NO: 62662 - protein, 1065 aa, Zea mays
  Clone ID: LIB3689-215-H9_FLI.pep
SDDQAQHKMEKLSKILKDTSVASDLQAAGLKVISCIVQRDEARMPMRHTFLWLDDKSCYEEEQILRHVEPPLSTLLELDKLKVKGYNEMKYTPSRDRQWHIYTLRNTENPKMLHRVFFRTIVRQPNAGNKFTSAQISDAEVGCPEESLSFTSNSILRSLMTAIEELELHAIRTGHSHMYLCILKEQKLLDLIPFSGSTIVDVGQDEATACSLLKSMALKIHELVGARMHHLSVCQWEVKLKLDCDGPASGTWRVVTTNVTGHTCTIDIYREVEEIESQKLVYHSATSSAGPLHGVALNNPYQPLSVIDLKRCSARNNRTTYCYDFPLAFETALQKSWQSNGSTVSEGNENSKSYVKATELVFAEKHGSWGTPIIPMERPAGLNDIGMVAWIMEMSTPEFPNGRQIIVVANDITFRAGSFGPREDAFFETVTNLACERKLPLIYLAANSGARIGIADEVKSCFRVGWSDEGSPERGFQYIYLTEEDYARISSSVIAHKLELDSGEIRWIIDSVVGKEDGLGVENIHGSAAIASAYSRAYEETFTLTFVTGRTVGIGAYLARLGIRCIQRLDQPIILTGFSALNKLLGREVYSSHMQLGGPKIMATNGVVHLTVPDDLEGVSNILRWLSYVPANIGGPLPITKPLDPPDRPVAYIPENTCDPRAAICGVDDSQGKWLGGMFDKDSFVETFEGWAKTVVTGRAKLGGIPVGVIAVETQTMMQIIPADPGQLDSHERSVPRAGQVWFPDSATKTAQALLDFNREGLPLFILANWRGFSGGQRDLFEGILQAGSTIVENLRTYNQPAFVYIPMAGELRGGAWVVVDSKINPDRIECYAERTAKGNVLEPQGLIEIKFRSEELQDCMGRLDPELINLKAKLQDVNHGNGSLPDIEGIRKSIEARTKQLLPLYTQIAIRFAELHDTSLRMAAKGVIKKVVDWEESRSFFYKRLRRRIAEDVLAKEIRQIVGDKFTHQLAMELIKEWYLASQATTGSTGWDDDDAFVAWKDSPENYKGHIQKLRAQKVSHSLSDLADSSSDLQAFSQGLSTLLDKMDPSQRAKFVQEVKKVLD

SEQ ID NO: 62663 - protein, 1168 aa, Zea mays
  Clone ID: LIB3689-221-H4_FLI.pep
TSQRIHHQLHSQLPLISLTLTPAGQPRPHPARGSHHLRDDKHPLPNRSLARAQNPSDRRRARPNRGHRGEIRSRRTMESPAKEEAGGELAMEIESSVTAEDWRRALSRVVPSVVVLRTTAPRAFDTEVAGASYATGFVVDKSRGIILTNRHVVKPGPVVAEAMFVNREEIPVYPLYRDPVHDFGFFRYDPGAIKFLKYDEIPLAPEAASVGLEIRVVGNDSGEKVSILAGTLARLDREAPYYKKDGYNDFNTFYMQAASGTKGGSSGSPVVDCQGRAVALNAGSKSSSASAFFLPLERVVRALDLIRDSWDAFGTKTESVYIPRGTLQATFQHKGFEETRRLGLRNETEQMVRVVSPEGETGMLVVDSVVPEGPAHKHLEPGDVLVRINEEVVTQFLRLETLLDDSVGKEIDLQIERGGVPLTVNLQVEDLHSITPNHFLEVSGAVIHPLSYQQARNFRFKCGLVYVAEAGYMLSRASVPRHAIIKKLAGEDIAHLDDLIAVLSKLSRGTRVPLEYVKYTDRHRNKSVLVTIDQHEWYASPQLYTRNDATGLWTGKPAIPPESPFLALAHHASHVDTNSNAVSSLSESSPMDLKCQYDSENLADGCIKMQTDDEIVVDGSHSNEDSVIEKKRRRVVEEIAADGTLPSYGDLEDVKGGSLRHPSNADGSELARTISSNASLAEQVIEPALVMFEVHVPPVCMLDGVHSQHFFGTGVIIYHSEHLGLVAVDRNTVAVSISDIMLSFAAYPIEIPGEVVFLHPVHNFVLVAYDPSALGAGASVVRAAKLLSEPALRRGDSVYLVGLSRSLQATSRKSIITNPCTAVNIGSADCPRYRAINMEVIELDTDFGSTFSGILTDEQGRVQALWASFSTQLKYGCSSSEDHQFVRGIPIYAISQVLEKIITGTEGPFRLINGIKRAMPFVRLLEVELYPTLLSKARSYGLSDNWVQALAKKDPVRRQVLRVKGCLAGSKAENLLEQGDMILAINKEPITCFLDIEKTCQELDQSIGSDGVLNMTIFRQGKEIDLVVGTDVRDGNGTTRMVNWCGCIIQDPHSAVRALGFLPEEGHGVYVARWCHGSPVHRYGLYALQWIIEINGQPTTDLETFIKVVKGLEDGEFVRVRTVHLNGKPRVLTLKQDLHYWPTWELSFEPETATWRRKIIKALQSARA

SEQ ID NO: 62664 - protein, 230 aa, Zea mays
  Clone ID: LIB3689-222-D5_FLI.pep
VCLARAVCSSTEARGIGKKIPRPTLPQAISHRMATGPRSLHALLGGGAVADLLLWRRRNASAAAVVGATTVWFVFERAGYSFPSVLSNALLLLVAILFFWAKSASLLNRPLPPLPNLEVSDAIVEKAANHALVWINRLLAVGHDIAIKRDRKVFIKVILILWVVSFIGMLFNFLTLIYIGVMLSLLVPPLYEKYQDQVDEKVGVAYSVLSRHIDTIITRAGQSAKQKKTE

SEQ ID NO: 62665 - protein, 106 aa, Zea mays
  Clone ID: LIB3689-222-E5_FLI.pep
AAVQPCRSSKLAASASASGIDEETPDILHEPDSLSNCVKTTTSPNGKRVSPPHNALGSSPNRKGGRKLILKSIPLFPSLTGDTNSGSAMNSTDSAFCASPLTLGPS

SEQ ID NO: 62666 - protein, 669 aa, Zea mays
  Clone ID: LIB3689-224-C3_FLI.pep
NLPCPRARARASTPSARVSVRAGGFLAKNCRAGRGIEEESVGGGGGDDDGFFWPEIPGQGNMKYVLVTGGVVSGLGKGVTASSIGVVLKACGFRITSIKIDPYLNTDAGTMSPFEHGEVFVLDDGGEVDLDLGNYERFLDIKLTRDNNITTGKIYQSVIDKERKGEYLGKTVQVVPHITNAIQEWIERVAMIPVDGMEGPADVCVIELGGTIGDIESMPFIEALGQFSYRVGPGNFCLVHVSLVPVLNVVGEQKTKPTQHSVRGLRGLGLTPNILACRSTKELEDSVKEKLSQFCHVPAANIITLYDVSNIWRIPLLLCDQKAHEAILKVLNLERVDSIAREPKLDEWVARAAIFDTLHDTVRIAMVGKYTGLSDSYLSVLKALLHASVDCRRKLVVDWVASTDLEDSTAIEAPDAYKTSWNLLKGADGILVPGGFGDRGVQGKILAAKYAREKNVPYLGICLGMQIAVVEYARHVMNFTDANSTEFDPNTKTPCVIFMPEGSKTHMGATMRLGSRRTFFKIADCKSSKLYGNVTYVDERHRHRYEVNPDMVPEFEKAGLQFVGKDDTGRRMEMIEIHNHRYFVGAQFHPEFKSRPSKPSPLFVGLIAAASGQLDRVLQDRCNGHVGSAKHVLSNGSYTSAVHQNGNPKKLTNGLSNGTYYANGNGVHA

SEQ ID NO: 62667 - protein, 1007 aa, Zea mays
  Clone ID: LIB3689-227-C6_FLI.pep
GRRRPAQLLLWLLIESKKTREMGVMSRRVLPACSSLCYFCPSLRARSRQPVKRYKKIIADIYQLQPDGEPNDRRIGKLCDYVSRNPTRIPKITEYLEQRFYKDLRHENFTLAKVVPCIYRKILCSCKELRPLLATSSLSTIHTLLDMKAHDDLQVLGCLMLVDFLNGQVDSTHMFNLEGLIPKLCKIGHELREDDEGLRLRSAALQALASMVQYMGDHSHISMELDEVVSVIISCYEANQTLSIKEVVRFQDDDDLVINGNLAVLPVSGQNSAKVASDTMSASENPAYWARVCLRNMANIAKEATTVRRILDPLFRLFDSHDYWSPESGIALSVLQEMQKLMDKSGQHGHLLLSFTIKHIDHKSIAKNSVKQINIVKVASHLARHAKLKASVTIASAISDLIKHLRKCMHFAIEASNANADCDKWYSALYVALEECLVQLTEKVGDVGPILDMVGVMLENLSHTATIARTTISSVYRTSQIAASVYKSSYHQKAFPEALFHQLLLAMLHSDNKTRIGSHRVLSTIVAPSMACPWSDISFPIPMKGDDSHNLHLLVLSAFSSEAIINETRTKNKIQESLQENNKSEAIVDPENGYTQTEPDKRKYSGGPCLNEHYRTAFNDENLKFMKLNDHQIVLLLSSIWSQASLDDNLPANFEAMGLVYSIALLCSKPKSSSHVTRIHCFQLAFSLRRNSLSPESDLKPSRRRCLYTMASAMLIFSAKIADLHQIIPLVKAAAPEKMVDPHLRLMDDCQLVNTSAESSNSEMVYGSEEDESDALVFLSAINKPDTELIETVMCHFREKFENLPEKVNGIEEQLLQEFSLDDSFPLGAPLFMEMPHSCSMYAEKDEECFDEDTVPSELDDDDIIFEHSGSQSDRKTSGSMASSDVLTVNQLIESVHETARQVANVPVPANPVPYDQMKSQCEALVMEKQQKMSVLLSLKHSRTDSHGSAGVDGLETNESSLLSEPELQSTRKGRMRRCDSASSESDCSFRLPPASPYDKFLKAAGR

SEQ ID NO: 62668 - protein, 158 aa, Zea mays
  Clone ID: LIB3689-230-H12_FLI.pep
WTCPCRPSLSFYPRRRRRRRRRLVSLGDSPFPPLRPPQVRLAPGPIVSSQPAGTSLYGLLTRSICSCMLQACLVFFHHLQRPSVHANSHPLMAGPTVAAALPRLLLRRRAPPYALPCLPFLLCEILRPKPNFLFVFGSEFKLQVYTPFFLFFCPNLCS

SEQ ID NO: 62669 - protein, 860 aa, Zea mays
  Clone ID: LIB3689-231-H4_FLI.pep
NPQRPPAGEGGEAREDNPSWQPFATENPAFEEYYKEQQIVSEEEWDSFMSMLRKPLPATFRINASCQFFQDICSQLENDFRKSLETEVTDDHEEDAIRPLPWYPGNLAWHLNFSRMQLRRNQALESFHEFLKRENEVGNITRQEAVSMVPPLFLNVQPDHHILDMCAAPGSKTFQLLEMIHQSTKPGLLPNALVVANDVDVQRCNLLIHQTKRMCTANLIVTNHEAQNFPGCNLAKFCSKMCMDEAKVQRLEFDRVLCDVPCSGDGTVRKAPDMWRKWNAGMGNGLHHLQVEIAMRGMSLLKVGGRMVYSTCSMNPVENEGVVAEILRRCGDSVELLDVSNELPELARRPGLSTWKVRDRGSWFGVHEDVPRYRKHVISASMFPSGKGSKDSGTGSSSVEVNTDVADADMKDSTDMGEGEQETTVTIDDSNNGDNLKTEEGTKVDCESGEVTTSSSYKKLNSTSIRTEHSDYPLHRCMRIVPHDQNSGAFFIAVLHKLSPLNENQVVDGVRIDQNISKDKTEKLEKDLVSHKASSEENTVHQQVIDNANVLDGEQNRDRDNKSSEDKSSEDSKVNVNEAAKGQAGTRDRRRQQNQGRWRGVDPVIFFKDEVTVKSIVSFYGITDSFPLEGHLVTRNPDTSHVKRIYYVSKSVQDVLELNIKIGERLKITSLGLKIFWFSYTFALFQERQSSKEGSPCTFRLSSEGLPLLLPYITKQILYASAIDFQHLLQYRTIKFPDFVDAKFGEEASALLPGCCVVVLREGHQDIGSIATDPSAIAIVCWKGKTNLCVMVSPLDGKELLERISLRHGLKIPKGDKEKPSQEIAGSDELLDCATEVDDQESLPESKASDIEISDAKEAE

SEQ ID NO: 62670 - protein, 311 aa, Zea mays
  Clone ID: LIB3689-236-H9_FLI.pep
ILRWGFLGLDLLLMGVPKQRWTPEEEAALKAGVAKHGPGKWRTILRDSDFSALLRLRSNVDLKDKWRNLSVTAGGYGSREKARMALKKGRRVVPKLTAEPMDVDEKDMDNAHDTVIDVEPLAMAFEPLPLLESPDKSVARLDDLIVEAIRKLNEPSGSNKAVISGYIEDQYWPPADFQYLLSTKLKSLVNSGKLIKVNQKYRIAPSSSLGGISTKVSSSEGMNTENNNVKRLTKPQVVAELEKMKGMTREEAAAFAAKAVAEAEVAMAEAEEAARVAEAAENDAEAAKAFLDAVILSMRNRNAASMILRAC

SEQ ID NO: 62671 - protein, 1132 aa, Zea mays
  Clone ID: LIB3689-238-A9_FLI.pep
PRSIYHRGIREAFSGGVSSRGRGAMASSLLTTDRRWGATPARKSGMTVLGKVPKPINLPSQRLENNGLDPNLELVPKGTHTWGSKAPSTTPNAWSSSSILSTKNDGSSSSSSHFNGRPSSGGGSRPSTAGSEPLGSPNAWGPNSRPSSASGTFPSSHLPMATNRPRSAETRPGSSQLSRFADNASDNVKASIRTIDRPGSSSHGPGFTLSTGDFPTLGSEANSQRGHSSKGRPISSSGKEVSQGEQVKSLTTGNGELISQSNNQPVDIMKTEQHAHTGGAPVLATNVPNEGLQPRPYPPNFPMPHPQFDSWRAPPGHPPEGMWHRGLVPGGPYRPVGPPGSFPVEPFGYYGQFPPNSEVAARQGPGHGGYQAKNGDVYHPTPPNSYIMNQPVIPVRPVYQGPVPYDGYYGPRAHFNNANVRDPHFVGGPGILNQFPNQNDRFHPGHPQNRPGRHETVPREQLESDKIHVFHRGNPGSLHDNSDRLGGSREFERNAQPASPLLPHPDGNRTDVNMRTDTRDTFSESERTRVLTKSVPNQRGSVGTEHLSVYDNAHSHHRETGDGTLRKKFKEDGSAALHPVIKKNAALIEKIESLNNKARNVDARNLPESASSKEFNKHKKSTDVSSNDVMGMACKSDPAVSVSCVSPAVQRLPNVPIKGTILGPAHPQLTEFSKAEKLGDSISDHVHRKSDSSRNSYHGPSKDRPANKFGSHGRGESSTTDLRNNIDHGQQPEIASQLQPAIVPDDMPASLDYESQRAKMKELAAERAKKLKAEEEERIKNQKAKALAKLEELNRRSSVLQKKSNDIKVETYDAHDKQHAGLDVTAKLDTSTEPHDVIAPDRLTDLLPPNDPNHTMVHIQAQSTAQSHALDGGKDPDAHATSSLVKNTHSNMEPVVQKSISQLHDITVVKAKQGYRKRHVSEEKISDEKASASITTRNITKNVDVLIDTVTAVVAPHDDPPTQNKKGTRHLRSKKKLDDAPVTSKHPPVVLNEPNTVKVSTEPKTHTGGVIISSSIVPTEGTIVTVGSITVGGISLKPMNQERVKSPDGTNNTESSQPRPQQTRKSGKHQHVLRPVEKPHGNDGILCAPVKPPVPNEHSDGAMPTAAVADLTKPVGKAINDGENVTRTKRAQ

SEQ ID NO: 62672 - protein, 955 aa, Zea mays
  Clone ID: LIB3689-241-A11_FLI.pep
EYKYKMGASRPPSTPASKGEHTPMSTPGGSSRAKEEKIFVTVRVRPLSKKELAAKDDVAWECADTQTILYKGPAQDRAAPMSYTFDKVFGPACQTDVVYEEGAKDVAMSALTGINATIFAYGQTSSGKTFTMRGVTESAVSDIYRHIDSTPEREFVIKISAMEIYNEIVKDLLRPDSAPLRLLDDPEKGTIVEKLQEEIAKDSQHLRHLISICEEQRQVGETALNDTSSRSHQIIRLTLESRLREVSGCVKSFVANLNFVDLAGSERAAQTHAIGARLKEGCHINRSLLTLTTVIRKLSSGKRSGHIPYRDSKLTRILQLSLGGNARTAIICTMSPALTHVEQSRNTLFFATCAKEVTNTAKVNMVISDKQLVKHLQTELARLESELRTPDRGSSSDILIMEKDRKIRQMEIEIEELRKQRDNAQSELEELRKKKVDHQPGWNPFDSPQKARKCLTFSGSLEPSNKNKMMMSSIRQSSTAPFMLKHEIRKLEQLQQQLEVEANRAIEVLHKEVECHKHGNQDAAETIAKLQAEIREMQTVRSENRDMEMITDEGNGSDLKDEISRLHMQDNDIAKLEAKLENVQRSIDRLVMSLPNVAMPCNETTPKSNRSKKKKRLLLPLGVSNNINRANLLRAPCSPHSSSRPSESEVENRAPEGDTMSVEGSEKATPTKSEDGDMSSRDETPRYRRSSSVNMKKMQRMFQNAAEENVRSIRAYVTELKERVAKLQYQKQLLVCQVLELESNEGKPNGEDNSGPLQDGPDSWDRLFKEQMQCIIHLWDQCQVSIIHRTQFYLLFRGDKADQIYIEVEVRRLVWLQQHFAEVGDASPGAVEDPAVSLVSSMKALRNEREFLARRMGSRLTDEERERLFIKWQVPLDAKQRKLQLVNKLWTDPNDQVHIDESAGLVARLVGFCEGGNISKEMFELNFAVPTSRRPWLVGWQPISNMIREKTQQLW

SEQ ID NO: 62673 - protein, 468 aa, Zea mays; identical to SEQ ID NO: 39000
  Clone ID: LIB3689-241-C5_FLI.pep

SEQ ID NO: 62674 - protein, 517 aa, Zea mays
  Clone ID: LIB3689-250-G2_FLI.pep
ISSYNICSKHVVFGKVVSGIALLKKLEAVGSETGNPSYQVKIVDCGEVSNTNSPDLLKGEKEKKLRTADGNSTAEGRAKLKKTSGDHKQRKKRKHYSSDSYSSDTSDSLSYSSDSGSDSESDSSMDTSSSSDHRRKRRKGSKKDKRKPTKRKGKHTRSKRKSRGSKRRSRRSHGSSSDDSVSSKTDNSSSDSEKGGHHTKRSLPKDKESTKMTISEQGRTFQEADKDEQTVTTINRSQSHDGSKPSNKDGNRADERSGNYNSEDRNGPGGSSRNNPIQVDVNLTKPVNVDGNTGGDNAEAGMSRTGEGRHLPSNDSVSTNGKDLGVGSADNGQPQRIRKGRGFTQKYGYARRYRTPSPERPPVRPRYDGGRDDRWNNFNRYERNGPYSRRSPVRRYHGSPRANSPSRYPRRERMRSRSRSPVRRHDRGGYHRPSPRRSRSPAEPRQNVNDRPRSGHGGGDPDHSPPANRSRSKSRDPLGPRSPDAAPAKRESSRYNRRRSSSSRSSSPDGNKGLVSY

SEQ ID NO: 62675 - protein, 365 aa, Zea mays
  Clone ID: LIB3689-250-H5_FLI.pep
DAAGVDPPLCLPHSGVHDLVVLVRNHQLLAQRRRHGPVHGVGPAQGLERQVRRLLAGDHHGAKRRAHPGGAVNLGDLHSGDDHAGNDLAREAHDLVLGGVHVERLHPRHGADHADVLEPLDAGGAEGPVVAAGADHDLGLHDVGVHAGLRVVVHGHERPVGDDAADAPSPDDEVLHGHGVEQLHVGARQEQAHDRGREERGVLDDHVVLGLVVRHAQLVQEQVRRLAHHHGREQLPAQPRAAARRHRLLHDGDAHGGVLGELVRAGQPRGAGAHDDDVGVGVGDHVRHVATGHLAGHDGLLDGAEPEGRQVVGRVGGGHGHGRADGPRAGAARAGGHHEGRRCGPRGGREPGAREGGLEEARRGG

SEQ ID NO: 62676 - protein, 513 aa, Zea mays
  Clone ID: LIB3637-218-D6_FLI.pep
LAFLYLITGYLDKVGFMCKIAGQNNNLMGQFHNALYLGDAKKRVEILENAGQLPLAYVTAATHGLTEFAERIAAELGENVPSLPEGKPKSLLIPPAPLTACGDWPLLRVMRGIFEGGLDATGRADLEEDDEAAGADWGDEELDIVDASEVVANGDGFDVEEGEPNEEGGEEGGWDLEDLELPPETETPKAVGNARSALFVAPTPGIPVSQIWTQRSSLAGEQAAAGNFDTAMRLLSRQLGIKNFVPLMPLFLDLHMGSHTYLRGLAAAPVISVAVEKGWNESASPNVRGPPALVFSFSRMEDRLKAAYKATTEGKFPEALRQFLSILHTIPVIVVDSRREVDEVKELIEIVREYVLGLRMELKRKELRDDVTRQQELAAYFTNCKLQRVHMRLVLASAMALCFKQKNYATAAHFARMLLENSPQEAQAKKARQVLQACHDKDDSHQLNYDFRNPFVVCGATYVPIYRGQKDVSCPYCGSRFVPSIEGQLCTICELAAVGADASGLLCSPTQSR

SEQ ID NO: 62677 - protein, 611 aa, Zea mays
  Clone ID: LIB3636-002-G10_FLI.pep
THCTHTQTAMAVGGDANGGGGGVRQRQRGCSCTKADFFPEESFSSWSAYGRALRSTGPRLADRLTSRSLESTELHEVRARSGADMKRDLTWWDLVWFGVGAVIGAGIFVLTGQEAREDVGPAVVVSYVVSGVSAMLSVFCYTEFAVEIPVAGGSFAYLRVELGDFMAFVAAGNILLEYCIGGAAVARAWTSYFATLLNHQPSDFRIHASSLSADYSELDPIAVVVIALVCIFAVASTKGTSRFNYVLSIVHIAVIVFIIVAGLTKADAANMRDFMPFGVRGIFSASAVLFFAYIGFDAVSTMAEETKNPARDIPIGLVGAMTLTTALYCVLAVTLCLMQPYASIDKDAPFSVAFSARGMDWAKYIVAFGALKGMTTVLLVSAVGQARYLTHIARTHMMPPWLAQVHPRTGTPVNATVVMLVATAIIAFFTDLGILSNLLSISTLFIFMLVAVALLVRRYYVAGETTVANRNKLAACIIAILATSSATATCWGVNVNGWVPYAVTVPAWFASTVCLWAFVPQARAPKLWGVPLVPWLPSASIAINVFLLGSIDYKSFMRFGFWTAGLLVYYLFVGLHASYDTAKALAADSAMAKVEDGDGKPARGAVHNGEY

SEQ ID NO: 62678 - protein, 621 aa, Zea mays
  Clone ID: LIB3635-001-G4_FLI.pep
LHSQRQREGGPAAASTWWWCASGSAKGDMESTLKGIRGSDAPCVLDLDDAATVAGGVEDTYGEDRATEEQLVTPWTVSVASGYNLLRDPRYNKGLAFTERERETHYLRGLLPPAIVSQELQERKIMNNIRQYQLPLQRYMALMDLQEGNERLFYKLLIDNVEELLPIVYTPTVGEACQKYGSIFSRPQGLYISLKEKGKILEVLKNWPERSIQVIVVTDGERILGLGDLGCQGMGIPVGKLSLYTALGGVRPSACLPITLDVGTNNEELLNDEFYIGLRQRRATGQEYTDFLQEFMTAVKQNYGEKVLIQFEDFANHNAFDLLARYGTTHLVFNDDIQGTASVVLAGLIAAQTLLGGSLADHTYLFLGAGEAGTGIAELIALEISRQTKAPIEECRKKIWLVDSKGLIVSTRKESLQHFKKPWAHEHKPLSNLLDAVNAIKPTVLIGTSGKGQTFTKDVVEAISSFNERPIILALSNPTSQSECTAEQAYTWSKGQAVFATGSPFDPVEYNGKIHVPGQANNAYIFPGFGLGVVMSGAIRVHDDMLLAASEALAQQVTEENFEKGLIYPPFSNIRKISAHIAASVAAKAYELGLASRRPRPKDLVKYAESCMYSPIYRNYR

SEQ ID NO: 62679 - protein, 205 aa, Zea mays
  Clone ID: LIB3634-001-A11_FLI.pep
IINKAPAVPINSCHRVPRAQIIPRDAKTLAQPPIPLMATTTTQASLLLQKQLRDLAKHPVDGFSAGLVDDSNVFEWQVTIIGPPDTLYDGGYFNAIMSFPQNYPNSPPSVRFTSEMWHPNVYPDGRVCISILHPPGEDPNGYELASERWTPVHTVESIVLSIISMLSSPNDESPANIEAAKEWREQREDFKKKVRRIVRKSQEMF

SEQ ID NO: 62680 - protein, 243 aa, Zea mays; identical to SEQ ID NO: 58204
  Clone ID: LIB3634-002-C8_FLI.pep

SEQ ID NO: 62681 - protein, 416 aa, Zea mays
  Clone ID: LIB3634-002-D3_FLI.pep
VRSAREPPMGDAVEDIVIAGAGLAGLATALGLHRKGVRCLVLESSPALRASGFAFTTWTNAFRALDALGVGDKIREHHLLYERMIAFSAATGEAAAEVSLKIQSKSGPHEIRCVKRDFLLRTLADELPEGTIRYSAKVVAMEEDGVGGAKTLQLHLADGSTIKAKVVIGCDGVNSVVAQWLGLPKPILSGRSATRGLAEYPGGHGFGPEILQFIGHGFRSGVLPCSDTSVYWNYTWYPSPADGDAEESVAKMRSHVVAKLRGAKVPAEALEVVERSEMSDVASSPLRFRSPLALVRGSISRGGVCVAGDALHPMTPELGQGGCAALEDGVVLARCLGKAFALLGQERDEGRVVTAALEEYAAARRWRSIQLITAAYVVGFIQQSNNAVVRFVRDRFLSRLLSKTLVAMADYDCGAL

SEQ ID NO: 62682 - protein, 393 aa, Zea mays
  Clone ID: LIB3634-002-E5_FLI.pep
CLLAGGARASPPTDALRRVSPRAGAGGLCQQLLLPQGYPCTEHTVQTDDGFLLSLQHIPHGRNGIADNTGPPVFLQHGLFQGGDTWFINSNEQSLGYILADNGFDVWVGNVRGTRWSKGHSTLSVHDKLFWDWSWQDLAEYDVLAMLSYVYTVAQSKILYVGHSQGTIMGLAAFTMPETVKMISSAALLCPISYLDHVSASFVLRAVAMHLDEMLVIMGIHQLNFRSDMGVQILDSLCDDEHLDCNDLLSSITGQNCCFNSSRIDYYLEYEPHPSSTKNLRHLFQMIRKGSFAKYDYGWWGNLRRYGQLRPPSFDLSSIPESLPIWMGYGGLDALADVTDVERTIKELRSTPELLYIGGYGHIDFIMSVKAKEDVYVDLMRFLRAQQGMHSSY

SEQ ID NO: 62683 - protein, 504 aa, Zea mays
  Clone ID: LIB3634-002-F4_FLI.pep
EMKSCGGGGADGQQCPCDYCGEAAAALHCRADAARLCVACDRHVHAANALSRKHVRAPLCAGCAARPAAARVSPTPSPGGADPAFLCADCCEGCAAASAARVPVEGFSGCPSAAELAASWGLDLRRAAVAVGDDGDGGDDDDPFLSVLDYSVLGVGMADTDLRDLYVPCDPPRVPAPYAGARPLRGEALCDQLAEMARRDEADTSHAHPHSDLSPRTPRRTSAVSSGRLPSGKMAPPAALPVPAHPPPAAPQEVPLPYTSLLMMASANCSDLIGGADRVGDTDEQLLWDCAAPSVPPTQIWDFNLGRSRHHDEKSALEVGYGSNHGGFMIKSYSDMLKEISSGTTKDLEDIYESRYCSTAEDIMSSNICQLSSKNVSTGSNKRKVRSCAASTMDGPTTSGNHNHVPASASGPGAALTREISFGDQTVSAPAAETERPAAVRIDSETLAQNRDSAMQRYREKKKNRRYEKHIRYESRKLRADTRKRVKGRFVKSTEALNAARYNG

SEQ ID NO: 62684 - protein, 1133 aa, Zea mays
  Clone ID: LIB3632-001-C3_FLI.pep
GGGGRMSSLSRELVFLILQFLDEEKFKETVHKLEQESGFYFNMKYFEDEVVNGNWDEVERYLGGFTKVDDNRYSMKIFFEIRKQKYLEALDKHDRSKAVEILVKDLKVFASFNEELFKEITQLLTLENFRENEQLSKYGDTKSARAIMFVELKKLIEANPLFRDKLQFPSLKNSRLRTLINQSLNWQHQLCKNPRPNPDIKTLFVDHSCGQPNGARAPSPANNPLLGSMPKPGGFPPLGAHGPFQPSPTPVPPLAGWMSNPPAVTHPAVSGGAIGFGTPTNPAALLKHPRTPTTANPGMDYPSGDSDHISKRTRPVGMSEEVNLPVNMLPVTYPQSHNYQQDDFHKTVARTLSQGSTPMSMDFHPLQQTLLLVGTNVGDIGLWDVGTKDRLVVRNFKVWDLSKCTMILQASLVKDPAVSVNRIIWSPDGTLFGVAYSRHIVQIYSYNGGDDIRQHLEIDAHIGGVNDIAFAHPNKQLCIITCGDDKTIKVWEATSGAKQFTFEGHEAPVYSVCPHYKENIQFIFSTALDGKIKAWLYDNMGSRVDYDAPGHWCTTMAYSADGSRLFSCGTSKDGESHLVEWNESEGAVKRTYQGFRKRSMGVVQFDTTRNRFLAAGDEFMIKIWDMDSTGLLTTIDADGGLIASPRIRFNKEGTLLAVSTVDNGIKILANADGLRLLRTLENRSFDASRNASEAVTKPLINPLTAAANAAAASSSGAGAPSAVTAMNGDTRSLVDVKPRIADESLDKSKAWKLMEITESTQCRSIKLADNMRTSKISRLIYTNSGLAILALTSSAVHLLWKWPRSDRNSGKASASVSPTLWQPPSGILMTNDTTDNNPEEAVHCFALSKNDSYVMSASGGKISLFNMMTFKTMTTFMPAPPAATFLAFHPQDNNIIAIGMDDSTIQIYNVRIDEVKSKLRGHSKRITGLAFSNVLNVLVSSGADAQLCVWNTDGWEKQKNRFLQIPSGRQSNILDTRVQFHQDQMHFLVVHETQIAIYETTKLEPVKQWPVRENSPPITHAAFSCDSQLIYASFMDATVGIFNASSLRLQCRILPASYLPPNISPSVHPVVVAAHPSEASQFALGLTDGGVFVLEPLESDRKWGNPPPVENGSASNLSAPPPNGASSSDQPER

SEQ ID NO: 62685 - protein, 130 aa, Zea mays
  Clone ID: LIB3632-004-C10_FLI.pep
PIQIQIQGLVMASKRILKELKDLQKDPPTSCSAGPAGEDMFHWQATIMGPPDSPYAGGVFLVNIHFPPDYPFKPPKVSFKTKVFHPNINSNGSICLDILKEQWSPALTISKVLGQFSTNFTSIYTVHIIA

SEQ ID NO: 62686 - protein, 520 aa, Zea mays; identical to SEQ ID NO: 58917
  Clone ID: LIB3632-006-G3_FLI.pep

SEQ ID NO: 62687 - protein, 627 aa, Zea mays
  Clone ID: LIB3632-007-B11_FLI.pep
GTSCCRATMLYAHLHLRRPCSPFAYCPYSKLSVSIPTLNPLPRGPLSRRACACAHRYLRHVASPADEEEAGYGEGSVEGDDLGPASAAAVAATIRRASSASPVRFRCVLGEAVEEPRGEEGLADPSPDFRRLCAEQLEIFRVLISRDAVLSVYVRPAGSYIMDQLELRRVALYPGINNLSEKDTPVLVCNFSISSGLRAAEAFLVKQQMEVIREFGAIVLPMVKHPFVVGFLVVELPELHGGRAMNSYTADTELPPNTFMDKSSDVTPHTAWDIQTYGDQAKGYSQLVNEWKNSALMISRTLAMAYVMDQKAYLLQQTSWQNNVRMSGLVEQIWGPLSSIRALAKMLSFHTKRSEIPYDIIEDMLTQGDHMKDALQQIQDAVYLTKANIVRSNEETLKTIQRSPHPSRTLSDYKSVPGNDSQKLDPVLALSSDGYDMVMPMPPLWLAPLQHQYDRPCDLCDVLKDLVAGALPLAYKQQRTLDLTEISHPLHVAVEESALRKALSNLIEGALLRTQHGGVVQICAVEAPAGGALVVIDDDGPDMQYMTQMRSLAPFGSDLADGMLEDNMTWNFIAGLTVARELLEEYGCVLRVISPRRTDAVIGTGGSRVEIWLPSFQTQAAKTSQEV

SEQ ID NO: 62688 - protein, 485 aa, Zea mays; identical to SEQ ID NO: 46975
  Clone ID: LIB3632-011-H9_FLI.pep

SEQ ID NO: 62689 - protein, 262 aa, Zea mays
  Clone ID: LIB3632-013-A1_FLI.pep
GRWRSVRRRSSSSRRRRVAAPHLELATMARGLKKHLKRLNAPKHWMLDKLGGAFAPKPSSGPHKSRECLPLILIIRNRLKYALTYREVISILMQRHVLVDGKVRTDKTYPAGFMDVISIPKTNENYRLLYDTKGRFRLHPIRDEDAKFKLCKVRSVQFGQKGIPYLNTYDGRTIRYPDPLIKANDTIKIDLETNKIVDFIKFDVGNVVMVTGGRNTGRVGVIKNREKHKGSFETIHVEDSWATSSPPVWATCSPSARVISRG

SEQ ID NO: 62690 - protein, 249 aa, Zea mays
  Clone ID: LIB3632-014-B10_FLI.pep
SSAQKLETAACWRTPVVDCTSEPFPQWLQGRLTTELRNALTTSSDASLRSKHMTYSMTAASQGTVILPSPPANPNSSRDMPRSTPKTAVSRYGSGTSNRLPSAEYTTQWPLPATATREVLHGGDDPSAAPFAVATGEPELLPRHAEEHAEDGGVEVRQRDLEPPAVRRVHHAVALAGYSYTRGAARRRRSLGGSFCRRRQCDPPPCRGGHPLPLLGHLHKSLGADHGRSRRPPARFPGKKLRELELACF

SEQ ID NO: 62691 - protein, 324 aa, Zea mays
  Clone ID: LIB3632-018-B9_FLI.pep
SSAAMGILALITGKAGASGFGSASTAEQVTDGADASRLTVAITGGASGIGLETSRVFALRGAHVVIAARNTEAASEARKTIMEKNPTARIDVLKLDLSSLKSVRAFVDQFNSMKLPLNILINNAGVMFCPFQLSKDGVEMQFATNHLGHFLLTNLLLDTMKATAKSTGIEGRIVNLSSVAHHHTYPKGIDFDNLNDEKIYNDKMAYGQSKLANLLHAKELSRRLKEEGANITVNSVHPGLIMTNLMRHSFVLMKVLQVATYILWKNVPQGAATTCYVGLSPQLKGVTGKYFADCNVEKTSKLARSEELAKQLWDFSEELIKSAK

SEQ ID NO: 62692 - protein, 158 aa, Zea mays
  Clone ID: LIB3632-020-F4_FLI.pep
NLPWARLLAHFFQENIFRDFLPFHFKQKTRTTVPTSINVHYSNYPLLRTNFQRDSHFRRNNRSRTTSGKEQTFVPVLLIKLRQLRVIGLREPTFGGDVNNKEDLPLVGFQAHFLAVAILDGEFVYGGLRHGFGRPHLASASPLLPFPTRTGLSGIPVS

SEQ ID NO: 62693 - protein, 227 aa, Zea mays
  Clone ID: LIB3632-021-H6_FLI.pep
HRTEAAAMAAEKPAPVRVLYCGVCGLPAEYCEFGPDFERCKPWLRAHAPGVYPDDLVAASSSPGGGDKDVDKVGDRLQGVGISDGSTSAAGDASASKPQEAKRLPGGKLKKKEKQEVVIEKIVRNKRKCVTVVKGLELFGVKLSDASKKLGKKFATGASVVKGPTEKEQIDVQGDISYDIVEFITDTWPDVIHLYSLLCFTSFICFHVCKISDTVSAQTIWCHSTQQ

SEQ ID NO: 62694 - protein, 276 aa, Zea mays
  Clone ID: LIB3632-023-C10_FLI.pep
MANKRQRDARKRFREANPDLFPPQTAPSADGTKNKSKKKKNKSMFKKANKGGTGRFKHPLRVPGMRPGERCFICKSTDHVAKACPEKALWDKKKICLLCRERGHSLKNCPDKSEGNLMKFCYNCGESGHSLSKCPKPIENGGTNFASCFICNQQGHLSKNCPENKHGIYPKGGCCKVCGEVTHLARHCPNKGRQDLISSRDDDVNMEEHSQECPAVHHGGDDLEDDFVNEEEPKPAKSKKAKQSGSRPATGTGNDVKSASAKTKAKQAPKVVKFFG

SEQ ID NO: 62695 - protein, 440 aa, Zea mays
  Clone ID: LIB3632-030-G7_FLI.pep
RASPSPTPLHSTPLARARRPRAPPSRPAPPRCPIYIHSRSSPSTTLLTAHSCSCHPARRPQSMATASLALSLRLAPSSRPLSLRRRGATGVTCRATTATFHQLDAVAVREEESRFRTAAAEGRNLLPLTRCIFSDHLTPVLAYRCLVKEDEREAPSFLFESVEQGSEGTNVGRYSVVGAQPSMEVVAKANHVTVMDHEMKSRREHFVPDPMRIPRTIMEQWNPQIADSLPDAFCGGWVGFFSYDTVRYVETKKLPFSKAPHDDRNLPDIHLGLYSDVIVFDHVEKKTHVIHWVRTDCYRSVDEAYEDGRNRLEALLSRLHCLNVPTLSSGSIKLNVENFGPVMQKSTMSSEEYKNIVVQAKEHILAGDIFQVVLSQRFERRTFADPFEIYRALRIVNPSPYMAYLQARGCILVASSPEILTRVQKRTIINRPLAGTIRRG

SEQ ID NO: 62696 - protein, 170 aa, Zea mays
  Clone ID: LIB3632-036-C11_FLI.pep
RSFRRSYLHCELSLKMIVSSLFSVRTAASVAHVSFEYKWLHKQLVQLRDVPVMDGFICLSHTCSLHAEKFHEIYNFAFAWAREKGQKSLALETAIGMWQLLFAERSWPLIDYWCQFLQVRHNKAISRDTWAQLLEFVKTIDPQLTNYDEEGAWPYLIDEFVDYLKENGLA

SEQ ID NO: 62697 - protein, 966 aa, Zea mays
  Clone ID: LIB3632-039-B10_FLI.pep
ARWCRGDWELRRGEVEVRGATTKREREMGAIGGDAPVQWDKVDGAEVANGGGGGAAGRLEKILVSVRLRPLSDKEISRGDPAEWECINDTTIISRSTFPDRPTAPTAYSFDRVFRSDCTTKEVYEEGTKAVALSVVSGINSSVFAYGQTSSGKTYTMTGITEYTAADIYDYIAKHEERAFVLKFSAIEIYNEVVRDLLSAENTSLRLWDDAEKGTYVENLTEVTLRDSDHLKELISTCEAQRRTGETYLNENSSRSHQILKLTIESSAHEFLGKDKSTTLVASVNFVDLAGSERASQALSAGTRLKEGCHINRSLLTLGTVIRKLSKVRNGHIPYRDSKLTRILQPSLGGNARTAIICTMSPARSHMEQSRNTLLFASCAKEVVTNAQVNVVMSDKALVKQLQKELARLESELRCPASYSGLEALVREKDNQIRKMDKEIKELKLHRDLAQSRLQDLLKVVGDNHGSKHPLASSARNFTFDVPQPCEDEQSTTSEAISSGQNFRLQGRLTTQRDYRSQQSENDVQFATPLSYSISSPPFSGMPPTNGRNDNSHISDEDSEDLCKEVRCIETNETEENECLESSAVGSNSLQDSNLASSMHGNDNTNRSVNSGRNDASSITLEQHLENVKKPFANPGMDLGSSTRNSSSSKVIGRSRSCRSLMGSTLLEDLEKEVCTPPSRSFMDYPGRPETCQRRVPALNYDAESEALSRAGSMLSEITTTRGGLKENSSAAGDTEFVAGIGEFVAELKEMAQGHNGELAEGTIRSVGLDPIMDILQSPSRWPLEFEKKQQEIIDLWHGCNVSLVHRTYFFLLFKGDPADAIYMEVELRRLSFLKNTYSNGSMGYDMVAGSLSTSLVSSAKKLQREREMLCRQMQKRLTIQERESLYTKWGVSLSSKRRRLQVARRLWTETRDLEHVRESASLVARLIGLLEPGKALREMFGLSFAPQQSTRRSHSSWRYGRSSLD

SEQ ID NO: 62698 - protein, 592 aa, Zea mays
  Clone ID: LIB3632-042-C4_FLI.pep
GGVGDGAGMWRLRIAEGGGDPWLRTKNAHVGRQVWEFDASADPDPAVDAARRAFAGSRGHLKHSADLLMRIQFAKENPLELDLPAIKLGEHEDVTEEAVSTTLRRAISRLSTLQAHDGHWPGDYGGPMFLMPGLIITLYVTGALNTVLSSEHQKEIRRYLYNHQNEDGGWGLHIEGPSTMFGSALTYVTLRLLGEGPDSGDGAMEKGRNWILDHGGATYITSWGKFWLSVLGVFEWSGNNPVPPEVWLLPYLLPFHPGRMWCHCRMVYLPMCYIYGKRFVGRITPLVLELRKELFKDPYSKIDWDKARNLCAKEDLYYPHPFVQDVLWATLHKFVEPVMMSWPGSKLREKALETAMQHVHYEDENTRYICIGPVNKVLNMLACWIEDPNSEAFKLHIPRVYDYLWLAEDGMKMQGYNGSQLWDTAFIVQAIVATNLTEEFGPTLKLAHNYIKKSQVLDDCPGDLNDWYRHTSKGAWPFSTADHGWPISDCTAEGLKASLLLSKISPEIVGGPIEANRFYDAVSCLMSYMNDNGGFATYELTRSYAWLELINPAETFGDIVIDYPSNPGPDIIQKTIPWAPQERGGQLYQQSC

SEQ ID NO: 62699 - protein, 474 aa, Zea mays
  Clone ID: LIB3632-046-C10_FLI.pep
IGFGGRGRGVPSKGTMGPRRSKRVSWATGANLCKVRFFISEDSPSQAGLRPQDNLQAKGSWLMHAAGPSSDDSLPPGFESLQPTSCLKIDISQIHVIRWRCPPQVLHNPVWLVAAGEESEEVALQNDRIFGALEAIYPRPSNIPPNPFVTPDVKDSQYDDSRTQLVPLLPVEEDDASDQLEEPPVGLSSSYQQSDKYDSATFRVPQASDAPFTTAQQQQQPNGSINNTRSGAPAEPDTVAAASAAYTAIIQSNRMGNMIDQDLLVEMLSDPAQLERLMKEYAALKHEQSTNSSVAPMVKGPPPQMTASVPVSFPDHTTAFHNINSTLPPPPVLNRLPPPAIPSAVTINPPASSSQAISFPTGRTSGLNYYQTLIHQHGGERQEPQPLQQHGMHFPMHHRTVASQSSATDIVSSGTMPARDTKQRPMKPCAYFNSARGCRNGAKCTFLHDVSAARKEQPKGPKRIKLDSRIAGRY

SEQ ID NO: 62700 - protein, 963 aa, Zea mays
  Clone ID: LIB3632-053-G1_FLI.pep
ARSTGLADLAAMEKACTLLVYFDKGSPSMANEIKAELESGDGPAKADAMRRAILLLLNGESLPHLFITVVRYVQSCDDHAVQKLLLLYLETVDKRNAATGKILPEMILICQNLRNNLQSPNEYIRGVTLRFLCRLTEPELLEPLVPSILANLEHRHHFVRRHALSAISAIYSLQQGDQLIPDAPELVERALASEQDPAARRNAFLMLLAAGQDRAVGYLFNNADRVAEWPDLLQMAAVDLIRKVCRSKGRADKGRYIRVIISLLSASSAAVVYEGAGALVSLSSAPTAVRAAANTYCQLLSSQSDNNVKLIVLDRLHELCSSHREVMVDMVMDVLRALASPNVDVRRKVLDLVLDLLTLRNVEEVVLYLKKEVVKTQAAEVKGDEYRQMLVQAIHNCAKKYPEVAALVVHLLMDFLGDPNVAAALDVVLFVREIIETNPKLRVSMIQRLIDIFYQIRASHVCSCSLWILGEYSLSLPEVESAISTIKQCLGDLPFYTVSEERETTDSSKPSQPVVSSVTVSSRRPAVLADGTYATQSAATEIAVSAPASALGSLASTQNLRSLILSGDFFLAAVVACSLTKLVLRLEEIQPAKVEVNKVSTEALLIMVSILQLGQSSYLPHPIDNDSYDRIVLCVRLLCNTGDDVRKVWLQSCRQSFVNMLAEKQFRETEEMKAKAQITYAQPDDLIDFYHLKSRKGMSQLELEDAVQDDLKAATGQFTKDADDTDKLNRILQLTGFSDPVYAEAFVTVHHYDIVLDVTVVNRTKETLQNLCLELATMGDLKLVDRPQNYTLAPESSKQIRANIKVSSTETGVIFGNIVYETSNVMERSVVVLNDIHIDIMDYISPATCADVAFRNMWAEFEWENKVAVNTVIQDEKEFLNHIIKSTNMKCLTPPSALDGECGFLAANLYAKSVFGEDALVNISVEKQADGKLTGYIRIRSKTQGIALSLGDKITLKQKGGNS

SEQ ID NO: 62701 - protein, 378 aa, Zea mays
  Clone ID: LIB3632-057-D3_FLI.pep
GATKMAPTTATKDDSGYGDERRRELQAFDDTKLGVKGLVDSGVKSIPSIFHHPPEALSDIISPAPLPPSSSPSAAAIPVVDLSVTRREDLVEQVRHAAGTVGFFWLVNHGVAEELMGGMLRGVRQFNEGPVEAKQALYSRDLARNLRFASNFDLFKAAAADWRDTLFCEVAPNPPPREELPEPLRNVMLEYGAAVTKLARFVFELLSESLGMPSDHLYEMECTQNLNVVCQYYPPCPEPHRTVGVKRHTDPGFFTILLQDGMGGLQVRLGDGQNGGCWVDIAPRPGALMVNIGDLLQLVTNDRFRSVEHRVPANKSSDTARVSVASFFNTDVRRSERLYGPIPDPSKPPLYRSVRARDFIAKFNTIGLDGRALDHFRL

SEQ ID NO: 62702 - protein, 449 aa, Zea mays
  Clone ID: LIB3608-006-G11_FLI.pep
ARSHPTSSQLAQPFLFRFFHCSQNPEAEAAVASMPPMEAAEDVVIVGAGLAGLAVALGLHRKGVRSLVLESSPSLRASGFAFTTWTNAFRALDALGVGDKIRRQHQQAQALRVMASSTGEIVQEVDLTQQGKRGPNEIRCVRRDLLLQALEEELPRGAIRYSSRIVSIEEEDGNGDKVLQLTDGSVIRAKVLVGCDGVNSVVAKWLGLATPSYSGRSAARGFARYPDGHGFEPKFLQFVGHGFRSGMLPCNDTDIYWFFTWTPSENDKGVDESAAKMKQFVLAKLRGSNKVPAEALAAIDRSEMSDVLAAPLRFRSPLSLATASIARGSACVAGDALHPMTPDLGQGGCSALEDGVVLARCLGDALLPPPAGSGSGRGKEDRVQAALREYAWIRRWRSVELVATSYTVGFVQQSDSAVVSFLRDRLLSGVLARRLLKMADYDCGTLESY

SEQ ID NO: 62703 - protein, 802 aa, Zea mays
  Clone ID: LIB3608-007-F4_FLI.pep
GARHSSVLSGGGGGGEGDRCGRPTAGSPDQMDTPDRPRAGAGAGFEDSPVFNFINNLSPIPPPKPLDSAHNVQLFKSSDLAPVSSIFASPHVNPTKGTKVLIRDESVQLPHELHSPSSVRTRIGTSGSFRMIRCKDIVPENCNITCQLNEASIDSSDHTSSSTGQLTQSIKDAAGSMESDKDQCAGGKIDLTMSQECTGLEGMNLDESSPDRMDSSHSGIVVHENQLSEQNNDEPAAYNGVYMITHQSSSDMLTLAVPSGTEAQPMNDTQKADNPYPCESLLDVQSSGNCTQNSVHEPHLYWNGAVEGAAVAYTPQALPGALQSQLMPCNKLNEPKDYMPTEQNALSQHLRGMRRRSLFNEKAGLSNKGVDKASDHHPVNSTTPKCKTISGDNSKTLRTPPCALPGIGLHLNALAATATPKEKIVPQDIQSTINESSNLIGPAGSSPAPSEQNIINDDFTQTTDVATAEASSQGSPKKKRHKFDSGDGTSCKRCSCKKSKCLKLYCECFAAGVYCSEPCSCIGCMNNQSHTETVLSTRQQIESRNPLAFAPKVIHTSEPGLELRDFSNKTPASARHKRGCNCKKSSCLKKYCECFQGGVGCSISCRCEGCKNAFGKREGAAVLSIEEPKQGLEEKDVCVKEEKSEIEKQLVVYQTPDDAPAENVLTTPSMVQCRPLACRPPPSSKKSSKKPRSSTKLTGHPSRLCNLQAPPKTDTMLSPFENYAEMVLGDSTSDILKGNSSPQTSVKVVSPNKKRISPLRMGTGLSPICRSGRKLILKSIPSFPSLGGDVNNEDPETKLPAP

SEQ ID NO: 62704 - protein, 214 aa, Zea mays
  Clone ID: LIB3608-009-C8_FLI.pep
PNKANRYNFTQKQQKLFSDKRELIRHIFSPRLLFINRRQHSAHNFKHELTSYPDRGSLFVQDLNQILDSIFLRWGSLAGRFRSSHWGSSILKKYCSTASSGTCSNLGGIHSGLLSFSSSTALNPSDKSRLKVPRRTWQTTLYSRRRHSPRVCVLPSLIDLREIFRLVGEAFFRDLIVAATHLSETFEISCSRASMISSTVLLEKHLLMVLCKSQ

SEQ ID NO: 62705 - protein, 498 aa, Zea mays
  Clone ID: LIB3608-010-A7_FLI.pep
AARCRVFARRIVGAMGRRKMSAAAPPSRSWSNVGGSVIPELRAKHKTDLENLTLTKQPLRTLHFFLLAMLQYLKRLATYILSKGGFFFLLIVLLVASGILLVVSDGLHNKVCCMFFSCLCLNQRDMDSHFHKNPCCSILYSILALFLSTNVVWMSCMQHVQEFLNYAKFVSWWVSLGVASSIGLGSGLHTFVLYLGPHIALFTIKAVQCGRIDLKIAPYDTIQLKVGPSWLDKKCSEFGPPVYPASAHSVRIPVFDLLPQIQLEAVLWGIGTALGELPPYFISRAARLSGSESKAVQELDPATSKEDGPVASSLNRTKRWLLSHSQHLNFFSILILASVPNPLFDLAGIMCGQFGVPFWEFLFATLIGKAIIKTHIQTLFIVSLCNNQLLYLIEKELIWIFGHVPGFSATLPSVIARLHAAKDKYLSPPAPVSPSSQMEEKQWNFSFTSVWNSIVWLVLLNFFIKIVTSTAQDYLKKQQDTEMELISDSPIHDHSKTN

SEQ ID NO: 62706 - protein, 780 aa, Zea mays
  Clone ID: LIB3608-027-C9_FLI.pep
SKGRWAGRPARPSSSRTFHGPTSSFVPPLTPTLLGESAPPSTPLLVDERTRSTPPTPTPVPDPSPPRSLPIPDPALRSGRDRGGFGLPLIGASAMDQSRRAVDSYWRSRMVDGVTADDDKVAPVYKLEEICELLRASDASIVKEVADFVLKRLDNKSPLVKQKALRLIKYAVGKSGTDFKREMQRHSAAMRQLVHYKGHPDPLRGDALNKAVRETANEAIAAIFSTEDPKPAVATESLGKRIQGFGNTNYEPSRDDKKSFLSELSEVVGIGSASIKQGLSNFAAAHAMMTNDNGSTYRSPNLRRSLTTESERYGRYDPSEIQRESRASSDASKNAPSGPWGPTSSSTPTDETSSSQPGIKTREERLLETIVTASGVRLQPTRDALQIFFAEASKLDAVALSRALEGKLNSPLWQVRMKAICVLEAIVRKQDTDPYSIIASYFTENTASVVKCSELPQVSLREKASKVLNMLIGEQPTGTAATKAAMPTPVQMPDLIDTGDQDDLATSSGHASIEQNSGNSAYVSSVDDLLGGEPISDTSVTADSNGSDPFADVSFHEAETKETNDLFSGLTVEEKSSTTMHDSSSDKNELPDIFGSSPDSFIQGSVTDQGTVNDLIAGLNLNGTGHAQSAVKAEPNSNSGSQFFDTKNESGHVPSAATLNDILGQNSLYQQQQTPLQYSFPQHMMLNQSFPGQQLNYGAMGILLAQQQQLLQSFGNFNAGLGNSSFNSMNGGNTSVLPDIFNSSNQPQNHVAVMSSSKKDDNKAFDFVSDHLAAARGSRK

SEQ ID NO: 62707 - protein, 92 aa, Zea mays
  Clone ID: LIB3608-027-F6_FLI.pep
TQDHWTVSSARFHPSELYHLDIIQAATVFLAGKVTHADSMVTNALQGTKRRPLVLAQDSDYPASKVLYTHKNFGLNTITRRGNRFNLILTTS

SEQ ID NO: 62708 - protein, 180 aa, Zea mays; identical to SEQ ID NO: 37897
  Clone ID: LIB3608-028-A12_FLI.pep

SEQ ID NO: 62709 - protein, 345 aa, Zea mays
  Clone ID: LIB3608-046-G11_FLI.pep
PPDQQRLIFAGKQLEDGRTLADYNIQKESTLHLVLRLRGGMQIFVKTLTGKTITLEVESSDTIDNVKAKIQDKEGIPPDQQRLIFAGKQLEDGRTLADYNIQKESTLHLVLRLRGGMQIFVKTLTGKTITLEVESSDTIDNVKAKIQDKEGIPPDQQRLIFAGKQLEDGRTLADYNIQKESTLHLVLRLRGGMQIFVKTLTGKTITLEVESSDTIDNVKAKIQDKEGIPPDQQRLIFAGKQLEDGRTLADYNIQKESTLHLVLRLRGGMQIFVKTLTGKTITLEVESSDTIDNVKAKIQDKEGIPPDQQRLIFAGKQLEDGRTLADYNIQKESTLHLVLRLRGGY

SEQ ID NO: 62710 - protein, 261 aa, Zea mays
  Clone ID: LIB3608-049-G1_FLI.pep
IKLRAIHDKLRPPLRSPPSYSDPKERTQGESTMTEGGRPNRPDQRDLGELSAVSDLDHLGGGAVAGAHLLDGLDDVHALDDLAEDDVLAVEPRGRDGADEELGAVGVGPGVGHGEHTGGGVLAHELLVGELLAVDGLAAGAVAAGEVAALAHELGDDAVEGGALVVERLPGLAHALLARAQRAEVLRGLGHLVGVQLHHDPARRGAADGHVEEDARVRHRDRELGFGDIFPSLYECDLICGSPPQELVSSSRISSSLEPIN

SEQ ID NO: 62711 - protein, 368 aa, Zea mays
  Clone ID: LIB3608-052-G9_FLI.pep
SSRTSRPPSPQVVKRQREHGRCSHGGAAREAGLPGAGGLGAGPRLHGHVRLLRPSQAGARHDRAHPPRRRRRRHLLDTSNVYGPHTNELLLGRALRAAGGVREKVQLATKFGIRADADDGAWEIRGDPAYVRAACEGSLQRLGVGCIDLYYQHRIDNRVPIEVTVGELKKLVAEGKIKYIGLSEASASTIRRAHAVHPISAVQLEWSLWSRDVEADIIPTCRELGIGIVAYSPLGRGFLSSGPTMVDKLSDQDFRKELPRFQPENLEKNAVIFERVNAMAARKGCTPSQLALAWVHHQGADVCPIPGTTKVENFNSNVAALSVELTPQDMAELESYASAGVQGDRYHDFLNTWKDSETPPLSSWKAGE

SEQ ID NO: 62712 - protein, 446 aa, Zea mays
  Clone ID: LIB3608-058-A9_FLI.pep
PTVRPSLLAERRWSNPSTRTSRPAPPAPIPRPSSMAALSVPLHAAAGSRAAAADPVKVPCVRSTGSAHFGRAFPSVAVSSLAARHIEPMRAIATQAPPAVPQYLSGEKTKIGINGFGRIGRLVLRIATSRDDIEVVAVNDPFVDAKYMAYMFKYDSTHGPFKGSICVVDDSTLEINGKKVTITSKRDPAEIPWGNFGAEYVVESSGVFTTTDKASAHLKGGAKKVVISAPSADAPMFVVGVNENSYDSKMNVVSNASCTTNCLAPLAKVVHEEFGIVEGLMTTVHATTATQKTVDGPSMKDWRGGRGAGQNIIPSSTGAAKAVGKVLPELNGKLTGMAFRVPTPNVSVVDLTCRIEKNASYDDVKAAIKAASEGALKGILGYTDEDVVSNDFVGDSRSSIFDAKAGIGLSSSFMKLVSWYDNEWGYSNRVLDLIAHMALVSAAAKL

SEQ ID NO: 62713 - protein, 1123 aa, Zea mays
  Clone ID: LIB3608-060-C1_FLI.pep
HTRSLPFPSPSSAPDPSPAPEFMASDSDVDEDELLQIALQEQAARDLSHQRPPAANKPVVNLVRPPAPNARGGNARAGGAAAKARQPSRGGDEDDDSEVELLSISSGDEDDNPRARGPPPPRGGGGGRAGARRAASRDDGDFDDEEPRSWKRVDEAELARRVREMREAKVAPNIQELDQKAAAAAAAAARKAFTSVQTLPKGVEVLDPLGLGVIDNKSLRLITDASVSSPISREKSQGLDPNMRDKVIYSSPNFDPKVFLSWVHKDTSAADLEAGALTLKTDLKGRTQQKKQLVKENFDCFVSCKTTIDDIESKLRQIEEDPEGAGTAHLYSVTQKISGVANRAFEPLFERQAQAEKIRSVQGMLQRFRTLFNLPSAIRGNIRKGEYDLAVREYQKAKSIVLPSHVGILKRVLEEVEKVMQEFRGMLYKSMEDPHLDLAEIENIVRLLLELEPETDPVWHYLNIQNSRIHGLFEKCTQDHDSRMEVLQNKIREKVLSDSKWRQLQQDSNKSLEVDSTIGDSPRIDQLSTNFMAEEADSLRATYIRRLTSVLIQHVPAFWRLALSVFSGKFAKAASGNVVSDFDVNAKPTANKNDEKGGEVKYTNHTLDEVGSMVQATISAFDTKVQSTFRDFEECNILCPYMSDTIKEIAKACQTLEGKDSSPTAVKMLRTLHFEMTKLYILRLCSWMRATTKEISKDETWVTLSTLERNKSQYAISCLPLEFRDITVSAMDRIDTMILNLMSETAKSYDISQPLQEINESVRLAFLNSFLDFAGYLERFGGELTENRPNKENNYVSNGYINGTRETFANTDGDLHKKLLVVLSNIGYCKAELSEELYSKYRHIWSPVRNNEERSSDMRDLRTSFSALEEKVLDQYTFAKSNLIRSAAQSYLLDSGIYWGAAPMVKGIRDATLDLLHILVAVHAEVYSGARPLLEKTMKILVEGLVDIFLSVFHENKTKDIRLLDANGFCQLMLELEYFETVLHTYFSPEAQQAMKSLQENLLEKACESVAEAMENPGHQRRPTRGSEDTASDDRQPSVSPDDLLVIAQQCSSDLLQGELERTRLNIACFMESTLQPTAAPAGPKPAAHSSYQAQHAPVQTSSPSFRRQQTGTSSPVVSRRRR

SEQ ID NO: 62714 - protein, 472 aa, Zea mays
  Clone ID: LIB3608-061-E11_FLI.pep
PSSPAAMAETVDDKISYFQAVTGISDTDLCTEILAAHNWDLQLAVSSITANPSSPSAPVSTSSRDPAPSAPLADAEFVAPPPPIPPPPQQQPGIAWKLVTLPFYVVSGGASLVAGSFRLGAWVAGGVLSRSLSLLGLAGQAGSGDRLLELPPSAAEAADFVAEFERECGAGRGPRFVAEGFADALQRAQREFKLLFVYLHSPDHPDTPAFCGGCLCAEPVAAFIDENFVAWGGSIRRTEGFKMSNSLNASRFPFCAVVMASTNQRIVLLQQVEGPKSPEEMITILQRVVEECATSLVAARIEAEERLNNQRLREEQDAAYRAALEADQARERERIEEQERREREAVEAEKKRKEEEEAVARAAQEAAEKEAALARRRQEKAMALGAEPEKGPGVTRVLIRFPTGERKERRFHSSATVTSLYDYVDSLDCMKAENYSLVSNFPRVTYGPEKHSLTLEEAGLHPQASLFIEIEQ

SEQ ID NO: 62715 - protein, 541 aa, Zea mays
  Clone ID: LIB3607-006-H2_FLI.pep
LTKINRQVPAGNLITDWSSQHRACHPLSSSSVVGDVARNLEPLGVERARHVDPLVGVSPEVVPLGLHQVGRQPVPAVGVEVGQASGHSRGADAVVDGEAHHPAPRRLPVHDLLRELGVYEQAGEARVPVVGLLDAVQEDGADDAPALPDPGQLAEVEPPAFLRALGLDDVHALRVAADLGRVQGLPHVLHQLRLVHRRAGGVVVTLEDLGGLHPLVLQPAQEPRVQGRLDRRSGHRQLGGLLHRPLPCPFHPGLVKDLVHQVAIAMLVLDAKDVGRDLDQEAQELALVPLGEHLVQLTVGELTDRLENVVCLGNQLHIAILDSVVNHLDKVARSTFANVRDTRATVRDLSSHLEDNVFDVLVSLERASGHQGRAVAGTLLSSRDTHAKIQEAALLHGLLPPLRVLVPLVPPIDDAVALLQVSCERRDGLVNWRAGLDEHDHHPWLLNGLHKGRGVMEAVDGKVSFCLGTLHGLVHLGGCPVVHRDGEPFLCNVEGKVLPHDRKASKTDSCERHLLLHYGAGALPSADSDAELNWRCHHRPK

SEQ ID NO: 62716 - protein, 241 aa, Zea mays; identical to SEQ ID NO: 57103
  Clone ID: LIB3607-010-A3_FLI.pep

SEQ ID NO: 62717 - protein, 411 aa, Zea mays
  Clone ID: LIB3607-011-D11_FLI.pep
RILAHLRDMDNEVKSFLLLNMYLQVAWCLHAIDGENPSETCIDELLSKQSSLFDQLYYYLVVLPTYQKEGRSTTVLSCRVCIITAEMWCLFKKSKYSSTRLESLGYFPQPDMVQKFWKLCEQQLNISDETEDEDANEEHIEDTNRDAVMIAAAKLVLADTVSKDYLGPEIVSHYVSHGASTTEIIKHLITSLKKNANFDMGTLFFEALKRAYERYMAHVHDGENQILTGKSYSECQDLASRLAGSYVGAARIKNKSDILKIIRDGVSFAFVELPNQLLFLEAALLPFVSKLQASDIPDILADVEKRIQHINTTGDQSVWRPFFMFVEHLRDKHAKNEVLHEEEEKPVRKRGRPRKVREVPDVPDLRGARHVRGKKLFRDDGHNSSVRNLLVHLTIRITVKMTTATAMQISP

SEQ ID NO: 62718 - protein, 203 aa, Zea mays
  Clone ID: LIB3600-014-H10_FLI.pep
GTQTTEEHSHRLLILILISSADGHGWNRWTEREQHTHTHTRGANNNNKKKLQATTPSQALVSARATATGMQSAPARPPAGRRSVGAPAHEVVGLAHPVRVPRRRRGRWPRRPRGRVRRHGHGVRERGGQRADPGRGGGAVVERAQRVVPAAQARLVLERLHRAHARRHHQRRRLPARRRRHPAAGLGSCGSCSVRVVISVGTV

SEQ ID NO: 62719 - protein, 398 aa, Zea mays
  Clone ID: LIB3600-016-B5_FLI.pep
RTAHHDQIPKGPEFDHTFTTHHAKSRRAQLQTTSRADRHSALSRFISLRLDRHNLDLVQHGAAERDAVGDLGVVVGAVEGEAGADAAGHEPERRRLEPAFPRGIERHLLRDVARERLHQHRAVAAVPGVADGERQVVGAVGHGADDLRDGALPPGHQLHRVLPRGDREVGRVNKPHRLERLDDPAGQRRRRVLLLGGQQNADRRVPEHLGTDLEAVVLDQVVFGRVRRGQLLDGDSVQQRAARGVLLHAGVGERDLRDGGGGAEAPGPGVGGRAAVERAHGDVGGRRERRRHRHAQGLVLRARPRRRERERVQRPRPHRHVLRRRRAAAEAQRVHAVRHREEHAPGLGTARDVLHVALHRPPRQRVAPHDEGLVQPPRRRLEVAVDEHAFGVLSMTRS

SEQ ID NO: 62720 - protein, 168 aa, Zea mays
  Clone ID: LIB3606-027-A9_FLI.pep
AAPPPPPPRPREEPETEPLPPPVQMGEVSEEDLRQYDGSDPKKPLLMAIKGQIYDVTQSRMFYGPGGPYALFAGKDASRALAKMSFEPQDLTGDVSGLGPFELDALQDWEYKFMSKYVKVGTVKKSVPVEGGSTASTTEAEKAPTTEEKPSGAVVEKEAVANEGAQEN

SEQ ID NO: 62721 - protein, 570 aa, Zea mays
  Clone ID: LIB3607-017-B4_FLI.pep
GRSKKRKVLLPMGSSGFSWTLPDHPKLPKGKPVAVVVLDGWGEANPDQYNCIHVAQTPVMDSLKNGAPEKWRLVKAHGTAVGLPSDDDMGNSEVGHNALGAGRIFAQGAKLVDQALASGKIYDGDGFNYIKESFESGTLHLIGLLSDGGVHSRLDQLQLLLKGVSERGAKKIRVHILTDGRDVLDGSSIGFVETLENDLLELRAKGVDAQIASGGGRMYVTMDRYENDWDVVKRGWDAQVLGEAPYKFKSALEAVKTLRAQPKANDQYLPPFVIVDDSGNAVGPVLDGDAVVTINFRADRMVMLAKALEYADFDNFDRVRVPKIRYAGMLQYDGELKLPSRYLVSPPEIDRTSGEYLVKNGIRTFACSETVKFGHVTFFWNGNRSGYFDATKEEYVEVPSDSGITFNVAPNMKALEIAEKARDALLSGKFDQVRVNLPNGDMVGHTGDIEATVVACKAADEAVKIILDAVEQVGGIYLVTADHGNAEDMVKRNKSGKPLLDKNDRIQILTSHTLQPVPVAIGGPGLHPGVKFRNDIQTPGLANVAATVMNLHGFEAPADYEQTLIEVADN

SEQ ID NO: 62722 - protein, 264 aa, Zea mays
  Clone ID: LIB3607-049-C8_FLI.pep
SIGGEEELSAGDGQVLGGDAALPGVRGAQHLFGGAGGRHVLLRLQLAGRLHLPLVVVGGGVRQQEHPDGARPPPQAQRQALRAPQRRAEHHQGKRRSRTHAATDRRSSVPSSSVLSALYYIACMQMDKASIIKDAIEYIQQLQAEERRVLQELRVLDDDTAAAATAQVECCDVDGGLLRREAERAKKMKRAQSVASGAQSAPPPPPPAPPHVEVLELRVSEVGDHVLVVSVTCRKRRDAMARVCRAIEDLRRRLPRAHRLRRGR

SEQ ID NO: 62723 - protein, 594 aa, Zea mays
  Clone ID: LIB3607-055-H6_FLI.pep
KMGTSSGANFHQQPPPTQGMLPPRHGPRPSGLQTSLSLASSEQVGSPDMQEPGSNSEPGHDSATESASSKDTWPAEPNQSNGGVAASDVVSKAAEKEVANGVSKPQVIHGPSSRVSGMLLREVARERVDLVAEKMKMMSDEHLEEVKNELRSILEGTGGSHHIEEFLYLQKLVQDRHDLTPSMLSVAHHVQLEILVAIKTGIQAFLHPSVTIPHNRLVEVFLYKRCRNIACQSALPAEECRCNVCASRNGFCNLCMCVICNKFDFEVNTCRWIGCDFCSHWTHTDCAIHNGQIGMGQSVKSSIGHAEMLFRCRACQRTSELLGWVKDVFQQCAPGWDRDALLRELEFVCKIFRLSEDAKGRVLFRKCLDLIERLRNTPADSINPRMILQALQELEMDSPKISENEDVGHLITPQEACNRIAEVVQEAVRKMELVAEEKMRLYKKARLAVEACDRELEEKVREAQELKAERQRKKQQVEELESIVRLKQAEAEMFQLKANEARQEAERLQSIALTKSKTAEQDYASMYLKRRLEEAEAEKQFLFEKIKLQENQRPTVGVGSSSGAGGDSTPMMMLSKIQDLLKNVRSMPAKSEGH

SEQ ID NO: 62724 - protein, 112 aa, Zea mays
  Clone ID: LIB3595-066-F1_FLI.pep
QLLHLVRQCFFLCSWTNLEFLRSSSVKLAVIFVMMNPVMAKPVRKGQLRFHSRRKKTGHGSNVFISSASGLLEISYLRSSASAFASGEKWMGGEWNMSVRAGAASVRARLGG

SEQ ID NO: 62725 - protein, 415 aa, Zea mays
  Clone ID: LIB3592-013-H7_FLI.pep
LKPWGFGEPEAVAAAGMNGEVECSVCHAKVPVPPPVSKAYDSHRSTVSSRQRALNVLLVSGDCVLAGLQPILVYISKVDGKFKFSPISVNFLTEITKIMFTIVMLFIQARRLKVGDKPLFTVSIFMQAARNNVLLSVPAFLYAINNYLKFIMQLYFNPASVKMLSNLKVLVIAVLLKMIMRRRFSVIQWEALALLLIGISVNQLKSLPEGSSVLGLPVAAGAYLYTLFFVTVPALASVYNEKALKSQFDTSIYLQNLFLYGYGAIFNFIGLVVTAIIQGPSSFNILEGHSKATMFLICNNAAQGILSSFFFKYADTILKKYSSTIATIFTGVASAVLFGHTLTINFVLGISIVIISMHQYLSNQIKDEVPSSKVEMAEAHDHSRKEPSYVNVPDSGASESKHRHGSDERQPLLPV

SEQ ID NO: 62726 - protein, 457 aa, Zea mays
  Clone ID: LIB3592-046-C5_FLI.pep
YNFLQGEVPGTRALRRFPASAFDHNLRLCGEVVNADCRDQEGLPSSGAPAYGSSSPVVRPAGDGGRAARKHLRFRLAAWSVVAICLIAALVPFAAVFIFLHHKKKSQEVRLGGRASASAAVTAAEDIKDKVEVEQGRGSGSRSTESGKGAELQLFRADGASFDLDELFRSTAEMLGKGRLGITYRVALQAGPVVVVKRLRNMSHVPRRDFTHTMQLLGKLRHENVVDLVACFYSKEEKLVVYEHVPGCSLFQLLHGNRGEGRTPLPWPARLSIAQGMVRGLAYLHKSLPYFHRPPHGNLKSSNVLVFFSAPNGKQQKQAVPKLTDHGFHPLLPHHAHRLAAAKCPEFARRGGRRLSSRADVYCLGLVLLELVTGKVPVEEDGDLAEWARVALSHEWSTDILDVEILGDRGRHGDMLRLTEVALLCAAVEPDRRPKLQDVIRMIDDIAGGDGSELDRR

SEQ ID NO: 62727 - protein, 947 aa, Zea mays
  Clone ID: LIB3592-062-C11_FLI.pep
SCVQTTGEFTLILRNKVHHIIIIFFLSYVFFPVKPHNPLAIQVYELHRVYKIQKDMMKQHQRKEVYSYPTLAGASHTNSPSQVPPNGAKMMWQMPVPPVSTTYRKAIGEHNDTNQSCMKFLREGSVQSSPNGFLSSDAAPRTRQGTFDLQLPADHYIDDDDTSDNKPIDFLGLASDAKPQNDAELTLVSAERLGKFSDNSSSSGLRTTNNLGSRQVTNLNESNTGFFMGRANGSVSRGLPHTLENSWHQPILRSSTTTFNFSKEYSKEKHTNEGTSSIFFDTSAKLTHDDKPTINKGKQVSSITFLAPRYNDADPPKYFKAADGRPASYNQFLYQGQNSSAGWIARSPLEPSVINNFARVDRPHHSNLGTFTVPISIPQIDNPSIVSPMGSCTADPRSSIVNNPALIPRFNGSSTVNSYASLSAVTQSIGTSIPKLKNVDNLDKRYPGFPLDSFSVSHSRHQVAISSNLEQKNSQKFEDSDQQSHGKGMKNFNLNETLSDCQEDGLVEQDGRCAASFQHGKDGGSVFGISWLKNKAVSADPTALEKAGKIFGHSFGTTMELKNAKDQNEPAVTIRNLSDSASTSLGCGIKKDGPSEDIATGTLLVCNKAQEDATCLPLSCQKHVPKDGQDADGVIKISGASIRNFIDLNDAVPNDDNSEESVVSHECQAEPSRNNHPKRAFVIDLEVPACEEDAAWDFDQECAQPKPDAHQEVDGRSDTSALAAAENIVALSRIIPTALEASDDMLQWFADLAVLNIKDLAEQAELQACTNDSSNDESDSFESLTLKLEETKIDEYWSRPLEPEITTDEQLISTAHLLTKPRRGQQRRRRQKRDFQKDILPGLSSLSRPEIIEDVQLLEGLVQASGGSWESSLTRRGRYGGRTRGRKPRKTVVTVIVEEEVEVSPPPKPVGTGDLEADGRGMVGWGRTTRRCRRARCPSGNNLAAAS

SEQ ID NO: 62728 - protein, 180 aa, Zea mays; identical to SEQ ID NO: 37897
  Clone ID: LIB3592-075-H10_FLI.pep

SEQ ID NO: 62729 - protein, 228 aa, Zea mays
  Clone ID: LIB3592-081-G12_FLI.pep
HAYCIHNTEHQKELRSDRHGCRHHGYHLPRAHRQAGGWHEGRLRRGPHHHAQDRRQAQAGGVRQPLVRCRPRPVPGPAVRLAPELPDRRVPRRLRVGHRGAVGGPGDLRQEPRAGGDPLPLGHARRARVRVPGAARHVLHVRLLRAGYRHRQGPPREPRRPHRRPRQQQRLGLRHQLRPRQVSEGMMLACVYRRRTYSYVLQVAPVFVKGALGARDCTASVFVCMLWS

SEQ ID NO: 62730 - protein, 669 aa, Zea mays
  Clone ID: LIB3592-082-H5_FLI.pep
LQPARVSSTITTLTVSVKMMRVMDKLKGKKRGDCGDSSRSRSTRGSGGGDTSSMLFQGSTASRQRLEQLLGCMEEQGREVASHSAPGQEREVAGHSAPGQEREVACHNALEPEREAIGSSGPMLEQDHNAFEQASEAADHNAPSQEDELARQGSPMRDDDDYGEDYDGEADGEADDEVVTTTQATNFRFRRSLRVPPTQPLDQRRVINPAGERSWVEVAWSGKGHRTPVNTVLGSIARFHYPGVVQFNGAETGAYHWAHWGLKPYGPDRTHQDAVWSSFWEQFRLDETANEEHAKRVFHNAARKVINGSMSDARVKAVTVYFKKVKGQRMTNKQACEIHLTAEEYKQSEVDWLTAHPEAWVKLCEYWASDEYKVISDRNRLNRKSKPGLHRFGADGFIGKSQRMEARDGVEPRFIDVYMEGHRGPDPDHPEVLCDDSATEKLTRYAEEVRRKAGDDDLDWREAPFDPDAAYVAGGGLPHGRLGIGDGVVSHDSFGRRSVSSVGSRSRTSTSRESELDEQLRQQQQQVQQLSQQVQMMQGMLMQMYSAQMGSPMGPQFTRPSQSGQTPNTNETQGSETGQGNPQMDIQWSMPPRGQILPPPQPGMGYWPPPPWGYPTHPMGPWGRPPWPTQPLPSPADSGSHQVTPPPHVDFADRCLNSSGEATNNNPMS

SEQ ID NO: 62731 - protein, 376 aa, Zea mays
  Clone ID: LIB3592-105-G12_FLI.pep
PSAYMMLLHGWKGRRRKEKRSPLLLRALKSIGEQLYLVLTILLRLFENGCLGHHCLPLSLRIQSRVVTVVPSDTVLTASKKMLELKMSSAVVAIESKPGGILTSRDILMRVIAQNLPPESTTVEKVMTQCPECASVDTPILDALHTMHDGKFLHLPVLDRDGNVVTVVDVLHITHAAIATVGNSGAAGSESTSAMMQRFWDSAMSIGPLDDDDDSTRSEGSTKVASEAADIGRSALFPASALSNTFGFKIQDKQGRMHRFNCETSSLTDLITSILQRVGDDIDRKHLPQILYEDEDHDKVILSSDSDLIAAVDHARQIGWKSLRLHLDYARRKRGDGSSDFEYAGKDAWASAYSAVAAGAALVAGLGVMAYLKRSG

SEQ ID NO: 62732 - protein, 309 aa, Zea mays
  Clone ID: LIB3593-002-H9_FLI.pep
VNVIKNHHLFDKNPASVVPIREIYLFWYVMMLFLQLLISKGSSRLTLNCNGWLPVDVARIFGRRSLEPLLSPNSHSNVPVFQPSSYLALPLMSILNIAREFGLQHTTPSIDDNDLCSVCLERSCSVAAEGCSHEFCIKCALYLCSTSNIRVEFTGPPGSIPCPLCRNGIMSFTKLPSTPTEGLKSGSALTFCNPCILNTRSMDSPATFSKAEIRRNRVAAVSSELVCPITCSPFPSSALPTCRCSDDDPCGDTDVQDGPEFQSPRPSHSASMELDKRGEGDLDRASCSGMFWSRRSCHREQQCDAEINA

SEQ ID NO: 62733 - protein, 104 aa, Zea mays
  Clone ID: LIB3594-004-G1_FLI.pep
IIIISMVVDRCDQQLQGSHLQLLPQPQAWAASPDSAAASTNSGAAFFSGATPRTTVACAAVLVSSRSGYFLPHLQLEPQPQLDPQLQDILDLVVQKKLDLFKNQ

SEQ ID NO: 62734 - protein, 316 aa, Zea mays
  Clone ID: LIB3594-011-B4_FLI.pep
GGWILWWGSLVSICCVWMGAPKQRWTPEEEAALKAGVAKHGPGKWRTILRDSDFSALLRLRSNVDLKDKWRNLSVTAGGYGSREKARMALKKGRRVVPKLTAEPMDVDVKNMDDAHDTAIDVEPLAMAFESLPTEESPDKSVARLDDLILEAIRKLKEPSGSSKAAIAAYIEDQYWPPADFQRLLSTKLKALVNSGKLIKVNQKYRIAPSPPPSGRIGTKVSSAEGMKAENNNAKRLTKHQVIAELEKMKGMTKEEAAAFAAKAVAEAEVAIAEAEEAARVAEAAENDAEAAKAFLDAVTLSMRNRNAASMMLRAC

SEQ ID NO: 62735 - protein, 375 aa, Zea mays
  Clone ID: LIB3594-012-H3_FLI.pep
RGGGVRCIQESKLVSERETERSSIDRRPWRGNDKLLPCLQLLCSLQRRLRPFLQPCTPSASATARWATTCRPAATWCSSTGPRASKACASTPRRQSPRRPAQLRHRAHPRHRQRRRRPGPARQERLVRGLVGAEQRAALLPRRRHQVRRGGQRGAGRRHAQPPPGDAQPGRRPGARRLPGHQVLHVGALRRGRQLVPALQRLLRAGLHGGRRALPGRHRRAAARQRVPLLRVPGQPARHQPGLRHVPAGHHRQGQRQRPQLQQPVRRHGGRRRRRAREGRRAQRQGRRFRERLALGRRLRGQRRQRAEIQPGTHRPRRPRHAQEDRPAGDLRLRHVQREPEGRRSHGEELRPLLRQQAARVPDPVQLIKSGGSEE

SEQ ID NO: 62736 - protein, 476 aa, Zea mays
  Clone ID: LIB3594-018-E7_FLI.pep
CSERTHSPVPDLRSPRRSKMQIFVKTLTGKTITLEVESSDTIDNVKAKIQDKEGIPPDQQRLIFAGKQLEDGRTLADYNIQKESTLHLVLRLRGGMQIFVKTLTGKTITLEVESSDTIDNVKAKIQDKEGIPPDQQRLIFAGKQLEDGRTLADYNIQKESTLHLVLRLRGGMQIFVKTLTGKTITLEVESSDTIDNVKAKIQDKEGIPPDQQRLIFAGKQLEDGRTLADYNIQKESTLHLVLRLRGGMQIFVKTLTGKTITLEVESSDTIDNVKAKIQDKEGIPPDQQRLIFAGKQLEDGRTLADYNIQKESTLHLVLRLRGGMQIFVKTLTGKTITLEVESSDTIDNVKAKIQDKEGIPPDQQRLIFAGKQLEDGRTLADYNIQKESTLHLVLRLRGGMQIFVKTLTGKTITLEVESSDTIDNVKAKIQDKEGIPPDQQRLIFAGKQLEDGRTLADYNIQKESTLHLVLRLRGGQ

SEQ ID NO: 62737 - protein, 832 aa, Zea mays
  Clone ID: LIB3594-019-D10_FLI.pep
ADSSSCSLVGSMADGGIVVAICQYGGEFTSGPNGNLTYKGGEAHAVDVTRDMPLENFKDEVSKVFHVDVTDMSLKYFLPNNYRTLITISCDRDLQRMVDFTTSATQVEVFLISRVENRSIVTYSGASASKPGSNAPGDKRKRPPSKNKVSKSNKKTPTPSAPGTSVQPSANNVKQPRPIAIETNDNRVFQLEFGSDVAFATPAGGASTAPDILDQQNLALVDTAHREPIGHFNDSGDSYVGSEITVDPQHGLDNPVMFWDDIIKGVGQEFDNVKDFRAQLCKYAIGKGFAYRFIKNETTRVTVKCVAEGCTWRMHASESSRNKKFVIKKMTDEHTCGGGNGEGQRRATRQWLTTVIKEKLHDNPMLKPKDLVKEIYEQYGVTLTYSQVWRGKEVAQKELYHAIRETYSHLPWYCERLTESNPGSIALLSPMVDTKFRRFFVAFHASLHGFANGCRPLLFLDKVPLKATNEYKLLVAAAVDADDAVFPVAFSVVEDENYESWVWFLMQLKFPVQNHSYAYNAMTFLSSGQKGLDAAVSQVFEDSHHAFCLHHIMEEFKGELRKGPWSQQIREGMIEDFTRAAQACSIEDFNASIESIRNISTEAAEWIIASKPEHWSDAIFRGCRYDHFSSNIVDAFNNWIPTKKEGSIVLMVDSLRTKIMEIIETRREACKAWSGPLTPSMEFKAQEEVTKAGKMTVLCSSETVFEVRGNAIFVVNLANWECTCRRWQLSGLPCLHAVAVFNRIGRSFYDYCSKFFRIESYHMTYSGTIFPIPDMDTVDFSAGANLIPPPKPRTSDKPRRKRFNPNKIPTVIRLCSRCKQAGHNKATCEAIL

SEQ ID NO: 62738 - protein, 120 aa, Zea mays
  Clone ID: LIB3594-025-F10_FLI.pep
QWVTMWISLAYKSRNPLPAFVLIMALFVYERKPCSTIRLMLLLYQYSCIHLACNQHFLWSCPGKAALITVGGLAAGATVGSAVENFLQVDIVPFLGIHSPAVVVSEFILFSQLLVSLFVR

SEQ ID NO: 62739 - protein, 470 aa, Zea mays
  Clone ID: LIB3595-040-A2_FLI.pep
RPSPISDPLVDPKMQIFVKTLTGKTITLEVESSDTIDNVKAKIQDKEGIPPDQQRLIFAGKQLEDGRTLADYNIQKESTLHLVLRLRGGMQIFVKTLTGKTITLEVESSDTIDNVKAKIQDKEGIPPDQQRLIFAGKQLEDGRTLADYNIQKESTLHLVLRLRGGMQIFVKTLTGKTITLEVESSDTIDNVKAKIQDKEGIPPDQQRLIFAGKQLEDGRTLADYNIQKESTLHLVLRLRGGMQIFVKTLTGKTITLEVESSDTIDNVKAKIQDKEGIPPDQQRLIFAGKQLEDGRTLADYNIQKESTLHLVLRLRGGMQIFVKTLTGKTITLEVESSDTIDNVKAKIQDKEGIPPDQQRLIFAGKQLEDGRTLADYNIQKESTLHLVLRLRGGMQIFVKTLTGKTITLEVESSDTIDNVKAKIQDKEGIPPDQQRLIFAGKQLEDGRTLADYNIQKESTLHLVLRLRGGQ

SEQ ID NO: 62740 - protein, 218 aa, Zea mays; identical to SEQ ID NO: 60485
  Clone ID: LIB3595-061-C4_FLI.pep

SEQ ID NO: 62741 - protein, 292 aa, Zea mays
  Clone ID: LIB3595-064-D7_FLI.pep
DPCTASRPPAGMEFALVESESFSPSCPTLIMPALSIGNVGQLAVDLLISSSRARRVAYLDEPSVLPCAGNDAFGPDAVGDLALALEAYESTSHKLGFIQQRSPVTTGMMVSFAKNVADFINSIGKNHIVIISSLDSGKRRVIDASSDMQVYYLSSCNEDGSDPEYEKLGWKKLEDYDPSQKRWNCLASLVEGGGLSEDLDDDTDEMTINDYYASLPFAALFSACKAKGLKVSCVLCYCSEGDNMPESFQLAEAICKLLGHGPEKFHGNGSNGWIVPLSWKSVYGPPPDMSIF

SEQ ID NO: 62742 - protein, 881 aa, Zea mays
  Clone ID: LIB3357-002-B7_FLI.pep
GDPSPSPCPSSSSDLPPSSTPTLTASAVAMALASQGITLRSPPAGSGGHSGRRSSSVPAAAAPRGWGQPHAGQALSISPARYEPAARPPWRGSLAAAIRAAASAGAHHGSDPVPAEPRIELPAIFTVFSEAAKTGAAFFIASSSAAFLLGSFGGFGGGAGGLFGGGGGGGGWGAGGGGAGGGGGGDFWSWLFSAGAANADDKSSGDWDAHGLPVNMTVPLTKLSGLKRYKLSELKFFDRAAAGGGAYTGPEDSFFEMVTLQPGGVYTKSQLLKELETLVSCGMFERVDLEVKPKPDNTIGLTVSFVESVWSAAKQFKCINVGLMSQSGQVDFDQDMTEREKMDYLRKQERDYQQRVRGAKPCILPENVRGEVLGMMKKQEKVSARMLQKIRDHVQKWYHNEGFVCAQVVNFGNLNTNEVVCEVVEGDITKVEYQFQDKLGNIVEGNTQLQIIDRELPQQLRPGHIFNIGAGKQALKNINSLALFSNIEVNPRPDETKEGGIVVEIKLKELEPKSAEVSTEWSIVPGREGRPTLASIQPGGTVSFEHRNIYGLNRSIVGSVTSSNLLNPQDDLSFKLEYVHPYLDGVDDRSKNRTFKTSCFNTRKLSPVFVAGPNMDEAPPVWIDRVGFKANITESFTRQSKFTYGLVVEEITTRDETNTICTHGSRAMPSGGLSMDGPPTTLSGTGVDRMAFLQANITRDNTEFVNGAIVGDRYIFQLDQGLGIGSKNPFFNRHQLTLTKFINLNKQEKGAGKPLPAVLVLHSHYAGCVGDLPSYDAFALGGPYSVRGFSNGELGASRNILELATELRVPIRNTHVYAFAEHGTDLGSSKDVKGNPTEFFRRVGHGSSYGVGVKLGLVRGEYIVDHNAGTGTVFFRFGERF

SEQ ID NO: 62743 - protein, 190 aa, Zea mays
  Clone ID: LIB3357-052-G3_FLI.pep
RHHMLGRLSSIIAKELLNGQKVVVVRCEEICMSGGLVRQKMKYLRFLRKRMNTKPSHGPIHFRAPAKILWRTIRGMIPHKTKRGEAALARLKTYEGVPPPYDKTKRMVIPDALKVLRLQPGHKYCLLGELSKEVGWNYHDTIRELEEKRKEKAKVAYERKKQLAKLRVKAEKAAEEKLGSQLEILAPIKY

SEQ ID NO: 62744 - protein, 186 aa, Zea mays
  Clone ID: LIB3356-011-E9_FLI.pep
ADKANRGKQLRLLVVDIGEAALAAVVAVEVVGHEDARAALCVGALLAEAGHLASGVVHLIELQHGELNLLVLVFDLLGLGVRLLLTLLGAAAEAEHQVECGLLLDVVVGEGATVLELLAGEDEPLLVRGDALLVLDLGLHIVDGVRGLHLQSDGLPRQSLHKDLHLWRRCGGAACGGAYVGFGCCR

SEQ ID NO: 62745 - protein, 57 aa, Zea mays
  Clone ID: LIB3356-013-A2_FLI.pep
HIPVLTKQTLYSIQTKNKNKNSVDPPFNRRNSDDPLINKRNQGLCLRRSCVGPPRDP

SEQ ID NO: 62746 - protein, 112 aa, Zea mays
  Clone ID: LIB3356-018-C11_FLI.pep
PYIRARLGSGRLVVVELEPHPVVDLVVLERDVVLVDVVPLLDADLLGARPRLRRHQLLEVADGVVLVALHPHLLPQAVVQHHLDHLRLPDPERAPLSPPTDSQTLDLASEWL

SEQ ID NO: 62747 - protein, 233 aa, Zea mays
  Clone ID: LIB3356-018-H5_FLI.pep
IKLRAIHDKLRPPLRSPPSYSDPKERTQGESTMTEGGRPNRPDQRDLGELSAVSDLDHLGGGAVAGAHLLDGLDDVHALDDLAEDDVLAVEPRGRDGADEELGAVGVGPGVGHGEHTGGGVLAHELLVGELLAVDGLAAGAVAAGEVAALAHELGDDAVEGGALVVERLPGLAHALLARAQRAEVLRGLGHLVGVQLHHDPARRGADDGHVEEDARVRHRDRELGFGDIFPSL

SEQ ID NO: 62748 - protein, 1030 aa, Zea mays
  Clone ID: LIB3357-009-H5_FLI.pep
HFEFSLSLPHRRQPLFAVACAMSSRLDKEKAVNVQVLLRCRPFSDDEVRSNAPQVITCNDYQREVAVTQSIAGKQFDRVFTFDKVFGPTAKQKDLYDQAIIPIVNEVLEGFNCTIFAYGQTGTGKTYTMEGECRRAKSGPKGQLPADAGVIPRAVKQIFDTLERQNTEYSVKVTFLELYNEEITDLLAPEEISKATFEDRQKKTLPLMEDGKGGVLVRGLEEEIVTNASEIFSLLERGSAKRRTAETLLNKQSSRSHSLFSITIHIKEATPEGEELIKCGKLNLVDLAGSENISRSGAKEGRAREAGEINKSLLTLGRVITALVEHLGHVPYRDSKLTRLLRDSLGGRTKTCIIATVSPSVHCLEETLSTLDYAHRAKSIKNRPEVNQKMMKSTLIKDLYGEIDRLKAEVYAAREKVGVYIPKDRYQQEENERKAMADQIEQMNASLEANQKLISDLQEKYDSELRHSADLSKKLEVTEKCMDHTSNLLSATKEDLKQAQYNLKEKDYIISEQKKAENALTHQACVLRSDLEKYTRDNTSLYSKIARGDKLSATNRSVVNTFQTDLASKLDTLSNTLNASIDQQNMHLKAVEDLCQSCVDSHDRATSELKKKILASKSLYMSHMEAFQNVVLLHKASANATLEDISSLSATSCCSLDQLLVCVEGEAQNIFNDIHKLLTTHRSEMTHFTQQLRESFQISLDRTKEMSTYIIGLFDKYVEETSKLQSHSNNTHEAQMKSIEDFQMVYEEQSKSEEQKLLADISSLVSKHITRQRELVGVRLSSLGDAARGNKAFLDEHTSAMEFVTKDAKRKWETFAEQAENDCKAGSSSSAVKHCRMETMLQECACTVDSAVQQWKKSHAAVNDLSRKQVAEVEALVRTAIENNEQHEVEVASSRAVAEEDTTNSSKDIAQGVENLLEKAQKSSSRVVSMVEAHFAELQKLQESHSTQATGINMHADKSFQTSYKDYEPTGETPVRSEPNVPSKGSIESLRAMPMETLMNEFRENHPYESESSKESKLSQIPRLPLATIN

SEQ ID NO: 62749 - protein, 647 aa, Zea mays
  Clone ID: LIB3357-012-A5_FLI.pep
DLRSLRLPIPYRVRSHPSSMAALSLRQRQLDLIVRMLHLNKPPPPPGTAAEQEEEVYKILVLDSFCLSLLSPLLRVADLRKHGVTLYFPIDKPRQQVADAPAVYFLRPTQANADRVAADAAASLYASFHLNFSSALPRPLLDRLAAATAASGSAHRVARLADQYLDFVSLEDNLFSLAHPRSYVALNDPKAADADIEALVDAIALGLFCAAATLGTVPVIRCPRGGPAEMVAAALDARLRHHLLAKPNLFTEASASASVASFQRPVLCLFDRNLDLSVGIQHDWSYRPLVHDVLGLKLNKLKMPADKSGPAKAYDLDDSDAFWVANSWSPFPRVAEEIESQLAKYKQDVDEVNQRTGGNKDGIEFDGTDLIGNTQHLMNAVNSLPELTERKKMIDKHTNIATALLGHIKERSLDGYCDCGNDMLTKGTVDRSTLLGLLRGKGTKADKLRLAVTYLLCFETPELEQVEAALRESEVDMSAFQYVKRIKSLNTQFSASSSSSATRSNIVDWAEKLYGQSISAVTAGVKNLLSSGRQLALTRTVEALMEGKPNPEVDNYLLFDPRAPRSGSGGQFKGPFREAIVFMIGGGNYIEYRSLMELAECSQPPSSKHVIYGATEIVNGVEFIEQLAELGQKAGLGLGGGNNPPLQ

SEQ ID NO: 62750 - protein, 338 aa, Zea mays
  Clone ID: LIB3357-018-H5_FLI.pep
AGISLPSRSFPGEAMDEAAVDDLIRRLLEARGGRTPRNAQVTDAEIRRLCAAAKDVFLSQPNLLELEAPIKICGDVHGQYSDLLRLFEYGGYPPDANYLFLGDYVDRGKQSIETICLLLAYKIKYPENFFLLRGNHECASINRIYGFFDECKRRFNVRIWKIFTECFNCLPVAALIDDKIFCMHGGLSPDLKSMDQIRNIPRPVDVPDVGLLCDLLWSDPDKEIDRWGENDRGVSYTFGADVVAEFLQKHDLDLICRAHQVVEDGYEFFAKRQLVTIFSAPNYCGEFDNAGALMSIDNSLVCSFQILKPSEKKGKAGNGNMPKPGTPPRKIKISVTHI

SEQ ID NO: 62751 - protein, 209 aa, Zea mays
  Clone ID: LIB3357-043-H11_FLI.pep
KKKELLGCSPLSGGDLDLTIIDLLLQVLGVLAVDGAADADAGAQDLLDGAGHLLGHGPGAHGPGDLDDVVEGDVAAVPDVLDLLPVPLGLLERLDDKGGGGGDDGDLGLPVLHRELHGDAQALPVPGGLLGDVLADLLRGEAERADLGRQRRRRADLAARHADEDLDHLRGVQLGRHGCCWPAVCRCGCGGWRGLGKVWSGGGGWRGLG

SEQ ID NO: 62752 - protein, 625 aa, Zea mays
  Clone ID: LIB3357-045-C4_FLI.pep
SLRFWLKKLLVSIGFPPMDKIQSDCPYPGCFFCVMKEANPSKRRASVLKYFRELPSQDDDGQVLPISGLWNTAMAHPNDPEFINLGIFECMASLIWKGLKNRRWLAHDQNIYIPYYAAHIIGSYTMNMEEFAERAVRAGVIPPLVELLRGRLTWVEQRVAVRALGHLATYPSTFPAVADHGEVLELAIQLASSSLEIVYSHFYQFVDRRLGYHCDLLTRGMGGVEMESRKAEEWASQLQCWSLQLINCFAFKPEFLHDICKPDFLVKLPGMWGGLVNENSPAGVGLLRTICQSKVGRGHVANIPATIDALCNIARSSDDWQYMAVDCLIWLMQDASTCHKVKDIVAPTLIDLSDISALGDYKKLGDTIVTVLQECMQQSGNSRGAIGVQTKAEIDELLRSKQSLKLEKSMPKEDLHIKQAAALVVKLEGNSLFSSGNIAGAAEKYSEALALCPMKSKKERVVLYSNRAQCYLLLQQPLAAISDATRALCLHSPVNRHAKSLWRRAQAYDMLGLAKESLLDAILFINECSQSNDPDLSLKQNKVPDYAERLVKKQMRSAWLFREAALKHGGVHCEGDASDAFGQDADDSEWETASESDAENDDTGEADDGTEWKNDGHREDICEKS

SEQ ID NO: 62753 - protein, 714 aa, Zea mays
  Clone ID: LIB3357-052-E10_FLI.pep
LLLQQQLRVPWWQMGCSNSKVDNEEPVRRSKDRRQLMKQLVRRRPELAAVHIAYLHALRNTGATLRQFVELESALSQQPPVDLVVPPSPTPQPPPPPPPELSVTSSLPPSPCPPPPVPFSPVTTIRKMEKRDGELPPPPPPLVLSPIRLRKMEDEFHGGDFTDDDDTDSCSTPLPPPLPPGIDWEDLDPYNVCPLSFPSPFADRNDKEVASHVTMDNDPEVDTEFYGEEDESMLGNNDVIVDRVHVNPAKGRALGDGNSSTVSWVTKDSDSMAVPWRSKKSLVEIVKEIDEYFLKAAASGNDVVIFLDSAGGRPDALEVEAKKGAGKNSKPAKVFSTLSWSWSFKSQQASREASVLNSSASGYGYHGKTLEKLYDEEQKLYKLIKDEEFARLQYKKHVSVLQKLESGGHDRLHAERLRDSIEELQTRIISLEEAVSLACFSISNLRDEELYPQIIELSAGLVHMWKNMHECHQVQNHIAQQVSLLGNRPGSEPTSDTHRQATSQLEIEVSGWHTAFCNLITSQREYVSILSQWIGLTDCLPDDGGLMRSSSGILSLSEELQRALDRLPEKVAAEAIKTFMSVIHSIVVQQSEERQLKKKSDNMDSKFQTQLEKHGENTMQNSAQPPNKNNYSASKNGTKLDAFRKQVEEEKARYLTSVRVSRAMTLNSLQTSLRNVFHALEGFSGVCVQAFEGISRCSEVAVIHSGAASPAISS

SEQ ID NO: 62754 - protein, 871 aa, Zea mays
  Clone ID: LIB3357-054-A6_FLI.pep
EKNTGTMVSKSYSNLLDLTSGDGFDFRQPFKSLPRVVTSPGIISDTDWDTISDGDSVGSASSTERKIIVANFLPLNCTRDETGVLSFSLDHDALLMQLKDSFSNETDVVYVGSLKVQVDPGEQDQVAQKLLREYRCIPTFLPSDLQQQFYHGFCKQQLWPLFHYMLPICLDKGELFDRSLFQAYVRANKLFADKVMEAINADDDFVWVHDYHLMLLPTFLRKRLHRIKIGFFLHSPFPSSEIYRTLPVRDEILKSLLNADLIGFQTFDYARHFLSCCSRLLGLHYESKRGYIGIEYFGRTVSLKILSVGVHIGRLESVLKLPATVSKVQEIEQRYKGKILMLGVDDMDIFKGISLKFLGLELLLDRNPKLREKVVLVQIINPARSTGKDVQEAITEAVSVAERINTNYGSSSYKPVVLIDHHIPFYEKIAFYAASDCCIVNAVRDGMNLVPYEYTVCRQGNEEIDKLRGLGKDTHHTSTLIVSEFVGCSPSLSGAFRVNPWSVDDVADALCRATDLTESEKRLRHEKHYRYVSTHDVAYWARSFAQDLERACKDHYSRRCWAIGFGLNFRVIALSPGFRKLSSEHFVSSYNKASRRAIFLDYDGTLVPQSSINKAPSEEVISVLNTLCNDPKNIVFIVSGRGRDSLDEWFSPCEKLGLAAEHGYFIRWSKEAAWESSYSRPQQEWKHIAEPVMQVYTETTDGSSIESKESALVWHYLDADHDFGSFQAKELQGHLERVLSNEPVVVKCGHYIVEVKPQGVSKGLAVNKLIHTLVKNGKAPDFLMCVGNDRSDEDMFESINSMTSNAVLSPTTPELFACSVGQKPSKAKYYVDDTSEVIRLLKNVTRIPSQRQDVSASHGRVTFRGVLDYVD

SEQ ID NO: 62755 - protein, 559 aa, Zea mays
  Clone ID: LIB3587-203-D2_FLI.pep
ANAVLQCLMCTKPLMIYLLLRLHSKDCNTIISNSCPHPLLEILMCTLYFFLFDLSYYFIGCSKNWCLMCELEQYASTLRESGGPLSPSRILSNLRNIGCRLGGGTQEDAHEFLRHLVMSMQAACLDGLGGEKHVEPSLQETTLIQQMFGGRLKSKVKCLRCYHESERYENIMDLTLEIHGWVESLQDALTQFTAPEDLDGDNMYKCGRCSAYVKARKQLSVHEVPNILTVVLKRFQSGKYGKINKCVTFPDMLDMVPFVTGSGDNPPLYFLYAVVVHVDTENASFSGHYISYVKDMQGTWLRIDDSEVQVVSVNQVMSEGAYMLFYLRSFPRPPRIYIEKGLPVTSAKRHTSKSSKGSKHDRKQTELLFPANDQAYGVYDFRPDGEGYAQDQHAELRSRAFHHADDAFADSVSADFSEATSSEWSLFTSSDESSFTTESTRDSFSVVDYGDNAGLDPISSIFGPSYAPEHGAPGSFVSRTRFSPSSPQTRYFSESTGFVSDSSMPAHPHGIVHRGRYPDSRACASSAEPLASAAHQRSGYGRYPLSRDGFVQTSGFCQM

SEQ ID NO: 62756 - protein, 474 aa, Zea mays; identical to SEQ ID NO: 60793
  Clone ID: LIB3587-219-F12_FLI.pep

SEQ ID NO: 62757 - protein, 249 aa, Zea mays
  Clone ID: LIB3591-068-D9_FLI.pep
DNLLSVLQLAMLLWSYFSVVLTDPGSVPPNWNLDFDAERGETAPLTSSEFSSQMNSQQSVALGNTANPRARYCRKCNQLKPPRCHHCSVCGRCVLKMDHHCVWVVNCVGALNYKYFLLFLFYTFLETTLVTLSLLPHFIAFFSDIEIPGSPAALATTFLTFVLNLAFSLSVFGFMIMHISLVSANTTTIEAYEKKTTPHWIYDLGRKRNFAQVFGNDRKYWFIPAYSEEDLRRIPALQGLDYPVSETRF

SEQ ID NO: 62758 - protein, 449 aa, Zea mays
  Clone ID: LIB3591-072-G2_FLI.pep
PPPLPSAPVPPYPTPPQERRGGGGGKAKGKMFGRAPKKSDNTKYYEILGVPKSASQDDLKKAYRKAAIKNHPDKGGDPEKFKELAQAYEVLSDPEKREIYDQYGEDALKEGMGGGGSHADPFDIFSSFFGPSFGGGGGSSRGRRQRRGEDVVHSLKVSLEDLYNGISKKLSLSRNVICSKCKGKGSKSGASMRCPGCQGSGMKVTIRQLGPSMIQQMQQPCNECKGTGESINEKDRCPGCKGEKVVQEKKVLEVHVEKGMQHSQKITFPGEADEAPDTVTGDIVFVLQQKDHSKFKRKGEDLFYEHTLSLTEALCGFQFVLTHLDNRQLLIKSNPGEVVKPDQFKAINDEGMPIYQRPFMKGKLYIHFTVEFPDSLAPEQCKALESVLPPKPSSKLTDMEIDECEETTMHDVNNIEEEMRRKQAHAAQEAYEEDDEMPGGAQRVQCAQQ

SEQ ID NO: 62759 - protein, 721 aa, Zea mays
  Clone ID: LIB3591-076-D2_FLI.pep
QPSVNSCTWRWAGFHGGSIKASSVLPLALPRGKSPSATFAMARNREVVILLLDVGPSMHGVLLEVKNVCLTLVHKKLVYNRSDEVGIVLFGTKGTCNELAKDIGGYKHVTVIHDIKVVDEGTAQALQNLPLGSAPGDFLDSIVVGLDMVIRKFGITKGKRRLCLITGAQELLRDPPEGTKEDQVDTIANMLKKHNIKMECIIFREPGVHHNDVMEENDRLLHQFRNRSVAKVVQVDNPTSLLGALKTRNVLPVTVFRGDLEVNSNFKIKVWVYKKTAEEKFPTLKKYSDKAPPNDKFASHEVKVDYEYKSVVEPDKVVPPDQRIKGYLYGPQVIPVSNAEWEAVKFKPEKGVKLLGFTDRSSVPRHQFMKDVCLFIPEPGNMKASLAVSAIARAMHQMNKVAIVRCVWRQGQGNVAIGVLTPNISSVNNIQDSFYFNVLPFAEDIREFQFRSFSSLPSSSQPTEEQQEAADNLVKMLDLAPPGREVLKPEFTPNPILERFYSYLDLKSKQPDANVPPLERSLRRITEPDPDVVGQQTQLIQNLSKAFVLKDNPKKKKARTQDMLAYTGAGDQAKSVEDRVLENTHPSTENVVAIRDSNPVQDFEAMLAKRSSSTWTQKAIGDMQNYIAALLQNSSDGGNYQKALECFASLRKACIIEQEPQEFNQFLTKIYERLKEGDAAKFFQLLSSKNISLINKEEAPDSDVTEEMARSFYLKREKASQ

SEQ ID NO: 62760 - protein, 960 aa, Zea mays
  Clone ID: LIB3591-081-E3_FLI.pep
CSSPALMVAPIPASALQPPAPGQYFGNRPSFSYNVVSHANARLPTGQQFQPVTGANLAGPISRFVPPGSLQPPTPGHITRPSTAFPGSMAPNPPGSIQLPFSVPRPSNIPFGAIAQQGSSDINNLKSDSPRAPEVTPQAMQLSTGMPSKSPSTIASASGSPSIPIQTLTNSSVPPRPEVFGATRPSVPAQPSATVSNPTGFLGRPIVPPAAPLPQTPPPIATQGGTPQNSQRPFYPSYPSGPGIVPPQPLWPHPHPPQPTGFQQPPFQYYPAGPVGSLGRPITGASAATMAFANVQPPGVSTGGDRKVQASTNAGSEQSTHAAAEPDSTGHGGQVTEQLEDNRNTGVQDSDAWSAHKTETGVVYYYNALTGESTYQKPTGYKGELEKVATEPVPVSWDKLAGTNWSIVTTSDGKKYYYDNKQKVSSWQLPPEVCEILKNAESGSLKEGSTSLQDAATIENKGVISIDASTPAIQTGGRDSLPLRQTVAPASPSPLDLIKKKLQDAGASSAPSALATSSATSELNGSKPADAALKGQLVANNGEKLKDNNGDVNISDSSSDSDDEEHGPSKEDCIRQFKVMLKERGVAPFSKWEKELPKIVFDPRFKAIPSHSTRRAIFDHYVRTRAEEERKEKRAALKAAVEAYKELLEEASEDINQKTDYQEFKRKWGADTRFEALDRKEREILFSEKVKAVQEKVQSMRKAVIANFKSMLRESKDITSTSRWAKVKENFRSDPRYKAMKHEERETIFNEYIVELKSAEQEAEQAAKAKVDEQAKLKERERETRKRKEREEQEMERVKMKIRRKEAVSSYQALLVEMIKDPKASWTESKPKLEKDPQGRARNPDLGQGDAEKLFRDHVKDLYERCVRDFRALLSEVITPEVAARTTAEGKTAINSWSEAKGHLRSDLRYNKLPSKDKESIWRRYADDLTRKLRQSDTKEKDKSDTDGKQPRSSDPPRRR

SEQ ID NO: 62761 - protein, 280 aa, Zea mays
  Clone ID: LIB3591-097-G1_FLI.pep
VLLCRGAFKIRGASNSIFALDDEQVSKGVVTHSSGNHAAAVALAAKLRGIPAHIVIPRNAPACKVENVKRYGGHIIWSDASIESREYVCKRVQEETGAVLIHPFNSKYTISGQGTVSLELLEQVPEIDTIIVPISGGGLISGVALAAKAINPSIRILAAEPKGADDSAQSKAAGKIITLPSTNTIADGLRAFLGDLTWPVVRDLVDDVIVVDDTAIVDAMKMCYEILKVAVEPSGAIGLAAALSDEFKQSSAWHESSKIGIIVSGGNVDLGTLWQSMYKH

SEQ ID NO: 62762 - protein, 322 aa, Zea mays
  Clone ID: LIB3355-011-B1_FLI.pep
GVRMASAQAVGQGERGHFVLKSGHTIPAVGLGTWRAGSDTAHSVRTAIAEAGYRHVDTAAQYGVEKEVGRGLKAAMEGGINRKDLFVTSKLWCTELAPDRVRPSLQKTLKDLQLDYLDLYLIHWPFRLKDGAHMPPEAGEVLEFDMEGVWREMEGLVKDGLVKDIGVCNYTVAKLNRLMRSANVPPAVCQMEMHPGWKNDRIFEACKKHGIHVTAYSPLGSSEKNLAHDPLVEKVANKLDKTPGQVLVRWALQRGTSVIPKSTRDERIKENIQVFGWEIPEDDFRALCGIKDEKRVLTGEELFVNKTHGPYKSATEVWDHED

SEQ ID NO: 62763 - protein, 244 aa, Zea mays
  Clone ID: LIB3354-001-B11_FLI.pep
PTQPSRPDAPPTVLPPPRPRRRTLPRVPQGRGSPEMDWSAVTAEDLVDALREVDWSMPPRPVPEFFSRFTVPRSYSKWTSRLKCNLYYYRTNYFILIMFILGMGFLWKPVAIVAAFMTGLSIAFLNDSFAVTFNEKVTRTVRQFSPHLAAKLRPPITPVLRGRPSSKRSIHICGRPRWVFVLFFSAVSCILWLTSCSLLTVLWALLIALFATVLHASFRTPNLKARLNTFREEFRAVWRNYSEL

SEQ ID NO: 62764 - protein, 279 aa, Zea mays
  Clone ID: LIB3354-036-B8_FLI.pep
RSLPSETPSTSAAAGAAATMAVGKNKRISKGKKGGKKKTVDPFSKKDWYDIKAPSVFSVRNIGKTLVSRTQGTRIASEGLKHRVFEVCLADLQGDEDQAYRKIRLRAEDVQGRNVLTNFWGMNFTTDKLRSLVKKWQTLIEAHVDVKTTDNYMLRLFCIGFTKRRPNQVKRTCYAQASQIRQIRRKMVEIMINQASTCDLKELVSKFIPEVIGKEIEKSTSSIFPLQNVFIRKVKILKAPKFDLGKLMEVHGDYKEDVGVKLERPVEGDEAGQEVAAAE

SEQ ID NO: 62765 - protein, 211 aa, Zea mays
  Clone ID: LIB3354-003-G12_FLI.pep
AVEMLLAVEGGGFFSSSATGYSHGLALLLLGRKAEEKPVKVSPWNQYRLVDRETEQVYHLPSAKDQAPGKCAPFVCFGCTANGLEVASPPKATSSNALGTGTSQEEASCSANKTLTTSGSISGSERRGCLKSNSKRDSLEHRIVVSEGEEPRESLEEVQTLRSSMERRKVQWTDTCGKDLFEIREFETSDESLSDDDPENEGFRKCECVIQ

SEQ ID NO: 62766 - protein, 120 aa, Zea mays
  Clone ID: LIB3354-004-C4_FLI.pep
PRSAHSAGAVLVPQSKGLLGIGNSFFIPKLCEDPEEEVYIAGYAVCHYRRERLDKCVHAKNSLQKPAVPLEGVAQLRVDLVLLEVVDGEVEVLALAPGHAHGGRLPGVAGDADLPLAAHP

SEQ ID NO: 62767 - protein, 237 aa, Zea mays
  Clone ID: LIB3354-006-A6_FLI.pep
FMQVRCIVRNIVRDWGDEGQKERDECYKPILEELNRLFPNRSDQRPPSCLVPGAGLGRLALDISSLGFVSQGNEFSYYMLICSNFILNHTQEANEWSIYPWIHSNCNSLSDNDQLRPVSFPDIHPSSAGITEGFSMCAGDFVEVYSEESQESAWDAVVTCFFLDTAHNIVEYIEIISKVLKDGGVWINLGPLLYHFADSYGPDDDMSIELSLEDVKKVAYHYGFTMEVRVSALNLFF

SEQ ID NO: 62768 - protein, 448 aa, Zea mays
  Clone ID: LIB3354-006-G1_FLI.pep
LSAYWTGFKSPEQISRVRNTGVKPEILKRVGQAITTLPENFKPHRAVKKIFELRAAMIESGQGIDWAVAEALAFATLIVEGNHVRLSGQDVERGTFSHRHAVLHDQETGAKYCPLDHVAMNQNEELFTVSNSSLSEFAVLGFELGYSMENPNSLVLWEAQFGDFANGAQVMFDQFLSSGEAKWLRQTGLVVLLPHGYDGQGPEHSSARLERFLQMSDDNPFVIPEMEPTLRKQIQECNWQVVNVTTPANYFHLLRRQIHREFRKPLIVTAPKNLLRHKDCKSNLSEFDDVEGHLGFDKQGTRFKRLIKDRNDHKQVEEGVNRLILCSGKVYYELDEERKKSERGDVAICRVEQLCPFPYDLIQRELKRYPNAEIVWCQEEPMNMGAYSYISPRLFTAMKALGRGSFEDIKYVGRAPSAATATGFLSVHAQEQSELVKKALQAEPIKFL

SEQ ID NO: 62769 - protein, 138 aa, Zea mays
  Clone ID: LIB3354-007-E5_FLI.pep
GCFLVQLEKYRNYDFGRCPRVYCCGQPCLPVGQSDIHRSSTVKIYCPKCEDIYYPRSKYQGSILTILLLYYLYACVSNFDLFVRTQTYGIFVPSLTQLPMFSCLSTHLPTALCWLIQKTIKHENSPLRPPITMFFQLP

SEQ ID NO: 62770 - protein, 176 aa, Zea mays
  Clone ID: LIB3354-015-B2_FLI.pep
ALPVSLQILLSSSRPSSSSSSSRDLGLLRPPWLAKLLQTLGATTESLRLRGPPPPPWRTCTKASSRRCRGTSPSSTATRTASSTPPRHTKGSELSGVASPCLLLLPSSSTVDLDPRPYWYQSLSHFDFCIEKKKSESSLEHACLPAWFGLVWFRRPASAVDGRRNRILKTSEDRMK

SEQ ID NO: 62771 - protein, 461 aa, Zea mays
  Clone ID: LIB3354-015-E9_FLI.pep
FRPLSLASSISPPTMGKEKSHINIVVIGHVDSGKSTTTGHLIYKLGGIDKRVIERFEKEAAEMNKRSFKYAWVLDKLKAERERGITIDIALWKFETTKYYCTVIDAPGHRDFIKNMITGTSQADCAVLIIDSTTGGFEAGISKDGQTREHALLAFTLGVKQMICCCNKMDATTPKYSKARYEEIVKEVSSYLKKVGYNPDKIAFVPISGFEGDNMIERSTNLDWYKGPTLLEALDQITEPKRPSDKPLRLPLQDVYKIGGIGTVPVGRVETGVIKPGMVVTFGPTGLTTEVKSVEMHHEALQEALPGDNVGFNVKNVAVKDLKRGFVASNSKDDPAKEAASFTSQVIIMNHPGQIGNGYAPVLDCHTSHIAVKFAELITKIDRRSGKELEKEPKFLKNGDAGMVKMIPTKPMVVETFSAYPPLGRFAVRDMRQTVAVGVIKSVEKKDPTGAKVTKAAAKKK

SEQ ID NO: 62772 - protein, 204 aa, Zea mays; identical to SEQ ID NO: 42261
  Clone ID: LIB3354-026-H10_FLI.pep

SEQ ID NO: 62773 - protein, 127 aa, Zea mays
  Clone ID: LIB3354-034-F2_FLI.pep
RETRIPRRRLRKRRRRRRRWLPPHTPHGPSGGSVPRYVRRCCFPSDRSFGFYRSENWVIGDGWMDLTGFADPGVARVHGSGVPAVRADGRGLGHLLVPACAQHHGQPRGAGDQEEILDMREDESEEA

SEQ ID NO: 62774 - protein, 204 aa, Zea mays
  Clone ID: LIB3354-057-E9_FLI.pep
FNMVLAWCSGRYQELATTYKLLYLVVDDGWMETTDQIKVIKQAHTHPGFLAELEVAPARLVDHDVGPALGVHGHGADGRREHHPPHRAGLRRRVDHVLGAAHRRLHHLLLHARTHAWRMRSLVTTLLTSQSTSAGTRPADGTHRVVGDGGGGVEDALAALHGAADGVVVQQIGLAEDQPLGGAVQRLEVRVLRVICCHEHVQTR

SEQ ID NO: 62775 - protein, 408 aa, Zea mays
  Clone ID: LIB3354-061-G12_FLI.pep
SELSPSSLIPSLPEAKAQSASAQSRTAMATAAAQSHPASMDARRWDESSYRRGILRARDLSSRTLFRAVFFDHSDDPDTDILLAAASSDGSLASFSLSSCISACSATSQVETAATLVDPVCIVQAHSGPAYDVRFYPDQQQPLLFSCGDDGRIKGWRWHEMQSCLVPLSLQGDHLEPALDLVNPQHEGPWGARSPVPENNAIAINKQDGSILAAAGDACAYCWDVETSKCKITFKGHADYLHSIAVRESNRQVVTGSEDGTARIWDCRSGKCTRVIQPGKSKAFESSWVSCVAIDPSESWLACGTSSGISVWSLLSNECIFNLDCHAPVQDLLFDKNHILAVGAEPLLSRLTINGTVLSQVKCAPQSAFSVSIHSTGIAAVAGYGGLVDVISEVGSHLCTFGSRGLDK

SEQ ID NO: 62776 - protein, 126 aa, Zea mays
  Clone ID: LIB3354-066-C4_FLI.pep
GAASNHGRSSERPPPPVYKFPSFSSSIYRGHQIQEEGRAPRTFGARSGSTSSRASSWLASSSSDHLQGSWCSLPLSPIKFSCLISTFRSQLPSIPSLRPMLGTLVQQQGQRTTFTCASSSVMVARA

SEQ ID NO: 62777 - protein, 141 aa, Zea mays
  Clone ID: LIB3354-066-F7_FLI.pep
SSLRREKNLIKPSHRSLDGYKHIVNVEYWTAVSSEGPHFPSKAARAKEAAQRSPNRENTEEYHQMMDEGWLEEGGRQLPFVILALLCSQQHTRQERVASQCWRWCYRARCGQHQAAGVTAMSSCQSIAVAFSNPFVQIICR

SEQ ID NO: 62778 - protein, 231 aa, Zea mays
  Clone ID: LIB3354-067-C8_FLI.pep
LGSNPKQGVDLSAAAMSKLQFESVKDAISQIVGDAKEKNRKFTETVELQIGLKNYDPQKDKRFSGSVKLPHIPRPKMKVCMLGDAQHVEEAEKMGLDYMDVEALKKMNKNKKLVKRLAKKYHAFLASEAIIKQIPRLLGPGLNKAGKFPTLVTHQESLESKVNETKATVKFQLKKVLCMGVAVGNLAMEEKQIQQNIQMSVNFLVSLLKKNWQNVRCLYVKSTMGKPYRVF

SEQ ID NO: 62779 - protein, 334 aa, Zea mays
  Clone ID: LIB3354-072-D6_FLI.pep
ATPGFRSVPHPASSNQSPPRLVASPPFPPPAPGRRPRLARRTQAAAETPGLRHPTPPRRPRSTCRRCPRAPHSLASSGAAAPRRRQLRAGRPFLGGSAGGWASRLIGLSGWVGSRKRPAAAMGCFHSTAKRQHPGYEDPVHLASQTAFSVSEVEALFELFKSISGSVIDDGLINKEEFQLALFKNQRKENLFANRIFDLFDVKKRGVIDFGDFVRALNVFHPNIPMEEKVDFSFKLYDMDGTGFIERKEVKQMLIALLGESEMRLSDEIIETILDKTFSDADANQDGKIDRTEWENFVTRNPSLMKIMTLPYLKDITTTFPSFVFNSEVDDLVT

SEQ ID NO: 62780 - protein, 228 aa, Zea mays
  Clone ID: LIB3354-077-E12_FLI.pep
RVTAVYNLPDTNRREPPLDLVELVCLHHRISLGNGVPGSSPVVELAVVLVGVAVERAVQVPTPAVESREPNPLPAGAAPVRPYLPPFGDRRHPLAGSGNISGLLHVHCLQLDLGNSYYRVAASNNRLHDGVAAVHDAVDRGGSQLGLILLRYHLLVALRAHVHGRRAAEEATVIDAEDGSLGGLAPSLLVLHGFLNSDETALFAIPLRRSPRGRRGGEGRGIAGNSVG

SEQ ID NO: 62781 - protein, 362 aa, Zea mays
  Clone ID: LIB3354-078-C9_FLI.pep
SQPRPTTAESEPPPPPHPRARLHGVKMSGRALKDLNVSQSADLENGKDNSVKSCITKPVLNGNKCANKEEKAPSACHDAVTNGNAAAIADVEYIDSENLVDLPDVDAALSTLAKRLDSKDWVMTCEALNNVRQLAMYHKERLQELLEPLVPLIVKSVKNPRSAVCKTALMTCADIFKAYGDLMVHSIDPLLVQLFLKASQDKRFVCEAAEAALISMTSWISPLLLLPRMLPYLKNKNPRIRAKASVCFSKSVPRLDVVGIKEYGMDKLIQIAATQLSDQLPESREAARNLALELQAFYEKSQASTSDEHEVEASASPDAESWEAFCQSKLSALSAQAILRVTSTTTKECVTSAPKEGLAVGC

SEQ ID NO: 62782 - protein, 104 aa, Zea mays
  Clone ID: LIB3354-091-H8_FLI.pep
HDDKLEVLPSYLRQDVEVSPQVSQAEMETEHPCQPLVASVTTVGQMLWFCSKESSQTCAPLSDGLVQILLPTTMLKCMLCLNLLVNESPQRHVCHLGAHPQIVW

SEQ ID NO: 62783 - protein, 378 aa, Zea mays; identical to SEQ ID NO: 36824
  Clone ID: LIB3354-097-E2_FLI.pep

SEQ ID NO: 62784 - protein, 822 aa, Zea mays
  Clone ID: LIB3354-098-A6_FLI.pep
FLRVARTHPTPKATTHTQREARDGEGEDASRSGRATSGAGGARTHATLPRSKTREIRLPSSPARARSGYVSMAAGEEQEEFFDSREVLSPASVSSSPSSSGRHDDGGWLFAQQLLEVWVRDPGSVHERRQRFVKSLGLMDPSPHGARPGEETCSRPEAREEILPASPSTELFSAVPTFASMGGEPTASGGDGAGTEEEPECVFKNLDDGTVFVVDEMGKDGSFRSLRERLSNRTVTAAEFEQAFGSSPFIRELMRRVDDSDEPSTPEKTVLRRRRRRRIGWLRRLGIGVCVVDADAEEEDDEVNSTSSTSSRGCSRKVDRVKVRPYKKRSKELSAVYKGQVIKAHEGAIVTMKFSSDGQLLATGGEDGVVRVWRVVEGKRPDDRHFVDDDPSCVFFTVNENSELAPINSCEGGKGKHNNSSKVATDPACVVIPHQTFALSEDPVHEFRGHHDAILDLSWSKNRELLSASKDKTVRLWKVGCDSCLKVFSHNNYVTCVQFKPTNDNYFISGCIDGMVRIWDVPRCLVVDWADSKEIITAVCYRPDGKGAVVGTITGNCHCYEASENHLALESQVPLYGRKKSPLKRIVGFQYCPSDPKKLMVTSGDSQVRILDGAHVVSSYKGLRSPSQVPAAFTPDGDHIIAASDDSSIYMWNYANQLAPVTSRVKTVWSYEHFFCNDVSVAIPWNALPARSSISLACNIPLSRQEVSEELHNSQESVSCCSAEGSPKADSSCRLPSGNFTLSNAFSAELAPRGKATWPEEQLPSSDSVTPSSSSALRKSQYKFLKTSCQSAATHAWGQVIVTAGWDGNIRSFQNYGLPMQV

SEQ ID NO: 62785 - protein, 299 aa, Zea mays
  Clone ID: LIB3354-103-C8_FLI.pep
RGRRPRTDWRRRGEASVGAGATMSAVVCGKRSSSIFGDELVPSPSSPPSPSHHHHPAKRARCSPSRWREGLLHHLLTLFPDMDPQLLEKALEASGDDLDSAIKRLNELRLESAGAILSATVCESEKDISSAHNLLAEGTTSNGHLDIATENPPAIDNSQTSHHSSEWVDLFVKEMMSSSDIDDARARASRALEVFEKSIMDRVGPEAVQNLHRENVMLKEQLAIILRENAVLKRGVAIQHERQKEFDVRTQEVDSLKQLVLQYQEQIKTLEINNYALRVHLKQAQQGNSMHGRFPPDVF

SEQ ID NO: 62786 - protein, 351 aa, Zea mays
  Clone ID: LIB3354-108-B3_FLI.pep
TIHSLRCAASGRPRSRRRISEEGEAAVRLHLGGHRRDEHGAVEIGGVPRHLQVVEVDAREPVVAAEVAEVLHLLLGQDDAGSGCCCWGWAHVVERRQGAQLRERVVVDLRLRRPRVGVGVRERRLRLHRLLLLLLLLLLLHLLPLVLLVVQAAQHPVIQPERAGAGLLGAGAAGFGEAVLVHDPLRLDPARRLAVVEHERLLDPRRPAPVLHGLVRARGLPVARPGGAVGAGAVGVLAVPRREEVPLAAPEEGALRQVPRVEAVQVDLGDDGHRRAAPRGARAEVVRHQLLVRRVEPEARGQVELRLRVAALLLHGRHRYHWTLSSLAVGWLVGSVVGWRRLAAAGGEGNG

SEQ ID NO: 62787 - protein, 179 aa, Zea mays
  Clone ID: LIB3355-008-B9_FLI.pep
KRTNSIKLQIALLHPSAATGAGREIRLRALAADAAGELDVFGHDGDALCVDGAEVGVLEQADEVGLGGFLEGQDGVALEPQIRLEVLSDLTDQALEGQLPDQQLRALLVLADLAQRHRPGPVPVGLLHAAGRRRRLPRRLGGELLARGLASGGLAGGLLRTSHLLLSLAARFLPCLDGT

SEQ ID NO: 62788 - protein, 152 aa, Zea mays
  Clone ID: LIB3355-008-C6_FLI.pep
RAKLSTSSSSEQAPQPNRLGALAADAARELDVLGHDGDALGVDGTEVGVLEEAHQVGLGGLLQRGDGGGLEAEVRLEVLRDLADQALERELADQQLRALLVLADLAQRDGARAEAVRLLHAARRRRRLARRLRRQLLPRRLAARRLARRLLR

SEQ ID NO: 62789 - protein, 161 aa, Zea mays
  Clone ID: LIB3355-008-E2_FLI.pep
SGACDRALGLALRRRAAALRLCCWDGNLLRAADRQLSVPRRRCGSAGCCSARGGWGRSSARLGRRDEGGRAARRRDRGSWPEPESDGRVAAGSVVLHECRRWELLGCFRDEDAAGGLLGLHQLLHQHPVQRREQPLRHRRPPLVSLLLAQQDKEEKSSTLP

SEQ ID NO: 62790 - protein, 367 aa, Zea mays
  Clone ID: LIB3355-012-E1_FLI.pep
TIALFLTISFIPLLLIERHETTEMQSKADGWMETTTERKGSLGSGGVSFHLWVVEVDADHGLPEPRADVGQDGGVAVVGDCLDDGAGAARGVAALEDARADEDAVASELHHERGVGGRGDTPRGELHDGEAAQLLGLHDEVVGRGDALGVGEDLVVVHAAERADVAHDGAHVAHGLDDVARAGLPLGADHGGALAHPAERLAEVAAAADEGDAEVVLVDVVRVVGGGQHLALVHVVDAQGLQDLGLHEVPDAGLGHDRDGDGALDVADEARVRHARHAALRADVGGDPLQRHHGARAGLLREARLLRGHHVHDDPAPEHLRQPHLDGESRRLGLLGRLQQLRAVAAVHRHHAAAVGRHGFGSLVPSL

SEQ ID NO: 62791 - protein, 301 aa, Zea mays
  Clone ID: LIB3355-032-B7_FLI.pep
RAAPSPPPHAPTLSPPPPRMACSHLAAAGGSSPAAAAVVRSPTHSPAAAFARLRSTPRFSSAGLSVKGSRAAFPWVAAAGPAAAAPVADLDGRPATEKQPIIVIDNYDSFTYNLCQYMGELGLNFEVYRNDELTIEDVKRKNPRGILISPGPGEPQDSGISLQTVLELGPTIPIFGVCMGLQCIGEAFGGKIIRAPSGVMHGKSSPVYYDEELGKALFNGLPNPFTAARYHSLVIEKETFPHDALEATAWTEDGLIMAARHKKYKHIQGVQFHPESIITPDGKKIILNFVRFIEELEKQRS

SEQ ID NO: 62792 - protein, 138 aa, Zea mays
  Clone ID: LIB3355-049-F2_FLI.pep
FVLLETNYMKRGKTTIFFQKPYPHRFFLSVLVMAWYFMPLFTARRFQTFSTQRALDSIRSLIFLKSVPASSASRCHLPWHPSHRSLFLLLIFFSYRACLAYLLRRSARKKSRAQPSGKSRARASLQPFLSLRTHGLLS

SEQ ID NO: 62793 - protein, 201 aa, Zea mays
  Clone ID: LIB3355-058-B2_FLI.pep
SKHSPENPKSHSPVTARFSSRISSRVYLLLLLRRRNYPNGSLRRGRRHRRPPRRRRGGAGPGRHPDHSSQGRAQDGPAAATPCAVPGHRPGAGRQAADRRGAVPAGLSSGPAHRGPRRLCAVREGPDLVRLHHPGRRPHRRAFRQRRRLARLRPRLRRRRRRGRSRRHVLDASPRRRAVLFILSCFTFVRVCVGGSWVILS

SEQ ID NO: 62794 - protein, 378 aa, Zea mays; identical to SEQ ID NO: 36824
  Clone ID: LIB3355-062-C8_FLI.pep

SEQ ID NO: 62795 - protein, 317 aa, Zea mays
  Clone ID: LIB3356-022-F9_FLI.pep
PTPSPLPPKSHASPKDPQTLHPPAGALGDRRIEQVDGGEEASKMFRNQYDTDVTTWSPQGRLFQVEYAMEAVKQGSACVGLRSSTHAVLAAVNKPASELSSYQRKVFRVADHAGVALAGLTADGRVLSRFLRNECINHSFVYEAPLPVSRLALKLADKAQVCTQRSWKRPYGVGLLVAGLDESGAHLYYNCPSGNYFEYQAFAIGSRSQAAKTFLERRFQGYNDYTPEQLIKDALSAIKETLQGEKLSSSNCTVAIVGRKEDGTIEPFEMIGAARIQELIDSMEVAEEAPAEEASSMQEEERGPEDAAAAAPAPMDI

SEQ ID NO: 62796 - protein, 245 aa, Zea mays
  Clone ID: LIB3356-052-A4_FLI.pep
AGAPNPGQSRRVTGRAHPGAAAAVKHKSFAAARRLCPLSFKTDCSPQLSVSSIQLIVLSSSLFSPPCKQQSFTDRSSASCMETAAVAAAGAGRRIMVAVDEGEESLHALNWCLANVVSPAGGDTLVLVHARRPRPVYAAMDSAGYMMTSDVLASVERHANAVSAAAVDKAKRVCADHPHVKVETMVESGDPRDVICDAANKMAADLLVMGSHGYGFIQRAFLGSVSNHCAQNCKCPVLIVKRPKE

SEQ ID NO: 62797 - protein, 522 aa, Zea mays
  Clone ID: LIB3356-054-C5_FLI.pep
RRLVSSRLACPQPLGFVPSGFSAAAERRGMAHRLLRDAQADGWERSDFPIICESCLGDNPYVRMLRAEYDKECKICARPFTVFRWRPGRDARYKKTEICQTCCKLKNVCQVCLLDLEYGLPVQVRDTALSINSNDAIPRSDVNREYFAEEHDRRARAGIDYDSSYGKARPNDTILKLQRTAPYYKRNRAHVCSFFVRGECTRGAECPYRHEMPETGELSQQNIKDRYYGVNDPVALKLLSKAGEMPSLTPPDDETIRTLYIGGLDSRITEQDLRDQFYAHGEIESIRMVLQRAIAFVTYTTREGAEKAAEELANKLVIKGVRLKLMWGKPQAPKPEEDESGRLGQVSHGGLLPRAVISQQQSGDQPQPPGMEGQQQQAAPASYYFNIPAPPATERTVYPSMDPQRMGAIVKPHDSEGKPGPQQAGQAQASSNPAQGGGYPAPPPYYHGQYPPYYPPPPPYGGYMPPPRMPYPPQYPPYQPMLAQPAQVQASSSRQPPHAGGGQQQPPDGPPAQQQPQQPIQN

SEQ ID NO: 62798 - protein, 228 aa, Zea mays
  Clone ID: LIB3356-054-D4_FLI.pep
LTHACSEERCRAQEMQRDAGSGDRTPGTPSPTHGGRLRHRKRSNEVPSDVNTTNGANLLLNDQNKYKSMLVRTYSSLWMMAGVVFLIYMGHLYIWAMVVVVQIFMAKELFNLLRKANEDRQLPGFRMLNWHFFFTAMLFTYGRFLSHQLVNTMTSDKLLYKLVSRLIKYQMFICYFLYIAGWHWTQGVQSDNDIWSISLLVDVFRNVGRRSSAIKPPQTGLCLVSFLE

SEQ ID NO: 62799 - protein, 322 aa, Zea mays; identical to SEQ ID NO: 62762
  Clone ID: LIB3354-126-C1_FLI.pep

SEQ ID NO: 62800 - protein, 428 aa, Zea mays
  Clone ID: LIB3332-038-E6_FLI.pep
SRRIPSHYHPSRRPPIRSGSSNPGAVMATKRSVGTLGEADLKGKKVFVRADLNVPLDDAQKITDDTRIRASVPTIKFLLEKGAKVILASHLGRPKGVTPKYSLKPLVPRLSELLGVEVVMANDCIGEEVEKLAAALPEGGVLLLENVRFYKEEEKNEPEFAKKLASVADLYVNDAFGTAHRAHASTEGVTKYLKPAVAGFLMQKELDYLVGAVANPKKPFAAIVGGSKVSTKIGVIESLLAKVDILILGGGMIYTFYKAQGYSVGKSLVEEDKLELATSLIEKAKAKGVSLLLPTDIVVADKFAADAESKIVPATAIPDDWMGLDVGPDATKTFDEALDTTKTVIWNGPMGVFEFQKFAAGTEAIAKKLAELTTTKGVTTIIGGGDSVAAVEKAGLADKMSHISTGGGASLELLEGKTLPGVLALDDA

SEQ ID NO: 62801 - protein, 133 aa, Zea mays
  Clone ID: LIB3279-008-B12_FLI.pep
LVFASSCTITRLLQSIVDTFKSRILYQHNLFPRFRTRAYRHFSFLHPKYRADKVDKRGVGFAIPRRRVDLHAHRLVPNLCDGGDLGAGLGVYRYGHGRRRHQAEAAREPYSSGTRRRGGRRRRRPFGLASLPR

SEQ ID NO: 62802 - protein, 423 aa, Zea mays
  Clone ID: LIB3279-183-H6_FLI.pep
PGVVSMAGAPRARSLNIAVPEAEARPVLVPGGNKARSGPANARKPSPKPVRKAEPAPAGTPEETVPAATKAEEGAKRNAVGGGGGGAPKGASPVPSPRRTPPGPPSRRNDAPLSHPGLPLSASCSSDASAESVRARRAFTGKVEKGRSVPTAQPKQGKAVGKAVESKPIRVEVVAPMTVTPEAVQGKRRCAWVTPTTDPCYVTFHDEEWGVPVHNDRRLFELLVLSGALAELTWPEILKKRQLFREIFMEFDPAAVSKINEKKLVAPGCVAHSLLSEQKLRAVLENARQILKITDEFGSFDRYCWGFLNHKPIVSKFRYPRQVPVKSPKADIISKDMMRRGFRGVGPTVIYSFMQAAGLTNDHLVSCFRFEHCSAVPTLCACDIDRANTKVDLKKDEVTAKIYREEVIANPEMLRTIDALTVS

SEQ ID NO: 62803 - protein, 338 aa, Zea mays; identical to SEQ ID NO: 57906
  Clone ID: LIB3279-187-C5_FLI.pep

SEQ ID NO: 62804 - protein, 185 aa, Zea mays
  Clone ID: LIB3279-191-E9_FLI.pep
SFSSELLDGNRKLLALVTSGNAKAHNTSALQPINGPMGGPQEVEALLEPMRELSRLISERKFDEAFTMALQRSDVSIVSWLCSQVDLRALCAMVPVPLNQGVLLALLQQLAIDIHNETSWKVQWMTDVAMAINPADQIIAVHVRPIFEQVYSQLAHQRTLPTTASDGTSIRVIMHVINSVLLSYK

SEQ ID NO: 62805 - protein, 267 aa, Zea mays
  Clone ID: LIB3279-194-G10_FLI.pep
SEAARAERESEGGADAESFLHPASAAVSDRMFLTRTEYDRGVNTFSPEGRLFQVEYAIEAIKLGSTAIGLKTKDGVVLAVEKRVTSPLLEPSSVEKIMEIDEHIGCAMSGLIADARTLVEHARVETQNHRFSYGEPMTVESSTQAICDLALRFGEGDEESMSRPFGVSLLIAGHDENGPSLYYTDPSGTFWQCNAKAIGSGSEGADSSLQEQYNKELTLQEAETIALSILKQVMEEKVTPNNVDIAKVAPKYHLYTPAEVEAVIARL

SEQ ID NO: 62806 - protein, 454 aa, Zea mays; identical to SEQ ID NO: 48078
  Clone ID: LIB3279-206-D10_FLI.pep

SEQ ID NO: 62807 - protein, 597 aa, Zea mays
  Clone ID: LIB3279-208-G7_FLI.pep
PISQYTMLTASPSSQVKPQQWGTCGVSVASTPALLPPPAAGRLVAVETRRRTRTVASAALGPVATEPAERSPVPQPPPLSSDEETVLRLGNYVPVFVMLPLEVVTTENDLEDAGKLREQLRRLRGAGVDGVMVDVWWGAVEGAGPALYEWRAYRDLFRVVQGEGLKLQAIMSFHACGGNVGDDAVSIPLPRWVREVGEADPDVFYTSSSGARNQEYLSIGVDDEPLFHGRTAIQLYADFMKSFRENMADFLDSGLIVDIEVGLGPAGELRYPSYPETQGWVFPGIGQFQCYDKYLEADFKAAAAEAGHPDWELPDDAGEINDTPEDTGFFTAERGTYLTEQGRFFLTWYSRKLIQHGDRVLDEANKAFLGCKVKLAAKVSGIHWWYRHPSHAAELTSGYYNLGGRDGYAPIARMLARHDGAVLNFTCAEMRNSEQAEEALSAPEQLVQQVLSAGWREGVEVACENALSRYDRRGYNQMLLNARPNGVGLSGAARRRVAAVTFLRLSDELLASNNFRIFRTFVRKMHADLDYCPDADRYGRPLKPLERSAPEMPMERLLEATAPAPAFPFDPETDMSVGGGLAEAVDWVLDKIAWLFG

SEQ ID NO: 62808 - protein, 334 aa, Zea mays
  Clone ID: LIB3279-224-A8_FLI.pep
VTAMAGDWQELGQAAAIGLLFAFLVAKLISTVIAFKEDNLRITRSPPTSPTAAAAAAPPVPSHDGSTDGGSGSDSDSDWEGVESTELDEEFSAASAFIAASAASGTSVPEEAQLRLYGLYKIATEGPCTAPQPSALKLKARAKWNAWHKLGAMPTEEAMQGYITIVQELFPNWDAGASAKRKDEDSIASASASKGPMGPVFSSLMYEEDEGNESELGDIHVSAREGATDDIVKLLAAGVEVNVRDTEGRSPLHWAVDRGHLSAVEVLANANADLNAKDNEGQTALHYAAVCEREDIAELLVKYHADLRIKDEDGNTAHDLCPSTSSWSFMNQAN

SEQ ID NO: 62809 - protein, 619 aa, Zea mays
  Clone ID: LIB3332-008-A3_FLI.pep
ERTTAVGVRGASERAAMKYVLVTGGVVSGLGKGVTASSIGVVLKACGLRVTTIKIDPYLNTDAGTMSPFEHGEVFVLDDGGEVDLDLGNYERFLDIKLTRDNNITTGKIFQAVINKERRGDYLGKTVQVVPHITDEIQDWIERVAVVPVDGKEGPPDVCVIELGGTIGDIESMPFIEALGQFSYRVGPGNFCLVHVSLVPVLNVVGEQKTKPTQHSVRGLRGLGLAPDVLACRSTEPLEEHVKAKLSQFCHVPVSNIVNLHDVTNIWHIPLLLRDQKAHEAILKVLDLQYDGKVPREPELTKWTKRATKFDKLKTPVKIAMVGKYTGLSDSYLSVIKALLHASVAMERKLVVEWVPSCDLEDSSAKETPEAHKKAWKLLKGADGVLVPGGFGDRGVQGKILAAKYARENNVPYLGICLGMQIAVIEFARSVMKLRGANSTEFDPATTSPCVIFMPEGSKTQMGATMRLGSRRTYFHVSGCKSAKLYGNASSVDERHRHRYEVNPDMVPDFEKAGLQFVGKDESGKRMGIVELPSHKFFIGAQFHPEFKSRPGKPSPLFLGLIAAASGQLEPLLQRSNPTTKACSISKVPKLKLYPTGPVNNPLNSLVNGYYPNGTGIHT

SEQ ID NO: 62810 - protein, 176 aa, Zea mays
  Clone ID: LIB3332-025-C10_FLI.pep
NPLLPPSRARPRSRARSVGHGAGVGGAGLRGGRGGDHAAAADAAGAGRPAPGHDLRGAERAEAHDVGGALLPLPAHGHLLEVRDAPHLRRRARLHPLRAPPPPEVHHEVAAERAPHRRRAAPLLDPLLRHPARRQARADAAARRQAQEARRLMDPHPSGGLVLPLPALCSCFMLWC

SEQ ID NO: 62811 - protein, 368 aa, Zea mays
  Clone ID: LIB3332-027-B10_FLI.pep
VVSGEGINRGRLFPCKCGEAASNPQPGNSVRQLLSLPQACLSTSIPSTLTVLCFGQLNELYILLQVQNLIERCLQLYMNKGEVVRTLSTRARIEPGFTTLVWQKLEEENSEFFRAYYIRLKLKRQIILFNHLLQHQYNLMKYPAPPNIPLAPIQNGIHHMPVSNLPMGYPVLQQPIMPAPGQPHMDPMACGLSSGHVVNGIPAPGGYHPMRMNSGNDMVLDNGAPEAPHAGATGSAMSSEMAVSPSSAASSNHAPFTPSDIPGMTMDVSALDSAFGCDVGNPESLQLGPDGSSRDSIRSLGQLWNFSLSDLTADLTSLGADLDVLENYTGTPFLPSDSDILLDSPDQDDIVEYFADAINGSPSDEEKP

SEQ ID NO: 62812 - protein, 544 aa, Zea mays
  Clone ID: LIB3332-031-D7_FLI.pep
AGLEHLPIRLPRPATRHDCVAGCCGAQLPPHAAGDAFCLPASARPSSLIPPPLCFRTKIWACLLPTKLFRQGRVPVSMGKKGKWFGAVKKVFSPESKEKKEERLRRKSAASNPTPVDLTPSTSLEVNLSVPPPPAPPPVLHQAEEVGVPEAEQEQSKHVAVEEAPAAAPAQASVLPPAVPTQELAAVKIQTAFRGYLARRALRALRGLVRLKSLVEGNSVKRQSASTLRCMQTLSRVQSQISSRRAKMSEENQALQRQLLLKQELENFRMGENWDDSTQSKEQIEASLISRQEAAIRRERALAYAFSHQWKSTSRSVNPMFVDPNNLQWGWSWLERWMAAKPWEGRNGADKESNIDRGSVKSMSLNLGEGEITKAFNRRDSKLEKPSPPTPRPARPTSRHSPLTPSARVAPIPARRKFVTPKNGLSQVDDDARSVLSVQSERPRRHSIATSTVRDDESLTSSPSLPSYMVPTESARAKSRLQGSATANGAETPEKGGSTGPAKKRLSFQGGTVSASPMRRHSGPPKVEIAPPQPEALVVNGGSK

SEQ ID NO: 62813 - protein, 514 aa, Zea mays
  Clone ID: LIB3332-032-D4_FLI.pep
LFSREFAHRLHLIGPREVRATSLVRAPEQSSLPDLHPSVIVRMKQMARKSMGGKAPRKQLATKGARKSETRTRGVKKAHQLRPGTAALCEIRQYKKSTGLLIRKLLFQRLVGHDATWFLLDIAFYSHNRFQEDSTSISGIPMSNTRSAEEKEVLATSPNRCLTNCFKLIQSCFSWDAVPYQQPWPPPHMQVEFGCGSADLCPIPWPFFTTIGTNEEIIDITSDDDKVDNVVDQLIDEQIAAVVFVPACMEATPNNVINTSKTVETFAAHQSPEYDSGLKDKDQRISFEDEISEGGQAEQSTPQQELWAMPPDTSDRETVERTTRSIEVEHFSQVESKHKMNSMSVEASEHVTITQIEKKPVQQVEITQELDSLPICSREHSNEALEGERTVQAGLEQECEVLGILSTITSDIFAIGLSPNQYTVYFYRNLMACMMLIRRRFLLSFGRSWDAVTYKQPWPPPVHVVILGDGFSVRLTPWQPLDTDIYSFPVNKPESSAGVFCIATESTQCAYDSQ

SEQ ID NO: 62814 - protein, 270 aa, Zea mays
  Clone ID: LIB3332-032-E10_FLI.pep
NSHWKWHLAFLLYILQQHCETLMTVALLCALIPVVMSRYAAMFPDKVFSFKVRERLSDFILAAFQRSPNIIAVLKKPITDRLGEAHDNLAKTELALHLCWAIGEHGAGGVGHKDVARELFENLELLLYENLATSRLGLSQEPGSDSMGASSRKSSQARLLCFVVTAIAKLATCHSELLPRARVSLGKVARSRTSDRRVWQRACDYLGLMNEPAICLSVLGPSTAQGNGPGIVNWSEGGTKMVAHVPFYLLAQQKGPPSHNFSFADLLPTE

SEQ ID NO: 62815 - protein, 552 aa, Zea mays
  Clone ID: LIB3332-034-F10_FLI.pep
PHTHNQISPKSTRRHLRFKMQIFVKTLTGKTITLEVESSDTIDNVKAKIQDKEGIPPDQQRLIFAGKQLEDGRTLADYNIQKESTLHLVLRLRGGMQIFVKTLTGKTITLEVESSDTIDNVKAKIQDKEGIPPDQQRLIFAGKQLEDGRTLADYNIQKESTLHLVLRLRGGMQIFVKTLTGKTITLEVESSDTIDNVKAKIQDKEGIPPDQQRLIFAGKQLEDGRTLADYNIQKESTLHLVLRLRGGMQIFVKTLTGKTITLEVESSDTIDNVKAKIQDKEGIPPDQQRLIFAGKQLEDGRTLADYNIQKESTLHLVLRLRGGMQIFVKTLTGKTITLEVESSDTIDNVKAKIQDKEGIPPDQQRLIFAGKQLEDGRTLADYNIQKESTLHLVLRLRGGMQIFVKTLTGKTITLEVESSDTIDNVKAKIQDKEGIPPDQQRLIFAGKQLEDGRTLADYNIQKESTLHLVLRLRGGMQIFVKTLTGKTITLEVESSDTIDNVKAKIQDKEGIPPDQQRLIFAGKQLEDGRTLADYNIQKESTLHLVLRLRGGQ

SEQ ID NO: 62816 - protein, 424 aa, Zea mays
  Clone ID: LIB3332-034-G4_FLI.pep
GAVSARSALPRRSCYDLLSLSQEQDGCRRQDDREGAGEAGAARPSYRWRRDAAVAGGEASVHSGSDQEGHPATLLRALGAQVLLVRGPRPGDRRGAPLLRAGHHTGAPKPAPLRRLAAVLDRAGVRVHRRVGHRARVRPPRLLGLLAPGRRGRPGAALVAHGALLLVEVQPPAPPLQHGVPGARRGVRAQEEGGAAVVHPVRVQQPGRPGGAHRGAAHPRVAAVPGDQRVGAAVPALRLPLRPLRPHLQRPGARPDLRLGRRRRGRGVRAVQAGGGVRGLVGGARVRRAAADRERVAGAHHLPAAHPPVAPPLRLERVGLAARRAGHHGPRLRHPQPRVPQHHGHARRAPPLLHHAALPRHGGHQGDQAHPRGLLPLRPDPCCQGDLARGQGVHLRRARGPQGRLLVQQEVLAAAARRAERTLP

SEQ ID NO: 62817 - protein, 482 aa, Zea mays; identical to SEQ ID NO: 56456
  Clone ID: LIB3332-038-E5_FLI.pep

SEQ ID NO: 62818 - protein, 584 aa, Zea mays
  Clone ID: LIB3332-039-E5_FLI.pep
LQKDSVRNLVMQTSKPRSGSSDAPQRTSPRTPRASRVAKTGGNETDSTGVTPTRTPTERSPKVTERRSPRSPITEKKRPSRLSELESKVSQLQDELKKAKEQLSSSEARRRHAQQEAEEAKTQEQAAAASKLEELQRQLDEFSAAEESRLQELRKISQERDRAWESELEAVQRQKSADAAALGSAMSEIQRLKQQLEASAESDAARAKQCEYVEAEIEGLKQEMEIRLATIEGLKVNVSESDRAAAEANATVNETKQQLETAKATIDSLVAEGVRMQECLRSKDMELNESKALVASLQEDMKKSHDTDNAKAKANTDVRSETEALQKVLVTTSAADANGSCGSYDPEIEQLRTALEVAEIRYQEQQTRMTIETGGLYETLESVRAECARELCELRLELKNKNDALMEAMAGAAADPHRPDAMQQPELEAKLMRSITDAAELKACLMDKENALQSLAEENEALKAGAGRAEAELRRKYEAAVAELELAKAAEQDVRMRLGLVTDEADRSSRRAARASEQLDAAQAAWRRWRRSCGACACSPTSGARPRRRLQPRSVGVGGRTATAARWRGPGRWGPSTAAPSAGS

SEQ ID NO: 62819 - protein, 700 aa, Zea mays
  Clone ID: LIB3332-041-F11_FLI.pep
RGCCCSVSPLAMSSAVKDQLQQMSTTCDSLLLELNVIWDEVGEPDMARDRMLLELEQECLDVYKRKVDQANRCRAQLRQAIAEAEAELAGICSAMGEPPIHVRQSNQKLQGLREVLNAIVPYLEEMRKKKVERWDQFVDVIEQIKKVASEIRPADFVPFRIPVDQSDLSLRKLEELTKELQSLQKEKSDRLKQVMEHLNTLHSLCEVLGVDFKQTVNEVHPSLGEADGSKNLSNCTIESLASAASRLRELKVQRMQKLQDLASSMLELWNLMDTPLEEQQMFQNVTCNIAASEHEITEPNTLSIDFLSYVESEVLRLEQLKASKMKDLVLKKKTELEEHRRRAHLIGEEGYAAEFSDEAIEAGAVDPSLVLEQIEAHIATVKEEAFSRKDILEKVERWLNACEEEAWLEDYNKDDNRYNAGRGAHLTLKRAEKARILVNKIPGLVDVLTTKIVAWEAERGKEFTYDGVRLMSMLEEYMIVRQEKELQKKRQRDQKKIQDQLKAEQEALYGSKPSPSKPQSTKKAPRHSMGGANRRLSLGGATMQAPKTDILHSKTARAAKKAEDLGALSPSSRGLDIAGLPIKKLSFNASTLREAETPRKPFAQIMPGNNVSPMPTRPISSATEEENKTPRTFVGGLNAKTPATVTAPMQMAMTPAVANKVIATPATLFQEKADSPALPADIEYSFEERRLAVYLARQVA

SEQ ID NO: 62820 - protein, 729 aa, Zea mays
  Clone ID: LIB3332-043-D2_FLI.pep
RPLVPVSVSKASHTSAPPPRATAPSPDSRGDHHRRLPFLLPPAPPPPIPARPTAIVRPRNGVTRRRSGKPTLAEVTSGSIVQPCGFCLAGIVMDPEKQNEMSLMDKRQLVYEVARWPQGAVEILKCWTRRELLELICVELGKERKYTNVPKAKMIAYLLKLVSRKSGKNGQLKDDNANVMLLEQDNKDETQMKESEEQEQSRPLKTANSDSSIRREAHACCSVVCSNVACQATRNAGDNYCKRCSCCICNKYDDNKDPSLWLVCSSDNPYSGCSCGVSCHLNCALKNKKAGIVNNGCNKLDCSFYCVSCGKINWLMRSLQKQLAIAREARRVDVLCERLSLSHKMVKGSERYKEITSIISSAAKTLEKEVGGALDQVSAITGRGIVNRLTCGAEVQKLCSSALEIVDSTVDSILEFESNNSPKLLGPQPQILFDEITPFSVVIVLNYQDSIGKEQVDGSKVWHRSAKVCNYSSEPTCHILRPNTRSLVSGLSPSTEYFFKVLPFSSVQGFTEWEAKCSTRSLDHGSSQCSTQNSESMCLKVDPMQHQKKDLNVQNHQRTIQYDSPKGSTNSSENNLLCDRYSKRAKVARLDGASDNDESQLPPTSEVLPFASSNYSPSEAPSKPDLLIGTPDSASKNYVEQQYEYCVKVVRWLEHEGHMDNDFRVKFLTWFSLKATAQDRRIVGALVDVLIGDPASLVAQLVDAFKDIIYTKEKPFQTQQKDARCKIWH

SEQ ID NO: 62821 - protein, 646 aa, Zea mays
  Clone ID: LIB3332-045-G11_FLI.pep
PSYDRPAGPAPPPAMDDVSKYAHSPAHLAVLRRDHAALRRLVAALPRLPRAGEVATEEESVAGEAVADAVSAVIDRRDVPRRETPLHLAVRLRDPVAADILMSAGADWSLQNADGWSALQEAVCTREEAIATIIARHYQPLAWAKWCRRLPRILASISRIRDFYMEISFHFESSVIPFIGRIAPSDTYRIWKRGAALRTDMTLAGFDGFRIQRSDQTFLFLGDGARPEDAGGKELHSGSLIVLAHKDKEITDALEGAGVQPTESEVAHEVALMSKTNMYRPGIDVTQAELVPHLNWRRQERTEAVGQWKAKVYDMLNVLVTVKSRRVPGAMTDEELFAMDGEEKNGRGAELDAELDEVLTAEERKQLDSALRMGNNEEESEERGDEGDAGADHTDASGVTKDKKGWFGWGAKKGAKGDDKPSKVGSKDETSDPGKQKEKGSGKKKKGGSSAESVKHESEYKKGLRPVLWLTPDFPLKTDELIPLLDVLANKVKAIRRLRELLTTKLPTGTFPVKIAIPIVPTIRVIITFTKFEELQPLDEFATPPSSPTQFQDAKAKEPEGSGSWYSWVKGGRGTQSGDSGDGRNWKDEVDPFHIPSDYTWVDATEKKRRMKAKKAKSRRTTARKQSSKNTSSEGGHRPMMDGFEE

SEQ ID NO: 62822 - protein, 554 aa, Zea mays
  Clone ID: LIB3353-002-E9_FLI.pep
TERLLQYSCDLRGVLVGVGARVRSISLHRSSGQKAESCLSNSKGELPFLSSGVAFGRGREKEGEASSVPAAAPSAFGSLQDRASAIIDRCHHHQASMALADGEADYSSWDSDDEYQKFIQNMNPPRVTIDNTSCPNATVIHVDSANKYGILLEVVQVLTDLKLIVKKAYISSDGGWFMDVFTVTNQSGHKITDESVLQGIKDYIYKSIGPDSCFLPSRRRAVGVEPSSDHTLIELTGTDRPGLLSEVSAVLTSLECNVVSAELWTHNGRAAAVMQVTDRESGLAVSDAERVGRIKGRLYNVFRGRSRDAKTAVATTGATHPERRLHQMMFEDRDYERRGKDDGRAAASGSNPGPVVSVVNWLQKYYSVVTVRCRDRPKLLFDTVCTLTDMQYVVFHGSVDTEGPEAYQDYYIRHIDGCPVNSEAERKRIIQCLEAAIERRVSEGLKLELSTGDRVGLLSDVTRIFRENGLTVTRAEVSTRGDEAVNTFYVRDAAGSAVELRTLEAIRQEIGQTVLQVKGHPEQPKPPVAAQDSPTRFLFSSLLFRPRSLCNLGP

SEQ ID NO: 62823 - protein, 372 aa, Zea mays
  Clone ID: LIB3353-008-G8_FLI.pep
FTMCNTVSGLNKINTSLLLQAAGWPCMNHDRCNASGSFTTRMHLAFHSKQLAAAAAAAGMLMHHVLVELEAGEHVVVDGVGEVVEQVLERADAGDEPLDEVTEDGEHGEPAVLDLLELELIHLLLGLAEAERVEEGPAGVGRVAGAGEELLEAEEVLLAHGARVVPVLEAAVLGEAHERHVEDEERVGVGPVVVGARGRDDARLEPRQRGLRGDDAHLAEDLRGDGAHRAQHGVAAVDHLAIGQPLGLDEAPGALRVREAQRVEAIVAGQRAIEVGEGLLGREPQLPVGTLLGWRAGAGPDDEGRLPRRRPRDGRLHGAAQQLPAGEESLGRHRSGTGASSNLSFRQRTCLRSRSCRWLAALSAVWEERGAE

SEQ ID NO: 62824 - protein, 273 aa, Zea mays
  Clone ID: LIB3353-009-C5_FLI.pep
QLVAADHALIVQIAVSSLLIQFAPASRSICCHGRLRQRDRRHGHGGSAQIQLSLRVAAVERVVVVLAATASSSSYSSCRRPGGGGQRGADRRPEPVRGVQDPPAPLRRRLRAGSLLPADGARQVHHSAPRLRRQQHHQAPPGLAGELARGRGEQHGVRGGGAAAGPGVRVRGGGVPAAEAGQRAQGAAGARAGRPAQRAGAARRPASPLLRRDGQPPRQPAAAAAAVAADDDGGRRWRKRVRRRGVRADVLRLGRPGLGHVAGSRSPALDLAS

SEQ ID NO: 62825 - protein, 134 aa, Zea mays
  Clone ID: LIB3354-118-C12_FLI.pep
FNFVGRILGPRGNSLKRVEASTGCRVFIRGKGSIKDTEKEEKLKGKPGYEHLNEPLHILIEAELPANIVDTRLRQAQEVMEELLKPVDESQDFYKRQQLRELAMLNSTLREDSPHPGSVSPFSNGSMKRAKPSQ

SEQ ID NO: 62826 - protein, 187 aa, Zea mays; identical to SEQ ID NO: 47521
  Clone ID: LIB3354-123-A12_FLI.pep

SEQ ID NO: 62827 - protein, 459 aa, Zea mays
  Clone ID: JC-ZMSHLIB3569P056A04_FLI.pep
PLSLASSISPPTMGKEKSHINIVVIGHVDSGKSTTTGHLIYKLGGIDKRVIERFEKEAAEMNKRSFKYAWVLDKLKAERERGITIDIALWKFETTKYYCTVIDAPGHRDFIKNMITGTSQADCAVLIIDSTTGGFEAGISKDGQTREHALLAFTLGVKQMICCCNKMDATTPKYSKARYDEIVKEVSSYLKKVGYNPDKIAFVPISGFEGDNMIERSTNLDWYKGPTLLEALDQITEPKRPLDKPLRLPLQDVYKIGGIGTVPVGRVETGVIKPGMVVTFGPTGLTTEVKSVEMHHEALQEALPGDNVGFNVKNVAVKDLKRGFVASNSKDDPAKEAASFTSQVIIMNHPGQIGNGYAPVLDCHTSHIAVKFAELITKIDRRSGKELEKEPKFLKNGDAGMVKMIPTKPMVVETFSAYPPLGRFAVRDMRQTVAVGVIKSVEKKDPTGAKVTKAAAKKK

SEQ ID NO: 62828 - protein, 519 aa, Zea mays
  Clone ID: JC-ZMSHLIB3587P008D10_FLI.pep
GLTKPNAVEPPQVTFSAKDIEFSEWKGDILAVAVTEKDLSKDADSKFENAVLKKLDGQLGGLLSEAAAEEDFTGKTGQSVVLRLAGQGFKRVGLIGLGQSAPSTAAASRGLGESVASVAKAAQASSAAIVLASPSGIQEEFKLTAAAAVASGTVLGLYEDSRYKSESKKVHLKQVDIIGLGSGAEVDQKLKYANDLSSGVIFGRELVNSPANVLTPAVLAEEASKIASTYSDVFTATVLDVEKCKELKMGSYLGVAAASANPPHFIHLCYKPTDGNVKRKLAIVGKGLTFDSGGYNIKTGPGCSIELMKFDMGGSAAVFGAAKALGQIKPPGVEVHFIVAACENMISGTGMRPGDIVTASNGKTIEVNNTDAEGRLTLADALVYACNQGVEKIIDLATLTGACVVALGPSIAGIFTPSDELAKEVAAASEVSGEKFWRLPLEESYWESMKSGVADMVNTGGRQGGSITAALFLKQFVDDKVQWMHIDMAGPVWSDKKRAATGFGVSTLVEWVLNNSSSS

SEQ ID NO: 62829 - protein, 468 aa, Zea mays
  Clone ID: LIB143-040-E3_FLI.pep
KKGENAIFTIPPGLAYGEMGSPPTIPPNATLQFHVELLSWASVKDICKDGGIFKKIIVEGEKWENPKDLDEVFVKYEVRLEDGTVVSKSDGVEFAVRDGYFCPALSKAVKTMKKGEKVLLNVKPQYGFREEGKPASGDEAAVRPNAVLHIDLELVSWKTVMLIGDHKRILKKVLKEGEGYEGPNDGAVVKVRFIGKLEDGTVFVKKGHDGEEPFEFKTDEEQVIEGLDITVVNMKKGEVALARVPPEQAFGSVETNQDLATVPPNSTVLYEVELVSFEKEKESWDLKTNIEKIEAAAKKKDEGNVWFKMGKYAKASKRYEKAAKYIEYDSSFNEDEKKQSKALKVSSKLNNAACKLKMKEYREAEKLCTKVLELESTNVKALYRRAQAYIELVDLELAELDVKKALEIDPDNRDVKLVYKTLKERMREYNRRDAMFYGNMFAKWRKLEQLQKVPGKQEPQPMAIDSAA

SEQ ID NO: 62830 - protein, 682 aa, Zea mays
  Clone ID: LIB3060-074-A5_FLI.pep
VICFLFAGDCKVTCLHSLSVGLKPMVSLSLAVLPGQGGYLILAMGGLDHKIHIYCGDKAGKFIKACELKGHSDWIRSLDFSLPVMMDGERHNLFLVSSSQDRTIRIWKMTSEAAASGSSLQLRKETIEMTSYIEGPLFVAGSTSYQVSLESLLVGHEDWVYSVEWQPPTLLTGDEAHQPMSILSASMDKMMMIWRPEKTTGLWIDSVTVGELSHSALGFYGGLWQPDGRSILAHGYGGSFHMWRDVGLDSENWQPQIVPSGHFAPVSDLTWARSGQYLLSVSHDQTTRIFAPWRNQVNPGDMICWREIARPQIHGHDLNCVTFIQGSGNHRFVSGADEKVSRVFEAPLSFLKTLQQATLLKPDISEDFDNVQVLGANMSALGLSQKPIYTHGVKESSISNSNDGPDSMETIPDAVPTVFTEPPVEDQLAWNTLWPESHKLYGHGNELFSICCDYEGKLVASSCKAQSAAVAEIWLWEVGTWKAVARLQSHSLTVTQMEFSRNNAFLLSVSRDRHLSIFSIRKTEGGAEHRLVAKLEAHKRIIWACSWNPFGYEFATGSRDKSVKIWCVEDASSVKLLATLPQFRDSVTALAWMGRDRASNAGIVAAGMDNGLIELWSVSGGRASSGTQLSVACVLRFDPLLCHVSTVHRLRWRCSTDEKSTLELASCGADHTVRVFEVCGSI

SEQ ID NO: 62831 - protein, 323 aa, Zea mays
  Clone ID: LIB3060-087-D11_FLI.pep
AWRSRTRCLRDCRDYNGRICSMDFHSKATNYLVTASDDESIRLYDTQDAVCLNTINSKKYGVGLVCFTDNPSIVLYSSNNGWDESLRLLSMNDNRFIRYYKGHLDRVVCIALCSGKENFLSCSLDRTILLWDHRAEKPQGLLRAQRRPTVSYDAQGMVFAVAYGGRIKMFDIRKFGMGPFATFSVGTDDSEAHVVQFSGDGRRILLTTKAGRVHVLDSFEGNSIASFRAKPILTNSTLEASFCPEGNHIVSGSGDGSVYAWNVESGKVACWESTDVKPPRVRWSPGSLMFVTGTSELSCWVPDLSKLESFTISHTNTRSSSSL

SEQ ID NO: 62832 - protein, 473 aa, Zea mays
  Clone ID: LIB3060-099-E3_FLI.pep
ESGHSQSQGGSALLSQTAPQRLALGWQPPRPVGPAPAAYIRLQPEDLPPATALPALVASVVLHTSTRTCPQTTAAAMSISEELPGEGSDGEEEVFINEEDIIHEITIDEEDLPDRDDEDDDVVNGMVDSEDIDDSTYAFQGHQDEVFIVACSPTDSSLVASGGKDDRGFLWRIGSEEGALELTGHKDTVGTVAFSSDGNLLACGSFDGQINVWNTATRTLKGTLEGSGSGFEWLKWHSRGHLIIAGSEDCNVWMWNADHNAILNTFAGHSNTVTCGDFTPDGKLICTGSDDASLRIWDPRSAQSRHVVRGHGYHSDGLTCLSMTSDSQTVVSGSKDSSVHIVNLNSGQVVGSLAGHTNSIECLGISSSYGWVATGSMDQKLIIWDLTHQSSRCICEHDEGVTSLTWLGSSRYVASGCIDGKVRIWDSLSGACAREFSGHADVVQSLAITADGNTMVSASSDGSARVFDISMFK

SEQ ID NO: 62833 - protein, 458 aa, Zea mays
  Clone ID: LIB3279-206-F12_FLI.pep
ARRRHPHPDRHHHLLAPPPSAVAAMEDDPSRQVRVRFVTKLPPPLRTPPAAIAVPADLTRMGLSEIVNSLLAAAEPDHQSQPFDFIVQGELVRLPLQEFLLAKGISAERVLELEYVRAVAPRKQEEPCPHEDWVSAVDGSNPGFILSGCYDGLARLWKDAAVCTQILEGHNDAITSTRFINKGSETEGSLHVVTGSKDRSLRLYKCDTSVIMDYPKRVGAYKILRGHTASVKSISADPSGDMLCSGSWDGTIKLWAVEGSDDDDAVSLKKRRMNSDSSGPEESQLEGSATSTLLGHTQGVTAVTWPERKTIYSASWDHSVRQWDVQTVKETWNMFCGKALNCLDCGGEGSSLIAAGGSDPVLRVWDPRKPGTLAPVFQFSSHSSWITACKWHPSSCFHLVSSSFDGKVMLWDLRTAWPLASVDSHEDKVLCADWWKGDSVISGGADSKLCISSGIQIV

SEQ ID NO: 62834 - protein, 229 aa, Zea mays
  Clone ID: LIB3279-225-F2_FLI.pep
HSAVHRRPGSPSLLLASTSQPSPERARGGGDTRLLTIVGDSASSHSMPSAVAEPLPDGKYETDRAGAVTVVGAGADHSIDGAVNGSKDESFFEARPWLDSDSEDDFYSVRGDFTPSRGSTPVHPRLTPSSGRMLADRSGPSLVKKKQRLLELLQEEQHYDDEDDSVTDASNDLESSAVHAIEEEEEHTRTRRRSEKSKKSSGSGCLPTFIWKRSFTACRKKKKEKGAEG

SEQ ID NO: 62835 - protein, 336 aa, Zea mays
  Clone ID: LIB3279-230-F3_FLI.pep
HLRVHLRTALTRLPTMSSLNSLFNRSTFGTKCKTCLNLVISRIKLLRNRRELQLINMRKEMVQYLQTGQESIARIRVEHIIREQNILAAYEIVELFCEFVLARVPIVEVQKECPLELREAIASIIFASGRCSDLPELMHLRNLFTTKYGKEFVAGAMELRPDSSVNRTIIEKLSVKAPSGDSKLKVLKAIAQEYNIEWDSSNTEAEFNKKYEDLLDGSGSSVHQIQTPIIEGSVSSPVVSAPRDKTPALNSPVIDAEKHQVRESPTSPAGGARAGVVTKGNVVTMGHHSPAEEMPSTSPSSSDALEKARAAIAAATRASAAARAAAELAKVKITNQ

SEQ ID NO: 62836 - protein, 940 aa, Zea mays
  Clone ID: LIB3279-232-B3_FLI.pep
SGCGGLSLAWSSTARRRTVNRRPATMFVKKLVERASKKQHIGSISSLRPENVSPRLAFHYGVPADAALLAYDPVLHVLAVATRNGQIKLFGRDNTQALLQSPSPLPSRFLQFAEGQGVLLNVNTQNQIEVWDIDAKKLCYLHPAEKAITAFSVLQKSFYIYVGDSSGSVSPLKLDLAQRCLADLPYWIPFTESYGSTTSAGNDVEVVFVSPQPLSESNRVLIIFRDGVMSLWDIKASKAVSISGKTTQQQSQKEAKNVTSACWVCAKGSKIAIGYDNGDLYIWAIPEVTSTQNSSSMGGQNLPIQRLNLGYKLDKLPIVSLQWIPSDGKAGRLYINGFNDHGHLFQVLILNEESESRIVKMVLPIAESCQGMELVTGLSDPNKHRQSALALLLKSGHICLYDDSEIERYLLHSQSRSPPTLPNCSYVKLPYGDSGISVAKFYTSNPAALASLDEDYFSSATKYPCLFSMKGKGQTLTSFTNIHKTRNLYITGHLDGTISFWDASCPHLLQIFMIKQQNKDDTSTGNPITSLQFDMSSSILLSGERSGMVHIITFKKDSSDNIFSFLNAKQGDNYDVRSIKLKGAVTTMSSISKSKHFAVGTEKGIVSVINVEDATILYQEQFECRLPGGIASLQFEIYSHNGYDKDILIIAMEDSSIFVIEEETGKLLNPNPVQTDKPSKAILLQMLELSPNDTPAVSDNQDTVSKESLLLLCTENAIRLFSLGHAIQGTKKIINKKKLSSCCCFASLIHSSSNDIGLILVFSNGKLEIRSLPDLSLLKDAFLRGFVYSRNLNSSSSITCSSDGEAILINGEETYFFSTLCQDEIYRHVDSISTVYRKENSTREDSSFVVKSPKEKKKGLFGMIMKDNKGSKSKESDAIGSEQCIATTSEELASIFSSTNFAPPSEGRNSSLRDDENAELDIGTCYYFCYYLCSSIYLCL

SEQ ID NO: 62837 - protein, 1164 aa, Zea mays
  Clone ID: LIB3689-222-D11_FLI.pep
DSRPPERPSHQDRALRTRGRQTSSGARGSTTGRLTAAAAMSSLSRELVFLILQFLDEEKFKETVHKLEQESGFFFNMKYFEEKVHAGEWDEVERYLSGFTKVDDNRYSMKIFFEIRKQKYLEALDRHDRAKAVDILVKDLKVFSTFNEELYKEITQLLTLENFRENEQLSKYGDTKSARSIMLVELKKLIEANPLFREKLVFPTLKASRLRTLINQSLNWQHQLCKNPRPNPDIKTLFTDHTCSPPNGARASPVSVPLAAVPKAGAAYPPLTAHTPFQPPPGPSLAGWMANAAASSSVQSAVVAAASIPVPPNQAVSMLKRPALTDYQSAESEQLMKRLRPGGHGIDEATYPAPTPQPAWSVDDLPRTVACSLSHGSNVTSMDFHPTRHTLLLVGSANGEFTLYEIGLRETLLSKPFKIRDINACSPQFQNAVVKDSSISINQVTWSPDGEMIGVAFTKHLIHLHGYQPPNETRHLLEIEAHSGGVNDIAFSRPNKQLCVVTCGDDKLIKVWDMHGHKLFTFEGHEAPVYSICPHHKESIQFIFSTSLDGKIKAWLYDNMGSRVDYDAPGKWCTTMLYSADGTRLFSCGTSKEGDSYLVEWNESEGSIKRTYSGFRKRSAGVAGVVQFDTAQNHILAAGEDNHIKFWDVDNNNMLICTDAEGGLPALPRLRFNKEGNLLAVTTADNGFKILANADGLRTLRALGSRPPFEAFRPQYEASSMKVSGAPVVASISPNIGRMDHLDRNSPAKPSPILNGGDTASRSIDIKPRISEEKPDKAKPWELMEVLNPQQCHVATMPETPDQARKVVRLLYTNSGVGLLALGSNAIQRLWKWSRNEQNPSGKATASVVPHHWQPNSGLVMTNDTADTNPEEAVPCIALSKNDSYVMSACGGKVSLFNMMTFKVMTTFMPPPPASTFLAFHPQDNNIIAIGMEDSTIHIYNVRVDEVKTRLKGHQRRITGLAFSTNLGILVSSGADAQLCVWTNDTWEKKRTVSIQMPAGKTPSGDTRVQFSSDQSHLLVVHETQLAIYDASKMERIYQWIPQDTLSASISHASYSCNSQLVFAAFTDGNLGVFDAENLRLRCRIAPSVINSNPPVHPLVVAAHPHEPNQFAVGLSDGSVKVLEPLESEGKWGAPAPADNGIIPNGKTPASSATSNPAADQIQR

SEQ ID NO: 62838 - protein, 511 aa, Zea mays
  Clone ID: LIB3732-012-D2_FLI.pep
RTSAASSPLPRTRTRSSGCYSAEVGRLVFLMGRTIKKAKKAQSKKSKKKTESSSSSNPAIASGPAKVWQPGVDTLEDGEELQFDPQAYNYLRGFGIGWSCLSFDVVRDQLGLVRSEFPHTFYGVAGTQAEKASWNYIGVFKLSNISGKKREPIPASAVEADTDVDSDSSSDEEDEEINEDTKPILHLKKVAHAGCVNRIRSMTQKPHISATWGDTGHVQVWDLSSFLNSLAESGTAAPKEDDIIHKHLPLKVFSGHKDEGYAIDWSPLVTGRLVSGDCNKCIHLWEPTSNNWNVDANPFVGHSASVEDLQWSPTEADIFASCSVDGTISIWDIRTGKKPCISVKAHEADVNVISWNKLASCMIASGCDDGSFSVRDLRSIEEDSLVAHFEYHKKAITSIEWSPHEASSLAVTSEDHQLTIWDLSLERDAEEEAEFRAKMKEQANAPEDLPPQLLFAHQGQRDLKELHWHPQIPSMIISTAIDGFNVLMPSNIDTTIPGSTDAAMPSAEPQH

SEQ ID NO: 62839 - protein, 371 aa, Zea mays
  Clone ID: LIB4074-022-C11_FLI.pep
RRGGGGGMADAARGLGSSSLPVANVQALAESCNDNGADAPVPGRYLIKDPSAEEVVAAGDSACTIPVIDFRKLLDPGSSEEECARLGAACHHWGFFQLINHGVPAEVTGNLMKDVAGFFRQPLEAKKECAQQAGSIEGYGQAFVVSEDQKLDWADMLFLIVRPREARDMRFWPTRPESFRDSVDAYSLEASKLAYRLLEFMARGVGADPASLQSMFQGQVQGMRVNYYPPCQQAADQVLGLSPHSDPNGLTLLLQMSHDVHGLQVSKDGRWFPVQALPGAFVVNVGDALEIVSNGAFRSVEHRAVIHPTKERISAALFHFPDQDRMLGPLPELVKEGDTVRYATTTYQEFMKRFFAAKLDGKKLIERFKLQ

SEQ ID NO: 62840 - protein, 621 aa, Oryza sativa
  Clone ID: LIB4309-033-F10_FLI.pep
FPRSPSPRSHAAAAAAAMPKHYRPAGKKKEGNAAKYITRTKAVKYLQISLATFRKLCILKGVFPRDPKKKVEGNHKTYYHMKDIAFLAHDPLIEKFREIKVHRKKVKKAFAKKNKDLADRLLNRPPTYKLDRLILERYPTFVDALRDLDDCLTMVHLFAALPAVEGERVQVQRIHNCRRLSHEWQAYISRTHSLRKTFISVKGIYYQAEVQGQKITWLTPHALQQVLTDDVDFNVMLTFLEFYETLLGFINFKLYHSINVNYPPVLDPRLEALASELYALCRYMSSGRVPGNSEPAGLIEDKEGEDNKESSKTDESELRLAQLQHQLPTNEPGALMHLVQESTAADADDADAKECRSLFKNLKFYLSREVPRESLLFIIPAFGGTVSWEGEGAPFDETDEDITHQIVDRPTQSHVFLSREYVQPQWIYDCVNARIILPTEGYIVGRVPPPHLSPFVDNDAEGYIPEYAETIKRLQAAAQSQVLPLPSLGDEDMENSLVEAIIDRSESNEIADKKRKLEMLEKQYHDELRMEYEGKTFSNRTADNQPDVVDKSDTKEADDHMEDSHKQAEKDAADISKTLMSRKQRGLLQAIEINQERKKDKVNLLKKRKKNADSSASAKGR

SEQ ID NO: 62841 - protein, 520 aa, Zea mays; identical to SEQ ID NO: 61230
  Clone ID: LIB3960-022-C9_FLI.pep

SEQ ID NO: 62842 - protein, 568 aa, Zea mays
  Clone ID: LIB3060-102-F5_FLI.pep
PPPSPPTPAPPSFHTHLDPPNPNPSGRTAAMAESGESSPNSAAATDDTHHEMPEAGAAAAAVHAQPRPPPPPSKVRLMVSYGGRIQPRPNDNQLAYVNGETKILSLERPLCFPDFAARLAALVGNAADVRVKYQLPGEDLDALVSVTNDEDLEHLVHEYDRLHVHRHATASSAGSSRGGSAPRLRVFLFPVQSPPPPPQPAGILEPKVEQRQWFVDALNTVLLPSSKQDPPPVPPQQQKQEQESVFAQQSPPPQAKHEAVFVQQSPPQPQTVVQMQMPPPQHVVLAAASPDYLFGLDNGFVHPPAVKVKDPAGDPPAVRESVPVELPAKNEDRHPIPNPAGDNVAVSPAEYQRQIPGLEKLQVADNAAHQPPPPAPAPAPAPSLAPTPVPAALPRNGSDDSLTRGYPLATPTPNSSAEYYLPKFPEKPPVPPPPQSSAPPPPTYLQVQGRYTSVAPGSGADRGPVFFIPAPHGYFAATASPGATSYPAVYAVAPPSTAANGSAASPAASNATAYSPAPTQVAYDSNGRAIYYTSMLPQYPSAVNGMSSAGAVLGTEPVNPVAVKPTVS

SEQ ID NO: 62843 - protein, 725 aa, Oryza sativa
  Clone ID: LIB4309-017-F7_FLI.pep
LVQAATQAMASHANASGGGGDEEMVEASTLRHRHGAGKDANGVGTERQLAAAAAEGEEEGPSSVERAFVDRAVPSWREQLTVRAFVVSFFLSIMFSIIVMKLNLTTGIIPSLNVSAGLLGFFFVRLWTAAIERVGLLRQPFTRQENTVIQTCVVAAYGIAFSGGFGTYLFGMSETIAKQATEANNAQNVKNPHIGWMIGFLFLVSFIGLLALVPLRKIMIVDYKLTYPSGTATAYLINGFHTPEGAKLAKKQVKELGKFFLFSFVWGFFQWFYTAGDGCGFQSFPTLGLQAYKNRFYFDFSPTYVGVGMICPHIVNVSVLLGGILSWGIMWPLIRNKKGSWYAASLSETSLHGLQGYRVFISIALILGDGLYNFVKVLIRTTAGFVVMMKKNSTLPVSNNGSPMVATEAISFDDERRTELFLKDQIPKTVAFGGYVAVAAVSIGTLPQIFPQLKWYYILVAYVFAPVLAFCNAYGAGLTDWSLASTYGKLAIFIFGAWAGASNGGVLVGLAACGVMMSIVSTASDLMQDFKTGYLTLASPRSMFVSQVIGTAMGCVIAPCVFWLFYKAFADIGVSGTEYPAPYAIVYRNMAILGVDGFSSLPKHCLTLCYIFFAAAIAINLARDLAPSKVARFIPLPMAMAIPFYIGSYFAIDMFIGTVILFVWEMVNKAKAEAFAPAVASGLICGDGIWTLPQSILALAKVKPPICMKFLSRSVNAQVDGFLGN

SEQ ID NO: 62844 - protein, 688 aa, Oryza sativa
  Clone ID: LIB4506-006-F3_FLI.pep
FPYNTMEPVNDFQEGISTEHAFEAEPVPSLSETITPRSMVVSFILSVTLSIVAMKVTLSSGFIPSFSIPAGLLGFCVSRASIRILDYFAVAQLPFTRQENTIIQTCVVACTSITFTGGFGTYILAMGKKAAVGDVNAQNNVEEPSFARMITFLFLISFAGMFIIMPFRKVMIIRHRLTFPSGTATAHLINSFHTPQGVKQARKQVTLLFKSFGGTIAWSLFQWFFASGPGCGFKFFPTFGLEAYKHGFFFDFTMANVGIGMMCPYMIVFSVFIGTIISCGVIWPYIESKEGIWYPSNLGPNSLNGIRGYKVFIGLSMIMADCLFVFLCIMVRTTCAMIKRRRQAMQGGGGNAQPFQGIDIADQPVKSFDDRRRAQVFLRDEIPDSVTIGCYVLLSIISIAAIPHLYPQMRYSHVALIYLAAPVFAFCNAYGFGVTDMNLASTYCKIAMFAFGSWVGIKSGGVVAALVAGGITMSILGNAADVAQDLKTGYLTLTSPRAVFISEAIGTALGCVVNPTVFWVFYRVYKMGSGDMGDMPYAKLYRGFAMLSVGDGEQGLPRHSMLLFKVFFVLALALSVFREVASRKEWRIRRYIPSTIGMAITFFMPPRVPVGMCIGSLVAYLWEKMDAGRGRMLSPALASGLICGDGVGSILLSMLTLMGARAPICIKFLSRGDNVKLDAFLATLHDMR

SEQ ID NO: 62845 - protein, 713 aa, Zea mays
  Clone ID: LIB3332-015-B4_FLI.pep
RISLYKSRLLLTSQPHHLLLIEAGIKRPRPAMDLARSGGAAAADDGGEIERHEPAPEDMESDPAAAREKELELERVQPWREQVTLRGVVAALLIGFMYSVIVMKIALTTGLVPTLNVSAALMAFLALRGWTRVLERLGVAHRPFTRQENCVIETCAVACYTIAFGGGFGSTLLGLDKKTYELAGASPANVPGNYKDPGFGWMAGFVAAISFAGLLSLIPLRKVLVIDYKLTYPSGTATAVLINGFHTKQGDKNARMQVRGFLKYFGLSFVWSFFQWFYTGGEVCGFVQFPTFGLKAWKQTFFFDFSLTYVGAGMICSHLVNISTLLGAILSWGILWPLISKQKGEWYPANIPESSMKSLYGYKAFLCIALIMGDGTYHFFKVFGVTVKSLHQRLSRKRATNRVANGGDEMAALDDLQRDEIFSDGSFPAWAAYAGYAALTVVSAVIIPHMFRQVKWYYVIVAYVLAPLLGFANSYGTGLTDINMAYNYGKIALFIFAAWAGRDNGVIAGLAGGTLVKQLVMASADLMHDFKTGHLTMTSPRSLLVAQFIGTAMGCVVAPLTFLLFYNAFDIGNPTGYWKAPYGLIYRNMAILGVEGFSVLPRHCLALSAGFFAFAFVFSVARDVLPRKYARFVPLPMAMAVPFLVGGSFAIDMCVGSLAVFVWEKVNRKEAVFMVPAVASGLICGDGIWTFPSSILALAKIKPPICMKFTPGS

SEQ ID NO: 62846 - protein, 382 aa, Zea mays; identical to SEQ ID NO: 61243
  Clone ID: LIB3060-094-H10_FLI.pep

SEQ ID NO: 62847 - protein, 308 aa, Zea mays
  Clone ID: LIB3245-170-H8_FLI.pep
CTGELALPLHSMEDLYSIHPGISRVVGGAASEASVAGAGAGGPSPSDLTELMKAQIASHPRYPSLLSAYIECRKVGAHPHVTSLLEEVSRERRPGPGAGAGEIGVDPELDEFMDAYCRVLVRYKEELTRPFDEAASFLSSIQAQLSDLCSGGSSPAATATHSDDMMGSSEDEQCSGDTDVPDMGQEHSSHLGDHELKEMLLKKYSGCLSRLRSEFLKKRKKGKLPKDARTVLLEWWNTHYRWPYPTEEDKVRLAAMTGLDPKQINNWFINQRKRHWKPSEDMRFALMEGVAGGSSGTTLYFDTGTIGP

SEQ ID NO: 62848 - protein, 551 aa, Oryza sativa
  Clone ID: LIB4371-021-H2_FLI.pep
DVELVVIMVQGEESSWRMAASTHHERAIPLNQALAYGVQAHASPSVAAAPPASFLDFQPAAAAAAYFGELEEALIHGANAGGVVDPGMIRADVHSKSAAAAATAGYLAARPPTLEIFPSWPMRQQQQLHSGNSQSVGSTTDSSSAQNTMPQMELVSPASIRASSEHQHQQQQPGQEVMMVTTDDYSYKPGLAAASPSFQQQHQLQHHQQQQLHGGGDHDKRKHGSTRKDGKSVDAKTERRLAQNREAARKSRLRKKAYVQNLETSRVRLQQIEQELQRARSQGLFLGGCRAAGDMSSVKSFAGAAMFDMEYARWLDDDSKRLTDLRGGLQAHLLDTNLGLIVEECMQHYDELFQLKAALARSDVFHLLTGTWATPAERCFLWMGGFRPSDLLKILIQQLDPLTEQQMLGIYSLQQSSEQAEEALAQGLQQLHQSLADTVAAGTLNDGPGVPNYMSLMAIALDKLASLESFYQQADNLRQQTLHQLRRILTTRQAARCFLSIGEYYRRLRALSNLWSSRPRENFIGTESVSPTGTELQPMHNQPQQNQYSGF

SEQ ID NO: 62849 - protein, 407 aa, Sorghum bicolor
  Clone ID: LIB3481-032-D12_FLI.pep
HDSGELFAVKSAPASSAGAAELLRRERGIMAGLRSPHVVPCIGGRGGRDGSYQLFLEFAPGGSLADAVARNGGGRGLEERAVAAYAADVAAGLAYVHGAGLVHGDVKPRNVVIGGDGRAMLADFGCARSAEAVGGPIGGTPAFMAPEVARGEAQGPPADVWALGCTVIEMATGRAPWRGVDDVLAAVRLIGYTHAVPEVPRWLSADAKDFLARCLARRPSDRATAAELLEHPFIASASGISNCRAALDLDAAAKGRWVSPKSTLDAAFWESDSDDDEHDVVSAQSTAERIAALACPASALPDWDSDEDWIDVLSTPAEASSSDATNAPADEEVPYLDDGGAGTEEEVARAEAAESLDIDVDGAHNVGEADASPDHEWHLRVSSPCVGETPCKLLCDTNNAMDFVLAP

SEQ ID NO: 62850 - protein, 710 aa, Zea mays
  Clone ID: LIB148-025-E8_FLI.pep
PPGRHPPLRFEARCTHSNKTKEATMASISPEDIGGDVNLSKIPVEEVFKTLKCDRKGLSSTEGENRLRTFGPNKLEEKKENNLLKFLGFMWNPLSWVMEMAAIMAIALANGGGRAPDWQDFVGIVSLLFINSTISYIEEANAGNAAAALMAGLAPKTKLLRDGRWEEQDASILVPGDIISIKLGDIIPADARLLEGDPLKIDQSALTGESLPVNKHPGQEVFSGSTVKQGEIEAVVIATGVRTFFGKAAHLVDSTNNVGHFQQVLTAIGNFCIISIAAGMLVEVIVMYPIQHRAYRDGIDNLLVLLIGGIPIAMPTVLSVTMAIGSHRLSQQGAITKRMTAIEEMAGMDMLCSDKTGTLTLNKLTVDKSLIEVYSKGVDRDMVLLYAARASRVENQDAIDTCIVNMLADPKEARAGIQEVHFLPFNPVEKRTAITYIDGNGDWHRVSKGAPEQIIELCNMGAEAEKKVHALIDGYADRGLRSLGVSYQQVPEKSKESAGDPWQFIGLLPLFDPPRHDSAETIRRALHLGVNVKMITGAVPPSKHHQPGAHLRDAVPELVVRGAAGLPPALRLLRRPAGGDVHRGVRRLGLLPHPGDRLGVGRRHLDVQHRHLHPARRAQVHDPRRAQRQGHGQQRPQQVIRLSGCLSRTAFRNKDCGKGRRSRGTVGGRAETLHGPQPARHHLLLRPSRQQGLACSPSSPRRPAKVARYT

SEQ ID NO: 62851 - protein, 364 aa, Zea mays; identical to SEQ ID NO: 43525
  Clone ID: LIB3596-056-D8_FLI.pep

SEQ ID NO: 62852 - protein, 362 aa, Zea mays
  Clone ID: LIB36-008-H12_FLI.pep
LRRMISFSSPSIQIYMSRNSKKKTGRNLQNSRHNNSRRSLKREVVLDEAAVVEAPQRHVLVRRRGGVALHGVGAEQAVQRLVRAGVEEGELVAEEERVEQRVRLGVGGPGRRLVRGALRPRLEVEGRARRGGLVVGRRHALPREVRERVGSGALGGLVLQGRRGRALLLFLEVDDGVGVGGAGALAAGGGPGGGGGGGGEVELGPGPADVARGVVVGARGGLGGGEGAEPDADALDGVADLGGPLAPRAPPDAPVLLLVGRPAPAPLLLARPGLRRRGRGADDEGGLALHHTLVLLLGVLVELPERGLEVVRLPPLALAGGPCRAAAARRRGRDELGEDRTTTHLCSLPVCNLCTLSPFFRV

SEQ ID NO: 62853 - protein, 967 aa, Oryza sativa
  Clone ID: UC-OSFLM202123C04_FLI.pep
GWVSEVWEVASMAEDKGGLDAVLKESVDLENIPIEEVFQNLKCCRQGLTSEEAQLRLQLFGPNKLEEKEESKFLKFLGFMWNPLSWVMEAAAIMAIALANGGGKPPDWQDFVGIITLLLINSTISFIEENNAGNAAAALMARLAPKAKVLRNGSWTEEEAAILVPGDIISIKLGDIIPADARLLEGDPLKIDQSALTGESLPATKGPGDGVYSGSTVKQGEIEAVVIATGVHTFFGKAAHLVDSTNQVGHFQKVLTAIGNFCICSIAVGMFVEIIVMYPIQHRPYRPGIDNLLVLLIGGIPIAMPTVLSVTMAIGSHRLSQQGAITKRMTAIEEMAGMDVLCSDKTGTLTLNKLTVDKNLIEIFERGVTQDQVILMAARASRTENQDAIDTAIVGMLADPKEARAGIQEVHFLPFNPTDKRTALTYIDSDGKMYRVSKGAPEQILNLAHNKTQIERRVHAVIDKFAERGLRSLAVAYQEVPDGRKESPGGPWRFVALLPLFDPPRHDSAETIRRALNLGVNVKMITGDQLAIGKETGRRLGMGTNMYPSSALLGQNKDESVAALPVDDLIEKADGFAGVFPEHKYEIVKRLQARKHICGMTGDGVNDAPALKKADIGIAVADATDAARSASDIVLTEPGLSVIISAVLTSRAIFQRMKNYTIYAVSITIRIVFGFMLLALIWEFDFPPFMVLIIAILNDGTIMTISKDLVKPSPLPDSWKLAEIFTTGVVLGGYLAMMTVIFFWAAYKTNFFPRIFHVESLEKTAQDDYQKLASAVYLQVSTISQALIFVTRSRSWSFIERPGFLLVFAFFVAQLIATLIAVYANWAFTSIKGIGWGWAGIVWLYNLVFYFPLDIIKFLIRYALSGKAWDLVIEQRIAFTRKKDFGKEERELKWAHAHRTLHGLQPPDAKPFPEKTGYSELNQMAEEAKRRAEIARLRELHTLKGHVESVVKLKGLDIDTIHQSYTV

SEQ ID NO: 62854 - protein, 420 aa, Oryza sativa nipponbare
  Clone ID: JC-OSROLIB3475P051A12_FLI.pep
AIHIRRKNFISIIIGGDQFKNDIMELYPGYLEDHFNIHKLSISSASPPEYMTSASTQFAAPVRMGAYDRPPPVGMWSHEQFKVDNGQATSASTIMEAEMKFENRLEEIPQVVLEEGRNVDQEASKPPDKVLRRLAQNREAARKSRLRKKAYIQQLETSRLKLAQLEQELQRARQQAVYANGSLREPNLGFTGPIDPGALGFEIKYSHWVDEQNRNTGELRNALLQGQTTDQDLELKLLVEAGLDNYNRLFEMKEEAANSDVFYIMSGMWKTPTERFFLWIGGFRPSEVLKNLRPQLEPLTDKQVVEVGGLQQTSMQVEDALSQGMDKLKQTIADSLTAADPFDSPEAYMVHMANAVEQLRSLVQFVTQADHLRQQTLQEMHRILTTRQAARGLLALGDYFQRFRALSSLWAARPRDSGIS

SEQ ID NO: 62855 - protein, 731 aa, Oryza sativa
  Clone ID: UC-OSROM202005C09_FLI.pep
SAPATAPMATVPTPSEAHGGATPTAADVEMVEASELRRRGKPSGDRATGPSRDGAAAAAEEAAAPSVERVFADRPVPSWREQLTVRAFVVSFFLVIMFSVIVMKLNLTTGIIPSLNVSAGLLGFFFVRLWTAAIERVGLLRQPFTRQENTVIQTCVVAGYDIAFSGGFGNYILSMSERIAGLGTEANNAQNIKNPHLGWIIGFLFLVSFIGLFGLVPLRKVMIIDYKLTYPSGTATAFLINGFHTPHGAKIAAKQVKKLGIFFILSFFWGFFQWFYTATDDCGFHKFPSLGLQAFQHKFFFDFSPTYVGVGMICPHIVNVSVLLGGILSWGIMWPLIAKKRGDWFSADLPDGSLHGMQGYRVFIAIALILGDGLYNFLKMIILTAFSLRSQIKKKNASTLPVSDDGMVTTTAAVSYDEERRNELFVKDQIPWYVAYGGYAVVAAISIGTVPQIIPQLKWYQILVAYIVAPILAFCNAYGTGLTDWSLVTTYGKLAIFAFGAWTGASHGGVLAGLAACGVMMNIVSTAADLMQDFKTGYLTLASPRSMFVSQVIGTAMGCVIAPCVFWLFYKAFDNIGISGSDYPAPNAAVFRSIAILGVDGFSSLPKNCLNLCYAFFAAAIVVNLIRDLVPKVSRFIPIPMAMAIPFYIGSYFAIDMFIGTVILFVWQRVDRAKADTYGPAVASGMICGDGIWVLPQSVLALAKVKPPICMKFLSRRTNDKVDAFLTTLGK

SEQ ID NO: 62856 - protein, 273 aa, Oryza sativa
  Clone ID: UC-OSROM202038D01_FLI.pep
AVVGRSSVQGKESHGGNLLLVVVLVVVARLPRRRHHRRVRRQGSGRRRRGGVRQVPLQLRREDPTTPRRRRAALRRRRQPRRLRRPLPPFPRVATEAEGDVRVGGGVPAVPAPDGGPGRARLRQRRRRPRQPAGGVRRGQPGPPPAAQDPGVPVPKDDSDNDRAAIAQPVAHRCVQDGTPCPLPASDWQRAVVRIPVGGASDVVASCSRSAPAAALQPARRRRAAATVPSPECQQPLVIAIRLRTGRGLVSACLTRTRYSRNPALYVLMKVFN

SEQ ID NO: 62857 - protein, 520 aa, Zea mays subsp. mexicana; identical to SEQ ID NO: 61230
  Clone ID: UC-ZMFLTEOSINTE019E07_FLI.pep

SEQ ID NO: 62858 - protein, 389 aa, Zea mays
  Clone ID: JC-ZMSHLIB3569P008H05_FLI.pep
PAVCRTRHAIMALMQESSQDLLEAHDELFHHCLCFAKSLALAVAQDLRIPDAIHHHGGGATLPQILAETALHPSKLRALRRLMRVLTVSGVFTVQQEQPPDADGGGGADSSTVDASDGADVVYRLTAASRFLVSDSDEASTATLAPFARLALHPIAISPHAVGICAWFRQEQHDPSPYGLAFRQIPTIWEHADNVNALLNKGLLAESRFLMPIVLRECGDEVFRGIDSLVDVGGGHGGAAATIAAAFPHVKCSVLDLPHVVAGAPSDAGVHFVAGNMFHSIPPATAVFFKTTLCDWGDDECIKILKNCKQAISPRDAGGKVIIMDVVVGYGQSNMKRLETQVMFDLVMMAVNGVERDEQEWKEMFIEAGFKDYKIRPVAGLMSVIEVYP

SEQ ID NO: 62859 - protein, 397 aa, Zea mays
  Clone ID: JC-ZMSHLIB3569P022D01_FLI.pep
APPRHGGLRARGGGRTQALEEARAPGRGAAAAPAGGDGAHRVGRLGVGSRPAAAPYRADGLRARHRPGRRRHPRRAQLPALRLRRPRPARAHPAADEGGRPGRRLRARRRARHPARALVAALHHAKPRLRRAPRRALGRAGAEVTVGRRSYNTQVIEVEDHTLEKHAKIESGGLLQPHLFFLTIPQVEGGADICATFQWSQKLLYDSGRFSVDIPFRFPYFVNPLPKVFMKKEKIQLTVHSGFSKEILLQGTSHPLKEKSRQGDKLFFHHEAIVENWSIKDFNFSYNVYSGDLSGGVLVQPATLCDYDDRDMFCIFLLPGSGNRKALQLEFAMKDLGDLHHFLGMQVQRRDGGLFLSQRQYMLDILDRAGMADCKPCSTPVDTNPKVSATTDLSSHA

SEQ ID NO: 62860 - protein, 334 aa, Zea mays; identical to SEQ ID NO: 41488
  Clone ID: JC-ZMSHLIB3569P027A02_FLI.pep

SEQ ID NO: 62861 - protein, 318 aa, Zea mays
  Clone ID: JC-ZMSHLIB3569P029F09_FLI.pep
GLAMPLNIDIDLFKLDIDELIADYSKENCTSLFEFKRVWMGKKFSYIYEGRPKTNSGLFMQSLFLHCIGHLTSQSSLHQRLAGLYCLYCLYECQPYKPQFKIYLSLEECRQLKDVVVMAKQNGLQLVPALVKRMLDKDMFLFGYMNLIDDNGDKQVEEMTALQNKRVKFACDKLFANTQAERYLHMDLGAEFELDSIKKLSKEYAEAKELALAEASQTVEVDDAKHLLQSERLLGDKIDEVVKEWDVQKEGFYERTGLSSSPGDQLMAIDNDESGAQCHEDGSRCDQLMAVDNDELGVQDHEDLDDDDGFAELELLLE

SEQ ID NO: 62862 - protein, 156 aa, Zea mays
  Clone ID: JC-ZMSHLIB3569P010G11_FLI.pep
RGDAAAPLLRRREMATVPGDLIWQVVRKNNSFLVKQFGNGNAKVQFTKEPNNLYNIHSFKHSGLANKKTVTIQPAAKDSAVVLSTTKTKKQNAPAKLSHKSVMRKEFRKMAKAVKNQVSDNYYRPDLTKPALARLSSVYRSLQVAKSGVKKKNRQS

SEQ ID NO: 62863 - protein, 344 aa, Zea mays
  Clone ID: JC-ZMSHLIB3569P030B12_FLI.pep
PDQQRLIFAGKQLEDGRTLADYNIQKESTLHLVLRLRGGMQIFVKTLTGKTITLEVESSDTIDNVKAKIQDKEGIPPDQQRLIFAGKQLEDGRTLADYNIQKESTLHLVLRLRGGMQIFVKTLTGKTITLEVESSDTIDNVKAKIQDKEGIPPDQQRLIFAGKQLEDGRTLADYNIQKESTLHLVLRLRGGMQIFVKTLTGKTITLEVESSDTIDNVKAKIQDKEGIPPDQQRLIFAGKQLEDGRTLADYNIQKESTLHLVLRLRGGMQIFVKTLTGKTITLEVESSDTIDNVKAKIQDKEGIPPDQQRLIFAGKQLEDGRTLADYNIQKESTLHLVLRLRGGQ

SEQ ID NO: 62864 - protein, 197 aa, Zea mays
  Clone ID: JC-ZMSHLIB3569P007G08_FLI.pep
RRGCHPRRSEMDRAFAHVRQCWGADTLNRGSGAQGRRQSFRPRKPQQNDRPGTRTKQPPPPPSPPRQPTQTHLEGHQRAGCRKVASTTTTSGWAHGPGQATAAPRAAPPVGHPWQQPLRRARSVGTRTTADAIRALQVAAHLQSPHTTTEEPDPVAAAPNKATTPHEQATVAAPSSAPHRPSLPQPPEALNTVATRP

SEQ ID NO: 62865 - protein, 478 aa, Zea mays
  Clone ID: JC-ZMSHLIB3569P007G11_FLI.pep
VIDRDRIKALRDEMKRAGFEESTDVLVSLMRAFSKEGDIKETEATWHWLLRSGCELPAQAYICRMELYARTGEPMKSLEMFKEMKNRNIPPNVASYHKIIEIMTKAREIEIAEKLMDEFVESDMKHLMPAFLDLMYLYLDLDMHEKLEHTFTKCLGRCRPNRILYTIYMESLVRIGNVSKAEEIFDEMHKNGMIGTNAKSANILLRGYLLAENYQKAESIYELMCKKKYDIPVESLEKLQSGLLSSKKVVKPPKPVSMKLDEEQREILIGLLLGGTQIESHAQKGVYIVNFKFQEDSHAHSALRVHIHERFFEWLPSACRSLNRESEIPYRFSTIPHAHFGFFADQFFQKGQPVLPKLVHRWLSPRVLAYWFMSGGVRLQSGDIVLKVSGGDTGGVERIVKSLQAQQSLACKVKRKGRFFWIGFQGCNADSFWKIVETYVLDSFASSTEESHNVGSDGLQDYTYYESDTQRHGRESEE

SEQ ID NO: 62866 - protein, 473 aa, Zea mays
  Clone ID: JC-ZMSHLIB3569P021D02_FLI.pep
LLASLVDPPLPSPRFKMQIFVKTLTGKTITLEVESSDTIDNVKAKIQDKEGIPPDQQRLIFAGKQLEDGRTLADYNIQKESTLHLVLRLRGGMQIFVKTLTGKTITLEVESSDTIDNVKAKIQDKEGIPPDQQRLIFAGKQLEDGRTLADYNIQKESTLHLVLRLRGGMQIFVKTLTGKTITLEVESSDTIDNVKAKIQDKEGIPPDQQRLIFAGKQLEDGRTLADYNIQKESTLHLVLRLRGGMQIFVKTLTGKTITLEVESSDTIDNVKAKIQDKEGIPPDQQRLIFAGKQLEDGRTLADYNIQKESTLHLVLRLRGGMQIFVKTLTGKTITLEVESSDTIDNVKAKIQDKEGIPPDQQRLIFAGKQLEDGRTLADYNIQKESTLHLVLRLRGGMQIFVKTLTGKTITLEVESSDTIDNVKAKIQDKEGIPPDQQRLIFAGKQLEDGRTLADYNIQKESTLHLVLRLRGGY

SEQ ID NO: 62867 - protein, 526 aa, Zea mays
  Clone ID: JC-ZMSHLIB3569P033C06_FLI.pep
ALHHNQAHLPPPHFFSSNRPVGSQRRGMASGGAVRDVGSPAELEAAVAGARAVAVHFWASWCEASKQMDEVFAHLAVDFPHAAFLRVEAEEQPEISEAYGVTAVPYFVFCKEGKIVDTLEGANPASLANKVAKVAGPASVAESAVPASLGVAAGPAVLENIQKMAQQNGSSAAESTNSGSTQDALNKRLEQLVNSHPVFLFMKGTPEQPRCGFSRKVVNILKQEGVTFGSFDILTDNDVREGMKKFSNWPTFPQLYCKGELLGGCDIVIAMHDSGELKDVFEEHNIPLKPQGSKNEEAGQPESATEKGGAAAEPIGLTDAQKARLESLTNSSPVMVFIKGTPEEPKCGFSGKLVHILKQENIPFSSFDILSDDEVRQGLKVLSNWPSYPQLYIKGELVGGSDIVMEMHKSGELKKVLSEKGVIPKESLEDRLKSLVSSAPVMLFMKGTPDAPRCGFSSKVVNALKKEGVSFGSFDILSDEEVRQGLKTYSNWPTFPQLYYKSELIGGCDIVLEMEKSGELKSTLSE

SEQ ID NO: 62868 - protein, 317 aa, Zea mays
  Clone ID: LIB3061-103-A5_FLI.pep
LAMAQQQPVRRILKVAPPGKGGGESFPTVQAAVDAVPLGNRARVVIRLAPGVYREPVYVAKTKNFITVVSWDNTATRIRHSQSSRVIGTGTFGCGTFIVEGEDFIAENITFENSAPQGSGQAVAVRVTADRCAFYNCRFLGWQDTLYLHYGKQYLRDCYIEGHCDFIFGNSVALMEHCHIHCKAAGYITAHSRKSTSESTGYVFLRCTITGHGEAGYMFLGRPWGPFGRVVFAYTFMDRCIKPSGWHNWDKSENERTACFYEYRCSGPGALPSNRVTWCRQLLDVEAEQFLAHTFIDPDVDRPWLLQMMAIRIPASA

SEQ ID NO: 62869 - protein, 188 aa, Zea mays
  Clone ID: LIB3061-056-C3_FLI.pep
VDSVPDLTEHIHRTSARMLLHIDGYPDKIANAKWEVKELGIEHNGYVDLLLGEFKHYKTRLDHGGISRELQHLLLEYGVESISEVLVEGLSRVKRCTDEGRALMSLDLQVLINGLQHIVASNVRPKLQTVDTFIKAYYLPETEYVHWARSHPEFSTSQVVGLVNLVATMKGWRRKTRLETVEKIEAGP

SEQ ID NO: 62870 - protein, 117 aa, Zea mays
  Clone ID: LIB3061-003-E1_FLI.pep
EKESSSATVLEDPVENTLHGAAHACSHGFSEVCGLLEGFLKIESILYSAVHKRPSITELRNSETGRTTDSTGQIAQIVGRGFGGTRVAALGRRRDPGWVVRREKITGDSGSLWEARI

SEQ ID NO: 62871 - protein, 369 aa, Zea mays
  Clone ID: LIB3060-112-E4_FLI.pep
TVPRTRRCQDGVERHLHPFLHDTTRPAVLDHHRFAGRAPQRSAPLISAARRHRLLTTTATEQTRNVQPGAAVPPRHGLVSSGLHDTDGAHHHDRRFSHPSHEGSDASSSSSSPSASRAAFRGPGISALTPVPSRVVLRSPVVLGVWLSVQALGLGHVAQRVQVVERERVGDMVRVRRQDEAVVALYSLASEGGSLVDHLAVLPFVLSELGKQGPPASVDLAQDGFPFVSLLVLEILKGGELPLERLERVADADKALHLLLLILLFLGSLLIALRRVQPLRCLLIVPPRTRRPRRGSGAGRYPGAEVRGAGEDQANLLPVHLRRRRHLRAPPAGVGKNKTLGKPQARDSDACAVVVGGQRRLRRGVHAAS

SEQ ID NO: 62872 - protein, 805 aa, Zea mays
  Clone ID: LIB3060-107-D3_FLI.pep
ATPPPKRTAIMDANHSPPAQPERHHGSFNYDIESTDGTWRGAGAWQEQDPSSEALLRYDDDGPREPLLRRRTMNTTSQIAIVGANICPIESLDYEIVENDLFKQDWRSRKKQQIFQYIVLKWSLVLLIGLCTGLVGFFNNLAVENIAGFKLLLTSDLMLKHRYFTAFLAYGGCNLVLAAAAAAICAYIAPAAAGSGIPEVKAYLNGVDAYAILAPSTLFVKIFGSILGVSAGFVLGKEGPMVHTGACIANLLGQGGSRKYHLTCNWLRYFKNDRDRRDLITCGSAAGVAAAFRAPVGGVLFALEEAASWWRSALLWRTFFTTAVVAVVLRGLIQFCRSGKCGLFGQGGLIMFDLSSTVPSYSTQDIIAIIVLGIIGGVFGGLFNFLLDRILRAYSFINERGAPYKILLTVTISIITSACSYGLPWLAPCTPCPADAVEECPTIGRSGNFKNFQCPPGYYNGLASLFFNTNDDAIRNLFSSGTENEFHMSTLFVFFTAIYCLGLVTYGIAVPSGLFIPVILAGATYGRIVGTLLGPISDLDPGLFALLGAASFLGGTMRMTVSVCVILLELTNDLLMLPLVMLVLLISKTIADSFNKGVYDQIVVMKGLPFLEAHAEPYMTHLVASDVVSGPLISFSGVERVGNIVQALRITGHNGFPVVDEPPLSEAPELVGLVLRSHLLVLLKGKGFMKEKMKTSGSFVLERFGAFDFAKPGSGKGLKIEDLDFTDEEMDLYVDLHPITNTSPYTVVETMSLAKAAVLFRALGLRHMLVVPKTPGRPPIVGILTRHDFIPEHIHGLFPNIHKSH

SEQ ID NO: 62873 - protein, 325 aa, Zea mays
  Clone ID: LIB3060-105-H12_FLI.pep
FVSFTSTFILCIYIFSSHLVRLHYPAACNLISSINIVCICVSTKIICRLSDILACSVAYIMFSMCSTAGCPFGASCHFLHNFPGGYQAVSKMTNLGGPPVPAPPGRMPMGPGGPDGPPSPAVKTRMCNKYNTAEGCKWGSKCHFAHGERELGKPLQMDNPMGPPPMGPGPNGHFMPPPMPFPDMVPPSTFGASATAKISVDASLAGAIIGKGGTNTKHISRVTGAKLAIRDNEADPNHKNIELEGTFDQIKHASAMVTELIVRISGKPPPQAKNNPGRGPGSHAGGPGSNFKTKLCENFNKGSCTFGDRCHFAHGEGELRKPAAA

SEQ ID NO: 62874 - protein, 524 aa, Zea mays
  Clone ID: LIB3060-103-B10_FLI.pep
KKQIQYLYLYITNLLVTLYFGFHMHVLFILLACSCRNVSFKQELDQTINADARGPAAFCCCHGLLLPHCCLRLHVFAFLAVHGFFYEPCHLVPRDIVVDLQSNAPVRAGISAVGRLLCEERPADHRHAGAYALQRRVPPRVRQEQPGGRMRQDLFLRAPAEEEPSLSRLSVELLRQHSLLARDEVRPDDPQERPAAVRQPPRELGELSGRHDRDAAEVDVHDRAGTLGIQPPEAAQVLLPEVPADRGRVGTGHGSGEREKRADGVDAREDAAQRAHDVLLQRVERVDDDPLRAARVLGLPAVEVDHELVRVRSADEAGHVSQTDAPHPGHPVEHRVQVPVGQVALIFQWHVASVHELLEVEVPHEATRAHGAEHDCQDAHLAGHPLREAHEVVQYDAGDRRTARHAVEPRQEVTERRGAAPGERLAERGDVLRDVVVAAGRRQAVGDGLEPEVVEARQRVRAAGPEQAAVVVLGVDVGDEEAPRVQHLGQLQQRRDVALRRVRDEHRVGARVRAHHRGFPLHVG

SEQ ID NO: 62875 - protein, 595 aa, Zea mays
  Clone ID: LIB3060-097-D10_FLI.pep
EQVQSVQKYIRKKSQRGEHRPARWTKRPAEEMASMQSWRKAYGAIKDTTTVSIANLNSDFKDLDVAIVKATNHVECPPKERHLRRVVAATSITRPRADVAYCIHALARRLAKTRNWIVALKALVVIHRLLREGDPTFREELLNFTQRGRILQLSNFKDDSSPIAWDCSAWVRTYGLYLEERLECFRVLKYDVEAERLSKQGQGPEKGHSRTRELDSQDLLEQLPALQQLLYRLVGCRPEGAANNNYLVQYALALVLKESFKIYCAINDGIINLVDKFFEMPRHDALKALEIYRRAGQQAGNLSDFYENCRGLELARNFQFPTLREPPQTFLATMEDYVKEAPRMVPVREPLELPERLLLTYKPEESEEILEPAPVEEEKVPVEEPVLVPPVTEVVSPPPKAEVPDTGDLLGLDDTNPAVSAIEESNALALAIVPTDGASTTGNTAFQDKGFDPTGWELALVTAPSNTTSSTSVGQLGGGLDKLILESLYDDGAYRQRQQQQLYGSAAPNPFMANDPFAMSNQVAPPPSVQMAAMSQQHQQIPTMMQPNPFGPPMHPQVSMAPATNNPFLDAGFGAFPAANNGHQQHNPFGSAQLL

SEQ ID NO: 62876 - protein, 373 aa, Zea mays
  Clone ID: LIB3060-097-C10_FLI.pep
SASSASLSPFLPLLSCGCSLPLRLSASPPPPKPKSPRLAPQHRLRGRREGGRKEGRRLSGEMSDSYCPDCKKHTEVAFDHSAGDTVCTECGLVLEAHSVDETSEWRTFANESNDNDPVRVGGPSNPLLTDGGLSTVIAKPNGAQGDFLSSSLGRWQNRGSNPDRSLILAFRTIANMADRLGLVATIKDRANEIFKKIEDLKSIRGRNQDAILAACLYIACRQEDRPRTVKEICSVANGATKKEIGRAKEFIVKQLEVEMGQSMEMGTIHAGDFLRRFCSTLGMTNQAVNAAKEAVQRSEELDIRRSPISIAAAVIYMITQLSEDKKPLKDISLATGVAEGTIRNSYKDLYPYASRLIPNTYAKEEDLKNLCTP

SEQ ID NO: 62877 - protein, 125 aa, Zea mays; identical to SEQ ID NO: 48021
  Clone ID: LIB3060-096-D1_FLI.pep

SEQ ID NO: 62878 - protein, 229 aa, Zea mays; identical to SEQ ID NO: 60146
  Clone ID: LIB3060-095-D2_FLI.pep

SEQ ID NO: 62879 - protein, 502 aa, Zea mays; identical to SEQ ID NO: 59389
  Clone ID: LIB3060-089-D4_FLI.pep

SEQ ID NO: 62880 - protein, 307 aa, Zea mays
  Clone ID: LIB3060-087-H9_FLI.pep
REPAMDTGRKRIAPGGANGAGGPKRARESETTQMGVGSKTKPCTKFFSTAGCPFGSNCHFLHNFPGGYLAVSKMTNLGGPPVPAPPGRMPMGPGGPDGPPSPALKTRLCNKYNTAEGCKWGSKCHFAHGERELGKPLQMDNSMGAPPMGPGPNGHFMPPPMPIPDMVPHSTFGASATAKISVDASLAGAIIGKSGINTKHISRVTGAKLAIRDNEADPNHKNIELEGTFDQIKHASAMVTELIVRISGKVPPQAKNNPGRGPGSHAGGPASNFKTKLCENFNKGSCTFGDRCHFAHGESELRKPAAA

SEQ ID NO: 62881 - protein, 342 aa, Zea mays
  Clone ID: LIB3060-084-D5_FLI.pep
HPRPVADGRRSREMAVDEVNSVYVGGLPYEANEEMLRDAFGYYGTIVSVKVINDHAVKGKCYGFVTFTHPRAAEQAIAGMDGKKLGNRIVRVNEVRTRGPRDFGRDGFRRDPRRYGRDPYWDRRDRERSYDRERDPYHDRDSDRSREHDRERDYEHGGFNREIDYPMDRDREGDERRPREHDRTAEMHNVDSDNDKDKEHVSRKRFSRPKGRDSRDLSSSSDGLQNDGKHQLDKTIQMREDLENEVNQIKDKISGKEQHIADLQKKAQKLEDELVAARKVSSERQLAVTDLYKHFLQLQDYNDRVKTAEQRLQSLVDAALVELDMAEDATTRDGSMYENGVL

SEQ ID NO: 62882 - protein, 540 aa, Zea mays
  Clone ID: LIB3060-021-F2_FLI.pep
VVGPNMTTPSTAPAPLASLLLRVSAAAVPVARRRPKSPAAAAAARWEGGGGRRRCRAAVVEEAGVLLPKEGEGEEAPDAAAGRYDWREEWYPLYLAKEVPDDAALPLTVFDRQLVLWRDAHGVLRCHEDRCPHRLAKLSEGQIVDGKLECLYHGWQFDGDGKCVKIPQLPEGAKIPRSACARNYEVRDSQGVVWVWMSDANPPDEGKLPWFEPYARAGFTDLSTVHELPYDHSILLENLMDPAHVPISHDRTDWTAKREDAQPLFFDVTERTPRGFAGYWGRTGTPHLRNLLRFEAPCVLTNTLEFADKDGREQCFSAHFLCRPAGQGKSMLLVRFGSTLRSPLAKVLPSWYFHQNACKVFEQDMGFLSSQNEVLLREKLPTRELYLNLRSSDTWVAEYRKWMDRAGHGMPYYFGHSTLSPPPVPAVVEQAPAGAVAGISASFPAKGGVGMVHAPNPTNRYFRHVVHCKSCRATVKKYTSLKTVFAALAAAALSAAILAATRQWKAVLVAASAVLAAASYACDAVLSLITTNFIRTHRRL

SEQ ID NO: 62883 - protein, 205 aa, Zea mays
  Clone ID: LIB3060-004-F7_FLI.pep
CKYICVRAQTVEIVTRNQRNEAILGRAARRLLVDGLPADLHGRWPSVGRGWLAGHPILDGCSHSHEGLLHVDGVFGTRLHEWDAHLISKRLCCLSCHNFVGSKVTLVPNKELVNIITCITVYLVQPLLHIIEAFLVCHVIYNNDSMSSAVVAASDCPEALLPSSIPNLKFYGLPILLHCANFEINPNCADIAVQIRIVCKSEKQA

SEQ ID NO: 62884 - protein, 662 aa, Zea mays; identical to SEQ ID NO: 62493
  Clone ID: LIB143-057-H1_FLI.pep

SEQ ID NO: 62885 - protein, 166 aa, Zea mays; identical to SEQ ID NO: 60377
  Clone ID: LIB143-046-G2_FLI.pep

SEQ ID NO: 62886 - protein, 345 aa, Zea mays
  Clone ID: LIB148-031-D7_FLI.pep
WAAGRATGPSPTTATDSDVWTCRPTTSSSSRGRAGRGGPLAADHVLVVADRRGRVGLPAALQALLLVDLPQPLDLLPQCLLMSIFEDLVLRERRDPLPQVAVPQRQQRALVVEERHARGQRRHLRLERRDAALQLRDVLQLAHARPLRGLPVRQDPLDALRIHRGGRGGAVALALCLLGVAPIRLLVVDAVVVGRRRRARHRRGRGLRLRLRRRRLEVVGEHGQELIVVEAVEVMRPGIAVAGAGLGLEEGHGVADGAAVRAALGGGEVEELVHPRRLHGRGGEERAHGGAALLLVPAPELRPRRRHGGDLGRQLRHGRDRDPAPRVGSTRGINATRGNGGATPE

SEQ ID NO: 62887 - protein, 139 aa, Zea mays
  Clone ID: LIB148-024-D9_FLI.pep
YTVNVCMYIVTGHVTRSSERDWSLHYMAMAPLPPPSFSSLAVLMVVVGFLVQFSSWLGLQRSSELITTQSYTVGLLGVPGASSPPPPPILAFPRSFFVQPSPLGVVAAVAELAEAGVRARPGHRVVPQLVQEPHICTGA

SEQ ID NO: 62888 - protein, 522 aa, Zea mays
  Clone ID: LIB148-010-C6_FLI.pep
SSTAAAFCSVRKMFLESFRVESPRVKYGDGEIQSEYRYDTTEVVPPGNGGGAGWVVRPKSVTYNFKTSTNVPKLGVMLVGWGGNNGTTLTAGVIANREGISWETKEKVHKANYFGSLTQASTIRVGSHNGEEVYAPFKSLVPMVDPNSIVFGGWDISKLNMADAMARAKVLDFHLQKQLRPYMESMLPLPGIFNPDFVAANQGARADNVIKGTKKEQVEQIKKDIKEFKEKNKVDKVVVLWTANTERYSNVVAGLNDTMDKLLASLDKNEAEISPSTLYAIACVLEGVPFVNGSPQNTFVPGLMELAIKKNSVIGGDDFKSGQTKMKSVLVDFLVGAGIKPTSIASYNHLGNNDGMNLSAPQVFRSKEISKSSVVDDMVASNPILYKPGEHPDHVIVIKYIPYVGDSKRAMDEYTSEIFMGGKNTIALHNTCEDSLLAAPIILDLVLLAELSTRIQLKAEGQDKFHSFHPVATILSYLSKAPLVPPGTPVVNALAKQRAMLENILRACIGLAPENNMMLEHK

SEQ ID NO: 62889 - protein, 574 aa, Zea mays
  Clone ID: LIB148-005-H8_FLI.pep
PDMAAKDGSGSQDLGGHTFWPMLSYACGELCVIVLLYVSALASYAATRLARVCGLRPPCILCARLDHALHGKPWFSSDLVCAAHRSEISSLAHCKTHDQLVACSGDLSRPTSARSRRLCSCSDPLKNARGAQKHSEAANAVECWDSSVPADHPNEKTFVVGIEEVHESDGSPGSHGQSTKDSAPSANGGGAAKSNYISPAPTRIAVDRNGSVKNASVARANLTSPRPSEIISARDSNSTTQQEVKALLSQMSSVRGLDGSSSEGSPSPGTSAPNEESNPAAASKRPYLERNYSVLEPSEGSQLADDVEGESSLENVKKQLELNKKAMAALYKELEEERSASAVAASQTMAMINRLQEEKAAMQMEALQYLRMMEQQADHDHLAIQDLHDLLTEREKELLDLDAELAHCRRLLQNDPFNGDGRNNGADTVNTTIDGRNPAAIECLDGADLVGSAMSLFEDEKAFILESLSRLEENLGIFTNRLASGDARGSQEDVLFEEHEHTTADGSPSNGDKLSGVANLKAGISLLNIRLRALEDDQEFLKQVLSSLQCGSDGLQCIQEISGHLAELRRVVTR

SEQ ID NO: 62890 - protein, 495 aa, Zea mays
  Clone ID: LIB143-070-H5_FLI.pep
SSSHLAMAMQAAFLAGFSQLAAQPSRDCAVAVAPTRVAVAAVGSAKVGARVGLKAGIAAPAPAPAAGRGVRCRASLIEPDGGQLVDLVAPEEGGRRAALRREAAELPHRLRLGRVDKEWVHVLSEGWASPLQGFMREHEFLQTLHFNAIRGQDGRMVNMSVPIVLSVGDAQRRAIQADGATRVALVDERDRPIAVLSDIEIYKHNKEERIARTWGTTAPGLPYVEEAITNAGDWLIGGDLEVIEPIKYNDGLDQYRLSPAQLREEFARRNADAVFAFQLRNPVHNGHALLMTDTRKRLLEMGYKNPVLLLHPLGGFTKADDVPLSWRMKQHEKVLEEGVLNPESTVVAIFPSPMHYAGPTEVQWHAKARINAGANFYIVGRDPAGMSHPTEKRDLYDADHGKKVLSMAPGLERLNILPFKVAAYDTKQKKMDFFDPSRKDDFLFISGTKMRTLAKNRESPPDGFMCPGGWKVLVEYYDSLVPSEGSSKLREPIAA

SEQ ID NO: 62891 - protein, 624 aa, Zea mays
  Clone ID: LIB143-070-B4_FLI.pep
LLLTICFSVLPVLHDPGSSQEQQARPPHADRTTERAALTDPSPPPPPRSTMTLASTDKVVLGCIAFSIFWVLAVFPSVPFMPVGRTAGSLLGAMLMVLFRVMTPEEAYKAIDLPILGLLFGTMVVSIFLERADMFKYLGSALAWRSRGSKDLLFRVCLVSAVASALFTNDTCCVVLTEFILKLARQNNLPPQPFLLALASSSNIGSSATPIGNPQNLVIAVQSGITFGQFLVGVFPAMIVGVAANTCILLCYFWRCLSAPEKDQEGGAAAAGPDVAVVADEEVTSHRFTPARMSRASSVNGGGADADCVGELIRRSDSLSRADTTLGMSMRSRSYNSEGGDIQVAIRSMRASSMSQEMVEVSTVCDRRDDGGAGPRKVTRTTSHQRSVIIEDAPEADAADDDDDGHKGKDGDSVTNKEKRWKVLVWKTAVYLTTLGMLAALLMGLNMSWSAITAALVLLALDFTDAQACLEKVSYSLLIFFCGMFITVDGFNRTGIPNALWELVEPHSRIDSAKGTALLAVVILVLSNVASNVPTVLLLGTRVAASAGTISPESEKKAWLILAWVSTVAGNLTLLGSAANLIVCEQARRAQFFGYNLTFWSHLRFGLPSTIIITAIGLLIVASY

SEQ ID NO: 62892 - protein, 631 aa, Zea mays
  Clone ID: LIB143-063-E4_FLI.pep
STPARHRRTAMTLSLRRKQLDVIVRMLHLNQQQLPNGGEGQGEDDAYKILVMDPPCISILSPVLKLGDLRHQGVTLTLAIDRPRQAVPDAPAVYFVRPTPGNVDRVAADAAAGLYGSFHVNFSTSVPRPLLERLATACAAAPPACAGRVARVADQYIDFVCIEDDLFSLAQPRAYVALNDPAAADADITALVDAVALGLFCVVATLGVVPVISCARGGPAEMVAGALDARLRDHLLAKPNLFTEAASAAVTSFQRPVLCLFDRNFELSVGVQHDWSYRPLVHDVLGLKQNKLKLPAEKYELDDSDKFWVANSWSPFPKVAEEIEAQLAKYKQDVDEVNQHTGGGKVGVEFDGTDLIGNTKHLMNAVNSLPELTERKNMIDKHTNIATSLLGHIKERSLDGYCSCENDMLVSGTVDRNTLLSLIRGKGTKEDKLRLAVTYLLSFATPPSSELEQVEAALRESEVDMSAFQYVKRIKALLNTQFAAASGTATKSNIVDWAEKLYGQSIGAVKNLLSDSRQLALTRTVEALMEGKPNPEVDDYLLFDPRAPRSGTSGQFKGPFREAVVFMIGGGNYIEYKSLIELNQRSQPSKHVIYGATEILSGAEFIHQLAELGQKAGLGGGSSNIPPGSAQ

SEQ ID NO: 62893 - protein, 268 aa, Zea mays
  Clone ID: LIB143-059-C3_FLI.pep
ETGALLFPAINVNDSVTKSKFDNLYGCRHSLPDGLMRATDVMIAGKVAVVCGYGDVGKGCAAALKQAGARVIVTEIDPICALQALMEGLQVLPLEDVVSEADIFVTTTGNKDIIMVDHMRKMKNNAIVCNIGHFDNEIDMLGLETYPGVKRITIKPQTDRWVFPETNTGIIVLAEGRLMNLGCATGHPSFVMSCSFTNQVIAQLELWKEKSSGKYEKKVYVLPKHLDEKVAALHLGKLGAKLTKLTKSQADYISVPIEGPYKPAHYRY

SEQ ID NO: 62894 - protein, 651 aa, Zea mays
  Clone ID: LIB143-053-G1_FLI.pep
LVAMAKGEGPAIGIDLGTTYSCVGVWQHDRVEIIANDQGNRTTPSYVAFTDTERLIGDAAKNQVAMNPTNTVFDAKRLIGRRFSDPSVQSDMKLWPFKVIPGPGDKPMIVVSYKGEEKQFAAEEISSMVLIKMKEIAEAYLGSTIKNAVVTVPAYFNDSQRQATKDAGVIAGLNVMRIINEPTAAAIAYGLDKKASSSGEKNVLIFDLGGGTFDVSLLTIEEGIFEVKATAGDTHLGGEDFDNRMVNHFVQEFKRKHKKDISGNPRALRRLRTACERAKRTLSSTAQTTIEIDSLFEGIDFYSTITRARFEELNMDLFRKCMEPVEKCLRDAKMDKSSVHDVVLVGGSTRIPKVQQLLQDFFNGKELCKSINPDEAVAYGAAVQAAILSGEGNEKVQDLLLLDVTPLSLGLETAGGVMTVLIPRNTTIPTKKEQVFSTYSDNQPGVLIQVYEGERARTKDNNLLGKFELSGIPPAPRGVPQITVTFDIDANGILNVSAEDKTTGQKNKITITNDKGRLSKEEIEKMVQEAEKYKAEDEEVKKKVDAKNTLENYAYNMRNTIKDDKIASKLSADDKKKIEDAVDSATSWLDSNQLAEVDEFEDKMKELEGICNPIIAKMYQGAGAGMGDAAGMDEDAPSGGSGAGPKIEEVD

SEQ ID NO: 62895 - protein, 228 aa, Zea mays; identical to SEQ ID NO: 60163
  Clone ID: LIB143-036-E6_FLI.pep

SEQ ID NO: 62896 - protein, 177 aa, Zea mays; identical to SEQ ID NO: 50616
  Clone ID: LIB143-033-D8_FLI.pep

SEQ ID NO: 62897 - protein, 303 aa, Zea mays
  Clone ID: LIB143-044-E12_FLI.pep
RPSPFSSPSIGGCLLPPLPSLHRAAAATMKGPGLFSDIGKKAKDLLSKDYTYDQKLTISTASASGLGLTSTAVKKGGLYSLDVSSVYKYKNTTVDVKVDTESNISTTLTVLDALPCTKLVTSVKLPDYNSGKVELQYFHENATFATVVGTKPSPVIDLSGTVGAQGVAFGAEAGYDTATGKFTKYTAAIGVTKPDYHAAFILADKGDTIKVSGVYHLDEKQKASAVAELTRRLSTNQNTLTVGGLYTVDSQTAVKARLNNNGTLAALLQHELKPKSLLTISGEFDTKALDRPPKFGLALALKP

SEQ ID NO: 62898 - protein, 153 aa, Zea mays; identical to SEQ ID NO: 48136
  Clone ID: LIB143-041-B12_FLI.pep

SEQ ID NO: 62899 - protein, 248 aa, Zea mays
  Clone ID: LIB143-040-B9_FLI.pep
TNQVKNIQLQAKPNTPLQQEKNAKRKNERSLSQRRRRAAGAFTAPAHGAGVGSEPGHFVLTVAAAAVAVHVGLLLLGRLGRAAGARRGPELHDRTAGSRCGQEGRPLLAGHDDHHVLLEPRRRPGRAGRRALLPVGARFSGRAGPLAAVGVEVPGQLPVGAGQDEQRQGYEPQHRRQPAEQVRHRRLPRGVRHVRVRTHGRAVAHGRELCCWPHGGRAASSLAPYPPRLACVLAVVVLRMRGTRDQGC

SEQ ID NO: 62900 - protein, 858 aa, Zea mays
  Clone ID: LIB143-023-D11_FLI.pep
PRRYDLRLTPDLPACVFTGSVAVSIGVAAPTRFLVLNAAELDVATGGVSFAPQGSDQVLQPLEVTNVPEDEILIIRFNEVLSIGEGTLTIAFKGTLNDKMHGFYRSVYELNGEKKNMAVTQFEPADARRCFPCWDEPAFKAVFKITLEVPSETIALSNMPVIEEKVNGPTKIVYFQESPIMSTYLVAVIVGNFDYVEDFTTDGTRVRVYTQVGKSAQGRFALEVALKTLVLFKEYFAVPYPLPKMDMVAIPDFAAGAMENYGLVTYRETALLFDEMHSAAANKQRVAVVVAHELAHQWFGNLVTMEWWTHLWLNEGFATWVSYLAADQFFPEWNVWTQFLEESTIGFKLDALAGSHPIEVDINHVDEIDEIFDAISYRKGASVIRMLQNYLGAEVFQNSLAAYIKRFAYSNAKTEDLWAALEEGSGEPVRTLMHSWTKQQGYPVITVKLKDGKFQLEQTQFLSSGSTGVGQWVVPITLCCCSYSRQAKFLFHGKQEDFDLSASGFTDCQKKDGFWIKLNVNQTSFYRVSYDEELAARLRYAIETNKLGAADRYGVLDDAYALCMAGKQKLVSLLHLISVYKDETEYTVLAHIITTSLHIAEMMAIAAPEELVHLKKFLIDFLEPFALKLGWDAKSDEGHLNALLRGTLLTALAELGHEATINEAVRRFNVFLEDRETPLLPPDVRKAAYIALMQTVSKSNKTGYESLLRVYRETDLSQEKVRVLGSLASSPDHDVVREVLNFILSPEVRNQDAIFLLRGVSSGAHEVAWQWLKENWDYILGAYSGTLLTYFVNITVSPLATDEHGDEAEEFFKSRTKANIARTVRQSIERVRINAQWVKNIKAEADLGNVLKKLAYKH

SEQ ID NO: 62901 - protein, 237 aa, Zea mays
  Clone ID: LIB143-018-F1_FLI.pep
ASANQRVAGNMSPPVKILGHYASPYSHRVEAALRLKGVPYELVQEDLGNKSELLLAKNPVHKKVPVLLHGDRAVCESLLIVEYVDEAFDGPSILPADPHDRAVARFWANFLDTKFSQPFWLAYWAEGEAQKAVVKEAKENLALLEAQLGGKSFFGGDTPGYLDIAACALGPWIGVLEEVTGVALLDADEFPALCQWARDYSSSEALRPCLPDRDRLVAYFTENKEKYKTFAKATLHQ

SEQ ID NO: 62902 - protein, 215 aa, Zea mays
  Clone ID: LIB143-004-E1_FLI.pep
PIHHPAMPPKRKSPATIAPAAGSPRKTRSMVAAAAAGKRATEPAPAKAVPAKKEDEAAVAELKGRKRGKKEAEAVTVATEPKGRKRDKKEAEAVTVATEPKGRKRGKKEAEAVAPAAEEEDGVDVAAGAKRVIVEACTQCRQFKIRAQKVKEDLESYVSGVSVIINPQKPRRGCLEIREEGGEVFISLLNMPRPFTPMKKLDMDKVIKDIAKKIS

SEQ ID NO: 62903 - protein, 438 aa, Zea mays
  Clone ID: LIB143-003-D10_FLI.pep
QQSQRKVVLMSTVTLPTLSRCLVELEGLHHLPGEVGVVTAEVAVGGGLDEPVAALLQVEVDADHPGPEVEVLLHDLEDLLVGDRAGAVRVDEHGQGLRHADGVRHLHEAAAGEAAGHDALGGLPGHVGAAAVHLGGVLAGEGATAVGSPAAVRVDDDLAAGEAGVTVGPADDEAPGRVEVEDGLLVEVLLRDHGLDDVLLEVGGDLVVGDGLVVLGGDEHGVHADGHHGAALVHVLHRHLGLAVGPQPGAGAVLAHLGEARAQLGGQHVAQRHQLGGLVGGVPEHVALVARADLLGPLREVPVHALRDVGGLLLDVHQHLAAVGVEAHVVGGEPDLAAGVAHDLLVVHGRLGRDLAEHHHHVGLGAGLAGHLAVGVLREACVKHGVRHLVAQLVGVPLVHGLRGEKEALGRHCLLLALPTSCAAALYSGPARGRRGKR

SEQ ID NO: 62904 - protein, 537 aa, Zea mays
  Clone ID: LIB3066-043-A11_FLI.pep
SDPTETFLSVRSIDRCRVVCQTPSAPKTMACNLAQCATAAAATVAPRTPRPAASASVSFSARKPAGGSLRLQRQACCEPSVAPSRAVFACRAAASGSAADLASGGRRSSGVPVFVMMPLDTVKECGTALHRRKAVQASLSALKSAGVEGVMVDVWWGIAERDGPGRYNFAGYAELMEMARKAGLKVQAVMSFHQCGGNVGDSVSIPLPRWAAEEMERDQDLCYTDQWGRRNYEYVSLGCDAMPVLKGRTPVECYTDFMRAFRDHFADYLGNTIVEIQVGMGPAGELRYPSYPESNGTWKFPGIGAFQCNDRYMRSRLKAAAEAAGKPEWGHGGPTDAGGYNNWPEDTVFFRGDNGGWSTEYGDFFLSWYSQMLLEHGDRILSGATSVFGAAPVEVSVKVAGIHWHYGSRSTPPSSPRATTTRGATTGTSPSRASWRATAPCSTSPAWRCGTTSSRRRRGACRRRWSGRWAPRRAPPGWASRARTRCRGTTARRTTRWSPRPPSAPPRTGWWPSRTCAWGPTSSTRTTGGASPPSCAA

SEQ ID NO: 62905 - protein, 533 aa, Zea mays
  Clone ID: LIB3067-007-F4_FLI.pep
LNERPDLGIKKILIVDWDVHHGNGTQKMFYDDPRVLFFSVHRFDYGSFYPAEGDASHCFIGEEAGKGYNINVPWEHGKCGDADYIAAWDHVLLPVTKVFDPDIILVSAGFDAALGDPLGGCCITPNGYALLLTKLLGFAQGRIVMALEGGYNLRSIANSVCACAKVLLGDKFTFNTPEMQPFESTWRVIQAVRNELKTCWPVLSSKLPENVSLRIKPAPSELYASSDSESDSEDVDELLGTVASVNVIEATGVAISEHLSKMKLDDDSLAVKTNSSCSAAEQHPVDSVKVHNNASVVLTKKISDLSLEWRSDLSKTDVWYASFGSNMWRPRFLCYIQGGKAEGMNIPCCGSRDTSSPKGTVWKTVPHRLLFGRSSTPCWGTGGVAFLNPEINYNEKLYVCMYKITLEQFNDILFQENRLVLEDGKDGNTVYPDSPLIGSSEIKFISTNRAVHLEPIKDSWYSNVLYLGNEDEVPILTMTCPASDIERYKSGELRLAPPSETYAATLIKGLVEGKQMDADGAASYINAAAARAL

SEQ ID NO: 62906 - protein, 76 aa, Zea mays
  Clone ID: LIB3067-014-G10_FLI.pep
SCFGACIQTSFNPVSALPYVPLPVGVVLVPNNIYEFCDELATVLPMTMFASKGHGLSSLIYHCVEVLCYNVIVVLT

SEQ ID NO: 62907 - protein, 157 aa, Zea mays
  Clone ID: LIB3067-031-H6_FLI.pep
RLVRARYLLHITSPELGGRRGRSRRSASGGVLPDGVPELVLVDGSKALERLAVPDEAEGRHHMDAVDLRDFQQFVDVDLEEDRGRVLAGAVRVHRGHHLAPTAPGGHEVDDHQLALLLGLGHAGVELVLGVARDHGTLLGRHYSDPLFSFPRCGIRP

SEQ ID NO: 62908 - protein, 393 aa, Zea mays
  Clone ID: LIB3066-030-E11_FLI.pep
LLPSFRIRIWIWIWIWIGCVSCVTMSEIMKLKRGISTKPGDHLVQNGQQHPCHEWEEQQRYWPSPRAPPASPTESPRTPGGSQKKAVLGKVKSKAKKWMHMLHHKKKPAPPEEMMWTPRAGPGPSAAQDSMPSREERHAAEHRGTGTGTPRKPQQHAPSCSSSDPERASEVFLEASPRQNSPVPSPTAHRQQQQPQPYFKVSSRFESEMKEANEMLMESKKLRVNTTKPKTKTVTFAPPAVEREQPGPGGERSGWKKDCRRELPGAAASQALRDAFAAVRQTVLEMVARIQEAVALVDGRRHVVERLVSLGRYLVMKLEPGQDDTLLSEAITDAVLDLFDAWSESVERPLVRRAKEISSWFLQEGREDTPPPVPPSTRPCAAEDADVFYSLEN

SEQ ID NO: 62909 - protein, 172 aa, Zea mays; identical to SEQ ID NO: 41503
  Clone ID: LIB3067-004-B3_FLI.pep

SEQ ID NO: 62910 - protein, 991 aa, Zea mays
  Clone ID: LIB3067-009-G2_FLI.pep
TVLSSAVSLLEAPVASVKRIRTDKRTGDTSAVAGTEMMTSTSNQKDVAAVPPASAGENSQRVVRPMASSASDKSKGRAVSPEKEFANGENANEVNSNIEDSPMVVAAAPISPDAAANDTCQQNGFVSDSHLGAEIALEDQRDHIIRELNASTNVPPSRCQAFKDGMKQGIINPSDIDVTFENFPYYLSENTKNVLLSSAFIHLKKKEFIKQFVEISSINQRILLSGPAGSEIYQETLVKALAKHFSARLLVVDSLLLPGAPSKDPEFQKDVGKADKSGDKAAAEKFAIYQKHRSSLADTVHFRRPAAPTSSVNADIVGTSTLHSASLPKQESSTATSKSYTFREGDRVRYVGPAQPCSLSQRGPSYGYRGRVMLAFEDNGSSKIGVRFDKQIPDGNDLGGLCEEDHGFFCSAELLRPDFSAGEEVERLAMTELIEVISEENKSGPLIVLLKDVEKSFTGVTESLSSLRSKLESLPPGVLIIGSHTQMDSRKEKAHPGGFLFTKFASSSQTLFDLFPDSFGSRLHERSKESPKTMKHLNKLFPNKILIQLPQDEALLTDWKQQLDRDVETLKAKSNIGSIRMFLSRNGIECNDLEELFIKDQSLSNENVDKIVGYAVSYHLNQNKIETSKDAKLVLTTESLKHGLNMLQSMQNDNKSSKKSLKDVVTENEFEKRLLADVIPPNDIGVTFDDIGALENVKDTLKELVMLPLQRPELFCKGQLTKPCKGILLFGPPGTGKTMLAKAVATEAGANFINISMSSITSKWFGEGEKYVKAVFSLASKIAPSVIFIDEVDSMLGRRENPGEHEAMRKMKNEFMVNWDGLRTKDKERVLVLGATNRPFDLDEAVIRRFPRRLMVNLPDASNREKILKVILAKEELGSDVDMDSLANMTDGYSGSDLKNLCVTAAHYPIREILEKEKKEKNLAKTEGKPEPALYGSEDIRPLSIDDFKSAHEQVCASVSSDSANMNELLQWNDLYGEGGSRKKKALSYFM

SEQ ID NO: 62911 - protein, 487 aa, Zea mays
  Clone ID: LIB3068-021-D11_FLI.pep
DRRLRTRLSPRPKAFPLLPFFSHFSPPPPLPPFDNTMRECISIHIGQAGIQVGNACWELYCLEHGIQADGQMPGDKTIGGGDDAFNTFFSETGAGKHVPRAVFVDLEPTVIDEVRTGTYRQLFHPEQLISGKEDAANNFARGHYTIGKEIVDLCLDRIRKLADNCTGLQGFLVFNAVGGGTGSGLGSLLLERLSVDYGKKSKLGFTVYPSPQVSTSVVEPYNSVLSTHSLLEHTDVAVLLDNEAIYDICRRSLDIERPTYTNLNRLVSQVISSLTASLRFDGALNVDVNEFQTNLVPYPRIHFMLSSYAPVISAEKAYHEQLSVAEITNSAFEPSSMMAKCDPRHGKYMACCLMYRGDVVPKDVNAAVATIKTKRTIQFVDWCPTGFKCGINYQPPSVVPGGDLAKVQRAVCMISNSTSVVEVFSRIDHKFDLMYAKRAFVHWYVGEGMEEGEFSEAREDLAALEKDYEEVGAEFDEGEDGDEGDEY

SEQ ID NO: 62912 - protein, 136 aa, Zea mays
  Clone ID: LIB3067-050-C2_FLI.pep
PEAQKAVADRRKRKKKRQRARMPCLNVSTNVNLEGVDTSAILAEASKSVANIIGKPEAYVMVVLKGSVPMAFGGTQEPAAYGELVSIGGLNPDVNKKLSAGIASILESKLSVPKSRFYLKFYDSKRSDFGWNGSTF

SEQ ID NO: 62913 - protein, 454 aa, Zea mays; identical to SEQ ID NO: 48078
  Clone ID: LIB3067-050-F12_FLI.pep

SEQ ID NO: 62914 - protein, 298 aa, Zea mays
  Clone ID: LIB3068-041-D2_FLI.pep
WIGKIIHLAPAAAAFCCTQVQSLILRCLQMYMDQKEVVDALSHHSKIEPCITELVWRQLEHQNPLFFKAYYMRLMLKTQIMVFNKLLQDQFEVINKEFSSGIPSMSLPNGSNSNLLKQNSCFLPETAPGSAMPDGIMHNGSSRGIINGTPSGDQLLNASKDLHGLHNGIDASTSLQSDQNAAAVLYGVDNETSATIKTESCYSSNADFAFCGNTFLESCQSIGDASGGGSFSSSELNGQPLNDSILDMESSSFSFLNQMPQSFIFPDLADDFNQSAEITPFLTPETNFSDSTGGDHTG

SEQ ID NO: 62915 - protein, 891 aa, Zea mays
  Clone ID: LIB3068-041-F8_FLI.pep
HTANTPQGHSKDLVVEPKMFGNIGKIPIIGDLTGSNKNAHLKGNVVLVRKTVLGLDVTSIAGSLLDGIGEFLGRGVTCQLISSTVVDPNNGNRGKLGAEASLEQWLLNPPPLLSSENQFRVTFDWEVEKQGIPGAIIVKNNHASEFFLKTITLNDVPGHGTIVFVANSWIYPQSKYRYNRVFFSNDTYLPSQMPAALKPYRDDELRNLRGDDQQGPYQEHDRVYRYDVYNDLGLPDSGNPRPVLGGTKELPYPRRCRTGRKPTKSDPNSESRLTLVDGDVYVPRDERFGHIKKSDFYGYAIKALVNAVIPAIRTYVDLSPGEFDSFKDIMKLYEGGIQLPKIPALEDLRKQFPLELVKDVLPVGGDYLLKLPMPQIIKEDKTGWMTDEEFGREILAGVNPMLVKRLTEFPPRSSLDPSKYGDHTSTIREADLENKLEGLTVQQALHGNRLYILDHHDNFMPFLVRVNSLEGNFIYATRTVLFLRGDGTLVPVAIELSLPELRDGLTTAKSTVYTPKSTTGAEAWVWHLAKAYANVNDYCWHQLISHWLNTHAVMEPFVIATNRQLSVTHPVHKLLLPHYRDTMNINSNARQMLVNAGGIFETTVFPRQYAFEMSSVIYKDWNFTEQALPDDLIKRGMAVADPSSPYKVRLLVEDYPYASDGLAIWHAIEQWVTEYLAVYYPNDGVLRADVELQAWWKEAREVGHADLKDAPWWPKMQTVAELVKACTTIIWIASALHAAVNFGQYPYAGYLPNRPSVSRKPMPAPGSDEYAELERKPEKVFVRTITSQFQALVGISLLEILSSHSSDEVYLGQRDTKEWTSDAKAQEAFKRFGARLTEIEKRVVTMNADPRLKNRNGPAEFPYTLLYPNTSDTKGDAAGITAKGIPNSISI

SEQ ID NO: 62916 - protein, 430 aa, Zea mays
  Clone ID: LIB3068-042-F6_FLI.pep
GQCWRNYGSSYPITISFSVAFRPNDSNSQSGLPMDSVNDGDQSNGHYGHANQGLSQGLGAFGGGRSCPFLRDGRNSSLGRAARDRSGTCQPPVTNQGTACQISCIVDTSELRKIADPLLDCLLADWETRHSSMFHQSSRIFIDPCCLDMRMDLGGFGPQSSNWLGISTASRDWNGLQLWPPINYLKQFLTPCRDLGYLRVNLSGFSLPSGMVYGGATTVKIFYQRRRKTTAGNKIATINDDDNVEAHALRLGLDVDVTAVTPSDPPSDVEGAADTPSETISRFHGPLLLEYNGTTRRADADSTVPLRPEVVASDDSSMQNFGDSCESSLDPSSSMESRRRSFMAKITMAPSQLLAAPVLPKRSRGATKYGTALRRSRRVAGAGVEFNMQDLENRATKQVMRTLKVITENACINQQAVFFSNTQESCVSLY

SEQ ID NO: 62917 - protein, 364 aa, Zea mays
  Clone ID: LIB3068-057-F5_FLI.pep
SSPSAVRLCAVAASAQTALSQPASPSPVRRELNRIESMGSSSNTNTSGGASDKEEKKEDKVKGKDSSGPSFKENERVLAYHGPLLYEAKVQRIENHEDEWRYFVHYLGWNKNWDEWVANDRLLELTEENVRKQQELDKNQVVDKTMKSGRSTQHKPKVSNADAKADKDDTKSLISVKGKKRKSQLGTEIQDKEKRSSHSLLVLQFPLPLKKQLVDDWEFVTQMGKLVKLPRSPTVDDILKKYLEHRAKKDGKINDSYAEILKGLRCYFDKALPAMLLYKKERDQYAEEVKGDVSPSTVYGAEHLLRLFVKLPELLASVNMEEDALNKLQLKLLDVLKFLQKNQITFFTSAYDGSCKGADEDKTK

SEQ ID NO: 62918 - protein, 277 aa, Zea mays
  Clone ID: LIB3068-057-H12_FLI.pep
PVPPPNLQQAKPINNHQPHQSIPFPLPLHFHGQGSVLLLPLPQRQARQRPEGRLVLAALLRGERAAVPVPTPTPEEVAVVVVNHNQGRDGARVPQVRRERRRADLAVRAGGAVRGRGPRRDRRRGVAHDGGGGRGRRRLHQPARVRRAHGVRVRRRRRRRGGPAPRLHGLRRRRQRPHHARRARARPARPRGVRHRRPVPPHDPGRRPQRRRPRLLRRVQAHDGRGRRRRIRQDRCLGTRILCLSCSASALLRSHKLDFFHFMYVHILHWNHTDSAT

SEQ ID NO: 62919 - protein, 263 aa, Zea mays
  Clone ID: LIB3068-059-H2_FLI.pep
AVRLSRLQHFHPRAAVAGASRAAGRPVGSAAAKMNDADVAKQIQQMVRFIRQEADEKANEISVSAEEEFNIEKLQLVEAEKKKIRQEYERKEKQVEVRKKIEYSMQLNASRIKVLQAQDDLVNKMKDDAMKELLLVSHNHHEYKNLLKDLIVQGLLRLKEPAVLLRCRKEDHHHVESVLHSAKHEYASKADVHEPEIFVDHDVYLPPAPSHHDAHGQFCSGGIVLASRDGKIVFESTLDARLEVVFRKKLPEIRKLLFGQTAA

SEQ ID NO: 62920 - protein, 125 aa, Zea mays
  Clone ID: LIB3069-014-B12_FLI.pep
LKKLNQINTPFDFWTKLKEKRMRREREGGEGGRKKIPDAWAILSSPLLSSRVYSFPCWLGFADDDGGVPHLGAGQGRQRAGGHSHFRPLPEVLVPRPRRAYLAQAQKRRSIDPRGVTEEESQGGT

SEQ ID NO: 62921 - protein, 485 aa, Zea mays
  Clone ID: LIB3069-017-C3_FLI.pep
SLIRSEDSAGAGMNEKASVSKELNAKHKKILEGLLRLPENRECADCKSKGPRWASVNLGIFICMTCSGIHRSLGVHISKVRSATLDTWLPEQVAFIQSMGNEKANSHWEAELPPNYDRVGIENFIRAKYEDKRWVPRNGTLRPSSGVRDEKSQESPASANRSGHHRSSFEQNRASPALPSKVAHVASRIPSQASPQPPKVEPPVPKVVSPPQPQKSPAKVEATPPKVEKPSVAPPPKVDYATDLFNMLSMDGTTEKESESSPNDDNAWDGFQSAQPVPSSEEKDSAKPAESMTQSTSGIEDLFKDSPVVSLSSAPAVSQVNAKNDIMSLFEKSNMASPFAVQQQQLAFMSQQQALLMAALKAGNSPQIVPGNANQLNTNVSSPPLGTLPFQNWTNLGYQNPGLTLAAAQNGATKVANNNQDLSSGTFGFGTPGMHNITPAVPANGATAAGASNNGTASTASSTLPSQSGKDYDFSSLTQGFFTKR

SEQ ID NO: 62922 - protein, 206 aa, Zea mays
  Clone ID: LIB3069-023-C8_FLI.pep
SILSQASVYGEQVEELRRRQDDGEGLHAYQSGIPAVQFNLLHRQPHGEQGERPRNEAGGGRRRQALGAPGADVVEPRQRRARADHPGDHGEDDEEPGRRVPDGEVDRGEVSREVEAGADEEAVVDGVVDGPAAHRRHDDVHAQVEHQQESGHRLHARVRHGSILATALLVVGQAKRALSTEHGLSSLAPSLALYAYTYYFSAGLRY

SEQ ID NO: 62923 - protein, 285 aa, Zea mays
  Clone ID: LIB3069-047-E9_FLI.pep
TENGVTSPPSRPRAPDRLLRSAAVTAGAAPANAERATGQLAAPGASSRKPAAGAPGAAGRQPATCAHRHSTSGPDHSAPGPDHTSPGSHNAAPGADNSTSDPHHAASVPTGVATARSHHSATVSPGKPAARSRHPATVSTHGATSRHAPSTRHPAATGRAHAGPERGPDSPARGDTGCVPQEPEDAEPRRRDVPGALALAHGHADERGLGCKRARGRLRHGGGVGGRGPRRPALKTRLRLFLLSSRRCCHPLPVPRRCCSLHFSFIFFFFPLVLLFNFTGPTIDS

SEQ ID NO: 62924 - protein, 228 aa, Zea mays; identical to SEQ ID NO: 62059
  Clone ID: LIB3069-052-F1_FLI.pep

SEQ ID NO: 62925 - protein, 289 aa, Zea mays
  Clone ID: LIB3069-004-A5_FLI.pep
PAQASCRSPSTRENQSCSLLRRPAGEPAVRRVTERNLLDGVQHRLPRVRPVAPQPAAARLACGACAYFMFLSTIRALQTGGLEQPEHRVHPGAIAAAGLVLRVAPAPAPGRAPAALAGGRGDPLPGGGGGGGGGVGLGERGHLVVGEHGVEHVHGQEEVGVARAEELGGGHAGDAAADREAAGVADEPARVVEHELRRAHRARQPGDGAVRVDHLGGCAGRRRRGAAPRGRKRYARRRVPHGHARTHTNWNARSQGQSGCRVGMGREVGGGDETAVGRCLGARERLERW

SEQ ID NO: 62926 - protein, 255 aa, Zea mays
  Clone ID: LIB3069-004-H6_FLI.pep
LRTRLNPSSRAAAPARRQPTGAGAAMKKIFGAKKDKGPPPSIQDATERINKRGETVDEKIKKLDEELARYKEQIRKTRPGPSQEAIKARAIRLLKHKRMYEEQRNMLYNQTYNLDQVGFAADGLKDAQQTMNAMKAANKELKGMMKTVKIDEIDNMQDEMTDLMDVSNEIQETLGRSYNIPDDVDEEELMGELDALESDMEFDSAAVPSYLQPDSDFDADLNLPAAPSRPAMVPAGGLQEDELGLPAVPRASLRS

SEQ ID NO: 62927 - protein, 422 aa, Zea mays
  Clone ID: LIB3069-011-E5_FLI.pep
HGGTPCVGCLLPQCRPRVPFAPADTDAATATAGMATPLRATAVLAWGSGEDGQLGMGGNEEKDWPHFVEALGPYAVTAVVAGSRNSLAICDDGRLFTWGWNQRGTLGHPPETKTESSPGPVDALAGFKIVQAAIGGWHCLAVDDKGRAYAWGGNEYGQCGEEPERKEDGTRALRRDIPIPQRCALKLKVRQVAAGGTHSVVLTQEGHVWTWGQPWPPGDIKQISTPVRVQGLEKVRVIAVGAFHNLALTEDVILWAWGNNEYGQLGTGDTQPRSQPIRVEGLSDLSLVDIAAGGWHSTALTIDGEVYAWGRGEHGRLGFGDDKSSHMVPLKVELLAGEDIVQVSCGGTHSVALARDGRMFSYGRGDHGRLGYGRKVTTGHPMELPINLPPLSSSRDGRWQAKYVACGGRHTLAIAEWTEATD

SEQ ID NO: 62928 - protein, 339 aa, Zea mays
  Clone ID: LIB3069-015-E8_FLI.pep
LAPGFTLPYFQFSSEGDPNPESPPAKTSSRARAHTHTLLALCQRLGLWRRRKHLGDAFGGDGGEVLGPRVAVLRGGCDRPVVLVGPVRGGGHDDLRDVREHRQAVQRAPGGDGQVLRRGLVPHVEVLGHGLHAAVHVPRHRLRHRERRTGCAPHARPLRLGRQLARHLRHAPNHRVDMRRRRLQRAREVLVHLVHRVVHLAVDEGEDVERQAAEAVVDGANDALDGRLDGVNAGAERAGVVLGEAVEPSEAHRGLGSRHLDEVQVPQLRGPPRLLLLHHNLPLLRLLVLGVGLLLRHRANQTRDSLGYSGTVEPGRQTGLREEKETEQARRYGFFRLLA

SEQ ID NO: 62929 - protein, 435 aa, Zea mays
  Clone ID: LIB3069-016-E11_FLI.pep
APPQPVPAPSRSPRQSCDSATAAMAFEKIKVSNPIVEMDGDEMTRVFWQSIKDKLILPFLDLDIKYYDLGILHREATDDKVTVEAAEATLKYNVAIKCATITPDETRVKEFNLKHMWKSPNGTIRNIINGTVFREPIICKNVPRLVPGWTKPICIGRHAFGDQYRATDAVLKGPGKLKLVFEGKEEQIDLEVFNFTGAGGVALSMYNTDESIRAFAEASMTTAYEKKWPLYLSTKNTILKKYDGRFKDIFQEVYEADWKSKFEAAGIWYEHRLIDDMVAYALKSEGGYVWACKNYDGDVQSDFLAQGFGSLGLMTSVLVCPDGKTIEAEAAHGTVTRHFRVHQKGGETSTNSIASIFAWTRGLAHRAKLDDNARLLDFALKLEAACVETVESGKMTKDLAILVHGSSSVTRSHYLNTEEFIDAVATELRSRLGAN

SEQ ID NO: 62930 - protein, 226 aa, Zea mays
  Clone ID: LIB3069-018-E4_FLI.pep
KRQRNNAKIRLTMGKGFASYLAMKTGPEGGDGAAAAAQQALIDADLRNLAVAARKLANHAFVLGGGLGFGTSFLKWLAFLAAVYLLILDRTNWKTNMLTALLVPYIFFTLPNVLFSMIRGEVGKWIAIIAVILRLFFPRHFPDWLELPGSIILLTAAAPSLFAHTFRDDLVGVFICLAIGCYLLQEHIRASDGLRNAFRKGNGVSNSIGILLLFIYPVWTGVLQIL

SEQ ID NO: 62931 - protein, 230 aa, Zea mays
  Clone ID: LIB3069-021-B8_FLI.pep
ASRGQQPSAMSEVFEGYERQYCEASASLSRKCTAASALDGERKKQKLSEIQSGVEEAESLIRKMDLEARSLQPSIKAGLLAKLREYKSDLNNVKSELKRISAPNARQATREELLESGMADTLAVSTDQRGRLMMTTERLNQSTDRIKESRRTMLETEELGVSILQDLHQQRQSLLHAHTTLHGVDDNIGKSKKILAAMSKRMDRNKWIIGGIITALALAILFILYFKLAH

SEQ ID NO: 62932 - protein, 361 aa, Zea mays
  Clone ID: LIB3069-021-H6_FLI.pep
LRQMHKSYRSKRVRIHGYKQLSLTATTAGPRKSKRCERRRRSGGLRQSTMHARAREKLNDRRRAGRESWMLAAHPWVGRLRLLVVGGGELLVGVGDEEQLVDDAGEAAADEGPDPVHPLVAPLPADEGGAEGHGGVHGRAVEGAAHQDVGPHDEADGNGGDGAQAALLRVHRRGVHRVHQPEGHHDLQHQRLPHRHARQPEGARGLPARREAEQEARHGGPQQLRHPVQEPPEQGDVAAHEGAEGHGRVHVPAGDVRAHRHRHEQRERVRHRRRDQARRGRRAAAGQLAEGHAGALAGEDEDEGGDELSERRLEGARVVHLLVAPQGDPIDRHFHGPLASSRSGHDCDWSWSGGKLSSGGV

SEQ ID NO: 62933 - protein, 259 aa, Zea mays
  Clone ID: LIB3069-025-G3_FLI.pep
FRSRVRARRRYRHLMQDVLSLLPHAKKDSKVESKQSKGNALNELLELRSCSSCLFFECRKQKDLYLWMVKSPGGPSVKFLVNAVHTMEELKLTGNHLKGSRPLLTFSTNFDEQPHWKLVKEMITQIFASPKDHRKAKPFHDHVFVFSIVDGHVWFRNYQISVPHNEIDKVDKGGLDKMTLIEVGPRFCLNPIKIFGGSFGGPTWYENPYYISPNQIRALEKRQKAGKYAKKVKAKVRRKMHEMENTLEPDEFAELWKGE

SEQ ID NO: 62934 - protein, 242 aa, Zea mays; identical to SEQ ID NO: 46973
  Clone ID: LIB3069-027-E10_FLI.pep

SEQ ID NO: 62935 - protein, 285 aa, Zea mays
  Clone ID: LIB3069-028-G10_FLI.pep
LHPLRQVPIIPQPGGMAVSNNITACINFLVLLCTIPIAATGLWLASRHGSEDCARLARWPVAVLGALLLLVALAGFAGAYWNRRGLLACYLFAMAALITFLLAFLVFAFAVAHDSGAYPAPGRAYQDYRLQGYSSWLRGYVADDPRRWEGVRACVAASGTCRKLAMDRSFIVPEQFYMSHLSPIESGCCKPPTVCGYAYASPTAWTGPAADADCAAWSNDPGQLCYACASCKAGVLGGLREQWRRATVPLLVATVALIFVYVVGCSAFRNAQTEDLFRRYKWGNY

SEQ ID NO: 62936 - protein, 506 aa, Zea mays
  Clone ID: LIB3069-038-C6_FLI.pep
GRPDDDPAWFCLRVGCDQSHEQVDPEALDRSFFMRVMAARSPNVRLQKAISKKNQSSMLKCPHSAPPKQPRARFARLSAETETAGKAPAEPKPRVERICAMQASPIRTKTARVECPSERKKALTTPRSKAVRPRQELFHSVKHQKEPLAAAARKGTVVKSLFMSTTPKKEPVQTPAADKSKGAVSKVCSKLRKLNLACREVPSRYMSQPQPKIMKTAKKAEETTVAKSEKRGLESRTNAKKKILGRSVKRANAEPDGENRNGCSSAADENSLAETAGSHQERKVVLQELRIEVDASRCDNSDDNKENVSSAPSEEALDNSHYGSENRLLENNENVPVKENVALKVAKLQKKVHQEQAVKLKKTTNPRPFRLRTDERGVLKEAKPEKRQPFAENNSMAVLKDANREVAQMDKHTHCKGRDKPPTCGKKQKKQSAQIAVTAQQLGEPTRPAFNNGIQRKAVEPERVCSAASSTRTTKPARGLPAPPPSRTGKEMKAAVKLSRFQTAAA

SEQ ID NO: 62937 - protein, 445 aa, Zea mays
  Clone ID: LIB3069-039-G4_FLI.pep
DLGLSSAAEWERMGRRKMSAAAPPSRSWSNVGGSVIPELLAKHKMDLENLTLTKHPIRTLHFFLLAMLQYLKRLATYILRKSGLFFLLIVLVVASGILLSISDGLHKKHVQEFLNYAKFVLWWISLGVASSIGLGSGLHTFVLYLGPHIALFTIKAVQCGRIDLKTAPYDTIQLKVGPSWLDKKCSEFGPPVYPASAHSVRIPVFDLLPQIQLEAVLWGIGTALGELPPYFISRAARLSGSKSKAVKELDAATSKEDGTVASTLDRSKRWLLSHSQHLNFFSILILASVPNPLFDLAGIMCGQFGVPFWEFFFATLIGKAIIKTHIQTLFIVSLCNNQLLYLMEKELIWIFGHIPGFSATLPSVIAKLHAAKDKYLSPPTPVSASSQMEEKSWNLSFTLVWNSIVWLVLLNFSVKIITSTAQDYLKKQQDMEMERVSDSPPPEQN

SEQ ID NO: 62938 - protein, 339 aa, Zea mays
  Clone ID: LIB3069-041-C11_FLI.pep
HGLLWRRHVRQAAGHPRGDAAARPGRVRAPPGRLIRRPGRARARGPRRRQADQGRRGRGHRGARRQGPGLAAGAGRARRQARPTALPLHAAGGGQGRDVPQLRRLLQRRRRRRRLRAGVARRLASLQRLLLRAFLRGGGPAVQGLQQGAAAAGAGCCVGGRVLERVRAEGGRLQRRAGQGHRRGHRPAREGHLHVQRGLRQPGASVSVRCPVPLPCSVASDKSIQWRIALLCVMSHVPDHCWLLAGSERSRSVSPTGCRQRTEQIRRRRWWRQQEHQAWSSQQESQEGQEAVGDDREDEPVAARHGHLGDRVHGGAADPLQARASIPRHRARRGHPGIS

SEQ ID NO: 62939 - protein, 332 aa, Zea mays
  Clone ID: LIB3069-044-D11_FLI.pep
RPPCAPPAMASTAVKLIDIAVNFTDGMFKGIYHGKQCHVADIPAVLARAWAAGVDRIIVTGGSLKESREALQIAETDGRLFCTVGVHPTRCGEFEESGDPEGHFQALLALAKEGLDKGKVVAVGECGLDYDRLQFCPADMQKKYFEKQFELAEAVKLPMFLHMRAAGEDFCEIMTRNLHRFPGGVTHSFTDSAEDRDRLLSFEKMFIGVNGCSLKTNENLEVLRGIPVERLMIETDSPYCDIRNTHAGSQYVKSVWPSKKKEKYEPDSTVKGRNEPCLVRQVLEVVAGSKGISDIEGLSRTLYHNTCRLFFPQDLDASANAQLESGTAVQDC

SEQ ID NO: 62940 - protein, 296 aa, Zea mays
  Clone ID: LIB3069-045-G4_FLI.pep
GDLAGGGRRSDGGAKPAAQRRADGDDARRHEGAARRRHPRSRAVEEEVRRAHGPVPRHPQEDRRRQGVHGRDDARLLLLPRRGQVRRRRRRPSRRPPVHPRRLRPRSISPGECRRGQAPQVHSLRRPRRGIRGALQRVSEPYGPRPRRAAGRRLPRRARQGHRGARRARLAPDLLPHARRGHQDHQPPRQRARECREAQDREHHQLHQGGARRTRARGLFQAQEDPGLQEEGDRAPDGQRQAFRRGTARRGSRAQEGHLRGGCGKSAGCWRGEGRRHHLLIASFHDHPIIQSPWKQ

SEQ ID NO: 62941 - protein, 213 aa, Zea mays
  Clone ID: LIB3069-048-A8_FLI.pep
YNRTVTRSSLLSRSHGRGASLFRSSFSPLAAADGGCLPPSLCCVLLVLARPAASAVQRTDHHPVVHGGAPRRAGGVGAVGHPAFPAQLLPALSPGRRRCAEGRVGSAACGRRRRRRGAGLAARRRGDGQRRRPQHGDAPRHGGRRRALRGRRRRGRRGGEGRVLAELAEAGVRTRPGHRVVPQLVQKPHARSATCVLRVLLRDRWSCSDLFGS

SEQ ID NO: 62942 - protein, 231 aa, Zea mays; identical to SEQ ID NO: 53471
  Clone ID: LIB3069-051-G2_FLI.pep

SEQ ID NO: 62943 - protein, 146 aa, Zea mays
  Clone ID: LIB3075-026-F9_FLI.pep
TIPSSQEYRLSLAIVQAEHVILHEEGPSGRQQMECLGELDGVLLGAGAYGTGDEDEHASLGTRWLAVDGDDLMLAGLERERSELAGNGGRALELLALEGEHGGLLVQPNQRRAVGVERSVVMLHEGLRYRVRVHRHHLAAAGQARS

SEQ ID NO: 62944 - protein, 174 aa, Zea mays
  Clone ID: LIB3075-029-A4_FLI.pep
YEKERLDAELKLVGEYGLRCKRELWRVQYALSRIRNAARHLLTLDEKNPRRIFEGEALLRRMNRYGLLAEGQNKLDYVLALTAENFLARRLQTLVFKAGMAKSIHHARVLIKQRHIRVGRQIVNVPSFMVRVESEKHIDFSLSSPFGGGPAGRVKRKNQKKASGGGDAGDEDEE

SEQ ID NO: 62945 - protein, 180 aa, Zea mays
  Clone ID: LIB3075-044-A12_FLI.pep
YMGTAVQVTSSKSTTAATVTKNERGNCNGNGGRIHRRPCARTYARTRLVEVVGEEGEEERGGRGGEGGRAAAGGGPRGGGASGSASASASGSLGGRLGGSWGARGGGLGGGQHCGGRGGDDDEDGEEDPLHLHLAPAVVVVRRRRIALGTGSVGLFARMAAARVLLVSLAGSYWRLLVLL

SEQ ID NO: 62946 - protein, 164 aa, Zea mays
  Clone ID: LIB3075-053-H6_FLI.pep
LIWPSPSTSASRIISSTSSSVSFSPRFVMTWRSSAAEMKPFWSLSNTRKASLSSSSESVSFILRAIRLRNSGKSMVPLPSASTSLIMSWSSASVGFCPSERMTVPSSLVVMQPSPSLSKRLKASLNSAIWSSVSWSAMGVVVGRDQIDRSWKRQGAGSRTRKNG

SEQ ID NO: 62947 - protein, 83 aa, Zea mays
  Clone ID: LIB3070-009-F4_FLI.pep
PTRANATPSYLSLALATVIFVSNMTRQPRGDRQRCRFGAFNTSIPGGDSPRERRRHGGAGTDGSPAGRCSDSPAHLTKQDHDR

SEQ ID NO: 62948 - protein, 345 aa, Zea mays
  Clone ID: LIB3075-003-B11_FLI.pep
ALVNRRPRAPLRPDTSPLPRTGPWRESAGACQSGKPRPPLVGPSSLRLLCWSAPPNSTMPAAASHPSPTGPLVARPPASSSPPAGRPASQTLARRAREKLDAMFGYRKADPDLEAGGSSLLYPGMTESPELRWAFVRKIYVILTVQLAMTAAVSAFVVKVPAVSNFFVSSNAGIALYIFLIVLPFIVLCPLHYYHQKHPVNLLLLGLFTVAISFAVGMTCAFTSGKIILEAAILTAVVVNSLTAYTFWAAKRGHDFNFLGPFLIAAIMVLMVFSLIQIFFPLGKISVMIYGGLASLIFCGYIIYDTDNIIKRHTYDQYIWAAVSLYLDVINLFLSLLQLLRAADS

SEQ ID NO: 62949 - protein, 369 aa, Zea mays
  Clone ID: LIB3075-009-B7_FLI.pep
RTSIADVHVMCMDLSPKKPNKASASDGGAYYDWSPADLPMLGVASIGAAKLCLTAGGLALPSYSDSAKIAYVLQGKGIFGVVLPEATKEKVISVKEGDAMALPFGVVTWWHNNADAAISDLVVLFLGDTSTGHKPGQFTNFQLTGSTGIFTGFSTEFVARAWDLTQDDAAKLVSTQPGSGIVRVKDGHKMPEARDEDRQGLVLNCLEAPLDVDIKNGGRVVVLNTQNLPLVKEVGLGADLVRIDAHSMCSPGFSCDSAYQVTYIVRGSGRVQVVGIDGTRVLETRAEGGCLFIVPRFFVVSKIADETGMEWFSIITTPNPIFSHLAGRTSVWKAISPAVLQSSFNTTPEMEKLFRSKRLDSEIFFAPSN

SEQ ID NO: 62950 - protein, 454 aa, Zea mays; identical to SEQ ID NO: 48078
  Clone ID: LIB3075-011-A4_FLI.pep

SEQ ID NO: 62951 - protein, 220 aa, Zea mays
  Clone ID: LIB3075-025-H6_FLI.pep
RSGIVALDRAEAVIEITEWVEVPKKILTLESNITNLNSSSEVGAANSTTDSKENLSSGSNTNSSTPIDESNAQEIITEKVLKKRTFRVPLKVVEKTTGAGTILSKELYSEAKNRLEALDKKDAERRKTAELKNNLESYIYSMKEKLEESADILTVSTEQERESFAEKLSEVQDWLYMDGEDAQANEFKERLDQLKAIGDPILFRLSRTGRQTNHGSPKRE

SEQ ID NO: 62952 - protein, 105 aa, Zea mays
  Clone ID: LIB3075-030-B6_FLI.pep
QIQKSLNYSLNFFDMKKFTSNTNVHRIQEAPYNTTNLISVHDPQTSVFFSITTVLGDRCIHILDWLDPSSRKSCYVLKTEFFVNYYYYYRLALQTLLLFVVTDES

SEQ ID NO: 62953 - protein, 302 aa, Zea mays
  Clone ID: LIB3075-031-C1_FLI.pep
AALARLPIALPCRRRLIRSDPSPWRSPAPPCRRGRVHGGPNYQGDQRASLGDRGEHEGVLLLLRRDRVRRDAKGLGDVSGCLCHLQGVPWSRYSSAALWIKHVWRCFREHRTGGRLRTATGSVLPCRSKVSGSGNADGGGREEGGGGGEHHAGQGLRAEQGRAAARTVLRRPAPAAAVHGHGAGGVAGPPPGPQRQVQPRHGRGPRRGARRRRALPGHGARLGGLLGGRGGRGRQPLRVPRRRLGVGGRRRRRPGRVRRRRHDHGEGGQGRGGGGGLGGGAWSLRVVPCRRARRTGRCSSAR

SEQ ID NO: 62954 - protein, 368 aa, Zea mays
  Clone ID: LIB3075-040-F10_FLI.pep
ERRAVSLVFFLRSLPAAGRARAFSPFVSHGGRQDGERRHHPRGARHPPVVGIQRHRHHHQQVDLPETGVQVPPDGVVRPLHMLLHRSLHRDQSPENEAADRGGLGGPVEEDIPHVVGVLRQHRAGEREPEVHTSLIHADDQVVHSGNDSGSSVAGLEEILRVAHLGVLGAHRGRNPCHLRDGAELQHGWLLRRAGGVPGHVHQDHPGRVAAPRLQVRQHQHGVLHGSAGHADPVGAGRGAGGRRRAGVAADARVRGTGAGGRRHLRGAGLLPQLLHLLRHPLHDGSHLQRGRQPQGGRGGAGVLDGVPEPHLRHERTRLRRHARRMHLLRLRQAPTLAEPGAQSPLGDADAAAHRRQARRQDIKSLLE

SEQ ID NO: 62955 - protein, 315 aa, Zea mays
  Clone ID: LIB3075-041-C2_FLI.pep
GAKRQCSLTTEQTPASVTLLPLGSLRLPSSPSLRSLGYERIRIASPPPRPGEMAGLGKAMYAVGFWIRETGQALDRLGCRLQGKYFFHEQISRHRTIMNIFDKSPHVHRDAFVAPSASLIGDVQVGQGASIWYGCVLRGDANNIQIGSGTNIQDNSLVHVAKSNLSGKVFPTIIGNNVTIGHSAVLQGCTVEDEAFVGMGATLLDGVVVEKHGMVAAGSLVRQNTRIPCGEVWGGNPAKFLRKLTDDEIAFITESASNYSNLSKVHAAENAKPLEKIEFEKVLRKKFAHQDEEYDSSIGITRGAPPELTSPNPAQ

SEQ ID NO: 62956 - protein, 491 aa, Zea mays
  Clone ID: LIB3075-044-A11_FLI.pep
VPMVQLPGSKKRHAEMATAATVKAEVEGLGCGDGSPHKHVKPMPQPPPQPPPPEDLPFDVLDGPSPLGLRLRKSRSLVDLIQCKLFQDKSAHEQFDGHNNISDTPMKKEVRSGAPTAGERMKASNFPANVLRIGSWEYISHYEGDLVAKCYFAKHKLVWEVLHNGLKSKIEIQWSDIIALKATCPENEQEGVLDLVLARPPLFFKETDPQPRKHTLWQAASDFTDGQASSKRRHILRCPSSLLSRNFEKLIQCDQRLRELSQQPAAILQNPGFEPKRSIFQNPNESKDCLDIGGLKFEHNKATLPKFTAPLSTRVFSSLSNNVGRPINIGFGAGHFGGNVPEESKNCNQWNQLIVPGLEALQGDERSAGGPPLTTNDAISKKAWEDLVQHLFSDTPSLPALDDNNLTSRVDSLYSLLEKDTAPPAMRDPECSSDGGDIGAIQVDSDGFKGRLDPSPPGISRNDSLDELLLNLPKIASIPQFLFNRTEDSDE

SEQ ID NO: 62957 - protein, 257 aa, Zea mays
  Clone ID: LIB3075-046-B2_FLI.pep
RSSPTLVATGRLEEGEAHPSTSQCRAMAASSVSLGAPDGTSTRSVSTRRRNPNQKQLGNKMCAVLIYFSYNLCLCFFLLVCSVLVLFDSNWFLLLAQGGDEAVVARIGPWGGVGNALHDIAERPHRLHRVTIFSGTIVNSLEYLYSDGDGQQHTTGPWGGCGGTGRKIHLAPEEFIVEVTGTFHPCAWDRTIPSVVSSLTLVTSTGKTHGPFGTQLGAAFQVPVQSDSRIVGFFAHGDNYIEAIGAYVKKLTESSNR

SEQ ID NO: 62958 - protein, 414 aa, Zea mays
  Clone ID: LIB3075-046-E2_FLI.pep
DHDKMACTDNAMRALFLLVLFCIVHGEKEESKGIDAKASGPGGFFDITKLGASGNGKTDSTKAVQEAWASACGGTGKQTILIPKGDFLVGQLNFTGPCKGDVTIQVDGNLLATTDLSQYKEHGNWIEILRVDNLVITGKGNLDGQGPAVWSKNSCTKKYDCKILPNSLVMDFVNNGEVSGITLLNSKFFHMNMYQCKNMLIKDVTVTAPGDSPNTDGIHMGDSSGITITNTVIGVGDDCISIGPGTSKVNITGVTCGPGHGISIGSLGRYKDEKDVTDINVKDCTLKKTMFGVRIKAYEDAASVLTVSKIHYENIKMEDSANPIFIDMKYCPNKLCTANGASKVTVKDITFKNITGTSSTPEAISLLCTAKVPCTGVTMDDVNVEYSGTNNKTMAICTNAKGSTKGCLKELACF

SEQ ID NO: 62959 - protein, 201 aa, Zea mays
  Clone ID: LIB3075-049-D6_FLI.pep
EMMSESDEHGSLLDKINEKIHEYKHSSSSSSSDSDDDKKSKKSKKKKKLFGRKHPLHHVLGGGKAADLVLWRNKQASGSILAGVTVIWLLFEGIGYHLLTFLCHALIVFLTVWFVWSNVASFVNRSPPKFPEVILSEAQCLKVAHIARKEINEAFYTLRNVASGKDLKTYLMSIAVLWFISIIGSCFSFLTVSYTIILQFS

SEQ ID NO: 62960 - protein, 116 aa, Zea mays
  Clone ID: LIB3075-050-C8_FLI.pep
PNNGEREREGGGGGGGGQEVFVRSFALPGDGVAVGAVEVPELLDLADELAQRGHLPHRQAAGAASARAPPASSPRPSTASVARPLLYLVFRVGVGPSGRTLPFRFAKWTAAKQVTA

SEQ ID NO: 62961 - protein, 277 aa, Zea mays
  Clone ID: LIB3078-002-H2_FLI.pep
LGSGANQAQVIDNKTPIGIGATVVNNWAVYDGPGPNAKLVARAQGLHIQAGNWVNSFSLVFVDQRFSGSTLEVTGIVVESGEWAIVGGTGQFVMANGVISKKFHEQRSEGNIIQLTIHAFCPVLGPTKRLATKVGPWGGSGGSPVDITAEPQRLKSITVATGIAVTSIAFSYVDSAGQTQSAGRWGGSGGETEPVIQLGDSEVLTELSGTIGNVDGHTVITSIKFVTSLKTYGPFGAWGDGSDTPFAVPVQQGSAIVGFFARAGIYLDAVGVYVRSL

SEQ ID NO: 62962 - protein, 127 aa, Zea mays
  Clone ID: LIB3078-003-E1_FLI.pep
SFIYIGHQPDDACVVALLKMLIISSTPHLGVKAWKMVAWPGSARWAKRLSMGPVPVYSAWNQAPMTASMARRPFLISLVRSSLIFSGEPLPQPSGSNQRPPGYPTSVPVSLLLGKMGSVLTLPGLMM

SEQ ID NO: 62963 - protein, 128 aa, Zea mays
  Clone ID: LIB3078-006-F9_FLI.pep
RVLLQSCRRARKARFLYFESEVEDDIIPLFRRGETASREATEDALASLDKLISQCSASIVQATCGCCLDRPDNGYSHAAVIRFPSSDELKLFRESEEYKDMWASKFRPIVERSLHLHFTVDPVGNQLM

SEQ ID NO: 62964 - protein, 232 aa, Zea mays; identical to SEQ ID NO: 48242
  Clone ID: LIB3078-009-B7_FLI.pep

SEQ ID NO: 62965 - protein, 94 aa, Zea mays
  Clone ID: LIB3078-015-A3_FLI.pep
SDHLLALVPLSLSLLFFPFISSFLFSCMQWFLLLPTILLLMYPAWHHPSTITYVVQRLSIRWVRNIYVNASSGYHTCVMCNRYIYKTAEAPTIL

SEQ ID NO: 62966 - protein, 248 aa, Zea mays
  Clone ID: LIB3078-023-E6_FLI.pep
VEIFSIEGFQMGSVSGQTRIATMNLSLSSSEKSSNNRSSSLLNPKNAVSDSYGVSSKCSTFLRGQFQRIQLSYTRHTRPLPKRAGHVVSPSCVMPLTEENVERVLDEVRPALMADGGNVALHEIDGLVVVLKLQGACGSCPSSSMTLKMGIESRLRDKIPEIMSVEQFLEAETGGLELNEENIEKVLAELRPYLSGTGGGGLELVEIDGYIVKIRLTGPAAGVMTVRVALTQKLRENIPSIGAVQLLE

SEQ ID NO: 62967 - protein, 177 aa, Zea mays; identical to SEQ ID NO: 58274
  Clone ID: LIB3078-023-F5_FLI.pep

SEQ ID NO: 62968 - protein, 143 aa, Zea mays
  Clone ID: LIB3078-053-H12_FLI.pep
PIYIGGRTKHLLQRAIWNDTAFLTSVNVMDYSLLVGVDKEKHELVFGIIDYLRQYTWDKQLETWVKTSLVVPKNVLPTVISPKEYKKRFRKFMAKYFLSVPDTWSPDNPSKPCKSLGQSNRKLAEVQNGDNLSEHPNEVEGCA

SEQ ID NO: 62969 - protein, 124 aa, Zea mays
  Clone ID: LIB3078-056-C9_FLI.pep
VYICLRNCSQQLRSASLVLFAWLGKITLETYISQIHIWLRSSMPNGQPKWLLCFIPDYPMLNFMLTTAIYLLLSYRVFEITNVLKSAFIPSRDNSRLYQNFVAGIAISVCLYLCSLILLKIPVV

SEQ ID NO: 62970 - protein, 142 aa, Zea mays
  Clone ID: LIB3079-023-H8_FLI.pep
ATPAMHPSFAHPWAGTVRLWPYDQSGRPPPPPAFNALPQYNSFGSTPSAYGGFYGAPPPPYGMPYGGAAPPGFQAPAPAYQATPWNPTHGGAWHQDALAHSFNTMTLNPPNATSEWYADSGAGSHMTSDAGFANQERDRQVQ

SEQ ID NO: 62971 - protein, 343 aa, Zea mays
  Clone ID: LIB3079-025-A5_FLI.pep
VEQTRDDTDATHNTSSSYSREALTDHGDGGRKNFSLRVGGDDTGRPGSAAYAIAVMLHYTTRHHVQLPPVQAWRRRKTPHLLMQRCEHRSPFHLEGCAADFLLVCRNGSHFVLGILVALQSSKGIRVEATLRERREGLAAGAFEHVDVVGEGDAAVGGDAPEEGHVAARRDEERVGGRVEEHEGVGAGELREHEAGRVRRPVPQRLVGLDDQEHLVGALGQPVLLAQPPQVVQHPLEQAEHLVLRRERPWAEEGLVGVGVGEVAEVGEAHGHGGGAAGPQEARDELGRLRLGRRRPAPRRHQLRRHLHHLAAEHRQHPRAWSQAATSSCTNKNWDEARDGPRD

SEQ ID NO: 62972 - protein, 363 aa, Zea mays; identical to SEQ ID NO: 42242
  Clone ID: LIB3078-015-D2_FLI.pep

SEQ ID NO: 62973 - protein, 187 aa, Zea mays; identical to SEQ ID NO: 61562
  Clone ID: LIB3078-031-D2_FLI.pep

SEQ ID NO: 62974 - protein, 188 aa, Zea mays
  Clone ID: LIB3078-049-E9_FLI.pep
PSRRRRPRGGTGCYAAELRVALLLGAPLRRLRWSRGCFGCAQPTPIIAVDKPTKGLRIQGRSVKRRNVSDDFWSSSPHEMENSALQSRHSMSSISTAAQPNDQHVSGTSSSPNEFVNQGLLLWHQTRQQWIGNRRLNSQGQQSQEPKISCNATYESLLGSSKPFPQPTPLGEMVDFLVVSWEQEGLYG

SEQ ID NO: 62975 - protein, 163 aa, Zea mays
  Clone ID: LIB3078-050-A8_FLI.pep
QRRRRDLADDLVEGAGVLEPEHDADAEDVADGAAGQRVGEGEPGGVTRLQAGVARLQLQPRRRLAVRGRRQPEPPREQHQRRRRHHDQVGGGADVVAADALRRRPLPAHPHGRQRCHRGPGRGVAPEAVEPGHGGGELGCHVWRLRRRRRTSHLCAAVPSSAS

SEQ ID NO: 62976 - protein, 180 aa, Zea mays
  Clone ID: LIB3078-053-A2_FLI.pep
AAPWQNGERKVDGGGPGSNSRQVAPDDTGIVGSVGDGSSRDETFYEATAWLELDCEDDFYSVNGGKLNPQPKDLTPARSFASRTSGRNTPPPRPRDLPTLAAILKAEPLKPPPTPTPTAAPQRRLGDLLREAQDDDDDDNDTAVDGLSRDDSLRMGAEANRCCVPRLARAISCNGRTQRK

SEQ ID NO: 62977 - protein, 368 aa, Zea mays
  Clone ID: LIB3079-011-G7_FLI.pep
PDPRSSKSQAPPQARGSVVLMAGILAWAADVVGGAGGSDDEADDDARAAASAAMTPAQRLRAADLDARAASLRRAIQDLRLRVPPPHVAQRLPHLHADSLASSAALALQLNAHSSTKEQTQQREVTLQEENAAYEKAISECKQKIQEKQMEATQLLSNLEEMEVTEHNLKTQLENALKELEAAQHKASTATSGTAENALLEAKSVTDLKSKDLEEKKRELELLDNKVQTLEKEWSVVEEESLKKPTPAQREKVLERQLHSLIEQLTAKQAQAEILATDVHSKEKELERLNHLHRNLYGGANETGAPRSRLSRGLLSGPEDYYYDPKAGRKPYQAGARTEGQNRLMILRSAIVLYVLLLHVIVFIKISV

SEQ ID NO: 62978 - protein, 241 aa, Zea mays; identical to SEQ ID NO: 41450
  Clone ID: LIB3079-012-A1_FLI.pep

SEQ ID NO: 62979 - protein, 363 aa, Zea mays
  Clone ID: LIB3079-015-A8_FLI.pep
VIDRMDCGGALQLPPGFRFHPTDDELVMYYLLRKCGGLPLAAPVIAEVDLYKFDPWQLPEKAFGGEKEWYFFSPRDRKYPNGSRPNRAAGTGYWKATGADKPVGSPRPVAIKKALVFYAGKPPKGVKTNWIMHEYRLADVDRSAAARKKTNNALRLDDWVLCRIYNKKGVIERYDTVDDDDGDGAVAEDVKPVPAPAASKNPRASARVGAAAAAPMKVELPEYGGGYYDYDDLETPSAGMLCFDRPSAPAPADRDSNNSVPWTTHHTHTDNSSSGSERVLSPSPDLPDRDHAESQPAAAAAAAGWWPVGGDWGSAAEDGFMVDVDVDDGSSLFGPLSPGLFARVDAAAFGFGDMLASYLHKPF

SEQ ID NO: 62980 - protein, 277 aa, Zea mays
  Clone ID: LIB3079-029-F1_FLI.pep
LLLALGGRRERERERDLVERLARWSSNEDVGGVQRAGGGGAGGAGGGGQPDAVAQDEGVAAGGALPGRLRAGRVRAARRPRPPRLLPHQPGAPPPQVVRGQGRGVLPVRGGAGQPGSSEPAARAVKQGRQRGAPRHRGLQDAARPRALPGQLHARPAHRLLRLRPLRQVHQLPASRIRPRGQGAALLGDHRRRLRRLLRRHRHAQRLMRQVARAVPARLLLLQRPRRAQVLREPQAQGHRCPRRRRRDLRCHFQGGGRLYCPDGAALIGHQLAEAMR

SEQ ID NO: 62981 - protein, 207 aa, Zea mays
  Clone ID: LIB3079-035-F4_FLI.pep
DNESLAPIFTPARSVAEADVDASLPQQVFEDVHVHTYTAEETKEAFDVARNSVELLSTVLSSSPEQDALQDDLTTTLVQQCYQSQHTIQMIIETVGDNEAVLFEALSVNDEIQKVLSKYEEMKQPRASEHAEHVPVVIPIAAEHEDLNAVGNEDALVRKPAAARATSGGDDDILDDLDEMIFGKKGGSSSQEGPKKPDPKKDDLISF

SEQ ID NO: 62982 - protein, 216 aa, Zea mays; identical to SEQ ID NO: 37246
  Clone ID: LIB3079-035-G7_FLI.pep

SEQ ID NO: 62983 - protein, 282 aa, Zea mays
  Clone ID: LIB3079-042-H4_FLI.pep
VAVVAGTAALAGLVARRGCGGAATVRGMSFGGSSSLASGAKRPFEYGRTHVVRPKGTHKATIVWLHGLGDNGASWSQLLETLPLPNIKWICPTAPSRPVSVFGGFPSTAWFDVADLSEDAPDDIEGIDASAAHVANLLSTEPADIKLGVGGFSMGAATALYSATCFAHGKYGNGKPFPVNLSLAVGLSGWLPCARTLKNRIEASPECAQKASSIPLLLCHGKADDVVAYKHGERSAGALKANGFSNVLFKAYNSLGHYTVPEEMDEVCKWITANLGLGTKSS

SEQ ID NO: 62984 - protein, 329 aa, Zea mays
  Clone ID: LIB3079-058-D5_FLI.pep
DIATENEFEKRLLADVIPPHEIGVTFEDIGALESVKDTLKELVMLPLQRPELFNRGQLMKPCKGILLFGPPGTGKTMLAKAVATEAGANFINISMSSISSKWLGEGEKFVKAVFSLASKIAPSVIFVDEVDGMLGRRENPGEHEAMRKMKNEFMVNWDGLRTKEKERVLVLAATNRPFDLDEAVIRRLPRRLMVNLPDASNRRKILSVILAKEDLADDVDLEAIANLTEGYSGSDLKNLCVTAAHRPIREILEKEKKERASAETENRPLPLSHTSNDVRALRISDFIHAHEQVCASVSSDSSNMNELVQWNDLYGEGGSRKKTTLSYFM

SEQ ID NO: 62985 - protein, 441 aa, Zea mays
  Clone ID: LIB3079-059-H1_FLI.pep
KTQDELIEAEVAELLRAAPTVQDLLRAASVATARLHDLDIFDAVKITLDAGPPELPGTTNVVIEVVEVANPLTGTAGVYSKPEARSWSLEGSLKLKNLFGYGDIWDASGSFGWDQTTEVGVGVCLPRFKSIPTPLMARASLSSQDWLKFSSYKERLLGLSFGLLSTRNHDLSYNLAWRTLTDPSRVSSKAIRRQLGHNLLSALKYTYKIDKRDSHLRPTKGYAFQSTSQVGGLWNSKGLRYFRQEFDVRGAVPLGFYSAALNVGVGAGVILPLAGGFMNSTSSVPERFYLGGNSSPVCSLGGPSSLLGFRLRGVGPTEARRHVLNNSESGSADPGRDYLGGDLAVSAFADLSFDLPLKIFRDAGIHGHAFLTAGNLAKLSEGEYKNFSASEFRQTFRSSAGVGIILPTKLFRVEVNYCRILKQAEHDSAKTGIQFSFSSPM

SEQ ID NO: 62986 - protein, 132 aa, Zea mays; identical to SEQ ID NO: 46693
  Clone ID: LIB3088-004-G4_FLI.pep

SEQ ID NO: 62987 - protein, 295 aa, Zea mays
  Clone ID: LIB3079-037-G8_FLI.pep
SFSLAGRPAIKPLCLQVQETAREEQAEISSMGRGRIEIKRIENNTSRQVTFCKRRNGLLKKAYELSVLCDAEVALVVFSSRGRLYEYANNSVKATIERYKKAHAVGSSSGPPLLEHNAQQFYQQESAKLRNQIQMLQNTNRHLVGDSVGNLSLKELKQLESRLEKGISKIRARKSELLAAEINYMAKRETELQNDHMNLRTKIEEGEQQLQQVTVAQSVAAAAATDVELNPFLEMDTKCFFPGGPFATLDMKCFFPGSLQMLEAQQRQMLATELNLGYQLAPPDTDVANNNPQQF

SEQ ID NO: 62988 - protein, 466 aa, Zea mays
  Clone ID: LIB3079-038-B11_FLI.pep
LALPPFPDRASVMEIDEMESGVVNGSGGGGSFRRARCWELLCSAAGMLWGKVVGFARKLGRIARDDPRRVAHSIKVGLALTLVSVLYYVRPLFNNWGVSTMWAVLTVVVVMEYTVGGTLSKGLNRACGTLAAGFIAVGAHKVAYLCGDKAEPVLLAVFVFLLSSAATFSRFIPEVKARYDYGVTIFILTFSLVAVSSYRVDELIRLAHQRFSTIVVGVGTCLCTTVFVFPVWAGEDLHRLAIGNLNKLAEFFEGLESECFRENATFENLEAKPFLQVYKSVLNSKATEDSLCNFAKWEPCHGKFKFRHPWSQYQKLGALSRQCASSMEALASYVITLTRTEYPEARPELRSEVRTACRQMSLHSAKALRELSAAMRTMAVPPSPANAHMSAAAKAAKDLRDELEDADLAQAMHVAVVASLLSDLVTKAKQITESVGTLARLARFVKNNDHENNADDKDIAAIDAVS

SEQ ID NO: 62989 - protein, 341 aa, Zea mays
  Clone ID: LIB3079-040-B1_FLI.pep
IIQRGTPVCCSSSSLVARGGGGGATMYRSAGVAMAWNVFRFCTALRGLGSIMILLVLAIVGVTYYAVVLCNYGPALFTGGGTTLAALAVLLSFHFLLAMLLWSYFSVVFTDPGSVPPNWNLDFDVEMGETAPLASSELCSQMNSQQSVALGNMTNPRVRYCRKCNQLKPPRCHHCSVCGRCVLKMDHHCVWVVNCVGALNYKYFLLFLFYTFLETTLVTLSLLPHFIAFFSDAEIPGSPAALATTFLTFVLNLAFSLSVLGFMIMHISLVSANTTTIEAYEKKTTPHWIYDLGRKRNFAQVFGNDRKYWFIPAYSEEDLRRTPALQGLDYPVRPDFDGQEL

SEQ ID NO: 62990 - protein, 83 aa, Zea mays
  Clone ID: LIB3088-002-B10_FLI.pep
CCSSDRYGRGSVVLSVTRGDLGACRLGDLYRYLEDSQFCFSDCRDLGSYCLGAAWRRPLAILRFRSSVTTGSWFAIDAMHRPR

SEQ ID NO: 62991 - protein, 143 aa, Zea mays
  Clone ID: LIB3088-010-E11_FLI.pep
YYASHTRSLEPTTSDRLADALNQSTSVPKMSCSLKRRYSLSAASLTSVPPYSGRRTVSPSFRATGIRLPALSRSPGPTATTLAAFSCLDVSGRRMPPAVFLGCTSFSTSTRFRDGSSLFAIAAVLSLPFLRSKPKGKRTRSFP

SEQ ID NO: 62992 - protein, 141 aa, Zea mays
  Clone ID: LIB3114-028-G2_FLI.pep
NPIHPSQAKAEKKKRRKKKHRQHVGGDCQLRGHPDRHHPASAGGVPQVRVRPRVLDLPPPHLPRLHPRHHLRHLRHHQEHLASHPCRRRSMSLYLCLFICLMPTCAVCSCLNSVVFLFCYRTHPMHHLSPRRNNHSNNKFR

SEQ ID NO: 62993 - protein, 216 aa, Zea mays
  Clone ID: LIB3115-011-D5_FLI.pep
AAIIETGLRAPELGKGAARKFYGNTMEASEEQGLHDAGEELGTAAMGRDSRPASWRPRLGQRSTGSGQGTPANRGTRAGSWAWRAGEEKPRGLRSGQASRGKQGAGRWNPSQGRAPWPGRGNWKGAASSTTRRGRGWRPWASAGEKHLLPPSSTGAGIGVAVRRPPTISVEERWASSRARLWRSEVPGASSAGGGCAQGPGAHRWELAGGRGRAAG

SEQ ID NO: 62994 - protein, 269 aa, Zea mays
  Clone ID: LIB3115-030-F10_FLI.pep
PVRNAKPPSGEMAPKRGGRAPVPAKKKTDKVTNPLFEKRPKQFGIGGALPPKKDLHRFVKWPKVVRIQRQRRILKQRLKVPPALNQFTRTLDKNLATNLFKMLLKYRPEDKAAKKERLLKRAQAENEGKTVESKKPIVVKYGLNHVTYLIEQNKAQLVVIAHDVDPIELVVWLPALCRKMEVPYCIVKGKARLGSIVHKKNASVLCLTTVKNEDKLEFSKILEAIKANFNDKFDEVRKKWGGGIMGSKSQAKTKAREKLLAKEAAQRMT

SEQ ID NO: 62995 - protein, 290 aa, Zea mays
  Clone ID: LIB3116-002-H3_FLI.pep
SPLLNCGRAPAAAASVEHLAVVSPLLSPAVAAPRQGPVLCRAMSEGDLAAPLVPKKDDGHGRAPRLSASLSSSASIFVEEDGEGEEEEEDLVAVAVAGAGVDVPLPLRRLLTNTGLDVSAAAALAFVEQGVGGSGGGGKACGSSGGKGGVGDGDGGSNRAATDAHYRQMIEADPGNSLLLVNYARFLKEVAGDAARAQEYCERAILASPGDAEALSLYAGLVWETSRDAGRAEDYYSRAVQAAPDDCYVLGSYAGFLWDAEEDEEENSEPLPPPSLFQGAAQRPSITAAS

SEQ ID NO: 62996 - protein, 180 aa, Zea mays; identical to SEQ ID NO: 52264
  Clone ID: LIB3116-012-B6_FLI.pep

SEQ ID NO: 62997 - protein, 228 aa, Zea mays
  Clone ID: LIB3116-022-C4_FLI.pep
EAVSARVLKGSNIVLGPYARGDAQVVNADFVKSSVRPDDCPRDGLPEFALVGRSNVGKSSLLNSLVRRKRLALTSKKPGKTQCINHFKVNDSWYLVDLPGYGYASAPQEARTNWDEFTRNYFLSRENLVSVFLLIDASIPAKKIDLDYASWLGQNKVPMTLVFTKCDKRKKKKNGGRKPEENVETFQGLIREYFEAAPPWIMTSSVTNQGRDEILLHMSQLRNYWLKH

SEQ ID NO: 62998 - protein, 160 aa, Zea mays
  Clone ID: LIB3116-028-B9_FLI.pep
LGRQRAEGRRRPAVLLADTAPPAAKMPFKRFVEIGRVALVNYGKEYGRLVVIVDVVDQNRALVDAPDMVRCQMNFKRLSLTDIKIDIKRVPKKTTLIKAMEEADVKSKWENSSWGKKLIVQKRRASLNDFDRFKVMLAKIKRGGAIRQELAKLKKVAAAA

SEQ ID NO: 62999 - protein, 224 aa, Zea mays
  Clone ID: LIB3115-038-D1_FLI.pep
LTNTTTISISDLFSSKKESKSSAPSFPCASRSPARRTEPPSSMIRENRRVQERRRDEASASASASARRTVRWSSPASRCGARGRGDPHGRAPAGAGPAAAPARRPARAGARAAPGAANLLPAGAGVGPARAEAAVLLARPPARLAARGASAPAQRGAPAGPPQRGARGRRRRPVGHRDARQHPEPRRRHRDRRHHTGADRPGGAFLAPVGLLRSCAFACYGFLY

SEQ ID NO: 63000 - protein, 86 aa, Zea mays
  Clone ID: LIB3116-028-D7_FLI.pep
PVVSIHAPRVFAPPPPPPPQPQQCRRTRPSGSRRSWRRRCARTAPSPTGSACALTIPSGTTPSAGTGAAPSSASERRDWPAAASEG

SEQ ID NO: 63001 - protein, 221 aa, Zea mays
  Clone ID: LIB3117-006-E1_FLI.pep
PGSRCERHLHAYKRRLRLPATAAGSSTAAGASATSGSPATSGASPTAGPPAAAGPPATAGPCAAAGSSAAATMPLPYSTAPASASSPATPMPVPTAASKPVPAAGNLRRWQHPDPGPVRRVSEASVQPDGDALLLASVPVVAAAVLPAAQAGGAAAPVPGDLRLGPPVHPAAAAAKRPGRGAVGGADSAATDGDVRPAAADSMPLRCCRRCPPLKKLCAVV

SEQ ID NO: 63002 - protein, 28 aa, Zea mays
  Clone ID: LIB3118-009-E4_FLI.pep
FALFNILRDKRYIFNKPQNKFARHGYHT

SEQ ID NO: 63003 - protein, 72 aa, Zea mays
  Clone ID: LIB3118-020-F8_FLI.pep
EWKLCEVYRISFGVDLDRRMHLLCQIVSSSCVEQRRAVVRTSASVPCFGIFHSKCMRRSRSTPKEIMRSLSN

SEQ ID NO: 63004 - protein, 80 aa, Zea mays
  Clone ID: LIB3118-035-B7_FLI.pep
VASQRLHYIITTVHSFLSSRHRRQLRCKGRDLAAAAAGRTSPSAAALPGPPSAPRARPAAAAAGRTAGPHRMSPGTGAAA

SEQ ID NO: 63005 - protein, 43 aa, Zea mays
  Clone ID: LIB3118-037-G3_FLI.pep
YSSIKYTFMSHHIKRNMAPLPTFTISGHIKSCFLHHIKRNMAP

SEQ ID NO: 63006 - protein, 139 aa, Zea mays
  Clone ID: LIB3118-039-C10_FLI.pep
RNTHMSSKASTEMVDAWIFQKVPLPRVRGIAGGDVAGANDVSLPRPQFLAISSALQQQLPGALAVDPHVHRSVVVSVPVHLRPGLGDSGLLPEALRSEDAESLLWCARCGGHQRCGPAALAAVSVGVGARKRNGVMVGN

SEQ ID NO: 63007 - protein, 155 aa, Zea mays
  Clone ID: UC-ZMFLB73161F03_FLI.pep
KRHEPHNNSTFLATKMCNPVTVETLVTHKASAKIQLQHRLRVQGRRNNTTQHKQPPQNFSCQRTKVAAPQPPSYFATSLQMITLGTSLLLWRGLLWWLLLVISIPWICCVGVHGRILRGPSIAIWIVSLGIPIIATTAPLALLLLRLLVCRATAP

SEQ ID NO: 63008 - protein, 569 aa, Zea mays
  Clone ID: UC-ZMFLB73154B07_FLI.pep
NMSSAGVIVLGPVPEDPAFLPICFNGSRSQHCSSGSQLQDSILIFLAVPGMPPMPMSVLGSESIASVKLRIQQFKGFVATKQRLVLDGHELARNNSPVKDYGLAEGNVLHLVIRLSDLRVINIETATGRKFQFQVDQSRNVKFLKNKLEAEGDEDIGNLEDHKLEYDGEELEDNQLIADISRRDDAVIHLFIRKPAKVWTQQVDGDTLVTVVNPQGKGNLQNEAGSVNSANSVGVRPAPVEPIVNRKAKLSCEVMKMINSTIAGLEKGHLPVMSAEGSGGVYFMRDATGQKNVAVFKPIDEEPMAKNNPRGVPVSTDGEGMKRGTIVGEGAFREVAAYILDHPVSDSKYGHSVGFSGVPPTTLVRTLHRGKSFKIGSLQMFMENNGSTEDMGPRSFPVKEVHKIAVLDIRLANADRHAGNILVCKEGEGGNYKLIPIDHGYCLPEKFEDVTFEWLYWPQAREPFSDETIEYIKSLDAEEDIKLLKFHGWELPPRCARVLRISTMLLKKGAARGFTPYDIGRILCRETVNRESEIEDIIQEAEDAVLPGSSENMFLETVSEIMDRHLDKE

SEQ ID NO: 63009 - protein, 248 aa, Zea mays
  Clone ID: UC-ZMFLB73011F05_FLI.pep
LRLYLGNRVVAPCFCCRSPCSMQKSGVRSGPTGAEATHTGTRNKMREENPGPKTSTPVRSPPPARNNHLFIIAWPAMRAHPSWQRPPPLGCHIFFLFFTCCSLPRLFQAAYLIDLLIIIEIDPIIISAETSSIEVEQDCRPRDPAASIYRRLRSAPNRTTTTSRFLQIWIQKQNMRCSTTKTKQQEPCRQGLTDTGSNAGLPNPAIRYEPAQHEANGFPDKSKQSSSPRALGEARSQGGRPSWIWRTR

SEQ ID NO: 63010 - protein, 586 aa, Zea mays
  Clone ID: UC-ZMFLB73150F02_FLI.pep
RNAVKRIEYEASAGASASWSSSSSAEQQRSPGLRPSRSLDLAPGADLRISGSVEGEVDELCRSLGLSGPEDFAVPVAAWEARKSRSNSDLLPRSRLDPSTPADETSPIARAVSAPGAQPTRSFPAPIPEESLHSSPASTATESAEEPTVAAPEESPNAAPASAVVAPVGGLPLPSPRRGGGEVGIRGARPPLLSPPPPIGALAPPPVRRSFVDNDMTGSAWDIVQSFAPRDQGSELGLGGSVDSRCNSDKEEENDVEDGDAAVEGELKELRIGETFEGFTGTSSLSTTNDDDASSTTTEAMFIISPNGKFKRNIKSWMRGALLGSGSFGMVYEGISDEGAFFAVKEVSLLDQGSNAQQSIVALEQEIALLSQFEHENIVQYYGTDKEESKLYIFIELVTQGSLSSLYQKYKLRESQVSAYTRQILNGLVYLHERNVVHRDIKCANILVHANGSVKLADFGLAKEMSKINMLRSCKGSVYWMAPEVINPKKMYGPSADIWSLGCTVLEMLTRQIPFPNVEWTNAFFMIGRGEQPTIPNYLSKEAQDFIGQCVRVDPESRPSASQLLEHPFVNRPLRASFESSSPPAI

SEQ ID NO: 63011 - protein, 300 aa, Zea mays
  Clone ID: UC-ZMFLB73113D01_FLI.pep
AIELVSAPEELVGDIGTLVTSGGAAQIHELSSQVFETLYRINVAGRKVTPFNDTLWRTWVNDEKFLIDTDSSNYMVWSSSGRIAYPKGSKQMTREVAPDNVYNSARSVRPGVNVTWGFPVPASSRYLVRMHFCDIASKALYELYFNIYVNGDLAVKDFDLSSATGFLAYPYYIDFIVDVKDEGILKLAIGGLKKSRSDEVSGILNALEIMRMNKTSGGMDGDFPIDLHMEYVVSKGIGEFARSLLCGFIFVGLFVALVTLMVRLRTELRNNGTAWSWRQMNSDEGKLARTYQLVPSKTDY

SEQ ID NO: 63012 - protein, 187 aa, Zea mays
  Clone ID: UC-ZMFLB73146H12_FLI.pep
GVPARRPGGAAARDGARGGGEARVRGGGAERVPVRAVPRAAALLRAQQRGGRGPARHPRRRRRALPAPRRPGAGAARGRRALHLRLDDAAGLPAPQLAPALLAVPVPYFSSGLGCSCITIVVVGTGRERARTVIYAGSQQGGNEPTTRRDAPWNLGSRALSVSSVLPSFFCQLHYFTRYMPVRCHGS

SEQ ID NO: 63013 - protein, 588 aa, Zea mays
  Clone ID: UC-ZMFLB73113F05_FLI.pep
LFTSLCSSEMAAATSSSTYLAIGRKTLNPAPSVATAATSVSFPATQHPCLVAASADRRRAVAAKVSSPSVIGTAMPSLDFETSVFKKEKVSLAGHEEYIVRGGRDLFPLLPEAFKGIKQIGVIGWGSQGPAQAQNLRDSLVEAKSDIVVKIGLRKGSKSFEEARAAGFTEESGTLGDIWETVSNSDLVLLLISDSAQADNYEKIFSHMKPNSILGLSHGFLLGHLQSLGFDFPKSISVIAVCPKGMGPSVRRLYVQGKEINGAGINASFAVHQDVDGRATDVALGWSVALGSPFTFATTLEQEYRSDIFGERGILLGAVHGMVEALFRRYTEQGMDEDSAYKNTVESITGIISKTISKKGMLEVYNSLTEEGKKQFIEAYSAAYYPCMDILYECYEDVSSGSEIRSVVLAGRRFYEKEGLPAFPMGKIDQTRMWKVGERVRSTRPQGDLGPLHPFTAGVYVALMMAQIEVLRKKGHSYSEIINESLIESVDSLNPFMHARGVAFMVDNCSTTARLGSRKWAPRFDYILTQQAFVTVDKKAPINQDLISNFMSDPVHGAIEVCAQLRPTVDISVTADADFVRPELRQSS

SEQ ID NO: 63014 - protein, 110 aa, Zea mays
  Clone ID: UC-ZMFLB73226D02_FLI.pep
MLEHLALFICTSNTLTTTPFRSLRNGPKQRKKAPILINQQLGTKCNPVTEYSCYVRLCWEKKKITSSIWSVMIISERFIPRSHYSLLIRPKTAFPHNNNNNFVMYLFYGK

SEQ ID NO: 63015 - protein, 455 aa, Zea mays
  Clone ID: UC-ZMFLB73184C01_FLI.pep
PSAMATSPAASSSSAPTASAVAAATMAVEATDGPVLSVVSKRLRALRKKYNRITQMEESLAAGKTLNREQEEVLRSKPVVAALIDELERLRPPLASALAEELSSRPAPAPSAASSSDSDSSVQDLLALVYFGSLFDVKQQSDFVSLVYTRELERSSCLTYDYVGDDPEDSLAETDLNAVSALASLAALRPPAAAGVSHRDALQACAHHARLWLCRADEPIHPDSTITYAGVRAKLDRIMASGYFTAQLEMRTPLDLAAAVASFGAGGVQVQESMVVSPQAPEAVEESQAVEGHKNEKEDSQATEIYNDHPVVDSEHVEDEVLVHPTDEVPPAETEQEQETFDADVKDQEQKDQQFIQRRSYQNQRGGGRGGSRRGYPNGRGGRGGRGGGYQNGRGGYQNGRGGAGGYYYESGYYQPRNYNRGRGGRSGGGNSYYNSHGGGAQGHHPGSVELGANA

SEQ ID NO: 63016 - protein, 133 aa, Zea mays
  Clone ID: UC-ZMFLB73031A06_FLI.pep
VQQRHQSAERISGEVEGSGMANGGGYVWALAAGFNAALAAISAKFIATLPLKYGTVILFNVTMWGCYVNSLKALSSLQATVTNFAANFLSSGLAGYFLFEEPLPSKWFAGASLIILGVFILSKSSIEEKQNTD

SEQ ID NO: 63017 - protein, 198 aa, Zea mays
  Clone ID: UC-ZMFLB73190A12_FLI.pep
VSCVLTPDCLNDSVEESTAEKDVASDGDEAESTGIVIRSHHPAPRSSSESSFTQQGTAMQRLRLQSGLNKGQRPSTDDSSSCIIDEPGSQHKAEKAEIEEDASTNLAGSADDLPGNIHDDEQKNIPEHGAEMTSPEAKSVLRLRKTSEEGNKDVKQESCLEPHVRAPMQKGGFQSYIIWLVLPVALLLLLCVGTYGWV

SEQ ID NO: 63018 - protein, 187 aa, Zea mays
  Clone ID: UC-ZMFLB73170D09_FLI.pep
VLQHISAPKPAMLPAAFSRFMSVSSARLEDRGFETATVADVLKSKGKSADGSWLWCTTEDSVYDAVKSMTQHNVGALVVVKPGQNKSIAGIVTERDYLRKIIVQGRSSKSTKVGDIMTEENKLITVNPDTKVLQAMQLMTENRVRHIPVIDGTGMLGMVSIGDVVRAVVAEHREELNRLNDYIQGGY

SEQ ID NO: 63019 - protein, 152 aa, Zea mays
  Clone ID: UC-ZMFLB73175A10_FLI.pep
PNQLQPRNSWRLAVVPYPPAPHRKDGSAKVFTRRLRRRLHGTEGTPCVFLSATCQRIAGGTRACTEGFLSGLRPHIRLGRYGTVPYHHCIGVSQAFCSSYMATNQLQIQEPEQRPWKVKVMQVDGEFHPTPEKNRVGHYHIPRVITSNVLKM

SEQ ID NO: 63020 - protein, 616 aa, Zea mays
  Clone ID: UC-ZMFLB73154G11_FLI.pep
PNHTSISPSQQKKNSHQWRSESTKASGSLDMERILKSARESGSLNLSNRSLREIPKEVYNNLDTGSQDEKWWEGVDLQKLILAHNNLEVLREDLRNLSSLVVLNISHNKISSLPAAIGDLPLLKSLDMSFNQINTLPEEIGLATALVKVDFSNNCLTELPPNLATCPDLSELKASNNNISRVPDVLAGCSKLSKLDLEGNKLVALSENMFVSWTMLTELNLAKNLLTAIPGSIGALPKLIRLDMHQNKITSIPPSIKGCSSLAELYMGNNLLSSIPADIGTLSKLGILDLHSNQLKEYPVGACNLKLSFLDLSNNSLSGLPAELGKMTTLRKLLLTGNPMRTLRSSLVSGPTTTLLKYLRSRLSSDEEASGSRSTPTKDDQIAAARRLSLSSKELDLSGLGVTSVPAAAWETSDVVKLDLSKNSIEDLPNELSLCSSLQSLVLSNNKIKRWPHTVVSSLPCLSSLKLDNNPLVEISSTDLVPLSKLEVLDLSGNASALPEPSAVSALPQLQELYLRRMKLHEFPNGLLGLKLLRILDLSQNHLTTVPEGIKNFTALIELDLSDNNITALPAELGLLEANLQVLKLDGNPLRSIRRTLLERGTKAVLKYLKEKLPSE

SEQ ID NO: 63021 - protein, 344 aa, Zea mays; identical to SEQ ID NO: 51046
  Clone ID: UC-ZMFLB73213E08_FLI.pep

SEQ ID NO: 63022 - protein, 487 aa, Zea mays; identical to SEQ ID NO: 47714
  Clone ID: UC-ZMFLB73238D04_FLI.pep

SEQ ID NO: 63023 - protein, 245 aa, Zea mays
  Clone ID: UC-ZMFLB73083A11_FLI.pep
FINTHGVIFKFPSSPQILLIVGVFQHLRVSTSPGYTQASNYRKIPLTYLHLIPDQVSYRTRKMEYTLLPDLAPHKIHAKIQVHVSRKWLFRGATDSGPLQHVDMVLSDREGNAIYAEIPGNLAEQKATNIEEGGVYDINRFRVCAAKTVFKIVDGDKMIQFTFHTIVKCATSPPTTFPLYVYRLTSFDLIEPHVQTTNNFVDVLGVITEIHELTPVHVRSQLTPTVTRTIIIEDLRCLPKWWSCL

SEQ ID NO: 63024 - protein, 248 aa, Zea mays
  Clone ID: UC-ZMFLB73164E11_FLI.pep
SRLFENDTSIFSLGTDEKVGDPTKTHNGSEKVAATEPLGRCSLLITPTEDRTDGITEPVDLAKNNENAPQEYQAASEIIPDKVAEGNDVSSTGITKDTTGHSADGKALTSEPHIGETHVNSASESIPNDAAPPTQSKMNGSTKKSLVNGVLDQPNANSGLESSGNDYPSYTNSSSAMPPASTELIGSAAAVIDVDSAENGPGTKPEQPAKGASRASKSKVSTRTEEGVAKRNKRKSDVGALLRYIVVY

SEQ ID NO: 63025 - protein, 246 aa, Zea mays; identical to SEQ ID NO: 46958
  Clone ID: UC-ZMFLB73134H09_FLI.pep

SEQ ID NO: 63026 - protein, 444 aa, Zea mays
  Clone ID: UC-ZMFLB73089B03_FLI.pep
ERRQIRDSQAASARRLSQSYFLRKMAAMMVAMTARSKNSILPMEKKQGWSIQLPELRFPWDSHEDKGFSLSLQGSGPSHGGLFASVGLKVSTGAPAVAPGPGDKDIKIPFTDHCMKYVSEAVGYQVISTEAESVEEVVDAKAKKAAKKRGLQLKIKIGNPHLRRLVSGAIAGAVSRTCVAPLETIRTHLMVGSNGDSMTEVFQSIMNTEGWTGLFRGNLVNVIRVAPSKAIELFAFDTAKKFLTPKADESPKTFLPPSLIAGALAGVSSTLCTYPLELIKTRLTIEKDVYNNFLHAFVKILREEGPSELYRGLTPSLIGVVPYAATNYYAYDTLKKLYRKTFKQEEISNIATLLIGSAAGAISSTATFPLEVARKQMQVGAVGGRQVYKNVFHALYCIMEKEGVGGLYKGLGPSCIKLMPAAGISFMCYEACKKILVEDNEDSE

SEQ ID NO: 63027 - protein, 275 aa, Zea mays
  Clone ID: UC-ZMFLB73159E10_FLI.pep
CKSIVSQTADQLMMLFLRVFACHNSTVHEEAMLAIGALAYATGPDFVKYMPNFFTYLEAGLQNYEEYQVCSISVGVVGDICRALEDKILPFCDRIMTVLLKDLSSSMLNRSVKPPIFSCFGDIALAIGENFEKYLPYAMPMLQGAAELLGTLDQSDDDMVDYGNQLRRGIFEAYSGILQGIKGPKAQLMIPYATHLLQFTEAVFKDRSRDDSVTKAAVAVLGDLADTLGQSSKDLFKTHLFHVEFLRECQAQQLDDEVRETAQWAQGMINQAVVS

SEQ ID NO: 63028 - protein, 445 aa, Zea mays
  Clone ID: UC-ZMFLB73121C12_FLI.pep
IYLQYVFCFCMSAICTAIFFFYSVLHAPFMYTYTHVQTIFCRIVPGIQCLVAILSRAITLLVLSQTGARLLRHPSSLVMVICSLGLILGHRHSMVHLSNLMVAIPQHLVAIRLGGISLKTSNLIQLPLVLGMIIIASSSNLNNNNLPLGLLLLLMPLATIMASLQHMLHKDMILPILSIVVGSKHMDMMATLVTRPKASSRATLSRLVMTSRDMVHLLMDQLRTRPRMGPAMVVLVGPPRHLRGSKLQPQLLEATLAMPVNRLLVLQQAIQFKVQLHLDMVLHHPSLAMAPNLHSKVDMVRALMGSLLHTARNLLHLHLMDKLRLLDLLRVVMCSMVTANLHTVHHQLTLVHPLQATRAMANSSLMAMLMVVEAMGSLQPTLLKQQLLLHPRITLPHLPRPLEQQLRQLLTTMGVPKLLRKLDLQQLIGNKLFTSLCCVVSSTVA

SEQ ID NO: 63029 - protein, 487 aa, Zea mays
  Clone ID: UC-ZMFLB73164H07_FLI.pep
GRGAETGVFVLAYLRDSKLLPFPTAAAAAPPHSVDTMRECISIHIGQAGIQVGNACWELYCLEHGIQADGQMPGDKTIGGGDDAFNTFFSETGAGKHVPRAVFVDLEPTVIDEVRTGTYRQLFHPEQLISGKEDAANNFARGHYTIGKEIVDLCLDRIRKLADNCTGLQGFLVFNAVGGGTGSGLGSLLLERLSVDYGKKSKLGFTVYPSPQVSTSVVEPYNSVLSTHSLLEHTDVAILLDNEAIYDICRRSLDIERPTYTNLNRLVSQVISSLTASLRFDGALNVDVNEFQTNLVPYPRIHFMLSSYAPVISAEKAYHEQLSVAEITNSAFEPSSMMAKCDPRHGKYMACCLMYRGDVVPKDVNAAVATIKTKRTIQFVDWCPTGFKCGINYQPPSVVPGGDLAKVQRAVCMISNSTSVVEVFSRIDHKFDLMYAKRAFVHWYVGEGMEEGEFSEAREDLAALEKDYEEVGAEFDEGEEGDDGDEY

SEQ ID NO: 63030 - protein, 204 aa, Zea mays
  Clone ID: UC-ZMFLB73042G06_FLI.pep
VARGAVRPGSPPSFYPHPPQRREDARGREEVSHRKRRREQSTNPVDPAAARRARSLPIMVVEEIAEGVKNLTVTGDAAASGGEGQRRGGGGSSNRIQVSNTKKPLFFYVNLAKRYMQQHEDVELSALGMAIATVVTVAEILKNNGFAVEKKIRTSTVEINDESRGRPFQKAKIEIILGKSDKFDELMAAAAEERGEVEDGEEQA

SEQ ID NO: 63031 - protein, 491 aa, Zea mays
  Clone ID: UC-ZMFLB73165B08_FLI.pep
AGSGDESSGGFDELDCQYTPTEREDYALSDRVVQVQQQYPDKQAEVLSFDRVLQGRITFPGQQWHSDFYANTTQTEDNDAYSCEYAQEVKYAILDGSSNLPETLDSEVDKLSLGHSDLLVQLLDSESCTEAKLIDAVKQLSGRIEVMEKKQAWSNKEVKHLQGMNERLLKRIVELKGTVMTLNSKIDPLTLDDSLNQFVEQCLGSEDVIYLVGGFDGFSSLPSLDSFSPSLDILTPLKPMAVGKSYSSTVALEGKIFVLGGGDGACWFDTVDCYDRSRDDWSTCPSLTCDKGSLAGVSVNGRIYAFGGGDGTKCFSDVEMFDPVHGKWIKNQPMLEKRFALAGVALNGAIYAVGGFNGVQYLSCAERLDPREPNWKMLPKMSAGRGCHTLTVLNEKIFSIGGYDTRAKAMVSTVEVYEPRMPSWVMVEPMNYTRGYHSSAVLGGSIFTFGGVKGEADTILDVVEHYKEGCGWMTTGLKSIGRRCYCSAIVL

SEQ ID NO: 63032 - protein, 447 aa, Zea mays
  Clone ID: UC-ZMFLB73230F06_FLI.pep
PTQTPPPHRIRDADLGFAVTTRCPRRALPPPPLVSSAMAGLAPEGSQFDDKQYDKKMQEILTEDFFTSYDDVCESFDSMGLQENLLRGIYAYGFEKPSAIQQRGIVPFCKGLDVIQQAQSGTGKTATFCSGILQQLDYGLVECQALVLAPTRELAQQIEKVMRALGDYLGVKVHACVGGTSVREDQRILASGVHVVVGTPGRVFDMLRRQSLRPDNIKMFVLDEADEMLSRGFKDQIYDIFQLLPSKIQVGVFSATMPPEALEITRKFMNKPVRILVKRDELTLEGIKQFYVNIDKEDWKLDTLCDLYETLAITQSVIFVNTRRKVDWLTDKMRSRDHTVSATHGDMDQNTRDIIMREFRSGSSRVLITTDLLARGIDVQQVSLVINYDLPTQPENYLHRIGRSGRFGRKGVAINFVTRDDERMLFDIQRFYNVTVEELPANVADLL

SEQ ID NO: 63033 - protein, 230 aa, Zea mays
  Clone ID: UC-ZMFLB73193H03_FLI.pep
FFRLAVLVQCSRGRLLTDAPFPFPMSRLDTQNTAPAPMPGTQGGQAVAFRISGDKAFFFGCGFYGAQDTLCDDAGRHYFRDCYIEGSIDFVFGNARSLYKDCELHSTAQRFGSVAAHGRRDPCERTGFAFVNCRVTGTGRLYVGRAMGQYSRIVYAYTYFDSVIAPGGWDDWDHTSNKSMTAFFGMYRNWGPGVDAVHGVSWARELDYFAARPFLGKSFVNGYHWLTPDV

SEQ ID NO: 63034 - protein, 308 aa, Zea mays
  Clone ID: UC-ZMFLB73181C07_FLI.pep
GCESAGGGRGEMVKAATWLLDRLLYVLKQDKGNDANTARDRRRRRRAPAGGAANAVGNDDGEEQHLNTFLDAANASSASSRVQFRNMASRARWVEEAGAAEVVENRGKLWLTTGVTRAGKLYYNVEETGFLAEMGALILLNDKDETIGIEDIYGKLAGGNYGCSWDTFQAYKHLKSLGYIVGRFGVPWTMKHGGTHHTIAPQINILETDQSLNRVDGASNDITKLLKEIQIDGICPSFEVYLPNSKFKKSSPGCPSFLLCLLRGKPPSRVELEAVENNFRGIPLKYAHVDNGRVSFLSFDEVTLPSLP

SEQ ID NO: 63035 - protein, 441 aa, Zea mays; identical to SEQ ID NO: 58947
  Clone ID: UC-ZMFLB73006H01_FLI.pep

SEQ ID NO: 63036 - protein, 490 aa, Zea mays
  Clone ID: UC-ZMFLB73008C06_FLI.pep
KPGGTLESHTLRPHARMAAAAGGTGGCGCHIVAVPFPGRGHVNAMMNLSRLLAARGAAVTFVVTEEWLGLIRSSSAAAAAEPAGIRIRTIPNVIPSEHGRAANHSGFLDAVATEMEAPFDRLLDGLEGPPPAALVADAYVPWVVGVGNRRGVPVWSLFPMSAAFFFAYYHFDRLPAWLTNSEHAPESGETIGNSDQRLGHYIAGQASSSIRLSDLEPLIHNKRTVKHILTTISSIRNAQSLLFTTMYELEASVIDSLRSVLSCPVYPIGPCVPYMMLEDHTVSSGKVARQGDYFTWLDSQPVNSVLYVSLGSFVSVSASQLEEIALGLIASEVRFLWILREQSPRVQELFSGINNGMILPWCEQLEVLCHHSVGGFMTHCGMNSTLEGVFAGVPMLALPLFFDQPIDGRLIVEEWKIGLAVRDWASKGGLIGREDIARAVKKLMSSDETGTKALRERALELKEASRRAVNEGGSSYCNLSSLMETVCTPK

SEQ ID NO: 63037 - protein, 284 aa, Zea mays
  Clone ID: UC-ZMFLB73011D03_FLI.pep
AMARDGLLPSFFSDVHKTTQVPVKSTVVTGICAAALAFFMDVSQLAGMVSVGTLLAFTIVAVSILILRYVPPDEVPLPSSLQASFRLSQENDEEKLRGTLGDDDHEQGSAEISDVVVEPITDPLIEKQLYASNLSEAKRRKTAACSITSVCIGVLILTTSASATFLPFPVRCSVCVLGGMLLLAGLGMLCWIDQDDGRHSFGHSGGFICPFVPLLPVMCILINTYLLINLGGGTWMRVGVWLVMGVFVYIFYGRTHSSLTDVVYVPVAEANEIYGSSSSLGFVA

SEQ ID NO: 63038 - protein, 169 aa, Zea mays; identical to SEQ ID NO: 46906
  Clone ID: UC-ZMFLB73012E11_FLI.pep

SEQ ID NO: 63039 - protein, 202 aa, Zea mays
  Clone ID: UC-ZMFLB73019C07_FLI.pep
PIRNLELSRRRPQQRGGHSTTAPQGSYSRRSGSSEGKMSSVFSGDETAPFFGFLGAAAALVFSCMGAAYGTAKSGVGVASMGVMRPELVMKSIVPVVMAGVLGIYGLIIAVIISTGINPKAKPYYLFDGYAHLSSGLACGLAGLAAGMAIGIVGDAGVRANAQQPKLFVGMILILIFAEALALYGLIVGIILSSRAGQSRAD

SEQ ID NO: 63040 - protein, 305 aa, Zea mays
  Clone ID: LIB3150-004-D9_FLI.pep
KQQQQQQPQQAAAAATGVWKTVKPFVNGGASGMLATCVIQPIDMVKVRIQLGEGSAGQVTRNMLANEGVRFFYKGLSAGLLRQATYTTARLGSFRVLTNKAVEKNEGKPLPLIQKAFIGLTAGAIGACVGSPADLALIRMQADSTLPVAQRRNYKNAFHALYRISADEGVLALWKGAGPTVVRAMALNMGMLASYDQSVELFRDKFGAGEISTVVGASAVSGFFASACSLPFDYVKTQIQKMQPDANGKYPYTGSLDCAVKTFKSGGPFKFYTGFPVYCVRIAPHVMMTWIFLNQIQKFEKKIGI

SEQ ID NO: 63041 - protein, 199 aa, Zea mays
  Clone ID: LIB3150-009-E1_FLI.pep
MGKAKSKGPKFAAVKKIITKKTINKYKEDVLNHKKKDVDKEKLGRNVPQVSSALFFSYNTALGPPYRVIVDTNFINFSIQNKLDLEKGMMDCLYAKCTPCITDCVMAELEKLGQKYRVALRIAKDPRFQRLACTHKGTYADDCIVERVTQHKCYIVATCDRDLKRRIRKVPGVPIMYITRHRYSIERLPEATIGGAPRI

SEQ ID NO: 63042 - protein, 185 aa, Zea mays; identical to SEQ ID NO: 47028
  Clone ID: LIB3150-009-G10_FLI.pep

SEQ ID NO: 63043 - protein, 321 aa, Zea mays
  Clone ID: LIB3150-011-B10_FLI.pep
SPGSPAGWPARNGGARPPAWRDAGAGPAPAARGLEPRHRWRRGRGPSQALWPSGPDGTGTAALAAPARGFPTARERRPPAPSALARPSPRRSGLGCAERSPLAAQPLRGRMALSRGPGGAAASAWPYRGRLSGAWTSRRAAPTTSAALPQQRGRGRGLDAVPGGAARGPLRGRGHAGPGGGNDPIRVRPSTAYPMPRPWRPQQRGCVDSTTRGHCPVARARGTSGARMLPRRLGRQPRRTSTSAVPSSVLARGHGASALPWLGDQASAQAHPNSGYAMAGAAPTVAVHLDANKPGPEGLGSQRWSLMENRCTASAGGRNVH

SEQ ID NO: 63044 - protein, 461 aa, Zea mays; identical to SEQ ID NO: 48739
  Clone ID: LIB3150-011-G9_FLI.pep

SEQ ID NO: 63045 - protein, 164 aa, Zea mays
  Clone ID: LIB3150-012-A8_FLI.pep
NLGGEHDGAACCLDLLLGDLGDELGLDDNGLGRQHPLPEHLEVAELRDVDLRGLVAAGLRRLVGGHHRPEALDVDRGAVELVAELMEVTHANLAEVARMVLVEEDTVVVHATGVTATSRVLPVLADAAVPGGHVAALLAVLLEARCHRRRRLTWAAPGRGEWRR

SEQ ID NO: 63046 - protein, 227 aa, Zea mays
  Clone ID: LIB3150-012-F7_FLI.pep
PATPPPHVHGSESLSSSAAKMVSLKLQKRLAASVLKCGKGKVWLDPNEVSEISMANSRQNIRKLVKDGFIIRKPQKVHSRSRARRAHEAKQKGRHSGYGKRRGTREARLPTKILWMRRMRVLRRLLRKYREAKKIDKHMYHDMYMKVKGNMFKNKRVLMESIHKSKAEKAREKTLSDQFEAKRAKSKASRERKIARREERLAQGPREPTAPVAAPAPSTGVPKKAKK

SEQ ID NO: 63047 - protein, 173 aa, Zea mays
  Clone ID: LIB3150-012-H6_FLI.pep
KPPTPFLSPSAAAAHAGNKRHGRLHLCVPQQRRRVDRQAALRRDRGFRRYPIRAAAPPRRCRLRGRLCLRRPVVLLHGHPQLRRVPGDRRCCRWWCNDGERRWRRRCCCIWWCCCRGSQGGEEGRGEGRERRRHGILPVRLELCVSSGSQKWWFGPVAVVNFAVLSVNLKNSW

SEQ ID NO: 63048 - protein, 219 aa, Zea mays
  Clone ID: LIB3150-013-H5_FLI.pep
RGSSRGAMDEEEHEVYGQEIPEDGDMDGADVDMAASGDDAAKLQELDEMKRRLKEMEEEAAALRDMQAKVAKEMQGGDPSASTAEAKEQVDARSVYVGNVDYACTPEEVQQHFQACGTVNRVTILTDKFGQPKGFAYVEFLEQEGVQEALNLNESELHGRQIKVAPKRTNVPGMKQRPPRGYNPYHGYPYRSYGAPYFPPYGYGRAPRFRRPMRYRPYF

SEQ ID NO: 63049 - protein, 430 aa, Zea mays
  Clone ID: LIB3150-015-E3_FLI.pep
HPPARCLRRISSDSDPPDHPAPPPRSSSSRSEKMAGLDTFLFTSESVNEGHPDKLCDQVSDAVLDACLAEDPDSKVACETCTKTNMVMVFGEITTKANVDYEKIVRETCRNIGFVSNDVGLDADHCKVLVNIEQQSPDIAQGVHGHFTKRPEEIGAGDQGHMFGYATDETPELMPLSHVLATKLGARLTEVRKNGTCPWLRPDGKTQVTVEYRNEGGAMVPIRVHTVLISTQHDETVTNDEIAADLKEHVIKPVIPEQYLDEKTIFHLNPSGRFVIGGPHGDAGLTGRKIIIDTYGGWGAHGGGAFSGKDPTKVDRSGAYVARQAAKSIVAAGLARRAIVQVSYAIGVPEPLSVFVDTYGTGAIPDKEILKIVKENFDFRPGMIIINLDLKKGGNGRYLKTAAYGHFGRDDPDFTWEVVKPLKAEKPSSA

SEQ ID NO: 63050 - protein, 204 aa, Zea mays
  Clone ID: LIB3150-015-F6_FLI.pep
DGQPRHPAAAAMVHVNFYRNYGKTFKKPRRPYEKERLDAELKLVGEYGLRCKRELWRVQYALSRIRNAARELLTLDEKNPRRIFEGEALLRRMNRYGLLGEGQNKLDYVLALTVENFLQRRLQTIVFKNGMAKSIHHARVLIRQRHIRVGRQLVNIPSFMVRVESEKHIDFSLTSPLGGGPAGRVKRKNQKKASGGGDAEEDEE

SEQ ID NO: 63051 - protein, 231 aa, Zea mays; identical to SEQ ID NO: 53471
  Clone ID: LIB3150-017-D7_FLI.pep

SEQ ID NO: 63052 - protein, 212 aa, Zea mays
  Clone ID: LIB3150-017-H5_FLI.pep
PFRFPHSLLQLRVRRRREGKMYTARKKIQKEKGLEPSEFEDSVAQAFFDLENGNQELKSDLKDLYINNAIQMDVTGSRKAVVIHVPYRLRKAFRKIHVRLVRELEKKFSGKDVVIVATRRIVRPPKKGSAVLRPRTRTLTAVHDGILEDVVYPAEIVGKRVRYRLDGSKIIKIFLDPKERNNTEYKLETCTAVYRRLCGKDVVFEYPMTENA

SEQ ID NO: 63053 - protein, 109 aa, Zea mays
  Clone ID: LIB3150-018-C2_FLI.pep
WPQAPARVSLALCSSSPGRVPARSLPWLGSARAVLCPCARPAPWNLGFRRARVSLATVEPRCPSRSFLLATKCRAFASSFSLPCRLSVFDPRLDVILRVQRLLGAQQNA

SEQ ID NO: 63054 - protein, 250 aa, Zea mays; identical to SEQ ID NO: 38264
  Clone ID: LIB3150-019-D9_FLI.pep

SEQ ID NO: 63055 - protein, 389 aa, Zea mays
  Clone ID: LIB3150-019-E12_FLI.pep
CSQKALARKNPTRETNLPNLSVAMALSDRSRESLLPSFLYASSARSFAATGAAARLPVSSPAPATAGAGGGVPFSIQAPKEKIEMYSPAFYAACTAGGIASCGLTHMAVTPLDLVKCNMQIDPAKYKSISSGFGILLKEQGARGFFRGWVPTLLGYSAQGACKFGFYEFFKKYYSDIAGPEYAQKYKTLIYLAGSASAEVIADVALCPFEAVKVRVQTQPGFARGLSDGLPKFVRSEGVLGLYKGIVPLWGRQIPYTMMKFASFETIVELIYKHAVPVPKSECSKTTQLGISFAGGYIAGVFCAIVSHPADNLVSFLNNAKGATVGDAVKKLGLWGLFTRGLPLRIVMIGTLTGAQWGIYDAFKVMVGLPTTGGVTPAPAAEAELKASA

SEQ ID NO: 63056 - protein, 162 aa, Zea mays
  Clone ID: LIB3150-020-F7_FLI.pep
LAHVLICFAQADVDVEPEVAAGAPKKRTFRKYSYRGVDLDALLDMSTDDLVQLFPARARRRFQRGLKRKPMALIKKLRKAKKDAPAGEKPEPVKTHLRNMIIVPEMIGSIVGVYNGKTFNQVEIKPEMIGHYLAEFSISYKPVKHGRPGIGATHSSRFIPLK

SEQ ID NO: 63057 - protein, 425 aa, Zea mays
  Clone ID: LIB3150-021-E12_FLI.pep
AFPKLFLFSCSANQRKPFPDSGGDMVLEATMICIDNSEWMRNGDYAPSRFQAQADAVNLICGAKTQSNPENTVGVMTMAGKGVRVLVTPTSDLGKILACMHGLEVGAEANLAAAIQVAQLALKHRQNKRQQQRIIAFIGSPVKYDKKILETIGKKLKKNNVALDIVDFGESDDEKPEKLEALIAAVNSSDSSHIVHVPPGENALSDVLLSTPIFTGEEGGSGFAASAAAAVATGASGFEFGVDPNVDPELALALRLSMEEERARQEAIAKKAAEDTSNTENINASSSNSDSVMAEAELASNAAAGDKQEQPKDDDDLLQQALAMSMEGGASGSAAVTDSAMAEAGAVDPDLALALQMSVQDANMSSDTDMSKVFEDRTFVSSILNSLPGVDPNDPSVKDLLASLHSQGEQEKKEDKSDKTEDEKN

SEQ ID NO: 63058 - protein, 158 aa, Zea mays
  Clone ID: LIB3150-021-G6_FLI.pep
GRHQSTAMGRMHSRGKGISSSALPYKRTPPIWLKTATTEVEEMITKAAKKGQMPSQIGVLLRDQHGIPLVKSVTGSKILRILKAHGLAPEIPEDLYFLIKKAVAIRKHLERNRKDKDSKFRLILVESRIHRLARYYKRTKKLPPTWKYESTTASTLVA

SEQ ID NO: 63059 - protein, 452 aa, Zea mays; identical to SEQ ID NO: 47541
  Clone ID: LIB3150-023-B9_FLI.pep

SEQ ID NO: 63060 - protein, 206 aa, Zea mays
  Clone ID: LIB3150-027-F6_FLI.pep
REARSARRRRWPPRSARSVSPRRRSARTSPRRPPRTGRASASPSSSPCRTGRPRSPSSPPPRRSSSRRSRNPRGTGRRSRTSSTAATSASTTSSRSPRPCGTGPWPRSWPGPSRRSWGPASASGAPSMGRTPRTCSRRSMMVRSRSHQLKGYTTRNHRTLSKWCFVPNAVPAPQSPIIVCFSSLKSCERPNQYLLPDKITSSDFLS

SEQ ID NO: 63061 - protein, 123 aa, Zea mays
  Clone ID: LIB3150-028-E8_FLI.pep
TARSSTAVTSPLTRPSPVAVAVAAVATAAVAAAAAMVAGAVTAVMAAVAATAVGARVVAAATEAVAATAVGARVVVAATAAAAAAGGTDVWAHPGFGRVILSIYSIVLPFASVTVLVSVLPLD

SEQ ID NO: 63062 - protein, 136 aa, Zea mays
  Clone ID: LIB3150-002-H3_FLI.pep
DPGGRGGYGAYSYGGRECRARDGQRSALVPQRLLPPKTARLDERADKGDGACRVSRRRESTTRLGGGGTSFQRQSQHTVRCNNHELNAPIGYKKHLEEFEPFNKNEVLFEDYCNSMLKDGTWTGHMELQAAMHSQF

SEQ ID NO: 63063 - protein, 178 aa, Zea mays; identical to SEQ ID NO: 41250
  Clone ID: LIB3150-010-A5_FLI.pep

SEQ ID NO: 63064 - protein, 312 aa, Zea mays
  Clone ID: LIB3150-012-C6_FLI.pep
ACSPCVHSWSEADDFCCNKMDATTPKYSKARYDEIVKEVSSYLKKVGYNPDKIAFVPISGFEGDNMIERSTNLDWYKGPTLLEALDQITEPKRPSDKPLRLPLQDVYKIGGIGTVPVGRVETGVIKPGMVVTFGPTGLTTEVKSVEMHHEALQEALPGDNVGFNVKNVAVKDLKRGFVASNSKDDPAKEAASFTSQVIIMNHPGQIGNGYAPVLDCHTSHIAVKFAELITKIDRRSGKELEKEPKFLKNGDAGMVKMIPTKPMVVETFSQYPPLGRFAVRDMRQTVAVGVIKSVEKKDPTGAKVTKAAAKKK

SEQ ID NO: 63065 - protein, 419 aa, Zea mays
  Clone ID: LIB3150-012-G7_FLI.pep
VGMALVLHSGAGNKNAFKALIAAEYSGIKVELTKDFEMGVSNKTPEFLKMNPLGKVPVLETPDGPVFESNAIARYVARLKDDNPLFGSSHIEQAHVEQWMDFAATEVDPGVAWYLYPRLGYLPYVSTTEETAISSLKRSLGALNTHLASNTYLVGHAVTLADIVLTCNLYHGIARILTKTFTSDFPHVERYFWTMVNQPNFKKVIGEVKQAESAPPIPKKAAPSKEPKAKDVKKEAPKEAPKPKVVEAPAEEEAPKPKPKNPLDLLPPSKMVLDDWKRLYSNTKTNFREVAIKGFWDMYDPEGYSLWFCDYKYNDENTVSFVTLNKVGGFLQRMDLCRKYAFGKMLVIGSEPPFKLKGLWLFRGQDVPKFVMDEVYDMELYEWTKVDISDEAQKERVNAMIEDQEPFEGEALLDAKCFK

SEQ ID NO: 63066 - protein, 391 aa, Zea mays
  Clone ID: LIB3150-014-G2_FLI.pep
AALAAMAKETEYYDVLGVCPAASDEEIRKAYYIKARQVHPDKNPNDPHAAENFQALGEAYQVLSDPLQRKAYDGYGKNSVSRENILDGTVVFTLLFGSELFEDYIGHLAMATMASSELTSDNDTPEKLQDRLKNVQREREEKLARFLKEFLSQYVRGDKEGFANRAEAEAKKLSCTSSGLDILRTIGYVYSRQAAKELGKKAMYLGVPFVAEWVRNKGHLWKSQITAAKGALQLLQLQEEACRQSSKDGNATEQDVDLQMRMNKDLMMSSLWKLNVVDIEMTLLHVCEMVLSENNVKKDDLKARATALKFLGKIFMREKEALPGPAPAPGPSGPSKRTVLDDDSSSDDSSDDDLTRTAPYRTPAFTQGIGRLFRCLCNPAYDVDDDFEPHK

SEQ ID NO: 63067 - protein, 365 aa, Zea mays
  Clone ID: LIB3150-019-G12_FLI.pep
VSSCKHASAFHKRNGGDGSRAFLAPGIRGALAGPAAARRAVGDVHHREQLRLHGVAGAAVQRGLRAAAHHGVRAGAFGVPCRGGARGVVGPPLGPHALRRRRRHGAVRVRHGGLRVRRRAVQRRRRRPARDAGGVHAGRQRRAGLLRRQPRGRVQPAHDRRAQQRLHHGSRRQVRADGVRRGAELRVPGGPAGGGRGGRARGVPERVRRLRGRAVLLQRRVRHPHRVPPVGLLRVLQDRVPARLQLRVRRRHLHIHLRRRQHRLHHHLLPRRAHQREVDGTEPSGRRVTAAAEQRHHHGLLRRQHADQQRRRLFCQLSLRGHRHRHSSRRARALALDSPVTGHHRCQVGHAYQKTGEHTYSMLSP

SEQ ID NO: 63068 - protein, 187 aa, Zea mays
  Clone ID: LIB3150-019-H6_FLI.pep
ISDLSNILHTSGSQPEIMAISLVLLAAKPGKLVGDHDVQLRSTFDDLLALPGGHVVGNLGTVCPVVHQQQLQLRDVVNDKLLELVGKVVPRLLVRAVSNVGHQGASLELPPDTGVDTLGPTPAWLEALVAVEVWPLELLDPLLHDLLRQQRHCHLCEPCGDAGERGASSGSGRRAAAGERGEALMAP

SEQ ID NO: 63069 - protein, 178 aa, Zea mays; identical to SEQ ID NO: 41250
  Clone ID: LIB3150-026-G8_FLI.pep

SEQ ID NO: 63070 - protein, 178 aa, Zea mays; identical to SEQ ID NO: 41250
  Clone ID: LIB3150-030-B4_FLI.pep

SEQ ID NO: 63071 - protein, 175 aa, Zea mays; identical to SEQ ID NO: 36984
  Clone ID: LIB3150-036-A8_FLI.pep

SEQ ID NO: 63072 - protein, 218 aa, Zea mays
  Clone ID: LIB3150-038-A7_FLI.pep
SPSRSPPPVAFVPSISGCDAGEPDTANRIRRQGEREEMGLTFTKLFSRLFAKKEMRILMVGLDAAGKTTILYKLKLGEIVTTIPTIGFNVETVEYKNISFTVWDVGGQDKIRPLWRHYFQNTQGLIFVVDSNDRDRVVEARDELHRMLNEDELRDAVLLVFANKQDLPNAMNAAEITDKLGLHSLRQRHWYIQSTCATTGEGLYEGLDWLSSNIATKS

SEQ ID NO: 63073 - protein, 368 aa, Zea mays
  Clone ID: LIB3150-038-F3_FLI.pep
KERRCFNMKALILVGGFGTRLRPLTLSFPKPLVDFANKPMILHQIEALKEVGVTEVVLAINYRPEVMINFLKDFEDKLGITITCSQETEPLGTAGPLALARDKLADGSGEPFFVLNSDVISEYPFAELIKFHKSHGGEATIMVTKVDEPSKYGVVVMEEATGRVERFVEKPKIFVGNKINAGIYLLNPSVLDRIELRPTSIEKEVFPQIAADQQLYAMVLPGFWMDVGQPRDYITGLRLYLDSLRKKSAARLAAGAHVVGNVLVHESAKIGEGCLIGPDVAIGPGCVVEDGVRLSRCTVMRGVRIKKHACISNSIIGWHSTVGQWARIENMTILGEDVHVCDEVYSNGGVVLPHKEIKSSILKPEIVM

SEQ ID NO: 63074 - protein, 225 aa, Zea mays; identical to SEQ ID NO: 60752
  Clone ID: LIB3150-038-H9_FLI.pep

SEQ ID NO: 63075 - protein, 175 aa, Zea mays; identical to SEQ ID NO: 36984
  Clone ID: LIB3150-039-A12_FLI.pep

SEQ ID NO: 63076 - protein, 376 aa, Zea mays
  Clone ID: LIB3150-042-D6_FLI.pep
LSPRRRRPPSSPPLPPRRGPSIRRQERRIRSSVVWESRGPILRVMKFGKDFRNHLEETLPAWRDKYLAYKALKKLIKNLVPREPAAAPPLPPPAPAAADAEGPGAPAAAHGNVNLANWFASILDAELHKLNEFYIEREEWYVIRLQVLKERIERVKAKKNDAFTSRSEFTEEMLEIRKDFVIIHGEMILLQTYSSLNFAGLVKILKKYDKRTGGVLSLPFTQRVRHQPFFTTEPLTRLVRECEANLELLFPIEAEVLEPSSSSNLEPHDVARCDPTSSRDVETVDVYRSTLAAMKAIQGLRRASSTYNPLSLSRFFHGEDGEPCSGAITSESSLSDSSTDSQIQDAGKDDKEVQSNSRDQNAAQGEQNAQGEPTDE

SEQ ID NO: 63077 - protein, 216 aa, Zea mays; identical to SEQ ID NO: 47321
  Clone ID: LIB3150-042-G6_FLI.pep

SEQ ID NO: 63078 - protein, 156 aa, Zea mays
  Clone ID: LIB3150-044-E5_FLI.pep
LPLLLQSSSPPATATLDHAVRRGKVSMVRVSVLNDALKSMYNAEKIGKRQVMIRPSSKVIIKFLTVMQRHGYIGEFEYVDDHRSGKIVVELNGRLNKCGVISPRFDIGVKDIEGWTARLLPSRQFGYIVLTTSAGIMDHEEARRKSVGGKVLGFFY

SEQ ID NO: 63079 - protein, 244 aa, Zea mays; identical to SEQ ID NO: 36891
  Clone ID: LIB3150-045-B1_FLI.pep

SEQ ID NO: 63080 - protein, 371 aa, Zea mays
  Clone ID: LIB3150-045-D2_FLI.pep
NMNVLLLSLLTTIDPYLELHASILLGISHWVAIEAPDPEEAEVQASLLRRLGAAINGHLRQDLPHGGAHLEAVAREAGPDHHVPAAAQEVHDEVGVGGHGADARLPDDRPSRGVHVVRHGLLDPPGHPVRDLRVAREPVAGVRVARRATVAADLDEPRELQRRRAVHGRVAVAGEGREPGARRDSLLLAGLHAPVEVERVQRPDWEVHAPGAEQLGRPRAHRDDAPGAAERLAAGGPHHDAAAVGLGRPVDADDLGVVPDHGAFRDGERLEHGHGLGGAEHAAVVAERGDPRVHRARDGEGEGAAPPAVKVVLVHLLGADVSDGGGERGAAPRAHGEVRRRGEHAVASLGLGGGPEAPGEAHHAEVPRLRV

SEQ ID NO: 63081 - protein, 246 aa, Zea mays
  Clone ID: LIB3150-045-D3_FLI.pep
RHRRHLHRPPISPRASAPIRGSAAVGSGRPAMAHRVDNEYDYLFKIVLIGDSGVGKSNILSRFTRNEFCLESKSTIGVEFATRTLQIEGKTIKAQIWDTAGQERYRAITSAYYRGAVGALLVYDITKKQTFENIQRWLRELRDHADSNIVIMMVGNKSDLNHLRSVPEEDGQALAEKEGLSFLETSALEALNVEKAFQTVLSDIHQIISKKALAAQEAAGSGPPGQGTTINVADSSANMKGGCCSS

SEQ ID NO: 63082 - protein, 230 aa, Zea mays; identical to SEQ ID NO: 50035
  Clone ID: LIB3150-049-D4_FLI.pep

SEQ ID NO: 63083 - protein, 292 aa, Zea mays
  Clone ID: LIB3150-050-D8_FLI.pep
RRAERLAAMAARAIAEREDAVARLEGEKAGLEKLLAEREKEQAQEASELQTSMIETLEAVEIEKQRHHSTRMEALARLARLEVTNGELAKSLAREQWNLEVQVDQVAQLREEVELKKLTQDKYRRKLTKIQKTSAPPVDEIESLRRFKLEEEIIDAEYTLTCDRIVSLKDKARKIEESIELTRRDMVHPTEVEIELKKRLDQLTDRLIQKQMQVESLSSEKAALLMRIESRGCLTIAPHHQLPQTHQDWTLKLVHGNNHIHQSFATEYGLDSSNWDLQSDSSIRSFQPGISS

SEQ ID NO: 63084 - protein, 202 aa, Zea mays
  Clone ID: LIB3732-061-F1_FLI.pep
RIVGDAKEKNRKFTETVELQIGLKNYDPQKDKRFSGSVKLPHIPRPKMKVCMLGDAQHVEEAEKMGLDYMDVEALKKMNKNKKLVKRLAKKYHAFLASEAIIKQIPRLLGPGLNKAGKFPTLVTHQESLESKVNETKATVKFQLKKVLCMGVAVGNLAMEEKQIQQNIQMSVNFLVSLLKKNWQNVRCLYVKSTMGKPYRVF

SEQ ID NO: 63085 - protein, 181 aa, Zea mays
  Clone ID: LIB3958-016-F1_FLI.pep
RQPAAEAASAGMATPTSSGDGSPPGSSDLVPPSYPEMIVAALAALAEENGSSQAAIARRIEAEARGDLPASHPALVAAHLSRMSAAGELVAVAGGKYALPPPVPPPPESPADDEEDDYADDEEEEEEAPEPEPLPQPPAKRGRGRPPKPRPTGFPAGVPGAAGPGPIGVPGAAAAAAAPRR

SEQ ID NO: 63086 - protein, 186 aa, Zea mays
  Clone ID: LIB3637-247-G6_FLI.pep
HAFFFSFFPDAKWTANKSWLVMCVRACVRTYPRSRRRRLSVEHVGRDSVQVVVDGLGQREAGPPRRRRRGLRVGSGVGHLAPPRGLRVALVRLRRRRSRIQLGRVDDTVGGASPPPLRLRRFVRRCYCVAEVEGRGHDRRRPRAAAVAVVVVVPLPERRDARAPRGRHYWWWSASVFVSRGRSREG

SEQ ID NO: 63087 - protein, 121 aa, Zea mays
  Clone ID: LIB3597-016-E6_FLI.pep
QSHGCSAERQEHGKGSMAATSRLLPPVRFCFGAIDLYDGDSDGYDSSVAAGGAHLSPKRLWIPGVAEGCAEAGQDGRRSLGAAGAQGQQQRPRRALRSSLTHPDPVAPAQSPSFHDTSTRR

SEQ ID NO: 63088 - protein, 245 aa, Zea mays
  Clone ID: LIB3595-038-A11_FLI.pep
KKYSATALSRPPSQHQQRRAMATAPYASSLFLASSPISTAPRIRAGPCPPSAQPSLRLRPRPSPAAAAAVQAEHQPALTAAPKPPALPFRVGHGFDLHRLEPDLPLIIGGINIPHDRGCEAHSDGDVLLHCVVDAILGALGLPDIGQIFPDSDPRWKGADSSVFMREAVKLMHEAGYELGNLDATLILQKPKISPFKETIRSNLCDLLGADPSVVNLKAKTHEKVDSLGENRSIAAHTVVLLMRK

SEQ ID NO: 63089 - protein, 163 aa, Zea mays
  Clone ID: LIB3595-041-E8_FLI.pep
MNFRVVKNRLNQLLNELVIDLCGHRYTHCYLHQRHNIVHPHLFGFGEFDCCFSLFLDWGGRTITCIVITLPGTSPTGTRDSARVLLFSSILPTLMSFTSLTVFGAISLSCGHRARTNSLSAATVVLGSYLLGPMSVPSDSRNFTSIGSFTPAISTGRVTSAFH

SEQ ID NO: 63090 - protein, 463 aa, Zea mays; identical to SEQ ID NO: 58993
  Clone ID: LIB3060-112-F5_FLI.pep

SEQ ID NO: 63091 - protein, 255 aa, Zea mays
  Clone ID: LIB3354-094-C6_FLI.pep
DELTSLKDYVTRMKEGQNDIYYITGESKKAVENSPFLEKLKKRGYEVLYMVDAIDEYAVGQLKEFEGKKLVSATKEGLKLDETEDEKKRKEELKEKFEGLCKVIKEVLGDKVEKVVVSDRVVDSPCCLVTGEYGWTANMERIMKAQALRDSSMAGYMSSKKTMEINPENPIMDELRKRAEADKNDKSVKDLVMLLFETALLTSGFSLDDPNTFGNRIHRMLKLGLSIDEDEPVEAEAEMPQLEDDAGESKMEEVD

SEQ ID NO: 63092 - protein, 60 aa, Glycine max
  Clone ID: LIB3055-013-D7_FLI.pep
IIIINFKDLLYILQQNSSTPAELIMPKQTTPVHIHDKPIQTSGFTLIQSCISLQYYVSCF

SEQ ID NO: 63093 - protein, 371 aa, Glycine max
  Clone ID: 700653781_FLI.pep
SLVRFTLTMDSLSLFCTGALLAGGLYWFVCVLGPAEQKGKRATDLSGGSISAEKVQDNYKQYWSFFRRPKEIETADKVPDFVDTFYNLVTDIYEWGWGQSFHFSPSIPGKSHREATRLHEEMAVDLIEAKPGNKILDVGCGVGGPMRAIAAHSRANVVGITINEYQVNRARMHNKKAGLDSLCEVVCGNFLKMPFVDNSFDGAYSIEATCHAPKLEEVYAEIFRVLKPGALYVSYEWVTTDKYSGDDPEHVEVIQGIERGDALPGLRSYAEIAETARKVGFAVVKERDLAKPPALPWWSRLKMGRIAYWRNHIVVTVLAALGIAPKGTVDVHEMLFKTADYLTRGGDSGIFSPMHMILCRKPHDKDEQNSG

SEQ ID NO: 63094 - protein, 312 aa, Glycine max
  Clone ID: 701044403_FLI.pep
LPFSESKFQRNVNSERNKKNTMMLKAAPRAVIYYLSEHPAIVGFRWSHAQSWGATWSFLFSSIASYLFLSVFLYFSLSLLFRRRQIPLGPLPAVHSLSMSLISATIFAGILLSAAAEISDTRWFWRRSKTPLQWLLCFPLGTRPSGRVFFWSYVYYLSRFLHMLRTLLRILRHRRLSFFHLLSNSISALASFLWLEFSQSFQVLAILFATLVYAAVYGYRFWTAIGLRGACFPFVLSCQIVLLACNVACHVAVFFLHFFLKGGCNGIGAWVFNSILNLALLMLSLNFYVRMHVHKRRRKVRDVTVTVATALS

SEQ ID NO: 63095 - protein, 169 aa, Zea mays; identical to SEQ ID NO: 50724
  Clone ID: LIB3591-090-G8_FLI.pep

SEQ ID NO: 63096 - protein, 269 aa, Zea mays; identical to SEQ ID NO: 52067
  Clone ID: LIB3596-035-C11_FLI.pep

SEQ ID NO: 63097 - protein, 312 aa, Glycine max
  Clone ID: LIB3056-003-D6_FLI.pep
GVHLSPTDISSQLPTQNPDAPVMLDRILRLLACYNILSFSLRTLPDGKVERLYGLAPVAKYLVKTEDGVSIAALNLMNQDKVLMESWYYLKDAVLEGGIPFNKAYGMTAFEYHGTDPRFNKVFNKGMADHSTITMKKILETYTGFEGLKSLVDVGGGTGAVVNMIVSKYPTIKGINFDLPHVIGDAPSYPGVEHVGGDMFVSVPEADAIFMKWICHDWSDEHCLKFLKNCYEALPDNGKVIVAECILPVAPDSSLATKGVVHIDVIMLAHNPGGKERTEKEFEALAKGSGFQGFRVLCCAFNTYVMEFLKKV

SEQ ID NO: 63098 - protein, 202 aa, Glycine max
  Clone ID: 701043114_FLI.pep
HNTISSFVFGCAAQHVTIMASKNSQQDTRLARIASAIRVIPDFPKPGILFQDITTLLLDTKAFKDTIDLFVERYRDQNINVVAGVEARGFIFGPPIALAIGAKFVPMRKPNKLPGEVISEEYSLEYGTDKMEMHVGAVQPGERALIIDDLIATGGTLGAAIKLLERVGVHVVECACVIELPELKGRERLGDKSLFVLINGGA

SEQ ID NO: 63099 - protein, 240 aa, Glycine max
  Clone ID: 701066283_FLI.pep
CIWEWERKMPKRTTHTYSSEDAAPEGPHSDLFVYYCKHCGSHVLITDTQLQKMPKRKTDKAYVLDKSKHLARLNMKEGGKVVLKRGEGKMEKQFRMNCMGCGLFVCYRAEQELELSSLIYVLDGALSTVAAETNPQDAPVPPCISHLEGGLVQLAIEVEDRAQRSAITRVNADDVRVTVAAPAARGEANNELLEFMGKVLGLRLSQMTLQRGWNNKSKLLVVEDLTARQVYEKLLEAVQP

SEQ ID NO: 63100 - protein, 306 aa, Glycine max
  Clone ID: LIB3093-002-E11_FLI.pep
LCYYPVSCGTNFHLALLRIRFCSGEMYAETGLLFPYLNNISHGLHQLEEYCKTQKSNASMDDLVQSSVMSEYDLAAEGDLFKAPEPIIEEPIMDMDPMTATISMISCGEDVSSQGLKSTDIDILQNDQFLHEVFYECEKDLLEKAAIEPPFSEILEIKVPLLNIDENTIQENKLLPDMQLAKSVSSGSLSSMDWMRGAAMKPAFIDIPAIDFNADYGMRRSFSEGDIKTLGNGNMNIVQSPLERPLLISNCTSEERFQKLSRYRNKRTKRNFGRKIKYACRKALADSQPRIRGRFARTEESDVKRE

SEQ ID NO: 63101 - protein, 202 aa, Glycine max
  Clone ID: LIB3073-012-B2_FLI.pep
GKKERKKEPIEAKMAMLASPPSVKLSLSFPLSASKPNPRRLFTIRAAEPETPPSGSDQSQAEPDPSDDTFDDRINQLRLRYRSGTGKKAELRKNKKSKKGTSGSGSGVFLPPVPLKEPVSGGVKVELGFSQYSERLNGRIAILGLTALLLVELATGKGVINYHSPAIILIQIYFVAAVGAVFVKYEKEKISVWPQTDSSTNK

SEQ ID NO: 63102 - protein, 269 aa, Zea mays; identical to SEQ ID NO: 52067
  Clone ID: LIB3591-011-H12_FLI.pep

SEQ ID NO: 63103 - protein, 185 aa, Zea mays
  Clone ID: LIB4073-007-B3_FLI.pep
TAAASEKTCSRGAGEQASKKRAERAKLARDGEVFQDDDGGGGSAGPGSGRGDDRRGEEHQDDDDGGGGGEEGGQRRGGAAADLPALRPPRRRRVPGVRRPPRHRQQHSWQQHSRVQPAREQRRQQHAWVPARQRQHRQHAPLRRRLPVQRLRRHARLPHRRLRPRARQQALNSVSRRRGSRVMLL

SEQ ID NO: 63104 - protein, 85 aa, Zea mays; identical to SEQ ID NO: 53126
  Clone ID: LIB3591-108-C1_FLI.pep

SEQ ID NO: 63105 - protein, 220 aa, Glycine max
  Clone ID: LIB3093-028-E5_FLI.pep
IIQNSKIALNKTFNSFPRFIFKKHETNIREKEKERETKSSSSIERDLNITIGNLLLQVLWILSINGATNRNACSENLLNGAAEVLGHGPRPHNPSDLDDVIERDVAVVLDVLGLLAVALGLLEGLDNEGGGGGDHSDLRLTILNGELDGDAEALPVLGGFFGDVFSDLLGGETEGTDLRGQGTRRADFAAGNADEDVDYLGGVELRRHCGEVMIEEEEEC

SEQ ID NO: 63106 - protein, 151 aa, Zea mays
  Clone ID: LIB3595-046-C9_FLI.pep
KCKSGGCSSGPRGRRRSWGSCTSTPWPRPVGGRARARPRRAARRRRRGDGDHEQRGVQGAHAPRGHQRQGEDVARALLPAGAAQGPAARGGAGERGPARDLQEAQGQDLRRRVLGCVRARRAHHRLPQHQGRRQGAWRRISNLSASLTPCM

SEQ ID NO: 63107 - protein, 649 aa, Zea mays; identical to SEQ ID NO: 54437
  Clone ID: UC-ZMFLMO17201H02_FLI.pep

SEQ ID NO: 63108 - protein, 402 aa, Zea mays
  Clone ID: UC-ZMFLMO17064B11_FLI.pep
AGPTSTEHITAMDVRKGKDMQGIPWNVMPTTRDKYRQSRLQGYANFENVPNSGRLSEKECMPAEKGQLYYEFQHSTRSVKPTIRHFQLRNLVWATTRHDVYLMSNFSVLHWSAMTCKKQEVINLLGHVTPCEKHHRNYYEGFYRTPVSTLAVKHNLLVTGGFHGEIICKFLDRQGVSYCCKTTNDDDGITNSLEIFEKPSGSLHFLASNNDCGLRDFDMEKFRICNHFHFAWPVNHTSLSPDGKLAAIVGDSPDGLLIDANSGKTVHKLHGHLDYSFASAWNPDGRTFATGNQDKTCRVWDVRNLSRSVVVLGGNIGAVRSIRYTPDGKFMAMTEPADFIHIFDVESGYSRKQELDFFGEIAGISFSPDTEALFVGVHDRFFSCCLLQFNRRRFYSYLDSTL

SEQ ID NO: 63109 - protein, 577 aa, Glycine max
  Clone ID: 700655523_FLI.pep
LRPFQEERSAMDIGTYGYPTPAVKKIESYYDVPEGVDIRGRYDAEFAKILTKDALKFVADLQREFRNHIKYALECRREAKKKYNEGALPEFDPATRYIREQEWVCAPVPPAVADRKVEITGPVDRKMVINALNSGAKVFMADFEDALSPGWENLMRGQVNLKDAVAGTISLHDKARNRVYKLNDQTAKLFVRPRGWHLPEAHILIDGEPATGCLVDFGLYFYHSYSAFRRTQGAGFGPFFYLPKMEHSREAKIWNNVFEKAEKVAGIERGSIRATVLIETLPAVFQMNEILYELKDHSVGLNCGRWDYIFSYVKTFQAHPDRLLPDRVLVGMTQHFMKSYSDLLIRTCHRRGVHAMGGMAAQIPIKEDPVANEVALELVRKDKLREVKAGHDGTWAAHPGLIPACMEIFNNNMGNASNQIDTVKREDGANITEQDLLQIPRGARTMEGLRLNTRVGIQYVAAWLTGSGSVPLYNLMEDAATAEISRVQNWQWLKYGVELNGDGLGVKVNKELFGRVVEEEMARIEKEVGTEKFKKGMYKEACKIFTRQCTSPMLDDFLTLDAYNYIVVHHPRETSKL

SEQ ID NO: 63110 - protein, 556 aa, Zea mays
  Clone ID: UC-ZMFLB73134D01_FLI.pep
TVSSLKGSDDVSCMDYDISFKLSLGNEDTSKLHKQACGSKRTMEKPRLDLKLSLAPSQSDVTDADLIRSSAPQDMFVQPYLMSSVPTVDEGSTSARHPSGGMVVSFLNQAGISPNQLPPLNSHLVQGPACSAPTVLQLPKSSAATSSGFVRPQQRNGSTKICSEPGCAKGARGSSGRCIAHGGGRRCQKEGCNKGAEGRTIFCKAHGGGKRCERLGCTKSAEGRTDFCIAHGGGRRCSHDGCKRAARGRSGLCIKHGGGKRCQTLNCTKSAEGRSGMCIAHGGGRRCQYAGCGKGAQGSTNFCKAHGGGKRCTHPDCSKGAEGSTAFCKAHGGGKRCSADGCTKSVHGGTQFCVAHGGGKRCVVEGCGKSARGRTDRCVGHGGGKRCHSAGCGKSAQGSTDFCKSHGGGRRCSWGHPGSDLGSGGAPCDRLARGKKGLCDRHNPLVHDNSVHGGASFGGFSVVSAAALSEGDGSPSPGTETSMRSFFMHAVEAPRCVAASAHEGRVHGGNFMPIMLDGGVGLGKRPADNADAGASAPPRSWKSMEKACGSAPRSWL

SEQ ID NO: 63111 - protein, 369 aa, Zea mays
  Clone ID: UC-ZMFLMO17259E10_FLI.pep
RLSNSALSDCPPLRIPLPAAAAAAAMLLLRANALAAVPVSFSITPAASYSCFPWPSSSTTAASCSVGSSARLAAAVQYDPLRPGSDAWAHPDGMVTAEGDEEKQRYDTEGESNDWEGEGPQGSSDPEGINVPRQRYIAVPKEALLDAVLSQFASDDDDAADFKRCARCLDAILHAEHKRMLEEMRTSYMLTQRHRDEEEEQDDTDTASGSDYVNGKAGSGFFGITQLDGTLFLTRSVDLRTLLGLTPDPDSQTRVAFATQFQRSFMTLLRNAQFEELSAQDLLLTYALNNDYLLTLPIYVDWKKAAQSNAIIFRRGYATERQKGLLLVEKLDYLQSKLLQNVFFSLSKPLKKPGKWLNEFLAGFEKINR

SEQ ID NO: 63112 - protein, 1989 aa, Zea mays
  Clone ID: UC-ZMFLMO17067D03_FLI.pep
SSSGVDDVSLNPTFSTVSGVADTSYVPSYSQVSSQGTAVALAGIQKDFVTVKLDTLLPDSGKGAPPVNEGDKGATVTTPVAKDICAGTVTTSDNTVTLTPNTLKENIGLVQVASAPSMLVASEELMKIAHVAVADKPVEKQTASRRRRKKTSSSEDTGVSTRQRSAMKRSYYNTSVAVDDIGSAVIPNEKSGITKERDVSSIQSTSNELPNINSPLYEKSGYDSQPSTPIAVPINEDTLPSGFDTCTNSMITLATSANSAEDDKPVDLHLNAPVSVDSQNQEQHMTGKDHLAVCSRIFATQLQTDTANPAIDHKPGTAQFEPSASLPQNSGKDATALPSEVDSAAPNRASSRRRKGSTREPRTRSNSASAASERRARLTGLKQAEDIKKLEMSATPTTTVCISSVEQQGAASLSAKITNASVSEGQKNPGNYMPSAISIPVGSHVLGLGATSIEETTATMITQAPAVSKSERRKLPGGSQQGIQFESSASKTKMVSAVEPAPANVECMQGTEVNSSEQTIVSATEPAPANDEHMQEQPTNIVSSVESEPSNDEEHTKHEVFLATTGDNMLASSAGTEILRDTVEHAACQPEAVCTDGTARQSELSQLDRKAFHDASYKYTHGSTKDDGILPSEGTSVDVTGSKQDDVNIVGTQTDDVSRGSSHFPVILQSTESDRPPGQVKNLESRMEQVKTEEALVNSSGGNQTHSLGDEPSHNTSLARNSPSEHSNERCSDQVIGENFKSKENIVEVHSGINTDGPDEALNALHTQSKEASMTDIGVPTDGDRCEGKGTSVEVCADMNTDGPVATQDASSTKSDKESCMMECGVSTDGCPTVCKTHNDLQGHVSCEETFVRTGGDDTTHITNANYGSNNESEATIASPVETTQKLMEGSTVIVSENSDLNKQCHTLHTRNDPPANTLLIVESNKVTCDAEIVCASRLESSGIEAETVGIQESALTDFEGTKGTGDLGDRTNSQLHDDVHGTSCSTIALVSEKEPSEDLTTGSHSEASNLLAAVEQTQETTVENQEIIDAVVFMDACKAEPVGDFTIAKGAEQTVEMVHYVDKQSAVLDYVETQTKRTSVCGSTLNESPQAAGLEEDCSVLKHGDPTSSELLTVAPNPIGETSVIQVEPEARNSDGYCTTEAGSALSETVMGLEPNKETAVPMQENIGEANDNFNNCEAHNNSEIHAFEVSMETQSSEVKEVSSIQSGAANLSTQTTALPDVTGQTSMASTGELVSTNEHIHMQGTEINSEQQTKMVSPAESAPANDEHVQDIVILSSEQQTKMVLAAEIDALCVQETAIIDLGGARGTVDLNDIRTQVPALPGRDVLDVEAHILEQKKTSSPGDEIKGSEQAKIESIAEIETVGVKENVIADHKETGNNSGVSIHAPLLVESGQKASPGVELRGIEVDAHVLEQAKMVSALEPDSTPEVCADKLEPSGADDVGMIVVQEAASVDDHNRAQGGEAHCSEQIKMASIAQAVSSMALVGYSSSEDSMVDAAARVTDADFVDSKAAGVYRQETMPTQTTSTLPENMDSPATAATMVESKFAASSEHVAGPEPIDETSVMQVELATSTGDGCAADGHNLVSSETVVEVKLAQEIVVPSPGGSIEANNTSTISEVYKDTQSRASGEACNDGQSHGDENMKLGEAYTELQLAPSSGEEAMTCMCSELPSQEVEAPSSDPLENNEETKNEAAAQGSVNEDSAPRAENAKIDEADTEQELLPSGEATVDESSELLSQDEKVARKDAKMEESAAAAAAQRQLTTEVAHASENAKLGEDGTELQLPPPSMVDISREQLSQEVEVASSGPSGTDETAEMKRLNTEHSPGDETSKLVGTDLGLQLSPSGDAMVDISNKPPSCQDVKEAPSSDILGNDENSDTEKTPAALHGRLNTELAPSGRNTEFSEADTGKQETPVSAEAMVESSSEPRSHEAKEAPTPDLSGDDEKAKSARAAVVAELFGDATEGGSDQPLPSPREQGKEAEADGGF

SEQ ID NO: 63113 - protein, 236 aa, Zea mays
  Clone ID: UC-ZMFLB73223A09_FLI.pep
KELYIYYCTFLIVGNKRCLDQITHHPFQPYSNSCRGFWYHHAEETYLMLAYWLPNTTHTLPVNATHRVGVGAFIMNDKREVLVVQEKSGVLRGLGVWKFPTGVVEPGEDINVGAIREVKEETGIDAEFVEVLAFRQSHKAFFDKSDLFFVCLLRPLSYDITKQDSEIEACQWMPVEEFAAQPFVQKHELVKYILEVGLAKVDKKYAGFSPISIKSAFTDKLSLFYMNRRDLDKASG

SEQ ID NO: 63114 - protein, 129 aa, Zea mays subsp. mexicana
  Clone ID: UC-ZMROTEOSINTE016A09_FLI.pep
KIAMADSYLEVRKSVLVGWHAALRWRLPGIMNLKLRTMRISCLKKALVQTRRNLTEVTRINLRSKMRRWIWMIRDMWSMDVWHTFQPLPAPGPGYSRKTSIHTLRISWTGGNHLASRSDTSASGLVPGS

SEQ ID NO: 63115 - protein, 658 aa, Zea mays
  Clone ID: UC-ZMFLB73403G01_FLI.pep
PPPDPSASPRNRLSVRPESGERVAAAEMESLAQRAALLRESLQKSQQVTDAVVSILGSFDSRLTALDSAMRPIQVRTHAVRTAHENIDRTLRSADVILTQFDRTREAEREIQKGPHENLQGFLDAVDRLRSIERFFSSNRSYRSSDGVLNHVNALLSKALVRMEGEFQNQLSQRSKPMEPDRLFDCLPSTLRPSSESQPEGGKNPSENQQNPEAVVYSPPALIEPKFVPLLSKLAQQLVQAGCQQQCSEIYSEARSSALESSLKNLGVEKLSKDEVQKMPWEILESKIGNWIHFMRIAVKLLFAGERQLCDQVFECSQSLRDKCFAAITKNSLATLLSFGEAIAMSKRSPEKLFVLLDMYEIMCELQTEIDTIFVGESGSQMRASALSLTKCLAQTAQKTFSDFEEAVEKDATKNIHTDGTVHPLTSYVINYVKFLFDYQSTLKQLFQEFKEDGTGSELAAVTMKIMQALQNNLEAKAKQYKDPALMHIFLMNNIHYIVKSVRRSEAKDLLGDDWIQRHRRIVQQNANQYRRIAWAKVLQCLSGQGLTSSGGSGHVGSDGGNSSGASRTAVKERFRSFNVLFEEIYHKQCGWSVPDTELRESLRLAVAEILLPAYRSFIKRFGPLIENSKAPGKYVKHTPEQLELLLGNLFEGKQERA

SEQ ID NO: 63116 - protein, 663 aa, Glycine max
  Clone ID: 700795004_FLI.pep
FKREKIDPSYEDVLNRVVTYASGLPLALEVIGSNLFEKTVAEWESAMEHYKRIPSDEIQEILKVSFDALGEEQKNVFLDIACCFKGYEWTEVDNILRDLYGNCTKHHIGVLVEKSLVKVSCCDTVEMHDMIQDMGREIERQRSPEEPGKCKRLLLPKDIIQVLKDNTGTSKIEIICLDFSISDKEETVEWNENAFMKMKNLKILIIRNCKFSKGPNYFPEGLRVLEWHRYPSNCLPSNFDPINLVICKLPDSSITSFEFHGSSKKLGHLTVLNFDRCEFLTKIPDVSDLPNLKELSFNWCESLVAVDDSIGFLNKLKTLSAYGCRKLTSFPPLNLTSLETLNLGGCSSLEYFPEILGEMKNITVLALHDLPIKELPFSFQNLIGLLFLWLDSCGIVQLRCSLATMPKLCEFCITDSCNRWQWVESEEGEEKVVGSILSFEATDCNLCDDFFFIGSKRFAHVGYLNLPGNNFTILPEFFKELQFLTTLVVHDCKHLQEIRGLPPNLKHFDARNCASLTSSSKSMLLNQELHEAGGIEFVFPGTSIPEWFDQQSSGHSISFWFRNKFPAKLLCLHIAPSTGSFIRYPEVFINGKFQEFESHETDDTESMLGLDHTHIFDLQAYAFKNNNQFEEVAWEKEWNHVEVTYQSVLDDEEEESEEGVLDD

SEQ ID NO: 63117 - protein, 574 aa, Zea mays
  Clone ID: 700343295_FLI.pep
NLSYVDLSSNFLHGSLPMGIGDLSALTLLNLRQNNFTGEIPRTITKLKNLLYIDLSSNNFNGSIPDGLPDDLVEFNVSYNYLSGSVPSNLLKFPDSSFHPGNELLVLPRSESLNGSDKSDEARHGLKRGILYALIICVVVFVTGIIVLLLVHWKISSWKSREKGTGQGKHVGQVQSAQRSAEISTTEMHDVALESSPSAEYGAVSLPGKERRHEAQDAPIDAAYFNEPAGSSSARKDSTKSSMPSLSSSPPDARSQHHHSILRVHSPDKLVGDLHLFDNSVVFTAEELSCAPAEIIGRSCHGTSYKATLDNGYMLTVKWLKEGFAKSKKEFSREIKKLGSVRHPNLVPLRGYYWGPKEHERIMISDYADATSLSTYLSEFDERNLPPLSAGQRLNIAIDIARCLDYLHNERVIPHGNIKSSNVLIQNSTPSALVTDYSLHRLMTPIGMAEQVLNAGALGYSPPEFSSTSKPCPSLKSDVYAFGVILLELLTGKIAGEIICMNDGVVDLTDWVRMLDLEERVAECYDRHITGVESSEGAPQALDGILRIALRCIRSASERPEVRTVFEDLLSLSS

SEQ ID NO: 63118 - protein, 1272 aa, Zea mays
  Clone ID: UC-ZMFLMO17333G09_FLI.pep
KELTPSVAGSVYKSTLTEHGAEPSSAQTGSNQQESINVKNSSSASKEQETTDNSLFISSNKKPLDTKQVNVTGPPAALRSLALTGNTKPTIFSSFSTEGMNPTGGNAPNELASSLQPSSRSFGNNQTGKEGLDSVQSVGIFGGSQNSNKDGDVYGFKSSLFTSSGSVPAKIGERNEVGFGVPSLQTSYTADRKVFGASVALSSVPSSSISPAKPSPIGSSSGFRTANSEAPQSLRGSPPSQQSMGKSHNSRTQAPAEYSRNSKKGTGFDSEQDLSKKFYSINEMTKELDALLAYIEKDGGFRDACITIQQRPLSMFEDGLQNFLQLLQVFKGKVEEQCSKIEDLRNNMFQVSARQTYMKGIVSQSSDNQYWDIWNRQKLSPEFEVKRQNILRANQDLTNQLVELERHFNNLEMNRSSETGRVASNRRAVYSNKTSSSQTQLSSVYSALNSQLAAAEQLSECLSKQISVLNIGSPSRKQGMVTKKLFESIDLAHTTDATKFSGSTPKPVKRFPSVNEHSKGILGSSKGGEPETARRRRESLDMSLASLEPQKTTVKRITQQQRLKINSDLPFRSNKKIFDSQMAAISQEKSSDSSNSSIVESYVSRLRSLSEDVNDKLSGPQQNPLFKWVKESTGSSQTSEQKHFELPGQMKSTAQSSKLTPSSPPSFSYTRMGAQDSINPSSVPSFGTKHTVSKPNTLTFKTTISPKSNANTEPNILPSITAPKTSLSPLSVKTAGESGDLPTLTMKNRQDGQSMPSLGNIKGPGASLQNKGGIFRDLDKSSFNSEHSKPAALHEKTDQLSGVGDAVQNTVKDISKMAPQPSAFLPAPVTQTNSYSLRPTVSSSATSGAKTSDVLSSSMQKVSPIVPGGTVSSSVPTPAKDSSTGLSQNASKPETLISKVTSTIVSASSTSVISVTESKPSVPPTTGASLPSTHVSAPQTAPTTSESVFTSTGKNVGPNTDTISTDEDDMEEEAPSASAELNLGALGGFGLGSQPSSSPQKSNPFGASFGTSGNKSSGTPFTLTTSPGQLFRPASLSIPSAQPAQPSQSTSSSSFSNSFSSGLTGFGQPAQIGSGQQSAFGKPAQIGAGQHAGFGQTAQIRPGFGQPAQIQSGFGQSAQIGTGQQSGFGKPAQIGAVQSGFGQPAQFAAQQTLGSVLGSFGQPPQLGGIGSGGFGGFSSASTSAGFSSLSSGGGFAAAATGGGFAALASKSGGFVGAASSGGGFGGASQGGGFGSGGGGFGSFGGNQGAGFSAFGASGAGRPAADFLTQMRR

SEQ ID NO: 63119 - protein, 682 aa, Zea mays
  Clone ID: UC-ZMFLMO17342B09_FLI.pep
GLLRIDSVPWDSCLQHSMAAARHGGYRSFDVARRREFDLERSRRSKEYRYSSRHRDSDRHRDGSRGREVPNGYIRHRSPYAPPKSRPSKRKDDKEPGEVSSDSGSESGGRPPVLREDGGLGVCRDGGALPASKKRKHSPGFHDTNVSKLRARDEVWSRRGPDAIAVELPLPSPPPMSAVGGCSPMDPEVLVVPNDAERMDAITEGEEDCATRNIFTSRWADAAEEEEVVIVPKKKKSVPPAHLPEQKSTKKIMGSELGEAMGSKTSRRSSSSSSNSMGSENWNIEVDEGDGIDSSVGCSLDTHSRSNMRRSGSPEVVRTPRRCFNMLQGCRSIDDFERINTINEGTYGVVFRVRDKKTGEIVALKKVKVDKENGREGFPLTSLREINILLSFDHPSIVDVKEVVVGGHDDDTFMVMEYMEHDLKGVMEAMKQPYSQSEVKCLMLQLLEGVKYLHDNWVLHRDLKTSNLLLNNRGELKICDFGLSRQYGSLLKPYTQPVVTLWYRAPELLLGAKEYSTAIDMWSLGCIMAELLSKEPLFTGKSEIDQLDKIFRILGTPNEERWHGCSKLPGFKGNFVKRPYNRLRDKFPAVSFTGGLTLSEAGFDLLNRLLAYDPEKRISAADALNHEWFREVPLPKMKEFMPTFPALNEQDRRIKRYMKSPDPLVEQQMKEQGSIGDHGLFD

SEQ ID NO: 63120 - protein, 518 aa, Zea mays
  Clone ID: LIB3067-009-D2_FLI.pep
FLGLEGLADDGGMLGDLVAELAGLLRGVDLVQPRRRQQLEVLHQPAQGDADDRQREDDPRAAPAADPKGHEAEVVAVGLHGLLLLQEALGPELVGPHPPLGVVGEEPGIDEDLGLGGDVVAGELAVVEVHVGDQQRDGHAQAERLLDDGLKVGEALEVRLRHRHAGAQHRGELLPELVLDGRVVHQLGDAPLDRPQCRLDRCDVDVLDDVEDVVVVDLALPLGLEDVIHGAPDLTSLSHHLLALLYEVVLEDLHAARLEVVAAVEVAAEEGAEHGDEVAVVVLEALRQAAALRVERLELVEERVVLAVEPAVEHDAEHVVVHHQLEAAAEHDAAGRGLGVLPHVLHHQPGLLLPPGAVLGHHLVGEEGDGHDAPHLAPVVAVHREHHVLPLAREDVEHHVAGAGAELHALRVEHLLGQLRGRHHHQVAHAHAQQEDVAEPLRHGHQVAVVQVVAHLQPVSNHGGARGPRWEAVPLAAQLGHGDGHHSRGEQAQQGLLQEGEVHVVLPAGPAGVGGVCG

SEQ ID NO: 63121 - protein, 177 aa, Zea mays
  Clone ID: LIB3115-018-E12_FLI.pep
ELIKKEELRREIEASVRASRRAMCPDGYSSRRISLRSRVAAAAASTAVVMATATAFLAGNCGSGSKLGSGDVENDGPAYTSAAGLALLPPGCLRPAAGDDVPAGGDLLLVAVAPGWWLSLPAALRRAAAAARILCGGAGKRTLRARSTSVAMPTTGEGEVRGEIWSGADADADRRWR

SEQ ID NO: 63122 - protein, 142 aa, Zea mays
  Clone ID: LIB3136-059-F9_FLI.pep
PTALHPVAMRRSSNAYGAMLPVPQPALVGHQFPCTASWLWSSGCTIELTGLGDSVGEDGLLWCCLGHLCCIGNNRSSDAVLCGSLHRLHLCRDTIWYGRIGLPISRFLRSLTGDRNGGPSVPDLLLELLLFRPLILHQLLAA

SEQ ID NO: 63123 - protein, 210 aa, Zea mays
  Clone ID: LIB3137-027-G12_FLI.pep
GKSRNFLSISYKLLSETEQHSLFLKLNNIQQWTTTKKPFKKSLKRVGHGPRSCQQRAAKAIQRAARLALSIFILSSHRIFLYLPPHPDAKQDSYPAFVSMGREGRAHGHGVVVVVVVYGQQHQSQICKFVLKLMLLGYPPWRTSSAPPPLWLLAGATSVDDDFVGALALPTASLLSSGLLELDVRYGSTLATLSFRFSKNRASDAFPHAP

SEQ ID NO: 63124 - protein, 469 aa, Zea mays
  Clone ID: UC-ZMFLMO17212G08_FLI.pep
SDDADVVALIGTSKDLAKQINQKEVHWGLLEDSVEERMEKALAESDKIEAESKDADAEDNKKRNAEGGKQGASLKKAKKDKLVGATGKSVRTETSMVSVAPRVKPELTLPATPVEVEQSILEDLRNRAQLNSVALPSVSFYTFLNTHNGLNCSSISHDGSLVVGGFSDSSVKVWDMSKMGQPAKISRSQGENGPSQGERISTLDEGKRTYTLFQGHSGPVYSAAFSPFGDFLLSSSSDSTIRLWSTKLNANLVCYKGHNYPVWDVQFSPVGHYFASASHDRTARIWSMDKIQPLRIMAGHLSDVDCVQWHVNCNYIATGSSDKTVRLWDVQTGECIRMFIGHRSMVLSLAMSPDGRYMASGDEDGTIMIWDLSTGRCVSPLLGHSSCVWTLAFSCEGALLASGSADCTVKLWDVASSTKTLKTEDTKGSSANRLRLLKALPTKSTPVYSLRFSRRNLLFASGALSLSSS

SEQ ID NO: 63125 - protein, 1101 aa, Glycine max
  Clone ID: JC-GMLE01810066F10_FLI.pep
HHRNTSRPGAYIDNTHIMWRPTAAVAIASLLTLPSALAEISLSSQKSFVRTENLFASDPYLSIYGDRPDDCPPCFNCNLDDFTCLQFANCTKSSGKCSCPPGFGGEDCSQPLCGSLPEGKDRLPRQGKECECHEGWEGINCNVCKTDNACNAMMPNGEDGVCYREGLVVKENYQMCDITNRKIMDQLKEKKAQATFSCNAERGECNFQFWVDQRESFYCGLENCEWSAEATESKNTTSYKCKDIKCACIPDRFLCGEDGSVDIGDFLDQEIKGPASFSSVSTASGSHSAFSEPAMNGLIQNIFGDESITLNCGSGECLYKTEVPGYERPVKKINTPLIAGVIAGCGLFVVAVILIVFFLARRNSRRYGPIQLGEEEEDDAAKLLADHKPASLAFENVSYHLKGRQILSDISGAVHPGELMAIMGASGAGKTTFLDLLARKNKRGTGLGDFWVNGEKITDDDFRSAIGFVDQDDTMLPTLTVHETIMDSALLRLPKDMSWAVKAQKVEDVEKQLGIYHIRHQLIGSEEGSGRGISGGEKRRVGIACELVTSPSILFLYEPTSGLDAYNAFNVIECLVTLVKSYNRTVVFTIHQPRSNIVALFDQLVLLAQGRTVYSGPFSKCQNYFDSIGYSCPPGFNIADYLVDLTMHASRPDNPIPEDSHTYGEDLDGRATVASSTMAVKSIPSIISNPSIEEGRPKNKRKSSIRQQQERQLFSRKSTDRAPAPASLRSDGDSILDKDNKWVKMARQNAQGSSINEDGHDLPPDAGNNTNLDVLVSSYEASDVKAELHSDIESAISDASESNGNPLHAPNGNSSGKVRGYRKPMLPTQFLILSRRTWRNLYRNPQLMLTHYAIAILLAVFLGFLFYGLTDDLKGFQNRLGFFFFLLALFGFSTLTSLTTFAPERLLFVRERAKGYYTPLAYYLAKVVFDIVPLRILPPAIMGCIVYPMTGLVPTAPEFGKFMLLLVLFNLAAAMICLFLGIVVRNQGVANLLGVLVMLFSLLFGGFLLNHETIPKGLLWLQSLSIFHFGFEGLIVNEVRYLSLVDKKYGLNIEVPGSAILSSFGFDVLALWRDVAGLGVVSGAFFVLGFAALHFLLVERR

SEQ ID NO: 63126 - protein, 536 aa, Glycine max
  Clone ID: UC-GMFLMINSOY003C08_FLI.pep
EKVRFDKLQAESIRFMAREILILRTLDHPNIMKLEGIITSQLSNSIYLVFEYMEHDLAGLVASPDIKFTDSQIKCYMRQLLSGIEHCHLKGIMHRDIKVSNILVNNEGVLKIADFGLANTLSPNSKQPLTSRVVTLWYRPPELLLGSTSYGVSVDLWSVGCVFAELFLGKPILKGRTEVEQLHKIFKLCGSPPEEFWKKNKLPLATMFKPKANYETSLQERCRGFPATAVNLLETLLSIDPSKRRTASSALMSEYFSTKPYACNPSHLPKYPPSKEMDAKNREEVRRKKNGGKVREAVTSKRQRQVHKVSHDHINFNQPALKENVSQNPGTNDGRAYVTKGKVAGAMHKEQPKPSYDAKSEAAQVVNGCNGYSVYSGPAPISGSSGFTWAKRRKPKASSILSDGSRSKVSALDPTFAKGTYDLTEHGIEVSERKHSYNTSHRDETSSYVSKKYQAPLVQQKSFDVADTYNSNYYMDFDFTDKMDALIDTQGHRKHDEPVEQSVPNMIPSNKNEELLHWNENDMRQSLRKSRLGRDQ

SEQ ID NO: 63127 - protein, 868 aa, Glycine max
  Clone ID: UC-GMFLMINSOY061B07_FLI.pep
GKIEKNKNTLLTPPFLSSFKSSSLMMPILLVILLALFSPSLGLPLASFQPKDNFLIDCGAENTATLPDGRHFKSDPQSRSFLQADDEYKVSANDVNLPSPVYSNARIFIQEAKYSFHLVQPGFHWIRLHFYPIKNNIFDLQKATFSVYTDTYVLLHSFNVNNTDKPIMKEYLINATEPQLTMSFIPLKNSAAFINAIEVVSAPDNLIFDTGAGLFPVGEIGGLTTYGFQPVYRVNNGGPLITSSNDTLGRTWESDEHFLTNKNLAKSASVATSAVKFPQDNPSISPMIAPQTVYASATEMGDAGVNQPNFNVSWKFDVDTSFGYLVRLHFCDIVSKGLNELYFNVYVNGKVAINNLDLSAITGALSTPYYKDIVVNATLMSEGLTVQVGPANADGGNANAIMNGIEVLKMSNSVNSLDGEFGVDGRSVSGSNRGTVAAVGFAMMFGAFVGLGAMVIKWHKRPQDWQKRNSFSSWLLPLHAGDTSFMSKNSMGKSNFFSSSMGLGRYFSFAELQEATKNFDSKNIIGVGGFGNVYLGVIDEGTQVAVKRGNPQSEQGITEFQTEIQMLSKLRHRHLVSLIGYCDENDEMILVYEYMPNGHFRDHLYGKNLPALSWKQRLDICIGSARGLHYLHTGTAQGIIHRDVKTTNILLDENFTAKVSDFGLSKDAPMGQGHVSTAVKGSFGYLDPEYFRRQQLTEKSDVYSFGVVLLEALCARPAINPQLPREQVNLADWAMQWKRKGLLDKIIDPLLVGCINPESMKKFAEAAEKCLADHGVDRPSMGDVLWNLEYALQLQEAFTQGKPEDESKSASAAVPTSPTPPTPSDDRPAAPAVPARPEAANNASSEVNSIDDHSGTAMFAQFSNLNGR

SEQ ID NO: 63128 - protein, 1243 aa, Glycine max
  Clone ID: UC-GMFLMINSOY044A04_FLI.pep
VWMNPLLNKGYQTPLKLEDVPSLPIDFRAEKMSELFHRNWPKPEENSKHPVGLTLFRCFWKHIAFTGFLAIIRLGVMYIGPMLIQSFVDFTSRKDSTPYEGLVLILVLYLAKSTEVLSVHQFNFHSQKLGMLIRSSLITSIYKKGLRLSSSSRQAHGTGQIVNHMSVDAQQLADLMMQFHPIWLMPLQVTTALVLIYSNIGVSAFAALLGSSIVFVFTLFRTKRTNSFQFMIMKSRDLRMKATNELLNNMRVIKFQAWEEYFGNKIGKFREAEHGWIGKFLYYFAVNMGVLSSAPLLVTVLTFGSATLLGVPLNAGTVFTITSVIKILQEPVRTFPQALIVISQAMISLGRLDEFLMSKEMDEGAVERVEGCNGSDTAVEIKDGEFSWDDVDGNAALRVEEMEIKKGDHAAVVGAVGSGKSSLLASVLGEMFKISGKVRVCGSIAYVAQTSWIQNATIQDNILFGLPMNREKYREAIRVCCLEKDLEMMEHRDQTEIGERGINLSGGQKQRVQLARAVYQDSDIYLLDDVFSAVDAQTGSFIFKECIMGALKNKTIILVTHQVDFLHNVDCIMVMREGKIVQSGKYDELLKAGLDFGALVAAHESSMEIAESSDRVGEDSAESPKLARIPSKEKENVGEKQPQEESKSDKASAKLIEDEERETGRVDLKVYKHYFTEAFGWWGVALMLAMSLAWILSFLAGDYWLAIGTAEDSAFPPSTFIIVYACIAGLVCTVVMIRSVLFTYWGLKTSQSFFSGMLESILHAPMSFFDTTPSGRILSRVSTDILWVDISIPMLVNFVMVAYFSVTSILIVTCQNAWETVFLLIPLFWLNNWYRKYYLASSRELTRLDSITKAPVIHHFSETIAGVMTIRGFRKQNAFCQENIDKVNASLRMDFHNNGANEWLGFRLDYMGVIFLCFATIFMIFLPSAIIKPEYVGLSLSYGLALSSLLAFTISMTCSVENKMVSVERIKQFSSLPSEAPWKIADKTPPQNWPSQGIIELTNLQVRYRPNTPLVLKGISLTIEAGEKIGVVGRTGSGKSTLIQVLFRLIEPSAGKITVDGINICTLGLHDVRSRFGIIPQEPVLFQGTVRSNIDPLGLYSEEEIWKSLERCQLKDVVAAKPEKLEAPVVDGGDNWSVGQRQLLCLGRIMLKSSKILFMDEATASVDSQTDAVIQKIIREDFADRTIISIAHRIPTVMDCDRVLVIDAGYAKEYDKPSRLLERHSLFGALVKEYSNRSAELEA

SEQ ID NO: 63129 - protein, 555 aa, Glycine max
  Clone ID: UC-GMFLMINSOY049B08_FLI.pep
ESGDMGCCASKESEPQHNGYRHAGTGGVHNQKTHEPLVNQSRAPANQPYHLHEKHAASTAQTVPQNMPWKPPGPALSPKPVVGVRQDTILGKQFEDVKQFYTLGKELGRGQFGVTYLCTENSTGLQYACKSISKRKLASKSDKEDIKREIQIMQHLSGQPNIVEFKGAYEDRSSVHVVMELCAGGELFDRIIAKGHYSEKAAASICRQIVNVVHICHFMGVMHRDLKPENFLLSSRDENALLKATDFGLSVFIEEGKVYRDIVGSAYYVAPEVLRRRCGKEIDIWSAGVILYILLSGVPPFWAETEKGIFDAILEGHIDFESQPWPNISDSAKDLVRKMLIQDPKKRITSAQVLEHPWIKDGNASDKPIDSAVLSRMKQFRAMNKLKKLALKVIAENMSAEEIQGLKAMFTNMDTDKSGTITYEELKSGLHRLGSKLTEAEVKQLMEAADVDGNGSIDYIEFITATMHRHKLERDDQLFKAFQYFDKDNSGFITRDELESAMKEYGMGDDATIKEIISEVDTIISEVDTDHDGRINYEEFSAMMKSGNQQQGKLF

SEQ ID NO: 63130 - protein, 193 aa, Zea mays; identical to SEQ ID NO: 38737
  Clone ID: LIB3245-196-B4_FLI.pep

SEQ ID NO: 63131 - protein, 970 aa, Glycine max
  Clone ID: UC-GMROPIC021F08_FLI.pep
KVAMATRNLEKMASIDAQLRQLAPAKVSEDDKLIEYDALLLDRFLDILQDLHGEDLKETVQEVYELSAEYEGKHDPKKLEELGNLITSLDAGDSILVAKSFSHMLNLANLAEEVQISRRRRNKLKKGDFADENNATTESDIEETLKKLVFDLKKSPQEVFDALKNQTVDLVLTAHPTQSIRRSLLQKHGRIRNCLSQLYAKDITPDDKQELDEALQREIQAAFRTDEIRRTPPTPQDEMRAGMSYFHETIWNGVPRFLRRVDTALNNIGIKERVPYNAPLIQFSSWMGGDRDGNPRVTPEVTRDVCLLARMMAANLYYSQIEDLMFELSMWRCNDELRVRAEELHRSSKKDEVAKHYIEFWKKVPPNEPYRVVLGEVRDRLYQTRERSRHLLSNGYSDIPEEATFTNVEEFLESLELCYRSLCACGDRAIADGSLLDFMRQVSTFGLSLVRLDIRQESDRHTDVLDAITKHLEIGSYQEWSEEKRQEWLLSELSGKRPLFGPDLPQTEEIRDVLDTFHVIAELPPDNFGAYIISMATAPSDVLAVELLQRECHIKHPLRVVPLFEKLADLEAAPAALARLFSIDWYRNRINGKQEVMIGYSDSGKDAGRFSAAWQLYKAQEELINVAKKFGVKLTMFHGRGGTVGRGGGPTHLAILSQPPDTIHGSLRVTVQGEVIEQSFGEQHLCFRTLQRFTAATLEHGMHPPISPKPEWRALMDQMAVIATEEYRSIVFKEPRFVEYFRLATPELEYGRMNIGSRPAKRRPSGGIETLRAIPWIFAWTQTRFHLPVWLGFGAAFKKVIEENVKNLNMLQEMYNQWPFFRVTLDLVEMVFAKGDPKIAALNDRLLVSKDLWPFGDQLRNKYEETRKLLLQVAGHKEILEGDPYLKQRLRLRHAPITTLNIVQAYTLKRIRDPNYNVKVRPRISKESAEASKSADELVKLNPTSEYAPGLEDTLILTMKGIAAGMQNTG

SEQ ID NO: 63132 - protein, 1024 aa, Glycine max
  Clone ID: UC-GMROPIC044C09_FLI.pep
HHSLTFSLLFSSSVLLSLPILQLIMFIKKLVEKASIKMPLGNSLDGLKGSDVDPRLVFHQGVPSGGAKFAYDNIQKILALSTKDGRIKLFGEDNAQVLLESKEPVPSKFLLFIQNQGILINVTFNNHIEVWDIDKKLLSDVYIVKEEITCFSVIKHSLFMYIGFSNGNISVLMLDQEPWHVVRMKYTIPLSASYGNSTEESDDTVVTHVLPQPAAESQRVLIIFRNGQIILWDIREIRSIFRTGGKILQTRYNETRKVSSACWVCPFGSKVVVGYNNGELFIWSIPSLNTGNSLATDYNSQNTPMFKFNLGYKSDKTSIGSVKWIYAEGKASRLYVMGGSDYAPSNLLQVVLLNEHTESRTIKMGLHLPEGCIDMEIISTSSKHRQNYFILLGKSGHVYLYDDNLIERYLLQSQSKSSPSLPKEVVVKLPLADSNITTAKFISNNSNFFSSEDEYYNQLVKNYPPLVPIETNLKDGINFSSSNFTGFSNIRNMYITGHSNGAINFWDATCPFFTPILQLKQQSENDFSLSGIPLTELYFDSNSPLLFSGDQSGMVRIYRFKPEPYASNSFMSLTGGTKKGIDHVIHSMKLIKTSGTVICMNIDHSSRHLAVGSDQGNVSVINIDGPSLLYRKHIASEISTGIISLQFKTCSLHGFEKNILAVGTKDSSVLTLDGETGNTLSIGTIHPKKPSKAIFMQVLDGQGEQTAGSVTKDGLELKEGIHIEDATAKQLYILLCSEKALYVYSFAHAVQGVKKVLYKKKFHSSSCCWASTIYSLSDIRLILLFASGKVELRSFPELTLIVETSVRGFTYSPPKLKSFSDSQICCSSKGDLVLVNGDQEIFVVSLLAQRNIFRLLDSVSCIYRKERMPSQEELVPGPVIHKEKKRGIFSSVIKDFTSSKEKHAPLLEKKDPKESIRELSAIFSNANFACNDNVDKPTMDENQLELNIDDIDLEDHVEKRKEQSILGALNKKKLAGTFQSLKGRLKEMKGNNQKTSDKEGQQDQKDGALDQIKKKYGFSSSSNV

SEQ ID NO: 63133 - protein, 216 aa, Glycine max
  Clone ID: UC-GMROPIC047C07_FLI.pep
IMEAMEAELDLVVCITEGIPQHDMVRVKAALNRQSKTRLIGPNCPGIIKPGECKIGIMPGYIHKPGRIGIVSRSGTLTYEAVFQTTAVGLGQSTCVGIGGDPFNGTNFVDCLQKFLTDPQTEGIILIGEIGGTAEEDAAALIKESGTEKPVVAFIAGLTAPPGRRMGHAGAIVSGGKGTAQDKIKTLREAGVTVVESPAKIGAAMLDVFKQRGLVQ

SEQ ID NO: 63134 - protein, 664 aa, Glycine max
  Clone ID: UC-GMROPIC049H03_FLI.pep
HEQTTQAALSLYPLLLISLCKHSFSSLSLFQVSIFPIVLFLPLPVLKWVCVHSMQVGFAGAGDTAEKNPFTPKAFAIRYWDKEIRSGLPKPPFLVSKASPLSAAEAAAFLKLVSGNSLSTRLPEFCAAAKLLCFPEVGPRLEKHDKDANFAVYRDNNFTNYGTGRPGGLDSFKNYSEGENIPVNDFRRYSRDSAGHKDGFLSYGTNGNVVQQSFHTYAAGATGGTGEFKHYADETNVPNLGFTSYSDNANGRTQSFSSYSENGNAGEQTFTSYGKNGNGPTNVFASYGTESNVVGSGFSNYAETANAANDTFKGYGIDMNNPTNTFSNYAAGGNGAVERFSSYRDKANVGADSFTSYAKAANAADIGFSNYGKSFNEGTDTFTTYAKSSDGETKVGFTSYGVNNTFKDYEKKGTTVSFARYTNISTTLSVSASSVSGSLVNKWVEPGKFFREKMMKEGTVMPMPDIKDKMPERSFLPRSILSKLPFSVSKIDELKQVFKASDNGSMEKMMKDSLEECERAPSSGETKRCVGSLEDMIDFATSVLGRNVAVRTTQNVNGSKKSVVVGPVRGINGGKVTQSVSCHQSLFPYLLYYCHAVPKVRVYEADLLDPKTKAKINRGVAICHLDTSDWSPTHGAFLSLGSVPGRIEVCHWIFENDMAWTIAD

SEQ ID NO: 63135 - protein, 396 aa, Glycine max
  Clone ID: UC-GMROPIC097D09_FLI.pep
VKICFSISWNFFFLKNEIKDSFFGAQGIFHYKLKHNNPLNSVRNQWTNWLKDHYYQYDLSKSRWSRLVPQKWRNRITEYRIAQNKDLTKCNSYEKSQLILYKEQQVNALKKKIRKQYRYDLLSYNFINYADKKDSYIYGYRSLFQVKKNQVISSNYNTYKKELFDIIDNLFIKNYISEDAILDMEKNLYRKYFDWMGINREILNRSISNPEFWFFSKFVIFYDAYRGNSQVIPIKLFFFSSNVNQNVSENKKNITRKKKNESLELELETRNRAKAEYPDQRNLESSISNQEKDIENDYVGSDSEKNSKGIKKKKDKNKMEAELNFLLRNFLILHLNWNNFLGQRIFNNVKVYCLLIRKKFKRNYNSLYSKRRTRSRYYDDSKSEEFNSSRLKEKEK

SEQ ID NO: 63136 - protein, 465 aa, Zea mays
  Clone ID: UC-ZMFLMO17339H07_FLI.pep
HVMFIPSAGMGHLIPFFRFIAALAGQSVDISVVTVLPTVSAAEEDYFTSLFAALPRVRRVDLHLLPFDASKLPSNDRDPFVLRWEALRRSAHLLGPLIAGAAPRVSAVITDVTLTSHVIPIAKELGVQCHVLFPSNATMLSLLAYTPLHLDKKAEQGSDIGDVDIPGVCRIPQSCLPQALLHLDKLFTKQFIDNGREIINADGFLVNTFDALEPVALAALRDGKVVPGFPPVYAIGPLMSQQHSVDEGGKEEGSGSPVAWLDEQPARSVVYVAFGNRCAVSHDQIREIAAGLEASNCRFLWVLKTTTVDRDDSAVLTELLGEEFLERVQGRGLVTKAWVDQEALLKHPAMGLFLSHSGWNSVTEAAAASVPLLAWPRGGDHRVNAMVTVSGGVGVWMEHWSWDGEDWLVTGVEIAKKVKEVMSDEAVRARTTRTAEEAAKAVAEGGTSYRSMEEFISSVKATVAS

SEQ ID NO: 63137 - protein, 427 aa, Glycine max
  Clone ID: UC-GMROPIC057H01_FLI.pep
SIMVKGLHGQNLPAHVAQLVDQLERHCFAPDGSLISKPLFNDLQLAREEMCRERLRYLEAMAIYSEAIAMVEEYQQAISVSNLGGIRDTGNLYPQLGLKNSPQVYQTLEHQMVVAEAAQRLRLPLISKDGEVHDEDIEKLSVVSRSSLDSTVSGANSSNYNTPSSSVSGANTALAASDPVEVGVGGVANRFLGITPSYLWQTQHQKAPLSVDMTEYRLSVSREVEARLKMKCEKLSEAFVLDDNDSSSSGSHSSSSRLPERVKLLIEEIEREETALRDDLYSADRKFAEYYNVLEQILAVLIKLVKDLKLEHQHKYDEMQKTWLCKRCETMSAKLSVLEHVLLLETYTKDSIPALHKIRKYLVEATEEASIAYNKAVTRLREYQGVDPHFDNIARQYHDIVQKLENMQWTIHQVEMDLKRLPDKPST

SEQ ID NO: 63138 - protein, 145 aa, Zea mays; identical to SEQ ID NO: 53346
  Clone ID: LIB3150-051-A4_FLI.pep

SEQ ID NO: 63139 - protein, 371 aa, Zea mays
  Clone ID: LIB3150-053-E9_FLI.pep
KTITLEVESSDTIDNVKAKIQDKEGIPPDQQRLIFAGKQLEDGRTLADYNIQKESTLHLVLRLRGGMQIFVKTLTGKTITLEVESSDTIDNVKAKIQDKEGIPPDQQRLIFAGKQLEDGRTLADYNIQKESTLHLVLRLRGGMQIFVKTLTGKTITLEVESSDTIDNVKAKIQDKEGIPPDQQRLIFAGKQLEDGRTLADYNIQKESTLHLVLRLRGGMQIFVKTLTGKTITLEVESSDTIDNVKAKIQDKEGIPPDQQRLIFAGKQLEDGRTLADYNIQKESTLHLVLRLRGGMQIFVKTLTGKTITLEVESSDTIDNVKAKIQDKEGIPPDQQRLIFAGKQLEDGRTLADYNIQKESTLHLVLRLRGGY

SEQ ID NO: 63140 - protein, 285 aa, Zea mays
  Clone ID: LIB3150-054-D11_FLI.pep
LKCRKRAVPCCRKPETSLPSCWRRAEGRRPGRQEEMTLAAGLGYALIALGPAFSLFSGVVVRKPFLVLTLLSSTLFWLISLIVLSGIWRGFLPIKSGAWWAYVILILTSVALQEGTRLVFWMLYKKMEEMLDAFADRISKPRLRLTDKMLISLAGGLGHGVAHAVFFCLSLLTPAFGRATFYTERCSKLPFFLASALIALGFLVIHTFSMIIAFNAYDEGKKSDQVFVPVIHLAAAAMTLVNLAPGGCLIGTPLLLVMAALTLQHCWRVACRRLTEHRHQQHNSS

SEQ ID NO: 63141 - protein, 551 aa, Zea mays
  Clone ID: LIB3150-029-B10_FLI.pep
VRLPPRVPLFRSPPPPHPSPSHCAPSLPPCLRRLGGLPPPSLSRAKSAHQFPWIFELWKMPRWTENSASTKSAELVKQQDRLEFDDPDEVDEEEEVEYEEVEEEVEYEETEDEYGQTEAVRQVDAKHDSKMVDADTDEGGKGSHDELLALPPHGSEVYVGGIASDVSSDDLKKLCESVGEVVEVRMPGKSGRLYAFVNFRTKELASKAIQKLNNKDLKGKKIRVSSSQAKNRLFIGNIPYNWTENEFKKAAEEVGPGVLKVNLVKAPHSDTNKGYGFIEYYNQACAEYAKKMMSTPEFKLDKNAPNVSWADTKNGGESASTAQVKSLYVKNLPKAVTQEQLKKLFEHLGEVTKVVIPPAKAGHENRYGFVHFKERSMAMKALEDTERFELDGQLLDCSLAKPLADKKDDTSAPKGGPLLPSYTPVGYGLMGAYNPLGNGLAVAGAYNPYGNGLAGAYGVLGAHAAQPMLYVPGAPPGSTMIPMVLPDGRLVYVPQPAGQQPVPMTSPPPPQKGDRHYGGSGGSSSGGRRQQRRDDSGGSNTNSRRGRRRPY

SEQ ID NO: 63142 - protein, 231 aa, Zea mays; identical to SEQ ID NO: 60655
  Clone ID: LIB3150-030-E4_FLI.pep

SEQ ID NO: 63143 - protein, 237 aa, Zea mays
  Clone ID: LIB3150-034-C7_FLI.pep
KKQISFPLRQQTTITEAGMQDKQSGYPATEQLSIPKILRTSTMVPRCHCHQKGNQEKHKSYKQARSNNDAACGERSSPRSGPLSPDAARELDVLGHDGDALGVDGAEVSVLKEPHEVGLGGLLQRGDGGGLEAEIGLEVLRDLTDEALEGQLADEQLRALLVLADLPERDGAGAEAVGLLHAAGGRRRLARRLGRQLLAGRLAARRLARRLFSAGHRSFGAWRGGRRVGGSVDLGRS

SEQ ID NO: 63144 - protein, 266 aa, Zea mays
  Clone ID: LIB3150-035-G4_FLI.pep
GAERAKGSAATDMAEQHKEESGVTVLDKISDKLHGRGGGSSSSSDSDDERSSATAAVKAKIYRIFGREKPVHSVLGGGKPADLFLWRNKRISGGVLAGATAFWLLFEVMDYHLLTLLCHCLILTLAILFLWSNATTFINKSPPNIPEVKIPDDLAVNVARSLRYEINRGFATLREIGQGHDLKKFLIVIAGLWILSVLGSCCNFLTLSYIVFMVLYTVPVLYEKHEDKVDAFGEKAMVELKRYYAIFDEKCLSKIPKGPLKDKKQH

SEQ ID NO: 63145 - protein, 268 aa, Zea mays
  Clone ID: LIB3150-040-B2_FLI.pep
AASACSGGKERERERERDLVERLVGGPRTKMLAVFSGQVVEVPAELVAAGSRTPSPKTKASQLVGRFLAASEPAVSVQLGDHGHLAYSHTNQALLRPRSFAAKDEVFCLFEGVLDNLGRLSQQHGLSSKGANEVLLVIEAYKTLRDRAPYPASFMLAQLTGSYAFVLFDKSTNSLLVASDPEGRVPLFWGITADGCVAFSDDIDMLKGSCGKSLAPFPQGCFYSNALGGLKCYENPKHKVTAVPADEEEICGATFKVVEGSTVLTALH

SEQ ID NO: 63146 - protein, 276 aa, Zea mays
  Clone ID: LIB3150-040-E1_FLI.pep
ERVREEKGRRLDVHDKETKTVWRGGRVAPAAPLRSKSPKRQDQIKSDLSTPSPSMAIVYALVARGTVVLAEFAAVSGNAGAVARRILEKLPPDAESRLCFAQDRYIFHVLRSDAAGITFLCMANDTFGRRIPFLYLEDIQMRFMKNYGRVAHSALAYAMNDEFSRVLHQQMEFFSSNPSADTLNRLRGEVSEIHTVMVDNIEKILDRGDRISLLVDKTSTMQDSAFHFRKQSKRLRRALWMKNAKLLVVLTVVIVVLLYLIISAFCGGLSLSSCRS

SEQ ID NO: 63147 - protein, 463 aa, Zea mays
  Clone ID: LIB3150-040-H3_FLI.pep
PPFRPLSLASSISPPTMGKEKSHINIVVIGHVDSGKSTTTGHLIYKLGGIDKRVIERFEKEAAEMNKRSFKYAWVLDKLKAERERGITIDIALWKFETTKYYCTVIDAPGHRDFIKNMITGTSQADCAVLIIDSTTGGFEAGISKDGQTREHALLAFTLGVKQMICCCNKMDATTPKYSKARYEEIVKEVSSYLKKVGYNPDKIAFVPISGFEGDNMIERSTNLDWYKGPTLLEALDQITEPKRPSDKPLRLPLQDVYKIGGIGTVPVGRVETGVIKPGMVVTFGPTGLTTEVKSVEMHHEALQEALPGDNVGFNVKNVAVKDLKRGFVASNSKDDPAKEAASFTSQVIIMNHPGQIGNGYAPVLDCHTSHIAVKFAELITKIDRRSGKELEKEPKFLKNGDAGMVKMIPTKPMVVETFSAYPPLGRFAVRDMRQTVAVGVIKSVEKKDPTGAKVTKAAAKKK

SEQ ID NO: 63148 - protein, 106 aa, Zea mays
  Clone ID: LIB3150-042-A3_FLI.pep
ECLLLLRRRRRRFPRLRPPKPCRRTRPSGSRRSWPRRCARTAPSPTGSACAPTTPSGTTPSAGTGVAPNSDSERWKKCWLKTPRGYRALQARKLLFNFFCLCYLSL

SEQ ID NO: 63149 - protein, 485 aa, Zea mays; identical to SEQ ID NO: 46930
  Clone ID: LIB3150-042-E2_FLI.pep

SEQ ID NO: 63150 - protein, 175 aa, Zea mays; identical to SEQ ID NO: 58278
  Clone ID: LIB3150-044-C3_FLI.pep

SEQ ID NO: 63151 - protein, 362 aa, Zea mays
  Clone ID: LIB3150-049-G3_FLI.pep
FGTDHYLRFMLRKKLQDIKNDDKMIQAEGVESLSEYELRQACRERGHLGLLSTEEMRQQLRDWLDLSLNHSVPSSLLILSRAFTVSGKMKPEEAVVATLSSLPDEVVDTVGTVLPSEDSVSERKRKLEFLEMQEELIKEEEKRQEKEDKAKLEEPKATEEDLALKEMTEPTVREKEELKKAKTHDKKEQLCNISQALAVLASVSSVTKERQEFLSLVNKEIELYNNMLAKEGTDGEEEARRAYKAAREESDHAAEAAVGEKVSSALIDRVDAMLQKLEKEIDDVDARIGNRWQLLDRDCDGKVTPEEVAAAANYLKDTIGAEGVQELISNLSKDNEGNILVEDIVKLASQTEENNEAEETAR

SEQ ID NO: 63152 - protein, 308 aa, Zea mays
  Clone ID: LIB3150-051-D9_FLI.pep
LADLPPKLSARPLPAGSLARSRRRHSPAMGCKACDKPKPSYRKGLWSPEEDQKLRDYILLHGHGCWSALPAKAGLQRNGKSCRLRWINYLRPGLKHGTFSPEEEETVMSLHATLGNKWSRIAKHLPGRTDNEVKNHWNSYLKKRVEGPSTPPSDSDDSHCAKPGRGGSTARETGDDRPADYSGSSEPREPSSSPDTSCLTGTPKVMFVDWLDMDCMGGGGGGPPGAAAAAAAPGLGAAAGVARVSTGDDQMTMDDGSASGRADVSLHGTFGDSGGAGCWEFHESFDQMQAAGFCDLLSSIGEYYFGLD

SEQ ID NO: 63153 - protein, 173 aa, Zea mays
  Clone ID: LIB3150-052-G3_FLI.pep
RRAAAAALDAHRAAMAEQTEKAFLKQPKVFLSSKKSGKGKKPGKGGNRFWKSIGLGFKTPREAIEGTYIDKKCPFTGTVSIRGRIIAGTCHSAKMNRTIIVRRNYLHFVKKYQRYEKRHSNIPAHISPCFRVKEGDHVIIGQCRPLSKTVRFNVVKVIPAGSAAAGKKAFTAA

SEQ ID NO: 63154 - protein, 149 aa, Zea mays
  Clone ID: LIB3150-052-H4_FLI.pep
SALPQHSITSKVPVPARKHRSDSSGSARTSGEHLVDVFESAGLVHFSGEISAPRARARRIWRGLEGSGRGGWCGGADLAANGRRASPRAREGRWWRERWNRRRILLPVVGSSVVQRVGAESNSPLPIMRVVKVEVFTCCDYLPLLEHIV

SEQ ID NO: 63155 - protein, 371 aa, Zea mays; identical to SEQ ID NO: 63139
  Clone ID: LIB3150-053-A6_FLI.pep

SEQ ID NO: 63156 - protein, 203 aa, Zea mays; identical to SEQ ID NO: 56876
  Clone ID: LIB3150-053-C2_FLI.pep

SEQ ID NO: 63157 - protein, 386 aa, Zea mays
  Clone ID: LIB3150-058-C3_FLI.pep
GLPSCSRRTSLPPPPPLLSHSNLEPIVFFVIVRFFGESMSSSTSGTREMSSPNSTATSIGQVQKVPGFAKLQGENFVYFMQTYSIMLGRTSRSYTADFDLSKYECGSQCVSRCHACIFYDFELRHFAIEVLGRNGCTIRGVSYLPGSVPIKLNSQDLIEIAGIKFYFLLPSRSIFATLAARDATMLPPQSPSLLHPNYPGNPSANDCGRSNGENGVKISNDMQGKLVKQKRSFSGELDISYSYGTKKNVDRVGTLDGCVNKLHIQIADKDTDNQQILLEEEKDVTTCLTTLISELSGPKEWVPMERLLSEIFKRFGKKWLRDRVSKYLPQKGMSGSSTKVDHRPWCSLWELLRKHPEHFVMTTLTRGEETLDYVGLVHLVSVENEP

SEQ ID NO: 63158 - protein, 557 aa, Zea mays
  Clone ID: LIB3150-074-D2_FLI.pep
FEFTRERAIFDLLDIPLYHGWIVDPQDTETATAIGSKSYNALASGLAEFKSGKPTEENKYVEEETVDFAAATTAALKIPSPSVSRGRSFDEHTLSNSSTVPHKRRGDLEEEEELMRVLNLSKAKSGDVEVSFDTSHSHSSSNIETPQNESFQSEALELVVATKKEEYGNHATSDHVSMLSVTNVAINGSEVVPEESQENLISKEPEDNGIKNLDIPIQFSETTPYPSHESFASSDHQPAIPTLVEDDKETCKEQFDVQIHGQSNDTDVACDSSVTTCEAVPDHATTELDVKSDSLDNSQSLPSSIQECEPIYQGEEHILGTTNMVYENQEPVYEGEVVLAEQADKIGESSSSGDDKATEHQWELIDNFLRTTANQLTVYGLFCLQEGLNESELCVFFRNNHFNTMFKYNGSLYLLATDQGFISQTDLVWQRLDEVNGDGVFLTSNFTPFNAETPRNDSWNEQQAMTSTADYLAQFDNSTSGNSDLELAIALQQQEFERQPQRFQAPPQQQQQQQQQPPPHTQYQTQSGRPGLVVGPRRSNAPPPSRSESKKERCIVM

SEQ ID NO: 63159 - protein, 590 aa, Zea mays
  Clone ID: LIB3150-075-F6_FLI.pep
PHSSLALCSSEMAAATSSSTYLAIGRKTLNPAPSVATAATSVSFPATQHPCLVAASADRRRAVAAKVSSPSVIGTAMPSLDFETSVFKKEKVSLAGHEEYIVRGGRDLFPLLPEAFKGIKQIGVIGWGSQGPAQAQNLRDSLVEAKSDIVVKIGLRKGSKSFEEARAAGFTEESGTLGDIWETVSNSDLVLLLISDSAQADNYEKIFSHMKPNSILGLSHGFLLGHLQSLGFDFPKSISVIAVCPKGMGPSVRRLYVQGKEINGAGINASFAVHQDVDGRATDVALGWSVALGSPFTFATTLEQEYRSDIFGERGILLGAVHGMVEALFRRYTEQGMDEDSAYKNTVESITGIISKTISKKGMLEVYNSLTEEGKKQFIEAYSAAYYPCMDILYECYEDVSSGSEIRSVVLAGRRFYEKEGLPAFPMGKIDQTRMWKVGERVRSTRPQGDLGPLHPFTAGVYVALMMAQIEVLRKKGHSYSEIINESLIESVDSLNPFMHARGVAFMVDNCSTTARLGSRKWAPRFDYILTQQAFVTVDKKAPINQDLISNFMSDPVHGAIEVCAQLRPTVDISVTADADFVRPELRQSS

SEQ ID NO: 63160 - protein, 329 aa, Zea mays
  Clone ID: LIB3150-077-A12_FLI.pep
AMGNLHAKGAGTGAKGAGAANTSISNSGDSMSNAATPSPVEQATFKWVIDGFSSLLDKDQGWTYSNVFELMGVEWYLKLNPKYEVSNEECVSLRLELSQSSVKLDTIFEASFKFMIYDQLIGKHKVHLGNHSFQTASTSSAIAFMLPLKALRQSSRFIVNNSCVFGIGFIKVATIKVNTTLETLFVRKMNIFNEAKVYTWKIEDFSALKNPCHSPEFEIAGYTWIISLNPSYDGNSLSLFLKMKKTNDVPKGSGSLVEFALSIKDQENGKDRKYPGRCQFSSKHHRWGWKKFISLEDFKDSSKGYLIKGKCCIEAEVAISGSSKTEYSM

SEQ ID NO: 63161 - protein, 196 aa, Zea mays
  Clone ID: LIB3150-078-B9_FLI.pep
DVDSYTIRGTNKVVHVGDCVLMRASDSDKQPYVARVEKMEADGRGSVRVQVRWYYRPEESKGGRRQFHGAKELFLSDHFDLQSAHTIEGKFVVHSFKNYTKLDNVGPEDFFSRFEYKAATGSFTPDRVAVYCKCEMPYNPDDLMVQCEACKDWFHPSCMAMTIEQAKKLDHFVCSDCLKENGSKRLSNVYATSSNS

SEQ ID NO: 63162 - protein, 431 aa, Zea mays
  Clone ID: LIB3150-079-A11_FLI.pep
NPSAFRRSFRRHRCPSKLETPLPPLIFASASLRPSSNPRDRDCSQKALARKNPTRETNLPNLSVAMALSDRSRESLLPSFLYASSARSFAATGAAARLPVSSPAPATAGAGGGVPFSIQAPKEKIEMYSPAFYAACTAGGIASCGLTHMAVTPLDLVKCNMQIDPAKYKSISSGFGILLKEQGARGFFRGWVPTLLGYSAQGACKFGFYEFFKKYYSDIAGPEYAQKYKTLIYLAGSASAEVIADVALCPFEAVKVRVQTQPGFARGLSDGLPKFVRSEGVLGLYKGIVPLWGRQIPYTMMKFASFETIVELIYKHAVPVPKSECSKTTQLGISFAGGYIAGVFCAIVSHPADNLVSFLNNAKGATVGDAVKKLGLWGLFTRGLPLRIVMIGTLTGAQWGIYDAFKVMVGLPTTGGVTPAPAAEAELKASA

SEQ ID NO: 63163 - protein, 438 aa, Zea mays
  Clone ID: LIB3150-081-H5_FLI.pep
EKAKAEKLIEELEKASPLSKAEVRETISEDERYMLRKVGLKMKQFLLLGRRGVFDGTIENMHLHWKYRELVKIICKEHRLEDVEYAARTLEAESGGILVAVEKVSKGHAIIVYRGKNYKRPSKLRPKTLLSKRDALKRSLENQRCKSLKVHVLKLSKNIDDLRDQMNSSYYHKDMHDPSVNSVTLQQQDEEMPEVAPMSSEPEVEKWTSVEIDRALDLTKSGVPVEDMQSKVCFNKLEDDSSATAGPCLTGSSIAASSYNLIRHQNQRSSTVTSSPDGRYEGAPSKVVDAPKLDAESLSVSPLRAAPLSNQERLVLRKQALQMKKRPVLSIGRNNAITGVAKTIKTHFKKHPLAIVNIKNRADGTPIQQLISELEEATGSVLVSRETNKVILYRGWGAEVAQKSSRESSTDEGEKEVISPQLLEAIRLECGLLPADSG

SEQ ID NO: 63164 - protein, 566 aa, Zea mays
  Clone ID: LIB3150-094-G12_FLI.pep
LPDVEVEPMVEVSAKFADYQCNNAMGLWSKVKGSGTIFKNPNSIGQAIAKNLPSSDIIESASVAGPGFVNITLSNRWVAQRIQDMLVNGIKTWAPVLPVNRTVVDFSSPNIAKEMHVGHLRSTIIGDTLARMFEFSNVVVLRRNHVGDWGTQFGMLIEYLFEKFPNWQEIGCQAIGDLQIFYKASKHRFDSDPDFKARAQQGVVRLQGGEDKYREAWKKICDISRSEFDLVYKRLNVVLEEKGESFYNPYIPQVLEELSNKGLIKESEGARVIFIQGHQIPLIVVKSDGGFNYASTDLTALWYRLNVEQAEWIIYVTDVGQQQHFDMVFSAAKMAGWLPDPSEKKFPKTSHVGFGLVLGSDGKRFRTRSTEVVRLVELLDEAKSRSKSELLQRLTENGKIVDWTDEELDQTSEAVGYGAVKYADLKNNRLTNYTFSFEQMLSDKGNTAVYLQYAHARICSIIRKSNKNVEELKMSGAISLDHPDERVLGLYLIRFAEVVEEACTNLLPNVVCEYLYNLSEMFTKFYTNCQVVGSPEETSRLLLCQATAVVMRQCFNLLGITPVYKL

SEQ ID NO: 63165 - protein, 370 aa, Zea mays
  Clone ID: LIB3150-094-E8_FLI.pep
LLGADDNDDPTQLIAAAAAAAQKAEAKKSAVAPAGKAAQPAATTKFPTKPAPPSQTVRDARGGGSSARGGFGRGERGRGRGGRGYGQNRGFSGDNGSDFQGGYGGGGYGDGAVTGGSEGERERDTRPPYRGGGRRGGYRNVEFADDSERPPRRNYERHSGTGHGYEMKRDGAGRGNWGTATDELIAQDAEDSPKMEEAAPVAEKQGEQNDAPAADENKDNKDATANEEEEKEEDKEMTLEEFEKIREEKRKALLALKAEERKVEVDKDLQSLQPLSNKKENDEVFIKLGSDKDKKKENAERDERAKKSVSINEFLKPAEGERYYGGRGRGRGRGDRGGFRGGYGGGYSRGPAAAAPSIEDQAQFPSLGGK

SEQ ID NO: 63166 - protein, 456 aa, Zea mays
  Clone ID: LIB3150-097-C8_FLI.pep
ISPPPSPSVNPSLLPAVCSFDLCSRSEVSSDREAASIVGMALVLHSGAGNKNAFKALIAAEYSGIKVELTKDFEMGVSNKTPEFLKMNPLGKVPVLETPDGPVFESNAIARYVARLKDDNPLFGSSHIEQAHVEQWMDFAATEVDPGVAWYLYPRLGYLPYVSTTEETAISSLKRSLGALNTHLASNTYLVGHAVTLADIVLTCNLYHGIARILTKTFTSDFPHVERYFWTMVNQPNFKKVIGEVKQAESAPPIPKKAAPSKEPKAKDVKKEAPKEAPKPKVVEAPAEEEAPKPKPKNPLDLLPPSKMVLDDWKRLYSNTKTNFREVAIKGFWDMYDPEGYSLWFCDYKYNDENTVSFVTLNKVGGFLQRMDLCRKYAFGKMLVIGSEPPFKLKGLWLFRGQDVPKFVMDEVYDMELYEWTKVDISDEAQKERVNAMIEDQEPFEGEALLDAKCFK

SEQ ID NO: 63167 - protein, 245 aa, Zea mays; identical to SEQ ID NO: 38748
  Clone ID: LIB3150-061-D9_FLI.pep

SEQ ID NO: 63168 - protein, 243 aa, Zea mays
  Clone ID: LIB3150-075-D1_FLI.pep
LLSDPELRRPQHQARPPSRVTEMALPNQGTVDYPSFKLVIVGDGGTGKTTFVKRHLTGEFEKKYEPTIGVEVHPLDFTTNCGKIRFYCWDTAGQEKFGGLRDGYYIHGQCAIIMFDVTSRLTYKNVPTWHRDLCRVCENIPIVLCGNKVDVKNRQVKAKQVTFHRKKNLQYYEISAKSNYNFEKPFLYLARKLAGDPNLHFVEAVALKPPEVTIDMAMQQQHEAELAAAAAQPLPDDDDDLIE

SEQ ID NO: 63169 - protein, 104 aa, Zea mays
  Clone ID: LIB3150-077-E1_FLI.pep
HHISGQRQDPFNTTQGPQKPLAAMGVPQRRQQVRRRPERWLLSFSMMKWYRFTQTGCPLQPTTKQTNQTHDSIADAVLLYVTVCKYMTIQSIILTGGCTLKATA

SEQ ID NO: 63170 - protein, 175 aa, Zea mays; identical to SEQ ID NO: 58278
  Clone ID: LIB3150-100-D8_FLI.pep

SEQ ID NO: 63171 - protein, 198 aa, Zea mays
  Clone ID: LIB3062-058-E4_FLI.pep
KEKAKAKESQSGKQKEEPAAAECGDVVAADRGAPVGRGGARRARAVRAQVARVHGGAGPPRRAPPAAQPGRGGLQPVDGVRVAAAGRRPDPHLRVHRQAGVVRQGGDGVRGAGADARPRRGEEQGAPHLGHHLRDRPQPLRHQDRVPHPRGARPRLPCHRLPARARGGPQGRGRRRRRRQLICSSFRRRRPCVGCSIR

SEQ ID NO: 63172 - protein, 81 aa, Zea mays
  Clone ID: LIB3062-046-C5_FLI.pep
CLKTFGSCFSEDIRIPAGTKIDFRQTSDGQLITEIDGKQIGTVQSKDLCRAFFDMYIGDPPVSVETKQDIAQNVAGLIRRC

SEQ ID NO: 63173 - protein, 209 aa, Zea mays
  Clone ID: LIB3062-036-F9_FLI.pep
RDREEEREGEAADSSLRSSPLIWRKEARGVANPSMATPTTYSVRISSETHKIEAWVVSDEALARQLQEEENTRDAAADTREFAGNVPLESSSPAVEYRPAQNAAQVAREDNVDPDNMSYEQLQALGEAVGTQSRGLSDELISYLEPFRNKCTFFSRKKNSEECVICKTTYRSRQKLIRLPCSHCYHADCITRWLKINKACPVCNEEVFG

SEQ ID NO: 63174 - protein, 454 aa, Zea mays; identical to SEQ ID NO: 48078
  Clone ID: LIB3062-031-A5_FLI.pep

SEQ ID NO: 63175 - protein, 352 aa, Zea mays
  Clone ID: LIB3062-030-F8_FLI.pep
PPTSRLPDPAMEKMLHSAPAHGRLPECFIFPADKLPQAKATSATVSLPIVDLSLGRDEVRRAILEAGKEIGFFQVVNHGVSLEAMQDMETVCQEFFRLPAEDKAGLYSEDTGRATRIYSSTMFDTGAEKYWRDCLRLACSFPAVGDSAAAWPDKPRRLREVVERFTVQTRGLGMEILRLLCEGLGLRPDYLEGDISGGDVVLHVNHYPPCPDPNATLGLPPHCDRNLLTLLLPSMVPGLEVAYRGDWIRVEPVPGAFVVNFGCQLEVVTNGILKSIEHRVMTNLGVARTTVATFIMPTTDCLIGPAAEFLSDDNPPCYRTLTFGDFKRIYSVVKLGSSLNLTTNLKNVQKEL

SEQ ID NO: 63176 - protein, 547 aa, Zea mays
  Clone ID: LIB3066-029-D1_FLI.pep
GFTAAPRSTRAMEFDEYEYLEKAVEPAPPPANGSGSGEKDRGSRRREGDEGRISKRSRSGEDRERGRHRSVREHRDRDKDDGKEKERSRDSRGKDRDREGREREKERGDRHRPREREVERERRSLSRSERRRIEEEEMVRELEMERERSERHHYRDRDVRRRKDDGAEPEVDPERDQRTVFAFQLSLKADERDVYEFFSRAGKVRDVRLIMDRNSRRSKGVGYIEFYDVMSVPMAIALSGQPLLGQAVMVKPSEAEKNLVQSNATSGGAASGGARKLYVGNLHSNITEDQLRQVFEPFGQVELVQLPLDAMTGLCKGYGFIQFARLEDAKAAQSLNGQLDIAGRVIKVSAVTDHVGVQASGATTGDLDDDEGGGLALNASSRAALMLKLDRSGTATSLTGGIGAAGVAVPATSVIGAAGAASLLSPTVSAVGSVPGAPVLPITAQNVIMSTPTEFLLLKNMFDPSLETDPDFDLDIRDDVQDECSKFGAVKHIFVDKNTAGFVYLQFDSVTAAGKAQQALHGRWFAGKMITATFMSDQEYSTKFPNL

SEQ ID NO: 63177 - protein, 492 aa, Zea mays
  Clone ID: LIB3066-028-F9_FLI.pep
GVLGMGNQCPNGTLGSDYYNRPASRFADGCLEDDRYSDLKKFDKPWPEVNSFKPTAVGILKRGLDPTSITVLERKTADVREHYIIGRRLGQGQFGTTFLCTEISTGCEYACKTIPKRKLITKEDVEDVRREIQIMHHLSGHKNVVSIKDVYEDGQAVYIVMELCAGGELFDRIQEKGHYSEQKAADLIRIIISLVAMCHSLGVMHRDLKPENFLLWDKEDDLSIKAIDFGLSVFFKPGQVFTELVGSPYYVAPEVLHKRYGPEADVWSAGVILYVLLSGVPPFWAETQQGIFDAVLKGHIDFDSDPWPKISESAKNLIRKMLCPCPSERLKAHEVLRHPWICENGVATDQALDPGVLSRLKQFSAMNKLKKLALRADNDNNVTINYEEFIAATVPLNKIEREEHLMAAFTYFDKDGSGYITVDKLQRACGEHDMDDTFLEEIILEVDQNNDGQIDYAEFVAMMQGNKVGLGWQQMETTLNVTLRDAPQVHCH

SEQ ID NO: 63178 - protein, 635 aa, Zea mays
  Clone ID: LIB3066-020-E10_FLI.pep
RAAGRSTSSRTTETCVPYHGAEQAAPGAGRGEGPDEHRAGQGRQRRLPGGGPGRGHRQGHQAQRVVPRRRAPHPGDRHAHPPLPGVRRLLRVLAVAPPRAHPELGGRAQDPRHRAPPPRRRGPGVRAGGVLRHAPRDADAQHVRLLRQLPRRRLGLLRVRPHLRRVPRRLPRVPDAGQAAGWWWCRPARRWQAAPRGDVRIPREPLRLRHRRLQRETRGRGGRRGTEDGGSRGQGPAHERDDGGSAARQGQPAASSPRPVHRLPPCRRGQGEPSGGGLSVPADQGERAALLRAHGGDGHAHRAVRGDGDRGLRARARPLLRSRQADGGARDVLRVVQGRLRVPPVRRAGGGGGRHAEEAGTHGRVHPRQARRGLAAEALAAGSGADGKPRASPRRRGQRRHERDQGPSSARGAGGGCGARGKHSRESRARCLPHRGRRPGRGGGRLPEPQRGRHVRPRARAAAGAGAVRRQRSAGRQRVPRLLGGLGDGAGAFRERARESARPTRRRPQHVGAGRDVQPRGGGDQRADDVLRQRQQRGSAATTRAAHARLAGASRRRQRRSGCGPFRGVGAGASADVCSDVRHADEAPASDAGAADVATVRQERNAAGGIGNAKPESTVATTRGAQLRRVSDYID

SEQ ID NO: 63179 - protein, 55 aa, Zea mays
  Clone ID: LIB3066-017-F4_FLI.pep
ALVTPLHRWPPVLIPSDPQSMEMVIPLPCMEEVPKAMSHVVVASSRQGRASDIIP

SEQ ID NO: 63180 - protein, 326 aa, Zea mays
  Clone ID: LIB3066-015-H10_FLI.pep
VIGVVIGGLAIMSGKLTAEQLTKFTLYAEWLILSTWWIGDNWSSLMQSVGASEKVFRLMDLLPSKQLSSEGLKLEKLKGQIQYADVSFSYPSRPTVPILGGLNLTLNPNEVVAIVGLSGSGKSTIINLLLRLYEPTNGQILIDGVPLTELDIRWFRERIGFVGQEPRLFRMDISSNIKYGCPREVSHEEVIWAAKQAYAHDFIMALPDGYNTIVDDALLSGGQKQRVAIARALLRDPSILLLDEATSALDAESEHYVKSVITKVSRDSKAKRTVVIIAHRLSTIQTADRIIVMENGNIVEDGKHIDLIEKGGLYSRLARRQNDDLK

SEQ ID NO: 63181 - protein, 486 aa, Zea mays; identical to SEQ ID NO: 59117
  Clone ID: LIB3066-015-E2_FLI.pep

SEQ ID NO: 63182 - protein, 201 aa, Zea mays
  Clone ID: LIB3066-009-F6_FLI.pep
AVVDIDVHYGNGTAEGFYRTDTVLTMSLHMMHGSWGPSHPQSGSVDEIGEGKGLGYNLNIPLPNGSGDAGYEYAMNELVVPSIDKFQPQLLFLVVGQDSSAFDPNGRQCLTMEGYRKIGQIMRRLADRHCNGQILVVQEGGYHITYSAYCLHATLEGVLDLEAPLLDDPIAYYPEDDKYTMKVVDMIKSYWKESVPFLKEI

SEQ ID NO: 63183 - protein, 357 aa, Zea mays
  Clone ID: LIB3066-008-F6_FLI.pep
AFKFCRSSSYRHLSCCYPRRQPRGHRRPCRHHDDPAAFFVVLRPDVQGGARVPERPRLRRGRPGGHRHDAGRQLPPRHHGRGAVHPAAHGVPRERSVPLPHRRRRRRRPRPLRRAARLVSVPRPPGVPLRPVARPRPHLALGAPGAGPAAQLRARLPRRHAAARRAPRHVPRLRRGRGGRRPDAGVRGPRGPRGGGARVLPRQLQQLLHGRLLVAPGAQRHLPRAPPMLLQHGRHGHGRRQVARRRVHAPGGGVDGRAEAAADLPPRLAAAVPARLRRPHPGGGPPVEPARARRRQRRGPLPGSPSGPYQPPSLERQGQAVAPPRRPPAVLCGLPMGALRPLPLLVAGDRRVVTGEP

SEQ ID NO: 63184 - protein, 110 aa, Zea mays
  Clone ID: LIB3066-004-E2_FLI.pep
YKLGSLSGSLFHQNNSVHLFLPGRGVEHVEHLRVIRHVVALPHGRLHELLQRDQRRSGAGPEDVLALLTAVVPDVEEHEGVALADQVVDRPTQRLLAARREVHRHADLPL

SEQ ID NO: 63185 - protein, 419 aa, Zea mays
  Clone ID: LIB3066-003-H5_FLI.pep
TRLAMAFNKIKVANPIVEMDGDEMTRVFWKSIKDKLIFPFVDLDIKYFDLGLPHRDATDDKVTVEAAEATLKYNVAIKCATITPDEARVKEFGLKAMWKSPNGTIRNILNGTVFREPIICKNIPRLVPGWTKPICIGRHAFGDQYRATDAVIKGPGKLKLVFEGKEEQVELEVFNFTGAGGVALSMYNTDESIHAFADASMATAYEKKWPLYLSTKNTILKKYDGRFKDIFQEVYEAGWKTKFEAAGIWYEHRLIDDMVAYALKSEGGYVWACKNYDGDVQSDFLAQGFGSLGLMTSVLVCPDGKTIEAEAAHGTVTRHYRVHQKGGETSTNSIASIFAWTRGLAHRAKLDDNARLLDFTQKLEAACVGAVESGKMTKDLALLVHGSSNITRSHYLNTEEFIDAVADELRSRLAANSNL

SEQ ID NO: 63186 - protein, 187 aa, Zea mays
  Clone ID: LIB3062-047-C1_FLI.pep
VPTDVRPLSARRCWPPSTPLAGGRSTESTPHSLPRRDAAGHSTESAPHSHSEMSEYKNVVGGRLKLKGKALDVKEGGVKKKKKKHQLEESSQIEHDELHKGGDSGLPTDHNNELIEAGKVGDEEGNPHPDYDHLTPAERRYIEQKRKIDMQKLAKVANKSHRDRIQDFNQYLANLSEHYDIPKVGPG

SEQ ID NO: 63187 - protein, 521 aa, Zea mays
  Clone ID: LIB3062-046-A4_FLI.pep
PERNANTETRERERERVPKRAQEATAQRPGGERDTSTRLSPFPSPSVPSVAAPDRTPLPRGIVLRCGADRGWRRSGMAGHGEKRRRTGGAHEKPEEEEEDRISDLPDVLRLHILSLLPLKSAIRTGALSSRWRRLWAYRWPEPSSVTIRLPPGAAAAAAARAEALAGIDRRGRRRVDGFSLAFHGGQLAHADLKRCVDYAAACEAEDLHLRADGGAGAARGSRGATRRPGALTVQFPVGSPLLARLSVRGLSLTAVNNAMVATLEVIHLHSVFLTDAALRRMVAACPRLRELDLRYCRRLRRVDFSSVGVPNLCSFTVVDCSRTTELRVPVAPRLRSFRFSGTFLSSNILSGAKGSLEHLYLCSGGPETGLPATNLPYAVPRLSNLTVLTLCSIALQYVSSFTAKAGSEGNLHGLKELQLLTFGMANSNLADIYSFLKTCPCPRLERLFVQLPTNTGDAFTENFLEVAEEDPPKGGLENLCLAKLTNFKGHRNEMQLVGFLLRKSCSLKKLFLIAPKEDHP

SEQ ID NO: 63188 - protein, 231 aa, Zea mays; identical to SEQ ID NO: 53471
  Clone ID: LIB3062-045-G12_FLI.pep

SEQ ID NO: 63189 - protein, 252 aa, Zea mays
  Clone ID: LIB3062-044-F8_FLI.pep
RSLLSTFHIPVPLRLRCRSPTPKLRQSDHKVLCGIHRRMSEEDKTAASAEQPKRAPKLNERILSSLSRRSVAAHPWHDLEIGPDAPAVFNVVVEITKGSKVKYELDKKTGLIKVDRVLYSSVVYPHNYGFVPRTLCEDNDPLDVLVLMQEPVIPGSFLRARAIGLMPMIDQGEKDDKIIAVCADDPEYRHYNDISELSPHRLQEIKRFFEDYKKNENKEVAVDAFLPATTAREAIQYSMDLYAQYILQSLRQ

SEQ ID NO: 63190 - protein, 643 aa, Zea mays
  Clone ID: LIB3062-037-B12_FLI.pep
DHTSAARTGAKGGILYRARAMATRPGPLTEWPWQRLGNFKYLVMAPVVVHGARRVVARGWGDIDLAFALILPSLLLRMVHNQIWISAARYQTARGKHRIVDRGIEFDQVDRERGWDDQIILNGLLFYVGYLAIPSARRMPAWRSDGAVAMALLHAGPVEFLYYWFHRALHHHFLYSRYHSHHHSSIVTEPITSVIHPFAEHMVYYVLFAIPMLSTLYMGNASVLGIVLYIAYIDFMNNMGHCNFELVPRWMFQLFPPLKYLMYTPSFHSLHHTQFRTNYSLFMPLYDYVYSTMDKSSDQLYETSLRGAEETPGLVHLTHMTDLQSVYHLRIGFASVASRPSATSAMWWYMWVLWPVAWLSMALAWAYGSSAFVVERIKLGKLRMQTWAVPRYNFQYGLSWERESINGLIERAILDADARGVKVLSLGLLNQAKQLNGGGELFRHRYPKLRVRLVDGSGLATAVVLRSIPRDAKQVLLHAGPSKIACATAAALCERGVQVVMNPNKEYDMLKSQIADSKASYWERRSDNHHTPQVWLVDSIDDEEQKMAPKGAVFVSISQFPIKKIRKDCTYLSTPAMKIPETMQNIHACENWLPRRVMSAWRIGGILHALEGWTVHECGDAMVHAEKAWSAAIRHGFVPLTKA

SEQ ID NO: 63191 - protein, 223 aa, Zea mays
  Clone ID: LIB3062-035-C10_FLI.pep
EEEKRKGGMAAPPARARADYDYLIKLLLIGDSGVGKSCLLLRFSDGSFTTSFITTIGIDFKIRTIELDGKRIKLQIWDTAGQERFRTITTAYYRGAMGILLVYDVTDESSFNNIRNWIRNIEQHASDNVNKILVGNKADMDESKRAVPTAKGQALADEYGIKFFETSAKTNLNVEQVFFSIARDIKQRLAETDSKPEDKAIKINKPDQGSEAPAAQRSACCGS

SEQ ID NO: 63192 - protein, 331 aa, Zea mays
  Clone ID: UC-ZMFLMO17278G01_FLI.pep
RPSAAAQTSDPCCEQGMAAAWAVLAAVLVAAQVASAAPVTAPAFLWAPKNYGFRSDDAKEVVHYQTISPKNLAKSVLEEGGWSTFMCSREDTEKHVDVAIVFIGSKLQSSDISKDKQVDPALADTLKLSFTESEFSMAFPYVSTSDDEKLEESLLSGFTENCKSGFGRNRITYTDTCAVSGQDLKTYHNMDAINDLVVSGRTNPSGQTDVIVFCSGGFEKLGTTESEGELLSQLVDLLKLSGARHTILYASQPSGYLLENPSGSPVARHLAERTNGTKTGLLSKCDGECLVKSTLLEGTFVGIVLLIILISGLMCMMGIDTPSKFEAPQES

SEQ ID NO: 63193 - protein, 401 aa, Zea mays
  Clone ID: UC-ZMFLMO17364C12_FLI.pep
ILILHSFPSLLLLLLPRKADIVLVAARSYGLTGLVRVSVKEHCVIESKPDHFLDDLRLHNPWTELKQFAKSIDINDKDPVVHKHTPYIVILVRLAEKWADAHDGNLPSTRQEKKEFKDLIRAHMLNVDEENYKEAVDSSYKVSVTPGISNEIRQIIDDDSAEVNSSSSDFWILVAALKEFIAKEGNGELPLEGTIPDMTSLTEYYVSLQKIYQAKAEFDCLALEHHVKEILKRIGRDPDSISRAYIKTFCKNSRKLRVSRYRSFEEEFSSPFVAEIQRYFTDEDYSYATNFYILLRAVDRLAANYSRLPGIFDSEIDEDIPRLKTVAASVASEMGLNGASLSEDLITEMCRFGGAEIHPVAAFVGGVASQEVIKLVTKQFVPLPGTFIFNGIDLKSQVLML

SEQ ID NO: 63194 - protein, 360 aa, Zea mays
  Clone ID: UC-ZMFLMO17426D02_FLI.pep
NSFSMRVREWFSWHFPELVKIVNDNYLYAKLAKFIVNKSDLTEKDIPALADIVGDEDKAKEIVEAAKASMGQDLSPVDLINVQQFAQRVMNLSEYRKNLYEYLVTKMNDIAPNLTSLIGEVVGARLISHAGSLSNLAKCAASTLQILGAEKALFRALKTRGNTPKYGLIFHSSFIGRASTKNKGRMARYLANKCSIASRIDCYSEASTSVFGQKLREQVEERLEFYDKGVAPRKNLDVMKAAIDSMVNGTSMDDDDIEKTDASPKKSKKKKTKTKADGDAMDVDKPSNVAGGEAEPGTEKKKKKKKHKLEEEAQEENGAADTTPKKKKKKSREASEEAEPKTATDGKKKKKKKAKAEDDE

SEQ ID NO: 63195 - protein, 175 aa, Zea mays
  Clone ID: UC-ZMFLMO17365H04_FLI.pep
VWRGPMVMSALEKMTRGVAWGDLDILVVDMPPGTGDAQLSMSQRLRLSGALIVSTPQDIALIDARRGANMFRKVQVPILGLVENMSCFKCPKCGEKSYIFGEGGAQRTAEEMDMKLLGDVPLEISIRTGSDEGNPIVISSPNSASAQAYVNVAEKVTQRLNELAEERRMGPEILL

SEQ ID NO: 63196 - protein, 182 aa, Zea mays
  Clone ID: UC-ZMFLMO17264A10_FLI.pep
SMRILFCSELEQCILFPPAIEATPVDSTESSFDTYRSPPRPLPYDDPRFSPPARDWLRSENPSHSPEESEPLRANEDDEEMETPSIIQKASKTNYNTKMKICSSTYGDKVPPREHGNYFSYFSPSAEDEDVCPTCLEDYDSENPRIVMQCSHHFHLGCIYEWMERSEACPVCGKKMEFDETT

SEQ ID NO: 63197 - protein, 147 aa, Zea mays; identical to SEQ ID NO: 58821
  Clone ID: UC-ZMFLMO17286B03_FLI.pep

SEQ ID NO: 63198 - protein, 320 aa, Zea mays
  Clone ID: UC-ZMFLMO17286D01_FLI.pep
DSMMCQEGKPQAAVDKTLDSKVFKGWVETDNPWTSDDETDNNEMTYVNLQLNPERYTGYTGDSARRIWDAIYKENCPKYPSEELCHEKKALYKLISGLHSSISVHIAYDYLLDESTNSWGQNLPLLYDRVLKYPERVQNLYFTYLFVLRAVTKAANYLEQAEYNTGNPEDDLKTESLVKQLLYNSKLRSACPLPFDEAKLWQGENGPELKQEIQKQFRNISAIMDCVGCEKCRLWGKLQVHGLGTALKILFSVDGDSHMNQPLQLQRNEVIALFNLLNRLSESVKFVHEKGSSIEEVIEEQIPSTVQKSVSMPNLKLDFL

SEQ ID NO: 63199 - protein, 554 aa, Zea mays
  Clone ID: UC-ZMFLMO17270F10_FLI.pep
RSAHTHNQISPKSTRRHLRFKMQIFVKTLTGKTITLEVESSDTIDNVKAKIQDKEGIPPDQQRLIFAGKQLEDGRTLADYNIQKESTLHLVLRLRGGMQIFVKTLTGKTITLEVESSDTIDNVKAKIQDKEGIPPDQQRLIFAGKQLEDGRTLADYNIQKESTLHLVLRLRGGMQIFVKTLTGKTITLEVESSDTIDNVKAKIQDKEGIPPDQQRLIFAGKQLEDGRTLADYNIQKESTLHLVLRLRGGMQIFVKTLTGKTITLEVESSDTIDNVKAKIQDKEGIPPDQQRLIFAGKQLEDGRTLADYNIQKESTLHLVLRLRGGMQIFVKTLTGKTITLEVESSDTIDNVKAKIQDKEGIPPDQQRLIFAGKQLEDGRTLADYNIQKESTLHLVLRLRGGMQIFVKTLTGKTITLEVESSDTIDNVKAKIQDKEGIPPDQQRLIFAGKQLEDGRTLADYNIQKESTLHLVLRLRGGMQIFVKTLTGKTITLEVESSDTIDNVKAKIQDKEGIPPDQQRLIFAGKQLEDGRTLADYNIQKESTLHLVLRLRGGQ

SEQ ID NO: 63200 - protein, 436 aa, Zea mays
  Clone ID: UC-ZMFLMO17311C08_FLI.pep
LEVKPWVKTSLAPGSGVVTKYLLQSGLQEYLNQQGFHIVGYGCTTCIGNSGDLDESVSTAITENDVVAAAVLSGNRNFEGRVHPLTRANYLASPPLVVAYALAGTVDIDFEKEPIGFGKDGKEVYFRDIWPSTEEIAQVVQSSVLPDMFKGTYEAITKGNPMWNQLTVPEASLYSWDSKSTYIHEPPYFKDMTMSPPGPSTVKDAYCLLNFGDSITTDHISPAGSIHKDSPAAKYLMERGVDRKDFNSYGSRRGNDEVMARGTFANIRIVNKFLNGEVGPKTIHVPTGEKLSVFDAAMRYKSEGHATIILAGAEYGSGSSRDWAAKGPMLLGVKAVIAKSFERIHRSNLVGMGIIPLCFKAGEDADSLGLTGHERYSIDLPTNLSEIRPGQDVTVTTDNGKSFTCIVRFDTEVELAYFNHGGILPYVIRNLAAAHN

SEQ ID NO: 63201 - protein, 377 aa, Zea mays
  Clone ID: UC-ZMFLMO17272D09_FLI.pep
AYGYYFHMATADGLLKRDKGKHRPFVLSRAFFAGSQRYGAVWTGDNSADWDHLKSSIPMVLILGLTGLPFSGADVGGFFGNPEPDLLVRWYQVGAFYPFFRGHAHHDTKRREPWLFGERRTAIIREAIHMRYSLLPYFYTLFREASVNGIPVMRPLWLEFPEDKETYNNGEAFMVGPSLLAQGIYEEGQKSVSVYLPGKESWYDLRNGSPYKGSVTHKLQVLEDSIPSFQRAGTIVPRKDRFRRSSTQMVNDPYTLVIALNSSGAAEGELYMDDGKSYDYQQGAFSHRRFVFADNKLTSFNIAPDNLSKKFTSGCVIERIIVLGLRSGVKKAIIEPGNQEVEIESGPISLRSGSSPVVPTIRRPNVRIADSWTIWIA

SEQ ID NO: 63202 - protein, 295 aa, Zea mays
  Clone ID: UC-ZMFLMO17273D12_FLI.pep
KGNLDKASPNAGYVLLMFYHLYDGKSRREFENELYERFGSLVKMPLLKPDRAPLPDAVKAILDEGISLFKMHRSRHGRAEPSKGSYAKEWAQWEQRLRATLFGNADHLNSIQVPFDYAVKAVLEQLKAVAKGDLKTPDTGKRKFGNIMFAAVRLTPPDILGLLRKVAEKDTAVDSFVNKIRLEDNLTKVHVTLAHKRGHGVSAVASYGIYQHQEVPVSFNALYYTDKMAALEAQLGAVNDEPINSRNEWPHATLWTAPGVTPKEANMLPQLASEGKAERVPIDPPITISGVVDFY

SEQ ID NO: 63203 - protein, 383 aa, Zea mays
  Clone ID: UC-ZMFLMO17273F09_FLI.pep
NELGSMSIRDDKDVEDIVVNGNGAEPGHIIVTSIDGRNGQAKQTISYMAERVVGHGSFGTVFQAKCLETGETVAIKKVLQDKRYKNRELQTMRVLDHPNVVALKHCFFSKTEKEELYLNLVLEYVPETAHRVIKHYNKMNQRMPLIYAKLYMYQICRALAYIHNSIGVCHRDIKPQNLLVNPHTHQLKLCDFGSAKVLVKGEPNISYICSRYYRAPELIFGATEYTTAIDVWSAGCVLAELLLGQPLFPGESGVDQLVEIIKVLGTPTREEIKCMNPNYTEFKFPQIKAHPWHKIFHKRMPAEAVDLVSRLLQYSPKLRSTALEALVHPFFDELRDPNTRLPNGRFLPPLFNFKPHELKNVPADFMVKLVPEHARKQCAFVGW

SEQ ID NO: 63204 - protein, 263 aa, Zea mays
  Clone ID: UC-ZMFLMO17355F05_FLI.pep
REGRAAALRQMGKYMRKCRGAAGAEVAAVEVTQVVGVRTRSRSAAATGGVAKVVAPRRKRAPAGEPAASVGAGGDGGSCYIHLRSRMLFMAPPQPQPPSVPTPAEAADGAAGQQGAALAAGLSRCSSTASSVHVGGQRGSHTCRSDDAAEAGGDHVLVDVSAASNSGSGPDRERRETTPSSRAHGELSDLESDLAGHKTGPSLPAATPAAELIVPPAHEIQEFFAAAEAAQAKRFASKYNFDFVRGVPLDAGGRFEWAPVVSI

SEQ ID NO: 63205 - protein, 261 aa, Zea mays
  Clone ID: UC-ZMFLB73008E02_FLI.pep
LIPRKNSWGEKREGKIYNECTNVEASASITAARRSRRRRRRWRRRRTAPRRGPSWRGPASGAPRCSPWSRRAVSGTTASGSRAPAGPAPWPSSPEAAWRRPSPPRPRGHRVARAGTRGRGGARGARPGGGGGGTRGWRGSSACARAPRRRARGRPPRARPCCAAGPPPCRRRRRRGAPRARGGSPPGAWTSRSRARAASATWTAAPAPRGPPRPHASASGPSRPPQPALASSSTWTPLPKIVARERKPGVSDATTKELRSN

SEQ ID NO: 63206 - protein, 187 aa, Zea mays
  Clone ID: UC-ZMFLB73130A03_FLI.pep
FIWDEDLGVEHFNAEEYIKLVKKHNLDISQPGLEPDRGLTWQMTKRRGDSEVHKDTEERPGWCSDPHLPPCAAFVEIMAPVFSRDAWRCVWHMIQNDLVHGWGLDFALRKCVEPAHEKIGVVDSQWIVHQVVPSLGNQGQSENGRAPWEGVRARCRKEWGMFQTRMAEAEKAYYKMMGITPPNSTRV

SEQ ID NO: 63207 - protein, 436 aa, Zea mays
  Clone ID: UC-ZMFLB73172G11_FLI.pep
LCDANRPKLPARRRRFVSLMDWSTRFRTRNPSPAVSHFAGHRRSQADRVFLRTMASAAPVEEPTAAAEAKGRLTGDSFIRRHLRTLAPYQPILPFEVLSARLGRRPEDIIKLDANENPYGPPPEVAAALGSLKFPYVYPDPESRQLRAALAEDSRLESDYILAGCGADELIDLIMRCVLEPGDKIVDCPPTFTMYEFDASVNGALVIKVPRLPDFSLDVDLIVEVVEQERPKCIFLTSPNNPDGSVINDEDLLKILDLPILVVLDEAYIEFSSLQSRMAWVKKHDNLIVLRTFSKRAGLAGLRVGYGAFPLSIIEYLWRAKQPYNVSVAAEVSACAALQNPTYLENVKNLLVKERERLFNLLKGIPFLKPFPSHSNFILCEVTSGKDAKKIKEDLAKMGVMIRHYDKKELKGYIRISVGKPEHTDALMKGLNALRL

SEQ ID NO: 63208 - protein, 531 aa, Zea mays
  Clone ID: LIB3180-002-D8_FLI.pep
FRLLPSPTGVLASPIRSATSPSRTFLSPTPQRLSAPRSRSRLFSMGLVKEGVDMEEGTLEIGMEYRTVSGVAGPLVILDKVKGPKYQEIVNIRLGDGTTRRGQVLEVDGEKAVVQVFEGTSGIDNKYTTVQFTGEVLKTPVSLDMLGRIFNGSGKPIDNGPPILPEAYLDISGSSINPSERTYPEEMIQTGISTIDVMNSIARGQKIPLFSAAGLPHNEIAAQICRQAGLVKTLEKGKHAEGGEDDNFAIVFAAMGVNMETAQFFKRDFEENGSMERVTLFLNLANDPTIERIITPRIALTTAEYLAYECGKHVLVILTDMSSYADALREVSAAREEVPGRRGYPGYMYTDLATIYERAGRIEGRTGSITQIPILTMPNDDITHPTPDLTGYITEGQIYIDRQLHNRQIYPPINVLPSLSRLMKSAIGEGMTRRDHSDVSNQLYANYAIGKDVQAMKAVVGEEALSSEDLLYLEFLDKFERKFVTQGAYDTRNIFQSLDLAWTLLRIFPRELLHRIPAKTLDQYYSRDASH

SEQ ID NO: 63209 - protein, 469 aa, Zea mays
  Clone ID: LIB3180-003-A1_FLI.pep
RRLPSAPPFRPLSLASSVSPPTMGKEKSHINIVVIGHVDSGKSTTTGHLIYKLGGIDKRVIERFEKEAAEMNKRSFKYAWVLDKLKAERERGITIDIALWKFETTKYYCTVIDAPGHRDFIKNMITGTSQADCAVLIIDSTTGGFEAGISKDGQTREHALLAFTLGVKQMICCCNKMDATTPKYSKARYEEIVKEVSSYLKKVGYNPDKIAFVPISGFEGDNMIERSTNLDWYKGPTLLEALDQITEPKRPSDKPLRLPLQDVYKIGGIGTVPVGRVETGVIKPGMVVTFGPTGLTTEVKSVEMHHEALQEALPGDNVGFNVKNVAVKDLKRGFVASNSKDDPAKEAASFTSQVIIMNHPGQIGNGYAPVLDCHTSHIAVKFAELITKIDRRSGKELEKEPKFLKNGDAGMVKMIPTKPMVVETFSAYPPLGRFAVRDMRQTVAVGVIKSVEKKDPTGAKVTKAAAKKK

SEQ ID NO: 63210 - protein, 445 aa, Zea mays
  Clone ID: LIB3180-003-F3_FLI.pep
KEKSHINIVVIGHVDSGKSTTTGHLIYKLGGIDKRVIERFEKEAAEMNKRSFKYAWVLDKLKAERERGITIDIALWKFETTKYYCTVIDAPGHRDFIKNMITGTSQADCAVLIIDSTTGGFEAGISKDGQTREHALLAFTLGVKQMICCCNKMDATTPKYSKARYDEIVKEVSSYLKKVGYNPDKIAFVPISGFEGDNMIERSTNLDWYKGPTLLEALDQITEPKRPSDKPLRLPLQDVYKIGGIGTVPVGRVETGVIKPGMVVTFGPTGLTTEVKSVEMHHEALQEALPGDNVGFNVKNVAVKDLKRGFVASNSKDDPAKEAASFTSQVIIMNHPGQIGNGYAPVLDCHTSHIAVKFAELITKIDRRSGKELEKEPKFLKNGDAGMVKMIPTKPMVVETFSQYPPLGRFAVRDMRQTVAVGVIKSVEKKDPTGAKVTKAAAKKK

SEQ ID NO: 63211 - protein, 302 aa, Zea mays
  Clone ID: LIB3180-005-A9_FLI.pep
PSTSTQEMQDRMRRQGQYGEADINSMVAAQLHHYQAQQRVQKHPENSYTGRDPAQASAEHQYTSPKARQSQWDRGGPNAPSQVPSYAYNEAQGAGGAQSFYDGQRSDTKVGLEKQPSKESREQPRTERTETRYENYNLPRTFEGLEQSFHEDIILLSKELQEAEDAENSRHMERLKDINTQYQEKLLTLRARQANYRDEFLRKESLARQQQYQHASMSHYASNSTAGEQHGYNPTAAGTPPVAAGGAYGEAHRGYASGQYESFSDRPDYPEFHDGGRGRGRSSEQRAQYPGGRAYNSGGRRF

SEQ ID NO: 63212 - protein, 152 aa, Zea mays
  Clone ID: LIB3180-005-B2_FLI.pep
GEASSYLGEYYITASLIYEAMCSSSFLASSSFAAPTTLSLTSPSLMNRNVGMASTLNCSAMVFISSTSTFRKTTFGDFLAISAKIGAMARHGGHHVAVKSITTSFLALLASSIWMLHSSRLWIAITVPSVGVTGVAAAAAASEAAIYVSRAH

SEQ ID NO: 63213 - protein, 454 aa, Zea mays; identical to SEQ ID NO: 48078
  Clone ID: LIB3180-005-G2_FLI.pep

SEQ ID NO: 63214 - protein, 280 aa, Zea mays; identical to SEQ ID NO: 37742
  Clone ID: LIB3180-007-H5_FLI.pep

SEQ ID NO: 63215 - protein, 581 aa, Zea mays
  Clone ID: LIB3180-007-H6_FLI.pep
SPRVLLVRQGKSRSKKRKVLLPMGSSGFSWTLPDHPKLPKGKPVAVVVLDGWGEANPDQYNCIHVAQTPVMDSLKNGAPEKWRLVKAHGTAVGLPSDDDMGNSEVGHNALGAGRIFAQGAKLVDQALASGKIYDGDGFNYIKESFESGTLHLIGLLSDGGVHSRLDQLQLLLKGVSERGAKKIRVHILTDGRDVLDGSSIGFVETLENDLLELRAKGVDAQIASGGGRMYVTMDRYENDWDVVKRGWDAQVLGEAPYKFKSALEAVKTLRAQPKANDQYLPPFVIVDDSGNAVGPVLDGDAVVTINFRADRMVMLAKALEYADFDNFDRVRVPKIRYAGMLQYDGELKLPSRYLVSPPEIDRTSGEYLVKNGIRTFACSETVKFGHVTFFWNGNRSGYFDATKEEYVEVPSDSGITFNVAPNMKALEIAEKARDALLSGKFDQVRVNLPNGDMVGHTGDIEATVVACKAADEAVKIILDAVEQVGGIYLVTADHGNAEDMVKRNKSGKPLLDKNDRIQILTSHTLQPVPVAIGGPGLHPGVKFRNDIQTPGLANVAATVMNLHGFEAPADYEQTLIEVADN

SEQ ID NO: 63216 - protein, 624 aa, Zea mays
  Clone ID: LIB3180-008-G4_FLI.pep
AGSGEMSMYGRDPWGGPLEICHDSATDDDRSRNLDIDRGALSRTLDETQQSWLLAGPGDQGRKKKKYVDIGCLVVSRKLFVWTLGVLLAAAVFAGVVAGIAKAIPRRHRPPPPPDDYTVALHKALMFFNAQRSGKLPKHNNIPWRGNSCMKDGLSDPAVRRSLVGGYYDAGDAVKFNFPAAFSMTLLSWSVIEYSAKYDAAGELGHVRDIIKWGSDYFLKTFNSTADSIDRVIAQVGSTATSPGSRQPNDRYCWMRPEDIDYPRPVVECHACSDLAAEMAAALAAASIVFKDNKAYSQKLVHGATTLFQFARERRGRYSAGGSDAAKFYNSTSYWDEFVWGSSWMYLATGNSSYLTLATHPKLAKHAGAFWGGPDYGVFSWDNKLTGAQVLLSRLRLFLSPGYPYEETLSTFHNQTSIIMCSYLPIFRSFNRTRGGLIQLNHGKPQPLQYVVNAAFLASVFSDYLEAADTPGWYCGPHFYSIEVLRSFARTQIEYILGKNPLKMSYVVGFGNHYPKHVHHRGASIPKNGVHYGCKGGWKWRDTKKPNPNIIVGAMVAGPDRHDGFKDVRKNYNYTEATLAGNAGLVAALVALSGEGHGVDKNTMFSAVPPMFPSPPPPPAPWKP

SEQ ID NO: 63217 - protein, 370 aa, Zea mays
  Clone ID: LIB3180-009-E10_FLI.pep
PQLGAGGKRERERAMAADQQPQLQEEMNDAAGGGLRLPPGFRFHPSDFEIVSFYLTNKVLNTRFTCTAITEADLNKIEPWDLPSKAKMGEKEWYFFYQKDRKYPTGLRANRATEAGYWKATGKDKEVYNAAEGVAVLVGMKKTLVFYRGRAPRGDKTNWVMHEYRLEGSGRLPAGLASATGSAAANAAAALKASAYKDEWVVCRVFHKTTGIKKTTTAAPAYQVAMAGAEMDQNQNNIPFPMPMQFSMLPDFSLDPVPPYYPYPNAGAGMPMLPMAAGIGGGAGGLHLNGAALFGNPMAAPQPMSFYHQMGTGTACAGGFDVSAPESRPSSMVSQKDDQANGAEISSMMSVAGPGPATTTTIEMDGVWKY

SEQ ID NO: 63218 - protein, 256 aa, Zea mays; identical to SEQ ID NO: 44857
  Clone ID: LIB3180-009-E4_FLI.pep

SEQ ID NO: 63219 - protein, 271 aa, Zea mays
  Clone ID: LIB3180-010-A2_FLI.pep
RTSTASSTTIDDCSIPASRRPAATSCNTRTSAASYSPFEMPEIDWNLENTQIVCKLFVEQVGKGNRPNTYLNSVGYAEVEKGFKDRTGIDVTKSQLKNKWDKLKEDFKAWRKLKLRQTGTVGTVKRALLIWMMIGGKELERIYQDVESSGSLAFKMKMRWLGALETSQILVVITGLLVLQMILLQLMLSNRTLYQCLKHRMRNSFLQLKIMKTMLALHLQVVGKGWLGQFKEKERKLRQEMHSSSKKQSQAWLARPMNLLPRKMENILLIK

SEQ ID NO: 63220 - protein, 205 aa, Zea mays
  Clone ID: LIB3180-010-A3_FLI.pep
PPRTQQQALQQNSTRSSPARRPTMIIPKKNRNEICKYLFKEGVLYAKKDYNLAKHPQIDVPNLQVIKLMQSFKSKEYVRETFSWQYYYWYLTNDGIEHLRNYLNLPSEIVPATLKKSARPLGRPFGSGPPGDRPRGPGRFEDRPRFGDRDEYRGGPRGASGDFGGDKSGAPAEFQPSFRSSGARSGFGRGGGSGFGAGPTSSSME

SEQ ID NO: 63221 - protein, 200 aa, Zea mays
  Clone ID: LIB3180-010-E5_FLI.pep
PRPPPNTPSRHAVAAASPSFTMIISKKNRREICKYIFHEGVLYAKKDYNLAKHPKLDVPNLEVIKLMQSFKSKEYVRETFSWQYYYWYLTNDGIEHLRSFLNLPSEVVPNTLKKSSKPPSRPFGSGPPGDRPRGPPRFGEDRPRFGDRDGYRGGPRGAMGDFGGEKGSAPADFQPSFRGSRPGFGRGGGSAFGASGSSME

SEQ ID NO: 63222 - protein, 687 aa, Zea mays
  Clone ID: LIB3180-016-D2_FLI.pep
KSETVRTIRTIQLQLLNPAAMDRSRSKRGYHYDQDSPPPRSKQRFDRRSGGGQNANSSYHRRGPLGGGGSDRRGFLPPAPAPPPPPPPPPLPPSSATAGGGAGPTTTTTSFRILCPECKAYGFPPGFVAKVRDDSGALVTVHPPFAGDYVRVIETVDGARREADGRPPMFSPAQEALLMVHRRILETDADDGDEDGEYGPRGKDSRDRGKTTTRLIVPKMHVGCLLGKGGKIIEQMRMETKTHIRILPRDQHTPRCVSLSEEVVQVVGDGNCVKKAVAIITDRLKESLHRDRGPFRGRMNSPEPRISQEDDYLGVSQMPAYEESLGRSDQIRNNTSMEPPGYEFDSNDGKVIEHPDILYDDIIFRILCPNDKVDNLVATNDGILEMLQADVGVDVRLSDIIAGSDERVVIITSREGPDHELFPAQEAVLHIQTHIVDLGPDKDNIITTRLLVPSSEIACFDGREGSLSDIQRQTSANVQILPKEDLPLCALESDELIQIVGEISAARNALIQVTTKLRSFLYREMSGPIQVGNINVHGAISPVAGSPGGPNLGNDMPMSAYHQASQLATSWHSKDSGGSASGSFDQGSNIIDEIRQGATKRFAVPLVTRSTLEVVIPNSAVASLTMRAGSKLAQISEISGATVTLAEDRPDILEKVVRISGTPEQASKAENLLQGFILSIPDDIPSG

SEQ ID NO: 63223 - protein, 482 aa, Zea mays
  Clone ID: LIB3180-018-A11_FLI.pep
ASSSPFPLRVQPGATHSAADPRRRSDPAMASTAARRLRELQAQTGNKTCVDCAQRNPQWASVSYGVFMCLECSGKHRGLGVHISFVRSVTMDSWTEAQLRKMEAGGNDRLNAFLTARGVPKETPHVAKYNSNAAAAYRDRIAALAEGKPWTDPPVVKETPGSGAPAPARKPPVHTSAASGGGGWDDWDDDFRPDMRRNQSVGSFAAAGAQSGRQPPRSKSTQDMYTRQQLEASAANKEDFFARRMAENESKPDGIPPSQGGKYVGFGSSPPPSANRNGGAAQGDVMQVVSQGFGRLSLVAASAAQSAASAVQVGTKEIQSKMRDGGYDQKVNETVSVVANKTAEIGSRTWGIMRGVMALASQKVEEYAKEGGVGGWGEDWQHSEQKSEPYQRFEHETNGNSWNSSQNSSSKNNSSSWDDWDDPGKKDEPAKPHQSSDSWAGWDDGKDDGFDSPSYNNHSTSNKGSNQNGTSGGTFWTEGGFR

SEQ ID NO: 63224 - protein, 410 aa, Zea mays
  Clone ID: LIB3180-018-A2_FLI.pep
IYCQLGSNKAEASRVRGRHRGLGMAAKKVLMLCGDYMEDYEVMVPFQALQAYGVSVDAVCPSKKAGDICRTAVHQLTGHQTYSETKGHNFTLNASFDEITASEYDGLVIPGGRAPEYLAMDEKVLDLVRMFSGAKKPIASVCHGQLILAAARVVENRTCTAFPAVKPVLVAAGAKWEEPDTMAKCTVDGNLITAATYNSHPEFISLFVKALGGSVAGSDKRILFLCGDYMEDYEVMVPFQALQALGCHVDAVCPDKGAGETCPTAIHDFEGDQTYSEKPGHDFTLTASFGSVDASSYDALVVPGGRAPEYLALNDKVISLVKAFAESGKPIASICHGQQILSAAGVLKGKKCTAYPAVKLNVLLGGGTWLEPDPIHRCFTDGNLVTGAAWPGHPELVSQLMALLGVKVSF

SEQ ID NO: 63225 - protein, 140 aa, Zea mays
  Clone ID: LIB3180-018-D5_FLI.pep
ILMHFRFLLGMAIFDTMKHIRPDVSTVCIGLAASMGAFLLSAGTKGKRYSLPNSRIMIHQPLGGAQGQETDLEIQANEMLHHKANLNGYLAYHTGQPLDKINVDTDRDYFMSAKEAKEYGLIDGVIMNPLKALQPLPASS

SEQ ID NO: 63226 - protein, 299 aa, Zea mays
  Clone ID: LIB3180-020-B12_FLI.pep
AKALCVCVCHITYCQSVTEIEMARCPAAHAALCSLALLLLLPAARAATFTMTNNCGYTVWPGLLSGAGTAPLPTTGFALAHGASAAVDAPAGWSGRMWARTLCAADAATGRFSCATGDCGSGAVQCNGGGAAPPATLAEFTLGGSGGLDFFDVSLVDGYNVPMLIVPAQGAGGAGGGSSSSSNGSAGGSSKCMATGCLVDLNGACPADLRVMAASASASASGAGGAVACRSACEAFGSPQYCCSGAYGNPNTCRPSTYSQFFKNACPRAYSYAYDDSTSTFTCATGISYAITFCPSTTR

SEQ ID NO: 63227 - protein, 553 aa, Zea mays
  Clone ID: LIB3180-022-E7_FLI.pep
EAHTHNQISPKSTRRHLRFKMQIFVKTLTGKTITLEVESSDTIDNVKAKIQDKEGIPPDQQRLIFAGKQLEDGRTLADYNIQKESTLHLVLRLRGGMQIFVKTLTGKTITLEVESSDTIDNVKAKIQDKEGIPPDQQRLIFAGKQLEDGRTLADYNIQKESTLHLVLRLRGGMQIFVKTLTGKTITLEVESSDTIDNVKAKIQDKEGIPPDQQRLIFAGKQLEDGRTLADYNIQKESTLHLVLRLRGGMQIFVKTLTGKTITLEVESSDTIDNVKAKIQDKEGIPPDQQRLIFAGKQLEDGRTLADYNIQKESTLHLVLRLRGGMQIFVKTLTGKTITLEVESSDTIDNVKAKIQDKEGIPPDQQRLIFAGKQLEDGRTLADYNIQKESTLHLVLRLRGGMQIFVKTLTGKTITLEVESSDTIDNVKAKIQDKEGIPPDQQRLIFAGKQLEDGRTLADYNIQKESTLHLVLRLRGGMQIFVKTLTGKTITLEVESSDTIDNVKAKIQDKEGIPPDQQRLIFAGKQLEDGRTLADYNIQKESTLHLVLRLRGGQ

SEQ ID NO: 63228 - protein, 371 aa, Zea mays
  Clone ID: LIB3180-024-A2_FLI.pep
KPRSTMAPAPVLAGILLALVAMAVAVHAHAPAHSPEASESTSPSEAPAGAPDDAREMETPWMSPAEAPVLYGENAAPAASPEEEGAPAMAPGFDANGPAAASPEEEDATAMAPDYDANGPTAASPEEEYAPAMAPDYDANGPAAASPEVEAPTMAPDLSPSASESPEEAPTMAPDLSPSASEAPEEEAPTMAPDLSPSASEAPEEELPTMAPDLSPVASESPEETPAGAPEFEGASIAAPPLDDAPTMAPAFAPFGISESPEESEAPAGAPEEEAEAEAEAESPSSETAAAPLSEDYGVLEEEVVVLSPDGSAAVSSEPETEESPAKATPAAAEAPGPSSDGEDSGASTGAPCRSLVSAVIVAAMCAVAAF

SEQ ID NO: 63229 - protein, 517 aa, Zea mays
  Clone ID: LIB3180-029-G5_FLI.pep
RESRPAPHSQQSETPIRGAGRGEPGVGNKKPRIPSSVAGMGQEGMGYNSKGGGGGGGGGGGLPMTALRPRGASPLHHSRSRKIHRTFNNLKITVLCGLVTILVLRGTIGLNLSLPSQPSDAEALADAKAVEDIDRILREIRSDSGPDPDDEGDFGAASGFNATALSATEAAAAYAAAVGKYALGPKISDWDAQRRRWLAQNPGFPATLAGGKPRIMLVTGSQPGPCDNPLGDHYLLKTTKNKIDYCRLHGIEIVHNLAHLDNELAGYWAKLPLLRRLMLSHPEVEWIWWMDSDALFTDMSFELPLSRYDGHNLIIHGYQDLLFEKHSWIALNTGSFLFRNCQWSLDLLDAWAPMGPKGFIRDQAGKVLTANLKGRPAFEADDQSALIYLLLSQKDKWMDKVFIENSYYLHGFWAGLVDKYEEMMENHHPGLGDERWPFVTHFVGCKPCGSYGDYPVERCLRSMERAFNFADNQVLRLYGFSHKGLESPKIKRFRDQTTRPINDVENLDMKAKISTIS

SEQ ID NO: 63230 - protein, 353 aa, Zea mays
  Clone ID: LIB3180-032-A2_FLI.pep
CPRAHEGSGDLRQRCALPKGDAHRALRGEGADGDRARVRGRGRGGGRRRDAPVRGRPRGAGAGRQLLALPPLQGRAVQPVRGHEVLRHPAGARLAGEPGGAPGRPVLQAPRRGEPGGGRHVRAAERGRARVPPRGGGARDGRARGGRRPHRPGVAAGGAGLRRAARGGRGCGRPPPGRGQVAGRGRGRAGVAPRGGPGGRGGAHPRGHGLGHRRQPGLRRVQQDHVDGAGGDAARREGVPGRDGPQRDDAAADGGGGAGGGRGGRVPVQGHLAAVHRLPAQRQGGRQAAHHPPLRLLAAGRGGGLRGQRPRPRCHKSHVQPLGGQAASLSVQPSRRRRRCRMPLPPPRPQLLE

SEQ ID NO: 63231 - protein, 367 aa, Zea mays
  Clone ID: LIB3180-008-D3_FLI.pep
QITTSHPLLSRPQLFVRSPLAARLPRGRGAANSKERVSSSLHGSTELPDPSAPNPTHPVGHRLAMDLDLWISKVKEGQHLAEHELQSLCEYVKEILIEESNVQPVNSPVTVCGDIHGQFHDLMKLFATGGHVPETNYIFMGDFVDRGFNSLEVFTILLLLKARYPAHITLLRGNHESRQLTQVYGFYDECQRKYGNANAWRYCTDVFDYLTLSAIINGQVLCVHGGLSPDVRTIDQIRTIDRNCEIPHEGPFCDLMWSDPEEIETWAVSPRGAGWLFGSRVTAEFNFVNGIELVCRAHQLVQEGLKYMFQEKGLVTVWSAPNYCYRCGNVASILSFDEKMERDVKFFTETEENNQMRGPRTAVPYFL

SEQ ID NO: 63232 - protein, 619 aa, Zea mays
  Clone ID: LIB3180-011-E8_FLI.pep
RGIGEGPVFDSPRFASESSSSSLLPPWSLLLRATPSSESSARDTVAAAKSGRRSGSSRCFADPMGETNELPPPPVAAPPPMMPMQSMMVGAGAIHPPHEQFHHLNYCVHSNPSWVQVAALAFLHYLVMLGSTVMLATAIVPAMGGNAGDKARVIQSFLFMSGINTLLQTLIGTRLPTVMNASFAFVVPVLSIAKEIESNNFLNDHERFKHTMRTAQGALIVASILNMILGFSTIWGAYAKKFSPVIMTPVVCVVGLGLFQLGFPQVGKCVEIGLPMLILAVVVQQYVPNYFSYIHQRVTFLFERYSLLLCIGIVWAFAAILTAAGAYDHASPKTQQHCRTDKSFLMSSAPWIKIPLPFEWGPPIFTAGHSFGMMGAVLVAAFESTGAHFATARLAGATPPPAYVLSRSVGLQGIGMFLEGIFSVPAGSSVSVENIGLLGLTKVGSRRVIQISTGFMIFFSIFGKFGAFFASIPLPIFAAIYCILFGIVAAVGVSFMQFANKNSMRNIYIIGLSLFLGISVPQYFNGYTSSAGGHGPARTNAGWFNDIINTVFASGPTVALIVASVLDNTLEFRGYEADRGLSWFQPFLRRHKGYSDPRNEEFYSFPISVYDVIPDRFRR

SEQ ID NO: 63233 - protein, 267 aa, Zea mays
  Clone ID: LIB3180-013-F6_FLI.pep
LQLLLVARSFQRLPRSLIVCLIWSTGRFVHVCRYITHSFLLATLLIRALVNQTLTYPSCGIEINANADAAQSRNGQEGWKVQPTAYGSAPGATNVTHRSAYAASCWICTATSIWAALWWLSISSWPRLSASSWPRLSASWILAGRCIPSTRSRLPTWWWISSTWSRLPPGSGWCISSAWFLPSTRFLPPSRGLLPSTRFLPPSTGLLPSTRFLFPSTGLLPSTRFISPTPSTRFISPSTGLVPSTRFLPPTGLPWQVKMTRQVNQIS

SEQ ID NO: 63234 - protein, 483 aa, Zea mays; identical to SEQ ID NO: 43218
  Clone ID: LIB3180-016-C8_FLI.pep

SEQ ID NO: 63235 - protein, 244 aa, Zea mays
  Clone ID: LIB3180-021-F8_FLI.pep
PRYPLSLGFLSHHQPPSRLSPPPPALGRRDEGRREAPAGRGGKRSSRAGGEMFLWDWFYGVLASLGLWQKEAKILFLGLDNAGKTTLLHMLKDERLVQHQPTQHPTSEELSIGKIKFKAFDLGGHQIARRVWKDYYAKVDAVVYLVDAYDKERFAESKKELDALLSDDSLANVPFLILGNKIDIPYAASEEELRYHLGLSNFTTGKGKVNLGDSNVRPLEVFMCSVVRKMGYGDGFKWVSQYIK

SEQ ID NO: 63236 - protein, 354 aa, Zea mays
  Clone ID: LIB3180-021-H3_FLI.pep
LRDMKRRKCNPRQMDGWMEMTTERKGSLGSGGVSFHLGVVEVDADHGLPDPRADVGQDGGVAVVGDCLDDGAGAARGVAALEDARADEDAVASELHHERGVGGRGDTPRGELHDGEAAQLLGLHDEVVGRGDALGVGEDLVVVHAAERADVAHDGAHVAHGLDDVARAGLPLGADHGGALAHPAERLAEVAAAADEGDAEVVLVDVVRVVGGGQHLALVHVVDAQGLQDLGLHEVPDAGLGHDRDGDGALDVADEPRVRHARHAALRADVGGDPLQRHHGARAGLLREPRLLRGHHVHDDPAPEHLRQPHLDGESRRLGLLGRLQQLRAVAAVHRHHAAAVGRHGFGSLVPSLV

SEQ ID NO: 63237 - protein, 180 aa, Zea mays
  Clone ID: LIB3180-022-A2_FLI.pep
SSSRRRRRPAAGNRRKMPAGHGLRSRTRDLFARPFRKKGYIPLTTYLRTYKIGDYVDVKVNGAVHKGMPHKFYHGRTGRVWNVTKRAIGVEINKQVNGRIIRKRIHVRVEHVQPSRCTEEFRLRKAKNDQLKVDAKDRGEVISTKRQPVGPKPGFMVEGATLETVTPIPYDVVNDLKGGY

SEQ ID NO: 63238 - protein, 283 aa, Zea mays; identical to SEQ ID NO: 41343
  Clone ID: LIB3180-023-G9_FLI.pep

SEQ ID NO: 63239 - protein, 722 aa, Zea mays
  Clone ID: LIB3180-024-H3_FLI.pep
NACHDNIVHQQKVLTRIHRDDDDKSSSDWASQPLQQTHETDTIRLVHLLDLGARATASSRSVLVHAAGATHVGTRALVHLGDDGVAKALQLLHLVIELVRLGELVGVQPADGRVDGVLDLLLVVGSQLGRDLLVLDRVAHVVGVVLQRVLGLHLLLVLLVLRLVLLRVLHHLLDLLLGQTALVVGDCDLVLLPRRLVLGRHVQDAVGVDVEADRDLGDTTRSRWDAGELELPKQVVVAGPGPLTLVHLDQHTRLVVRVGGEHLLLLGGDGGVPRDKDGHHSSGSLQTQRERSDVQQKQVLHLLVALTTEDSGLDSSTIGNGLIRIDVLAQLLAVEEVLEQLLHPGDPSGATNKDNIMDAALVHLGIPQAFLNRLHALPEQVHVELLKPGTGDGGVEVNALVQRVNLNGGLGSGRQSSLGPLTRGPQPPESPRVASDILLVLSLELLDKVVNHPVVKVLTTKMGVASCGLDFKDTFLNCKEGDIEGTTSKVKNEDILLTDTGCLLVKTIGNSSSGWLIDDTQHIEASNHPSILCGLPLRVVEIGRDRDNSILDRAAKVSFSDLTHLDENHRGDLFGCKLFLLPLVLNNYHWLLTGPRNDLEGPQLNITLDRGVTKPPANETLGIKDGVDGVHGDLVLGRISDEALGVGEGDVRGCGAVTLVVGDDLDTVVLPDADARVRRAEIDADCRPITLACHLFSLSAEVAEHGMELAVAVNGRGVAAEG

SEQ ID NO: 63240 - protein, 652 aa, Zea mays; identical to SEQ ID NO: 38995
  Clone ID: LIB3180-031-A4_FLI.pep

SEQ ID NO: 63241 - protein, 350 aa, Zea mays
  Clone ID: LIB3180-031-D1_FLI.pep
AFPLLTTCWLLLQCYCHYATTRACAATRRRWTKRDAMDSRQGQQPNYKIYIRMMKTVLLDVKSTDTIDQIKSKIGALEGIDNSQQELFFAGSHLEKDNRLADYNIMTNSCVDLYVTDGMQISVSIPSVWKTIKLNVMKSQSVADVKAMIEQMGGIPLDEQILMHGCQKLEDNKLLSQCGLSNGHTLHVLVRPTDRLHISVDVDGEETLNLDVKSWYTVADVKLMIDTLEGLPARTQILMHTQPGGANTVLKDIETLQNQGIKNNDIVALYHKVNFFVKTYEGRNLVLSMRTCDTAEEIMKVIEEKLKVNTGVYYLHYRGRVLALGDTLRKHKIENNCTVDVRLRNSHVTK

SEQ ID NO: 63242 - protein, 420 aa, Zea mays
  Clone ID: LIB3180-033-B2_FLI.pep
SATSTLESFPTMASQGSSVFAALEQAPEDPILGVTVAYNKDPSPVKVNLGVGAYRTEEGKPLVLNVVRRAEQMLINNPSRVKEYLPITGLAEFNKLSAKLIFGADSPAIQENRVATVQCLSGTGSLRVGGEFLARHYHERTIYIPQPTWGNHPKVFTLSGLNVRSYRYYDPATCSLHFEGLLEDLGSAPSGSIVLLHACAHNPTGVDPTIEQWEQIRQLMRSKSLLPFFDSAYQGFASGSLDKDAQSVRMFVADGGELLMAQSYAKNMGLYGERVGALSIVCKSADVAVRVESQLKLVIRPMYSNPPLHGASIVATILRDSEMFNEWTLELKAMADRIINMRQQLFNALKSRGTPGDWSHIIKQIGMFTFTGLNSEQVAFMRQEYHIYMTSDGRISMAGLSMRTVPHLADAIHAAVTQLK

SEQ ID NO: 63243 - protein, 363 aa, Zea mays; identical to SEQ ID NO: 42242
  Clone ID: LIB3180-035-H10_FLI.pep

SEQ ID NO: 63244 - protein, 1021 aa, Zea mays
  Clone ID: LIB3180-036-B7_FLI.pep
QSQSRSPSKPTSPAVPHSPIQISSTPTGRLRRRWHRSSHTRTPLRNPERAPAMEQLRTIGRELAMGSQGGWGQSKEFLDLVKSIGEARSKAEEDRIIARELEHLKRRLADPDVPRRKMKELLLRLVYAEMLGHDASFGHIHAVKMTHDESLPLKRTGYLAVALFLDERHDLVILVVNTIQKDLRSDNYLVVCAALTAACRLIGEEAIPAVLPQVVELLAHPKEAVRKKAVMALHRFYQRSPSSVSHLVSNFRKRLCDNDPGVMGATLCPLYDLILEEPNSYKDLVVSFVNILKQVAERRLPTSYDYHQMPAPFIQIKLLKILAVLGSGDKQASGHMYTVLGDIFRKGDTASNIGNAILYECICCISSIFPNPKMLEAAAETTSKFLKSDSHNLKYMGIDALGRLIKINPDIAEEHQLAVIDCLEDPDDTLKRKTFELLYKMTKSTNVEVIVDRMIEYMINITDHHYKTEIASRCVELAEQFAPSNQWFIQTMNKVFEHAGDLVNIRVAHNLMRLIAEGFGEEDEGADSQLRSSAVDSYLRIVGEPKLPSSFLQIICWVLGEYGTADGKYSASYIIGKLCDVAEAHLTDDTVKAYAISAILKTFAFEITLGRKIDLLPECQTLVDELSASHSTDLQQRAYELQALLGLDKTAVESVMPADASCEDIEVDRSLSFLNSYVQQALENGASPYIPESERSGVISVGSYRSQEQQETSAHTLRFEAYEMPKPSLPLATSQTSMSTPPTDLVPVPEAGYYKEDNQTSMSQPPSDAISGEFGVKLRLDGVQKKWGRPTYSSSTPSSSISSQPTPNGASHSDGGGSSSQPRESSYGSKRQQGTEVSAEKQRLAASLFGSAAAKADRKAQASRKTAKDSPSTEKVATTNVTAQPVKEQVIPAAPPPDLLDLGDEPVSSSPPSADPFSQLEGLLGPASAAPVLSGTPATSTSKAPGLLSIFSDDVPTGVTSVSTDPTLGDVNSMGSRKGAAAVASMKGPSLQDALQKDAAARQVGVTPTVNNPNLFKDLLG

SEQ ID NO: 63245 - protein, 363 aa, Zea mays; identical to SEQ ID NO: 42242
  Clone ID: LIB3180-036-B8_FLI.pep

SEQ ID NO: 63246 - protein, 473 aa, Zea mays
  Clone ID: LIB3180-036-H11_FLI.pep
HPSGTVTKDLEPSPLFSTTASKMPQVMVVARNFMDMVAALPAGKLDMLYDSAFICEAVLRSLPPLAKKYALQMLYVLAPVTAAAMEEWVLDEYAAKHKVAIDKLLQLRVFVEVRDRRRDVSYKMNQKFQGNMQKYLVDGGSLPREPLPLSVTGRLPTPADLEAYALDQWECFLLQLINSSQVEKGSSFSSSMMKTFQRGLLSSRDGEASKLTENGFQFLLMETNAQLWYIMREYISSAEERGVDPTELISFLLELSFHKLGAAYSLNTLTDVQRIAIRDLAELGLVKQQQGRKDSWFIPTQLATNLSASLSDSSSNKEGFVVVETNFRMYAYSTSKLHCEILRLFARVEYQLPNLIVGAVTKESIYGAFENGITAEQIISFLRQNAHPRVADKIPAVPENVTDQIRLWETDLNRVDMIPSHLYEDFPSKEWFEQCCDYARDNGYLLWEDPKRMRLIVRGEFHPEMREFLRRQR

SEQ ID NO: 63247 - protein, 956 aa, Zea mays
  Clone ID: LIB3180-037-C5_FLI.pep
ERSRISARAGGRAAMHLKLWKPLSHCAALLLDKKNRPPRTPPAGAGAGSGGGRRLQESKLREALEEASEDGSLAKSRDAALLDGGDGGAEEGSVGRSRSLARLHAQRDFLRATALAAERAFQSPDALPVLEEALAKFLVMYPNYASASDVDRLRADEYPHLDKVCLDYCGFGLFSYLQSCNPADSSAAFTLSEITANLSNHALYGAAEKGTAEHDIKNRIMDYLNIPESEYCLVFTVSRGSAFRLLAECYPFGTNKRLLTMFDHESQSVNWMTQVARDKGAKAYSAWFKWPTLKICTTELRKLISTKKRRRKDSATGLFVFPVQSRVTGAKYSYQWMALAQQNHWHVLLDAGALGPKDMDSLGLSLFRPDFIITSFYRVFGADPTGFGCLLIKKSVMACLQSPSGGTGAGLVRIVPVFPQYLSDSVDGFDGVLDGLEDDNIIPIEEGSASNSHHASQLPAFSGAYSSAQVREVIESEMDQDSSDRDGASTIYEESESVSVGEVMKSPVFSEDESSENSFWVDLGQSPLGSDHSEQSSKGKLGSPLPASWFSGRKKASPKVPSKLSRSPVHDKHVLSFDAAVRSVSQEPGPVEVVPDEDHSRNGIKNIHISEIEEDNRDGKVNKRFVKFSCANGPAEGSATSVFGTCTARENGSTSEICSETQAETKESAIRRENEGDFRLLGRREAHNGRFNGGGRFFGVEEPERVSSMGRKVSFTMDDSRLCRNSDAGETSGYGMAADDQDDDDAYSDYDEAQDGRKEPEIVCRHLDHVNMLGLSKTTLRLRYLINWLVTSLLQLRLPDSGDGEGAAAAAAPALVYIYGPKIKYDRGAAVAFNVKDCGSGTSLINPETVQKLAEKEGLSLGVGFLSHIRLTDSQRHGAADVGLSSSSSPAAASGRREKKSTRKNAVVGTEVVTASLGFLTNFEDVYRLWAFVAKFLDSSFLEQERLSSIPEDAER

SEQ ID NO: 63248 - protein, 553 aa, Zea mays
  Clone ID: LIB3180-037-E6_FLI.pep
VGVMMSHRRRSRAAGSPPGDASTGTPPTPEKSGRVRPWAATASNRKVLVFALAFRAANALLVRTYFNPDEHWQCLEVAHRVAFGYGHLTWEWKRGLRSYLHPLLFAALYKTLALLHMDTPWVMVMAPRLVQSLFAAFGDLYLYKLSKLIFNGQVAKWTLFSQLVNWFMFFCITRTLSNSLETVLTVAGLYYWFAAIESSKATSIVSKQHAACEQSIPSRKVALLIAALSCAIRPTSAVTWLYVGLLDFIQMKSKCRFILLDVIPVGAIVLAVTTLLDWWMYGSWVIVPLNFLKFNLLSSGGDYYGTHVFHWYFTQGFPSMIWTFLPFALCGIVKSQEWRLSGLIAWVLGVYSILGHKEFRFVLPVLPLALMFSGYCLASMSQSKGKNQHRKGSLSRLQLSVILLVITNVPMALYMSLFHQRGTEDVMYYLSKEAYDGRVRSVLFLMPCHSTPYYSTLHYNLPMRFLDCTPSDSKGTLDESDCFLTSPSEFVGDVFGNLSAFSHIVLFESEEKHVLQLLLHNSFLEMRRFFHSHFKVDRDLQSAVVVYSRRDVL

SEQ ID NO: 63249 - protein, 537 aa, Zea mays
  Clone ID: LIB3180-037-H7_FLI.pep
HRHHSPPASSSLSRLLVLALLCQPRGRASKQMVAMAAPGRVALLAAALLFGAFFPSAFATSSYPARLAGRLLSTTASAVAKQLWSLKSAATKTATASVAGRSMVRYEGGYAVDTVFDGSKLGIEPHAAQINRAGDLLLLDSINSNIYRVQLPLSPYSRPKLLAGSPEGLSGHVDGRLREARMNHPKGFTVDDRGNIYVADAMNMAIRKISDTGVTTIAGGKSIRGGYIDEPSVSDDAKFSTDFEVQYISSTCSLLVIDRGNQAIREIPLNDDDCAYQYEAGFPLGFALLCAAGFFGYMLALLQHRLLGMPSTINKPQAPPRPSIASIPPYQKPLNPYVRQPFIPREETARQEPEEGFFTSAGKLVGGAKSSVAEVFGFKKKSLSNPYHQQQRRANPWPVQESYAIPHDEPPPALDTRAPAPQKNYSSEKIHYVRHGHPYFNSWDGHRLPQQQPDQQLYHQQQQQHLQQHRQCSAGPQTFYEQSCEATNEVVFGAVQEVDSKRRMVEIKAVNYGDTFYEQYGMRYRNNFIGYNNTNNY

SEQ ID NO: 63250 - protein, 626 aa, Zea mays
  Clone ID: LIB3180-038-D6_FLI.pep
SPDTTRPRSPVTHDTTRDSPHPTNRLSPSSLAQLSCTSTAPGYMAAASTLAFGHPKTLAAAGAKPLPAATSTSVSFPATHQPACLLSSPAPGSLRRRDVAAMVSAPPAVGTAMPSLDFDTSVFNKEKVSLAGHDEYIVRGGRNLFPLLPEAFKGVKQIGVIGWGSQGPAQAQNLRDSLAEAKSDIVVKIGLRKGSKSFEEARAAGFTEESGTLGDIWETVSGSDLVLLLISDAAQADNYEKIFSHMKPNSILGLSHGFLLGHLQSLGLDFPKNISVIAVCPKGMGPSVRRLYVQGKEVNGAGINSSFAVHQDVDGRATDVALAWSVALGSPFTFATTLEQEYKSDIFGERGILLGAVHGIVEALFRRYTEQGMDEESAYKNTVEGITGIISKTISKKGMLEVYNSLSEEGKKEFNKAYSASFYPCMDILYECYEDVASGSEIRSVVLAGRRFYEKEGLPAFPMGNIDQTRMWKVGEKVRSTRPEGDLGPLHAFTAGVYIALMMAQIEILRKKGHSYSEIINESVIESVDSLNPFMHARGVAFMVDNCSTTARLGSRKWAPRFDYILTQQAFVAVDKDAPINQDLISNFLSDPVHGAIEVCAELRPTVDISVPANADFVRPELRQSS

SEQ ID NO: 63251 - protein, 477 aa, Zea mays
  Clone ID: LIB3180-038-G9_FLI.pep
KKNLVKVEGSAHGLRPKMLPYFDPEYENFNQRINPPRVCIDNTTCSDCTLVKVDSMNKNGILLEVLQVLSDLDLHIFKAYITSDGGWFMDVFHVVDKQGQKITDDKTIKYIEKALGPESNLLGAKGSNSAGRSVGLHSIGDHTAIELKGPDRRGLLSEIFAVLADLQCNVLAAEVWTHRMRVACVVYVNDVATGQAIDDPDRVARVEDRLRHVLRGYGGGGGAGDDDDGSGAHANFAAASSTPHHVDRRLHQLMHADVDAVHGDGAHAAAGGEGDRPAVTVEHCEEKSYSVVNVKCKDRSKLLFDIVCTLTDMEYVVFHAAVSSEANYGIQELYIRRKDGKTLLKDEAEKVIRCLEAAISRRVSEGFTLEVCGRDRVGLLSDVTRVLREHGLTVSRADVTTAGGQATNVFYVRNPSGQPVDMKTVEGLRGQFGQTAMLNVKSVGVPAAVAKAAEPSSGSMVRSSFFSFGSLFAKLRA

SEQ ID NO: 63252 - protein, 237 aa, Zea mays; identical to SEQ ID NO: 44890
  Clone ID: LIB3180-039-D12_FLI.pep

SEQ ID NO: 63253 - protein, 236 aa, Zea mays
  Clone ID: LIB3180-039-D5_FLI.pep
FLSHHQPPSRLSPPPPALGRRDEGRREAPAGRGGKRSSRAGGEMFLWDWFYGVLASLGLWQKEAKILFLGLDNAGKTTLLHMLKDERLVQHQPTQHPTSEELSIGKIKFKAFDLGGHQIARRVWKDYYAKVDAVVYLVDAYDKERFAESKKELDALLSDDSLANVPFLILGNKIDIPYAASEEELRYHLGLSNFTTGKGKVNLGDSNVRPLEVFMCSVVRKMGYGDGFKWVSQYIK

SEQ ID NO: 63254 - protein, 962 aa, Zea mays
  Clone ID: LIB3180-040-B2_FLI.pep
AAKAAAPLSPGTRGGRTPTHRPSLSSSSSLSSEGQVTVFVTMAGTLLQSVALGTPFGGRMRTHCWRSHGTRRPASMLAVSLSRPVKMSAFVGLRSVHSFSVTPTVSNSRSAVASYRSSRQTRRSRFVTRAMFERFTEKAIKVIMLAQEEARRLGHNFVGTEQILLGLIGEGTGIAAKVLKSMGINLKDARVEVEKIIGRGNGFVAVEIPFTPRAKRVLELSLEEARQLGHNYIGSEHLLLGLLREGEGVAARVLESLGADPSNIRTQVIRMIGETTEAVGAGVGGGSSGNKMPTLEEYGTNLTKLAEEGKLDPVVGRQPQIERVVQILGRRTKNNPCLIGEPGVGKTAIAEGLAQRISTGDVPETIEGKKVITLDMGLLVAGTKYRGEFEERLKKLMEEIKQSDEIILFIDEVHTLIGAGAAEGAIDAANILKPALARGELQCIGATTLDEYRKHIEKDPALERRFQPVKVPEPTVDETIEILRGLRERYEIHHKLRYTDEALIAAAKLSYQYISDRFLPDKAIDLIDEAGSRVRLQHAQVPEEARELDKELKQVTKQKNEAVRSQDFEKAGELRDREMELKAQITALIDKSKELSKAEEESGETGPMVNEEDIQHIVSSWTGIPVEKVSSDESDKLLKMEETLHKRVIGQDEAVVAISRSIRRARVGLKNPNRPIASFIFAGPTGVGKSELAKALAAYYFGSEEAMIRLDMSEFMERHTVSKLIGSPPGYVGYTEGGQLTEAVRRRPYTVVLFDEIEKAHPDVFNMMLQILEDGRLTDSKGRTVDFKNTLLIMTSNVGSSVIEKGGRKIGFDLDSDEKDSSYSRIKSLVIEEMKQYFRPEFLNRLDEMIVFRQLTKLEVKEIADIMLQEVFDRLKAKDINLQVTEKFKERVVDEGYNPSYGARPLRRAIMRLLEDSLAEKMLAGEVKEGDSAIVDVDSEGKVVVLNGQGGIPELSTPAITV

SEQ ID NO: 63255 - protein, 488 aa, Zea mays
  Clone ID: LIB3180-041-D12_FLI.pep
YDGGLTAAHHMDPSVSVCRLHPGVAVTGFCPACLRDRLSGLHPPSAADLRRCKSFSYARSAAAVEPQRRSCDLFRHGQPIAAAVPEEEEDQQEHGRSHSHQSKKSSSLGGLLGKKLQQWRRKNKKEPEMEVPSSWDARLGPVPALGRLPATMLSLPVEEDDDSMAAPAVPRSDGQIPVEEDYCYYYDNANNINAAAAVPGGSEQTRDYYLDSSSSSRRRRSVDRSTTSGRNSFSDANSSEAACRMMMMMNAAANGNARVSPAGIAAAESLHHYHESHHHHHHQSVLVHHQCYREEDEQQQEAYNLRAGDFSGSNGVPASKPNKKGIKGWSIWGLISKKSSSSRKHSAAGGGAVAGGGGEYEYPWPELRARGYNGQMLRCNSSISARSSFSGTGTGSGRRSVSGVDMRDKYNSNNGGLRTRRDEVLLERHLSTRSSSYSRSGHHDLDPAAMAPPQMGMQLSSRPPNIPRRSSSNSKHELGKTRRSTLGL

SEQ ID NO: 63256 - protein, 363 aa, Zea mays; identical to SEQ ID NO: 42242
  Clone ID: LIB3180-042-G2_FLI.pep

SEQ ID NO: 63257 - protein, 322 aa, Zea mays
  Clone ID: LIB3180-051-E8_FLI.pep
AYLFSLFSHLSQNLSVSRLSRAPFSHARPAPPPVAPPRPRPALEEPTPAATAAASPAPDRAPPRPRGGGGRGGRGGGMKGGSKAVVVAHKHAGVFISKSKEDALCTKNMVPGESVYGEKRVSVQNEDGTKVEYRVWNPFRSKLAAAVLGGVDNIWIAPGTRVLYLGAASGTTVSHVSDIVGPDGLVYAVEFSHRSGRDLVNMAKKRTNVIPIIEDARHPARYRMLVGMVDVIFSDVAQPDQARILALNASYFLKNGGHFVISIKANCIDSTLPAEAVFAAEVEKLKADQFKPAEQVTLEPYERDHACVVGGYRVPKKQKATS

SEQ ID NO: 63258 - protein, 136 aa, Zea mays
  Clone ID: LIB3180-055-B6_FLI.pep
SCFAEFQTLASPVAAAAEMAKSLRSKREKRLRTLRREIAEPFYDKKEAAKLTAQAAALAAPPLQVRGPPPSQDAGSSRGASSASAMDVEMSDEGNNRSKTFLKPLGIISKKKVQLHLKIKKDKRKARKKGKFSFKK

SEQ ID NO: 63259 - protein, 228 aa, Zea mays
  Clone ID: LIB3180-062-H8_FLI.pep
RFGKEEHYEWFKDFSHFRHLLAPLLSPSLSVLEVGCGNSRLGEDLLREGVAGGITCVDLSPVAVQRMRDRLAALGTKGVDAVVADMLDLPFEQESFDLVIEKGTMDVLFVDSGDPWDPNPTTVENVMKMLNGIHRVLKPEGIFVSIAFGQPHFRRRFFEAPEFTWSIEYSTFGDSFHYFFYTLKKGKRSLESSSYQNTLPSPVAPRINMVHEELESEDFIFLTNLDGL

SEQ ID NO: 63260 - protein, 140 aa, Zea mays
  Clone ID: LIB3181-001-B11_FLI.pep
RSMSLGVDFKYFNGYPGGILAPGRCFAWENSRYSMGDSGREPYMVVHNQLLAHAAAVQLVFWINFLLVGLYHGIWPRRRLAVGFKRAGPRRMLCCASVVNTSEIKGAVVALDEAEDFVVEVEAEVPDEGAVAEDPQHHRA

SEQ ID NO: 63261 - protein, 50 aa, Zea mays
  Clone ID: LIB3227-017-F10_FLI.pep
PSNLTIYHTRHENVYLIHSYIRWSINTLNKQNNIVTTVYQATNSIIIAQG

SEQ ID NO: 63262 - protein, 182 aa, Zea mays
  Clone ID: LIB3227-021-F11_FLI.pep
ARHRKHPPPSTSDITTTNSSSATAQALSPLMRRASWMSLGMMVTLLAWMAQRLVSSKSPTRYASAASCSAATAEDWNRRSVLKSCAISRTRRWEGSLRMSSSVLFWYLRISRSATVPGRKRCGFFTPPVAGADLRAALVASCFRGALPPVDLRAVCFVRAFGAERRREQSAHLDRAVAAARA

SEQ ID NO: 63263 - protein, 535 aa, Zea mays
  Clone ID: LIB3180-045-D9_FLI.pep
RRVLLVDGSLHNKLFPSTTSLHQELICFDLPSLHSTFLDLLNATIKGMRSQLLPHGASIIRLITEYFKIAKLPTLRTKTYSILQLLLTSMGVGTSLHLLEATVSNAVADLNDDGEINMTMINTNSSQLTNESSSKVYSKKRKQEPQMQNSTISGSEKVAISPRKRKGSSIPIASKGVAPESTGDVTLSTPHSVKIAALETLEVLLNVGGSLRMDRWRSEVDMLLINVARSACGMGGSYEQKPSTFGEPNISDFQLASLKGLLASFLSSHARPPYLANGIELFRKGKLEIGTKVAEFCSHALLALDVLVHPRALSLERTVPASSGFNYTAQKKTVFGAGTHQISPFGDQPQAMEVEDMYDDWLISNNNEPPEVPVNGSDAVVSKDVLVEDGKQLNPIAEDPKVDPPRITDAAQDAPASTKTDVKVVDAAAATAAKPNTAENPSSSNAVPSPVRTTDSDSRKHASFPEQDSPHENKSAAVHPGEASATPGVGSSHHRHQAPEARSASFTELFGSESGIESESEDLMPDIVDGDPDSD

SEQ ID NO: 63264 - protein, 969 aa, Zea mays
  Clone ID: LIB3180-050-C8_FLI.pep
EPVPQARATRAKEDESEVERERERKTLPRPGSRRRRKRRRPQRRHAREPRRSSTRAVPIRRPDRRISSPAPGPSIALSPCPCPSGGFIARAPAMSDLASSCKDKLAYFRIKELKDILNQLGLPKQGKKQDLVDRVLAILSDEQGQHHHGWGRKNALTREAVAKVVDDTYRKMQVCAPDLPSRSHSGSDFSHFRPKEEAPDFYHVDTKVRCLCNSTLLNDNMIKCEDGKCQVWQHITCVLIPDKPTEGAGPDIPPHFYCELCRLKRADPFWVTTGNPLLPVKFMSSGVGNDGASVPQIVEKTFQLSRADRETVQRQEYDLQVWCILINDKVQFRMQWPQYAELQVNGIPVRVMTRPGSQLLGINGRDDGPLVTTCSREGINKISLSRVDARTFCFGVRIVRRRTVPQVLNLIPKEGEGESFEDALARVRRCLGGGGATDNADSDSDLEVVTESVTVNLRCPNSGSRMRIAGRFKPCVHMGCFDLETFVELNQRSRKWQCPICLKNYSLENLMIDPYFNRITSLLHNCSEDVNELDVKPDGSWRVKGDAATRDLSQWHMPDGTLCDSKEDTNPGVVSVNEFKREGTSDGHRTLKLGIKKTPNGLWQVSSKPDDKKPVVRNHIQNNTGYSIPNIVPMISSPTGSCRDGEDVSVNQEGGGIQFDISLNQEFDSFAHNFGQTYNTEDRQQEPQHNAADVIVLSDSDEENDPIVRLPAVYANTPTNGDSFPFVTDAAVSGYPEGYQEDAGVGTSGLGLLSNNTGDFEINNWQMHSYPQPEQGFQFFGTDTDVGNPFVGPHNSFSITPEDYSLDCNVGIEDPSAAHDVSICRNSNDVHGSLVDNPLALAGDDPSLQIFLPSQPSTVPLQEELSERANTPNGVHPDDWRISLTLAAGGGGNEEPTSVDGLKSQPKVPSKEAGVEPLLDAASALPSMNNDRCNGSNLNPRRIENIFSHPRQPRSVRPRLCLSLDSDSE

SEQ ID NO: 63265 - protein, 568 aa, Zea mays
  Clone ID: LIB3180-053-B5_FLI.pep
AAAGAKPLPAATSTSVSFPATHQPACLLSSPAPGSLRRRDVAAMVSAPPAVGTAMPSLDFDTSVFNKEKVSLAGHDEYIVRGGRNLFPLLPEAFKGVKQIGVIGWGSQGPAQAQNLRDSLAEAKSDIVVKIGLRKGSKSFEEARAAGFTEESGTLGDIWETVSGSDLVLLLISDAAQADNYEKIFSHMKPNSILGLSHGFLLGHLQSLGLDFPKNISVIAVCPKGMGPSVRRLYVQGKEVNGAGINSSFAVHQDVDGRATDVALAWSVALGSPFTFATTLEQEYKSDIFGERGILLGAVHGIVEALFRRYTEQGMDEESAYKNTVEGITGIISKTISKKGMLEVYNSLSEEGKKEFNKAYSASFYPCMDILYECYEDVASGSEIRSVVLAGRRFYEKEGLPAFPMGNIDQTRMWKVGEKVRSTRPEGDLGPLHAFTAGVYIALMMAQIEILRKKGHSYSEIINESVIESVDSLNPFMHARGVAFMVDNCSTTARLGSRKWAPRFDYILTQQAFVAVDKDAPINQDLISNFLSDPVHGAIEVCAELRPTVDISVPANADFVRPELRQSS

SEQ ID NO: 63266 - protein, 433 aa, Zea mays
  Clone ID: LIB3180-054-F2_FLI.pep
VLVAKEGVSSSMFGRMPRKSSNNTKYYEVLGVSKTASQDELKKAYRKAAIKNHPDKGGDPEKFKELSQAYDVLSDPEKREIYDQYGEDALKEGMGGGSSSDFHSPFDIFEQLFPGSSTFGGGSSRGRRQKRGEDVVHTMKVSLDDLYNGTTKKLSLSRSALCSKCKGKGSKSGASGTCHGCRGAGMRTITRQIGLGMIQQMNTVCPECKGSGEIISDKDKCPSCKGNKVVQEKKVLEVHVEKGMQHNQKIVFQGQADEAPDTVTGDIVFVLQLKDHPKFKRMYDDLYVEHTISLTEALCGFQFVLTHLDGRQLLIKSDPGEVIKPGQHKAINDEGMPQHGRPFMKGRLFVEFNVEFPEPGALSPAQCRSLEKILPPKPGSQLSDMELDQCEETTLHDVNIEEEMRRRQQQKKQEAYDEDEEEDAQPRVQCAQQ

SEQ ID NO: 63267 - protein, 363 aa, Zea mays; identical to SEQ ID NO: 42242
  Clone ID: LIB3180-059-C2_FLI.pep

SEQ ID NO: 63268 - protein, 538 aa, Zea mays
  Clone ID: LIB3180-062-C12_FLI.pep
SGSCVQLPSQGDRWAGWHETQQNPCQSPEPQGSHPRQRHRTPTHLGGESEPQERRAMAAMMMATSESKSPARALRRLAGAAVAAVLLRRTFSASKCKTEARMATARMKLLRNRREAQVRQMRRDIAALLRDKQEDTARIRVEHVIREQNFMAANEIIELFCELIVTRLPIIAKQKECPADLKEGICSLIFAAPRCSELPELGRIRDIFEKKYGKDFVSAAVDLRPDAAVNNLLIEKLSIKKPSGQIKLKVLKDIAKEHQIDWDTAESEQELLKPPEELIKGPSTFLEASNMPVKNILTPYTVQPDPVNFSYRCSDDEYDDRGTMQFKDAASAARAAAESAERAASAAKAAADFVNNNNNNHPFDEDEDRKASTHEFTHTLKRQSMSNSSRSSLKEDANAFDEQKPHEGKTYSTRRFSGKNHVEYDKDGYPADLDSTKTRRRNCRAARKVHSEIKFDDSEGLCSESEGENDVEIQSVERLLPPKSELFSENRHSEDEEHDQDFPELPKTNLRSRVHPNMPLDYETLTARFEALKSGKLP

SEQ ID NO: 63269 - protein, 234 aa, Zea mays
  Clone ID: LIB3181-003-H4_FLI.pep
EKGSHSVSQNCNSNDIHIHLLAFRLHCRSLLLFDDALVAHIDTVQKLSDILLLHMAFLVDEGGGARYELDVVSVKDELILDLLGPEDGHAIKHVHLPDLLLAEEVSDLDGGVAVGDGGVDGEVGVDEPHLVAVALGDPLDEVLDVGDGGADGGHGAAGAEPGVHLELAAGLLQLEVEVEVLEVAGELAAGPLHRDQLGGHRDRDALRDVHRLRRQDRLHLARWVLRRRSGGGGG

SEQ ID NO: 63270 - protein, 281 aa, Zea mays
  Clone ID: LIB3182-012-B9_FLI.pep
SETHQAKHISNNLTTMATKILSLLALLALFASATNAFIIPQCSLAPSSIITQFLPPVTSMGFEHPAVQAYRLQQAIAASVLQQPISQLQQQSLAHLTIQTIATQQQQQFLPALSHLAMVNPAAYLQQQLLASNPLALANVVANQPQQQLQQFLPALSQLAMVNPAAYLQQQQLLSSSPLAVANAPTYLQQQLLQQIVPALTQLVVANPAAYLQQLLPFNQLTMSNSAAYLQQRQQLLNPLAVANPLVAAFLQQQQLLPYNQFSLINPVLSRQQPIVGGAIF

SEQ ID NO: 63271 - protein, 599 aa, Zea mays
  Clone ID: LIB3182-016-H7_FLI.pep
HRKSHRSDRGEQRPPPDSGARRSRAVVCLPPSLYPPRIRATATAGREMEAVRGDGRWCVVTGGRGFAARHLVTMLLRSGEWRVRVADLGPAITLDRDEEEGFLGAALREGQAVYVSADLRDKAQVARAFEGAEVVFHMAAPDSSINNFHLHYGVNVDGTKNVIDACIRCKVKRLIYTSSPSVVFDGVHGIFNADESMPYPDKFNDSYSETKADAEKLVMRANGREGLLTCCIRPSSIFGPGDKLMVPSLVAAARAGKSKYIIGDGNNYYDFTYVENVAYGHVCAEKTLSSEDGAKIAAGKTYFITNMEPIKFWEFMSLILEGLGYERPSVKIPVSVMMPVAHVVEWTYQKFAKYGMKVPQLTPSRIRLLSCNRTFSCSRAKEQLGYEPLVSLKDGVKRTVESYSHLQAQNHRSISKASIFLGNGNLAKTVLWEDAKQTVTVLLLLAVIYYHLFTCGYTFITAMAKLLSLTALFLFIHGMLPSNLFGHKVEKLEASNFHITQAQAHHIAHSISSNWNSLVGALRSLCRGNDWLLFLKVSLSLLVVSILSSMSSQAAFKIGTALVFTGFKAYEKWEDSIDSMVGDACTILLHFGSAKESSS

SEQ ID NO: 63272 - protein, 501 aa, Zea mays
  Clone ID: LIB3227-011-C12_FLI.pep
RSLFINEGKHRGEATIEAVRLIADHVKLNDCQLHPDSIEVFLSLRFDEDIGKDEIQEEKVKPKRNKRWQKNQEVPKQLPVNDKKKTRQELISKARKEVDADLRAVSFTLDPKERKGIQKETLSALFETYFRILKHSMAASNSRTKVNNVSPGGSHPLLTPCLEGLGKFSHLIDLDFMGELISCLKKLSGYSDRQDEIPNDNALSVSERLQCCIVVFKVWRSNLEALNVDLQDFFVQLYNLILEYRPDRDHGEVLADALKTLLWEGRQHDMLRAAAFIKRLATFALSFGSAEAIAALVTLKHLLQKNSKCRNMLENDSGGGSLSCLVAKYNPEATDPYLSGALASVLWELSLLEKHYDISVSSMASNILSMANLNPTQNPVPILNVNPLEAYRDLSLERELSKPASKALPLNLKRKRRAKEFVALSPDVLQKADCSVDKDELEEKLQSHFSVLRGISENERLRAELNHTLSSINMYKEYKKQKRKNMKVKTGRKKNSKALAV

SEQ ID NO: 63273 - protein, 108 aa, Zea mays
  Clone ID: LIB3227-012-C1_FLI.pep
PSSISGLHYCQKRTSFFNCCVLLARISTYGREVGGKLCIHIHTPRQQRLLAYSSALRMMRWLFPALPCTHNATARAVQVTTALLAYRESHYMLTSLPPYRLFLPNQTQ

SEQ ID NO: 63274 - protein, 86 aa, Zea mays
  Clone ID: LIB3227-012-C7_FLI.pep
CQNQEQHHELSYMWHRCVNYISHDTCTSSITTEISSRLTVHRRPTAAAARPEGGGLIDYRSGRRMGLKPKGIVPHAGGRANQASKL

SEQ ID NO: 63275 - protein, 261 aa, Zea mays
  Clone ID: LIB3227-025-F11_FLI.pep
ALDWSEICSDPSLTRSRLTIFTGGGGAPGQGAAGLQTHRKSRGRSVPGGGVRRRRVPLRRGRRPRRRRRRGGQQQPQLGPEGRRPVGARRSDRHQTGVQEAGENQPRRLRDLHVLRAVPDVPGAHSPGQDKEGGVRSQVGGRRCRRAQRRPPRGLQRVLPEIRRGDEAGRGRGGNPDRRGGVPEDQGQVSQQVNALEMAPGGPRMAVASGMIAVSKLLSGGPLIRGHMSRDRNKFRPPPPYSISHGLLYQRVIFFNVRLDL

SEQ ID NO: 63276 - protein, 217 aa, Zea mays
  Clone ID: LIB3227-041-F7_FLI.pep
RVATSERSPARQKSERRAEMAGSQSQAMLEKMELRQSYRNVWHTDLTNAVAADLPWCCLSLWCGPCVSYMLRRRALYNDMSRYVCCAGYMPCSGKCGESQCPEVCLATEVFCCFGNSVASTRFLLQDEFNIQTTQCDNCIIAFMFFLQQLACICSLVACIVGNSELSEAAHVISCMSNLVYWTVCSCMQTQHKVEMDKRDGTLNTMSAPPMQQMSRW

SEQ ID NO: 63277 - protein, 253 aa, Zea mays
  Clone ID: CC-ZMPO148024B07_FLI.pep
ALIPRVEPTRGAGSRSRPWRSCRPRSPPWRRRGRSSGAGTSSSAAPPWARSSPPRPCSRRGWTSSSTSPPPSAARTAAPSATPWPSSSPSDHNSINDEKTDRGDAEEAQSKCHGAAAATAVDPKRVKRILANRQSAQRSRVRKLQYISELERSVTSLQTEVSALSPRVAFLDHQRSLLTLGNSHLRQRIAALAQDKIFKDAHQEALRKEIERLRQIYQQQSLKSGREPDAAPSVRDDKDMIGSEGTAAPGPPS

SEQ ID NO: 63278 - protein, 329 aa, Zea mays
  Clone ID: CC-ZMPO148032D08_FLI.pep
RIARSAPAQRLPAMASLTLPPAPPNPRQDAIDLQKAFKGFGCDSTTVINILTHRDSVQRGLIQQEYRAMYHEELSHRISSELNGNHKKAMLLWILDPAGRDATVLREALSVDTMDLRAATDIICSRTPSQLQIMKQTYYARFGTYLEHDIGHHTSGDHQKLLLAYVGIPRYEGPEVDPTIVTHDAKDLYKAGEKRLGTDEKTFIRVFTERSWAHLASVSSAYHHMYDRKLEKVIKSETSGNFEFALLAILRCAENPAKYFAKLLRKAMKGLGTDDKTLIRVVVTRTEIDMQYIKAEYFKKYKKPLAEAIHSETSGNYRTFLLSLVGPGH

SEQ ID NO: 63279 - protein, 317 aa, Zea mays; identical to SEQ ID NO: 60440
  Clone ID: CC-ZMPO148045B04_FLI.pep

SEQ ID NO: 63280 - protein, 134 aa, Zea mays; identical to SEQ ID NO: 43265
  Clone ID: CC-ZMPO14820001B03_FLI.pep

SEQ ID NO: 63281 - protein, 120 aa, Zea mays
  Clone ID: CC-ZMPO14820005C01_FLI.pep
IMLWNAVIFGPDDTPWDGGTFKLTLQFTEDYPNKPPTVRFVSRMFHPNIYADGSICLDILQNQWSPIYDVAAILTSIQSLLCDPNPNSPANSEAARMFSENKREYNRKVREVVEQSWTAD

SEQ ID NO: 63282 - protein, 326 aa, Zea mays
  Clone ID: CC-ZMPO148038H03_FLI.pep
LHLEEGAVKMRLRLLACCYNDPEMRIDPDTVYPIRPDCRDDAPKTRFKPRPGLTLSPKRWKLLHNEEGCVDIAGMIKRVQRGGVHPTIKGEVWEFLLGCYDPKSTTEQCNQLRQQRRLEYEQLKAKCREMDTAVGSGRVITMPVVTEDGQPIENPNGGASGSEQKNSGAPLPKEVIDWKLTLHQIGLDVNRTDRLLVYYERQENLARLWDILAVYSWIDKDIGYCQGMSDLCSPISIILENEADAFWCFERLMRRVRGNFKSTSTSIGVRAQLTTLSTIMKSVDPKLHEHLENLDGGEYLFAFRMLMVLFRREFSFVDTMYLWELM

SEQ ID NO: 63283 - protein, 660 aa, Zea mays
  Clone ID: CC-ZMPO148043A07_FLI.pep
DGQRPGREAMSWLRSAVHRAVEASGGHSSLLTRTVRTSLDTVVHHAGQAVAGGARLITGSRSYKSAKVAAKRLEEEALSCKGDERVQLLRRWLVALKETQRATTAVREPQFGDNPDQTAPLLDLYIDYDSGAEPMNFFHVFLYSQALECVVLSLIREAPTEEEVPLVSEVFGMCLSGGKDVHNALLSSVKDLARLFSSYSDEVLAKRDELLQFAQGAISGLKINADIARLDNEITQLQQQINSMDALHATSIVNQNKKAQTATEGFRKAVSEVRLCSRMEELLLKKKSIHPGDSLETHFEKVDKLKVLSESLANSSAKAEKRIMENRLQKEESLIFRVTKTNEVSGIEKELVAEISGLEEQRNQLEAELKKVNTKLKVATVKLKKTREERDQFDEASNQIVLHLKTKEDELSRSIASCKVEASTVSAWINFLKDTWKLQSLFEELREKQANEELDRCGLCFAKLMKYHVSASMEELSTSIDRIKTFVDNLKIFGNRSVSAEDGANGPSKQSNPRRYLEEEYLQTEKKVVAAFSLVDSIRAIYSSNQDYYKTSLCRRDDTEVKNLFTSIDNLRIEFESVPRPVLQIEIKEQAEKKKRSPSLKVSASPSHSRSDSPIAAQLRTRLPSESESELAKFDQEYKADEISGWEFDDLEDEPTPGFL

SEQ ID NO: 63284 - protein, 516 aa, Zea mays
  Clone ID: CC-ZMPO148067C11_FLI.pep
RGALRRTFSCLGDPDPPPRDRSSRMHGPYPTAAAAAASSSDDMAANGMKVALHRQVSGGSMKQNAELRRQASLESPRTGRATSRFLFGRQSSMDPNRRRGRSQSPVRAPEDLGVPDNLDATMQLLFFACQGDALGIEGLLRSGVDVNSINLDGRTALHIAACEGHRDVVRVLISWKANIDARDRWGSTAVADAKFYGHSRVYDLLKFHGAKVPRTKRTPMMVSAPAEIPEYELNPGEVQFRRGCDVTPGVYHIAKWNGTKVSVKILDRDGCSDQEAANSFRHELTVLEKVRHPNVVQFVGAVTQSIPMMIVSELHEEKDLSVCIQKKGKLKPQKVLRYGLDIARGMTYLHQCKPDPIIHCDLKPKHIFLDSGGQLKIAGFGVTRMSKVGTDKVRLIYHGALVDSFSYHTAPELYRNDAFDSSVDSYSFGFILYEMVEGSVRAPEDSGHSIRFEGLRPSLKGRLKGYPPDFKALVEECWHPQAMARPTFSEIIIRLDKIYAHFDKHGSWKDSLKLWK

SEQ ID NO: 63285 - protein, 160 aa, Zea mays subsp. mexicana
  Clone ID: UC-ZMROTEOSINTE003B12_FLI.pep
TSPIDCIRGMPAFLVAVLGGVVLWSNHKTTAFPGAPVYGLHDVDELLLVLQGPVDLVVVSSPEINHDVLVPEEEHHCRRVVQLIHGVEIRNLCDVNKVDDRKVLYGLSYCRQHFIHLHAGLVPVMAEADDDEALLLGEDGLVHRPPRVQMRQQVRHLPPT

SEQ ID NO: 63286 - protein, 191 aa, Zea mays subsp. mexicana
  Clone ID: UC-ZMROTEOSINTE017E10_FLI.pep
DADAAPEKNLRMDSLRSVLESIQAMQIRPVVAQIITLGMILTSALILWKGLVVVTGSESPVVVVLSGSMEPGFRKGDVLFLHMNKDPVRTGDIIVFNVEGRDIPIVHRVIKVHERHDTVDSDILTKGDNNPGDDRVLYAHGQLWLQRQHIIGRAVGYLPYAGWLTIIMTEKPVLKYLLIGALGLLVVASKE

SEQ ID NO: 63287 - protein, 218 aa, Zea mays subsp. mexicana
  Clone ID: UC-ZMROTEOSINTE018G03_FLI.pep
ARSCAPPRSPRRLVPDLLLVSSLPDHVSILLARSCGNMGLTFTKLFSRLFSKKEMRILMVGLDAAGKTTILYKLKLGEIVTTIPTIGFNVETVEYKNISFTVWDVGGQDKIRPLWRHYFQNTQGLIFVVDSNDRDRVVEAKDELHRMLNEDELRDAVLLVFANKQDLPNAMNAAEITDKLGLHSLRQRHWYIQSTCATTGEGLYEGLDWLSNNIANKA

SEQ ID NO: 63288 - protein, 254 aa, Zea mays subsp. mexicana
  Clone ID: UC-ZMROTEOSINTE008C05_FLI.pep
EGYDHVIKNNNNLCRGLFQWEQSRLTKEQKHPGYLQGRRRTAGLNLLTCASYIIGVASTQVRILWNPVLASVRARHLVPLQNKLSFLVSLALLMCSFIFPSNNRSTANTEDIRNSMHSCHHHAIFFYSRSHIGNLMEEVRLPVPAVEGLGDDVAGNAELGPAVLAAVDVAVQVHQEQPPHPRLLSHLPNSTPTQSLSAIPAPGEGHSNVPMPRLEIPSSGFLESEIGRREIYWEWELSSVYCLWLVCVCSGGGV

SEQ ID NO: 63289 - protein, 227 aa, Zea mays subsp. mexicana
  Clone ID: UC-ZMROTEOSINTE009B07_FLI.pep
EYHALCKEPPPQVVARPLPNDILEWHYVLEGSKGTPFEGGYYYGKLKFPPDYPFKPPSISMTTPSGRFAPHKRICLSMSDFHPESWNPMWSVASILTGLLSFMMDDALTTGSIKTSDAEKRRLAKASLVYNCESKNCPHFRKLFPEYVEKYNQQLQLENTAAEPVPQENPAPAPSPAVQQAPTVANRAQPLAEARRDKNQKKAVPFWMVLVMFSVFGAVMALPLMQL

SEQ ID NO: 63290 - protein, 185 aa, Zea mays subsp. mexicana
  Clone ID: UC-ZMROTEOSINTE024H12_FLI.pep
NRLLVLQQAIQFKVQLHLDMVLHHPSLAMAPNLHSKVDMVRALMGSLLHRARNLLHLHLMDKLRLLDLLRVVMGSMVTANLHTVHHQLTLVHPLQATRAMANSSLMAMLMVVEAMGSLQPTLLKQQLLLHPRITLPHLPRPLEQQLRQLLTTMGVPKLLRKLDLQQLIGNKLFTSLCCVVSSTVA

SEQ ID NO: 63291 - protein, 177 aa, Zea mays subsp. mexicana
  Clone ID: UC-ZMROTEOSINTE010G05_FLI.pep
SGYADVNDNSFLKVNFQMEQGLPLVPKSLTFNRVKCAVSKGIKLGPTFLVTSLTGGSIVGDMAPYQAFAIGGLGSVRGYGEGAVGSGRLCLIANCEYTIPLVKHLEGSIFMDCGSDLGSARHVPGNPALRQGKPGFGIGFGYGLHFNTDLGQIRVDYAMNAFNRKTIYFGINSSGGS

SEQ ID NO: 63292 - protein, 417 aa, Zea mays subsp. mexicana
  Clone ID: UC-ZMROTEOSINTE011D10_FLI.pep
RMIYTAIDTFYLTDEQLRDSPSRKDGIDEATETALRVYGCDLIQESGILLRLPQAVMATAQVLFHRFYCKKSFVRFSAKRVAASCVWLAGKLEESPRKSRHIIFVFHRMECRRENLPIEFLDVFSKKYSELRHDLIRTERHLLKEMGFICHVEHPHKFISNYLATLEAPPELTQEAWNLANDSLRTTLCVRFKSEVVACGVVYAAARRHRVPLPEDPPWWTVFDADEAGIQEVCRVLAHLYSLPKAQYIPVYKDNDSFTVKRISDLQASKESPARAVASDKGTPVPSSSSQEKDPVAKTILNKVKEKSDDEGKPLPAEFDGKENPVANSKNDKSDSGVDRSRERERSRGRERDARGRDSDRDSRGRESDRERDRRRCSRERSSGHSDKEKSRRHSSRDRADYYNSHSSREKDRHRHH

SEQ ID NO: 63293 - protein, 370 aa, Zea mays subsp. mexicana
  Clone ID: UC-ZMROTEOSINTE011G04_FLI.pep
FGCGKTVISQALSKYSNSEAVVYVGCGERGNEMAEVLMDFPQLTMTLPDGREESVMKRTTLVANTSNMPVAAREASIYTGITIAEYFRDMGYNVSMMADSTSRWAEALREISGRLAEMPADSGYPAYLAARLASFYERAGKVKCLGSPDRNGSVTIVGAVSPPGGDFSDPVTSATLSIVQVFWGLDKKLAQRKHFPSVNWLISYSKYSKALESFYEKFDPDFIDIRTKAREVLQREDDLNEIVQLVGKDALAESDKITLETAKLLREDYLAQNAFTPYDKFCPFYKSVWMMRNIIHFNTLANQAVERAAGTDGHKITYSVIKHRLGDLFYRLVSQKFEDPAEGEEALVGKFKKLYDDLTTGFRNLEDEAR

SEQ ID NO: 63294 - protein, 227 aa, Zea mays subsp. mexicana
  Clone ID: UC-ZMROTEOSINTE020D09_FLI.pep
RLVIPGDGRGVLVGVGVSVGVGVALLVVPAHPQRAHHRVLGARRRALHLLSGLLDDAAGLVLAGDGGVLGVLPGLGGLLLGGLHGVGCLLLGGLRRLAGLLLGGLRRLAGLLLGGLRRLAGLVLGGLRRLAGLVLGLVGLLAQVAAGVGRLLLGGLLGVLALARRVRRPVLGVLRRVLGRPHRLPGLLLGAGLGLAGLVASLVLVGSHGRVSQATQARSAQLRSLWN

SEQ ID NO: 63295 - protein, 467 aa, Zea mays subsp. mexicana
  Clone ID: UC-ZMROTEOSINTE011H03_FLI.pep
SLSKEMLDSKVEINEQNCDINTENVAFVAITEPLDVPSQADTVEESINDGSWVNRQNNGSNLNAMPYAMNVEPLDPPKPSTVSEPVDSGVQVNEDRPSISLVEFLAARNASSCKNGTSEVCLGNVAAEKLSFERTSAGAGKNSKNISQLLVKKALEVDADKRFFLFSVPIGPKFEGSSSPTPRTSGHNINNTEEAVSDKECGVKDTKNGFRLSLGMDSIFSQYHATDSKKNLSENSSLDRILDESFSKQNGEHSRSSLSSMVSFSGASAKEPVVLGSGTSENYVEDLTGVRDRPVATLNSGEELQKVCDLLYEFKDEMLGASAAKCINKSSPSLEALLAESSDSEAQISDLEGTDSGAGIGSGRLFSTLSSSDDDDASAADESLVDVADLTTPPEPYTSVPSDEPLVDMADLTNPSGIDASSVNQPPADVVDLLHTSNEPLVSLDDLPNHPEMSFGGSSGEHTDSLI

SEQ ID NO: 63296 - protein, 156 aa, Zea mays subsp. mexicana
  Clone ID: UC-ZMROTEOSINTE059E01_FLI.pep
VARLPFSDNCFICPCSWNGCPVCLVQLLKHAKQRVPRVELPDQLFVNIAVAIGAQVNKFLCFLQDVSCERNLKHFVVAIAGLWAAAVIGSWCNFLTVIYVGFVCVHTLPVLYEKYEDQVDDFLYSLLGLLRDQYQKLDQGVLSKIPKGNMKAKKNE

SEQ ID NO: 63297 - protein, 294 aa, Zea mays subsp. mexicana
  Clone ID: UC-ZMROTEOSINTE103A03_FLI.pep
RNRAAPDKTEEPPPRPTGHRVAEEGIQRAMSTDVPMSPELEQVDGEIQDIFRALQNGFQKMDKIKDSSRQSKQLEDLTAKMRECKRLIKEFDRILKDEEKKNTPDVNKQLNDKKQFMIKELNSYVTLRKTYQSSLGNKRIELFDTGNDQVAEGTPVQMASEMSNQELISTGRKQMDQTDQAIERSKMVVAQTVEVGAQTAATLTQQTEQMKRIGNELDSVHFSLKKASQMVKEIGRQVATDKCIMAFLFLIVCGVIAIIVVKIVNPHNKNIRDIPGLAPPAMNRKLLSIDAAGL

SEQ ID NO: 63298 - protein, 313 aa, Zea mays subsp. mexicana
  Clone ID: UC-ZMROTEOSINTE060C04_FLI.pep
FVQPGAGCSADPEIIVKHVEFVQDTMEVDTIESCRTKLMGDNIASTSDTSTKLACSSLLHGRELSGTSLEDQGPGHSSESLANEKYDMKYHTDCTYGVNDKTLLVQEILSGADIWPEDKDSDGSAGMQVDNEASRGTSESLECPPCGVDDKAPSDLSFYSSHKLCTDVAILPKVVEGKVEQSRDENIVQTVENEAESVDTKTRTSISVEPMSHGQEISSTIHTRNTGASCESDELKEQNSKNTDASLDKSVAKMHELLKFPYPSGKVEMSTIRPEKRRHKLRLHHPAYLPFLGFLWSACFKKKICKVARKRKS

SEQ ID NO: 63299 - protein, 454 aa, Zea mays subsp. mexicana
  Clone ID: UC-ZMROTEOSINTE078E10_FLI.pep
FPFSIALSWKQDSQNSAPQQTLVFPKGNVIPSIKALTFYKSSTFEVDVLYVDTCDSQIPQKISTYTIGPFQPSKGERAKLKVKVRLNIHGIVTVDSAMMLEEDVAVPVSSANEAPKDTTKMDTDDAPSDPVSGTDVNVHEPDTTEAAPAAENGTQNPEEKSVPMETDAKVEPSKRKVKRTSVPVHALVYGALAAADLQKAVEKEYEMALQDRVMEETKEKKNAVEAYVYDMRNKLYDRYNDFVTPEEKEGLIGKLQEVEDWLYEDGEDETKGVYISKLEDLKKIGDPIEARYKESTERGSSVDQLVYCINSFREAALSSDQKFGHIDISEKQKVINECSEVENWLRERKQQQDALPKHTDPVLLVSDLKKKAEALDRFCKPIMTKPKPAPKPQTPPPHTPPPQPEAQASDPQTPEQQQSGTGAAGEPGSEGGVQQASGEQMDMDRPDDSADVAA

SEQ ID NO: 63300 - protein, 72 aa, Zea mays subsp. mexicana
  Clone ID: UC-ZMROTEOSINTE129E03_FLI.pep
TFLVLYWSGDFLNIQLHSIRRLTNAAQAWITYEEARENSAEALVQQKKLTSLWEQRAWELGWRPKNVKALLK

SEQ ID NO: 63301 - protein, 386 aa, Zea mays
  Clone ID: UC-ZMFLMO17034B07_FLI.pep
SLSGHTAPTDDDNSRQRLGQPATAARSRLTTNRLVHLLDLGARAAAASGGVLVHAASAAHVFTRALVHLGDDGVAEALQLLHLVLELVRLGELVGVQPADGRVDGVLDLLLVIGRQLGRNLLVLDRVAHVVGVVLQRVLGLHLLLVLLILRLVLLSVLNHLLDLLLGETALVVGDCDLVLLPRCLVLGRHVQDAVGVDVKAHGDLWHTTGCRGDAGELELAQQVVVACPGPLTLVDLDQDTGLVVRVGGEYLLLLGGDGGVPRDQHCHNSSSSLQTQGQRGDVQQKQVLHLLIALTAQDGSLDSSTIGDSLIGVDVLAQLLAVEEVLEQLLHPGDPSGATNKYNVMDGALVHLGIPQALLNRLHALPEQVHVELLKPGTGDGGVEV

SEQ ID NO: 63302 - protein, 162 aa, Zea mays subsp. mexicana; identical to SEQ ID NO: 59134
  Clone ID: UC-ZMROTEOSINTE047H10_FLI.pep

SEQ ID NO: 63303 - protein, 417 aa, Zea mays
  Clone ID: UC-ZMFLMO17034D10_FLI.pep
VAARWLSLEMASAGVAPSGYKNSSSTSIGAEKLQDHMNELKIRDDKEVEATIINGKGTETGHIIVTTTGGKNGQPKQTVSYMAERIVGQGSFGIVFQAKCLETGETVAIKKVLQDKRYKNRELQTMRLLDHPNVVALKHCFFSTTEKDELYLNLVLEYVPETVHRVVKHHNKMHQRMPLIYVKLYMYQICRALAYIHGTIGVCHRDIKPQNLLVNPHTHQLKICDFGSAKVLVKGEPNISYICSRYYRAPELIFGATEYTTAIDIWSAGCVLAELMLGQPLFPGESGVDQLVEIIKVLGTPTREEIKCMNPNYTEFKFPQIKAHPWHKVFNKRMPPEAVDLVSRLLQYSPNLRCTAVEALVHPFFDELRDPNTRLPNGRFLPPLFNFKPHELKGVPADIVAKLVPEHAKKQCSYVGS

SEQ ID NO: 63304 - protein, 331 aa, Zea mays subsp. mexicana
  Clone ID: UC-ZMROTEOSINTE063B10_FLI.pep
FLHSSPLMQDTTGSVKLWEITRGAVIEDFGKVSFEDKKKELFEMVSIPAWFTMDARLGCLSVHLDTPQCFSAEIYAVDLNVAGAQEDLKINLAQETLRGLLIHWSKRKQKSSSHSLCNGDSSIGKDVPSKDSPRSRPEVDDATQNHATHVLPSFEFSTVSPPSIITEGSSGGPWRKRITDLDGTEGDLPWWCVDCITLNRYPKENTKCGFYLHPAEGSPAPNITQGKLSAPRILRIHKVANYVVEKLVLDKPLDGGSDAFVMGLSSAQSQLSVLDSSSRLGLKPWQKTKPCIEILCNNQVLSPEMSLATVRTYIWKKPEDLILHYRVVQPR

SEQ ID NO: 63305 - protein, 352 aa, Zea mays subsp. mexicana
  Clone ID: UC-ZMROTEOSINTE084C03_FLI.pep
RTRFCDAMAVERDIFGISGPTYLKSIDWNCEHNRRSVAASLVQAVYVLERDRQLNHQSFEALAPAWWEFLHFELIRKLIDDADMSIFGAIFEFNPPREEASGANAPRFVIAFRGTITEKDTISRDLSLDLHLVQNGLHRTSRFNIAMQAVQNVASVFPGSTIWLAGHSLGAGLAILTGRNMVKKGVLLESFLFNPPFVAAPVERIRDERVKHGFRIARSVITAGLTIAMKAKTEGSSQRSVADESFSILSSWTPYLFVNPGDHICSEYIGYFQHRKNMEDLGAGFIEKLATQNSIGDLFFKALGWESEPLHLLPSADLIVNVSPSSDFKYAHGISQWWQPELNLQCSKYRYS

SEQ ID NO: 63306 - protein, 168 aa, Zea mays subsp. mexicana
  Clone ID: UC-ZMROTEOSINTE115E11_FLI.pep
QMGLSLHRSTLRLELTKEPLLLIGSLEATVPKFGRCVNELELDLLQRQPGSLLQEGLAEGHHPLLWTHTASLDHQVVTLHDTIVGEATHGSDVLLGPVKLCGGIVGLLSSLADLVDLLVHLSAVVVPILTSTGNRIRDPSRMPCTDTSNLAETPVGFAGKAGDTPTSD

SEQ ID NO: 63307 - protein, 135 aa, Zea mays subsp. mexicana
  Clone ID: UC-ZMROTEOSINTE129G01_FLI.pep
ATCTGTATSTAGRASSSRSSSCSSASRTCSSGQTSRDAYVSEFESGKLNYVFDELIDAYIFFDKDGDGMLRRRDVTHRMNEASHQERTPSHITAQLFKEMDLNRNGKVNLKEFLYSMIRWAGLGTEDDGSDEASP

SEQ ID NO: 63308 - protein, 860 aa, Zea mays
  Clone ID: UC-ZMFLMO17001A10_FLI.pep
DIHVAAMGASRKLQGEIDRVLKKVQEGVDVFDSIWNKVYDTENANQKEKFEADLKKEIKKLQRYRDQIKTWIQSSEIKDKKALMDARKQIEREMERFKVCEKETKTKAFSKEGLGQQPKTDPKEKAKAETRDWLNNVVSDLESQIDNFEAEIEGLSIKKGKQRPPRLVHLEKSITRHKAHIKKLESILRLLDNDELSPEQVNDVKDFLDDYVERNQEDFDEFSDVEDLYSTLPMEKVEALEDMVSLAPSSLVKGVASVPTTAVSSTKSSIATSLTQPTVSTAPSQSTSQDQTEDTASQESNSESVPQTPPPKGGNSGPSIPAVPIAVSTGSAAISVLAETISSPVRPIVPTTVATILSSAIPRSAPENTSTVTSIPANLSITLKDDESMSFPPRRPSPAITEIGIGRGIARGTTSQALGTAPITIGPVPGNGSVSALPGINDLSKRNILNTDEKINSGGLSQQLVMPLGSKVQPQQVPRTNDAISSESANTNESPILGGRVFSPPVVSGVQWRPLGAAAFQNQSEISHFRGRPEISADHREKYIQRLQQVQQQGGSLLNVSHITGINQKQFPTQQPNPLLQQFNSQSSSISSQVNLGVQGTDAGHIKSEEEEQLLAEDGVESSATTGANKQTSEDDTKIPYSNPSAPAAESNQLPRDTDPSPGQPLQPGMSSSGVGVIGRRSVSDLGAIGDNLTGTSASSGHDQLYNLQMLEAAFHKLPQPKDSERAKTYIPRHPAVTPASYPQVQPSIVSHPSFWERIGSDTLATDMLFFAFYYQQNTYQQYMAARELKKQSWRFHRRYNTWFQRHVEPQVTTDEYERGSYVYFDFHVTEDGSGWCQRIKNDFTFEYNFLEDELSVQTN

SEQ ID NO: 63309 - protein, 401 aa, Zea mays subsp. mexicana
  Clone ID: UC-ZMROTEOSINTE042A05_FLI.pep
DTHGYVGADLAALCTEAALQCIREKMDIIDLEDETIDAEILNSMAVSNDHFKTALGTSNPSALRETVVEVPNVSWEDIGGLENVKRELQETVQYPVEHPEKFEKFGMSPSKGVLFYGPPGCGKTLLAKAIANECQANFISVKGPELLTMWFGESEANVREIFDKARQSAPCVLFFDELDSIATQRGSSVGDAGGAADRVLNQLLTEMDGMNAKKTVFIIGATNRPDIIDPALLRPGRLDQLIYIPLPDEQSRLQIFKACLRKSPVAKDVDLNALAKYTQGFSGADITEICQRACKYAIRENIEKDIERERRSKDNPEAMEEDEVDDIAEIKAAHFEESMKYARRSVSDADIRKYQAFAQTLQQSRGFGSEFRFPDQPTAAAAAADPFASAAAAADDDDLYS

SEQ ID NO: 63310 - protein, 459 aa, Zea mays subsp. mexicana
  Clone ID: UC-ZMROTEOSINTE065G02_FLI.pep
LDFPNIVIKGSELQLPFQACLKIEKFGDLILKATEPQMVLYNIYDDWLKSISSYTAFSRIVLILRALHVNNEKAKMLLKPDKTIVTEPHHIWPTLNDEQWLKVECALRDLILSDYAKKNNVNTSALTQSEMRDIILGAEIAPPSQQRQQIAEIEKQSRETTQLTAVTTRTTNVHGDELIITTTSPYEQQAFASKTDWRVRAISATNLYLRVNHIYVNSDDIKETGYTYIMPKNILKKFICIADLRTQIAGFLYGLSPQDNPQVKEIRCIAIPPQHGTHQMVTLPANLPEHEFLNDLEPLGWMHTQPNEAPQLSPQDLTSHAKILENNKQWDGEKCIILTCSFTPGSCSLTAYKLTPSGYEWGRSNKDNGSNPHGYLPTHYEKVQMLLSDRFLGFYMVPDNAPWNFNFMGVKHDPQMKYNMKLGMPRDFYHEDHRPTHFLEFSNIEEGEAAEGDREDTFT

SEQ ID NO: 63311 - protein, 457 aa, Zea mays
  Clone ID: UC-ZMFLMO17001E03_FLI.pep
LISYILLSKLAYSVLVKDAISFIQNLLGAHVEVENLRIFTPVCLDYSLYFDGVNLACSTIDNIVAFLFPTEFSKQNDRMRFFKGSKVEVLQEAEVPFGSWRPGEIISGNGHTYLVRYDESPVDSSVAVERMPRRLIRPSPPTDDPVRWSLGSILEAFDSYSWKVAEVVRVLKKNQYLVRLLGSSLELSAHASDLRLRKLWLDDRWIVTQKYSARCLDGAFRGQSEDGNLDCNLRKDSHIQLENRNAFEGDTSRGMKRKSSAISTHPHCSVISKRLQCSDATKRFWTLNRDGRHTKLVDRGFFPLAEKVDAVDSPCLMLRGKYMHASHKGHTRTTEEFSDTESTSSSVGSSSPNSTPHRSQYYNLVNQSGDICSRTDGDEAFTSERETSEHGNNGSRGETHLLELHAYRATMLALYACGSISWEQEALLTNLRLTLNISTDEHLAELRSLVTHAVTSR

SEQ ID NO: 63312 - protein, 263 aa, Zea mays subsp. mexicana; identical to SEQ ID NO: 61917
  Clone ID: UC-ZMROTEOSINTE031H11_FLI.pep

SEQ ID NO: 63313 - protein, 471 aa, Zea mays subsp. mexicana
  Clone ID: UC-ZMROTEOSINTE042E09_FLI.pep
ENAFWALTGIMDDYFDGYFSEEMIESQVDQLVLEELVRGRFPKLVNHLDYLGVQVAWVTGPWFLSIFMNMLPWESVLRVWDVLLFEGNRVMLFRTALALMELYGPALVTTKDAGDAVTLLQSLAGSTFDSSQLVLTACMGYQAVGEARLQELRNKHRPSVISSMEQRAKGLRVWRDTDRLASRLYNFKRDTEPLVSLSEQSNDLTDGDKNQEANCSNVDDMYHGLTVNSEIDSLPDPKDQVVWLKGELCQLLEERRSAVLRADELETALMEMVKQDNRRELSAKVEQLEQELSELRQALSDKQEQEQAMLQVLMRVEQEQKVTEDARIFAEQDAAAQKYAAHILQEKYEGAMASLAQMENRAVMAETMLEATIQYQSSQQKAQLPSPSPSPRTPTRDASPGQGNQDSSQEFQPRRISLLAPFSSLGWRDKNKGKQNGSDESTNGKLNNSTDQGVETPKKRRRKEGRLAKRD

SEQ ID NO: 63314 - protein, 440 aa, Zea mays
  Clone ID: UC-ZMFLMO17037E09_FLI.pep
RLLACVLTPANIRPRKPHNLRPSHPRSPLLSSPRSRRSMAATAAEEMERMVEAEWEEGKQGMRKRKRYGLVEYRALPAYLRDNEYIHRHYRCEWPLPQVLLSAFSIHNETLNVWTHLIGFFIFLALTIYTATQVPNAVDIRSLQHLPDVLRKADIHKIQAELVSCLPSLPHLSDLQKLKDELKTSWNSMEVLPSLSRWHLLELLANCLPHRFTHPNETSLSVLQSMKEDLASLIAPQLIRPIARWPFYAFLGGAMFCLLASSTCHLLSCHSRRLAYIMLRLDYAGIAALIATSFYPPVYYSFMCYPFFCNLYLSFITILGVATIAFSLLPVFQNPEFRTIRACLFFGMGASGVIPVLHKLVLFWHQPEALHTTGYEILMGLFYGLGALVYAARVPERWMPGKFDIAGHSHQLFHVLVVAGAYTHYHAGLVYLKWRDLQGC

SEQ ID NO: 63315 - protein, 238 aa, Zea mays subsp. mexicana
  Clone ID: UC-ZMROTEOSINTE042G06_FLI.pep
AARADKEQAEEELCQATMGISRDSMHKRRATGGKQKAWRKKRKYELGRQPANTKLSSNKTVRRVRVRGGNVKWRALRLDTGNYSWGSEAVTRKTRILDVVYNASNNELVRTQTLVKSAIVQVDAAPFKQWYLTHYGVDIGRKKKTPAAKKDNAEGQEVEAAAEETKKSNHVTRKLEKRKEGRTLDAHIEEQFGSGRLLACISSRPGQCGRADGYILEGKELEFYMKKLQRKKGKSAVA

SEQ ID NO: 63316 - protein, 368 aa, Zea mays subsp. mexicana
  Clone ID: UC-ZMROTEOSINTE049F11_FLI.pep
HRPETTPSSSPQGCRRGDSVHPPPLSSLLPPVPGLARRGAMSRSLSMRGSMRSRRDLPPPEKTIERLESMVDGGNFYEAQQMYKSTSARYIAAQKYSEALDILQSGALVQLKHGQVTCGGELAVLFVDTLITGELPYSEQIFDRIRKMYEAFPRVTVPHFLGDDYDDEGHQLSEAISAAKVRAESCSSFMKAAIRWSAEFGTSRNGSSELHVMLAEYIYSESPETDMTKVSSHFVRGNDPKKFASMLVNFMGKCYPGEDDTAIARGVLMYLSQGNLRDANLLMDEMNEQLKSANSEFPKTDLIQFIKYLLPTLERDAYPLFRTLRQKYKTSTDRDAVFQELLDEIAAKFYNIQRQNPLEGLFSEMFKI

SEQ ID NO: 63317 - protein, 216 aa, Zea mays subsp. mexicana
  Clone ID: UC-ZMROTEOSINTE066E02_FLI.pep
ANPQHVSISGLTAAAAALRGYARRRGLRRHFRRQALTRYSAMVFLEAEMSWNVLISPSQLDRKGLLLRKAIIVRLLEDVTNRRASKEHGYYIAVNQLKAISEGKVRELTGDVLFPVSFTCITQKPMKGEVMVGHVDRILKHGVFLKSGPVESIFLAEKSMSNYKYIGGENAMFMNDHSKLEKDTAVRFKVLGFRWMEADRQFQLLATIAGDFLGPL

SEQ ID NO: 63318 - protein, 206 aa, Zea mays subsp. mexicana
  Clone ID: UC-ZMROTEOSINTE117B10_FLI.pep
RIASEGLKHRVFEVCLADLQGDEDQAYRKIRLRAEDVQGRNVLTNFWGMNFTTDKLRSLVKKWQTLIEAHVDVKTTDNYMLRLFCIGFTKRRPNQVKRTCYAQASQIRQIRRKMVEIMINQASTCDLKELVSKFIPEVIGKEIEKSTSSIFPLQNVFIRKVKILKAPKFDLGKLMEVHGDYKEDVGVKLERPVEGDEAGQEVAAAE

SEQ ID NO: 63319 - protein, 663 aa, Zea mays
  Clone ID: UC-ZMFLMO17009C11_FLI.pep
EAAQPGRWKRGRTEPSWGLAPRRILEIKRMGSLEARYRPTGAAEDTAKRRTQKSKSFKEVEKFDVFVLEKSSGCKFRSLQLLLFAIMSAAFLTLLYTPSVYEHQLQSSSRLVNGWIWDKRSSDPRYVSSASIQWEDVYKSIQNLNVGEQKLSVGLLNFNRTEFGAWTHMLPESDFSVIRLEHANESITWQTLYPEWIDEEEETEIPSCPSLPDPSFSRATHFDVVAVKLPCTRVAGWSRDVARLHLQLSAAKLAAATARGNRGIHVLFLTDCFPIPNLFSCKDLVKREGNAWMYKPDVKALKEKLRLPVGSCELAVPLNAKARLYTVDRRREAYATILHSASEYVCGAITAAQSIRQAGSTRDLVILVDDTISDYHRKGLESAGWKVRIIQRIRNPKAERDAYNEWNYSKFRLWQLTDYDKVIFIDADLLILRNIDFLFAMPEITATGNNATLFNSGVMVIEPSNCTFQLLMEHINEITSYNGGDQGYLNEIFTWWHRIPKHMNFLKHFWEGDEDEVKAKKTRLFGANPPILYVLHYLGRKPWLCFRDYDCNWNVEILREFASDVAHARWWKVHNKMPKKLQSYCLLRSRLKAGLEWERRQAEKANFTDGHWKRNITDPRLKTCFEKFCFWESMLWHWGENKNNSTQSSAVPATPAATSLSSS

SEQ ID NO: 63320 - protein, 346 aa, Zea mays
  Clone ID: UC-ZMFLMO17037G12_FLI.pep
PPFRPLSLASSISPPTMGKEKSHINIVVIGHVDSGKSTTTGHLIYKLGGIDKRVIERFEKEAAEMNKRSFKYAWVLDYDVRISEVERLFGKYGRVERVDLKTGFAFVYMEDERDAEDAISRLDGIDFGRKGRRIRVEWTKEDRTVGRKSSSRRSPTNTKPTKTLFVINFDPINTRIRDLERHFDKYGRVANVRIKKNFAFIQFEVQEDATRALEGTNGSHFMDRVISVEYALRDDDEKGERGNGYSPDRRGRERSPGRRRSPSPYGRGRERGSPDYGRSKERGSPDYGRGGRSPDNGRGVSPAGGGRGDHARGGGRSPDYDRQRREASPPGYDRSPSRSPGREARE

SEQ ID NO: 63321 - protein, 469 aa, Zea mays subsp. mexicana
  Clone ID: UC-ZMROTEOSINTE032F10_FLI.pep
LPPPRSRSAPVASQFGSSHTSAKMREILHIQGGQCGNQIGAKFWEVVCDEHGIDPTGRYTGSSDLQLERVNVYYNEASCGRFVPRAVLMDLEPGTMDSVRTGPYGQIFRPDNFVFGQSGAGNNWAKGHYTEGAELIDSVLDVVRKEAENCDCLQGFQVCHSLGGGTGSGMGTLLISKIREEYPDRMMLTFSVFPSPKVSDTVVEPYNATLSVHQLVENADECMVLDNEALYDICFRTLKLTTPSFGDLNHLISATMSGVTCCLRFPGQLNSDLRKLAVNLIPFPRLHFFMVGFAPLTSRGSQQYRALTVPELTQQMWDAKNMMCAADPRHGRYLTASAMFRGKMSTKEVDEQMINVQNKNSSYFVEWIPNNVKSSVCDIPPRGLSMASTFIGNSTSIQEMFRRVSEQFTAMFRRKAFLHWYTGEGMDEMEFTEAESNMNDLVSEYQQYQDATADEEEYEDEEEVQADDM

SEQ ID NO: 63322 - protein, 150 aa, Zea mays subsp. mexicana
  Clone ID: UC-ZMROTEOSINTE066F12_FLI.pep
DPSRRSEVVAGAGGRARSNMSWQAYVDDHLLCDIEGQHLSAAAIVGHDGSVWAQSENFPELKPEEVAGMIKDFDEPGTLAPTGLFVGGTKYMVIQGEPGVVIRGKKGTGGITIKKTGMSLIIGIYDEPMTPGQCNMVVERLGDYLIEQGF

SEQ ID NO: 63323 - protein, 248 aa, Zea mays subsp. mexicana
  Clone ID: UC-ZMROTEOSINTE117C12_FLI.pep
AYALVSAVALIQLVRIQRRVPEFGWTTQKVFHLMNFLVNGVRALVFGFHVHVFLLRAKVYKLVLLDLPGLLFFSTYTLLVLFWAEIYHQARSLPTDKLRPAYIAVNTIIYVVQVCIWIYLGINDNAVVELASKIFIVAVSFVALLGFSVYGGRLFVLLRRFPIESKGRQKKLYEVGTVTAICVTCFLIRCVVVALSAFDADVSLEVLDHPVLDFFYYMLAEILPSALVLFVLRKLPPKRVSAQYHPIN

SEQ ID NO: 63324 - protein, 219 aa, Zea mays subsp. mexicana
  Clone ID: UC-ZMROTEOSINTE033C03_FLI.pep
HSRSRRKFEDEDQLHCGRTSGMEGQFQVGKEEVIQAWYMDDSEEDQRLPHHREPKEFIPLDKLSELGILSWRLNADDWENDENLKKIREARGYSYMDICDVCPEKLPNYEAKIKNFFEEHLHTDEEIRDCLEGCGYFDVRDQDDQWIRVAVKKGGMIVLPAGMYHRFTLDSDNYIKAMRLFVGEPVWTPYNRPHDHLPARKEYVEKIINRGGNQAVEAR

SEQ ID NO: 63325 - protein, 289 aa, Zea mays subsp. mexicana
  Clone ID: UC-ZMROTEOSINTE044C05_FLI.pep
GNSMNYIESIPPLNGGNYELWREKLELALALLDIDLAITDPCPIAPVDPVQEENESDDDFNARVRNHAPIKMKYDLYKVKWDQSNRKCLMVIKSSIMDTIRGAFPACTTATEYLSKVESHFTISSKAYACTIIERLLTDKYTGGGVREHILKMASMASKLKPMEMALPDEFLVYLIFASLPKEFEAFEINYNSQPDNWGIEKLIAMCVQEEERIKASRGDSINYVGIYKAHGKAPQNDHHLKNKEVDMNACYWCEKSGHHQKDCPSFLKHLINKGIPYEEDPSKRRKMH

SEQ ID NO: 63326 - protein, 340 aa, Zea mays subsp. mexicana
  Clone ID: UC-ZMROTEOSINTE067C12_FLI.pep
GMASHHSEPLDPADADDPSDNNPELPCPSYHIVTKPGQLPVEFLEPSAAQKLVIGFDCEGVDLCRNGALCIMQLAFPDAVYLVDAIEGGKELIQACKPALESDHITKVIHDCKRDSEALYFQFGIKLHNVMDTQIAYSLIEEQEQEGKKKTSDDYNYISFVSLLADKRYCGILYPEKEEVRTLLRQDPNFWTIRPLSDMMVRAATDDVRFLLSIYAKMMEKLSKVSLWRLAVRSELYCRCFCLSDNQFADWSPLPPVPDDIEADVYVPEADILSVLDVPPGKMGRVIGRKGSTIMAVKECCKVEIHIGGAKGPPDRVFIIGPEKEVRKAEAIFRGRMLEF

SEQ ID NO: 63327 - protein, 176 aa, Zea mays subsp. mexicana
  Clone ID: UC-ZMROTEOSINTE093D10_FLI.pep
AGASPTSPAPYGGAPPPAMSKTAEFVVSKVDDLMNWARKGSIWPMTFGLACCAVEMMHAGASRYDFDRFGVIFRPSPRQSDCMIVAGTLTNKMAPALRKVYDQMPEPRWVISMGSCANGGGYYHYSYSVVRGCDRIVPVDIYVPGCPPTAEALLYGVLQLQKKINRRKDFLHWWTK

SEQ ID NO: 63328 - protein, 232 aa, Zea mays subsp. mexicana
  Clone ID: UC-ZMROTEOSINTE117E11_FLI.pep
RVEGLLPEKALDNLSYRFQSLVPGDAEHIQVYGPDALGSHPRDSQNMYHLLQGRPPMMAPHPMMDHIVNRKQPAPFDMAQSIHHDSHRSFPSNVNHMQHNLHGPGVPHLDPAGHIMRQHMSMPGRFPPEGLPRGVPPSQPVHHMAGYRPEMGNVNNFHMHPRQPNYGEFGLMMPGPSGPEVRGNHPEAFERLIQMEMSARSKQQQVHHPAMAAGRVPSGMYGHELDAKLRYR

SEQ ID NO: 63329 - protein, 671 aa, Zea mays
  Clone ID: UC-ZMFLMO17012H11_FLI.pep
HTHCISAYAYRKWKPMDLKQASSGTIFCLLLLFCVGCRCRPSEIEATQTAALKVDASPQLARKIPETLFGIFFEEINHAGAGGIWAELVSNRGFEAGGSHTPSNIDPWSIIGDDSSVFVATDRTSCFSRNIVALRMEVLCDECPAGGVGVYNPGFWGMNIEDGKAYNLVMYVQSPETKDLTVSLTSSDGLQNLASATITVSGTSNWTKVEQKLVAKGTNRTSRLQITTNKKGVVWLDQVSLMPEDTYKGHGFRTELISMLLDLKPRFLRFPGGCFVEGDWLRNAFRWRESIGPWEERPGHFGDVWHYWTDDGLGYYEFLQLAEDLGAAPIWVFNNGISHNDEVDTVAIAPFVKDVLDSLEFARGSADSTWGSVRAAMGHPEPFLVKHVAIGNEDCGKKFYRGNYLKFYNAIREAYPDIQMISNCDGSSRPLDHPADLYDFHVYTDSKTLFNMRSTFDRTSRSGPKAFVSEYAVWRSDAGRGSLLASLAEAAFLTGLEKNSDIVQMASYAPLFVNDNDQTWNPDAIVFNSWQHYGTPSYWMQTIFRESSGAMIHPVNISSRYSSSLAASAITWQDAENSFLRVKVVNFGSDTVNLTVSTSGLGASVNALGSTATVLTSGNVMDENSFSNPNKVAPVKSQLSNAAEQMQVTLAPHSFTAFDLALAEPKLVAEI

SEQ ID NO: 63330 - protein, 234 aa, Zea mays subsp. mexicana
  Clone ID: UC-ZMROTEOSINTE033D05_FLI.pep
RSRRERKTPKVEMAAAVRRAEELVEREMGGRDASHDAAHALRVRDLALSLAAEEGLSAPDRLLTVELAALLHDVGDYKYTKNNVEDMSVVEMFLQEVGLDEGQKDEIVAIIKGMGFKNEVSNKSIVEPTLEFAIVQDADRLDAIGAIGIARCFTYGGSKNSALHDPRILPRVSLSKEKYMSKEEKQTSINHFHEKLFKLKDMMKTEAGKRRAEKRHRFMEEFVAEFYEEWSGRA

SEQ ID NO: 63331 - protein, 395 aa, Zea mays subsp. mexicana
  Clone ID: UC-ZMROTEOSINTE044C11_FLI.pep
DSAERSLTNVASENREDKICHENTSSGDVCAEPKESMLLQENGIPVGTGNMVEEKVDAQPHVVVQQYKEETNLSPLTDALKKSLMQETTLSPFAASHKDSLTQEDGFMQEADLSPLTANHRDSLIEETKLLPTTAFHKVSLIEETGLTQTISYENNLKLQFKEGTKIGDIDMLPQDVDLIELPDQRKIIGHDVGAETVIEMEKGKLDQSSSLNLSDLDLVRGTEVAAVHNSPALVQPSAAGSSAESNNKQQEGPETFTGANASHTYDLCQIPLDNKDVQVIDIECGTPVEVDGFDLSKSKNEMMCSSMDSMMDPGHGIHTDILPGIQDGYSLAFSDFLGSDIPCYPSMQSDLHAGIGANDSEGIAVMDDPIYGSLSDIGFMDVWGQPTQDYDKFF

SEQ ID NO: 63332 - protein, 154 aa, Zea mays subsp. mexicana
  Clone ID: UC-ZMROTEOSINTE097F02_FLI.pep
RVLAATVAHFGKLDILVNGAAGNFLASPEDLTPKGFRTVLEIDTLGTYTMCYEAFKYLKKGGPGKGPSTGGLIINISATLHYSASWYQIHVSAAKVPGSSLNHSLIRENNWSKQIRLYRLGLIASQDHWLWSGEQIMTLESTGLHLDQFKTPRG

SEQ ID NO: 63333 - protein, 157 aa, Zea mays
  Clone ID: UC-ZMFLMO17016A12_FLI.pep
YIVLWTNVLCLSAGNRKNPIVNVLARAAKTLLSLGAPDSVRWCTGQCPVRQAGSSEVAALGNSPATYGYNSPDCPVSQRSAGPTVGRAICAGHVAKPTARRGHRTVRCAPDMSGAPTALRLPTVDCTIFGRESGTRQCPVCTGLSGAPVDRRQDQSS

SEQ ID NO: 63334 - protein, 179 aa, Zea mays
  Clone ID: UC-ZMFLMO17043C05_FLI.pep
TGKLFHFASSSMKQVIDRYDSHSKTLQKSEPQSSQLQSHMDDGTCARLKEELAETSLKLRQMRGEELQRLSVQQLQELEKTLESGLGSVLKTKSQKILDEISGLERKRTQLIEENSRLKEQVTRMSRMETQLGADPEFVYEEGQSSESVTNTSYPRPSTDTDDCSDTSLRLGLPFFSSK

SEQ ID NO: 63335 - protein, 214 aa, Zea mays subsp. mexicana
  Clone ID: UC-ZMROTEOSINTE058G06_FLI.pep
NEYYFRTEKVFSLKSFSKLPSIFIKWPESSILWSSATERDGPVQPQRRQPEGKARAHGQPREDDQLLQRVRCQEPEVHGIRVVGGDEVEGFESSDGTEAVVRVCVVDDKLKAKLDILVNPSKTVADYRTHITGASKKDLEGVTSSLVDVQKSLKRMLSKGNILIGHSLHRDLCALKIDYSQVIDTAYIFKYANLPTTASPSLNSLCKAILEYSV

SEQ ID NO: 63336 - protein, 251 aa, Zea mays subsp. mexicana
  Clone ID: UC-ZMROTEOSINTE075C10_FLI.pep
KLSISTASASGVNPFVGEAMGSAQDPFYIVREEIQESIDKLQSTFHRWEQTASNTGEYVHLTKELLISCESIEWQVDELEKTISVASRDPAYYGLDEVELSRRRNWTGSSHKQVGTVKRAIEKGKSNATTSKYQDTSRTNHYSAQDNDDFLSSESDRQLLLMRQQDEELDELSESVQRIGGVGLTIHEELSGQERILNDLSLEMETTSNRLDFVQKRVAMVIKKAGIKGQIMLIVFLVVLFIILFVLVFLT

SEQ ID NO: 63337 - protein, 140 aa, Zea mays subsp. mexicana
  Clone ID: UC-ZMROTEOSINTE120G02_FLI.pep
RALRHAAQELLRRAAGKWQGHRRRVRAAGQHGGHPQGAGRLPRRHDHARAQPRRQGAVRARVPRARQGRWLLRLQGHLHLRQRLGHRVHQVNTATTVAAMRWLACLVLVSYVAVVVFFSLSRMHVLLLNFLSSYHALWLA

SEQ ID NO: 63338 - protein, 181 aa, Zea mays subsp. mexicana
  Clone ID: UC-ZMROTEOSINTE044H09_FLI.pep
QRGSRGSTGSGSSKGKMSSAFSGDETAPFFGFLGASAALVFSCMGAAYGTAKSGVGVASMGVMRPELVMKSIVPVVMAGVLGIYGLIIAVIISTGINPKAKPYYLFDGYAHLSSGLACGLAGLAAGMAIGIVGDAGVRANAQQPKLFVGMILILIFAEALALYGLIVGIILSSRAGQSRAD

SEQ ID NO: 63339 - protein, 269 aa, Zea mays subsp. mexicana
  Clone ID: UC-ZMROTEOSINTE059B10_FLI.pep
DSEPVYTLTPVSRLLIGSQSSQLAQTPLAAMVLDPTIVSPFFELGAWFQHELPDPCIFKHTHGRGIWELTKDDATFDALVNDGLASDSQLIVDVAIRQSAEVFEGISSLVDVGGGIGAAAQAISKAFPHVKCSVLDLAHVVAKAPTHTDVQFIAGDMFESIPPADAVLLKSVLHDWDHDDCVKILKNCKKAIPPREAGGKVIIINMVVGAGPSDMKHKEMQAIFDVYIMFINGMERDEQEWSKIFSEAGYSDYRIIPVLGVRSIIEVYP

SEQ ID NO: 63340 - protein, 388 aa, Zea mays
  Clone ID: UC-ZMFLMO17205C07_FLI.pep
LERQILEKEKEEEKKRMSSQKKTADEERVRLLNEQRQREQDRIRREIEEKNKAEAKKLLEDLNKAGKKHVVVEGELTKEAIMELARNEQLKERHEMEKKLQKFAKTMDYLERAKRQEEAPLIEQAFQKRLEEEKILHEQEQLREIELSKQHHASDLQEKNRLSRMLEHKNALQERIIQERAAEFGRLKKERDERMNRLISSRKRERETVRKLMFYLNLEEQRIEMLREEEEARKREAEERRKREEAERKAKLDAIAEKQRLREIELEEKAKATREKLLKGSEAVRAPDSAPVAQPPRESAAAPAAAAAAPAPAPSKYIPKFKRGGDSSSIPSGSRDEDRWGSRGPLRQDGPPARLDAPSSRQDTDRWRGSRFSSNSTSSSSTWSRSRN

SEQ ID NO: 63341 - protein, 375 aa, Zea mays
  Clone ID: UC-ZMFLMO17052H10_FLI.pep
AGLVEKRRKRLLLFAILAATITYQAGLTPPGGFLVQDDNRTGRHAGDAVLLNNYPRRYTAFFYCNSVSFMLSIALIILLVNPNLYRPAIRSNALSVCTAAGLIGIMGGYAAGCTQHLKTSIYIFVLAAVVLSTVVFLAAVFLVIHLRKKDDNANSTNRAAAREAPGEEQEANAGAGVPNAMGGEQRGPQGAKARRKEKRAHAKRKYLMLLGILVASVTYQAGLAPPGGAWQSNDGTHTAGDPVMHDYRRARYLAFFYSNSTSFVASVVVVVLLLPESLHKKWWWLGVMNATIVLDLLGLLIAYAAGSSRTWKTSVVVSALVLAVLAYFAIHVLLSSCVRRGKKTAPDSPSPPQDQENREENEAATKEVELQGPAC

SEQ ID NO: 63342 - protein, 375 aa, Zea mays
  Clone ID: UC-ZMFLMO17122F08_FLI.pep
SDHNNNVTRKTIRIRNNDLHHLYRANIEPTKHVRTTTVAGREQTAEHRARVHGSAPKRRDGGSSVPALPPAAVGVVSAVVPEGAAADGVDDDDEDEEDDADDGDALPVPLERGHHAGLARLAVVAERRGVVAPGLAVRVRRVGGHRRPVRAADVGVAAAGGGLAAARLDGGEAGTHELGDGLVLVLQALADLGVLEAAPDPVPVPGVLDALLQPVGVVPEAVLLVSAAGDGLAGAPVGDDEGEDGEAEEDEDEDEHGEEVGPEQPGDAAAGADEARQGDGEEEGPQRDDGRREVALALGAVGAVAQPDARAQDRDGEQEGDEVEDPDQVVAQPERHGRWPPPRASWSRGWVGSWGAAGRVRAVLLGSMVTRDGDA

SEQ ID NO: 63343 - protein, 285 aa, Zea mays
  Clone ID: UC-ZMFLMO17159C09_FLI.pep
TTSPGQLFRPASLSIPSAQPAQPSQSTSSSSFSNSFSSGLTGFGQPAQIGSGQQSAFGKPAQIGAGQHAGFGQTAQIRPGFGQPAQIQSGFGQSAQIGTGQQSGFGKPAQIGAVQSGFGQPAQFAAQQTLGSVLGSFGQPPQLGGIGSGRFGGFSSASTSAGFSSLSSGGGFAAAATGGGFAALASKSGGFVGAASSGGGFGGASQGGGFGSGGGGFGSFGGNQGAGFSAFGASGAGRPAADFLTQMRRCQQQHRRLVLDSLRVSLQGDQLAKAFMALSSGSMAA

SEQ ID NO: 63344 - protein, 361 aa, Zea mays
  Clone ID: UC-ZMFLMO17206B11_FLI.pep
NKGGLLLIFHRMESLWKLTYLLEPASLALIATAISVAYASASRALDYGKEMERNLDFSEASITLDRSQALMIPLASSCSLLLMFYLFSSVSHLVTAFTAVASAMALFFCLSPYVTYLKMQFNLMDPFVSRCCSKSFTRLQGLLMLFCIATVLAWLVSGHWLLNNLLGISICIAFVSHVRLPNIKICALLLACLFVYDIFWVFFSERFFGANVMVSVATQKASNPVHTVANKLSLPGLQLITKKLELPVKLVFPRNLLGGIVPGSNPGDYMMLGLGDMAIPGMLLALVLFFDNRKFKDVNFPPDVSPPKRRNYVWYAVTGYGIGLVAALAAGILSQSPQPALLYLVPSTLGPVMYSLRCTKN

SEQ ID NO: 63345 - protein, 272 aa, Zea mays
  Clone ID: UC-ZMFLMO17078E03_FLI.pep
SKSRTRRRFHNEATNFGSGAGRTRQQARHNPSRVGRRGIRAAWRGRSSARTTGISAGLRRPWGRAAAKDRTKLGGAVELRASSGMESSQSSKSTTTRVLLQDGPSPAMTGTGAWPHSRGEHTRRPALDLGAGTRASGLEDHDRRRKDMDTVRRASMGDVHGFEAATAKAGAQGEQHRYPDEREVEGRAGGGRWRESARHRRPHQGTAMANREAHARGNSAAGRARQPWRAGAGAGRAGGWQREREAREGAMAGARRIQRRAGQASRDPDAER

SEQ ID NO: 63346 - protein, 456 aa, Zea mays
  Clone ID: UC-ZMFLMO17123G06_FLI.pep
QIFVKTLTGKTITLEVESSDTIDNVKAKIQDKEGIPPDQQRLIFAGKQLEDGRTLADYNIQKESTLHLVLRLRGGMQIFVKTLTGKTITLEVESSDTIDNVKAKIQDKEGIPPDQQRLIFAGKQLEDGRTLADYNIQKESTLHLVLRLRGGMQIFVKTLTGKTITLEVESSDTIDNVKAKIQDKEGIPPDQQRLIFAGKQLEDGRTLADYNIQKESTLHLVLRLRGGMQIFVKTLTGKTITLEVESSDTIDNVKAKIQDKEGIPPDQQRLIFAGKQLEDGRTLADYNIQKESTLHLVLRLRGGMQIFVKTLTGKTITLEVESSDTIDNVKAKIQDKEGIPPDQQRLIFAGKQLEDGRTLADYNIQKESTLHLVLRLRGGMQIFVKTLTGKTITLEVESSDTIDNVKAKIQDKEGIPPDQQRLIFAGKQLEDGRTLADYNIQKESTLHLVLRLRGGQ

SEQ ID NO: 63347 - protein, 367 aa, Zea mays
  Clone ID: UC-ZMFLMO17054H01_FLI.pep
PLLHSHSIHLPATRHFLREKLRNGTASQSQKLPRLAEREPRRACACAGVRAVPEQGTSLRGRQEPAGAVQAAGQRAPHVPQRRRAAGPHPGDHPLVRPLHAGAEGRGHRLPPVAHHHRHLADGAAVPVRVAVVGHHRPAVPVQGAERRRQRRRQRAGGARGAGRRRRVLAGEAPRAVPAPAAGGAGRAGGEGRGRAGAHRAGRGRGRVLHEPLRPARLRRRGRGRLRLGRQRRNAVPRAVRVAVPPAAVRAPGAGARAAERRRRHGWHGGQHRQHGRRRGHQPVPRRVLPGRQGRAARGRHRLHGGLRQRRLPRFRRQPGGGRHHGGELQCQWCQREEVPASRSVRPCNLYVFDFGLTPKETVLSTV

SEQ ID NO: 63348 - protein, 101 aa, Zea mays
  Clone ID: UC-ZMFLMO17078H04_FLI.pep
GSKFSCKLRSKKPSPPALGTRPLPLLPPMERGSVGGISDVELSVGRFSSHANSRSSEAIQLLRVVSCGKIWSNFAMSEVAMLGSLTMPDMVVDVSVVPDTN

SEQ ID NO: 63349 - protein, 360 aa, Zea mays; identical to SEQ ID NO: 53639
  Clone ID: UC-ZMFLMO17079D11_FLI.pep

SEQ ID NO: 63350 - protein, 469 aa, Zea mays
  Clone ID: UC-ZMFLMO17107E01_FLI.pep
LTVRLSLSLSLRINQSHGLPAASSAAPILRILPRLDLPVPRVPTEGGGRLMGTGAGSARALAVAFAVSLLACSGAVAVARAQDTERIEGSAGDVLEDDPVGRLKVYVYELPTKYNKKMVAKDSRCLSHMFAAEIFMHRFLLSSAIRTLNPEVADWFYTPVYTTCDLTPWGHPLPFKSPRIMRSAIQFISNRWPYWNRTEGADHFFVVPHDFGACFHYQEEKAIERGVLPLLRRATLVQTFGQKDHVCLKEGSITIPPYAPPQKMKTHLVPPGTPRSIFVYFRGLFYDTANDPEGGYYARGARASVWENFKNNPLFDISTDHPPTYYEDMQRAVFCLCPLGWAPWSPRLVEAVVFGCIPVIIADDIVLPFADAIPWEEIGVFVAEDDVPRLDTILTSIPMEVILRKQRLLANPSMKQAMLFPQPAQAGDAFHQILNGLARKLPHGEDVFLKPGQKVLNWTEGPRGDLKPW

SEQ ID NO: 63351 - protein, 676 aa, Zea mays
  Clone ID: UC-ZMFLMO17133B06_FLI.pep
ISLSSRHCWLGCAAARSGEGRTAMASAAAVIASPAPGAAAAEPAAWLVDERDGFITWLRGEFAAANAIVDHLIFHLRSISEPGEYDHVFSLVQQRRHHWPHVIHMQQFFPVSDIAFALQQASWRRHAPPAQALGAGASPAALPPPPPRRASFSQSHHSHQHHRHGAHYRPDPARGAATAATGSEKDGREVHNNKEGRGLKEAGNVVDTKSLRLDSPITDEGEEKSKLQAVSEESSKMVATPVEYSTNEIIDGSMVNTVEGLKVYEGLLNVTEANKILSLVNETRASYRRGGLEARQKVIIAKRPMKGHGREIVQLGVPIIDGPPDDENLRETRVEAIPGLLNDLFDRLSQQEIIPFKPDYCVIDIFNEGDYSHPHQSPSWYGRPLCTLCLTDCDMVFGRYISGEKGDHRGPLKLSLATGSLLLMQGRSIDCAKRAIPATRKQRVILNFGKSVARKHIPAESAWSTPLTPPMPWGQSSRPVNGSRHPQSPKHYGYAPISGVLPAPPVGAHHVPPSDGMQPLFVAPAPISAAAIPFTPTVPLQNTSAAWIQEVTPRPAPPRFPGPGTGVFLPPGSGHPLPHQMMPASHGHGEPNSPQGSSAYLHSKVNGKETSNGNLSPKNSPRKTSCTAEEKPECNGSLNGGGGSADEKSTVGMEQQNGVQKNVGSSKVQPHGHATE

SEQ ID NO: 63352 - protein, 328 aa, Zea mays
  Clone ID: UC-ZMFLMO17181A07_FLI.pep
APPASRLRPRASVSTSPAPSKDYEFTDGNGEVELRLDIQKLGIASSKDVFVDVDDTSLLIRAKSDGTLRTLMNVQTLFDRIKSSETIWFIDEDQLVVNLKKVEQELKWPDVDESWESLTSGITQLLTGISVHIVGDSTHINEAVAKEIAEGIGYLPVCTSELLESATEKSIDTWVASEGVDSVAEAESVVLESLSSHVRTVVATLGGKQGAASRFDKWQYLHSGFTVWLSVSDASDEASAREEARRSVSSGSVSYAKADVVVKLGGWDPEYTRAVAQGCLVALKQLTLADKKLAGKKSLYIRLGCRGDWPNIEPPGWDPESDAPPTNI

SEQ ID NO: 63353 - protein, 213 aa, Zea mays; identical to SEQ ID NO: 62941
  Clone ID: UC-ZMFLMO17181D02_FLI.pep

SEQ ID NO: 63354 - protein, 142 aa, Zea mays
  Clone ID: UC-ZMFLMO17213A08_FLI.pep
TIDLTTSREEQNSKRWNMFTTCGSARTPAWPPASDAWLSSFVWRPWARRPAPVEPLTLPPSPFPASPNAEAATSDALATRANERAEQAQRLEHGEELAQCEQRAYPARWVHRLHAPSHFLQPPPPPPIPSSPSTWAVRTGAS

SEQ ID NO: 63355 - protein, 478 aa, Zea mays; identical to SEQ ID NO: 57943
  Clone ID: UC-ZMFLMO17169C06_FLI.pep

SEQ ID NO: 63356 - protein, 356 aa, Zea mays
  Clone ID: UC-ZMFLMO17218G11_FLI.pep
EGEESCQGMEALRKQASKFKEQVAKQQQAVIKQFSTTGYERSDSIVIDEVELQRHQQLEKLYTSTRSVRDFQKDIVRAAEGLVSIGNKHIEVGTKFSEDCYRYGSENNASDEALRKAASLYGGALRNIEKEYEDFNRILSSQTIDPLRAMAMGGPLEDARGLAQRYSRMRHEAEILSTEIARRKARVREAPIAEHTTKLQQSEARMIEHKASMAVLGKEAAAALAAVESQQQRVTLQRLVGAAEAEKLFHLRLAAILDDVEAEMSSEKQRRESAPPIISSHKRAEKAQYFLAEVMHNFNGTTEKELSLIVGDYVVVRQIAPNGWAEGECRGKAGWFPAAYVERRENIPPNKVFPQV

SEQ ID NO: 63357 - protein, 415 aa, Zea mays
  Clone ID: UC-ZMFLMO17066A04_FLI.pep
MWCASCLASACAGCTCNLCTSAASAVSRRSARLAYCGLFAASLILSFLLRQFAAPLLKHIPWINAFDQTPPEEWFQMNAVLRVSLGNFLFFAIFSLVMIGVKDQNDRRDAWHHGGWIAKIAVWAVLIVLMFCVPNIVITIYEVLSKFGSGFFLLVQVVMLLDFTNNWNDSWVEKEERKWEIALLVVTVVCYLSTLAFSGVLFMWFNPSGHDCGLNVFFIVMTLILAFAFAIVALHPQVHGSVMPASVISVYCAYLCYTSLSSEPDDYECNGLHRHSKQVSMSALILGMLTTVLSVVYSAVRAGSSTTFLSPPSSPRSGAKNPLLGDEEDGKGDGKESEPRPVSYSYTFFHLIFALASMYSAMLLTGWTSAASESSELMDVGWTTVWVRICTEWVTAGLYIWTLIAPLLFPDRDFS

SEQ ID NO: 63358 - protein, 128 aa, Zea mays
  Clone ID: UC-ZMFLMO17115F08_FLI.pep
NDRILIIHLYICFISQKGGKLRLTASGRNTLTESLSLLRRPRGVTSQTLTRKSQPFHEYLVPADLTVGQFVYVVRKRIKLSAEKAIFIFVKNTLPPTAALMSAIYEENKDEDGFLYMTYSGENTFGLF

SEQ ID NO: 63359 - protein, 582 aa, Zea mays
  Clone ID: UC-ZMFLMO17151A11_FLI.pep
TTTTTGITTKPPKYHPRTKGKGRSFRRRAEAVAMDPNGGGDTILGDPLLPLSQSSKQQQDPLAGVSDYLGRSVHRGSSGGWRSALFVVGVEIAGSFAYFGISANLITYLTGPLRQSNASAAASVNAWSGTACIMPLLGAFLADAYLGRYRSVIIACTLYVLGYGMLTLSATVPALQPSHMPCREDGVSSSSCQPGWPQVAFFYVSLYLIAIAQGADKPCGLAFAADQFDAEHQGERASRGSLFNWWFFCMAIGISVSVSVVGYIQEYVGWGLGFGVPCAIVLCAFLVFLLGTPTYRLYAPTPEAKSPFRRLARGLAANANKTGGLSASHSEEEEAAADARCVLRLLPIWAASLAYGVVYAQIMTLFNKQGRTLDRHIGDGLELPPAALQTLGPASILLFVPVYDRAVVPALRWATGNPSGLSMLQRVGAGMAVSLAGVAVAALVEARRLAMAREHGLVDDPSATVPMSWAWIVPQYAMMGVADVLAVVGLQELFYDQMPDGLRSLGLALYLSVMGIGGFISSLLISLIDGVTGSGGGDSWFADNLNRAHVDYFYWLLAGLSAVELALFLYFARSYVYKHKPN

SEQ ID NO: 63360 - protein, 302 aa, Zea mays; identical to SEQ ID NO: 63211
  Clone ID: UC-ZMFLMO17192F11_FLI.pep

SEQ ID NO: 63361 - protein, 344 aa, Zea mays
  Clone ID: UC-ZMFLMO17220E10_FLI.pep
DDGNAIQGRWMEMTTERKGSLGSGGVSFHLGVVEVDADHGLPEPRADVGQDGGVAVVGDCLDDGAGAARGVAALEDARADEDAVASELHHERGVGGRGDTPRGELHDGEAAQLLGLHDEVVGRGDALGVGEDLVVVHAAERADVAHDGAHVAHGLDDVARAGLPLGADHGGALAHPAERLAEVAAAADEGDAEVVLVDVVRVVGGGQHLALVHVVDAHGLQDLGLHEVPDAGLGHDRDGDGALDVADEARVRHARHAALRADVGGDPLQRHHGARAGLLREARLLRGHHVHDDPAPEHLRQPHLDGESRRLGLLGRLQQLRAVAAVHRHHAAAVGRHGFGSLVP

SEQ ID NO: 63362 - protein, 509 aa, Zea mays
  Clone ID: UC-ZMFLMO17066G01_FLI.pep
HTLSPEMAEEYNRVLAILDDLTAEQLGAKIREYKIVAPDTKNSLSDPYPFNLMFQTSIGPSGLSPGYMRPETAQGIFVNFKDLYYYNGNKLPFAAAQIGQAFRNEISPRQGLLRVREFTLAEIEHFVDPEDKSHPKFGDVSDLEFWMFPREDQMAGRSATRLKLGNSISEGTVNNETLGYFIGRVYLFLTQLGIDKDRLRFRQHLPNEMAHYAADCWDAEIECSYGWIECVGIADRSAYDLRAHSDKSGEKLEAHEKFAEPREVEKLVITPSKKELGLAFKGNQKLVVESLEAMTETEALDMKAALESRGEVEFKVCTLGKDVTIKKNMVSINIEKKKEHQRKFTPSVIEPSFGIGRIIYCLFEHCFYQRPGKTEDEQLNVFRFPPLVAPIKCTVFPLVKLEKFEAVAKKISKALTAAGISHIIDMTGNTIGKRYARTDEIGVPLAITVDHTTSVTVRDRDSKDQIRVDVDEVASVVKEVTDGQSTWADIMWRYPAHTASAADEDGAQP

SEQ ID NO: 63363 - protein, 271 aa, Zea mays
  Clone ID: UC-ZMFLMO17116H06_FLI.pep
VASGAPSPRHVRRAGGGHARPGGRGLGIVGLVDMAGVSKTALLKKFNNDLLINSHDINVTIEGDRLGVSWEKWTPKEHVGVMNFVLLLDDVWEPLLDDYRPPGMQSLKFRKFPLGNMSPKIEETKIQYTLKVIRGSPTAVQELFVQLGVNVDTSDWELKPLGCLSVTVATQDKFDHFPVTVADWGVQAIVSRLLSGYFHDEDISIIAEEDDGTLASSDGATLLQYVVEAVNGCLVDAPNYGRRFPEKKLGAHDVIPAIRKCISTGGLKGRF

SEQ ID NO: 63364 - protein, 150 aa, Zea mays
  Clone ID: UC-ZMFLMO17154E10_FLI.pep
LDPLRLIFFGFVCRFWLPSPSASPCSWCTWPPSPSPAPASTRPGAWAPPSSTTRTSPGTTTGSSGWAPSWALPSRPSTTSTSSGLAPSRPSAPSGATRDERGLAVEQWRATYGRGAVSEENAIIHRSTWVPVVGSGRLILFQQLLRCARA

SEQ ID NO: 63365 - protein, 273 aa, Zea mays
  Clone ID: UC-ZMFLMO17169F02_FLI.pep
RLPSCGLTRVAGESSQAAGALDAGRTLPRAPSRCELNHSLLMGSLSAPPVLSPLVSGLIFSSDRVLKSRGLTTSSVMKSCRLSELSNAEVSSLKARPRIDSSSMSIFGTVNPIVEGVCVRGDAADKQYQVKNCRWRPTFALETDGPSNTDGQDFDEDSGFLGRTRLGRLIQAAARELLDKLNSARTNSPTKIFLVLLGFYTANALATILGQTGDWDVLVAGVVVAAIEGIGMLMYRKPIARPPGRFQSLISMVNYWKAGVCLGLFVDAFKLGS

SEQ ID NO: 63366 - protein, 681 aa, Zea mays
  Clone ID: UC-ZMFLMO17197B05_FLI.pep
DPDIQTRTCLFFFLLNLKTYRYDRDTQTRTLAAVQHVTIARAAAPGYGRWARTTHTHTYQSFLSSSLLALIGCARTVHAAGCSPVEASREVREHVLSSDRDRDCDVLAVDRAVRGAVAAAVGHRRLTAGVVGGGGVVGGDEAAGGVVGGLPLLHPLDGRGRAAGDARAPRHRLPRRVLREEPLEYHPVVVGLLVDGRVVGEHLGGVVHHLIRHLLFSEGFEAIDPVVANAVTELFFLPVENMLGQVRVLVVVERLPHDPLLDAAQVLVVHFPFGVHAHGDVDELLVEERHADLQAPRRRGLVGAQAVVLVQGFHLAAGLPVELLLVGGEVEVEVAAQELVGALPGQHHLHAQRLDLASHQEHGRAGPDRRHVVRLVVVDHLLDRVDAVLYGEVELVMDGSEVVSDLSCGLQVRGALEADDKGVELGAELLGGLGLDEVALGDGGDERGVEAAGEEDPERDVSHEPLDDRLLEGLSEDERLVRRPGHLLLEPVRGVPPPEPAAGAGVEVARREDLEAHAILVQRLHLGRDPDGTVTAPADVERVDADGVARRHVGPVAGVVEHEREHPVQHVHEVLAVLLVQGDDDLAVTARAEVVCAGELLPDVLVVVDLSIGHHHDGAVLVEQRLVAGQRGDDGEPLLRQEVALVLVEARPVGAPVLQPSGAGEDASPLCLRPVGATEHG

SEQ ID NO: 63367 - protein, 264 aa, Zea mays
  Clone ID: UC-ZMFLMO17075A03_FLI.pep
LAQRKEDRKAKLQAQFSQMRPVAMAPSVGPRMPMFPPGVPGVGQQLFYGQPPPAFINPQAGFAFQQPLMPGMRPGGPMPNFMMPMVQQGQQPQRPAGRRAGGMQQPMPMGGQQQVFPRGGRGYRYPTGRGMPDPGMHSVGAVMPPSYEMGGMPMREAAPQPVPIGALATALANAPPDQQRLMLGENLYPLVEQLEREQAAKVTGMLLEMDQTEVLHLLESPDALKAKVAEAMEVLRSAQHLQQSNVSTEQQLANLSLNDGVVSS

SEQ ID NO: 63368 - protein, 360 aa, Zea mays
  Clone ID: UC-ZMFLMO17086F01_FLI.pep
STPIVVAVAVERTTCTHTRARAIVGRARNNRALLHGALGGEALLVALGVGAVVVDHVLALHPAHPLLQGEVQLLVVPVPGAGGGGGGAGALGDDGGAAAGPAARDGDASVGLEPAVGGGEGGVGPVRLDAPALRRPVVRVPQAGVEPHRLALGERHPLALQVAEVPDGHVVHHEDDVLGVPEDGVGVEVGGGVEPEAELLLPLPLPPREHVGVQRVGLAGHVAQELEVDLVVRAALRRQVVGGDGAGGVARHQPQLHVDLAEQVLVPGLEPGAGRAVQRQRQQPPVVKDLAPPVAPRDVQLLVQAARREGAGHQHAQAQQQQGHPTRRRRHDRCNQPPRETDTYRHSTLMIEQVATRCST

SEQ ID NO: 63369 - protein, 588 aa, Zea mays
  Clone ID: UC-ZMFLMO17156D05_FLI.pep
GDSAARVRVRGGGSHLSRMFNWNDEQHQVRDAIWAEFNECDDHIVPCPKGAQDSTIVSSRVRKNNEEEVASIAAITEQSAGVQNGHQGMEKQTASHTSAHISATQIDMESWPDLPSLNPTLDRNYSDDNIASTYLDFCAATSLQEVTGNSTEQLDGKSEVFGNDQEEKSNSFLDCDWGNIGDFDDFDRLFSHSDSIFGNEIVANDSDFLSASSNLMDTAVLSIPIPVEAHKRPVWSRRKPEERGKSKISSSTSGFSHSKVESSSTNLQTPMEPVQTPQYALFQDSKKIGEVQHANQFMFPGYGYPAYPFPTIPLVSNIQAEGYQTKPAGTSNRTSEDYLKQSSSTEMSQDIPSRPLTMTPQEKIEKLRRRQQMQALIAIQQQQQQFGQQGPGSDTMVSQAYTPGNKNPDSLGSSIVIDENTNKVISPEMIPTDHDRVHKSSAISDDPFIEEKIYYQLQDALGKLDTKTRLCIRDSLLRLVHSATERKIDGDRSTNKTNKDEDEASEDASTRKTRSPNKEAETTTNPIDRIVAHLLFHRHCSKVAKATKEIISSIPLTLEPEPKVPFGTPRVPSKDQRDEQEIVLQPSQ

SEQ ID NO: 63370 - protein, 108 aa, Zea mays
  Clone ID: UC-ZMFLMO17169G09_FLI.pep
DSISHKLNLKQTQLGLGNDPQCRSTVQYQNKTSPKKICSPVLDDDGALGPSVSVKLCLMPAGEAYQEIISGTTLWFRFFFPETSVWHNIKAKMHIAAQQLLQDVPIVH

SEQ ID NO: 63371 - protein, 265 aa, Zea mays
  Clone ID: UC-ZMFLMO17075B11_FLI.pep
RYGWFGPDLNQQSSEPSLASAYSEDKIIGSRPPDLVFNEQKHMAGSDEFANHFVTPSIVDKINTSQMAENPSKVAQLSWLDSISNISFGALLSEAAPSQDTKQPPSQNSICLQQIPATCDSFDAAIASLIARQQPSNQPKVLNPSLWEAEETCHAFPFQNQTPHASSSVPGNSFAAMTSSVLCAIPETGTDDQQCATDGRKEELNSQTSVEGDGINAKPEISMQESAGDPEREASCPRLLGGTDSIGLSSLLTDSLDAFQKFSVF

SEQ ID NO: 63372 - protein, 537 aa, Zea mays
  Clone ID: UC-ZMFLMO17118F06_FLI.pep
LRFKMQIFVKTLTGKTITLEVESSDTIDNVKAKIQDKEGIPPDQQRLIFAGKQLEDGRTLADYNIQKESTLHLVLRLRGGMQIFVKTLTGKTITLEVESSDTIDNVKAKIQDKEGIPPDQQRLIFAGKQLEDGRTLADYNIQKESTLHLVLRLRGGMQIFVKTLTGKTITLEVESSDTIDNVKAKIQDKEGIPPDQQRLIFAGKQLEDGRTLADYNIQKESTLHLVLRLRGGMQIFVKTLTGKTITLEVESSDTIDNVKAKIQDKEGIPPDQQRLIFAGKQLEDGRTLADYNIQKESTLHLVLRLRGGMQIFVKTLTGKTITLEVESSDTIDNVKAKIQDKEGIPPDQQRLIFAGKQLEDGRTLADYNIQKESTLHLVLRLRGGMQIFVKTLTGKTITLEVESSDTIDNVKAKIQDKEGIPPDQQRLIFAGKQLEDGRTLADYNIQKESTLHLVLRLRGGMQIFVKTLTGKTITLEVESSDTIDNVKAKIQDKEGIPPDQQRLIFAGKQLEDGRTLADYNIQKESTLHLVLRLRGGQ

SEQ ID NO: 63373 - protein, 287 aa, Zea mays; identical to SEQ ID NO: 58142
  Clone ID: UC-ZMFLB73183F04_FLI.pep

SEQ ID NO: 63374 - protein, 540 aa, Zea mays
  Clone ID: UC-ZMFLB73186B12_FLI.pep
LTKINRQVPAGNLITDWSSQHRACHPLSSSSVVGDVARNLEPLGVERARHVDPLVGVSPEVVPLGLHQVGRQPVPAVGVEVGQASGHSRGADAVVDGEAHHPAPRRLPVHDLLRELGVYEQAGEARVPVVGLLDAVQEDGADDAPALPDPGQLAEVEPPAFLRALGLDDVHALRVAADLGRVQGLPHVLHQLRLVHRRAGGVVVTLEDLGGLHPLVLQPAQEPRVQGRLDRRSGHRQLGGLLHRPLPCPFHPGLVKDLVHQVAIAMLVLDAKDVGRDLDQEAQELALVPLGEHLVQLTVGELTDRLENVVCLGNQLHIAILDSVVNHLDKVARSTFANVRDTRATVRDLSSHLEDNVFDVLVSLERASGHQGRAVAGTLLSSRDTHAKIQEAALLHGLLPPLRVLVPLVPPIDDAVALLQVSCERRDGLVNWRAGLDEHDHHPWLLNGLHKGRGVMEAVDGKVSFCLGTLHGLVHLGGCPVVHRDGEPFLCNVEGKVLPHDRKASKTDSCERHLLLHYGAGALPSADSDAELNWRCHHRP

SEQ ID NO: 63375 - protein, 268 aa, Zea mays
  Clone ID: UC-ZMFLB73186E03_FLI.pep
AVVSSDIYIGNEEKKLEPAATENKAQGMESEKINGEEKLPTKSTFSYTDEVKERFNRILKYYIGTHNFHNFTTRTKAEDPAAKRFIISFAADRVVSLDGIDFVRCEVVGQSFMLHQIRKMIGLAVAVMRNCAPESIYDVAFRKDVNLNVPTAPEVGLYLDECMFTSYNKKWKDSHEAVSMEPYSEEAEEFKVKYIFTHIAAMEHKEGAVALWLHSLNHRNYPDFRYMETAEHNPGAEVESIAAGAEPKVGAEVENTEEVQMPSDNLSE

SEQ ID NO: 63376 - protein, 384 aa, Zea mays
  Clone ID: UC-ZMFLB73188B06_FLI.pep
VTMGSSGADTSSKPNKASAPQEQQQPATSGAATPAVYPDWSSFQAYPPIPPHGFFPSPVASSPQGHPYMWGAQPMIPPYGAPPYVMYPPGVYAHPSMASGAHPFTPYAITSPNGNADATGTTAVACDTDGKPSEGKDKSPTKRPKGTLGSLNMLTGKNPSEHGKTSGASANGATSQSGESGSDSSSEGSEGNSHNDSYKHSGQEQDGDVRSSQNGASRSPSEGKFNQAMAIMPMPSSGPVTGPTTNLNIGMDYWANTASSAPVIHGKVTPTTVPGAVVPAEQWIQDERELKRQKRKQSNRESARRSRLRKQAECEELAQRADVLKQENASLRDEVNRIRKEYEELLSKNNSLKEKLEGKQHKTDEAGLNNKLQHSGNDIQKKGN

SEQ ID NO: 63377 - protein, 827 aa, Zea mays
  Clone ID: UC-ZMFLB73189F06_FLI.pep
GPPRRMLGVLRTADSSPSRFDMECNRDDAVRSKDIAETKFRENDITGAKKFALKAKALFETLEGIDQMIVALDVHVRAQTKIAGENDWYGILEVPPMADEEAIKKKYKKLAFQTHPDKNSSVCAKAAFNLISDAWNVLSNTAKRTVYDHRRRVHALGVHQNNFKATARKNSNSSMSSVDRFCARRREVAPHLAHEGIETFWTLCWSCLMNFQYSREYFNHHLKCHNCHAVFVAAEVRPPSVQIYPTEPMPMSTNNNIGGNTVPGMVAPGVQAGVSQGNQNCDPTVFKSATCAKSTKHTVQQTHDSIRKDDAAGASIPANEEANCTKVLQHAARKHAHAVSSARRANAATREHEAAKRKHANAGKQGTWQSAASYPDGDGCKPVFPVKRKPRSTSETSGAKKHKVSSGDFNCESSSDVGRTSFGRVLMKLDVRSILIEKGKLQAQKLQELSSKKANVKKKQKMQNGKKSSRKGVCNIENEVNKIEMKQSSSSVDPKKDVLELVSRRVDSEEKERQKSSKQVGLKEKLKSWPVPEVRIVYTRRNRKQHKKELGDEVTGATPGTEHHMPARYGCLNQVCPDAGSDKIPVPDADFYSVPDADFSSFGDHSESSFQNDQVWAMYDEEDGMPRYYALIRKVISTRPFKVRLVHLKANDSNEFGASSWLSCGYSKTCGEFKFDVSKHTDQVNIFSHKVKYDKGPGGIIRIFPKKGDIWALYQNWSPDWDQFTADDMIYKYELVEILDSYSPSRGISVMPIVKVPGFVSVFKPVHNATRSWRIPREEMMCFSHQVPFHVLTGEEAHNAPKGCYELDPGSTPQELLHVVPPSGDAK

SEQ ID NO: 63378 - protein, 180 aa, Zea mays
  Clone ID: UC-ZMFLB73191H01_FLI.pep
THTHTARNMQVPGRELGGWWIKCVLNTHTHSKEHASTRQGAGWVVDQVCAGGVGATQISICFVQPDEIRARQINLLPGGEAAQVRGADADADQPPRASLLVASCRMSTSTPSCGSSTYRTTEPRMKQFRTDSMWGYLSWSTTRVFSSLMLRYWSTEWSVPRIARSFLSSTVTSFPTSSLK

SEQ ID NO: 63379 - protein, 648 aa, Zea mays
  Clone ID: UC-ZMFLB73195H06_FLI.pep
IPILPPHPTLPSPPHPPPSNPRGCFATLSRLLPPRGGRRSDPPDPRCSWGSGARRRAAEAAQEWNPRTICTTQTTPPKMTSTAAGRLVSPPATTETQTTTSRTTTPTTPRSSSPTDSSILSEVDIKRRQEDDINRVSTVLSISKPEACVLLRNYNWSVSKVHDEWFADEERVRKVVGLPEKHIEMPNDREVTCGICFESCPLGSMSAAACGHPFCGTCWRGYISTAISDGPGCLMLRCPDPSCAAAVGQDMINSLADVEDTEKYGRYLRRSYIEDNRKTKWCPAPGCEYAAEFVMGSGSYDVNCNCSYGFCWNCTEEAHRPVDCATVSKWILKNSAESENMNWILANSKPCPKCKRPIEKNQGCMHITCTPPCKFEFCWLCLGPWSEHGERTGGFYACNRYESARQEGVYDESERRREMAKNSLERYTHYYERWAANQSSRQKALGDLQSLQNDKLERLSDIQSQPESQLKFIIEAWLQIVECRRVLKWTYAYGFYLPEHEHAKRQFFEYLQGEAESGLERLHQCAEKELQIYLDAESPSKDFNDFRTKLAGLTSVTRNYFENLVRALETGLNDVGPSTSHGTCSKSATSKSLGGKSKSGKNRASSTSSKSGGSSRGVDDSNIWTCDQCTYANPKSARACQACDHQHR

SEQ ID NO: 63380 - protein, 488 aa, Zea mays; identical to SEQ ID NO: 46968
  Clone ID: UC-ZMFLB73200A06_FLI.pep

SEQ ID NO: 63381 - protein, 455 aa, Zea mays; identical to SEQ ID NO: 40951
  Clone ID: UC-ZMFLB73200C04_FLI.pep

SEQ ID NO: 63382 - protein, 542 aa, Zea mays
  Clone ID: UC-ZMFLB73202F02_FLI.pep
VPNCVSSSASSRRGDLKRIQSRLVAAGAGPERWCILRRQEQAMAEANAGKEKKEVVRLERESVIPIMKPKLTMKLAYLIEHQSDREEFLKLCRRVEYTIRAWYHLQFDDMMELFALFDPVHGAKKLEQQNFLPEEIDTLEQNFLSYFFRVMEKSNFNIVNDDEVELAHSGQYLLNLPIKVDESKLDDKLLSKYFKEHRHENLPDFSDKYVIFRRGIGLDRTSNFFFMEKVDMIIARAWRRFLEKTRLQKLFSRKKNSKPKIDSKKNDDLASEIEDKELYVERIRLETMDLSFGNLFGKVTIQEPTFEEVIVLYRRKSPKGQDDRAIHVKHFKNIPMADMELVLPEKKNPSLTPMDWVQFIVSVVIGLVTLISSLEMPKADFWVVIAILSALAGYCAKIYFSFQQNMATYQNLITQSMYDKQLDSGKGTLLHLCDDVIQQEVKEVIIAYYILMENGKATSDDLDLQCEELIQEEFGLQCNFEVMDAVQKLERLGVITRVSSHLFLFLLMVPPDQSIGTFSYRYSAQNNDFCRHVYRARSFCIY

SEQ ID NO: 63383 - protein, 272 aa, Zea mays
  Clone ID: UC-ZMFLB73204G09_FLI.pep
FSSRAQTLNLNLSPAAAATTSTATPPPPSRSPLPAPSTSSRIEAMSSDDEVREEKELDLSSNDVVTKYKAAAEILNNALKIVVSQCKPKVKIVDLCEKGDSFIREQTGNVYKNAKRKIERGIAFPTCVSVNDTVCHFSPLATDDAVLEENDMVKIDMGCHIDGFIAVVAHTHVITNGPVTGRAGDVLAAANTAAEVAMRLVRPGKKVSVFAKPKVLFHKLYFINHCSLILKHISLKDVSSGDLTKYFLSHFLHVLICSFRWYLYIYIYIYSE

SEQ ID NO: 63384 - protein, 334 aa, Zea mays
  Clone ID: UC-ZMFLB73206E06_FLI.pep
ERQRLHPISFSPPHLRRTPITLFPPPAVQLTPTAPPLPLKSRDIADPPALRSARLRTRPIGSRSVDGTLNCGYSSFRGRRASMEDFYDIKASKIDDKQINLFGIFDGHGGSRAAEYLKEHLFENLMKHPEFMTNTKLALSETYRKTDSEFLDAERNTHRDDGSTASTAVMVADHLYVANVGDSRAVISKAGKAIALSEDHKPNRSDERNRIESAGGIVMWAGTWRVGGVLAMSRAFGNRLLKQFVIADPEIQEQEINEELEFLIIASDGLWDVVSNEDAVTLVKMEEEPEAAARKLTETAFSRGSGDNITCIVVKFQHDKPRSGGGDSPSSPRL

SEQ ID NO: 63385 - protein, 475 aa, Zea mays
  Clone ID: UC-ZMFLB73206G05_FLI.pep
DDDVRRAPERRPRQVELRRDCPYLDTVNRQVLDFDFEKFCSISLSNLNVYACLVCGKYFQGRGLKSHAYTHSLEAGHHVFINLQTEKAYCLPDGYEINDPSLEDIRHVLNPRFTKEQVLNLDKNKQWSRALDGSNYLPGMVGLNNIKETDFVNVTIQSLMRVTPLRNFFLIPENYQHSKSPLVHRFGELTRKIWHARNFKGQVSPHEFLQAVMKASDKKFQIGVQSDPVEFMTWLLNTLHAKLKSSKKKNRSIIHDCFQGELEVVKEVHRKHIMEKREDGGELNGEAGSVVGTADGIVTETSKVPFLMLGLDLPPPPLFKDAMEKNIIPQVPLFNILKKFDGETVTEVVRPSIARMRYRVTRLPKYLILHMRRFTKNNFFVEKNPTLVNFPVKNLELKDYIPLPKPKENHKLRSKYDLIANIVHDGKPGEGCYRVFVQRKSEEAWYEMQDLHVTETLPQMVALSETYMQIYEQHE

SEQ ID NO: 63386 - protein, 352 aa, Zea mays
  Clone ID: UC-ZMFLB73208A04_FLI.pep
RNPRRHPSMMMLTKEFALSPPPGVVPRRRPSARVAPTAARGGSPVPDLWLRTAAPVPASAAAGFASSHSHDGDCDLAMLVTDFLENGATAGSGDSRNSSDSESGLPDLAHLADTISMLKQGGDEKENELLAMVHSLLLSIHEPQLQPFKTGQCGGSCIRHLLVKLLRYSGNDAAVCTSKWQGFDKIPGGDYEYIDVIMHGDTTAPERLIVDIDFRSHFEIARAVDSYGTLLNSLPVVFVGTLPRLKQFLHVMVDAAKWSLKQNSMPLPPWRSLPYLQAKWQSKYERKDSITEGGFQSTSSDHALCIGHLKRLKTSLQLELETAGLLMMPIKANKKRMPKSSERRRRRSLLSC

SEQ ID NO: 63387 - protein, 210 aa, Zea mays
  Clone ID: UC-ZMFLB73212A04_FLI.pep
TLASRSEAREQPWRGASRSSPSFSSASPPPPPLPMRPLSSRTRRFRSPAPSRASSASPSPSTSTTRDPRLPMMCHLMTTLGQHKHLSLSLERNRRHWKGLTLVPLLHTHMSWRPKHRAGSRVHQLLLRTVFPQRLLFRRPTQLPSSHWIFSLRDFLRRSLNGLRGLWRNMGHLCLLSHLLDCLSTSLRARRRAAQKEARRDVDLLIVRRS

SEQ ID NO: 63388 - protein, 439 aa, Zea mays
  Clone ID: UC-ZMFLB73216G03_FLI.pep
LPPPPCKSCRHHRSFFSPGQEKRGERGEARCPPDLLCPDAAVTTSSVSVRSKMGAGGRMTEKEREKQEQLARATGGAAMQRSPVEKPPFTLGQIKKAIPPHCFERSVLKSFSYVVHDLVIAAALLYFALAIIPALPSPLRYAAWPLYWIAQGCVCTGVWVIAHECGHHAFSDYSLLDDVVGLVLHSSLMVPYFSWKYSHRRHHSNTGSLERDEVFVPKKKEALPWYTPYVYNNPVGRVVHIVVQLTLGWPLYLATNASGRPYPRFACHFDPYGPIYNDRERAQIFVSDAGVVAVAFGLYKLAAAFGVWWVVRVYAVPLLIVNAWLVLITYLQHTHPSLPHYDSSEWDWLRGALATMDRDYGILNRVFHNITDTHVAHHLFSTMPHYHAMEATKAIRPILGDYYHFDPTPVAKATWREARECIYVEPEDRKGVFWYNKKF

SEQ ID NO: 63389 - protein, 948 aa, Zea mays
  Clone ID: UC-ZMFLB73216G04_FLI.pep
ATMAEIVTGAMGTLLPKLANLIKEEYNLQKKVRGEIMFLEAELKSMEAALIKVSEAPIDHPPDIQVKLWTREVRELSYDLEDSIDRFMVRVGDGKPHSFKGFIDRSLHLLTRGRIQHSIGIDIKEIRSRIKDVSERRDRYKVDLVPSKPVGRSIDNLRLSALYRKATELVGAEEKSSDLVRRLMEGDKEASKQPVVLSIAGFGGLGKTTLANLVYEKIKGQFGCGAFVYVSHNPDVVKVFKNMLYQLDGDKYRDINQGTWSEEQLIWELRKFLLHKRYFIVIDDIWNTSVWETIQCSLMHNECGSIIIITTRNIDVAKQAGSVYQMEPLSLSDSTKLFCQRIFGSEDKCPPHNLAEVAGKILQKCGGVPLAIITMASMLADKTGKEINTHNYWSHVYQSMGSGLNGSTNVKNMRRILSVSYYDLPSHLKTCLLYLSLFPEDYRIKTRGLIWKWIGEGFVHEEQGKTLYEVGEDYIEELINRSMLEPVDIGRDGKTVSCRIHDMVLDLISFLSNEEHFLTKVGEQQPISLDLPKKIHRLSLQISQEEEVKQLATMSFSHVRSLTVSTKVFQLMPKLSAFLVLRVLNLKKCKGVRNHHFKDICNMFHLRYLSLNAEFITEMPREIQNLQFLQVLDISNLGHKVKMPTIIHLRQLLRLCFRPMWGIRLPDGFGKLTSLQEVKGIITIKLPSMLHNLGCLTNLRTLAIDFCDWDESYEEPFIQCLSNLVSLKSMEIKGTMVSSLCSECDKLYPGPQHLCSIDIESTAVPRWMSSLCFLSSINIELLALGAQDFHVLGSIPSLRCLSIHVKETRDERLVIGKCYPFRCLTEMQIDYESMAVVFAPGSMQNLKELHLVFGVKEVMHKYGDCNFGLEHLMSLEHVSVKTMYSIMPEEVEAVKDEFQKSLDMNPGKPTLIVDYKYPIKRKIRSHAQAIRAAILFANAGRIPATEGL

SEQ ID NO: 63390 - protein, 450 aa, Zea mays
  Clone ID: UC-ZMFLB73217C06_FLI.pep
RDPAAASDRIGLDRRRKRRGGVGGSGPASLPPMSRMKHLLRKLHLAGGPAGAGGAAPDHHRSRHRRSGHPTPTPTPGAAAAAPEPPQPAVTPAAAVSIAPVVEEPRGLGAEAATTRLEEDYQVRLALAISASDHAGLVDADSVQIRAAELISLGAGAGSGHDRSPAEALSARYWNHSVVNYDEQLPDGFYDVCGAQLHPGFQAKFPSLEYLRAVPLGRDAPFLAILVDREHDPALKRLEDRAAQIAAQTRAGHGAAASAELAQRIVGLIVNAMGGLVEDADGMNREWSIKSRELSLKLNSVVLPLGSLRVGLSRHRSLLFKVLADRVNLPCKLLKGICYTGTDEGAVNLVKVDFDSMEYIIDLMGAPGTLIPSDISGSQFQDSNNSQLSSDAIEESVAELCLALEQINGGYENKNTIGGCSSGHSSILALTSSHLGDLSQTELKQNVVSE

SEQ ID NO: 63391 - protein, 162 aa, Zea mays
  Clone ID: UC-ZMFLB73221F02_FLI.pep
RPTAAAQDEEEVPGPGAATMSSMMNALSNWLVNPRRNPLARLHMHTVSSRLRKYGLRYDDLYDPYFDLDIKEALGRLPREVVDARIQRLKRAMDLSMKHQYLPEDLQAQQVPFRGYLSDMLALVRIFLLHSIGISYAFELESLHSPFFNACKGPNLHDMNYA

SEQ ID NO: 63392 - protein, 89 aa, Zea mays
  Clone ID: UC-ZMFLB73222B01_FLI.pep
SVLPPKFGVTKQPHSCRSQNPTRPIRPIPRLSALRYERRVRGGAEDQISSRTSIERYGFYVGCNWTSPSTRLAIDAEVPMLHATAMVAG

SEQ ID NO: 63393 - protein, 268 aa, Zea mays
  Clone ID: UC-ZMFLB73222F08_FLI.pep
TLVFAVVAGGPAMSHFGRSGPPDIRDTFSLLVLNISFRTTADDLFPLFERYGKVVDVFIPRDRRTGDSRGFAFVRYKYADEAQKAIDRLDGRDVDGRNIMVQFAKYGPNAEPIRKGRVKEGVEKSQDRSRSRSPRPRHRDRDHRSQSRSRSRERHVRDRDRGYRRRSRSRSRSLSSSPDNRSHHRARDDDKRKSMSKSRSRSRSTSRSRSYYSASPARHSASPRKSPPPQRSPTPAKHANGKVAPLSRCVSPLPKRATSRSPGSDGKE

SEQ ID NO: 63394 - protein, 287 aa, Zea mays
  Clone ID: UC-ZMFLB73223G07_FLI.pep
APTKLSGEARAGQLGRCSTRGMDGSAGSFVAVRRLSGSDRAAAFHHSSSAEVVTGSTAWIGRGLSCVCAQRRDSDARLSFDLTPVQEECLQRLQNRIEVQYDSANREHQEALQSLWCASFPGTELRGLISEQWKEMGWQGKDPSTDFRGGGFISLENLLYFARNYPKSFQELLRKQNGDRAIWEYPFAVAGVNITFMLIQMLDLQSVKPRSLFGAVFLKLLSENDQAFDILYCITFKLMDQQWLDMHATYMDFNTVMKSTRRQLERELLIEDIQRIEDMPSYRLLAR

SEQ ID NO: 63395 - protein, 515 aa, Zea mays
  Clone ID: UC-ZMFLB73226H03_FLI.pep
RTAAMDPPGRGDQGEAPQPQPLEWRFAQVFGERAAGEDVQEVDIISAIEFDKSGDHLATGDKGGRVVLFERTDVRDNASQRELERQDVPVTRHPEFRYKTEFQSHEPEFDYLKSLEIEEKINRIKWCQTANNALSLLSTNDKTIKYWKVQEKKVKRFAVMNLDSSQSAGSSTTAIASTSSSKAPLPNGGCSDMLGCLNNDLTFPPGGYPSLRLPVVTSLEANPVARCRRVFAHAHDYHINSISNNSDGETFISADDLRINLWNLEINSQSFNIVDVKPTNMEDLTEVITCAEFHPSHCNTLAYSSSKGSIRLIDLRQSALCDNHSKIFEEHEAPGSRSFFTEIIASISDIKFSRNGKYILSRDYMTLKLWDLNMNSGPVSTFQVHEHLRPKLCDLYENDSIFDKFECCLSGDGLRVATGSYGNIFRVFGRPPGSIEATTLEASRNPMRRQIANPARPTRTLTSFARGVRRGGENQGVDANGNSLDFSTKLLHLAWHPTENSIACAAANSLYMYYA

SEQ ID NO: 63396 - protein, 510 aa, Zea mays
  Clone ID: UC-ZMFLB73230B10_FLI.pep
STIYHQTLSSVVPHQPRARDFKHQTTIIMAPPPAMQSPGELNDGAYDAPHILFIPSAGIGHLTPVFRVIAGFSSRGIDVSVVTVLPTVSAAETDYFNGLFADYPAVRRVDMHLLPLDASEFTREDPFFLRWEALRRSVHLLRPIITNAAPRITAIITDITLTSCVIPIAKELDVPCHVLFPTAATMLSLNAYYPVYLEKLKGGPEPGVIGDAVDIPGVFRVPRSALPPALLDVNKLFTKQFIDNGRAIVKADGVLVNTFDAVEPAPLAALRGGKIVPGYPPVYTIGPLKSHATKAGDKPGDALLDEWLGKQRARSVVYVAFGNRSAARLDQIREIAAGLEDSGYPFLWVLKTTKVDREDDAELAEVLGDGYLERVKGRGIVTKGWVEQEELLKHPAVGMFVSHGGWNSALEASSAGVPLLVWPQLGDHRVNAMAAVRAGIGAWAEHWSWDGEDTLVTRQEIADKVKEVMADGKLRASVAVAREEAAKAVAEGGTSYRNMHDFIAKLKGGA

SEQ ID NO: 63397 - protein, 642 aa, Zea mays
  Clone ID: UC-ZMFLB73233H01_FLI.pep
FPSRYKPFTPRRPRLAPVRAADSPRVASLGFAVPVAGEGGVVSWRRRLRVPSRSQAMALEDGSPATFTPQVIANAFVKQYYQTLRYAREDAYKFYNDKSILGRTDSNGKMICVTTIDDIKEQLVSTDCADCLIEIETVDAQPSHVDGVIILVAGYFTTAVVKQKFIQSFFLAPQENSGYYVLNDTFRLTGISFEVKVVAANHDNKSTQITTLPNEPEIDSFKESEVPGVPPAGNILVNDGVISTSANVVSPVKNDPVVETCVKVVNEDVVKIPVAAPASTPVTAEEVVNKDFVKIPESAPALPSSVEKAAPAPPASVEKAAAAPPASVEKGAPAPRTPVEKADPAPSAPVEKGAPALRAPVEKADPAPRAPVEKEVTRKTYASVVKIPREDTQPAPAARPSKPNLNIKMVQNTEKNVSSPSKPAHATVNALPGDKGVPKNKSPDEPGYSIFVKNLPFEATVEMVEQEFSKFGAIKSGGVQVKCQPDQFCFGFVEFESQQSMLAAIEASRVYFGTRESYVEEKRTKTRVVDGVITRGDDNGNGGGGRFHSGRGGGYYGDGYKRQWGGQNNGYYNGADNMRNDYSGRVRGPQGNGHPQNGHGYHQNGHGYYSGNGYQQRRPNSNGNGLRVERNNGFRQQGPASA

SEQ ID NO: 63398 - protein, 576 aa, Zea mays
  Clone ID: UC-ZMFLB73234A03_FLI.pep
TVMEAAADEERPLIQYLAPEDDEASSRYTSDGTLDINKQRALKKSTGNWRACFMILGTEFAECLAFYATAKNLVTYLTAELGETNIDAATNVSTWIGSCYLTPLIGAFLADTYWGRYKTMIVFLLLYIVGMLTLTASAWLPLAMEDDSPDNSGLRRATAYLGLYLVSLGTGGIKPCTAALGADQFDGGDAAERVTKASFFNWYYFCTNIGSLLSGTVLVWVQENIGWGVGFTVQTVFMLFGLAVFVAGRKVYRYKKLGGSPLTRVAQVVVAAVRNCHLVLPDDTSALYHDKLLPTEPNFRIESARQFRFFDKAAIITGEKGAAAPTSPWRLCTVSQVEELKMLLRLLPVWASMVLFFAVSAQTVTTFIEQARVMDNRIGPFTIPPASIATFDVISVMVCVPVYDAVLVPLARRATGNDRGLSQLHRLSIGIALSVVVMVYAALLEGRRLALARANMPAMNIAWQAPMFAVHGAAAVFATVGVLEFFYDQSPDGMKSLGNALALLSMAAGSYFNSLALSAVGSITARGGERGWLPDDLNKGHMDYFFWMMAALGTLNLLHFLHYCNRRYRGNNNNTS

SEQ ID NO: 63399 - protein, 349 aa, Zea mays
  Clone ID: UC-ZMFLB73234E10_FLI.pep
ERATHKNPNASAPGLSASPPSAKTLACIRARTKLRLRGASSCRQKLSGASAMVWFQCEDCGENLKKPKLAGHFRSCSAYKLSCIDCGELFSHDTVQGHTQCISEAEKYGPKGQTKPSNGAQGKADKPKPNADVDINVGLSTRPPWFCSLCKTTTTSKQTLLLHADGKKHRAKAKAFHVSQKQKDGAEQTPDVKEAGVVPTKESAQVNGGVSGDHERNEDKDAGKRKRMDDMTIEPGNTKRQLTQSGDEKSENKAKSKADELASGTDCKSVQKQKIKWKKIITKTLKANADGVMKLKKLQKLVSKELQECGVSKDKEELRATLMDKIASSSRFYVDGKNVRLVAKNEEES

SEQ ID NO: 63400 - protein, 635 aa, Zea mays
  Clone ID: UC-ZMFLB73235D09_FLI.pep
NVEGTEDRGPRRNPSTRSRLPHPTPRFSPHRPAPRPQLLSPSSGNATARQSMLRPEPALGFLAAGPARACKPPPERRRKKQPPTRRRRPASAATVVGLGPRGAADPDPAHSSALLPLTSGGSGSGFASRGTVAPDEEEGRDEASSAESQEVAEAANDSFSYSLRECQKQRRLKSERSALVRPPASHELNNAGGIELLVLSPRCLIGGNPGGMSKSSTTSSRSRSGTGTFPSPGTPSCNRHCAGSMQYSKGWSSERVPLGTGRNRRYGGSGVVLPFNNGRKLPSKWEDAEKWILSPVSCDGMGRMSAPAPHHRRPKSKSGPLGHPAGIPGAYAAVSPLVPCFDGVLAAANFAAHSPFSAGVLIPEHGRIGDFSSGRDRCGDDGSSRSYSAEKESYILRSASIHAWTETLMEASAFANISEETVQDDKLQGQIEATSMISSPIIKKDIGTQMSPEDSISSPKARHSCSSLPSGHLIKEPNSHIPKPEIRDVQVDDQVTVTRWSKRHVTRGSDKRSTNIIEWRKKTTETRTPSFDEKERERCMSQCKREEAKITAWENLQKAKAEAAIRKLEMKLEKKRSSSMDKILGKLRSAQNKAQDMRSVVSSSEGQCSVRATKKTSSSVKTGRPFSCCFTYRAC

SEQ ID NO: 63401 - protein, 477 aa, Zea mays
  Clone ID: UC-ZMFLB73236F04_FLI.pep
PTSAAQTFPPSPNSFRRPPLHPYDDTMRECISIHIGQAGIQVGNACWELYCLEHGIQADGQMPGDKTIGGGDDAFNTFFSETGAGKHVPRAVFVDLEPTVIDEVRTGTYRQLFHPEQLISGKEDAANNFARGHYTIGKEIVDLCLDRIRKLADNCTGLQGFLVFNAVGGGTGSGLGSLLLERLSVDYGKKSKLGFTVYPSPQVSTSVVEPYNSVLSTHSLLEHTDVAILLDNEAIYDICRRSLDIERPTYTNLNRLVSQVISSLTASLRFDGALNVDVNEFQTNLVPYPRIHFMLSSYAPVISAEKAYHEQLSVAEITNSAFEPSSMMAKCDPRHGKYMACCLMYRGDVVPKDVNAAVATIKTKRTIQFVDWCPTGFKCGINYQPPSVVPGGDLAKVQRAVCMISNSTSVVEVFSRIDHKFDLMYAKRAFVHWYVGEGMEEGEFSEAREDLAALEKDYEEVGAEFDEGEDGDEGDEY

SEQ ID NO: 63402 - protein, 564 aa, Zea mays
  Clone ID: UC-ZMFLB73238G08_FLI.pep
PSAAPRTPNQQLPRPSAGEMALYLLFESASGYGLFHAYGIDEIGQSVEAVRSSVLDLDRFGKAVKLTAFNPFSSAVDALNQCNAISEGIMTDELRSFLELNLPKPKEGKKAKYSLGVVEPKVGSHISEVTGIPCQSNEFVQELLRGVRLHFDRFINELKDSDLEKAQLGLGHSYSRAKVKFNVNRVDNMVIQAIFLLDTLDKDINSFSMRVREWFSWHFPELVKIVNDNYLYAKLAKFIVNKSDLTEKDIPALADIVGDEDKAKEIVEAAKASMGQDLSPVDLINVQQFAQRVMNLSEYRKNLYEYLVTKMNDIAPNLTSLIGEVVGARLISHAGSLSNLAKCAASTLQILGAEKALFRALKTRGNTPKYGLIFHSSFIGRASTKNKGRMARYLANKCSIASRIDCYSEASTSVFGQKLREQVEERLEFYDKGVAPRKNLDVMKAAIDSMVNGTSMDDDDIEKTDASPKKSKKKKTKTKADGDAMDVDKPSNVAGGEAEPGTEKKKKKKKHKLEEEAQEENGAADTTPKKKKKKSREASEEAEPKTATDGKKKKKKKAKAEDDE

SEQ ID NO: 63403 - protein, 511 aa, Zea mays
  Clone ID: UC-ZMFLB73238H03_FLI.pep
QENMDVPVDDPVENLTGSPSTLGNEEEATTYANVQDQSKEEPEKLYEEPKDPMQDELGNQGHVSMNNEDVGGQNKVDQATPTEHGEEAGVKQHDATVPDDKKWPGWPGESVFRILVPTTKVGAVIGRKGDFIKKMCEESRARIKVLEGPPAVPERAVMISAKDEPDTELPPAVDGLLRVHRRITDGLETETDQPQRATVNTGPTRLLVPASQAGSLIGKQGATIKSIQDASKCVLRIVENVPPVALNDDRVVEIQGEPHDSHKAVELIASHLRKFLVDRSVLPLFETQIKAHNMHREQPMPPPQAWGPPPPSPWGHPPPNLPPGGPGYVGNPHYMPPRPQENYYPPPDVPPVEKQPHYGISSYGRDAPPSAPPGNQNQAHGSSQVTHSMQVPLSYADAVIGAAGASISYIRRHSGATISIQEGAPGEMTVEITGSASQVQTAQQLIKNFMAEASPQGPPAPGPHGQPVDTGYGSYPPYGGASYGSPPGAPAPAPHNGGSYGAAPYSSSYGY

SEQ ID NO: 63404 - protein, 151 aa, Zea mays
  Clone ID: UC-ZMFLLIB3205430F01_FLI.pep
GIISTGDGNGRRRGRRFEAMAFTMRAVKVPPNSASLEEARHRVFDFFKQACRSIPTVMEIYNLDDVVTPSQLRSTIAKEIRKNQNVTNPKVIDMLLFNATEELNNIVEHAKQRHHVIGQYVIGQEGLVHELGSKDLGNSDFLKKFYTSNYF

SEQ ID NO: 63405 - protein, 380 aa, Zea mays
  Clone ID: UC-ZMFLLIB3205439E05_FLI.pep
QIFVKTLTGKTITLEVESSDTIDNVKAKIQDKEGIPPDQQRLIFAGKQLEDGRTLADYNIQKESTLHLVLRLRGGMQIFVKTLTGKTITLEVESSDTIDNVKAKIQDKEGIPPDQQRLIFAGKQLEDGRTLADYNIQKESTLHLVLRLRGGMQIFVKTLTGKTITLEVESSDTIDNVKAKIQDKEGIPPDQQRLIFAGKQLEDGRTLADYNIQKESTLHLVLRLRGGMQIFVKTLTGKTITLEVESSDTIDNVKAKIQDKEGIPPDQQRLIFAGKQLEDGRTLADYNIQKESTLHLVLRLRGGMQIFVKTLTGKTITLEVESSDTIDNVKAKIQDKEGIPPDQQRLIFAGKQLEDGRTLADYNIQKESTLHLVLRLRGGQ

SEQ ID NO: 63406 - protein, 258 aa, Zea mays
  Clone ID: UC-ZMFLLIB3205440D08_FLI.pep
LNRESEESDEEENYFSIELTPSLFTSAVDNAYQSIHEFSKPLINMMKAAGWDLDGAANAIEPGVVYTRRAHKKFAFESYICQRMFSGFQEESFSIKDSNISVSNEAFFHQFLAVRAMDPLDVLSQNPDSVFGKFCRSKYLLLVHQKMEGSFFGNMDQRNYVMSGGHPRTPFYQAFLKLAKSIWLLHRLAYSFDPKAKVFQVKKGSEFSDIHMESVVKNIILEEGAERPKVGLMVMPGFLIGTSVIQSRVYLSDAKCAD

SEQ ID NO: 63407 - protein, 199 aa, Zea mays; identical to SEQ ID NO: 62040
  Clone ID: UC-ZMFLLIB3205448A07_FLI.pep

SEQ ID NO: 63408 - protein, 350 aa, Zea mays
  Clone ID: UC-ZMFLLIB3205450C12_FLI.pep
DKEGIPPDQQRLIFAGKQLEDGRTLADYNIQKESTLHLVLRLRGGMQIFVKTLTGKTITLEVESSDTIDNVKAKIQDKEGIPPDQQRLIFAGKQLEDGRTLADYNIQKESTLHLVLRLRGGMQIFVKTLTGKTITLEVESSDTIDNVKAKIQDKEGIPPDQQRLIFAGKQLEDGRTLADYNIQKESTLHLVLRLRGGMQIFVKTLTGKTITLEVESSDTIDNVKAKIQDKEGIPPDQQRLIFAGKQLEDGRTLADYNIQKESTLHLVLRLRGGMQIFVKTLTGKTITLEVESSDTIDNVKAKIQDKEGIPPDQQRLIFAGKQLEDGRTLADYNIQKESTLHLVLRLRGGQ

SEQ ID NO: 63409 - protein, 178 aa, Zea mays
  Clone ID: UC-ZMFLLIB3205461F05_FLI.pep
DCTGSLCKATAFLFPKTAFDFLTNVAASLFGIHGSPSPSSVLVDPRYEIVKMAEMQPCAEETPKEEQIVKFVAQIDKPILSSEDAVSKRFDVVTDCLDHHFVKENGHESVTRGWLKKVRLEWNILQNDLPDGIHVRVYEERMDLLRACIVGAPGTPYHDNLFFSSIFSFLLITLMNHL

SEQ ID NO: 63410 - protein, 88 aa, Zea mays
  Clone ID: UC-ZMFLLIB3205465A03_FLI.pep
QMCDLLKSKVGSLEFLQKLNGIQKSVDQNCAVEPDTSWDIIKSDLWEDGDPDDGYVLVKQEDVVDGITSFMAACLLSLKRTKVAIFFT

SEQ ID NO: 63411 - protein, 337 aa, Zea mays
  Clone ID: UC-ZMFLMO17280G02_FLI.pep
TARPSGRLLASQRTRATVGITYQIPAGAAAMAENFQLQGRHGKSRVRVSRVWRRPAAAGGDVIVEWNVAVSIVSDCLPSYTSSDNSAIVATDSIKNTVYVKAKECTEVVSMEEFAVILGRHFTSLYPQVSEATVTIVERPWERVTVDGKRHSHGFKVGVEKHSTEVIVKKSGSLRINSGIQGYSLLKTTQSGFEGFVTDRYRLLPDTRERIVATEVTAWWRYPFEHVSQLPSKPFCFTQRYQDVKKVLAETFFGPPDVGVYSPSVQNTLYLMAKEVLTRFPDISSVQLRMPNLHFLPVNLGSKEAPLVKFADDVYLPTDEPHGTIEATLISRPMSKL

SEQ ID NO: 63412 - protein, 105 aa, Zea mays
  Clone ID: UC-ZMFLMO17287B08_FLI.pep
VQRNLNSLGADGRLFIIGFQGGIAAEVNLQAVLARRLTIQAAGLRNRSLANKAEIVSEVEKNVWPAVAAGKVKPVIYKTFPLSEAAEAHRLMEASTHIGKILLLP

SEQ ID NO: 63413 - protein, 353 aa, Zea mays
  Clone ID: UC-ZMFLMO17293G10_FLI.pep
LLLLPKGEFASQRRPQQQRTADHATSSSGSERGSDSIRIDMDGGEHEAEESSSKRRERLLALRSAANVSPAGAPPPTAAGSLLPDPDLPGDEAASVCPPPPPPQRFYYYTNPAAAFTSSSGGATNPTWSHKRKSPPACYAPPPPAYGNYGSNYHPPHQQPTSSWQVHSPSPMPQDAPRSSPWQRPMQFQDPMSGYQGGPPSAPPPWVSHSGPRGRGSYSNPPSFGFRHPNPSRGGSTMNYGPRGGPYSSYGRGRGPNYFGSPGSRGRGGRGGWQGQSYMNKSMLDDPWVDLQPGVGNILIPRGEYDSNKSWLPESLRKKKETPPAHGQIKPAPGLSLSEYLDLSFNEVSDKEK

SEQ ID NO: 63414 - protein, 182 aa, Zea mays
  Clone ID: UC-ZMFLMO17310F05_FLI.pep
IMALASRAAAAAVACVLLALAASAAGAGSNSPAPAPSVDCISQAASLIDCIDYVQKGSSARRPSAACCGEVKTAVASPVIVGCLCSLAGSNSSNLGFPIDMKRVLALPGACGASNAAFSKCNISALSPTEAPAPSAAGGSSSGGAAASSPRAAAASSPPMTATALLAAVAAPLLAYYCCYLF

SEQ ID NO: 63415 - protein, 230 aa, Zea mays
  Clone ID: UC-ZMFLMO17310G09_FLI.pep
SSSSSSSSTYSLLMLPQTHAHNIQKNANMPSASSVVAYWRLICSNSAVQRADHHPVVDGGAPGPDGRLRPVGDLGFPAEPPPDVRLGRGSCGERRVGRAGRGGRDGGGAVGLDGERRRAGDGDAARHRRRRRRRGSQDGRRRGGGGGEGGVLAELAEAGVRSRAGHRLVPELIEEAHSGHHQTRTDAIGWLAPACLGRRMRARRVVLSRRGECGTDEREEKTGLGWPGCR

SEQ ID NO: 63416 - protein, 278 aa, Zea mays
  Clone ID: UC-ZMFLMO17321E02_FLI.pep
VRQDRHAAAAGAGQLRRHRHRLLPVVAGRRARRDRLRVPGQRVRRALHAAHQRVHAGAGAAGAAVPPLVRPHRRLPHLLHPLEPQARHLHGGRHAHQGLPQPGEQGGGVPQEPADAALLQPVERGRLGDAGRARQDGLVPRPLLRLLPRVQGRRLRRRRGRPDPLRRHRRHRGHRRPRLRRRRRGLVQPGAGPHPAAADALGAAQVHDLQLLHRPQALPAGPPRRVLHAVAPGYSSPVQQWRARACVCMWSALLLPLRRSVSITGSRQDERHRNMVDK

SEQ ID NO: 63417 - protein, 222 aa, Zea mays
  Clone ID: UC-ZMFLMO17360A02_FLI.pep
HHKHIFSQQICAFYLATDYTGACGPRDFGDDNDKPEIFIVRFQRNATYEALKAEKKNNLVDVLQGQHADASQLVARYKGPVEIEEINRWISQIIKDGDTREIPYFTSKVPDLVPEETSKAWSSKNIRSAGKSLKENIGFHFQDYLTHPMIGSTLLMCGCISMGIIWFRNNIPTQSTRQEKARKDKAKRPRPKLSTSLFGEPSVPDVDPKDARQWEMSSSDSD

SEQ ID NO: 63418 - protein, 314 aa, Zea mays
  Clone ID: UC-ZMFLMO17375G09_FLI.pep
HYLNLMRLYAPALCLLRSSTHPHPNQFRAGFTQSMASWKCSHSPSSPYLAKSGLVDSSLNRNVKSSQPQSIKYFVSLMGQQFRCGLSTREGSLSVKLDIPSHEKSRIGWNWKNMHQKIGGVAGGLCFGFSVTGVASAEVPIIRVKDNAETSSSSTSSTHGKEVYTDYSVTGIPGDGRCLFRSVVHGACIRSGRPIPNEDLQRKLADELRATVADEFVKRRKETEWFVEGDFDTYVSHIREPHVWGGEPELFMASHVLQMPITVYMRDEDAGGLIAIAEYGQQYGKEDPIQVLYHGFGHYDALQIPAKVGSKRKL

SEQ ID NO: 63419 - protein, 360 aa, Zea mays; identical to SEQ ID NO: 53639
  Clone ID: UC-ZMFLMO17377F09_FLI.pep

SEQ ID NO: 63420 - protein, 360 aa, Zea mays; identical to SEQ ID NO: 53639
  Clone ID: UC-ZMFLMO17427H12_FLI.pep

SEQ ID NO: 63421 - protein, 577 aa, Zea mays
  Clone ID: LIB3593-003-H7_FLI.pep
TCGLRTGGRRLEHCFRVVRLIARIFCWPSSSWRRRERERERESAGIGARKHPAAMAGGGVAALGVKTERAAQYKGRMTLAVATTCLVAAVGGAIFGYDIGISGGVTSMDPFLEKFFPVVFHRKNSGGKNNYCKYDNQGLAAFTSSLYLAGLVASLVASPVTRNYGRKASIVCGGVSFLIGAALNVAAVNLAMLILGRIMLGVGIGFGNQAVPLYLSEMAPAHLRGGLNMMFQLATTLGIFTANLINYGTQNIKPWGWRLSLGLAAVPALLMTLGGLFLPETPNSLIERGRVEEGRRVLERIRGTADVDAEFTDMVEASELANTVEHPFRNILQPRNRPQLVMAVCMPAFQILTGINSILFYAPVLFQSMGFGGNASLYSSVLTGAVLFSSTLISIGIVDRLGRRKLLISGGIQMIVCQVIVAVILGVKFGAEKQLARSYSVAVVVVICLFVLAFGWSWGPLGWTVPSEIFPLETRSAGQSITVAVNLLFTFAIAQAFLSLLCAFKFGIFLFFAGWITVMTVFVYVFLPETKGVPIEEMVLLWRKHWFWKKVMPDMPLEDGWGAAEGHAAPANNNHKG

SEQ ID NO: 63422 - protein, 557 aa, Zea mays
  Clone ID: LIB3060-082-G1_FLI.pep
RLIARIFCWRSSSWRRRERESARAGIGARKHPAAMAGGGVAALGVKTERAAQYKGRMTLAVATTCLVAAVGGAIFGYDIGISGGVTSMDPFLEKFFPVVFHRKNSGGKNNYCKYDNQGLAAFTSSLYLAGLVASLVASPVTRNYGRKASIVCGGVSFLIGAALNVAAVNLAMLILGRIMLGVGIGFGNQAVPLYLSEMAPAHLRGGLNMMFQLATTLGIFTANLINYGTQNIKPWGWRLSLGLAAVPALLMTLGGLFLPETPNSLIERGRVEEGRRVLERIRGTADVDAEFTDMVEASELANTVEHPFRNILQPRNRPQLVMAVCMPAFQILTGINSILFYAPVLFQSMGFGGNASLYSSVLTGAVLFSSTLISIGIVDRLGRRKLLISGGIQMIVCQVIVAVILGVKFGAEKQLARSYSVAVVVVICLFVLAFGWSWGPLGWTVPSEIFPLETRSAGQSITVAVNLLFTFAIAQAFLSLLCAFKFGIFLFFAGWITVMTVFVYVFLPETKGVPIEEMVLLWRKHWFWKKVMPDMPLEDGWGAAEGHAAPASNNHKG

SEQ ID NO: 63423 - protein, 545 aa, Zea mays
  Clone ID: LIB3245-095-B2_FLI.pep
PCPEPEAGAMAVAAPAAVSTGAGQGKEYPGGLTLYVLLTCAVAATGGLVCGYDIGISGGVTSMDAFLHKFFPSVYRKEQTARGGGSQYCKFDSQLLTAFTSSLYLAALAASFFVASVAHSLGRKWCMFGGGVSFLAGAALNAAAQDVAMLIVGRILLGIGVGFAGLSIPIYLSEMAPHHLRGTLNIGFQLMITVGIFSANLVNYGVDKIRGGWGWRLSLGLAAVPAAVITVGSLFLPDTPNSLIRRGYHEQARQVLARIRGADVDVADEYGDLVSASEASAAVRRPWLDVLGRRYRPQLTMAVLVPFFQQLTGINVIMFYAPVLFKTIGLGGDASLMSAVITGLVNIVATFVSIATVDRLGRRSLFLQGGCQMLVCQIVIGTLIGVQFGASGDGAAIPKASAATVVAFICIYVAGFAWSWGPLGVLVPSEIFPLEIRPAGQGINVAVNMMCTFAVAQAFLPMLCHLRFGLFYFFGGWVLVMTLFVAAFLPETKGVPVEKMGTVWRTHWFWGRFVADAGMDGRAGNRDSAFHKGKDIAIESRSRPV

SEQ ID NO: 63424 - protein, 549 aa, Zea mays
  Clone ID: LIB3245-349-H5_FLI.pep
ASELEIDLRRRPAAAAAAELVGAAMAIGGFVEAPAGADYCGRVTSFVVLSCIVAGSGGILFGYDLGISGGVTSMESFLRKFFPDVYHQMKGDKDVSNYCRFDSELLTVFTSSLYIAGLVATLFASSVTRRFGRRTSILIGGTVFVIGSVFGGAAVNVYMLLLNRILLGVGLGFTNQSIPLYLSEMAPPQYRGAINNGFELCISIGILIANLINYGVEKIAGGWGWRISLSLAAVPAAFLTVGAIYLPETPSFIIQRRGGSNNVDEARLLLQRLRGTTRVQKELDDLVSATRTTTTGRPFRTILRRKYRPQLVIALLVPFFNQVTGINVINFYAPVMFRTIGLKESASLMSAVVTRVCATAANVVAMVVVDRFGRRKLFLVGGVQMILSQAMVGAVLAAKFQEHGGMEKEYAYLVLVIMCVFVAGFAWSWGPLTYLVPTEICPLEIRSAGQSVVIAVIFFVTFLIGQTFLAMLCHLKFGTFFLFGGWVCVMTLFVYFFLPETKQLPMEQMEQVWRTHWFWKRIVDEDAAGEQPREEAAGTIALSSTSTTT

SEQ ID NO: 63425 - protein, 485 aa, Sorghum bicolor
  Clone ID: LIB3476-030-C4_FLI.pep
PERNKNSAPREVVVVVLEQQQRAGEGREMPGGAFLLNSGGGMADSGGGLTVPVVVTCLMAASGGLIFGYDIGISGGVSEMEAFLKKFFPGLLKSTARGGNKDVYCIYNNQALTAFTSSLYAFGMVGTLLASRVTRRLGRQAVMLIGGSLFLAGALVNAAAANLAMLIVGRMLLGLGLGFSGQATPVYLAEVSPPRWRGGFISAFPLFISIGYLVANLINYGTSRIPDWGWRLSLGLAAVPAAVMVAGAAFIPDTPSSLVLRGKHDDARAALQRVRGKGVDIGAEFADILAAAESDRRNEEGAFRRILRREYRPYLVMAVAFPVFLNLTGVAVTAFFSPILFRTVGFESDAALMGAVILGLMNIGGILASGFAMDRYGRKLLFVIGGALMFTCQVAMASIIGSQLGNGSKMPKGYAVTNRRAEQIVDCSSRLPRLGPLAVDGGRLSPAASNQALKVTRHKSPQHAMILFSPLIYRVFSSPSIPEKF

SEQ ID NO: 63426 - protein, 525 aa, Oryza sativa nipponbare
  Clone ID: LIB3477-003-F9_FLI.pep
LAMPGGGAMVAASGAGRPEYPGGLTMFVSMACLVAATGGLIFGYDIGVSGGVTSMDPFLSRFFPSVYRAQSAAAAAAGGNQYCRFDSQLLTMFTSSLYLAALASSLGAATVTRVAGRKWSMFAGGLVFLAGCALNGAAANVAMLIVGRVLLGVGIGFANQSVPVYLSEMAPARMRGMLNNGFQMMITTGVLAANLINYGTARIAGGWGWRLSLALAAVPAAVMTAGALFLPETPNSLLERGRRGEARRMLQRVRGEGVDMEDEYNDLVAAGEASHAVASPWRDILRRRNRPPLVMAVAIPLFQQLTGINVIMFYAPVLFRTLGFGGGASLMSAVITGGVNMAATLVSVLAVDRVGRRALFLEGGAQMVASQAAVGALIGARLGWSGTAAIPAGYAAAVVAAMCVYVAAFAWSWGPLAWLVPSEVMPLEVRPAGQSITVAVNMAMTFAVAQAFLPLLCRLRFVLFFFFAGWVAAMTAFVALFVPETKGVPIEDMAAVWSDHWYWKRFVDGDGDGARRRGDIEMGHK

SEQ ID NO: 63427 - protein, 546 aa, Oryza sativa
  Clone ID: LIB4370-006-F8_FLI.pep
LHSTLAFLWSRAPLREGRSGWVGEWSWSMAIGAFVESGGGGGGGGGGGYGGRVTAYVVLTCVVAGSGGILFGYDLGISGGVTSMDSFLKRFFPDVYQKKQDTRVSHYCAFDSELLTVFTSSLYIAGLVATLFASSVTRRYGRRTSMLIGGTVFIAGSVFGGAAVNVFMLLINRILLGIGLGFTNQSIPLYLSEMAPPRYRGAINNGFELCISLGILFANVLNYCVVKITAGWGWRISLSMAAVPAAFLTIGAVFLPETPSFIIERDGDTDKARILLQRLRGTTSVQKELDDLVAASNLSRTVQYPFRNIFKRKYRPQLVIALLVPFFNQLTGINVMNFYAPVMFRTIGLKESASLLSSVVNRLCATFANIMAMIVVDRFGRRKLFLVGGIQMILSQLAVGAILAAEFKDYGSMDREYAYLVLITMCVFVAGFAWSWGPLTFLVPTEICPLEIRSAGQSIVVAVVFLMTFVIGQTFLAVLCRIKSGTFFFFAGWICLMTVFVYFFLPETKKLPMEQMEQVWRKHWFWKKIVGEEEEKQAEKTALPSM

SEQ ID NO: 63428 - protein, 514 aa, Oryza sativa
  Clone ID: LIB4370-006-H11_FLI.pep
RSRLPLSQIPRLTSSCCCLRCVALRCLFLRSAPMRWKLKSSAYKRVPSRDAAMDLDVETPAKMADGGAPSWRMSLPHVCVATLTSFLFGYHSGVVNEPLESISTDLGFAGNTLAEGLVVSICLGGAFVGCLFSGSIADGIGRRRAFQLSALPMIIGAAVSALTNSLEGMLLGRFLVGTGMGLGPPVASLYITEVSPPSVRGTYGSFVQIATCLGIVVSLLIGTPVKDIDRWWRVCFWVAAVPATLQALGMEFCAESPQWLYKCGRTTEAEIQFEKLLGPLHVKSAMAELSRSERGDDGENVKYSELFYGRNFNVVFIGTTLFALQQLSGINSVFYFSSTVFRSVGVPPNLANICMGIANLSGSIVAMLLMDKLGRKVLLSGSFLGMAFAMGLQAVGANRHHLGSASVYLSVGGMLLFVLTFSLGAGPVPGLLLPEIFPNKIRAKAMALCMSVHWVVNFFVSLLFLRLLEQLGPQVLYTMFSSACVVAAIFVRRHVVETKGKTLQEIEVSLLQTQ

SEQ ID NO: 63429 - protein, 336 aa, Oryza sativa
  Clone ID: LIB4370-026-E2_FLI.pep
RAMFLVGAVPPIFLGIAVLAMPESPRWLVMRGRIEDARRVLLKTSDSPDEAEDRLLDIKKAVGIPEDASDGEDVVAIVRANKASQGEGVWKELLLNPTRPVRRMLVAGLGLMFIQQATGVDCVVMYSPRVFERAGIKSKTNSLGASMAVGVCKTFFIPIATLLLDRVGRRPLLLASGGGMAIFLFTLATSLLMMDRRPEGEAKALGAISIAAMLSFVASFASGLGPVAWVYTSEIYPVRLRAQAAAIGTGLNRLMSGATTMSFLSLSNAITIAGSFYLYASIAAAGWVFMYFFLPETKGKSLEDTVKLFGKDTDDDDDVDTSRHERKRSTELSAQH

SEQ ID NO: 63430 - protein, 489 aa, Oryza sativa
  Clone ID: LIB4309-039-E8_FLI.pep
ERKRLRERRRHAEAAADAHGELVQDGVAAGEPHRRGDLVHGHPTRVPRLRLPLHAHRRARPHPVRIHGGLLLPDAGRHHPRPRPHPLRVLGVRIAVQRRRHGWGDCQWSDGRVHWAQRVIDDCCNSNIIGWLAISFAKDSSFLYMGRLLEGFGVGVISYTVPVYIAEISPQNMRGALGSVNQLSVTVGILLAYLLGMFVPWRLLAVIGILPCTVLIPGLFFIPESPRWLAKMNMMDDFETSLQVLRGFETDISAEVNDIKRAVASANKRTTIRFQELNQKKYRTPLILGIGLLVLQQLSGINGILFYAGSIFKAAGLTNSDLATCALGAIQVLATGVTTWLLDRAGRRILLIISSAGMTLSLLAVAVVFFLKDSISQDSHMYYTLSMISLVALVAFVIAFSFGMGAIPWIIMSEILPVSIKSLAGSFATLANWLTSFGITMTANLMLSWSAGGTFVSYMVVSAFTLVFVILWVPETKGRTLEEIQWSFR

SEQ ID NO: 63431 - protein, 523 aa, Oryza sativa
  Clone ID: LIB4371-017-F11_FLI.pep
RDLVSPRESNHCRRSRDREGGAMNRGGGVGVGDESGSDYESGGGMRKPLLMHTGSWYRMGSRQGSLTGAGTSSMAILRESHVSAFLCTLIVALGPIQFGFTGGFSSPTQDAIIRDLDLTLSEFSVFGSLSNVGAMVGAIASGQMAEYIGRKGSLMIAAIPNIIGWLAISFAKDSSFLYMGRLLEGFGVGVISYTVPVYIAEISPQNMRGALGSVNQLSVTVGILLAYLLGMFVPWRLLAVIGILPCTVLIPGLFFIPESPRWLAKMNMMDDFETSLQVLRGFETDISAEVNDIKRAVASANKRTTIRFQELNQKKYRTPLILGIGLLVLQQLSGINGILFYAGSIFKAAGLTNSDLATCALGAIQVLATGVTTWLLDRAGRRILLIISSAGMTLSLLAVAVVFFLKDSISQDSHMYYTLSMISLVALVAFVIAFSFGMGAIPWIIMSEILPVSIKSLAGSFATLANWLTSFGITMTANLMLSWSAGGTFVSYMVVSAFTLVFVILWVPETKGRTLEEIQWSFR

SEQ ID NO: 63432 - protein, 601 aa, Oryza sativa nipponbare
  Clone ID: LIB3474-003-F4_FLI.pep
IREIAMEGGVHEFDGSTFRECFSLSWRNPYVLRLAFSAGIGGLLFGYDTGVISGALLYIRDDFPSVDKNTWLQEMIVSMAVAGAIIGAAIGGWANDRYGRRTSILVADALFFAGAAVMASATGPAQLVVGRVFVGLGVGTASMTSPLYISEASPARIRGALVSTNGLLITGGQFLSYLINLAFTKAPGTWRWMLGVAAIPAVVQFFLMLFLPESPRWLYRKGREEEAEAILRKIYSAEEVEREKEELKESVEAEARERSSSEKTSLVALLMTTATVRRGLVAGVGLQVFQQLVGINTVMYYSPTIVQLAGFASNQTALALSLVTAGLNAAGSLVSIYFIDRTGRRKLLVISLAGVILSLALLSAVFHEATSHSPPVGAAETAHFHGGALTCPDYSSRSSSSFWDCTRCLKAAAASAGCGFCAAGGGDKLRAGACLAAAAAASNATARDACRGEGREWYTRGCPSRYGWLAMAGLALYIAAFSPGMGTVPWIVNSEVYPLRHRGVCGGAAATANWVSNLAVAQSFLSLTDAIGAAWTFLIFGGLSVAALAFVLVCVPETKGLPIEEVEKMLEGRELRLRFWAKRRHHHGGDGDGGGEKTGGV

SEQ ID NO: 63433 - protein, 392 aa, Zea mays
  Clone ID: UC-ZMFLB73029E12_FLI.pep
EGGEMNGGGEDGKQQPHLVLAHKLFLLSHSDVDDLAKVDLRADVFAAVKSDDMAALYESLAADGVLETDAALLAEMRARIDEEIRKLDEKIADAEENLGESEVREAHLAKSLYFIRVGEKEKALEQLKVTEGKTVAVGQKMDLVFYTLQIGLFYMDFDLISKSIDKAKNLFEEGGDWERKNRLKVYEGLYCMATRNFKKAASLFLDSISTFTTYELFTYDTFIFYTVLTSVISLDRVSLKQKVVDAPEILAVIGKVPHLSEFLNSLYNCQYKSFFIAFSGLTEPIKLERYLQPHFRYYMREVRTVVYSQFLESYKSVTMEAMAAAFGVTVDFIDQELSRFIAAGKLHCKIDKVAGVLETNRPDARNAFYQATIKQGDFLLNRIQKLSRVIDL

SEQ ID NO: 63434 - protein, 362 aa, Zea mays; identical to SEQ ID NO: 56326
  Clone ID: UC-ZMFLB73068H08_FLI.pep

SEQ ID NO: 63435 - protein, 551 aa, Zea mays; identical to SEQ ID NO: 58625
  Clone ID: UC-ZMFLB73095E07_FLI.pep

SEQ ID NO: 63436 - protein, 158 aa, Zea mays
  Clone ID: UC-ZMFLB73101H09_FLI.pep
NTVRPHNCSKSKLAPQNIVLSFLDCPNRFEHNNKTQSKSLSCILSRRRDITNRPPITTSSTVNNFPTMRRMPISHLLLASRTREQTCSLLWRWWWRGVQVSTGIRQSIARYSCLTNGGIRSPMAERGRGRCECGPPDSVSLRSTGTSNSTRRGKGCGT

SEQ ID NO: 63437 - protein, 231 aa, Zea mays; identical to SEQ ID NO: 43391
  Clone ID: UC-ZMFLB73121C02_FLI.pep

SEQ ID NO: 63438 - protein, 480 aa, Zea mays
  Clone ID: UC-ZMFLB73121H05_FLI.pep
PISATQSFPQFPPFSHFSPPPSLPPFNNTMRECISIHIGQAGIQVGNACWELYCLEHGIQADGQMPGDKTIGGGDDAFNTFFSETGAGKHVPRAVFVDLEPTVIDEVRTGTYRQLFHPEQLISGKEDAANNFARGHYTIGKEIVDLCLDRIRKLADNCTGLQGFLVFNAVGGGTGSGLGSLLLERLSVDYGKKSKLGFTVYPSPQVSTSVVEPYNSVLSTHSLLEHTDVAVLLDNEAIYDICRRSLDIERPTYTNLNRLVSQVISSLTASLRFDGALNVDVNEFQTNLVPYPRIHFMLSSYAPVISAEKAYHEQLSVAEITNSAFEPSSMMAKCDPRHGKYMACCLMYRGDVVPKDVNAAVATIKTKRTIQFVDWCPTGFKCGINYQPPSVVPGGDLAKVQRAVCMISNSTSVVEVFSRIDHKFDLMYAKRAFVHWYVGEGMEEGEFSEAREDLAALEKDYEEVGAEFDEGEDGDEGDEY

SEQ ID NO: 63439 - protein, 298 aa, Zea mays
  Clone ID: UC-ZMFLB73126E08_FLI.pep
SISSISLHPLSRCLRRTACPCSLFRSSPRPARHPQTSFQAGMDDYAREMMELKTLVTRTLEKKGVLAKIRAELRASVFEAIEEEDRVENDDGGNPALLGSCNDRAKQLHASPSGRLLTALVCEYLEWAQLSHTMKVYLPECNLPKDFWKNELKDFSNKSGAEGSRSAESGPMLLDVLEGYLKYENLSQTRMGGRRMMSSESDPSLNVEHRSMRRAPLSSAGNLPPMGRPISSSQQASDRRGGSSASNTRKDEYNWRYDTTDDISEEVLRASTALESVQLDRKSRNLPTSWRHSGDGAE

SEQ ID NO: 63440 - protein, 265 aa, Zea mays
  Clone ID: UC-ZMFLB73126F09_FLI.pep
RIILRETQLRAFYSTTEEISSLFAKQQEQLKAMQRTLEDEENYESTLMGVDLNKVPLTTDNAGMKPVDCSKNTVGASSASPENTQVSEHDSSDEDANMTEQQDDDGTAIGGSTQGLECTSPERSEGRLKSGFHGNPVSTAPEREVTDTEQVPETDSQAGNAGCDDQRCDNTGGETMPLEDDMLLPDNEEPTALLKDVGQPQANVVPIPIPGDGVGHCFEEKHEGACSESKREDTHAGAIRTNLQGAWAMLQSTMKLEAAWQAMLW

SEQ ID NO: 63441 - protein, 414 aa, Zea mays; identical to SEQ ID NO: 54290
  Clone ID: UC-ZMFLB73127A05_FLI.pep

SEQ ID NO: 63442 - protein, 170 aa, Zea mays
  Clone ID: UC-ZMFLB73128C03_FLI.pep
ATHCRNKIHLLTSERNGSNTYGKNNESTIRKQQMQTNLQMEGGQTHVPWRRTPARLRWLTRSGRQRGGPGHRRGGGPGALLHHERADLRREDYGWLRPRTESSSWSRRSQEVSGELRHEHAHLGAALVRRAHRPRLLEHVPRAAPRHHFEDPAALLLVVVATVVLAVAVV

SEQ ID NO: 63443 - protein, 279 aa, Zea mays; identical to SEQ ID NO: 54031
  Clone ID: UC-ZMFLB73131B09_FLI.pep

SEQ ID NO: 63444 - protein, 1116 aa, Zea mays
  Clone ID: UC-ZMFLB73131F05_FLI.pep
PFPPRRRYRRRRTHACPGIWRSGSARGMEASAGLVAGSHNRNELVVIRRDGEPGPKPMDQRNGQVCQICGDDVGRNPDGEPFVACNECAFPICRDCYEYERREGTQNCPQCKTRFKRLKGCARVPGDEEEDGVDDLENEFNWSDKHDSQYLAESMLHAHMSYGRGADLDGVPQPFHPIPNVPLLTNGQMVDDIPPDQHALVPSFVGGGGKRIHPLPYADPNLPVQPRSMDPSKDLAAYGYGSVAWKERMESWKQKQERMHQTRNDGGGDDGDDADLPLMDEARQPLSRKIPLPSSQINPYRMIIIIRLVVLCFFFHYRVMHPVPDAFALWLISVICEIWFAMSWILDQFPKWFPIERETYLDRLSLRFDKEGHPSQLAPVDFFVSTVDPLKEPPLVTANTVLSILSVDYPVDKVSCYVSDDGAAMLTFEALSETSEFAKKWVPFCKRYSLEPRAPEWYFQQKIDYLKDKVAPNFVRERRAMKREYEEFKVRINALVAKAQKVPEEGWTMQDGTPWPGNNVRDHPGMIQVFLGQSGGHDVEGNELPRLVYVSREKRPGYNHHKKAGAMNALVRVSAVLTNAPYLLNLDCDHYINNSKAIKEAMCFMMDPLLGNKVCYVQFPQRFDGIDRHDRYANRNVVFFDINMKGLDGIQGPIYVGTGCVFRRQALYGYDAPKTKKPPSRTCNCWPKWCICCCCFGNRKTKKKTKTSKPKFEKIKKLFKKKENQAPAYALGEIDEAAPGAENEKASIVNQQKLEKKFGQSSVFVASTLLENGGTLKSASPASLLKEAIHVISCGYEDKTGWGKDIGWIYGSVTEDILTGFKMHCHGWRSIYCIPKRAAFKGSAPLNLSDRLHQVLRWALGSIEIFFSNHCPLWYGYGGGLKFLERFSYINSIVYPWTSIPLLAYCTLPAICLLTGKFITPELNNVASLWFMSLFICIFATSILEMRWSGVGIDDWWRNEQFWVIGGVSSHLFAVFQGLLKVIAGVDTSFTVTSKGGDDEEFSELYTFKWTTLLIPPTTLLLLNFIGVVAGISNAINNGYESWGPLFGKLFFAFWVIVHLYPFLKGLVGRQNRTPTIVIVWSILLASIFSLLWVRIDPFLAKDDGPLLEECGLDCN

SEQ ID NO: 63445 - protein, 408 aa, Zea mays
  Clone ID: UC-ZMFLB73137D09_FLI.pep
DQSAHRTMSAAETAVSPTTTPQPQLQSDPNAAADAASSNSLWVADETQTLTEVLLQPQPNHLSPPPSGEGDDGITASGAPVGGDAAASASAAAAANATIEERVRGPWSPEEDAVLSNLVEKFGARNWTLIARGIPGRSGKSCRLRWCNQLDPQVKRKPFTEEEDRIIMAAHAVHGNKWASIAKLLDGRTDNAIKNHWNSTLRRRYCNDGQCKHGGSVERSIPKVSREVSEEPWPLNDLNSFTAMDVKDDPVQTAPDTSPRARHITDHCSITQVVDPPYLSRPAAKIGAFRPYYLGHTEPTQQEMPGAVVMFDSTHKVSTPESEVFKFVDPICFAAEVPDKCGYGCCGAHEQHRKNSLLGPEFSEFEGHPPVLNISFASLVSEISSIAWMRSGMQSSDSSNLMQSIPPT

SEQ ID NO: 63446 - protein, 479 aa, Zea mays
  Clone ID: UC-ZMFLB73139A07_FLI.pep
FVLAYLRDSKLLPFPTAAAAAPPHSVDTMRECISIHIGQAGIQVGNACWELYCLEHGIQADGQMPGDKTIGGGDDAFNTFFSETGAGKHVPRAVFVDLEPTVIDEVRTGTYRQLFHPEQLISGKEDAANNFARGHYTIGKEIVDLCLDRIRKLADNCTGLQGFLVFNAVGGGTGSGLGSLLLERLSVDYGKKSKLGFTVYPSPQVSTSVVEPYNSVLSTHSLLEHTDVAILLDNEAIYDICRRSLDIERPTYTNLNRLVSQVISSLTASLRFDGALNVDVNEFQTNLVPYPRIHFMLSSYAPVISAEKAYHEQLSVAEITNSAFEPSSMMAKCDPRHGKYMACCLMYRGDVVPKDVNAAVATIKTKRTIQFVDWCPTGFKCGINYQPPSVVPGGDLAKVQRAVCMISNSTSVVEVFSRIDHKFDLMYAKRAFVHWYVGEGMEEGEFSEAREDLAALEKDYEEVGAEFDEGEEGDDGDEY

SEQ ID NO: 63447 - protein, 535 aa, Zea mays
  Clone ID: UC-ZMFLB73141F11_FLI.pep
SLFPQPHPSGSPCAVAAAAPGSARTDSTEGSAPLGLHLRRPALCLHRRCPAPSASTSGARLQEMYKSRLQELCQKRRWAPPLYEPTREGPAHAPLFRATVVVNGERFSSRDEGEKSLKEAYNLAAMAAFDNLIALPAAALAPAPAAPAPPSSETQLPYKSQLQIYAQKRGKLLPSYRPIHGGSLHAPLFKSEVTIDGQTFESPEYCHTMKEAETVAAKVALMSLPQEANPTQQLLLPSVNYKNLLQELVQKEGFPLPIYNTASDVSNYSAAFVSTVEIHGVTFHGKPGNTKKQAEMNAAKSAFEHFKNINHDAGSSGSANPLPVAATKQSVDGNTLRAKLEVNKSHLAEPSTEVEAIYSSTEVDKLPLPGPSMDIEVMDSTLEVDKLPLPERSMDVKVVNSSLKVDKLHFAEPITEAEVIHSSLQVDEPLIPKPGMSSSLENTPAVNGHSAPISPTITPTLISVPTATMPVSNDRCGCYMSTNRIQVYPRHTDMVIPEGAAVLPISDNQWVAVSLPYSMEQRDFCCRNPDCHLGR

SEQ ID NO: 63448 - protein, 615 aa, Zea mays
  Clone ID: UC-ZMFLB73148G03_FLI.pep
APPRVPVRLRSPDPRSQAELLPWSTLQYAARQGPGARTSVLRRRDRRARGALKSALPSPDGRCQALLGRGSKRNMELRRLLLLALICLRAPRLASAQQPDEATVIVKGSTRIAETDDNYVCATIDWWPPEKCNYNQCPWGQASILNLDLDHPFLAQAIQAFDHLRIRLGGSLQDRVVYDVGTESPCSPFTNVSNALFGFSVGCLGMDRWDKLNDLFERTGAIVTFGVNALYGRYNVRRSIWAGKWNSTNAYDFVKYTISKGYPVGSWEFGNELSGHGIGAKVDAKLYGKDVIEFKSILRQLYKAPLSQPLLLAPGGFFDQQWYSQLLETSGHGVVNALSHHVYNLGGGNDVHLIRKILDPKYLDRAEDTYRDMQLTIQRHGTWASAWVSESGGVFNNGGQLVSNTFINSIWYLDQLGMASKYNTKVFCRQTLIGGNYGLLDTQTFLPNPDYYSALLWHRLMGNGVLSVDINAPRQIRAYAHCRKQQQGITILLINLSNTTGYNVTLQNDINVSLGKRPDLEKRSSFTHRLRKAVSWLGRKPASNTRRREEYHLTAKDGDLQSKTMLLNGAPLELGDAGSIPAMDPVLVAVDLPVQLAPTSIAFVVLPKFEAKACS

SEQ ID NO: 63449 - protein, 317 aa, Zea mays
  Clone ID: UC-ZMFLB73148G09_FLI.pep
KPRLGPLLPPISLSLVLLTSTRFGSSFTPTAVSATSPVPRFVLACQAAMAATSPFDCVLLDLDDTLYPGDTGIGAALRRNIDEFLQAKLGVSADEAAATRAELFRAHGSSLAGLIALGYDVHPDEYHSYVHGRLPYDRIARDPQLARLLQSIPQRKVLFTNSDRAHMERALERLGVDEAAFDAVVCFETMNPHLFGDDGGDRRPAVVLKPAVDAIVAGLRAAGSNPRRTLFLDDSERNIAAGKALGLRTALVGKRARSKEADYAVESIGALRRAIPEIWGEAAERSSDKLPVPAVSVVRSTTSDLDSIIIQPTSIHA

SEQ ID NO: 63450 - protein, 488 aa, Zea mays; identical to SEQ ID NO: 46968
  Clone ID: UC-ZMFLB73151C06_FLI.pep

SEQ ID NO: 63451 - protein, 325 aa, Zea mays
  Clone ID: UC-ZMFLB73151H11_FLI.pep
LVGQGAFGKVYQVRKKGTSEIYAMKVMRKDKIVEKNHAEYMKAERDILTKVDHPFVVQLRYSFQTKYRLYLVLDFINGGHLFFQLYHQGLFREELARIYTAEIVSAVAHLHANGIMHRDLKPENILLDADGHAMLTDFGVAKEFDENTRSNSMCGTVEYMAPEIVQGRGHDKAADWWSVGVLLFEMLTGKPPFVGGNRDKIQQKIVKEKIKLPTYLSSEVHSMLKGLLHKEAGRRLGSGPGGSDEIKNHKWFKSVNWKRLEARQIEPSFRPNVAGKTCIANFDECWTNMPVLDSPVASPVAANSNFVGFSYVRPAPFLQKPSPLG

SEQ ID NO: 63452 - protein, 286 aa, Zea mays
  Clone ID: UC-ZMFLB73155A05_FLI.pep
KLGRIVDSRAGRALLPGILMDASLRGVQKYLSEKAAAAVQALLPESAGGELSTVCPWADQVRWHYHWASPLHYANTPQVCNFKYSRDCHNSRGQQGMCVVGAINNYTDQLYSYGQKTSYNLTESLMFLAHFVGDVHQPLHVGFQDDEGGNTITVHWYRRKANLHHVWDVSIIDTAIKDFYNKSMDTMVEALKMNLTDGWSDDIVHWENCKNKHATCANDYAIESIHYSCNYAYKDVEQDITLGDDYFFSRYPIVEKRLAQAGIRLALVLNRIFGGGEADDIPLQVQ

SEQ ID NO: 63453 - protein, 292 aa, Zea mays
  Clone ID: UC-ZMFLB73157C04_FLI.pep
SPPSRPRAVPPLLPLVAPRRAMQARVVVFPVKGRAWCFALPRASAAAPAADGALPRPTLRDLWRGISSGSRTAPEKAEAVVDFVADKMNRAWVGFGSAPEGSMKSRIHSFGLKLLSRVRPSEVLLKSVTKDVSALEIVHPASINSRLVRRRLRHIAVRGASVHKKFLYGSVCLLPVTSVFMVLPLPNIPFFWVLFRAYSHWRALQGSERLELLVSDCSDKWKVLEEKINSVKDGKPSENARNSPWKLRPSEKLDRFLEGRNLDEGLDCDTILSICQEYDLDKIDVLKYRDLL

SEQ ID NO: 63454 - protein, 377 aa, Zea mays
  Clone ID: UC-ZMFLB73157H11_FLI.pep
TGQTPPRRPTPARSESATPRPRVFVFITPESRLQSPQSSPASPPFPSPMELFARAKVVRLRSHHDKFLYADEDEVRVTQDRDGSSANARWTVEAAPHSAGAVRLRSRYGRYLTASGEPFLLGMTGRKVRQTAPAAPRPANASVDWEPLRDGFQARLRTKAGHFLRANGGLPPWRNSVTHDVPHRTATQDWVLWDVEVVQLLTPAPRPERTGSAPVAKLPDSPPAPDLGKPPQAHGPHHRPSKSYATPPPTLEPVAPPPPPPPPSRLNKLESSLSFSAPLHKVEGRAIHYHIADDLGNVDEGTVGHSFTFNGSNLEELAHKLQEETGLEDIIICTRSPINGKLTPLRLQLPPNNAAMHIVLVQESSKVAKSFPWPYGS

SEQ ID NO: 63455 - protein, 475 aa, Zea mays; identical to SEQ ID NO: 58658
  Clone ID: UC-ZMFLB73158D09_FLI.pep

SEQ ID NO: 63456 - protein, 494 aa, Zea mays
  Clone ID: UC-ZMFLB73158F08_FLI.pep
SAIVKSFSCRGREGFANMALAGTSKVVLGCIAFGIFWVMAVFPTVPFMPVGRTAGSLLGAMLMVLFRVISPEDAYAAIDLPIIGLLFGTMVVSIFLERADMFKYLGNLLSWKSRGSKDLLFRVCIVSAFASALFTNDTCCVVLTEFILKVARQNNLPPQPFLLALATSSNIGSAATPIGNPQNLVIAVESGISFGQFLLGVFPAMIVGVLTNAAILLLYFWKYLSVEKDQEGGQPTGPEVVADDEVTSHRFTPARMSHVSSLNPDDMDCVSEPIIRSNSVSTTGNENLRSRSINSEADIQLAIKSLRASSMSHEMVEVSTVPDRRDEGASSRKFTRTASQQRSVIIEDLAPSPEINGEKEKETEVAEKRWKVLVWKTAVYLITLGMLIALLMGLNMSWTAITAALVLLALDFTDAQACLEKVSYSLLIFFCGMFITVDGFNKTGIPNTLWELVEPYSRIDSAKGVALLAVVILILSNVASNVPTGNFSYAYDHV

SEQ ID NO: 63457 - protein, 652 aa, Zea mays; identical to SEQ ID NO: 38995
  Clone ID: UC-ZMFLB73159A10_FLI.pep

SEQ ID NO: 63458 - protein, 474 aa, Zea mays
  Clone ID: UC-ZMFLB73159B03_FLI.pep
VNENDTKPDEAKINAMIGRSNQQFLARVGAIELDDQGQEESGSEKNDMYTILPWVDGVARLVLILGLEDVSAIKKAARAMGDASINEHMRTSFKEAGAVKPLLQLLKHKDVHVREAGAYALEKLCVSATVCHNIKTEGGLELLVNIVKDRHTPVELLEKIIYILSRMFDMGICMVAVPDTEGYKDSENSAKTSVNQEMSSELIFDFDAISHLTEVLKEASPRLQAKVCCVLDHIAASEQHATAMTAACTGSVIEAILEIGVIHGTRSDSENFEIPSVVIKELSEAVSAAVRLLSKLLNFDLFIRSINGEKITSLLRRTLKSNFPLQSKDCLAACLIKLESRAGLSGDHGVSSIDMEITIYETIPRLIEQMMISLSFENKRSAVIELNKIISGGVLEYTRAVADSGGIFPLVKMLEEADGDALEAILSILYNLSMDPENHPAIIAAGAVPLLKRIVRTEAPQWSSAIQLLRTLPV

SEQ ID NO: 63459 - protein, 451 aa, Zea mays; identical to SEQ ID NO: 61496
  Clone ID: UC-ZMFLB73161C10_FLI.pep

SEQ ID NO: 63460 - protein, 313 aa, Zea mays
  Clone ID: UC-ZMFLB73162G09_FLI.pep
HHFCIAQSHCKTLIRFFLKLESEFEEQWANEGILGWGNKGTEKESEIDLDYYSTVEELVELGPEKLKQALAARGLKSGGTVQQRADRLFLLKVTPLEQLDRKHFAKVPHTKDGSNTAPNGNAFKEDMKKEIALMEVKMKRLCELLDEAFVRTKENAEKKLTLTYEEMEAEREEEEVQVDTESDDEEQQIYNPLKLPMGWDGKPIPYWLYKLHGLGQEFKCEICGNHSYWGRRAYERHFKEWRHQHGMRCLGIPNTKNFNEITSIEEAKALWEKIQARQGVNKWRPDLEEEYEDQEGNIYNKKTYTDLQRQGLI

SEQ ID NO: 63461 - protein, 313 aa, Zea mays
  Clone ID: UC-ZMFLB73163B09_FLI.pep
SVDRSMAIISDFKDDEAPEQQLAAGHGVEVALVAALERSGGALPFLQAAMDVAHRRSGLFRDPSAVSKVTAMAAAVRAQIEAEERVTREAEAKRKAEEDERKAEAEAQRAAKEAVMATAEEKPESTVEKDSMEVDKKEEANVRQPNAGNGLDLEKYSWTQQLPEVNITIPVPQGTKSRFVVFDLKKNHLKVGLKGQPPIIDGELYKPVKVDDCFWSIEDGRTLSILLTKHDQMEWWKSVIKGDPEVDTQKVEPENSKLSDLDPETRQTVEKMMFDQRQKQMGLPTSDEMQKQEILKKFMSEHPEMDFSRAKLD

SEQ ID NO: 63462 - protein, 463 aa, Zea mays
  Clone ID: UC-ZMFLB73166E02_FLI.pep
PSSSSPDPPPTAVRDHQPGYRATSSRRPARRPPRCTYVCRGATRADMAQLKAARATDVPPAMPDPDPDVVAADLGACVRHGRVDGLAAGSGRAEATATATTTAAAADQGRRRPPLVVVGHRGKGMNALASPDPRLRGDIRENTLRAFNAAAASHPAVAYVEFDVQVTRDGCPVIFHDNFIYTQQDGQVSAKRVTELNLDEFLSYGPQRDQGKAGKPLLRKLKDGRILKWDVQSEDALCTLREVFEGVHRRVGFNVELKFDDDLFYTEERLTCILKSVLKVVFEHANDRPIIFSSFQPDAAQLIRKLQDKYPVLFLTNGGTQVYADPRRNSLEEAVKLCVAGGLQGIVSEVRAILRQPSAVAKIKEANKLSLMTYGQLNNVAEVVYVQHLMGVDGVIVDLVQEIAEAVSAFTVVTAVQASGSQDGGGIVVGERMETAAVAVAGTPSFSPREVSFLLRLIPELVQ

SEQ ID NO: 63463 - protein, 493 aa, Zea mays
  Clone ID: UC-ZMFLB73172A06_FLI.pep
ALAAADASDCASPCVPSSEGAFGGGSRAFSAPSKADASAAASELDGLPRFEKNFYVESPAVAGMTEEEVEAYRRRREITVDGRDVPKPVREFRDVGFPEYVLQEITKAGFVEPTPIQSQGWPMALRGRDLIGIAETGSGKTLAYLLPAIVHVNAQPILSPGDGPIVLVLAPTRELAVQIQQEATKFGASSKIKSTCIYGGVPKGPQVRDLQKGVEIVIATPGRLIDMIESHHTNLRRVTYLVLDEADRMLDMGFEPQIKKIVSQIRPDRQTLYWSATWPKEVEQLARNFLFDPYKVTIGSEDLKANHAIVQHVEILSESQKYNKLVNLLEDIMDGSRILIFMDTKKGCDQTTRQLRMDGWPALSIHGDKSQAERDWVLSEFKSGKSPIMTATDVAARGLDVKDVKYVINYDFPGSLEDYVHRIGRTGRAGAKGTAYTFFTAANARFAKELINILEEAGQKVSSELAAMGRGAPPPSSGYRDRYRGYGGGRSWS

SEQ ID NO: 63464 - protein, 565 aa, Zea mays
  Clone ID: UC-ZMFLB73173G03_FLI.pep
LINNCNLYRRVRDRINPARHARCSNLPTLPEPSERVTCTSNFSLFFFTFRCRSSRGCRRLRRGPLDEGCPERVLHDDGECEGLGGVRRALTGGRQPAELAHHVGEHELDVEHAERGGGADAAAGAEGHHAQRAGAGDVGVEALAALQEALRPPRVRVRPRRRVLRHPRRVELHAGVRRHAVPAQLRVPRRRVRQHEVARRVPPERLLHHRLEVGHGLDVGFGDPGGLADLGDDLVVEALLRGGVEDEVHHGPFQRCGAGVCAGAHDLGAERDELLLAEALPAAGRLQVEERVHVRFPGPAHHLHAVRRCRGAVAEEVPSRADERHEAVELAAAQAAGLGELLPEERREEGQEVRELGHGHHHHVLEHLLDLPDELVGDLGAEADADEDAADGEAAAGHDPHGTVRRELGAEAAQVRVHGPLPDPGEALDAVRGHDLGDEVAAQSTPQGAVGRRVDGALADAEEEAGGAVLGPAREHGALLHQRLVDELRRGDHDEGALPHPHGEDGPVLLPEVAHHVHEGPSLQDHLEQVPHHRPTRRPRREAVDTAGLGAPTPPHGSQRRRQHH

SEQ ID NO: 63465 - protein, 507 aa, Zea mays
  Clone ID: UC-ZMFLB73175B05_FLI.pep
GRRRGERTMTSALRRKAAQMASAATQCFSYSSLPATWALRQRGGGASVLRLSSRRTFSVSAAAGFDNQNREYVIVGGGNAAGYAARTFVEHGMADGRLCIVSKEPVPPYERPALTKGYLFPPDKKPARLPGFHTCVGSGGQRQTAEWYKENGIEVLYEDPVVAFDGKTQTLKTSSGKVLKYGSLIISTGCEASRLPEKIGGKLPGVHYIRDVADADALVSSLGSAKKVVVIGGGYIGMEVAAAACGWNLDTTIIFPEDHIMPRLFTPSLAKKYEELYQQNGVKFIKGALIEKLGAGSDGRVSSAVLKDGSVVEADTVIVGIGAKPVVSPFEAVGVNPKVGGIEVDSLFRTSVPGIFAIGDVAAFPLKMYNRIARVEHVDHARKSAHHCVETLLTSQTKAYDYLPYFYSRVFEYEGSSRKVWWQFYGDNVGEAVEVGNFDPKVATFWIDSDSRLKGVFLESGTSEEFSLLPQLAKSQPVVDKSKLQAATSVEDALEIARSSLRSSAMV

SEQ ID NO: 63466 - protein, 460 aa, Zea mays
  Clone ID: UC-ZMFLB73178B02_FLI.pep
LDPRQAMAMEEEQTPPELRYLSGLGNTFTSEAVPGSLPVGQNNPLVCPLGLYAEQLSGTSFTTPRARNLRTWLYRIKPSVTHEPFYPRNPTNERLVGEFDRTTTVATPTQLRWRPADVPLHPGLDFIDGLYTVCGAGSSCLRHGYAIHMYAANKPMDGCSLCNADGDFLIVPQQGRLFITTECGRLLVSPGEIVVIPQGLRFAVDLPDGPSRGYVSEIFGAHFQLPDLGPIGANGLASPRDFLSPTAWFEQEHHPGYTIVHKYGGELFSATQDFSPFNVVAWHGNYVPYKYDLSKFCPFNTVLLDHGDPSVNTVLTAPTDKPGVALLDFVIFPPRWLVAENTFRPPYYHRNCMSEFMGLIYGMYEAKADGFLPGGASLHSCMTPHGPDTKTYEATISRAAANEPSRLSGTLAFMFESWLIPRVCPWALDSPCRDLDYYQCWIGLKSHFSPPAAAVDDENE

SEQ ID NO: 63467 - protein, 395 aa, Zea mays
  Clone ID: UC-ZMFLB73178C07_FLI.pep
AEGAKMVKDTRYYDVLGVDPSATESEIKKAYYVKARLVHPDKNPNDPQAAEKFQELGEAYQVLSDPTQRQAYDSHGKDGISTEGIIDPATIFAILFGSELFEEYIGQLAMASMASLDNFGEDEQIDARKLQERMQAVQKDREEKLAETLKNRLHIYVQGNKAEFIQHAEAEVSKLRNAAYGVVMLNTIGYVYSRQAAKELGKKVMFLGVPFIAEWFRDKGHFIKSQVTAATGAIALMQLQDNLTKYMSAEGQYTEEELEMYMENHKKVMVDSLWKLNVADIEATLSHVCQMVLQDSSARKEELRLRAKGLKTLGRIFQGAKVNPSEGETSQTKNIDNMDGNDGSSPDSSPNREAQFTPNQPPVPSPYVEAPHVNGVYCPFPMPAAPPGARRDRIP

SEQ ID NO: 63468 - protein, 324 aa, Zea mays
  Clone ID: UC-ZMFLB73178H10_FLI.pep
FPVVPFECSENQATLEEFITKAKAALVSVGIIRDPIMCNGKNGGKLTGRIIDSDMHDVARFLNRILGLFPDIQNRLFDLFTSILDIVIQNARIEGQLDSGIVDIKAKSVEMKESPKTVHVDTVSGASTILYTFTVDRGVSWELANSILEERLKDKAGSSSDGFYESRKEWAGRRHFLLAFEGSAEGLYIVIRPAVGEASREMSLVELKSKYRKVSSVDKISKGWQEEYDSSSKQCMHGPKCKLGSNCTVGRRLQEINILGGLILPVWGAVAKALAKQARQIHRRIRVVRLETTTENKRFVGLIIPNSAVESVLEGLQWVQDIDE

SEQ ID NO: 63469 - protein, 455 aa, Zea mays; identical to SEQ ID NO: 40951
  Clone ID: UC-ZMFLB73179B07_FLI.pep

SEQ ID NO: 63470 - protein, 229 aa, Zea mays
  Clone ID: UC-ZMFLB73255B10_FLI.pep
LLSCSLAFGIKDTSLFGPLLHRQREDEVEPQHLGSILAQNHPVDGGTPQATHLIGGAVTVPATHLIGGTVMVETGHTLHMTEGDHTLLTAGMNHIPLTMAGDHTHLTTADGIVQGPHTATEDAGHLLFRHTTAGTGTDLSPSHPVHLQGPEDGAIRAVYHHREATRAAIPQNPRDQQAILLRKGVKGNPRVADTLARVVIQGKATLIAAVRTPGLCPGSAQLDLRGVSS

SEQ ID NO: 63471 - protein, 246 aa, Zea mays; identical to SEQ ID NO: 46958
  Clone ID: UC-ZMFLB73255G07_FLI.pep

SEQ ID NO: 63472 - protein, 380 aa, Zea mays; identical to SEQ ID NO: 63405
  Clone ID: UC-ZMFLB73268G12_FLI.pep

SEQ ID NO: 63473 - protein, 465 aa, Zea mays
  Clone ID: UC-ZMFLB73306E03_FLI.pep
QLLTAASLPLRYCSSPPHSPAGAAAAAARSYPTSASGGGTAGGKGKMFGRAPKKSDNTKYYEILGVPKSASQDDLKKAYRKAAIKNHPDKGGDPEKFKELAQAYEVLSDPEKREIYDQYGEDALKEGMGGGGSHVDPFDIFSSFFGPSFGGGGGSSRGRRQRRGEDVVHPLKVSLEDLYNGTSKKLSLSRNVICSKCKGKGSKSGASMRCPGCQGSGMKVTIRQLGPSMIQQMQQPCNECKGTGESINEKDRCPGCKGEKVIQEKKVLEVHVEKGMQHNQKITFPGEADEAPDTVTGDIVFVLQQKDHSKFKRKGEDLFYEHTLSLTEALCGFQFVLTHLDNRQLLIKSDPGEVVKPDQFKAINDEGMPIYQRPFMKGKLYIHFTVEFPDSLAPEQCKALETVLPPRPSSKLTDMEIDECEETTMHDVNNIEEEMRRKQAHAAQEAYEEDDEMPGGAQRVQCAQQ

SEQ ID NO: 63474 - protein, 218 aa, Zea mays
  Clone ID: UC-ZMFLB73363B06_FLI.pep
EPLRADHRIAVAHKPDDAAPVERLVLVTLVAVLTLVKLSTDLLVVLLKRRQILTSLGELALLHTLTDVPVHEGALGVHEVELVVNAGEDLHNTGGVGDHTHGTLHLGQITAWDDAGRLVVDSALEASRAPVHELDGALGLDCGHSSVHVLGNHITTVHEAACHVLAMAGVALGHHGGWLEGAVGDFSHGQLLVVGLLSRNDWSVGRKHEVDPRVGHQV

SEQ ID NO: 63475 - protein, 502 aa, Zea mays
  Clone ID: UC-ZMFLB73284D06_FLI.pep
APPPPPGPPRGSKARLAQLSPVESSRSEGSSASEQTSESSEAEVNAPRTKLRPFYWDKVLANPDQSMAWHDIKFGSFHVNEDMIEELFGYSGGSRNNLKDKELPSADPASQHISLLNVKKSCNLAVVLKAMNIRVQDIHDALIEGNELPRVLLETILRMKPTDEEEQNLRLYNGDFSQLGLAEQVMKALIDTPFAFKRVDMLLFMSSLQEDASSLRDSFHQLEAACGELKHRLFLKLLEAVLKTGNRLNDGTFRGGANAFKLDTLLKLSDVKGADGKTTLLHFVVQEIVRSEGVREARLAMENGRSPAHSASDDTSNGSLEEDGDHYSNRGLSIVSGLSSEMDNVKRVAALDAEPLFATVVTLRQELLKSREFLNEIATVEETSGFRRSLESFVEHADNETGFLLKEEKRLRSLVKKTIRYFHGNDSKDDGFRLFVVVRDFLVMLDKACKEVGASQKGTNKSRSSGSGSGNGNGNPTFPSILQEQQFPAVIDGHSDSSHTSN

SEQ ID NO: 63476 - protein, 462 aa, Zea mays
  Clone ID: UC-ZMFLB73344B10_FLI.pep
PFRPLSLASSISPPTMGKEKSHINIVVIGHVDSGKSTTTGHLIYKLGGIDKRVIERFEKEAAEMNKRSFKYAWVLDKLKAERERGITIDIALWKFETTKYYCTVIDAPGHRDFIKNMITGTSQADCAVLIIDSTTGGFEAGISKDGQTREHALLAFTLGVKQMICCCNKMDATTPKYSKARYEEIVKEVSSYLKKVGYNPDKIAFVPISGFEGDNMIERSTNLDWYKGPTLLEALDQITEPKRPSDKPLRLPLQDVYKIGGIGTVPVGRVETGVIKPGMVVTFGPTGLTTEVKSVEMHHEALQEALPGDNVGFNVKNVAVKDLKRGFVASNSKDDPAKEAASFTSQVIIMNHPGQIGNGYAPVLDCHTSHIAVKFAELITKIDRRSGKELEKEPKFLKNGDAGMVKMIPTKPMVVETFSAYPPLGRFAVRDMRQTVAVGVIKSVEKKDPTGAKVTKAAAKKK

SEQ ID NO: 63477 - protein, 345 aa, Zea mays; identical to SEQ ID NO: 59674
  Clone ID: UC-ZMFLB73304B08_FLI.pep

SEQ ID NO: 63478 - protein, 294 aa, Zea mays; identical to SEQ ID NO: 63297
  Clone ID: UC-ZMFLB73319G09_FLI.pep

SEQ ID NO: 63479 - protein, 369 aa, Zea mays
  Clone ID: UC-ZMROB73035C10_FLI.pep
RVASGVPMDSAFRRALNEPMCLEETVVQQGIERCPFLRNINEPTSFSFSSVNFPIPARGAKGPIFEDGPNFDMAFRVFHGRDGVVPLSEGSLAQIEKPLPKPNPEFNPLAAKAATISLSAFGGFFSFGDFSNKRNKKNSNKKNPNNLPQNKGQPNNNNHEALSNEWLEMGQCPLAKSYRALSGIVPLVAKMMTPPAGMKLKCPPAVVAARAALSRTAFAKGLRPQPLPTKILVIALLGMAANVPLGIWREHTQKFSLQWFAAVHAAVPFIGMLRKSVLMPKTAMALTIAASILGQTIGSRAERIRLKRAAAAKLARESHGDAADYIKAPMSLKTGNHTVQFWDPLSLRAESTVAAGTTAVLVPAISAFN

SEQ ID NO: 63480 - protein, 545 aa, Zea mays
  Clone ID: UC-ZMROB73036C10_FLI.pep
VRRFVLILNLWCSHEERQGMKDRHLALNQTQRVRLEAALQELQSVAPAAAVTVADTIPVNQEDNILKGHGTSDQDGEVVATLCGVVERVNKLVYVRTLRASCRFSMEMNGVLQAADAKYWVYKGEGAANLILSYTGSSPTMLGKVLRVKKLLNDKSQLPPSCMVFSSHEQLLWGHIPELVESVKQDCLAQAYAVHVMSQHLGANHVDGGVHVRVSRDFLELVEKNVLSSRPPWRVNASSIDITADAALLIADHSLFSGTPKGSSCIAVEIKAKCGFVPSSEYISKDNSIKKQVTRYKMHQHLKFHQGEISKTSEYNPLDLFSESKERISMAIKSFFSTPQNNFRIFVNGSLAFGGMGGGADSVHPADTDKCIKDLSKVSGLELPDFTELLSETIFKSGVLGKLLTTQKLDDHDIEGAIHLYYNIISQPCLVCKNLTDVELLRKYTLLHSLPLDKSLKIVRNFLISATAKDCSLMISFRPRENGSTDSEYDSVFLESAKRTYEYKTYFVDLDVKPLDKMVHYFKLDQRIVNSYTRYGEVLPPPKGK

SEQ ID NO: 63481 - protein, 311 aa, Zea mays
  Clone ID: UC-ZMROB73056D02_FLI.pep
GSYSMDCDLDNHVNSVSSKDAVEHDHVHSALPDVHRGNTHADTVTNDGEPIGANNNGKVSRLTYGEDKFRPGIQRSENHTESMEGLSCLQRAGDSVGSPASINNTELPKNNVSSEAHIDDNELRRNDLVNDVESNSIDGKHDTMMNLSVPKISCLYKCCSPCFQSIYKMVHGIISNTLRPNLHCLTADDMHDILSSWCLNLLGSVRKLYSSHDEASCTEVFVRMSNKETHLEHCACQSDIYLSRECVCHLESNGDVETANTDCHPLSGQSLSFFFKDGVWMPLDLTAETKLHCSFRRFCVCSILGTVSMLS

SEQ ID NO: 63482 - protein, 204 aa, Zea mays subsp. mexicana
  Clone ID: UC-ZMFLTEOSINTE28B05_FLI.pep
KEARGLAVGPRLVQRLSGFGDHRSADNVERVAEEELAHASVGLYWFLKECQVMGREPSNTFQDLIKEYDVVLEGPFNYTAMASPDLLFNLRNLFYLGAYRAAINNIDVPGLDADAERDAIVFRSYIALGSYQDKQLKSHPPKNVESKILREHIKKEREAAKAGKRPYYLKKSELRERKLMNKYNELKEAGKLEALSAYKSTSVS

SEQ ID NO: 63483 - protein, 287 aa, Zea mays
  Clone ID: UC-ZMROB73044C03_FLI.pep
LSLSDLSLSPLAAPPSVHSAMYSNYGNPSGMQMPPQNSQPVQFDNPLYGASSGLIRSGIGVYGEKFLGSSSEFMQSNINRYFSNPQYYFHVNDQYVRNKLKVILFPFFHRGHWTRISEPVGGRLSYKPPIYDINAPDLYIPFMAFGSFIILSGFTLGFMGKFTPAAINLQFTRALIGWGFQLMVLKGLLYSMGGGEVPLLDLVAYGGYLFAGLSLAVVARLVWAYSYYVMMPWMSLCMGVFLVRTMKRVLFTEMRSSERHSSRQHYFLLFMAIAQFPLFFWLGSIGA

SEQ ID NO: 63484 - protein, 232 aa, Zea mays; identical to SEQ ID NO: 48242
  Clone ID: UC-ZMROB73028A10_FLI.pep

SEQ ID NO: 63485 - protein, 263 aa, Zea mays
  Clone ID: UC-ZMROB73078E11_FLI.pep
DKQNPPLRQLRLPLTRGSPDNRQRKEAQGLPAKMEDVDVSRQLKQMTNFIRQEAVEKAAEIEAAAAEEFQIEKLQLVEAEKKKIRQEYDRKEKQVGIKKKIDYSMQLNASRIKVLQAQDDLVTDMLESARKELLCISRDHPTYKKLLKTLIVQSLLRLKEPAVLLRCRKEDLQLVDLVLESARNEYADKAKVYPPEIVVDRQIYLPSAPSHYQAPGPSCSGGVVLASRDGKIVCENTLDARLQVVFRKKLPEIRQSLFGQVAA

SEQ ID NO: 63486 - protein, 196 aa, Zea mays subsp. mexicana
  Clone ID: UC-ZMFLTEOSINTE45B01_FLI.pep
KQKQLTGARTDLHDLNGRDVGPDVAVCVAPALEIHDGEELLLASGDPGTDLVEEVDHKTLELRHVAVGGVVLSQQADDDGAAGPVDAAHVDLVLLQLPAHLLLPHGAAAGRRLRPPPEELEQHGRRLVHVVAARAQEPAQRQVVHLLGAVVLLDEGPELGDLEPLPFPGRPAASVRHIRPLGSPDMIFLCPVLSCS

SEQ ID NO: 63487 - protein, 452 aa, Zea mays subsp. mexicana
  Clone ID: UC-ZMFLTEOSINTE53B08_FLI.pep
ASHSAMGKEKSHINIVVIGHVDSGKSTTTGHLIYKLGGIDKRVIERFEKEAAEMNKRSFKYAWVLDKLKAERERGITIDIALWKFETTKYYCTVIDAPGHRDFIKNMITGTSQADCAVLIIDSTTGGFEAGISKDGQTREHALLAFTLGVKQMICCCNKMDATTPKYSKARYDEIVKEVSSYLKKVGYNPDKIAFVPISGFEGDNMIERSTNLDWYKGPTLLEALDQITEPKRPSDKPLRLPLQDVYKIGGIGTVPVGRVETGVIKPGMVVTFGPTGLTTEVKSVEMHHEALQEALPGDNVGFNVKNVAVKDLKRGFVASNSKDDPAKEAASFTSQVIIMNHPGQIGNGYAPVLDCHTSHIAVKFAELITKIDRRSGKELEKEPKFLKNGDAGMVKMIPTKPMVVETFSQYPPLGRFAVRDMRQTVAVGVIKSVEKKDPTGAKVTKAAAKKK

SEQ ID NO: 63488 - protein, 530 aa, Zea mays subsp. mexicana
  Clone ID: UC-ZMFLTEOSINTE53D12_FLI.pep
AMETKRVAIIGAGVSGLAACKHLLERGCRPVVFEAGTVVGGVWARVPDSTALQTPRPMYQYSDFPWPDTVTEVFPDHRQVMSYLDAYARHFGVLDCVRFGRRVLGMEYHGVAEDDVAAWEEWGGNGQAFGCAGAGEWRLKVADAEGRIETHKADFVVLCIGRFSGVPNTPTFPPGEGPEAFDGQVIHSMDYAKMGTKKAREMIKGKRVTVVGYLKSAVDIAAECAEVNGAEHPCTMVVRTKHWIIPDYFAWGVHISLLFLNRFAELLIHKPGEGFLLWLLATLLAPLRWLFSKFAESYYAIPMRKHGMVPDHSLFQALATCLIAIQPKGFYERLEEGSIVLKRSKTFSFCREGVVVEGEVSSSSLVESDVVIYATGFRGDLKIKDMFASEYFRSVAVGSACTTVPLYRECIHPKIPQLAVLGYSESIANLYTSEIRAKWLAHFMDGGFRMPSVAAMQKDVLEWEKCMKRYAGGRYFRRSCIGLLHIWYNDQLCRDMGCDPRRKKGFLEELFGVYGPADYADLHPDRKKDD

SEQ ID NO: 63489 - protein, 146 aa, Zea mays subsp. mexicana
  Clone ID: UC-ZMFLTEOSINTE77E01_FLI.pep
GKSTNPNSDESEGKVGLHKILGSKAEALLNKKGISWPWKGRENEGPDERNHVILPWLHGGQENGVNHQKVSDSSISPDAQGAEHNQPSKNEASGSWSSFNNNSTGSASSTGSTNSSALYKVDLAEAEVGVAGGVQEEEPAPPRPPP

SEQ ID NO: 63490 - protein, 405 aa, Zea mays subsp. mexicana
  Clone ID: UC-ZMFLTEOSINTE45G07_FLI.pep
DILHHLRLINPSNKAMDTNYRAVISLVLLVCIASRSSLGAAETDVEQKRLSVPLMFVFGDSLVDVGNNNFLPPPAPRAASPYGIDFHAGTAGAVSGRFTNGYNLADLVARRLGFKMSPPSYLSLTPVSKFDLFTCRIGANYASGGSGILNTTGNGTLTLQKQITLFSKTKARMSWARCKLRSMVSRSLFLVSAGGNDFSAFSEMGKGEQDAPAYISSMVSTYVQHIDALYKLGARRLGILDVPAIGCTPGSRVPMANGGCNDAANSMAQNFNKLLRLEVAKAVASSMPGMRYSIASTYNFLTDLIDSHLVAGLRVVDRACCGSGKLNAAVMCAQPNTTYCSDRDDYMFWDMLHPTQATNERGVVAIFYGPQEYADPINFAQLAAATANDDDDINTAMAAGVYAAI

SEQ ID NO: 63491 - protein, 39 aa, Zea mays subsp. mexicana
  Clone ID: UC-ZMFLTEOSINTE069B05_FLI.pep
TMSHKKSASQLSISITGRVTTKQYCSLWCTSSQALQYLF

SEQ ID NO: 63492 - protein, 281 aa, Zea mays subsp. mexicana
  Clone ID: UC-ZMFLTEOSINTE075A11_FLI.pep
LFVGNVPKGLSEEELTNTIKGKGPGVINIEMFKDQHDPNRNRGFLFVEYYNHACADYARQKLSSPNFKVDGSQLTVSWAEPKGSTDASSAAAQVKTIYVKNLPENVSKEKIKDLFDKHGEVTKIVLPPAKAGHKRDFGFVHFAERSSALKAVKGSEKYEIDGQVLEVSMAKPLADKKPDHSHRPGGGPNYPLPPYGGGGYMGDPYGAYGGGGPAYNQPMIYGRGPAPAGMRMVPMVLPDGRLGYVLQQPGGMPPPPPPRRGSDRRDSGRGGEGHSRRYRPY

SEQ ID NO: 63493 - protein, 554 aa, Zea mays subsp. mexicana; identical to SEQ ID NO: 63199
  Clone ID: UC-ZMFLTEOSINTE51A12_FLI.pep

SEQ ID NO: 63494 - protein, 411 aa, Zea mays subsp. mexicana
  Clone ID: UC-ZMFLTEOSINTE51F04_FLI.pep
HPTGTLTLRPPPLSQLLSGSFLPVADSSTRKIPGCLSSLVSFLACMGLDVGEIGMGLDLGLDLRLFAARSAGGMAKGAAPAGIQSCIRSLEVERRKIEVFRRELPLCLRLLADVIDELKEEAAKRGEYDDGATVVDDGDKRKWMSTAQLWVDSDAKSDESDKEQQSEITSPPEPKLLGGGAPTPIRAAGSAVAVPPPLPPPLFRREDSSASSGLSSLVSSPATKARAVPISPPVVAASGTTASARFCGTTMPPCGSEVINMHSQAQQQASRKARRCWSPELHRRFVAALHELGGPQVATPKQIREVMQVDGLTNDEVKSHLQKYRLHNRRSSPGAAAAPVSQSIMLVDGVWAAQEQSSSQSGSRQGPLQFSRPGVAVGGGDDSSSSDDEDDNKSEDGYSREAAFAEGRMRV

SEQ ID NO: 63495 - protein, 367 aa, Zea mays subsp. mexicana
  Clone ID: UC-ZMFLTEOSINTE072G09_FLI.pep
ISNLTTIMATAIVPTDAELLQAQADLWRHSLYYLTSMALKCAVELHIPTAIHNLGGSATLPDLVAALSLPAAKLPFLGRVMRLLVTSGVFASSSESDDVQVQYRLNPLSWLLVEGVESEDHTYQKYFVLGTVSRHYVEAGMSLADWFKKEEDEDRQLPSPFEALHGVPLVHESTKLLDEELDRVVEEGVAAHDNLAIGTVIRECGADVFSGLRSLTYCCGRQGNVSAAAIVKAFPDIKCTVLNLPRVVEEKETTKTITIPPAQAVMLKLVLHFWSDDDCVKILELCRKAIPSREEGGKVIIIEILLGPYMGPVMYEAQLLMDMLMMVNTRGRQRGEDDWRHIFTKAGFSDYKVVKKIGARGVIEVYP

SEQ ID NO: 63496 - protein, 213 aa, Zea mays subsp. mexicana
  Clone ID: UC-ZMFLTEOSINTE79E12_FLI.pep
HVISCGYEDKTEWGTEIGWIYGSVTEDILTGFKMHARGWRSIYCMPKRPAFKGSAPINLSDRLNQVLRWALGSVEILFSRHCPLWYGYGGRLKFLERFAYINTTIYPLTSLPLLIYCILPAICLLTGKFIIPEISNFASIWFISLFISIFAFWVIVHLYPFLKGLMGRQNRTPTIVVVWAILLASIFSLLWVRIDPFTTRVTGPDTRTCGINC

SEQ ID NO: 63497 - protein, 483 aa, Zea mays subsp. mexicana
  Clone ID: UC-ZMFLTEOSINTE080B02_FLI.pep
WREAPAQGKRNRGARRGRKGRRRRRRRRRRANKMREIISIHIGQAGIQVGNACWELYCLEHGIEHDGTMPSDSSVGVAHDAFNTFFSETGSGKHVPRAIFVDLEPTVIDEVRTGSYRQLFHPEQLISGKEDAANNFARGHYTVGKEIVDLCLDRVRKLADNCTGLQGFLVFNAVGGGTGSGLGSLLLERLSVDYGKKSKLGFTIYPSPQVSTAVVEPYNSVLSTHSLLEHTDVAVLLDNEAIYDICRRSLDIERPTYTNLNRLISQIISSLTTSLRFDGAINVDVTEFQTNLVPYPRIHFMLSSYAPVISAEKAYHEQLSVPEITNAVFEPSSMMAKCDPRHGKYMACCLMYRGDVVPKDVNAAVATIKTKRTVQFVDWCPTGFKCGINYQPPSVVPGGDLAKVQRAVCMISNNTAVAEVFSRIDHKFDLMYAKRAFVHWYVGEGMEEGEFSEAREDLAALEKDYEEVGAEGADDEGDEGDDY

SEQ ID NO: 63498 - protein, 231 aa, Zea mays; identical to SEQ ID NO: 43391
  Clone ID: UC-ZMFLB73239B08_FLI.pep

SEQ ID NO: 63499 - protein, 297 aa, Zea mays
  Clone ID: UC-ZMFLB73239C11_FLI.pep
TLQFRSMEQSIEDRTMLPNHPATKLSTARLQTKVSQFDDFEKWDLSLHRSTLRLELAKEPLLLIGSLETTVPKFGRCVDELELDLLQRQPGSLLQEGLAEGHHPLLWTHTAALDHQVVTLHDTIMGEATHGSDVLLSPVKLCGGIVGLLSSLADLVNLLVHLSAVVVPILTSTGNRIGDPSRMPCTDTSNFAETPVGLAGKPGDTPTSDHTLITFPLGHTNDVNHLILLEDSINRDLFLKEFVAIVHLVSNGTTIDLNLHQVSLLLLQTLHLPNLGMSNDTDNRSIFLHLLKLQLNF

SEQ ID NO: 63500 - protein, 482 aa, Zea mays; identical to SEQ ID NO: 56456
  Clone ID: UC-ZMFLB73239F02_FLI.pep

SEQ ID NO: 63501 - protein, 381 aa, Zea mays
  Clone ID: UC-ZMFLB73239G02_FLI.pep
RGSFSLCNVSWTNPNFASQTTQCRACSWSPPHISYRLFERTDFNVGKKLQFPTYRDSLKERGTVQMLTVSREVALDVQSLATVLGSCLGNVTCQSLVLFEDLLVSTTLPPDDTLNLYTYAVLRLTPRALYSNASSWSYLRKGTSVSAGQTSSSSNGTTAGERPLLREKLSKGKDGFVAADFTATEARCAVPSTPILWFQQADECMHLCIYQHKSLTILLLVPASSVINGEEGITHVKKAMLENASQKIVTVEQKLTRGWGGENAYHVSGYRYLLVDPERRVSRASPPGKVTTLAKDSLLALNMLRQEVDLEKSRYKRGDPCHDKDFEVCIRTKNNAWVIAKISQGRELYMALEKGGETLLYASTAVEKFSNRYCEGAFSTD

SEQ ID NO: 63502 - protein, 422 aa, Zea mays
  Clone ID: UC-ZMFLB73241H10_FLI.pep
MAVEYHCCSAAFFEHIVIIIVLVLFAGLMSGLTLGLMSLSLVDLEVLAKSGTEQDRKHAAKILPVVKNQHLLLCTLLICNAAAMEALPIFLDSLVTAWGAILISVTLILLFGEILPQSICSHYGLAIGASVAPLVRVLVWVCFPIAYPISKLLDYVLGHGQTALFRRAELKTLVTLHGNEAGKGGELTHDETTIIAGALELTEKKAKDAMTPLCQTFAIDINAKLDRNLMQEVLEKGHSRVPVYYEKKTNIIGLILVKNLLSVSADDEVPIKSVTIRKIPRVLEEMPLYDILNEFQKGHSHMAVVIRKNNPSYQPAEQAANDGGTFEVSIAIDDKNNEKVVKNLPPPLQRWKSYPNTQNTSNRGNRPKKWSKDQADVLQVHKEPLPTLSEDEEAVGIITMEDVIEELLQEEIYDETDVHEEQ

SEQ ID NO: 63503 - protein, 449 aa, Zea mays; identical to SEQ ID NO: 62758
  Clone ID: UC-ZMFLB73247B11_FLI.pep

SEQ ID NO: 63504 - protein, 288 aa, Zea mays; identical to SEQ ID NO: 47549
  Clone ID: UC-ZMFLB73248F11_FLI.pep

SEQ ID NO: 63505 - protein, 652 aa, Zea mays; identical to SEQ ID NO: 38995
  Clone ID: UC-ZMFLB73249A05_FLI.pep

SEQ ID NO: 63506 - protein, 287 aa, Zea mays; identical to SEQ ID NO: 58142
  Clone ID: UC-ZMFLB73252C12_FLI.pep

SEQ ID NO: 63507 - protein, 375 aa, Zea mays
  Clone ID: UC-ZMFLB73255A02_FLI.pep
ASPRKLRLSRMQQEHAQPSMVGAKGCERCRDWQEHYYWEHMDASKIRFFRCMTGDFAHRISVPEKFAKNFKGQITEEFHLKSPSSAETWHVGVEKHGDKLFLVSGWENFAKAHELEENDLLLFACSGNSSFEVLVFGASGCEKVSSLFGSGLGPDMGKQFNDVVRRHGVHHSVTVSDSEDTVAPSQLVRSPRNALPLKEPSGKARPSKYESPNSSNFIVRHVATGKEGTDDEYANSNYYYSLSANRLGDEEKEEIIGLAPIRPNNPVFVTLLRKNHVQRRNNCLIIPSKFAADHLGERAHNIILRRPNRKEKWHVSYYHSRHTRCFQNLALFKFTRENKLHEGDICVFELMKGERRVTMTVHVVRKANGRFILVV

SEQ ID NO: 63508 - protein, 491 aa, Zea mays
  Clone ID: UC-ZMFLB73257E04_FLI.pep
VIIVTSSLMKDMNSKTDMYRANAIRVLCRIIDGTLLTQIERYLKQAIVDKNPVVASASLVSGIHLAQANPEIVKRWSNEVQEAVQSRAPLVQFHGLALLHQIRQNDRLAVSKLVSSLTRGSVRSPLAQCLLIRYTSQVMCESSMNTQNGDRPFFDFLESSLRHKAEMVALEAARKITEMDVTSRELAPAITLLQLYLSSSKPVLRFAAVRTLNKVARTRPLAVTNCNVDLESLLSDQNRSIATLAITTLLKTGNESSVDRLIKQITLFMSDIADEFKIVVVEAIRSLCLKFPLKYRSMLNFLSNSLREEGGFEYKKAIVDSIVTLVSEIPDAKEIGLLHLCEFIEDCEFTYLSSQILHFLGNEGPRTSDPSRYIRYIYNRVILENATVRASAVSTLAKFGALVDTLKPQIFVLLQRCLFDTEDEVRDRATLYLQTLSGEVAIGNDEKDVKDFLFGSFDVPLANLEASLRTYEPSEEPFDIFGVKRSQVATT

SEQ ID NO: 63509 - protein, 141 aa, Zea mays; identical to SEQ ID NO: 48129
  Clone ID: UC-ZMFLB73258H01_FLI.pep

SEQ ID NO: 63510 - protein, 351 aa, Zea mays
  Clone ID: UC-ZMFLB73260A11_FLI.pep
NMARIPSLKSLNAFPHAEEHLLKKTYSGAVVTIFGLLIMITLFVHELQFYLTTYTVHQMSVDLKRGETLPIHINMSFPSLPCEVLSVDAIDMSGKHEVDLHTNIWKLRLDKYGHIIGTEYLSDLVEKGHGAHHDHDHDHDHHDEQKKHEQTFNEEAEKMIKSVKQALGNGEGCRVYGMLDVQRVAGNFHISVHGLNIFVAEKIFEGSNHVNVSHVIHELSFGPKYPGIHNPLDETSRILHDTSGTFKYYIKVVPTEYKYLSKKVLPTNQFSVTEYFLPIRPTDRAWPAVYFLYDLSPITVTIKEERRNFLHFVTRLCAVLGGTFAMTGMLDRWMYQLIKTVTNSKTRSVLR

SEQ ID NO: 63511 - protein, 193 aa, Zea mays; identical to SEQ ID NO: 62442
  Clone ID: UC-ZMFLB73260B10_FLI.pep

SEQ ID NO: 63512 - protein, 400 aa, Zea mays; identical to SEQ ID NO: 59996
  Clone ID: UC-ZMFLB73264D12_FLI.pep

SEQ ID NO: 63513 - protein, 476 aa, Zea mays
  Clone ID: UC-ZMFLB73276D08_FLI.pep
LVEDRSQMVFPAILPKVAARWLFTFYRAARKLRRHAFQLYYRNTTAGVRVMAFVTFAGLRPRDVDLVARAVLPKHYMEQLNALVYGSLWLPARRKVAVTSAPRVMSEWFLKEYMAADAVVGLELQHVNVGRRRYFTGLLSSSGHATGPELRQKAIREALLGAEDDPIAVVGIINDSSPLDDELFVPYCKEVYVVSRESAKNDKLSREKYPKPLIFHDGRLAFLPTPAAMLAFFLFLPLGVVLSVIRINIGIVLPYKINFATAAIFGVRFRASGLRAPPADGKRRSGVLYVCTHRTLVDPIMLTTALQKPVPALTYSLSRLSELIAPIKTVRLTRDRARDAETMSRLLAQGDLAVCPEGTTCREPYLLRFSPLFAELADDMEPVALDAQVTTLYGTTASGHKWLDPVAFFANPVPSYRVEFLGAVPREWTRAGGRTGVEVANWVQRRLGQALDFECTGLSRRDKYMMLAGNDGVVAK

SEQ ID NO: 63514 - protein, 241 aa, Zea mays
  Clone ID: UC-ZMFLB73278H01_FLI.pep
RERTPSLSSRTARSYPVSPFSGLGESEMASSASRFIKCVTVGDGAVGKTCMLICYTSNKFPTDYIPTVFDNFSANVVVDGTTVNLGLWDTAGQEDYNRLRPLSYRGADVFVLAFSLVSRASYENIMKKWIPELQHYARGVPVVLVGTKFDLREDKHYLMDHPGLVPVTTAQGEELRRQIGAMYYIECSSKTQQNVKAVFDAAIKVVIQPPTKLREKKKKKSRKGCSMVNILSGRKMLCFKS

SEQ ID NO: 63515 - protein, 366 aa, Zea mays; identical to SEQ ID NO: 41312
  Clone ID: UC-ZMFLB73280B03_FLI.pep

SEQ ID NO: 63516 - protein, 496 aa, Zea mays
  Clone ID: UC-ZMFLB73280B06_FLI.pep
TFRDFEECNILCPYMSDTIKEIAKACQTLEGKDSSPTAVKMLRTLHFEMTKLYILRLCSWMRATTKEISKDETWVTLSTLERNKSQYAISCLPLEFRDITVSAMDRIDTMILNLMSETAKSYDISQPLQEINESVRLAFLNSFLDFAGYLERFGGELTENRPNKENNYVSNGYINGTRETFVNTDGDLHKKLLVVLSNIGYCKAELSEELYSKYRHIWSPVRNNEERSSDMRDLRTSFSALEEKVLDQYTFAKSNLIRSAAQSYLLDSGIYWGAAPMVKGIRDATLDLLHILVAVHAEVYSGARPLLEKTMKILVEGLVDIFLSVFHENKTKDIRLLDANGFCQLMLELEYFETVLHTYFSPEAQQAMKSLQENLLEKACESVAEAMENPGHQRRPTRGSEDTASDDRQPSVSPDDLLVLAQQCSSDLLQGELERTRLNIACFMESTLQPTAAPAGPKPAAHSSYQAQHAPVQTSSPSFRRQQTGTSSPVVSRRRR

SEQ ID NO: 63517 - protein, 225 aa, Zea mays
  Clone ID: UC-ZMFLB73280C04_FLI.pep
QANNTQQPTRRQEFQNNGIAKRSNSVLVVLDVKALGVGGSITLVGAEGSLGVGLAPGEEGRSSLLHVLHLASPGLEGARLEGTAEGEGQGPWLLGAELVHGIEIQGGLLLALSTGEEDNSRHSSRDGPLEGTDGVLGDHLRCHLLRVGARSHHVGLQEGTLQEDMVLVESLVAGSKDCLSDVSAAINVMRAINKDLRLNNWHQTVLLADDGVASQTLSIQVNGKL

SEQ ID NO: 63518 - protein, 482 aa, Zea mays; identical to SEQ ID NO: 56456
  Clone ID: UC-ZMFLB73285G12_FLI.pep

SEQ ID NO: 63519 - protein, 170 aa, Zea mays
  Clone ID: UC-ZMFLB73287H06_FLI.pep
WRAAADLTMYIARETSKVWRKVATEVSVELQLLREKWGLLLAGLIFQYIHGLAARGVHYLHRPGPLLQDLGFMALPELGQDKGYLSETIFSSIFISFVLWTFHPFIYHSKRFYTVLIWRRVLAFLVASQFLRIITFYSTQLPGPNYHCREGSKLATLPPPNSVLEVLLIN

SEQ ID NO: 63520 - protein, 488 aa, Zea mays; identical to SEQ ID NO: 46968
  Clone ID: UC-ZMFLB73296C07_FLI.pep

SEQ ID NO: 63521 - protein, 386 aa, Zea mays
  Clone ID: UC-ZMFLB73296G06_FLI.pep
SPESRDLHRPLQRRAAGKPKHPPNPVRLPSHPARTLRRDLAAVAMPLGDDAAADFALPDELLAALPRDPYEQLDLARRITALAVAGRVSGLEREAGRLRAEAAGKDRESAELRERVALLDAALQETNARLRAALEDNIKLSKERDSLAQTSKKLARDLHKLESFKRHLMQSLRDDSSSTQETVDITTCDQPVASKASSSADGGSVSNPATNIFTESLDVGSTNRDGTAARPPIQKYSLTTHITPRLTPEATPKIMSTSASPRRMSTTGTPKLMSGSTSPSKTRIEAHMSMTPWYPSSKQSSAANSPPRGRSNPGRTPRIDGKEFFRQARSRLSYEQFGAFLANIKELNAHKQSREETLKKAEEIFGPDNKDLYLSFQGLLNRSMVA

SEQ ID NO: 63522 - protein, 347 aa, Zea mays
  Clone ID: UC-ZMFLB73298B11_FLI.pep
GGLNRSTGALPHAPRRLFSTSFSSGAVDQPTTRHQPTAKRRMAAETKPAAASGVAGEMEVEAYRRLFPVAFLERHLGESVRIDARRLREARPTTVALGAVSSAHGSALARLGDTAMLASVKLEVMSPPAEHPDEGSVAVEFHMPPICSPLVRPGRPTDVAPVISKALEDVLTSSGMLNLKDLCLITGKASWLAYLDIYCLNADGSLFDAALISAVAAFTHLEIPLVSVGDDGRLFTVGGNDGKNKFELVNREKRKLTLGAIPLSLTCALHKDEILADPTSEEESIIETYVTVVVDSSDRLVSLQKLGGAVTCMATIKECISLAKERRRSLREILLDSIKAMEVDQTE

SEQ ID NO: 63523 - protein, 290 aa, Zea mays; identical to SEQ ID NO: 61433
  Clone ID: UC-ZMFLB73298D01_FLI.pep

SEQ ID NO: 63524 - protein, 575 aa, Zea mays
  Clone ID: UC-ZMFLB73299E08_FLI.pep
VPVDIVKLNIPDYFQIVKQPMDLGTIQKRMKAGMYSTPPEFAADVRLTFSNAMNYNPANNDVHLMAKTLSKNFESRWKLIEKKLPKPDEKPPQPDEKPPQPVEKPPVRKPTKKNSTKRVSIEKEDLTKKKPSKKSVPKQYIFRGEDSADSPVLQPKKRKTSPLVQDAPLVGDIVPTRKRIMTSEQKYDLSARLQSYGAFIPDHVVELIRSHADYCDANEEELELDMDALGDDTLFELLRLLDDYDRVNPSRNLTEQDPHEVKSRSQYELINASVCNEEVNELFDEDVDIGENDPPVLTFPPLVLEDETADRSRKHSASSSSSSDSESSSSGSSSSSGSDTDAKAAQQNSVSKEKILPVDGLGHEKDSLDTLNLPEQSTDPVSVSAYGEGGYVSEKVSPEKQIRAALLRSRFADTILKAREKALDQTTKKDPEKLRREREELERLQRQERARLQAEAKAAEDACKRAEEAAAAEAAAEAKRQRDIEREAARKALQEMERTVDINGGSHFLKDLEMLRGITCEEMPNLVGEGSPGFQLGSSNALAKLGLYMKDDEDDEEGDLADAPVVVDIEEGEID

SEQ ID NO: 63525 - protein, 421 aa, Zea mays
  Clone ID: UC-ZMFLB73305F10_FLI.pep
GKMFGRAPKKSDNTKYYEILGVPKSASQDDLKKAYRKAAIKNHPDKGGDPEKFKELAQAYEVLSDPEKREIYDQYGEDALKEGMGGGGSHADPFDIFSSFFGPSFGGGGGSSRGRRQRRGEDVVHSLKVSLEDLYNGISKKLSLSRNVICSKCKGKGSKSGASMRCPGCQGSGMKVTIRQLGPSMIQQMQQPCNECKGTGESINEKDRCPGCKGEKVVQEKKVLEVHVEKGMQHSQKITFPGEADEAPDTVTGDIVFVLQQKDHSKFKRKGEDLFYEHTLSLTEALCGFQFVLTHLDNRQLLIKSNPGEVVKPDQFKAINDEGMPIYQRPFMKGKLYIHFTVEFPDSLAPEQCKALESVLPPKPSSKLTDMEIDECEETTMHDVNNIEEEMRRKQAHAAQEAYEEDDEMPGGAQRVQCAQQ

SEQ ID NO: 63526 - protein, 171 aa, Zea mays; identical to SEQ ID NO: 59988
  Clone ID: UC-ZMFLB73346E10_FLI.pep

SEQ ID NO: 63527 - protein, 539 aa, Zea mays
  Clone ID: UC-ZMFLB73346F04_FLI.pep
TNNTTSPPPPTSHMCTRAHLPSTTAIYPGAPSSLPRPSLRLRLRPRPRPRPLLAATTPVTSSRADAAAMDPVATWGLTPLAGADPEIYDLLEREKRRQRRGIELIASENFTSFAVMEALGSALTNKYSEGMPGARYYGGNDVIDEIENLCRSRALAAFHLDAASWGVNVQPYSGSPANFAAYTALLNPHDRIMGLDLPSGGHLTHGYYTAGGKKISATSIYFESLPYKVSAATGYIDYEKLEEKALDFRPKLIICGGSAYPRDWDYAKLRAVADKVGALLLCDMAHISGLVAAQEAANPFEYCDVVTTTTHKSLRGPRAGMIFYRKGPKPPKKGQPEGAVYDYEDKINFAVFPSLQGGPHNHQIAALAVALQQTMSPGFKAYAKQVKANAVAIGNYLMSKGYKMVTDGTENHLVLWDLRPLGLTGNKVEKLCDLCHITLNKNAVFGDSSALSPGGVRIGAPAMTSRGLLEKDFEQIGEFLHQAVTICLNIQKEYGKLLKDFNKGLVNNKDIENLKVQVEKFADSFDMPGFTLESMKYKE

SEQ ID NO: 63528 - protein, 308 aa, Zea mays; identical to SEQ ID NO: 39618
  Clone ID: UC-ZMFLB73351A08_FLI.pep

SEQ ID NO: 63529 - protein, 245 aa, Zea mays
  Clone ID: UC-ZMFLB73402E12_FLI.pep
LGGPRTKMLAVFSGQVVEVPAELVAAGSRTPSPKTKASQLVGRFLAASEPAVSVQLGDHGHLAYSHTNQALLRPRSFAAKDEVFCLFEGVLDNLGRLSQQHGLSSKGANEVLLVIEAYKTLRDRAPYPASFMLAQLTGSYAFVLFDKSTNSLLVASDPEGRVPLFWGITADGCVAFSDDIDMLKGSCGKSLAPFPQGCFYSNALGGLKCYENPKHKVTAVPADEEEICGATFKVVEGSTVLTALH

SEQ ID NO: 63530 - protein, 196 aa, Zea mays
  Clone ID: UC-ZMFLB73418G05_FLI.pep
LPSRRRHRKSISTPPRDLPPSLVSAMVKYSTEPTNPTKSAKAMGRDLRVHFKNTRETAFALRKLSLTKAKSYLEDVIAHKQAIPFRRYCGGVGRTAQAKSRHSNGQGRWPAKSAKFILDLLKNAESNAEVKGLDVDTLYVSHIQVNQAQKQRRRTYRAHGRINPYMSSPCHIELILSEKEEPVKKEAESQIATRKA

SEQ ID NO: 63531 - protein, 317 aa, Zea mays subsp. mexicana
  Clone ID: UC-ZMFLTEOSINTE066B03_FLI.pep
GDRGRTKQQRHPLASFPPPPASPLRVRAPPGVASLHPWAAGTYVRGEPHASLSPLAMDAGGEKCGDATAEGGDLYAVLGLKKECSDAELKVAYRKLAKKWHPDKCSSSSSVKHMEEAKEKFQEIQGAYSVLSDANKRLLYDVGVYDDEDDEESMQGMGDFIGEMAQMMSQAQPTRQESFEELQQLFVDMFQSDIDSGFCNRTAKAHQFQGPTKSRTCSTSPSSSPSPPSPTTAKDAEVPTCNGFNKRGSSALDSGKPPKPVEGGAGQNQAGFCFGVSDTKQAPKLPGQNASRRRNGRKQKLSSKHDVSSEDETAAGS

SEQ ID NO: 63532 - protein, 314 aa, Zea mays subsp. mexicana
  Clone ID: UC-ZMFLTEOSINTE066D10_FLI.pep
ASACFVGEGERERERSSREASRWSSNEDVGGVQRAGGGGAGGAGGGGQPDAVAQDEGVAARGALPGRLRAGRVRAARRPRPPRLLPHQPGAPPPQVVRGQGRGVLPVRRGAGQPGSAEPAARAVKQGRQRGAPRHRGLQDAARPRALPGQLHARPAHRLLRLRPLRQVHQLPARRIRPRGQGAALLGDHRRRLRRLLRRHRHAQRLMRQVARAVPTRLLLLQRPRRAQVLREPQAQGHRCPRRRRRDLRCHFQGGGRVYCPDGAALIDHHQAEAMRRYRTLYMRGGCNIVAGNKPCSCKPMNLSLYHASISVAC

SEQ ID NO: 63533 - protein, 290 aa, Zea mays subsp. mexicana
  Clone ID: UC-ZMFLTEOSINTE066G04_FLI.pep
KLVDVCSSNIVFFYFDCSGYLSPLLSIKDEKHFHSSAICAAAMHSLSIPFRLQHVGPASDSAHSSGKLDIGELVHILSDQGRQNTITALDVAMPAPSLTDRKDLRNIQRSLHSLTPEISDEDEDPYAVESMVVHGVLDAGGKRASISQVKESICSALEGRATKPKFSHLSVSPCPLPIPLPFPSIFSSSVGQQGEILGTSHAEGARPKGPLAVGSVPMAARLRSSSAIAPFIERRSASLQRLGVARGTLGSQVLHDWGFGREEVEDMAEHLAKMLRPFYPEMDLTSDSDD

SEQ ID NO: 63534 - protein, 358 aa, Zea mays subsp. mexicana
  Clone ID: UC-ZMFLTEOSINTE066H02_FLI.pep
TLVRLSSSSPASRARSASLAAVCCAGRLSSARCLLLAWPSMSMGRFVNSMDPTSGLEVIRDWNGVAQVVLRSPKGASARVSLCGGQVVSWRNDRGEELLFTSSKATFKPPNAMRGGIQMCFPQFGYSGTLERHGFARNRIWSLDDEQPPLNHNDNGSKVSVDLILKPSEDDLKCWPHCFEFRLRASLSKDGDLSLISRIRNVNGKPFSFSFAYHTYLSVSDISEVRIEGLETLDYLDNLSHKERFTEQGDAITFESEVDRVYVSSRNVVAVIDHEKKHSFVIRKEGLPDVVVWNPWEKKSKTMVDFGDEEYKQMLCVDAAAVERTISLRPGEEWTGKLELSAVLSTNCSDHLDHPVSI

SEQ ID NO: 63535 - protein, 333 aa, Zea mays subsp. mexicana
  Clone ID: UC-ZMFLTEOSINTE067E05_FLI.pep
TASYMDSCFHVLIQALLHCAPSSPPPLPATNCQGGTASRSDPLTSAMGNLCCCVQVDQSTVAIREQFGKFDSVLEPGCHCMPWFAGKRVAGQLTLRLQQLDVRCETKTKDNVFVNVVASIQYRALADKASDAFYKLSNTRSQIQAYVFDVIRASVPKLHLDDAFEQKDEIARAVEEELEKAMSAYGFEIVQTLIVDIEPDEHVKRAMNEINAAARLRAAANEKAEAEKIVQIKRAEGEAEAKYLSGLGIARQRQAIVDGLRDSVLGFSVNVPGTTAKDVMDMVLITQYFDTMKEIGASSKASSVFIPHGPGAVRDIATQIRDGLLQGSSVAKH

SEQ ID NO: 63536 - protein, 517 aa, Zea mays subsp. mexicana
  Clone ID: UC-ZMFLTEOSINTE071F02_FLI.pep
KCKLAATPPQRGRGDTIQYDVSGLVAATVADLSQELRQVPVRAPAVGHGSPRIPLPRRGARRHRPRRRGLHAPPQLLGLHDAVRARRRADAGAHPLRHEPRGRALVRVPRNRDGRHAARRALQGRVPPAMRHEACDRRVRQHARLVAPLQHHPAGAVRIGRRRRVVVVALAVVLPQDQEERPLHLRHGVGDLRDLVLAHNRRAAEGDVHHRIGRLGVQPAEVPALVMVKDVTRRRRGAPAVIRFVQEREHGPDGEDVHVWPQRRERVGLHGVAGVGEHVRRGLRGAVVSFERVDELAELREHERERVVVGGDGEERRQVADAERREAREPHLGARVPGRRGGHDGVPVPAEVVVVRGERGGRLDPEHGRRRHAVVPRHARHPRQEQRVHGARDGAPVVAEAAEDPGQRARPRHPCLLHVPRVAVYGDVEPTVVAVRVGHVLDLRIAVATLLLRHSHTGSAREHLPERRERGADGDACPGARAAEAAREVTRRGDVPLRRVRDDQEVVLLVVLRRHAV

SEQ ID NO: 63537 - protein, 212 aa, Zea mays subsp. mexicana
  Clone ID: UC-ZMFLTEOSINTE071G12_FLI.pep
IFHPPKLLFAVYKTGLGFPIPGDLLCSCLVLGFLYFQDLLDNLLLLDQESTNDSLPNSNSREYSTIRTVHSPAAPRQPGPFVLSRPQVRDPLDFLPGDGALGPARPLLGVLVHKLPAWGLDDSGLVGLRSVAVTLPVREALHHLAEVLLVLVLLLLLLVPLVLALAGGRDNGLGVPILAGGLLLVLLVVVEEVVVLLLRHDGCLLPPELVGC

SEQ ID NO: 63538 - protein, 467 aa, Zea mays subsp. mexicana
  Clone ID: UC-ZMFLTEOSINTE072C04_FLI.pep
PISDPLVDPKMQIFVKTLTGKTITLEAESSDTIDNVKAKIQDKEGIPPDQQRLIFAGKQLEDGRTLADYNIQKESTLHLVLRLRGGMQIFVKTLTGKTITLEVESSDTIDNVKAKIQDKEGIPPDQQRLIFAGKQLEDGRTLADYNIQKESTLHLVLRLRGGMQIFVKTLTGKTITLEVESSDTIDNVKAKIQDKEGIPPDQQRLIFAGKQLEDGRTLADYNIQKESTLHLVLRLRGGMQIFVKTLTGKTITLEVESSDTIDNVKAKIQDKEGIPPDQQRLIFAGKQLEDGRTLADYNIQKESTLHLVLRLRGGMQIFVKTLTGKTITLEVESSDTIDNVKAKIQDKEGIPPDQQRLIFAGKQLEDGRTLADYNIQKESTLHLVLRLRGGMQIFVKTLTGKTITLEVESSDTIDNVKAKIQDKEGIPPDQQRLIFAGKQLEDGRTLADYNIQKESTLHLVLRLRGGQ

SEQ ID NO: 63539 - protein, 487 aa, Zea mays subsp. mexicana
  Clone ID: UC-ZMFLTEOSINTE073B01_FLI.pep
CSWAYADTAPIRIVVLASLADPLLPSPRFKMQIFVKTLTGKTITLEVESSDTIDNVKAKIQDKEGIPPDQQRLIFAGKQLEDGRTLADYNIQKESTLHLVLRLRGGMQIFVKTLTGKTITLEVESSDTIDNVKAKIQDKEGIPPDQQRLIFAGKQLEDGRTLADYNIQKESTLHLVLRLRGGMQIFVKTLTGKTITLEVESSDTIDNVKAKIQDKEGIPPDQQRLIFAGKQLEDGRTLADYNIQKESTLHLVLRLRGGMQIFVKTLTGKTITLEVESSDTIDNVKAKIQDKEGIPPDQQRLIFAGKQLEDGRTLADYNIQKESTLHLVLRLRGGMQIFVKTLTGKTITLEVESSDTIDNVKAKIQDKEGIPPDQQRLIFAGKQLEDGRTLADYNIQKESTLHLVLRLRGGMQIFVKTLTGKTITLEVESSDTIDNVKAKIQDKEGIPPDQQRLIFAGKQLEDGRTLADYNIQKESTLHLVLRLRGGY

SEQ ID NO: 63540 - protein, 228 aa, Zea mays subsp. mexicana
  Clone ID: UC-ZMFLTEOSINTE073B02_FLI.pep
CCSGRCSRDWGPERAQQAPTATGRQQRLMPFAPHSHHSAAECREIIKLAKRVSERREQTSKDGSPPRHRPGKERVDDGDVTAGERDLAYQSPEQVLKDILTRDSDSGDDTDRRKKLYVMYSGSWELTSCRNVKSLRREVLSATLGVPKAAPHQRWRSTTISFGASDCPENMARVGILPLITAPVIANIKLHHVLIDGGAGLNVISHAAFKQLQIPPVGLTDSRVAQLV

SEQ ID NO: 63541 - protein, 679 aa, Zea mays subsp. mexicana
  Clone ID: UC-ZMFLTEOSINTE073B11_FLI.pep
LTVPKIPKLTNILISRAYSTSAIRKERIPSLIKRAGPGRTRLAARRPACLVGVGALAGGPVRQRGAEVAGHDAGVQELDDGRERHAPGHLVLVDGRAAGDGVVHELLEGARPDHPDLQRPDGPVRHAALPVHRVQRLLHLQAAPLQRPLAHRGAARGALGQELPVDDVVARDALGVGLAGVLHHGGAVRAEQRGRALHGALQLGLVRLVGLDGQQHVLAPHEPELRRGVVEAGHLEHVADAVPVQPRVRGDHQLVLAPDLHAGEVHQLARVAAGRRRGVHRQELEVAHVGHQGVGHLRGVAHGAEVEPEVALGGRVHGARHREPTAVVLERRDVLRHGAGDDDVQVLGAGPNAGDDASPVALGALGADQRRELGVSAEDAGDRLAHRQVGDARGERAGFDVLRELLPVELEEANGAEEARGEHRADAQHVLALAQPAQHLRVHALERVGAEDGRRGARVVVVGVERAVLEVVALVVARQDGPRREAARRLRLRLDKEEMESLPLVHPGHVQVHYGHLEAVQQLAAVELVLDGGHELALAGGRAGAGEELGHRVPRQDGRAVAVGNAADVRLQVLVRRHRHLGAEGGAVRSSGGEAVLGEVLGAGVAGEDLPQHALLHGVHVGGHLLDELELLSVCVLHRGRQRLRGRAPERRAGGRHYFGHHRHCLDLDGTLLLLANAS

SEQ ID NO: 63542 - protein, 591 aa, Zea mays subsp. mexicana
  Clone ID: UC-ZMFLTEOSINTE073G03_FLI.pep
RRRKREKPLPSRSFKLCIQHRAHVMEGRKGKPRCMHALDGEVGRRHWQSDDLAAAEAGLRHVVLVPERPLRRDDAHVQLLAEVLPLPDVGPDAPHARVVERHHHRRPRPRVHLDRVPAHRVQEVVRAPGRWRPFARAHADGEEGVAVDVDGVDALLGVLEDHLDEGAELGADDVGGHLGGRGLGGRHVADDVVLEHPVGGVEVLGELDGGLGVDVRHAVEAEPLLAVHLAAAHGELDGAGDVDLAVVVRPLRVGPRRARRQVPAEGPALVDGPRPPAGALRHLGRRRGVGALVADHGRDAVHLLDEPGGRRQQVVAGLLVGGDEERQALADVEVQRVVVVLHGVGALHLHQLHDVVLDADVEGRLDAHVADAEPVRLAGLHVVHGRVRRVLLVLAVDHEPRGPPDPLAGVQVLGQDGVVLGVPVADEDREVVGRRVEGDRDQVTAVDADEPVGARRPLHAGAGVIEEAADLVLGLPVVREVGVGLDRAHGAQHAVLPRVLPLLDPVPGEEERLVEHVEDIDDDVVVGCAVDGRAGEHVVDEDHLLRRPHDGLRPVRHLPLEEMVGVLRARHGGDERQHEQRGGGASHCHPS

SEQ ID NO: 63543 - protein, 592 aa, Zea mays subsp. mexicana
  Clone ID: UC-ZMFLTEOSINTE073G09_FLI.pep
LTKIKLSAGCQECSQWTVPSNRSTKPASIWLAQASHGPRLFPEQILLRLAGRSLGEVAEHHRPGRHVVRQPSPAEADDVVRGGSRAVPERDERARRLAPVVVGPRDHRGVEHRGVPEQHRLHLDGADVLAARDDDVLGPVLELDVPVRVAHAEVARAQPPAAHGLLRGRRVLVVPAHDRVPPEHHLAHGAPVGGQRLHARRVLDGDLLDHGVSDALQRLHPGALRGRQRVPLGFPHARRRRAVRLGEPVPVRDVEAELVHLGQHLRRRRRAARGDADPPRQRLPIRRRRVREHAEHRGRAAHVGDAVAHDVVKDHTGGHAADADARAALRRGGPHHAPPVAVEHGHGPEVDGHGRHLVDKHRGQRVEERAAVAVDDALGPRRGARRVVQRYRVALVGRPPDFEVARRAPQKRFVLRDRDAAVVAAAAAAGAAAARVRNRDDERKPVFGVGEEPERVAGHGVELRLHEEDLGFRVFQQDGHHGRVVAGVERAQDGAGHRHAEMELVHRRYVRGDDRDHVAAANAETSESGCPGEAPLPRLAPREPPIAANDGRAVAVHDRGALQEAERRQRHVVGSAPHGSVHGSACETERWP

SEQ ID NO: 63544 - protein, 516 aa, Zea mays subsp. mexicana
  Clone ID: UC-ZMFLTEOSINTE080A08_FLI.pep
GRMSSVYVLEPPTKGKVVVQTTAGPLDIELWPKEAPKAARNFVQLCLEGYYDGTLFHRVIKNFLVQGGDPTGSGTGGESIYGAPFADEFHSRLRFNHRGLVACANAGTSHSNGSQFFITLDRCDWLDKKNTIFGKVTGDSIFNLLSLADVETDKDDRPVYVQKILSVEVLWDPFEDIVPRQLKKAESVAKADAEVKPKKKAVKQLNVLSFGDEVEEEENEAATSVQAKIKSIHDVLDDPRFLKGEPEDVQLSKEQEEMKKVTVQTVRDALISKKVESREQENAPLSDDFPEDENEEDFDNRMRAQILKKRRELGDVCPRETSKADKPHHKDKELSDRRSNIEHRRDTDEDDDQEHELQKAKKLSLKKKGAGSEASAERMSKADANLQLLNPAEQERHLQKQKKRRLQGREDETLAKLQKFKSSFLSKNLATNHVEEKNPSTGKAEKEDEEEDDYKGWHTNLLSFLPSSSKDGMARKDDPDDYVVVDPLLEKGKEKFNKMQAKLKRREREWAGRSLT

SEQ ID NO: 63545 - protein, 488 aa, Zea mays subsp. mexicana
  Clone ID: UC-ZMFLTEOSINTE32E11_FLI.pep
EPHTETSPHARMAAAAGGTGGCGCHIVAVPFPGRGHVNAMMNLSRLLAARGAAVTFVVTEEWLGLIRSSSSAAAAAAAEPAGIRIRTIPNVIPSEHGRAANHSGFLDAVATEMEAPFERLLDGLEGPPPAALVADAYVPWVVGVGNRRGVPVWSLFPMSAAFFFAYYHFDRLPAWLTNSEHTPESGETIGNSDQRLGHYIAGQASSSIRLSDLEPLIHNKRTVKHILTTISSIRNAQSLLFTTMYELEASVIDSLRSVLSCPVYPIGPCVPYMMLEDHTVSSGKVARQGDYFTWLDSQPVNSVLYVSLGSFVSVSASQLEEIALGLIASEVRFLWILREQSPRVQELFSGINNGMILPWCEQLEVLCHHSVGGFMTHCGMNSTLEGVFAGVPMLALPLFFDQPIDGRLIVEEWKIGLAVRDWSSKGGLIWREDIARAVKKLMSSDETGTKALRERALELKEASRRAVNEGGSSYCNLSSLMETVCTPK

SEQ ID NO: 63546 - protein, 294 aa, Zea mays subsp. mexicana; identical to SEQ ID NO: 63297
  Clone ID: UC-ZMFLTEOSINTE35C02_FLI.pep

SEQ ID NO: 63547 - protein, 381 aa, Zea mays subsp. mexicana
  Clone ID: UC-ZMFLTEOSINTE39A10_FLI.pep
MQIFVKTLTGKTITLEVESSDTIDNVKAKIQDKEGIPPDQQRLIFAGKQLEDGRTLADYNIQKESTLHLVLRLRGGMQIFVKTLTGKTITLEVESSDTIDNVKAKIQDKEGIPPDQQRLIFAGKQLEDGRTLADYNIQKESTLHLVLRLRGGMQIFVKTLTGKTITLEVESSDTIDNVKAKIQDKEGIPPDQQRLIFAGKQLEDGRTLADYNIQKESTLHLVLRLRGGMQIFVKTLTGKTITLEVESSDTIDNVKAKIQDKEGIPPDQQRLIFAGKQLEDGRTLADYNIQKESTLHLVLRLRGGMQIFVKTLTGKTITLEVESSDTIDNVKAKIQDKEGIPPDQQRLIFAGKQLEDGRTLADYNIQKESTLHLVLRLRGGY

SEQ ID NO: 63548 - protein, 486 aa, Zea mays subsp. mexicana; identical to SEQ ID NO: 59117
  Clone ID: UC-ZMFLTEOSINTE39D11_FLI.pep

SEQ ID NO: 63549 - protein, 401 aa, Zea mays subsp. mexicana
  Clone ID: UC-ZMFLTEOSINTE40B08_FLI.pep
NQPDHTNQTTASSPDRRGASPPAPMATRYLIVSLPVQSPGATASSLWSRLQDSISCHSFDTPLYRFNVPDLRVGTLDSLLALSDDLVKSNVFVEGVSHKIRRQIEDLERAGGVETGTLTVDGVPVDTYLTRFVWDEGKYPTMSPLKEIVGSIQSQVAKIEDDMKVRASEYNNVRSQLSAINRKQSGSLAVRDLSNLVKPEDMITSEHLVTLLAIVPKYSQKDWLSSYEKIDTFVVPRSSKKLYEDNEYALYTVTLFAKVVDNFKVRAREKGFQVRDFEYSPEAQESRKQEMEKLLQDQEAMRTTLLQWCYASYSEVFSSWMHFCAVRVFVESILRYGLPPSFLSAVLAPSTKSEKKVRSILEELCGNAHSIYWKSEDDVGVAGLGGETEAHPYVSFTINFV

SEQ ID NO: 63550 - protein, 474 aa, Zea mays subsp. mexicana
  Clone ID: UC-ZMFLTEOSINTE41C01_FLI.pep
ARPLRTVSLCAPTPRPPKSPPRPASRPRSQGKEERRPGPRRQRADPSSRARSGLRSRFPGRVRRTPIVRAIELCSRLLAGERAEDPIVPSQPAPHPRGRGRGAPAPSGRLLLLRAPSAPWRPATAIARRPTASASQSATAILIFAIYVHGQKVTYFLRPIWEKPPKPFTILPHYYHENVSMGNLCKLHGWKVRETPRRVFDAVLFSNELDILDIRWHELSPYVSEFVLLESNSTFTGIKKDLHFKENRQRFGFAESRLTYGMIGGRFVKGENPFVEESYQRVALDQLIKIAGITDDDLLIMSDVDEIPSGHTIDLLRWCDDVPEILHLQLRNYLYSFQFLLDDKSWRASVHRYRAGKTRYAHFRQTDDLLADSGWHCSFCFRYINDFIFKMKAYSHVDRIRFKYFLNPKRIQHVICEGADLFDMLPEEYTFQEIIAKLGPIPSTFSAVHLPAYLLEQFDRYRYLLPGNCVRESG

SEQ ID NO: 63551 - protein, 567 aa, Zea mays subsp. mexicana
  Clone ID: UC-ZMFLTEOSINTE42D02_FLI.pep
LPPADLLSFLPRPVVPLSPAAPPPCPSRTRPYRTAPETLGRGTHPPRERGVGRRAAGGMAPQAAGSTPAVAALGFLLPTCWEIEVTCAAAMILVALYAAYELLNPRPFQAAAAGDADELLVRGLDGTNKGGASGRSAYVVKLELLAARNLMAANLNGTSDPYALITCGAEKRFSSMVPGSRNPMWGEEFNFFVDSLPVKINVTIYDWDIVWKSTILGSVTVPIESEIPSGPVWHTLDSTSGQVCLHIKVIKVHESSSRALNSSAEAGARRRISLDKQGPTVVHQKPGPLQTVFELPPDEVVDHSYSCALERSFLYHGRMYVSSWHICFHSNVFSKQIKVVIPLRDIDEIRRSQHAVINPAITIFLRMGAGGFGVPPLGCPDGRVRYMFASFWNRNHTFRALQRAVKNFQMMIEAEKQERAQSALRAHSSSRKNSKKEINIPEDCAALTGQLQPFVKEEVLVPVFNGTFPSTAEHFFSILLSDDSNYITEYRTFRKDKDINLGQWHIADEYDGQVRELNCKSICHSPMCPPYSAMTEWQHIVLSADKMDLVCFYCTTECSIMTDNSSW

SEQ ID NO: 63552 - protein, 277 aa, Zea mays subsp. mexicana
  Clone ID: UC-ZMFLTEOSINTE44A01_FLI.pep
PPFHQARRHATRSNAQAGEDQTGRTLPSPLGVSACCGARAEIRSDLGLGSWSSRHQTCLVGGAELPSTLEDPKSVLENLLRLQMADDPNMNFREFSQSLCNQDVVSFQTSVATSGSGDMPTYLDCSTGMDAGVGMLPTPSVVVSTGSSNMPADSGQNLKYGGPLAADWTQVELEILKDGMEKYVHEQGIMKYIKIAASLPNKTVRDVAMRCQWVGKKVHTRRRKPQGRHTGRNTKERKDKFVESALWGANHPIRRGMRASSFMLHNVQNNMFLCGGW

SEQ ID NO: 63553 - protein, 320 aa, Zea mays subsp. mexicana
  Clone ID: UC-ZMFLTEOSINTE44A02_FLI.pep
NSTLHSSHAKRGPHLDPRRRADLTIASLQPTATPSSPPAIYPARAPLLLLLLLILLPRRSGGRDLRSGWVAMAAAGRNAGVLALFDVDGTLTAPRKGVTPEMLEFMKQLRQHVTVGVVGGSDLVKITEQLGSTVITDYDYVFSENGLVAHKNGQLIGTQSLKSFIGEDKLKEFINFTLHYIADLDIPIKRGTFIEFRSGMINVSPIGRNCSQEERDEFEKYDKVHNIRPKMVSVLREKFAHMNLTFSIGGQISFDVFPQGWDKTYCLRYLEEFQEIHFFGDKTYKGGNDYEIFESERTVGHTVTSPSDTAQQCRSLFLSK

SEQ ID NO: 63554 - protein, 314 aa, Zea mays subsp. mexicana
  Clone ID: UC-ZMFLTEOSINTE44D01_FLI.pep
ASGEMDVVKAAQLSGRTLERVVVHPLVLLSIVDHYNRVARDTRKRVVGVLLGTSSRGSVDVTNSYAVPFEEDDKDPRIWFLDHNYHESMFSMFKRINAKEHVVGWYSTGPKLRENDLDVHALFNSYVPNPVLVIIDVQPKELGIPTKAYYAVEEVKENATQKSQKVFVHVPSEIAAHEVEEIGVEHLLRDVKDTTISTLATEVTSKLAALKGLDARLREIRSYLDLVIDGKLPLNHEILYHLQDVFNLLPNLNVNELIKAFAVKTNDMMLVIYLSSLIRSVIALHNLINNKMLNKEHEKAEDSKPTAIPTAAGS

SEQ ID NO: 63555 - protein, 213 aa, Zea mays subsp. mexicana
  Clone ID: UC-ZMFLTEOSINTE44H04_FLI.pep
LAAFPAPQQQRIPLPSRDPTLGPVAGESGMGLWDSLLNWLRSLFFKQEMELSLVGLQNAGKTSLVNAVATGGYSEDMIPTVGFNMRKITKGNVTIKLWDLGGQRRFHTMWERYCRGVSAILYVVDAADRDSIPIAKSELLDLLTKQSLAGIPLLVLGNKIDKSEALSKQALVDQLGLELIKDREVCCYMISCKDSVNIDVVIDWLIKHSRTAK

SEQ ID NO: 63556 - protein, 179 aa, Zea mays subsp. mexicana
  Clone ID: UC-ZMFLTEOSINTE45A02_FLI.pep
IDKITRPKPGWAHTSVPPAAASAAAVAATTTLAPTAVAATASVAAATTLAPTAVAATAAITAVTAPATIAAAAATAAVATAATATATGLGLVNGDVTAVELLAVHVLDSVEHGVLGGEGNEAEAAGPPRLPVGDDLGVEDLAVGGEGILQRLVAGGPGKPADEATVLHISRRHRPSTKP

SEQ ID NO: 63557 - protein, 273 aa, Zea mays subsp. mexicana
  Clone ID: UC-ZMFLTEOSINTE45A04_FLI.pep
AEITRSKGERMNTVPDAKQWDKTSYQLHDDSRMGHINLGLMNLDLKMNEAAAMKLPFRGMPYNMNQMYLKGSNANSNVNAFKMNVGVNKYSNSPNGKDANGKNNGGNNNNGSANGTSVADKRFKTLPTSEMLPRNEVLGGYIFVCNNDTMQEDLKRQLFGLPARYRDSVRAITPGLPLFLYNYTTHQLHGVFEAASFGGSNIDPTAWEDKKCKGESRFPAQVRICIRKLCKPLEEDSFRPVLHHYDGPKFRLELSIAETLSLLDLVPETSCGE

SEQ ID NO: 63558 - protein, 259 aa, Zea mays subsp. mexicana
  Clone ID: UC-ZMFLTEOSINTE45D01_FLI.pep
RLVPVQSTFSSSPTPPPSRHLAGGGTPTASMGNIFVKKPKITDVDRAILTLKTQRRKLAQFQQQLEKVIEAEKEAARQLVQQKKRDRALIALKKKKAQEELLKQVDTWQMNVEQQLADIELASKQKAVFESLKAGNAALKSIQNEINIDDVQKLMDDTAEAKAYQDEINAVLGEQLSAEDEEAVMAEFENLEAQLAVESLPDAPATEVRPEEKTKALADTEAAPEDIDDVIELPDVPTKVPERPEAPEKNKVLEEPLPA

SEQ ID NO: 63559 - protein, 487 aa, Zea mays subsp. mexicana; identical to SEQ ID NO: 47714
  Clone ID: UC-ZMFLTEOSINTE45D07_FLI.pep

SEQ ID NO: 63560 - protein, 356 aa, Zea mays subsp. mexicana
  Clone ID: UC-ZMFLTEOSINTE46A01_FLI.pep
SLSSALLCSTLLTPPTASSQPNPLSISLLFFLRIPSSAEHLLHSPSTQEMVVPEVNKEVLTDLEGMGFSTARATRALHFSGNSTIECAINWLSEHQEDADIDEMPLVPANSKTEVNKPSLTPEEMKIKAQELRERARKKKEEEERRMERESKKERVRIGKELLEAKRIEEQNERKRMIELRRLEKEEEKRAREKIRQKLEEDKAERRRKLGLPPEDPAAAKPSAPPPVEEKKSALPVRPATKAERMRDCLRNLKQQNKDDDAKVKRAFQTLLTYIGNVAKNPDEEKFRKIRLTNATFQERVGNLHGGIEFLELCGFEKLEGDEFLFLAREKVDRAILNTAGAELNSAITNPFFGVL

SEQ ID NO: 63561 - protein, 238 aa, Zea mays subsp. mexicana
  Clone ID: UC-ZMFLTEOSINTE46B01_FLI.pep
VPSVETSLRCYIASLASILTPQAISISTATSLFLAARTNPPPSTYCHSASSWPPLRQMGLSEEQQKQALELRSMTNGGKESLEETETDGASCNPAATGGCCQGNGGFTRALEQQKQALELRSMTNGGKESLEETETDGASCNPAATGGCCQGNGGFTCCHPDLPKEKRDKSIAIEQNPKSCEENGKDGGAGSKKGNSKTCPMPTWFETWERADTYAALAVVAAAAAVFISFRIYKNLN

SEQ ID NO: 63562 - protein, 487 aa, Zea mays subsp. mexicana
  Clone ID: UC-ZMFLTEOSINTE46C02_FLI.pep
CSWAYADTAPIRIVLLASLVDPPLPSPRFKMQIFVKTLTGKTITLEVESSDTIDNVKAKIQDKEGIPPDQQRLIFAGKQLEDGRTLADYNIQKESTLHLVLRLRGGMQIFVKTLTGKTITLEVESSDTIDNVKAKIQDKEGIPPDQQRLIFAGKQLEDGRTLADYNIQKESTLHLVLRLRGGMQIFVKTLTGKTITLEVESSDTIDNVKAKIQDKEGIPPDQQRLIFAGKQLEDGRTLADYNIQKESTLHLVLRLRGGMQIFVKTLTGKTITLEVESSDTIDNVKAKIQDKEGIPPDQQRLIFAGKQLEDGRTLADYNIQKESTLHLVLRLRGGMQIFVKTLTGKTITLEVESSDTIDNVKAKIQDKEGIPPDQQRLIFAGKQLEDGRTLADYNIQKESTLHLVLRLRGGMQIFVKTLTGKTITLEVESSDTIDNVKAKIQDKEGIPPDQQRLIFAGKQLEDGRTLADYNIQKESTLHLVLRLRGGY

SEQ ID NO: 63563 - protein, 672 aa, Zea mays subsp. mexicana
  Clone ID: UC-ZMFLTEOSINTE46D01_FLI.pep
GRRPEMDRRSWLWRRKSTDKSPAETETSASSASERITDEQDTAKSSPNSTQSPEVTSKELEDGNDVKVKVLSERLSSVVLDIRAKDDLVKQHSKVAEEAVLGWEKAETEIASLKAQLNAAAAKNSALEDRLVHLDGALKECVRQLRCAKDEQDQTVQGALAQQARQWESHKADLDQFRIDRSGASSRAASLATADIGVMDDFLEMEKLASASKGDAVEDASGQVLRLEEKVKKLAAEKAEREKALHEAQREMRTSRQRVMVAEERSAELQRQLNLANGEKHAMGAEVKAAEAKRGELEGQLELAHAEIAGLLDKGRILEERLESEKALTLELAAKYQDMEALRAEKRELSAQLETSRSEAKKLGDKIALMERKLEVEKALSIRLATKCHGIDALEAKKKGVELELETAREEIASLQNKASSLELRRVEEEKASSAALALRCQELDELRSQLESSNSRIVELNEKVKTLEDVVEEQRSVTVELESQLRSRRAEISSLKEDISLLQKKLESQKNLSSAYISALGASETEKKELASRFELGEKEAEELRGKMSLLEEQIRKERARSSEFAVKCQKMEEQISCRSLLGHQPVKSSAAIKDLQLRKETELAKAAEKLADCQKTIASLSSQLKSLADFDEFPPETETSGADSDDAWDSDLKLLQPASYPTQIGCLAVT

SEQ ID NO: 63564 - protein, 412 aa, Zea mays subsp. mexicana
  Clone ID: UC-ZMFLTEOSINTE47A08_FLI.pep
RFSCSIVSATRLYGRREMEGGEEVEKEGNMSQLAGVQFLLSNEGKEVPLSSIEDRTACLCLFFSAHWCRPCRSFTPTLLQAYTALRSAGKSVEIIFVSLDRDEASFRDHFQGMPWLAVPFDAAGLLRQKLCARFAIERIPALIPLSASATPSSGLGCGEDAVRLVGEYGVDAYPFSAQRRRELESMDDARREGGRLQELLGCEERDYVISADDIKIPIADLAGKTVGLYFGAHWCPPCHVFTKQLKEGYNELKILRPGSFEVIFVSIDRSKGEFQASMSSMPWLAIPYSDAARKRLTRIFSVKGIPGLLILGLDGKALKTDGRTAISAYGAAAFPFTESRVSEVGEALKREGDKLPRRVNDPRHRHMLELDMAKAYVCDECQQKGRYWVFSCKQYNFDLHPSCVGDNKVDNI

SEQ ID NO: 63565 - protein, 545 aa, Zea mays subsp. mexicana
  Clone ID: UC-ZMFLTEOSINTE47A11_FLI.pep
TLWIPSPGIRKTATAPLEQIHLDSSTSEGEASRSMAVAEKVKEKMLMLRSSDNQEFEVKESVAMQSMTLKKMIEDGCADKGIPLPNVTSHILVKVIEYCNKHAEPTGPGDAAGTTNRSAEDELKIFDADFVNVEHSTLLDLILAANYLDIKGLLNLARQTITDLINGKMPEEVCKTNIRNDLTIPSTSALATTMPSSERKQMEARFIAYMQETAEERMTGFAVRGEKYRKHGERPPQPPLEIVKYPALLERAWGWDSILPYCPVNSWPLYKTYLQEYYERNSREVLAHQVEANAASGPNLNGADENDLATLFNLCISREVQLLNLLKRRDKKYNVDEISLNEKLTNCARQITFVEYTGFPFPSVALKCIMAESDLLRKLLMCGTGMISQVNICSRIRKVAFRFMTYKGPGCFAAAATMMATTKEAKLMSGLLRNRCRENNGPFYRSVFIRKWTFAAMFRICEECSPVEESTGGYTATKLILDGSDDNNPCDKDLLQRNKINQKYQGLFKGKTTKCRHPVQKQEPGDGGLFEGECSRTSQHEVNGS

SEQ ID NO: 63566 - protein, 234 aa, Zea mays subsp. mexicana; identical to SEQ ID NO: 42501
  Clone ID: UC-ZMFLTEOSINTE47C02_FLI.pep

SEQ ID NO: 63567 - protein, 383 aa, Zea mays subsp. mexicana
  Clone ID: UC-ZMFLTEOSINTE47H05_FLI.pep
TRPRRRRRSAMRRGATKDDAAPDKVMGPLFPRLHVNDTLKGGPRAPPRNKMALYEQFSVPSHRYSAAVPPAPSPAPPWGAQRPASAVPSTSASQVGGGDRPIFPLFRVPSTEPVRSSDQTNANSNGQAANGTIAESWRQRQSTHLKSKDTNAAGPPAEGNNSVGKKLANDDDFTVPSVLYSGMPPHSSQEKLTLFPTTSPCKSVPAKYSSTDKRRLEGMDASDVKSKGPSGIKEKEPVQVRIDLEDKETTPSFQVLNDKTWSPDPKLSSHMDRLKKQHAEAESYQIRTRNENAVETQSPPKNGVSLLSKPYVDREQNGDSDLLGHGLRETGEKRKRSHHDVEQNDDLSDSSVESLPGMEISPDDVVSAIGPKHFWKARRAIVK

SEQ ID NO: 63568 - protein, 609 aa, Zea mays subsp. mexicana
  Clone ID: UC-ZMFLTEOSINTE49D02_FLI.pep
RESPSTLIRDQQNPQEYIYLLRRSLGGRNNMEATDEENALLLRLHPTPQVVASEYASDGSVDINKQPALKHRTGNWRACYPVLGVGFSEGMVFSAIATNLVTYLTTVLHESKVDAARNISAWSGVCFLTPLLGAFVADSYLGRYWTIVVVLPVYIVAMLVLIASASLPVLFQSDVHPAVVYLGLYLAAIASGGVKPCISAFGADQFDSSDPAELVKKGSFFNWYFFLTTISSLLSGTVIVWLQDNVGWAVSYVIPTVLMLICFPAFLAGSRVYRFREMGVSPITSLLQVVVAAVRKWNAKLPDDSSLLYEQASSPCTTEASHKNKHTNQFRFFDKAAIVPPGDESTVQTSPWRLCTVTQVEEIKMLLSTLPTWASFVIFYAVTSQMQSTMIEQGMLMDNHVGSFAIPPASMPIIGVLSFLIWVAAYETVLAPLARRFTGNEKGFSQWQRLAIGQALSILTMALAALVETRRLAIAEASGLRHREVPVPMSILWQGPVFFVHGAAEVFGAIGMTEFFYDQAPATMKSLCAAFGQLAVASGSYLNTAVLSVVALATTRGGATGWISDNLNEGHLDYFFWMMAALSLLNLALFVRYSMRHTDRQRKQDLGLS

SEQ ID NO: 63569 - protein, 183 aa, Zea mays subsp. mexicana; identical to SEQ ID NO: 44872
  Clone ID: UC-ZMFLTEOSINTE49D07_FLI.pep

SEQ ID NO: 63570 - protein, 207 aa, Zea mays subsp. mexicana
  Clone ID: UC-ZMFLTEOSINTE49F10_FLI.pep
KAGAEMAGESCVPKPLFGGAIFTTFPDRFQDVSNIREVPDHQEVLVDPSRDESLIFELLDLKGEVDDAGSALWFLQDIANEQDAGDNLVVEHSGTLELAALHLGEAPAVAATAVGQLAVSKGRQGREAQNIVRIYLANIRLKNAATDVLITAYEPLLINPLSESAVAVAAGPAIPAEQVGCLPMSEVFKLAVTNFNVRDWNLFDGGP

SEQ ID NO: 63571 - protein, 644 aa, Zea mays subsp. mexicana
  Clone ID: UC-ZMFLTEOSINTE50H07_FLI.pep
SNPASPATLMALEAGSSGGGGGGWGGGFRSLMRRKQVDSDRVRAEGQPQLAKELNVPELVAIGVGSTVGAGVYVLVGTVAREHAGPALTISFLIAGIAAALSAFCYAELASRCPSAGSAYHYSYICVGEGVAWLIGWALVLEYTIGGSAVARGISPNLALFFGGQDSVPWILARHQLPWFDIIVDPCAAALVFVVTVLLCVGIKESSFAQGVVTVLNACVMIFVIVAGSYIGFQIGWVGYKVSDGYFPHGVNGMLAGSATVFFAYIGFDTVASTAEEVKNPQRDLPLGIGVALAICCALYMAVSVVIVGLVPYFAMDPDTPISSAFARHGMQWAMYVVTSGAVLALCSTLMGSLLPQPRILMAMARDGLLPSFFSDVNKQTQVPVKSTIVTGICAAALAFAMDVSQLAGMVSVGTLLAFTIVAVSILILRYVPPYEVPLPPSMQESFRLNQECDEERDRGLLGVGNCNLSQTKDVIVAVESVKDPLIDKRLHKGKMDETKRRKIASLSIGSVCVGVLILASSASATWLPFLPICIGCTIGVVLLLAGLSLLSWIDQDAGRHSFGHSGGFTCPFVPVLPVLCILINTYLLINLSGDTWMRVGIWLLLGVLVYAFYGRTHSSLIDVVYVPAAQADEIYRSSSGYVS

SEQ ID NO: 63572 - protein, 530 aa, Zea mays subsp. mexicana
  Clone ID: UC-ZMFLTEOSINTE51H09_FLI.pep
SAAAFVHQATIPFPSAAQMPVATFLLVALLSCGARAIRTHGGYVSAVGDPGMRRDGLRVAWEAWNFCNEVGQEAPGMGSPRGADCFDLLETSSDEEGRPVYSVAHLVSDADNRLGAGDPFPGSPPGAARVTDADLYAPAKELYLGDRCQVADTPAPWQFWMVMLKNGNLDTTAAACPENGRPARPFPQTSRFPCPAGAGCMNQPLLFHNRTALDDAGRRLRGGLFGTYDLDAAAGLGAGDVSFYSVTWEKDVAASGRGGGWAFHHKLRTSTKYPWLMLYLRSDATRGFSGGYHYDTRGMTKTVPESPDFKVRLTLDVKQGGGRNSQFYLMDMGSCWKNDGRACDGDTATDVTRYSEMIINPATPAWCSPSRIDQCPPWHTFRNGSRVHRRDGARFPYGAYHVYCSPGNAARAEQPTTYCDAYSNPQAQEILQLLPHPVWGEFGYPTARGQGWVGDPRAWDLDVGAMSQALYFYQDPGTPPARRRWTSLDVGTEIYVSDKAEEAEWTLSGFDILVPDKCIKSQQRASNSCW

SEQ ID NO: 63573 - protein, 339 aa, Zea mays subsp. mexicana
  Clone ID: UC-ZMFLTEOSINTE52A07_FLI.pep
KRGRRRGLAMESPTSTASRPDFYDFLDRMRRPAAADLFRSIKSFLVSFSFHAPNAEEDGSKVQAFLAEMESAIRDHPLWANATDQEIDHALEGLEKYVMTKLFDRTFGTSTEDAVTDMDISEKIGLLQQFVKPHHLDIPKVLHNEASWLLAVKELQKINSFKAPREKLLCIMSCCQVINNLLLNISMSNDRTLSGADEFLPILIYVTIKANPPQLHSNLKFIQLFRRETKLISEVEYYLTNLISAKMFIIDVSAHSLSMEESEFQKHMESARLATQVSVASPSSSQGLPTSARANQEETDMAGLLIILFNLFGEVCLTMNLHSKTVFFFVTKQNVFFFV

SEQ ID NO: 63574 - protein, 188 aa, Zea mays subsp. mexicana
  Clone ID: UC-ZMFLTEOSINTE52G04_FLI.pep
QRRHSASAISSSPISILPSSAPSPACARHAGDLGGARARPLSDGVSRFPSPLVLCAPAGDPAKLFQHRYPSMAARRNVRYSPLPSEDGDDSNFIKEDVDLRYTYTPKSYRRIPWKSIALALFLLLLGTSLLFLSYFIFTGHMEGDSSQAYGLLFLGFLSFLPGFYETRVAYYSWRGAPGYTFASIPDY

SEQ ID NO: 63575 - protein, 155 aa, Zea mays subsp. mexicana
  Clone ID: UC-ZMFLTEOSINTE53A04_FLI.pep
IFSICVLESRAICKYAARKNKPELLREGNLEEAAMVDVWIEVEANQYTAALNPILFQVLISPMLGGTTDQKVVDENLEKLKKVLEVYEARLTKCKYLAGDFLSLADLNHVSVTLCLFATPYASVLDAYPHVKAWWSGLMERPSVQKVAALMKPSA

SEQ ID NO: 63576 - protein, 425 aa, Zea mays subsp. mexicana
  Clone ID: UC-ZMFLTEOSINTE53G06_FLI.pep
FWFADARLMSSQVSTSHGLHPPGKLGTFESPHAWPLSAPTAQPEAGRGDDQEVRLLSVAWNQDCGCFAAGTSNGFRIFNCDPFKETFRRDLKSGGFGIVEMLFRCNILALVGGGSNVQYPPNKVMIWDDHQSRCIGEFAFRSDVRAVKLAKDYIVIVLERKIFVYNFTDLKLLYQIDTLSNPKGLCCLSHNSNTSVLACPGVHQGHVRVEHFGLKMAKTISAHDSHISCMSLTMDGLLLATASTKGTLIRIFNTMDGTRLQEVRRGLDRAEIYSIAVSPNVQWLAVSSDKGTVHIFSLRVRVAGEDASNEQRTAESPRMDHQSSSSSIDPLIQANTGSNASSSLSFMRGILPKYFSSEWSFAQFHLPEVTRYIVAFGAQNTVMMVGLDGSFYRCSFDQVNGGQMLQKEYFRFLKSDSPPLRSAAI

SEQ ID NO: 63577 - protein, 125 aa, Zea mays subsp. mexicana
  Clone ID: UC-ZMFLTEOSINTE53H08_FLI.pep
HVCGRLYRIASMGFATFGVFLLAKRALQHFLEKRRRHELQKRVLNAAAQRQAREAEGSKGTSDAEPNSKKDQLVLDICVICLEQEYNAVFVPCGHMCCCMACSSHLTNCPLCRRRIDQAVRTFRH

SEQ ID NO: 63578 - protein, 685 aa, Zea mays subsp. mexicana
  Clone ID: UC-ZMFLTEOSINTE54E03_FLI.pep
LIRGGWTAWQGPRVAGMASSASAPASTGPRYAPPDPTLPKPWRGLIDGNTGYLYFWNPETKVTQYERPVAAVPAPQSQPPVYSRPDDGPRSSAPAEQRSEAAVSRPQYVPPSDNRTRNDHPESSSASGVNLSQSALSTNQVSQYANGSQMSTEAYRAKHEITIVGNEAPAPFMTFQSTGFPSEILREVLQAGFSAPTPIQAQSWPIALRGRDIVAVAKTGSGKTLGYLLPGFILLKRLQHNSREGPTVLVLSPTRELATQIQDEAIKFGRSSRISSTCLYGGAPKGPQLRELERGADIVVATPGRLNDILEMNRVSLHQVSYLVLDEADRMLDMGFEPQIRKIVKQIPPKRQTLMYTATWPREVRKIASDLLANPVQVNIGNTDQLVANKSITQHVEVIPHMEKSRRLDQILRSQDPGSKSIIFCSTKRMCDQLARNLSRQYRASAIHGDKSQAERDSVLNDFRSGRCPVLVATDVAARGLDIKDIRVVVNYDFPTGVEDYVHRIGRTGRAGATGSAYTFFGDQDSKYASDLVKILEGANQSVPPQLKEMALRGGYGGRSRRWASSDDSYGGQGYGAKRSTDSFNNNSFGNQAGGGSSFHSSSSGGQFSDTTSFHGSFDNSVRNNQTGDNASFPPSSSNNQSGDGLSFHERFYGSRGRDQSRTSNDGFRARSRSPPGKPVEVSNW

SEQ ID NO: 63579 - protein, 287 aa, Zea mays subsp. mexicana
  Clone ID: UC-ZMFLTEOSINTE55B07_FLI.pep
QHSQTHFLSFPSGSASSTTPTTPSASGELHPSTGCGEKRRGLTKSVGCGGGDPGAGAGAGAESRAMGQQSLIYAFVARGTVVLAEYTEFTGNFTTIAAQCLQKLPASNNKFTYNCDGHTFNYLVEDGFTYCVVAVESVGRQIPIAFLDRVKEDFTKKYGGGKTATAAANSLNREFGSKLKEHMQYCVDHPEEVSKLAKVKAQVSEVKGVMMENIEKVLDRGEKIELLVDKTENLRSQAQDFRQQGTKVRRKMWLQNMKIKLIVLGIIIALILIIILSVCHGFKCGSK

SEQ ID NO: 63580 - protein, 665 aa, Zea mays subsp. mexicana
  Clone ID: UC-ZMFLTEOSINTE55C06_FLI.pep
QVFATNPSSSPTERFRGSRFSIATETKEWGGGELWALARMKFMRLGTRPDTFFTAADSVRSVCTEVATDLQILVDNCLYHLHKFPLLSKCMLLQALCADAGDVVVELPGFPGGAEAFEACAKYCYGITVTVSARNLVPLRCAAAHLGMSEAADRGNLAAKLDAFLASCLLRRWKDALGVLHSTRHHAPLCEDLGLTSRCVDAVAALVASPDTAPPPRSTSASPWWAHDVAELGVDLFWRIMVAVKATGAVHEKTVGDALKAYARRWLPNVAKDQPLDRDAADVKQVATRHRLLLEKIVSLLPAERDAVSCGFLLKLLKAANILSASKASRAELVRRVAWQLEEASVSDLLIPSLSCVSDTLYDVGAVSAILDEFALRCAALPPAPALALSGSLDDSPAHSGGHRRSRSAESVSFDGTRRSLSAAPVSQGGLVQVGKLVDGFLIEVAKDPNMPMDKLLAIAEAVPDSARPEHDGMYKVVDTYLKAHPEMSKSARKRLCRVLNCRKLSEKACAHAAQNELLPLRVVVQVLFFEHARAAALASGGHAVAAAADLPSNIRALLSKSGSSEDDEADRVDEQRLRALAAGASPGDDWSVEGLRRAASKIATLRMKLAEDEDEDRDADEFARKAGLPRSASLRFRAFCAIPAGKPRRMLSKLWPLGRSGVSH

SEQ ID NO: 63581 - protein, 508 aa, Zea mays subsp. mexicana
  Clone ID: UC-ZMFLTEOSINTE55C07_FLI.pep
PGSRRRRARHAAGSDEMEDGVSTYTVDEALVSMGFGKFHAFVLAYSGMAKISEAMEMMLLSFVGQSVQAEWGLSAHEESLITSVVFVGMLVGAYAWGIVSDNYGRRVGFNFTAIVTGGAGLLSAFAPNYLSLIVLRFMVGVGLGGGPVLGSWFLEFIPAPNRGTWMVMFSAFWTVGTIMEASLAWAVMPAFGWRWLLALSSLPSFALLLFYPVTLESPRYLCMKGRIAEAVHVLETMSRVNCVSLPSGRLVSGHRVELHDIGDSSETAQLVTSNKNNTADRGSKSEIGGLSAILKLLSPNLIRSTLLLWTVFLGHAFLYYGLVLLTSELNHGNRICGSEEGAEVTTTAHIHDENLYRNVFITSFGEVPGLLLSAAIVDKIGRKLSMSSMLYISCLCISPLMFAQTESLTTVFLFCARVCISASFTVLHIYAPEIYPTAVRATGVGFASSIARFGGILCPLVAVGLVHACHQMAAILIFITVMLASGIAVSYFPLETSGRKLSDHVAAA

SEQ ID NO: 63582 - protein, 350 aa, Zea mays subsp. mexicana
  Clone ID: UC-ZMFLTEOSINTE64B02_FLI.pep
RKGAMSSANGTTNVHGKEAALYEEQLFKIGKVRTDLGQLSGKSALYCSDASIARYLIARNWDIRKATKMLKKTLKWRSEYKPDEIRWDDISDEAVTGKTYRTDYFDKIGRSILVMRPGCQNTKNANGQVKYLVYCMENAILNLPHGQDQMVWLIDFAGFNLGNLSIQVTKMTADVLQGHYPERLGVAILFNAPKFFEPFWKMASPLLEKKTRNKVKFVYSDRPDTMKIMEDLFNMDELECAFGGKNPATFNINDYAARMREDDKKMPSFWSPENSALASEPYQYELEVERKALSMARAWAEEEAKKAREHARALEEARNQWERQGIRVVVEGELKDDASAGVTWANAGSG

SEQ ID NO: 63583 - protein, 159 aa, Zea mays subsp. mexicana
  Clone ID: UC-ZMFLTEOSINTE64E02_FLI.pep
WEVECRDRSRKTRQAASSSSAAAAAASSALAHHELLANLTPIHRRHRPSMARGKVQLRRVENPVHRQVTFCKRRAGLLKKARELSVLCDASVGIIVFSAHGKLYNLATTGTMEELIERYKAASAGEATTDGCGRHNRMDPKHETTVLQQEINLLQKGLR

SEQ ID NO: 63584 - protein, 223 aa, Zea mays subsp. mexicana
  Clone ID: UC-ZMFLTEOSINTE64F10_FLI.pep
SSTPPKSLRFLEATSISVGSPSESSLGKIFGRAEKLKQKAAEIQSGIDGAEALIRKMDLEARNLQPSIRADLLVKIREYKSDLNNLKGALKRVTSINAQQGAREELLESGMADTLGVSADQRSRLLRATERQNQTTDRLRDSHRTMLETEELGVSILHDLSQQRQSLLHAHDVLDEVDNNVGKSRRTIGGMMRRMDRNKWIIGLIIAVLVLAILVILYFKFVH

SEQ ID NO: 63585 - protein, 113 aa, Zea mays subsp. mexicana
  Clone ID: UC-ZMFLTEOSINTE68A05_FLI.pep
CMFSIYRRHCPMWIHSGAHSEQPEGVLAAVRHVEEAVLVLVLLVDGGHQSSCWWEGVLYEDEDCLLSAQLDALPYHIHKLSDCEVGRNKVPASNHNSHIRGHTNVAAGLALYR

SEQ ID NO: 63586 - protein, 656 aa, Zea mays subsp. mexicana
  Clone ID: UC-ZMFLTEOSINTE68G10_FLI.pep
GGLGFVMSKSDLDDLLLQAAGRTGKNQSRPSNPRWNSGGSGSDGFDDDDDEDSDAAPTYSRKKPSSQVPLKKRHKPEKGGRRGGGGWNDEDDEDEDGRRSGGEDSDSAPSVGSDLYKDEDDKERLENMSELQRELILAERGTRLDDYKLKQRARASSSKTDKVGAPKDSSPPPPPSRMRSSTRTDKSGSAAKSALDELRAKQRMRQQAPEARRFTDLLPHSGSSIRRRAGSPPSDGSNDGNNRGRLNDHGRISGDGRDDEFDESPSRLDPLKFDDVKSITLRRSKLVKWFMEPFFDDLISGCFVRLGIGKTKNGTPSYRLCIVRNVDASDPDRNYKLENYSTCKYLNVVWDSEANAARWQMTQVSDSPPNEEEFKEWLQAAEKNGARIPTRQEVLDKKEAIQNAYNFVYSAATVQQMLQEKSAVRRPINIAAEKDRLRSELEMALSRRNEHEAERIRAKLKNLQNRAQPVSKDNKAAKLEAMNRKNRADNFKNASELKPVNTSLKAGEAGYDPFSRRWTRSRNYYASKPGGDNVEETANGSSSNVAPNNEDTKSKAQPGTAATTAAQVAAADAGKLIDTNAPVDLGTESNMLHTFELPISLSALQEFGGAKGLFDGYMARRQKIEATMGYKVPDNDGRRHALTLSVSDYKRRRGLL

SEQ ID NO: 63587 - protein, 367 aa, Zea mays subsp. mexicana
  Clone ID: UC-ZMFLTEOSINTE70G02_FLI.pep
SRRPGSMGREAAATRPPKLRRGLWSPEEDEKLYNHIIRYGVGCWSSVPKLAGLERCGKSCRLRWINYLRPDLKRGSFSQQEEDLIVSLHKILGNRWSQIASQLPGRTDNEIKNFWNSCIKKKLRQQGIDPATHKPLNDDNVADAAAAADNDAAVTPHHHRRHQDDHCGAANIDNNNNNNNNNNNRQLPSADDHCFAMSSDDPLAPHSPTVSFDPLSVTNVPTAMQQGSYGSFRSDNDHLCDYGGGGVDVVSDAATAYSAPYTGGGGGGDSSSNSNGTGTWACSGGEPMPPHVAMFGRDAAQAAAYHQFVDPAKYSPWQQHPAARLHDHNVGGAAAGFPIRSMSRDLPGSCFDLARSALEDEFSVDFL

SEQ ID NO: 63588 - protein, 519 aa, Zea mays
  Clone ID: UC-ZMROB73001F07_FLI.pep
LTLSLLAPPSKSHTTHHHQQPDMAGDDGAHGASARLEGVLTDASTPWARRAWGAAAIELPLLTRLAAPAVVMYMINYLMSMSTQIFSGHLGNLELAAASLGNTGVQMFAYGLMLGMGSAVETLCGQAYGAHKYEMLGIYLQRSAVLLCATGVPLAVIYGFSEPILVFLGQSPEIARAAAIFVYGLIPQIFAYAINFPIQKFMQAQSIVLPSAYISTASLALHLLLSWVVVYKVGLGLLGASLVLSLSWWLLVAAQFAYIVMSPRCRHTWTGFTWQAFSGLWDFLKLSAASAVMLCLETWYYQVLVLIAGLLPNPELALDALSVCMTVNGWVFMIAVGFNAAASVRVSNELGAGHPKSAYFSVWVVTALSTLISIMLGVLVLCLRNYISYLFTEGEVVSNAVADLCPLLAVTLVLNGIQPVLSGVAVGCGWQQFVAYVNIGCYYIVGVPLGAVLGFVFKLGVKGIWAGMIGGTCMQTAILVWVTLRTDWNKEVEEAQNRLHKWEANKTTEPLLAGVSNDK

SEQ ID NO: 63589 - protein, 452 aa, Zea mays
  Clone ID: UC-ZMROB73004B01_FLI.pep
HFPSAMGKEKTHINIVVIGHVDSGKSTTTGHLIYKLGGIDKRVIERFEKEPAEMNKRSFKYAWVLDKLKAERERGITIDIALWKFETTKYYCTVIDAPGHRDFIKNMITGTSQADCAVLIIDSTTGGFEAGISKDGQTREHALLAFTLGVKQMICCCNKMDATTPKYSKARYDEIVKEVSSYLKKVGYNPDKIHFVPISGFEGDNMIERSTNLDWYKGPTLLEALDLINEPKRPSDKPLRLPLQDVYKIGGIGTVPVGRVETGIIKPGMVVTFGPSGLTTEVKSVEMHHEALQEALPGDNVGFNVKNVAVKDLKRGYVASNSKDDPAKEAASFTSQVIIMNHPGQIGNGYAPVLDCHTSHIAVKFAELITKIDRRSGKELEKEPKFLKNGDAGMVKMVPTKPMVVETFSEYPPLGRFAVRDMRQTVAVGVIKSVEKKDPTGAKVTKAAAKKK

SEQ ID NO: 63590 - protein, 329 aa, Zea mays
  Clone ID: UC-ZMROB73004D03_FLI.pep
GVPYNQQIANCCKAGVVSAYGQDPAGSVSAFQVSVGLAGTTNKTVKLPRNFTLMGPGLGYTCGPAAVVPSTVYWTPDHRRRTQALMTWTVTCTYSQQLASRYPSCCVSFSSFYNSTIVPCARCACGCGGHGGHAGPGGCIEGDSKRALSAGVNTPRKDGQALLQCTPHMCPIRVHWHVKLNYKDYWRAKIAITNYNYRMNYTQWTLVAQHPNLDNVTEVFSFQYKPLQPYGSINDTGMFYGLKFYNDFLMEAGPFGNVQSEVLMRKDARTFTFSMGWAFPRKIYFNGDECKMPPPDSYPYLPNAAPVVASQLVLSAAASAFLLLLLLVA

SEQ ID NO: 63591 - protein, 328 aa, Zea mays
  Clone ID: UC-ZMROB73004F03_FLI.pep
LTCSVDTSYYVLQQETGLCKNLLQEYAQKMNYAIPSYICTKQASGVAPFVCSVEIGGILYIGAAARTKKEAEIKAARTALLAIQSQSEGGANGAKKYIVVPGQRPDKETNKNPTETPIPLRVKKRGSRKKWNKRKFRRMADRIVDAGKDAEGLGTLLHDDYEEARRIGYELPTDTAMVQFNKEVVMTQPGEGDRIVQLEPPRDPAEVQYNKEARSVEQDPPRDPAEVQHNKEARSVEQDPPRDPAEVQHNKEARTVEQDPPSNTEVWKPDNKATTTEQESVSAFIALRSNGDSTDVEAAPGDTLMMQGQESEATMQEASHAGEQAQPN

SEQ ID NO: 63592 - protein, 488 aa, Zea mays; identical to SEQ ID NO: 46968
  Clone ID: UC-ZMROB73006G09_FLI.pep

SEQ ID NO: 63593 - protein, 194 aa, Zea mays; identical to SEQ ID NO: 56887
  Clone ID: UC-ZMROB73014F07_FLI.pep

SEQ ID NO: 63594 - protein, 257 aa, Zea mays
  Clone ID: UC-ZMROB73020A03_FLI.pep
LITSISFYYCLRDQAAATGEGDLFYKVKYLAWDMETVVGDLMATELRLGLPGTVDDCSQHQQQTQLKVAAPPSNPTRGKKRPAAEEEEANKRDAEAAPPAAKAPVVGWPPVRSYRKSCFQQAKQQAVSSSSKAADKEDAAAPAPSCTASAAASNATASAGAGSFVKVSMDGAPYLRKLDLRMYKGYRELREALEAMFVSSGSANNNNNLSEFAVTYQDKDGDLMLVGDVPFEMFASTCRKLRIMKRSEATGLGSARQ

SEQ ID NO: 63595 - protein, 306 aa, Zea mays; identical to SEQ ID NO: 39172
  Clone ID: UC-ZMROB73020E05_FLI.pep

SEQ ID NO: 63596 - protein, 247 aa, Zea mays
  Clone ID: UC-ZMROB73020H10_FLI.pep
LLTCHFAQFHPLKKFWLLVVVMEVYFERYPGIVQWSPLTYVCKDFFPHLSVGFQDPRVQLHVGDAVEFLRNAPEGTYDAIIVDSSDPIGPAQELVEKPFFDTIARALRPGGVLCNQAESMWLHTHLIQDMLSICRETFKGSVRYAWTSVPTYPSGVIGFLLCAKEGPLVNFLTPINPIEKLEGATKAGREIRFYNSEMHRAAFVLPTFARRELEAYCVSTETEQAEETPAAPLKLTLASRSEIFATS

SEQ ID NO: 63597 - protein, 217 aa, Zea mays
  Clone ID: UC-ZMROB73024H12_FLI.pep
SPSDEQAPTSLAYASSTRKSSTCHPGRVLVRYSEMLLPSLAVAVVAPAPPLQDSPLPGLLLFSCSSSSSPSDGSAESTGADERRTPVSRNRLCRLVMSFALCTGASHSRHRIALSSLQNKKPLRSWQMSQSGGFCAEDEQGWRREKRRCFPASLLARWTRSSHASHSAASSAQQKTEAASAAHTSHCTFIADSLPAAYSTQTRCDPRGPAWECRSGR

SEQ ID NO: 63598 - protein, 444 aa, Zea mays
  Clone ID: UC-ZMROB73028D04_FLI.pep
SHDSLSIEHLFEALQILGLQPEEHGEAVVPVGALRDVGRAAAEHLRRRDEPRRAPPEVGVVHGHPEPADHPQVGLRHELPARRLAALLRLHLQVVDHGAHVGVIDAVHRVLDRLRHEPERAFQDVLHPGGHEVAHDGVAEVAPRERRAQAVADVGRHAEPRVRARGEPARDAHATPEVRGDGAVGGHARRAAGLDASEKLRGDGVDAGDEGPGHAVEQSRRVDRVVEGRGRRRARAEERPVVERQRAARLGRVEAPRHAGPGLDEVERAHAVHGHVVDARAQHHAAALEERHLEHGHDAGRVSGRRERHEQPPDLRRRLVVTEHVLAGEVGPGDDEERALAGAVDLQAPALAHAQPPRQRVERHQRLGQRRLEPLRREEGRFSVGVASGRRRRVVVHERRVRLGDCQVQVRQPQLRVRRVLARRHKRRPHHINLHRLSLLALEC

SEQ ID NO: 63599 - protein, 435 aa, Zea mays
  Clone ID: UC-ZMROB73028D08_FLI.pep
TLLPAARRGEGGGPDRAVSTRSAPARPRAWCSRAFRAPPASPCALGSMEAGYCNRKKTDGICESVCDSEFGSKSVLSMSRLKCALRGFDLRVLLILLIGVPILIFAIYVHGQKVTYFLRPIWEKPPKPFTILPHYYHENVSMGNLCKLHGWKVRETPRRVFDAVLFSNELDILDIRWHELSPYVSEFVLLESNSTFTGIKKDLHFKENRQRFGFAESRLTYGMIGGRFVKGENPFVEESYQRVALDQLIKIAGITDDDLLIMSDVDEIPSGHTIDLLRWCDDVPEILHLQLRNYLYSFQFLLDDKSWRASVHRYRAGKTRYAHFRQTDDLLADSGWHCSFCFRYINDFIFKMKAYSHVDRIRFKYFLNPKRIQHVICEGADLFDMLPEEYTFQEIIAKLGPIPSTFSAVHLPAYLLEQFDRYRYLLPGNCVRESG

SEQ ID NO: 63600 - protein, 538 aa, Zea mays
  Clone ID: UC-ZMROB73028F10_FLI.pep
GAFAMSEMESVAALMDSTSSKIQQLQEAFAELESQSAFCMNFKWKQLEDHFRGLEQSLKKKFDELKEQEKEFQETVAKSEQMLEQREAAVVAKELTSLERLQEKREAALAMIFSKSRLSLPVPSINPMNKALDNLGVKWPKPASEESVHLQVDNAAVRPRSELVALCEEMNVNGLHKFISDNRKNLAAIREEIPSALKKTSHPYGLVLDSLEDFYSGDNLVLDGKKDGDLLGVRRTCLMLMESLGQLHSNDITCSSLERHMLTTNIIERAKTIAFKWKSKLDNLDIDASNGNCLEAHAFLQLLATFGISAEFNEDDLCKLLPYVSRRRQTPELCRLLGLSQKMPGVIEVLVESGRPIDAINLAYVFELTEQFEPVHLLKAYLRDVKKMSHARNVKTSPGAQNEMNERELSALKSVIKCIEEHKLEQQYPVDPLQKRVLQLEKAKADKRMAVEAAKPQSKRPRANGSAFATRATGFADKSFYSATPERHPFNPCERQFVYGAEVHLPPMMTSASYTMQPAHGPYYGNGYPVQYQVSYIH

SEQ ID NO: 63601 - protein, 472 aa, Zea mays
  Clone ID: UC-ZMROB73049D03_FLI.pep
AVFALSSDSSIPFYSRFHTSVGALRDRVVSSRSLPACGVMARHFKYVILGGGVAAGYAAREFAKQGVNPGELAIISKEPVAPYERPALSKGYLFPQNAARLPGFHTCVGSGGERLLPEWYSEKGIELILSTEIVKADLASKTLTSAAAETFTYETLLIATGSSVIKLTDFGVQGAESNNILYLRDIADADKLVAAMQAKKGGKAVIVGGGYIGLELSAALKINNFDVTMVYPEPWCMPRLFTAGIAHFYEGYYANKGIKVVKGTVAVGFDADANGDVTTVKLKNGSVLEADIVIVGVGGRPLTRLFIGQAADEKGGLKTDAFFETSVAGVYAIGDVATFPLKLYNEQRRVEHVDHARKSAEQAVRAIKAKESGESVAEYDYLPYFYSRSFDLAWQFYGDNVGDDVLFGDNDPASAKPKFGSYWVKDGKVVGVFLEGGSAEENQAIARVARAQPPVADVQALKQEGIDFASKI

SEQ ID NO: 63602 - protein, 490 aa, Zea mays; identical to SEQ ID NO: 44974
  Clone ID: UC-ZMROB73050E05_FLI.pep

SEQ ID NO: 63603 - protein, 484 aa, Zea mays
  Clone ID: UC-ZMROB73053D03_FLI.pep
LPAAAPCPARTRTPVWALAFRFLGRLQGVWPTEGAKMWAERVVGERRMRQIQRFARNAKLTVVCLLLTVVVLRGTVGAGRFGTPQQDLIELRQHFVSHPHRALAEHHDARSRASTTTTSSSSSSSSGRRDEPDPPPRSLRDPPYTLGPKISDWDEQRAAWHRRHPETPPFLNDIKPRVLLVTGSSPKPCENPVGDHYLLKSIKNKMDYCRVHGIEVFYNMALLDAEMAGFWAKLPLMRALLLAHPEVEFLWWMDSDAMFTDMAFELPWERYGPYNLIMHGWDEMVYDDKNWIGLNTGSFLLRNCQWSLDMLDTWAPMGPKGPVRIEAGKVLTKSLKDRPVFEADDQSAMVYILATQREKWGDKVYLENGYYLHGYWGILVDRYEEMLENYKPGLGDHRWPLVTHFVGCKPCGKFGDYPVERCLKNMDRAFNFGDNQILQMYGFTHKSLASRRVKRIRNETSNPLETKDELGLLHPAFKAVKTST

SEQ ID NO: 63604 - protein, 338 aa, Zea mays
  Clone ID: UC-ZMROB73071C12_FLI.pep
LGRIDIEGKGNKWGRQQMDPWISSQPSLSLDLRVGLPPLSLHQAPVAVALARPKVLVEENFLLPPKKEPEVAAALESELRRMSEENRRLAEALAAVVSKYEALRSQHTEMVAASSASEGGSVSPSRKRKSESADTAPVQRLHQQHAAADLSECTSGGEPPCKRVVRDRAEEVEEEEECRPRVSKLYVRADPADLSLAVRDGYQWRKYGQKVTKDNPCPRAYFRCSFAPACPVKKKVQRSAHDASVLVATYEGDHTHGPPPSGSGSGSGASSKNAAKPPSPPRRQEAAVAVTAAAAASEMVRRNLAEQMAVTLARDPSFKAALVSALSGRILELSPTKD

SEQ ID NO: 63605 - protein, 196 aa, Zea mays
  Clone ID: UC-ZMROB73076C02_FLI.pep
NPEPKSVRFIIFMNSSRSISPSPSSSAASIISRTSSSVKCSPVSMASRWMSMSEIFPLASWSMMRNALWSSSRASRSPILSVIMCTNSSKSMVPLPSLSTSAIICPICSGVISNPRALIATFSSLASMVPGGCKQVKGESHSGRHGRTHAHVFVYINATSLARHRPEPSMSKRSNASLISFLFCAVSRFRRTLSVR

SEQ ID NO: 63606 - protein, 329 aa, Zea mays
  Clone ID: UC-ZMROB73076D07_FLI.pep
AQSLSLALGDDWATAAAAAPPLSRCPGLRRRLRQVFDGNEHQPDSGNISKMRPVFCGNLDYDVRISEVERLFGKYGRVERVDLKTGFAFVYMEDERDAEDAISRLDGIDFGRKGRRIRVEWTKEDRTVGRKSSSRRSPTNTKPTKTLFVINFDPINTRIRDLERHFDKYGRVANVRIKKNFAFIQFEIQEDATRALEGTNGSHFMDRVISVEYALRDDDEKGERGNGYSPDRRGRERSPGRRRSPSPYGRGRERGSPDYGRSKERGSPDYGRGGRSPDNGRGVSPAGGGRGDHARGGGRSPDYDRQRREASPPGYDRSPSRSPGREARE

SEQ ID NO: 63607 - protein, 526 aa, Zea mays
  Clone ID: UC-ZMROB73076F11_FLI.pep
PSSWSLVVLRADASRGSEVRRQQHGVAPGRPPRLSSAAGGDLYPGEKMHLSANEGIEGLRFAVTGGQGFVGAALSLELLRRGAREVRSLDLRASSSWSQQLLDAGVRIIQGDIRKKDDVRRAFRGVDCVFHLASYGMSGKEMVQTGRSDEVNINGTCNVLDACHEQGVRRLVYVSTYNVVFGGKPIVNGNEALPYFPIEDHVDAYGRSKSVSEQLVLKSNGRPAKSDKSTRLYTCAIRPAAIYGPGEERHFPRILSLAKLGLAFFKIGDPGVKTDWVYIDNLVLALILASMGLLDDIPDRKGTPVAAGQAYFICDGSPCNTFEFIIKPLFQSLGYSVPQVVLDTSVALAVSRIFLFISTLFYPWLDSKWMPQPLILPAEVYKVGVTHYFSFLKAREELGYVPMVRPHEGLAATISYWQERKRRELDGPTIFTWLAVTIGMLAVFSAACLPPVGPLKWVLDVHLFVFRSMLVIRLVLAVAIALHAGEAVYAWFLARRVDPRNAAGWFWQTFALGYFSLRYLLKRGRA

SEQ ID NO: 63608 - protein, 511 aa, Zea mays
  Clone ID: UC-ZMROB73077D12_FLI.pep
VPRSTGLNLTSPAAKNRSTEPAAAAAAVRQVLTMAELKRLSESRDLTRIERIGAHSHIRGLGLDSSMEARDTSEGMVGQLHARRASGLILQLIRQGKIAGRAVLLAGQPGTGKTALAMGIAKSLGAETPFASVAASELFSLDLSKTEALTQAFRRAIGVRIKEEAEIIEGEVVEISIDRPLSASGVGGSSVAPSGATAAGKSGRLTLKTTDMETVYELGGKMIEALVKEKVQSGDVIALDMASGKVTKLGRSIGRSRDYDAVGPHTKFVKCPDGELQKRKEVVHCVTLHEIDVINSRTQGFLALFTGDTGEIRAEVREQIDTKVAEWREEGKADIVPGVLFIDEVHMLDIECFSFLNRALENDMAPILVIATNRGITSIRGTNYRSPHGIPPDFLDRLLIITTHPYTEDEIRKILDIRCDEEDVEMSADAKVLLTKIGVETSLRYAINLITSAALACQRRKGKVVEMEDISRVYQLFLDVKRSTQYLMEYQSQYMFNEVPGQADGEDAMQS

SEQ ID NO: 63609 - protein, 323 aa, Zea mays; identical to SEQ ID NO: 47067
  Clone ID: UC-ZMROB73078B09_FLI.pep

SEQ ID NO: 63610 - protein, 400 aa, Zea mays
  Clone ID: UC-ZMROB73078H07_FLI.pep
VPALSEDPSVHRSRRHLDSFRRSLWRRVIDCDMRQWLCCNCHFDDEEDGHDKEQAKAQSNKIDPKQKSSKPPVSQPEPEFSPPTIDVPELSLDDLKQKTDDFGSSALIGEGSYGRVYHAALDDGRQAAVKKLDASENEPNDEFLKQVSLASKLKHENLVEMLGYCVDGNYRILAYEFATMGSLHDVLHGRKGVQGAQPGPVLDWMQRVKIVIEAAKGIEYLHEKVQPSIIHRDIRSSNVLLFEDFKAKIADFNLLNQAPDMAARLHSTRVLGTFGYHAPEYAMTGQLTQKSDVYSFGVVLLELLTGRKPVDHTMPRGQQSLVTWATPRLSEDKVKQCVDPRLKGEYPPKGVAKLAAVAALCVQYEAEFRPNMSIVVKALSPLLQQRPAPGTAEPAPQPVS

SEQ ID NO: 63611 - protein, 338 aa, Zea mays subsp. mexicana
  Clone ID: UC-ZMFLTEOSINTE088G06_FLI.pep
RIVRIMRKRLVRKTFDMIEEIAEKEDKEDYKKFWESFGKFIKLGCIEDTGNHKRLAPLLRFHSSKNEGDLISLDQYVESMPESQKAIYYIATDSLQSAKTAPFLEKLVQKDIEVLYLIEPIDEVAIQNLQTYKEKKFVDISKEDLELGDEEEETKETKQEFTLLCDWVKQQLGDKVAKVQISKRLSSSPCVLVSGKFGWSANMERLMKAQTLGDTSSLEFMRGRRIFEINPDHPIIKDLSAACKNEPESTEARRAVELLYEAALISSGYTPESPAELGGKIYEMMAIALGGRWGRSDMEEAEASTGEASAEADSSEGTVAEVIEPSEVRPESDPWRDQ

SEQ ID NO: 63612 - protein, 391 aa, Zea mays subsp. mexicana; identical to SEQ ID NO: 63066
  Clone ID: UC-ZMFLTEOSINTE083G01_FLI.pep

SEQ ID NO: 63613 - protein, 420 aa, Zea mays subsp. mexicana
  Clone ID: UC-ZMFLTEOSINTE086E06_FLI.pep
SATSTLESFPTMASQGSSVFAALEQAPEDPILGVTVAYNKDPSPVKVNLGVGAYRTEEGKPLVLNVVKRAEQMLINNPSRVKEYLPITGLAEFNKLSAKLIFGADSPAIQENRVATVQCLSGTGSLRVGGEFLARHYHERTIYIPQPTWGNHPKVFTLSGLNVRSYRYYDPATCSLHFEGLLEDLGSAPSGSIVLLHACAHNPTGVDPTIEQWEQIRQLMRSKSLLPFFDSAYQGFASGSLDKDAQSVRMFVADGGELLMAQSYAKNMGLYGERVGALSIVCKSADVAVRVESQLKLVIRPMYSNPPLHGASIVATILRDSEMFNEWTLELKAMADRIINMRQQLFNALKSRGTPGDWSHIIKQIGMFTFTGLNSEQVAFMRQEYHIYMTSDGRISMAGLSMRTVPHLADAIHAAVTQLK

SEQ ID NO: 63614 - protein, 449 aa, Zea mays subsp. mexicana
  Clone ID: UC-ZMFLTEOSINTE088H10_FLI.pep
HLRRRIRDSDLGFTAAHRAPPTPVPIRALLYDASVMAGMAPEGSQFDAKHYDSKMQELLSTGETEEFFTSYDEVFESFDDMGLQENLLRGIYAYGFEKPSAIQQRGIVPFCKGLDVIQQAQSGTGKTATFCSGILQQLDYGLVECQALVLAPTRELAQQIEKVMRALGDYLGVKVHACVGGTSVREDQRILASGVHVVVGTPGRVFDMLRRQSLRPDNIKMFVLDEADEMLSRGFKDQIYDIFQLLPSKIQVGVFSATMPPEALEITRKFMNKPVRILVKRDELTLEGIKQFYVNVDKEDWKLDTLCDLYETLAITQSVIFVNTRRKVDWLTDKMRSRDHTVSATHGDMDQNTRDIIMREFRSGSSRVLITTDLLARGIDVQQVSLVINYDLPTQPENYLHRIGRSGRFGRKGVAINFVTRDDERMLFDIQKFYNVLIEELPANVADLL

SEQ ID NO: 63615 - protein, 486 aa, Zea mays subsp. mexicana
  Clone ID: UC-ZMFLTEOSINTE083H02_FLI.pep
QASSYSPISATQSFPQFPPFSHFSPPPPPPPFNNTMRECISIHIGQAGIQVGNACWELYCLEHGIQADGQMPGDKTIGGGDDAFNTFFSETGAGKHVPRAVFVDLEPTVIDEVRTGTYRQLFHPEQLISGKEDAANNFARGHYTIGKEIVDLCLDRIRKLADNCTGLQGFLVFNAVGGGTGSGLGSLLLERLSVDYGKKSKLGFTVYPSPQVSTSVVEPYNSVLSTHSLLEHTDVAVLLDNEAIYDICRRSLDIERPTYTNLNRLVSQVISSLTASLRFDGALNVDVNEFQTNLVPYPRIHFMLSSYAPVISAEKAYHEQLSVAEITNSAFEPSSMMAKCDPRHGKYMACCLMYRGDVVPKDVNAAVATIKTKRTIQFVDWCPTGFKCGINYQPPSVVPGGDLAKVQRAVCMISNSTSVVEVFSRIDHKFDLMYAKRAFVHWYVGEGMEEGEFSEAREDLAALEKDYEEVGAEFDEGEDGDEGDEY

SEQ ID NO: 63616 - protein, 602 aa, Zea mays subsp. mexicana
  Clone ID: UC-ZMFLTEOSINTE102B05_FLI.pep
EKMALSVSMEGIEARARDLGVDLSAVDLDSITLPAGEDFGIVSDDEEVLRSEDLPELEMGLSNIIVVDNLPVVPPEKFEKLENVIRKIYSQIGAIKENGLWMPVNPETKKTYGYCFIEYSTPQEAELAREKTNGYKLDKSHIFAVNLLDDFEKYMKVPDTWTPAEIKPYTAGENLLKWLTDEKARDQFVIRAGTLTEVYWNDARKLAPELVFQKQYWTDSFIQWSPLGTYMATVHRQGSQVWGGENGFERLMRFAHPLVKLIDFSPGERYLVTYSSHEPSNPRDTHRVVLNIFDVRTGKVMRDFKGSADDFTTGGNIGVSGVSWPIFRWGGGKDDKYFARLGKNIISVYETDTFSLLDKKSLKVENVVDFSWSPTDPIISLFVPEMGGGNQPARVSLVQIPGKEELRQKNLFSVSDCKMYWQNSGEYLAVQVDRYTKTKKSTYTGFELFRIKERDIPIEVLELENKNDKIIAFAWEPKGHRFAIIHGDGPKPDVSFYTMRTANNTSRVSKLTTLKSKQANTLYWSPAGRFIVLAGLKGFNGQLEFYNVDELETMATGEHFMATDIMWDPTGRYLATAVTSVHEMEEVVDVRQEVLAFDLDQE

SEQ ID NO: 63617 - protein, 180 aa, Zea mays subsp. mexicana
  Clone ID: UC-ZMFLTEOSINTE082B09_FLI.pep
FPVQARPLILPCRVRTGPKNRASCRAHGPRDFWPSIATHQSYTVGLLGVPGASPPPPPILAFPRSFFQPSPLGVVAAASIMTRWRPCREIQQKSAGRVLKRRASFFVSDLRYHLLTIPKIHSAGQDRNTTHTHRLTDSKSWEKKRDMVATARHLRRRANPERRLRATGTTARSWTRCGAT

SEQ ID NO: 63618 - protein, 117 aa, Zea mays subsp. mexicana
  Clone ID: UC-ZMFLTEOSINTE084D02_FLI.pep
GMVGGLGFSLSNLIMYLTYALCFYVGALFVHEGKTTFKDVFRVYFALIFTAFGVSQTSATATDSTKAQESTISILTIIDRRSKINFVTRDDERMLFDIQKFYNVLIEELPANVADLL

SEQ ID NO: 63619 - protein, 544 aa, Zea mays subsp. mexicana
  Clone ID: UC-ZMFLTEOSINTE95A06_FLI.pep
QNDSNQLGTTSSSSVLVPNSRKQNATATKHKVHSNPATPSRQRSNIHQINAHPRKARAANTFAGSSSQGSRKVDLQPDARANVRNNSVSKAIPKPRRLQDRRVYSDTSQSSDSINSDRSQRRIRHNIVIDEQSSFSTNKKKVSTEIVSFTFTSPVHKSLHGKQILGNQNTVSTSSNTSNTKLDAIDGKFLGLLLEQKLRELTSGVRSPYTKPAEGAQAYHTSTALEDMASACETSSIASTDYDRESLQSFSDGKATLPYTDLATRSVQSSQPVKYDHGVTDRSELEHLGQSPLFTWEVSISTETCSSSESWRRPANGGTRLFSSTEGATTSDSTRFNKLLEADASSEYSDTASSITVATAEIPRSESSSSWHMDSRQEVEFIREILNASSPCRGISPYLERFSNGNSSGILDPHLLEELNGGTRLLAGEEGKGHRLRRRLLFDCVNESLSVKCAHYFSAGYSLWFTGMAVLQSLSAAEMHREMTSLTVAEEWMVDELVYREMSGPMGSWVDFRTEAYQAGGDVAAELLGSLVDEAVAELLTCGG

SEQ ID NO: 63620 - protein, 305 aa, Zea mays subsp. mexicana
  Clone ID: UC-ZMFLTEOSINTE083E02_FLI.pep
LSSGDWAVSYRRRPTPGAEVFVDLELPQGKLSRMGYNRHRRGRGSSSSSSRRTKQEASCDDGLGTSLPRQEEGTEDELKGSRIQLAMWDFGQCDVKRCTGRKLSRFGLLKELRVTNGFGGVVLSPVGTQCVSKEDHPIVQRKGLAVVDCSWARLSDVPFVKLRCGAPRLLPWLVAANPVNYGRPCELSCVEALSAALIICGEEDTAHLLLGKFKWGHAFLSLNRDLLKAYSQCENGAEIINVQKSWLSSNSSVPKPPVNGAEESRQNTEEGSEGDSDDDLPPLEKNMNHLNLDEDEESEEESESE

SEQ ID NO: 63621 - protein, 254 aa, Zea mays subsp. mexicana
  Clone ID: UC-ZMFLTEOSINTE085E05_FLI.pep
LQRHAMNSGRVYRSNLQGGRRTVTNLPGENENTNESLQIYICVWFVFVCKKKANKKTESSLHGVALLNGVNVEALELDDGLDVSLERVQLPEPGHLGALGRLLGELRQLAVALVVAEEVGGGGGLVEAVQRPLCRGPLRLSLALAVVGAVGEGRLVVDVVPGLAGERVADGELEHVQREVGDDAERPDGAAPAPADALHLAELPVGVHGDARRHQLRRQEGDHQQRAGPLHEGPTPGPGHEDERLADDAHLQVQ

SEQ ID NO: 63622 - protein, 312 aa, Zea mays subsp. mexicana
  Clone ID: UC-ZMFLTEOSINTE112A11_FLI.pep
RTSYENLSPSSTFLLFLPRQNTFAGESMAMAYRVLEVTLVSANDLKKVSLFSRTRIYAVASISGFDLRIPSHSTQADHSNGCNPCWNAVVHFPIPAAADTRGLALHVRLRAQRVYLGDRDIGEVFVPIDDLLAGADKGGDPRPVSYQVRRPHSGRAHGVLYFCYKFTEVPAVSCVSEPESKQVQYAKKYVQDSKNTTDKTMVPPTVYPPPQAMASAYPPPQYCSPYAAYPRQPYGYPAPPPYGYNAASPQPAMYNYAAQPVAAPARHGGGMGMGLGLGLLGGAVGGMMLGEAIGDYETDAAYDAGFNDALAF

SEQ ID NO: 63623 - protein, 135 aa, Zea mays subsp. mexicana
  Clone ID: UC-ZMFLTEOSINTE114F06_FLI.pep
REIRSSRSPTDPAAGRPPSPRRCLSIFVQFLFSIIKMSRGGSAGGGQSSLGYLFGSGEPPKPAVAPAASAPPVEKPSAAKTDAAKQVAAGVTSQTNNYHRADGQNTGNFLTDRPSTKVHAAPGGGSSLGYLFGGN

SEQ ID NO: 63624 - protein, 465 aa, Zea mays subsp. mexicana
  Clone ID: UC-ZMFLTEOSINTE080F06_FLI.pep
GAPPFRPLSLASSISPPTMGKEKSHINIVVIGHVDSGKSTTTGHLIYKLGGIDKRVIERFEKEAAEMNKRSFKYAWVLDKLKAERERGITIDIALWKFETTKYYCTVIDAPGHRDFIKNMITGTSQADCAVLIIDSTTGGFEAGISKDGQTREHALLAFTLGVKQMICCCNKMDATTPKYSKARYEEIVKEVSSYLKKVGYNPDKIAFVPISGFEGDNMIERSTNLDWYKGPTLLEALDQITEPKRPSDKPLRLPLQDVYKIGGIGTVPVGRVETGVIKPGMVVTFGPTGLTTEVKSVEMHHEALQEALPGDNVGFNVKNVAVKDLKRGFVASNSKDDPAKEAASFTSQVIIMNHPGQIGNGYAPVLDCHTSHIAVKFAELITKIDRRSGKELEKEPKFLKNGDAGMVKMIPTKPMVVETFSAYPPLGRFAVRDMRQTVAVGVIKSVEKKDPTGAKVTKAAAKKK

SEQ ID NO: 63625 - protein, 482 aa, Zea mays subsp. mexicana
  Clone ID: UC-ZMFLTEOSINTE080H04_FLI.pep
RLRTRLPPRLKPFPLLPIPSVGRRSIPYDDTMRECISIHIGQAGIQVGNACWELYCLEHGIQADGQMPGDKTIGGGDDAFNTFFSETGAGKHVPRAVFVDLEPTVIDEVRTGTYRQLFHPEQLISGKEDAANNFARGHYTIGKEIVDLCLDRIRKLADNCTGLQGFLVFNAVGGGTGSGLGSLLLERLSVDYGKKSKLGFTVYPSPQVSTSVVEPYNSVLSTHSLLEHTDVAILLDNEAIYDICRRSLDIERPTYTNLNRLVSQVISSLTASLRFDGALNVDVNEFQTNLVPYPRIHFMLSSYAPVISAEKAYHEQLSVAEITNSAFEPSSMMAKCDPRHGKYMACCLMYRGDVVPKDVNAAVATIKTKRTIQFVDWCPTGFKCGINYQPPSVVPGGDLAKVQRAVCMISNSTSVVEVFSRIDHKFDLMYAKRAFVHWYVGEGMEEGEFSEAREDLAALEKDYEEVGAEFDEGEDGDEGDEY

SEQ ID NO: 63626 - protein, 137 aa, Zea mays subsp. mexicana
  Clone ID: UC-ZMFLTEOSINTE083C05_FLI.pep
PRPAQQPPQHIAISISAMAEVEQQQDTPKLFNRWTFDDVQVNDISLNDYLAVNATKHAMYLPHTAGRYSKKRFRKAQCPIVERLTNSLMMHGRNNGKKVMAVRIIKHTLEIIHLLTDANPIQVVVDAIINRYSLNLG

SEQ ID NO: 63627 - protein, 278 aa, Zea mays subsp. mexicana
  Clone ID: UC-ZMFLTEOSINTE086D04_FLI.pep
GVEWSVVWRPKTMAASIGIMDGAYFVGRGEILHWINATLQLSLAKVEEAASGAVQCQLMDMVHPGVVPMHKVNFDAKTEYDMIQNYKVLQDVFNKLRIGKNIEVNKLVKGRPLDNLEFLQWLKRYCDSVNGGIMNENYNPVERRSKGCKERVSKGSNKPSKSLQANRLSGADPTDGGHGVGKVCNTFSEEHYIEQIQKLSEKIADLKVSVDSTEKERDFYFSKLRDIEILCQRPELEHLPMTKAVRKILYAADAKDSPLPEANDIITKSPSLFSNETE

SEQ ID NO: 63628 - protein, 367 aa, Zea mays subsp. mexicana
  Clone ID: UC-ZMFLTEOSINTE086F05_FLI.pep
PLRYLRGPGTSHEMRAAAAATAAALLAPGLKLCAGGARARVSCPSRSRLPLHRIAAMASAPNPSFRPEEARSPPALELPTPPLSKFKVALCQLSVTADKNRNIAHARAAIEKAASEGAKLVLLPEIWNGPYSNDSFPEYAEDIEAGGDAAPSFSMMSEVARSLQVTLVGGSIAERSGNNLYNTCCIFGSDGKLKGKHRKIHLFDIDIPGKITFKESKTLTAGQNPTVVDTDVGRIGIGICYDIRFQELAMLYAARGAHLLCYPGAFNMTTGPLHWELLQRARATDNQLFVATCGPARDTSAGYVAWGHSTLVGPFGEVIATTEHEEATIIAEIDYSLIEQRRQFLPLQHQRRGDLYQLVDVQRLGSH

SEQ ID NO: 63629 - protein, 486 aa, Zea mays subsp. mexicana; identical to SEQ ID NO: 60341
  Clone ID: UC-ZMFLTEOSINTE086F06_FLI.pep

SEQ ID NO: 63630 - protein, 309 aa, Zea mays subsp. mexicana
  Clone ID: UC-ZMFLTEOSINTE088C01_FLI.pep
LRGGMQIFVKTLTGKTITLEVESSDTIDNVKAKIQDKEGIPPDQQRLIFAGKQLEDGRTLADYNIQKESTLHLVLRLRGGMQIFVKTLTGKTITLEVESSDTIDNVKAKIQDKEGIPPDQQRLIFAGKQLEDGRTLADYNIQKESTLHLVLRLRGGMQIFVKTLTGKTITLEVESSDTIDNVKAKIQDKEGIPPDQQRLIFAGKQLEDGRTLADYNIQKESTLHLVLRLRGGMQIFVKTLTGKTITLEVESSDTIDNVKAKIQDKEGIPPDQQRLIFAGKQLEDGRTLADYNIQKESTLHLVLRLRGGY

SEQ ID NO: 63631 - protein, 449 aa, Zea mays subsp. mexicana
  Clone ID: UC-ZMFLTEOSINTE088F02_FLI.pep
CNRMHVLCLLTSLFGKDLSGVEQREARDPMAAAEGQWVLMATGRTPTNIAVIKYWGKRDEALILPINDSISVTLDPDHLSATTTVAVSPSFPSDRMWLNGKEISLLGGRFQSCLREIRKRARDFEDKEKGVKIKKDDWDKLHVHIASYNNFPTAAGLASSAAGLACFVFTLGKLMNVKEDYGELSSIARQGSGSACRSIYGGFVKWCMGEKDDGSDSIAVQLADKTHWNDLVIIIAVVSSKQKETSSTSGMRDSVETSPLLQYRAQTVVPGRVLKMEEAIKNRDFESFAKLTCADSNQFHAVCLDTSPPIFYMNDTSHRIISLVEKWNHSEGTPQVAYTFDAGPNAVLIAQNRKTAAHFLQKLLYYFPPQDNDLSSYLVGDKSILGDAGLHSMKDVEALPAPPDTKIPDQKFKGDVSYFICSRLGAGPKVVADEGQALIDSVTGLPKGV

SEQ ID NO: 63632 - protein, 549 aa, Zea mays subsp. mexicana
  Clone ID: UC-ZMFLTEOSINTE089A07_FLI.pep
FSPSPPLRASLTSSPGLAAAATAAAAAACSGGRDPARSVSPAARYTMEGAGRDANPLSGYRIGKTLGIGSFGKVKIAEHILTGHKVAIKILNRKKIRSMDMEEKVKREIKILRLFMHPHIIRLYEVIDTPADIYVVMEYVKSGELFDYIVEKGRLHEEEARHFFQQIISGVEYCHRNMVAHRDLKPENLLLDSKYNIKIADFGLSNVMRDGHFLKTSCGSPNYAAPEVISGKLYAGPEVDVWSCGVILYALLCGTLPFDDENIPNLFKKIKGGIYTLPSHLSPSARDLIPRMLVVDPMKRITIREIREHVWFKIRLPRYLAVPPPDTAQQVKKVDEETLNDVIKMGFDKNQLIESLQNRLQNEATVAYYLLLDNRLRTTSGYLGSEFQESMDSSFSQVIAETPTSATELRQHGFSESPGSGLRQHFAAERKWALGLQSRAHPREIISEVLKALQELNVYWKKIGHYNMKCRWSPGCLESMMHNSDSFSAESAIIETDVFMEKSTPTVKFEIQLYKTRDEKYLLDLQRVSGSHLLFLDLCSAFLTQLRVL

SEQ ID NO: 63633 - protein, 281 aa, Zea mays subsp. mexicana
  Clone ID: UC-ZMFLTEOSINTE090C12_FLI.pep
EMEDGIQSVDTISSTPTGVETPDVIDLRKLQRKETDKQAERPLYQVLEQKEERIAPGTLYGSSHTYMLGTQDKSSAPKRVDLLKNQKSDKVDVTIQPEELEAMDDVLAAKYEEAREEEKLRNQKEDFSDMVAENAHKKKRKRRKRKNQWKTRKWKTEFSLSIPSQVLQLVLKHLMLSTFGSCRGRRLTSRQNGRCTRFLNKRKKGSPLGHKDFKTNNVLVDENFIAKVADAGLVRLIRGSDDAGPSRGFSNSVYQDPEVQSMTQFSESSSNGIRNVKSRTH

SEQ ID NO: 63634 - protein, 318 aa, Zea mays subsp. mexicana
  Clone ID: UC-ZMFLTEOSINTE092G10_FLI.pep
ESTLHLVLRLRGGMQIFVKTLTGKTITLEVESSDTIDNVKAKIQDKEGIPPDQQRLIFAGKQLEDGRTLADYNIQKESTLHLVLRLRGGMQIFVKTLTGKTITLEVESSDTIDNVKAKIQDKEGIPPDQQRLIFAGKQLEDGRTLADYNIQKESTLHLVLRLRGGMQIFVKTLTGKTITLEVESSDTIDNVKAKIQDKEGIPPDQQRLIFAGKQLEDGRTLADYNIQKESTLHLVLRLRGGMQIFVKTLTGKTITLEVESSDTIDNVKAKIQDKEGIPPDQQRLIFAGKQLEDGRTLADYNIQKESTLHLVLRLRGGQ

SEQ ID NO: 63635 - protein, 482 aa, Zea mays subsp. mexicana
  Clone ID: UC-ZMFLTEOSINTE097B09_FLI.pep
GRPHTSDYNIQKESTLHLVLRLRGGMQIFVKTLTGKTITLEVESSDTIDNVKAKIQDKEGIPPDQQRLIFAGKQLEDGRTLADYNIQKESTLHLVLRLRGGMQIFVKTLTGKTITLEVESSDTIDNVKAKIQDKEGIPPDQQRLIFAGKQLEDGRTLADYNIQKESTLHLVLRLRGGMQIFVKTLTGKTITLEVESSDTIDNVKAKIQDKEGIPPDQQRLIFAGKQLEDGRTLADYNIQKESTLHLVLRLRGGMQIFVKTLTGKTITLEVESSDTIDNVKAKIQDKEGIPPDQQRLIFAGKQLEDGRTLADYNIQKESTLHLVLRLRGGMQIFVKTLTGKTITLEVESSDTIDNVKAKIQDKEGIPPDQQRLIFAGKQLEDGRTLADYNIQKESTLHLVLRLRGGMQIFVKTLTGKTITLEVESSDTIDNVKAKIQDKEGIPPDQQRLIFAGKQLEDGRTLADYNIQKESTLHLVLRLRGGY

SEQ ID NO: 63636 - protein, 328 aa, Zea mays subsp. mexicana
  Clone ID: UC-ZMFLTEOSINTE100G06_FLI.pep
HQKCSIYLINCNLSQNKGSSSAAPAKVTANQAPSTQTVPATPPQTSAAPDAPAPIVPVSAPAATATASAAPAVAVSTEADSYGQATSNLVAGSNLEETIQSILEMGGGTWDRDTVLRALRAAYNNPERAVEYLYSGIPEQMEVPAPPPSSQPVDPVQAVVAVQPAQAGPNANPLDLFPQSLPNDSANANTGNLDVLRNNAQFQNLLGLVQANPQILQPLLQELRKQNPRVMQLIQENQAEFMRLISEPLEGDEENEMMLDQMADATETIAVTPEENEAILRLEGMGFDRALVLEVFFACNKNEQLAANYLLDHMHEFDNDDGLGGPPL

SEQ ID NO: 63637 - protein, 265 aa, Zea mays subsp. mexicana
  Clone ID: UC-ZMFLTEOSINTE101C07_FLI.pep
NPLITPHSLTQNESQLSSAQLLTPHTHRPAATAPRIAEQSGELQSRAAEVGRRRHSSAMSKDKHHKHEHHLRRCCGCMASCLLALVLIVAFVSLVVYLALRPSKPSFYLQDLQLRRPISLGDPSLTASAQVTLASRNPNDRVGIFYKRLDVFVTYRDEAVTVPVSLPPQYQGHRDFTVWSPVLSAESVPVAAYVADAMKQDVAAGFVALQVKVDGRVKWKVGSWVSGSYHLFVSCPAVLSAGYPGVNNTVSSLKFAQPTGCSVEV

SEQ ID NO: 63638 - protein, 504 aa, Zea mays subsp. mexicana
  Clone ID: UC-ZMFLTEOSINTE104B03_FLI.pep
RRRTQRMGKRGKWFSAVKKVFSSSDPDGKEAKAQKADKSKSKRRWPFGKSKHSEPSISTVPGTAPAVAPLPSPPATQPHSLEIKDVNPVETDSEQNKHAYSVALASAVAAEAAAVAAQAAAEVVRLTAVTTAAPKMPVSSREELAATKIQTAFRGYLARRALRALRGLVRLKSLVDGNAVKRQTAHTLQCTQAMTRVQTQIYSRRVKLEEEKQALQRQLQLKHQRELEKMKIDEDWDHSHQSKEQIEANLMMKQEAALRRERALAYAFSHQWRNSGRTITPTFTEPGNPNWGWSWMERWMTARPWESRLAAASDKDPKERAVTKNASTSAVRAPVSRVISIQRPATPNKSSRPPSRQSLSTPPSKTPSASGKARPASPRNSWLYKEDDLRSITSIRSERPRRQSTGGGSVRDDTSLTSTPPLPSYMQSTESARAKSRYRSLLLTEKLEVPERAPLAHSVVKKRLSFPVVEKPSVVPTEKPRERVRRHSDPPKVDPATLKDAPAA

SEQ ID NO: 63639 - protein, 434 aa, Zea mays subsp. mexicana
  Clone ID: UC-ZMFLTEOSINTE92E10_FLI.pep
LSPDTDIPWPLPLPTHLRSAIPSSRRLRIHLPGATSGQPLAVQPSSPSGELRGVAKMISRQLVLTYLYLLIYICLSSGVILFNKWVLSPKYFKFPFPITLTMIHMAFSGIVTFFLVRVFKVVAPVKMTFHIYATCVIPISAFFASSLWFGNTAYLYISVAFIQMLKALMPVATFIMAVFCGTDKLRWDLFLNMVLVSVGVVVSSYGEIHFNVIGTLYQVTGIFAEALRLVLTQVLLQKKGLTLNPITSLYYIAPCSFIFLFIPWYLLEKPEMDVTQIQFNYSIFFLNALSAFALNISIFLVIGRTGAVTIRVAGVLKDWILIALSTIIFPESVITSLNIIGYAVALSGVVLYNYLKMKDVRANQLPADNNSDRATKDKKSSSMFRPDNSMDNSDGTVAGGLASEAAAVDEEAPLIPSARLSYVTRTQTGSSSNR

SEQ ID NO: 63640 - protein, 487 aa, Zea mays subsp. mexicana; identical to SEQ ID NO: 47714
  Clone ID: UC-ZMFLTEOSINTE93E08_FLI.pep

SEQ ID NO: 63641 - protein, 697 aa, Zea mays subsp. mexicana
  Clone ID: UC-ZMFLTEOSINTE93G07_FLI.pep
RAWSPSSRGDDRAAVAAYVPSPVRPFAGDGHDLVIGKVCPELFIMVEGWVFSALLVVFLAFTTPCESFYLPGSYMHTYQQGEVIRAKVNSLTSIETELPFSYYSLPYCRPRDGVKKSAENLGELLMGDQIDNSPYRFRVNVNESLYLCTTTPLDEANVKLLKQRSHDLYQVNMILDNLPVRRFTEQNGITIQWTGYPVGYIPEGTSDVYIINHLKFKVLVHKYEGGEVKVVGTGEGMEVISETDKDANSGYEIVGFEVVPCSVKRDPESILKLNMYDKVDPVNCPVELEKSQLVREKEKITFTYEVEFVNSDIRWPSRWDAYLKMEGSKIHWFSIMNSLMVILFLAGIVFVIFLRTVRRDLTRYEELDKEAQAQMNEELSGWKLVVGDVFREPTSPKLLCVMIGDGVQILGMAIVTIFFAAFGFMSPASRGMLLTGMIVFYMLLGIVSGYAAVRLWRTLKGTSEGWRSVSWSTACFFPGIVFIVLTVLNFMLWTRNSTGALPISLFFGLLSLWFCVSVPLTLLGGFFGTRAEPIEFPVRTNQIPREIPTKKYSLLFILGAGTLPFGTLFIELFFILSSIWLGRFYYVFGFLLVVLLLLIVVCAEVSVVLTYMHLCAEDWRWWWKAFFASGTVALYVFLYSINYLVFDLRSLSGPVSAILYIGYSFVVSLAIMLATGTVGFLTSFSFVHYLFSSVKID

SEQ ID NO: 63642 - protein, 264 aa, Zea mays subsp. mexicana
  Clone ID: UC-ZMFLTEOSINTE94A06_FLI.pep
SGAAAAMPSHADLDHQISQLRDCKFLPEVEVKTLCEKAKAILMEEWNVQPVRCPVTVCGDIHGQFYDLIELFRIGGDAPDTNYLFMGDYVDRGYYSVETVSLLVALKVRYRDRITILRGNHESRQITQVYGFYDECLRKYGNANVWKYFTDLFDYLPLTALIENQIFCLHGGLSPSLDTLDNIRALDRIQEVPHEGPMCDLLWSDPDDRCGWGISPRGAGYTFGQDIAQQFNHTNGLSLISRAHQLVMEGFNWCQARWLGEPTF

SEQ ID NO: 63643 - protein, 457 aa, Zea mays subsp. mexicana
  Clone ID: UC-ZMFLTEOSINTE94B09_FLI.pep
SRHSADSRRAMGKEKTHINIVVIGHVDSGKSTTTGHLIYKLGGIDKRVIERFEKEAAEMNKRSFKYAWVLDKLKAERERGITIDIALWKFETTKYYCTVIDAPGHRDFIKNMITGTSQADCAVLIIDSTTGGFEAGISKDGQTREHALLAFTLGVKQMICCCNKMDATTPKYSKARYDEIVKEVSSYLKKVGYNPDKIHFVPISGFEGDNMIERSTNLDWYKGPTLLEALDLINEPKRPSDKPLRLPLQDVYKIGGIGTVPVGRVETGIIKPGMVVTFGPSGLTTEVKSVEMHHEALQEALPGDNVGFNVKNVAVKDLKRGYVASNSKDDPAKEAASFTSQVIIMNHPGQIGNGYAPVLDCHTSHIAVKFAELITKIDRRSGKELEKEPKFLKNGDAGMVKMVPTKPMVVETFSEYPPLGRFAVRDMRQTVAVGVIKSVEKKDPTGAKVTKAAAKKK

SEQ ID NO: 63644 - protein, 551 aa, Zea mays subsp. mexicana; identical to SEQ ID NO: 58625
  Clone ID: UC-ZMFLTEOSINTE94D04_FLI.pep

SEQ ID NO: 63645 - protein, 466 aa, Zea mays subsp. mexicana
  Clone ID: UC-ZMFLTEOSINTE95E07_FLI.pep
PFYSRFHTSVGALRDRVVSPRSLPACRLPACGVMARHFKYVILGGGVAAGYAAREFAKQGVNPGELAIISKEPVAPYERPALSKGYLFPQNAARLPGFHTCVGSGGERLLPEWYSEKGIELILSTEIVKADLASKTLTSAAAETFTYETLLIATGSSVIKLTDFGVQGAESNNILYLRDIADADKLVAAMQAKKGGKAVIVGGGYIGLELSAALKINNFDVTMVYPEPWCMPRLFTAGIAHFYEGYYANKGIKVVKGTVAVGFDADANGDVTTVKLKNGSVLEADIVIVGVGGRPLTRLFIGQAADEKGGLKTDAFFETSVAGVYAIGDVATFPLKLYNEQRRVEHVDHARKSAEQAVRAIKAKESGESVAEYDYLPYFYSRSFDLAWQFYGDNVGDDVLFGDNDPASAKPKFGSYWVKDGKVVGVFLEGGSAEENQAIARVARAQPPVADVQALKQEGIEFASKI

SEQ ID NO: 63646 - protein, 574 aa, Zea mays
  Clone ID: 700454944_FLI.pep
EIEVTCAAAMILVALYVAYELLNPRSSQAAAAGDADELLVRGLDGADKFKGGVSGPSAYVVKLELLAAKNLMAANLNGTSDPYALITCGAEKRFSSMVPGSRNPMWGEEFNFFVDSLPVKINVTIYDWDIVWKSTILGSFTVTVESEVPSGPIWHTLDSTSGQVCLHIKVIKVHESSSRAINSSAEAGARRRISLDKQGPTVVHQKPGPLQTIFELPPDEVVDHSYSCALERSFLYHGRMYVSSWHICFHSNVFSKQIKVVIPLRDIDEIRRSQHAVINPAITIFLRMGAGGFGVPPLGCPDGRVRYKFASFWNRNHTFRALHRAMKNFVMMIDAEKQERAQSALRAHSSSRKNSKKEINVPEDCAALTGKLQPFVKEEVLVPVFNGTFPCTAEQFFSILLSDDSNYITEYRTDRKDKDINLGQWHVADEYDGQVRELNCKSICHSPMCPPYSAMTEWQHIVLSADKMDLVFETVQQVHDVPFGSFFEVHCRWCVKTISSNSCSLNISAGAHFKKWCIMQSKIKSGAVDELKKEVKVMLDFAQGYMLKVSSPDQENSNLAQQDNTAPDAPSDTG

SEQ ID NO: 63647 - protein, 230 aa, Zea mays subsp. mexicana
  Clone ID: UC-ZMROTEOSINTE109A12_FLI.pep
EALDLINEPKRPSDKPLRLPLQDVYKIGGIGTVPVGRVETGVIKPGMVVTFGPTGLTTEVKSVEMHHEALQEALPGDNVGFNVKNVAVKDLKRGYVASNSKDDPAKEAASFTSQVIIMNHPGQIGNGYAPVLDCHTSHIAVKFAELVTKIDRRSGKELEKEPKFLKNGDAGMVKMVPTKPMVVETFSQYPPLGRFAVRDMRQTVAVGVIKSVEKKDPTGAKVTKAAAKKK

SEQ ID NO: 63648 - protein, 411 aa, Oryza sativa
  Clone ID: UC-OSFLCYP176E09_FLI.pep
FPENCACPPPSKGNMITILSIDGGGVKGIIPAVILSFLESKLQELDGKDARIANYFDAIAGTSTGGLIAGMLAAPSLGNANQPCYAKDIVPFYLKHSPHIFPHRTGFFGWFFNILGIIKMAIGPKYDGKYLHRLIIDLLGETRMKETLTNVVIPTFDVKCVKPIIFSTFKARRKPLKNACLADVCIGTSAAPTFLPAHYFETVDHTGASQSFNIIDGGMAANNPTLVTMGEITKQIKRKSEEFPKAEPLDYRKYLVISLGTGLPEHDIMFDARNVAKWGIFRWLVDKDTMPLLNMFFHASSDMADTLVADLFQAIGCSHQLLRIQDHNIPIGAISNDLSTKDHLQLLVKIGENLLKKPLSKEECEKNNIEPEPNLHGDHVTTYADMLTRFAKLLSDERKLRLHNMKLDAKP

SEQ ID NO: 63649 - protein, 618 aa, Oryza sativa
  Clone ID: UC-OSFLCYP077G12_FLI.pep
FDRHHAAALRDVVHGDVDVDGLRGLDAVRVLAAEHDERQQVRGGEDGEERVVVVEARGVEVVGHPRRPPLAAAGDPLDGREDGAAQQVPGAVRRQRHRRPEALHALRRLVVEELDLPHHQERVGDAQQHELQQQDEDRHRQLPAGGDQPVPPRVPQPLALHNRRHHHRHDLEQHPQADPLQQRDPPRVLGPPAHGGDEEPVVEHDADEHRRRHERAEARRRHVELPDAAVQRHALLDEQRARLRHQRARHHHCGEQRHQLHDLLRLLHLRHRAQRPPGQPRHRSSSSFARLHRRLVQERHGHRRVHAEPAAGGVVLELELVELLGVGGERDAPLPHGGGDDPPHRGEGATLGHLVAVQRRTGEEDGDGDHEAQGGDAVADGPADVVLEVDEDGGGEEDAEEDGEHPPVEEGELMQLLRRVEVVELVGADGGDVRLRAAVAERDGVQPAEVDAQLQRRRARAGGAAAAVARRRLQCWHGDGQCEQQHAHEVDGGAGDEGPVAAEPGVGDDGADERRDEDGAGPVGDVVGRLHGALVQLLRQVDHQVRRDPVVRHPLEQLVHDDEGAGLPAAALGAEDGVAAEVDGAVARVLVVPGAGAVLHGERSLSASCTRGGSLRWW

SEQ ID NO: 63650 - protein, 370 aa, Zea mays subsp. mexicana
  Clone ID: UC-ZMFLTEOSINTE032D03_FLI.pep
ADQKYCERHMNRGRHRSRKHVEGQPGRAAKAMSAVAVAAAAAAAALAGAGATAAAGLAVNQHRQPGKSYATGATDPCSLQYSRGLANKLSNESENMQDSDNVSMLTCMNTGNTAGSVFPFSKQNTDLFEVSSSRPEFGLVPSDSLTRSPHSSLKSVKNLLSSRSLSEHQSSTSLQHFVDWPRTPPAQGGLSWPEAEDMPRAQRSQLSVSAPMASSELSSASTSPIHDHEKLILSPLKLGREYSPSGLVSVAGASRDEVSQLEATWATTFRDSSTGGPLGEVLAKNNSNAEARSCPSAAPPLTEYYCWDSGHGMESSPVGVLQRTTAFGSVSSSTGSSPRVENHGASCDGTSNLMDDLGSVVVSHPSIRLL

SEQ ID NO: 63651 - protein, 236 aa, Oryza sativa
  Clone ID: UC-OSROCYP013F04_FLI.pep
AVGEAAVGVGEAGGGGGGGEKADREEEEGKEDVEEGGVCKDLVLVEDAVPVEDPEEAAATAALQEEMKALVESVPVGAGAAFTAMQLQELEQQSRVYQYMAARVPVPTHLVFPIWKSVTGASSEGAQKYPTLMGLATLCLDFGKNPEPEPGRCRRTDGKKWRCWRNAIANEKYCERHMHRGRKRPVQLVVEDDEPDSTSGSKPASGKATEGGKKTDDKSSSSKKLAVAAPAAVEST

SEQ ID NO: 63652 - protein, 157 aa, Zea mays
  Clone ID: LIB3153-008-H12_FLI.pep
HSRTTTTNSSAIKRQPPRSLNAVTAGTTVLRAAVGGGVGDLSLALNAGQVGHAEGSEHLHGLLVDADLFDLERGLLRHEVHAALALLLLQLERDAADWAALDAAHQVGTEASHLVAEALRGQNRDLLEHLLVGVEVEGHAGVVLLDHLPGGLLHGLG

SEQ ID NO: 63653 - protein, 466 aa, Zea mays
  Clone ID: LIB3153-011-D6_FLI.pep
PRPGGAMGSTAAAPCHIVAVPYPGRGHVNAMLNLCRLLAARDGVTITIIVTEEWLSLLGAPAALPDLGLRVRFEAIPNVIPSEHGRANDMVGFMEAVYTKMASPFEQLLDRLAPPAPAAIVADMFVPWTVGVGERRGVPVCIMCPISATMFAVQYNFHLLPPAAAGGGASPGTSNITGSCFVENYIPGTKSIRFADLAPTHTDALLLDKILEAHSSVKKAQCIVFTTFQELESDAIGAMRQNCPVYAVGPCVPFMALQEHKASPDGDDYMAWLDAQPAGSVIYVSLGSFLSVSAAQFDEIAAGLAESKARFLWVLRDADACSRVRGLIRDPDAGLIVPWTNQLRVLCHPSVGGFFTHCGMNSTLEAVYAGVPMLTLPIAFDQPTNSRLVTEVWKNGIGLRDMARADGVIGRGEIASAVDRLMRPDAAEFQDMRKRVTLWKDAARTASEEGGSSWKDVTSFINFVSR

SEQ ID NO: 63654 - protein, 454 aa, Zea mays
  Clone ID: LIB3153-011-E5_FLI.pep
APKTPPASGAAAGDMDDGDTPRRKSVPDWLNSPIWSAPPPSPRHSSLPPTAPSPPQPPPSPLPSPQPRRDPTPIPPPNAPRDADVSDDEGKGAGAPSCAHLVAEFKVALDRKVVDLAELRRLACQGVPDAAGIRPIVWKLLLGYVPTDRALWPYELEKKRSQYCDFKDELLVNPSEVTRRMEEMTASEREEHNAEGTGVLPRAEIVRDEHPLSLGKTSVWNQYFQESEIVEQIDRDVKRTHPEMEFFNGDSSDSLSNQESLKRILTIFAKLNPGIRYVQGMNEVLAPLYYVFKNDPDQSQAALAEPDAFFCFVELLSGFRDNFCKQLDNSVVGIRSTITTLSQLLRRHDEELWRHLEVVTKVNPQFYAFRWITLLLTQEFQFRDCLSLWDTLLGDPEGPQATLLRVCCAMLILVRRRLLAGDFTANLKLLQNYPPTNIDHILHIANKLRGPLPF

SEQ ID NO: 63655 - protein, 93 aa, Zea mays
  Clone ID: LIB3153-013-B3_FLI.pep
TAVRDAMNVEEEVGRLKEEIHRLGQQQPDGSYKVKFGVLFNDDRCANIFEALVGTLRAAKKRKILTYEGELLLQGVHDNVEITLLPPPAVAAA

SEQ ID NO: 63656 - protein, 209 aa, Zea mays; identical to SEQ ID NO: 54442
  Clone ID: LIB3154-013-A1_FLI.pep

SEQ ID NO: 63657 - protein, 67 aa, Zea mays
  Clone ID: LIB3152-034-H10_FLI.pep
MVVVFGQLATTSPASFLTQQQLLPFYQQFVANPATLLQLQQLLPFVQLALTNPAAFYQQHIIGGALF

SEQ ID NO: 63658 - protein, 521 aa, Zea mays
  Clone ID: LIB3152-041-B8_FLI.pep
ARSKRHCSSIRHHATKSSPTPAVLLAAASTMTEDVQMNDSEPQPAASAPAVGAPALSTLHHLKEIASVIEAGSLSKEVRRISRAFRLTVALRRRLAARDVSAFLAFALPASSEAYGRLTALVPKEDDTEMDVDAAAPATQISIKHGLPEIEIYCYLLVLIFLIDHKKYDEAKACASVSIARLKNLNRRTVDVLASRLYFYYSYVYELTNSLAEIRGNLLALHRMATLHRDELGQETLLNLLLRNYLHYNLYDQAEKLRSKAPRFEAHSNQQFCRYLFYLGKIRTIQLEYTDAKESLLQAARKAPITACGFRIQCNKWAIIVRLLLGEIPERTVFMQKGMKKALIPYFELTNAVRVGDLELFRAVADKFASTFSADRTRNLIVRLRHNVIRTGLRNISISYSRISLADIAKKLRLDSENPIADAESIVAKAIRDGAIDATIDHANGWMVSKETGDVYSTNEPQIAFNSRIAFCLNMHNEAVKAMRFPPNSHKEKESAEKRRERLQQEEELAKHMAEDDDDDF

SEQ ID NO: 63659 - protein, 262 aa, Zea mays
  Clone ID: LIB3152-046-B11_FLI.pep
FDETEVGEIEDLLRAMDVDDVLSNLRVVGVPTKSAIYIWGYNHSGQTARKGKECHLRIPKSLPPKLFKLGNGKSLRWTDIACGREHTAAVASDGSLFTWGANEFGQLGDGTEDSAKEPKKVKSLETEFVKSVSCGAHCTAAVAEPRENDGTVSKSRLWVWGQNQGSDYPRLFWGAFTPNTVIKQVSCGAVHVMALSEDGLLQAWGYNEYGQLGRGRTSQGLQGARVLNAYARFLDDAPEQVKIVRVSCGEYHTAAISENGEV

SEQ ID NO: 63660 - protein, 612 aa, Zea mays
  Clone ID: LIB3152-053-F10_FLI.pep
SVTKDRVAKKKRDERRLRRAQGARGRPAAAAEYGDATTTIDPTCAQAVAQAFPHTFGQPLVSFVAPAAGAGAVEERHPIRVGVVFSGRQSPGGHNVVWGLHDALKAYNPQSLLYGFVGGTEGLFANKTLEITDDVLASYKNQGGFDLLGRSIDQIRTTKQVNAAMTTCHSLNLDGLVIIGGVTSNSDAAQLAETLIQNNCKTKVVGVPVSLNGDLKNQFVETTVGFDTVCKVNSQLVSNVCLDAISAGKYYYFVRLMGRKASHVAFECALQSHPNMLILGEEVALSKLTLMEIISKICDGVQARAELGKYHGVLVIPEGLIESIPEMYALIQEINILHNSNVPVAEMSSQLSPWAAALFQFLPPFIRRELLLHQESDNSAQLSQIDTEQLLAHLVETEMIKRTKEGRYKGRKFSSVCHFFGYQARGSTPSNFDCDYAYALGRISLHMIAVGLTGYMATVANLKDPVDKWRCAAAPLTAMMSVKRHLRGPGAIPIGRPSIHPSPIDLKGKAYELLREKASSFLLDDFYRTPGGIQFEGPGSDAKPITLTIENQDYMGDIEILKEYLGKVRTMVKPGCSREILKAAISSMVSVTDVLTVMSHPLNAELPLYHFK

SEQ ID NO: 63661 - protein, 284 aa, Zea mays
  Clone ID: LIB3154-010-C3_FLI.pep
FEHSETHQAKHISNNLTTMATKILSLLALLALFASATNAFIIPQCSLAPSSIITQFLPPVTSMGFEHPAVQAYRLQQAIAASVLQQPISQLQQQSLAHLTIQTIATQQQQQFLPALSHLAMVNPAAYLQQQLLASNPLALANVVANQPQQQLQQFLPALSQLAMVNPAAYLQQQQLLSSSPLAVANAPTYLQQQLLQQIVPALTQLVVANPAAYLQQLLPFNQLTMSNSAAYLQQRQQLLNPLAVANPLVAAFLQQQQLLPYNQFSLINPVLSRQQPIVGGAIF

SEQ ID NO: 63662 - protein, 229 aa, Zea mays
  Clone ID: LIB3151-012-A3_FLI.pep
QHRKHNIVPIMAAKIFCLIMLLGLSASAATASIFPQCSQAPIASLLPPYLSPAMSSVCENPILLPYRIQQAIAAGILPLSPLFLQQSSALLQQLPLVHLLAQNIRAQQLQQLVLANLAAYSQQQQLPLVHLLAQNIRAQQLQQLVLANLAAYSQQQQFLPFNQLAALNSAAYLQQQQLLPFSQLAAAYPRQFLPFNQLAALNSHAYVQQQQLLPFSQLAAVSPAAFLTQ

SEQ ID NO: 63663 - protein, 239 aa, Zea mays
  Clone ID: LIB3151-022-D1_FLI.pep
QLHDGAGVGVLVAEDLRRHGLLLVQVVVRRRVERRRVGRLVGVRVPRRRRVGRRLVVPSSEREPRVVHVQAGGRVLVLVAGLVLLVAVSVAAVLLLLILLAAVLLLFLLLAVLLLLASGSACILLLLRLRRLGLCLLLIVLLLLRLIFLLLLHLRRGRHRRQQLDLAASLLLHALHHLHGVGGRLLPLHQHLVRLGVGDHILHSVEAPEDLLDLAGAPFAVHVDPHLDLLRRRGRRRRR

SEQ ID NO: 63664 - protein, 397 aa, Zea mays
  Clone ID: LIB3151-038-E4_FLI.pep
RFVSLVVSGGVMKAVGYSPYDSSAQNRGLRGRSFSGNVVASAGAFPYMRANNDLESEIHRVEQDAYTGILRAFKVQSDAISWEKESLITELRKELRVSDEEHRELLNKVNEDGTIRRMRELRQAGGSPSGLHHGNMVLYGAEPGSTTKRQRASHSIPLQSAGLQSPMMPSHSVSSAKWGPLQARGTKARTPIPLALPSVDPSSLINHKVYTRWPEDNNFYEATITRYNPVTGEHGLVYDMGTQAESWESVRLCDMAPEDIRWGFDGHLSNRDVWSPSGPMLMRHMTNNGAMAGSIKGRGRLSINETIKDYAPPENGTNRNFDHVDIPNTGSVVMEVKRVLFNPNMPEIEKARKLLKDQEQSLLDAIARLDEASDSDNEDMAMEGRMGSAGERNGITT

SEQ ID NO: 63665 - protein, 195 aa, Zea mays
  Clone ID: LIB3151-044-D3_FLI.pep
SAKRQCVERIVEQNSMKMVIVLVVCLALSAASASAMQMPCPCAGLQGLYGAGAGLTTMMGAGGLYPYAEYLRQPQCSPLAAAPYYAGCGQTSAMYQPLRQQCCQQQMRMMDVQSVAQQLQMMMQLERAAAASSSLYEPALMQQQQQLLAAQGLNPMAMMMAQNMPAMGGLYQYQYQLPSYRTNPCGVSAAIPPYY

SEQ ID NO: 63666 - protein, 226 aa, Zea mays
  Clone ID: LIB3151-044-F7_FLI.pep
SCSTMANDGDDGQSQDYLFKIVLIGDSSVGKSNLLARFARNEFYPNSKSTIGVEFQTQKLVIDGKEIKAQIWDTAGQERFRAVTSAYYRGAVGALLVYDISRRQTFDSVGRWLNELHNHSDMNVVTILVGNKTDLKHAREVSTAEGQALAEAQGLFFMETSALDSSNVAAAFQTVVKEIYSILSRKVFQSLEQKKSELQSLSSGKAVVLQGEANQTSSGGRWCCSS

SEQ ID NO: 63667 - protein, 143 aa, Zea mays
  Clone ID: LIB3151-046-F1_FLI.pep
SMASKRILKELKDLQKDPPTSCSAGPVGEDMFHWQATIMGPSDSPFAGGVFLVNIHFPPDYPFKPPKVFHPNINSNGSICLDILKEQWSPALTISKVLLSICSLLTDPNPDDPLVPEIAHMYKTDRAKYESTARSWTQKYAMG

SEQ ID NO: 63668 - protein, 452 aa, Zea mays; identical to SEQ ID NO: 47541
  Clone ID: LIB3151-058-B11_FLI.pep

SEQ ID NO: 63669 - protein, 470 aa, Zea mays
  Clone ID: LIB3151-058-E3_FLI.pep
VSFGPPSAAAAAALSLGRALLIWATLIFSAPAAPAVRSEAMLEKDRISYFYDGDVGNVYFGPNHPMKPHRLCMTHHLVLSYGLHQKMEIYRPHKAYPIELAQFHSADYVEFLHRITPDSQHLYASELTRYNLGEDCPVFDNLFEFCQIYAGGTLDAARRLNHKICDIAINWAGGLHHAKKCEASGFCYINDLVLGILELLKYHARVLYIDIDVHHGDGVEEAFYFTDRVMTVSFHKYGDLFFPGTGDIKDIGEREGKYYAINIPLKDGIDDTSFTRLFKTIIAKVVETYLPGAIVLQCGADSLARDRLGCFNLSIEGHAECVKFVKKFNIPLLVTGGGGYTKENVARCWAVETGVLLDTELPNEIPKNEYIEYFAPDYTLKVPNLNMDNLNSKTYLSSIKVQVMESLRYIQHAPGVQMQEVPPDFYIPDFDEDELDPDERVDQHTQDKQIHRDDEYYEGDNDNDHDDGTR

SEQ ID NO: 63670 - protein, 350 aa, Zea mays
  Clone ID: LIB3151-059-A6_FLI.pep
RTNVPSGSAPAVRVTRHAMHAVAARAGDVVSGTASGGVAHPGVLQEWFGRQWWTSREVVLVAAAAILLPLVLRKRVDSLRFTSAISILLAVVFMLISSGIALYALFKGTATMPRMFPDFSRLSSPFELFTAVPVIVVAFTFHFNVHPIRAELSKTSDMKVAVRVSLVLCAAIYAAVGFFGFLLFGDATMADVLANFDRSSGAGVPQALNDAARLSYALHLVLVFPLLLFSLRVNVDELLFPGRRPLAADTRRFVSLTAVLMAVLYVLAIAIPSIWTLFEYSGSTFAVTISLIFPGAIVLRDVHGIAKRKDKALAATMIVLAVVTSSIAIASNIMSSISDEDRGGHVAGRR

SEQ ID NO: 63671 - protein, 258 aa, Zea mays
  Clone ID: LIB3151-061-E8_FLI.pep
VAACGCGREAARARLPWRWRRRCPARVRGGPCWSRAGRATSVATPCCSSSSRASAPSSSTTSTALTVLGNDYATRDGTGVRDYIHVVDLADGHIAALQKLFENSSIGCEAYNLGTGRGTSVLEIVKAFEKASGKKIPLIFGERRPGDAEILFSETTKAERELNWKAKYGIEEMCRDQWNWASKNPYGYGSPDSIKQNGHQTNGSADSSKQNGHRTNGSTDSPKRNGHHAYGSADSPKRNGHCVFGSSDLKPNGNGHLR

SEQ ID NO: 63672 - protein, 232 aa, Zea mays
  Clone ID: LIB3152-008-H4_FLI.pep
TNSDWDRDRGNMSKVFEGYERQYCEASASLTRKCTAAAALQGEKLKQKAAEIQSGIDGAEALIRKMDLEARNLQPSIRADLLVKIREYKSDLNNLKGALKRVTSINAQQGAREELLESGMADTLGVSADQRSRLLRATERQNQTTDRLRDSHRTMLETEELGVSILHDLSQQRQSLLHAHDVLDEVDNNVGKSRRTIGGMMRRMDRNKWIIGLIIAVLVLAILVILYFKFVH

SEQ ID NO: 63673 - protein, 250 aa, Zea mays; identical to SEQ ID NO: 38264
  Clone ID: LIB3152-014-G2_FLI.pep

SEQ ID NO: 63674 - protein, 103 aa, Zea mays
  Clone ID: LIB3152-016-F7_FLI.pep
FQDNLNKSTYSSLMGLLRSNVICAGLDGMDLEEQHYHAEEVGHVPRQPEHVHLRSPSFTFPPPPIFFTNKRSSSLLFLSRAPGSRRRVAVFPALSRRRRGRGS

SEQ ID NO: 63675 - protein, 445 aa, Zea mays
  Clone ID: LIB3152-027-D9_FLI.pep
PTPPPSSLLPESGELASRVRGRGCVRRRSTSTTLSRRARVSMADGEPSLTRWTFEDFVVHYEARFGLRREADGDGDGDGDDAPPPRGSDHGASRPATARANGGADLAVFEQFERMERKVEISNGAIEDGPLQKSLLPSFESAEMRNLAETLLRDIIRGSPDVKWESIKGLENAKRLLKEAVVMPIKYPKYFTGLLSPWKGILLFGPPGTGKTMLAKAVATECKTTFFNISASSIVSKWRGDSEKLVKVLFELARHHAPSTIFLDEIDAIISQRGEARSEHEASRRLKTELLIQMDGLTKTDELVFVLAATNLPWELDAAMLRRLEKRILVPLPEPDARHAMFEELLPYTPGTMEIPYDVLVEKTEGYSGSDIRLVCKEAAMQPLRRVMAVLEGRKEEVPESELPEVGPVTTEDIELALRNTRPSAHLHAHRYEKFNQDYGSHVHG

SEQ ID NO: 63676 - protein, 298 aa, Zea mays
  Clone ID: LIB3060-035-F11_FLI.pep
SFIYIGHQPDDACVVALLKMLIISSTPHLGVKAWKMVAWPGSARWAKRLSMGPVPVYSAWNQAPMTASMARRPFLISLVRSSLIFSGEPLPQPSGSNQRPPGYPTSVPVSLLLGKMGSVLTLPGLMMSAQRRPSAQPMRMSSMMKRVVVSVKYCCSPAVYQKGVLRTPILVRNSGMKMPAAPSIAHRQCTSSACTFHRRLSGSDPRPQGSKPKSPGRLPSSHGGGVLPGNQIGLLGSAAARTANDGRAASACLSSVLPPRKEDDARCPFLGSAVTAVVEDEEAETSAIAGASCGVGER

SEQ ID NO: 63677 - protein, 535 aa, Zea mays
  Clone ID: LIB3060-026-B6_FLI.pep
ASRGETEPLEVMVSVLRVVVEHPLPRRQHPPAVLRPHHALVLRLVPHGRHHVVLPEEVGGLVHQRGVPPAGLEPRAGAAEAVQQVQVRLQVVVAREVQGLLEERRHLVVQLQQHAQVRVHAAEAQPVRRPQDELRERRLVEEHAGHLGHAVVHVHDAQRPHAQLPLEPPPEGDVPDARAGEGEHAHRRHPVARRHVRARLRDVEGAQHRQRAAQAVARDRHAHLLAPPVVQIHQLAHLGQHLLPRRVPAEAAAGALVRVQRREPSLHLHVGVRAGDARLAQGDLVGRQIGHPLEAGDGAAPRHGDVPAAEPRRLLVGGHGHVPDERAGLAPHLGVGGRLDAEVGELEVVAGGVEVAGDLVADAAEADVVEEGLRRVLAAAAVGGEAVVVEAVVGGLGELAIADELLEEHAVDGVQQTLPVVAAVDLPPPRGELPVVGRGLMRAEVHVLDRHRGGLLFGSRRRGDDKIAARTTTALKRVRQCHTGEPAGPVVHGGDEAQAGRYGGRHQLLGAAVVVDAVRDHAARRCVFVLNASVF

SEQ ID NO: 63678 - protein, 316 aa, Zea mays
  Clone ID: LIB3060-025-C8_FLI.pep
SAWHIGFRREINSILSAKDIDDSLAYGLAKELDGKEFDDSNGVYENGSVNKHFMSELKSSSSCSNLAWSGDIRLKEVHFSYPLRSNVEILNGLDLTIECGKVTALVGPSGAGKSTVVQLLARYYEPTQGSITVAGEDIRVFDKREWSRVVSLVNQDPVLFSVSVGENIAYGLPDDVVSKDEIIKAAKAANAHEFIISLPQGYDTLVGERGSLLSGGQRQRIAIARALLKNAPILILDEATSALDATSERLVQEALNHLMKGRTSLVIAHRLSTVQNAHRIAVCSEGRITELGTHRELVAKGGSYASLVGTQRLAFE

SEQ ID NO: 63679 - protein, 777 aa, Zea mays
  Clone ID: LIB3060-080-D5_FLI.pep
ERSPPTHPDPSSSPRPLRRAGNSAMDPPRGGTVIDPTKCRLMSVDEKRELVRDLSKSPESAPDRLQSWTRREIVEILCSDLGRERKYTGLSKQRMLDYLFRVVSRKSSGPVEHVHEKEKGKDKESILEPNTTNHQSPAKRPRKSDNPSRLPIITNNSAASDVTGPTNNLRFCQNLACRAILRDNFCRRCSCCICFSYDDNKDPSLWLSCSSDQHLQKDTCGFSCHLECALKDERTGILQSGQGKKLDGGYYCIRCWKQNDLLGCWKKQLVIAKDARRLDVLCHRIYLSHRILVSTEKYLVLHDIVDMALKKLEAEVGPLSGAPNMGRGIVSRLTVGAEVQKLCAQAVDAVESLFSAVSPASSKIQRPCMMPPNFVKFEAITQTSVMVFLDLVDCPMLAQEATSFNIWHRVAVTELYPSNPTGIILAPLKKLLVTWLAPATSYIFKVVAFKNSIELGSWEIRMKTSCQKDDPRGSMPGGTGLGQNSESPKANSDGQSDPSSEGVDSNNNTAVYADLNKSPESDFEYCENPEILDSNKASHHPSERINDLQNIQMAADGVTEVTELEEAPGLSASALDEEPNACVQTVLLRDSNPLEHNQRTVVPRSHDTSNILAGHELVIVGPRYSGSVPPTAPRSVENSKDNGGRASKPKPCDIVVQNGSSKPEREPGNSSNKRATDKMDDFGHKDSFSEVSYEYCVRVVRWLECEGYIETNFRMKFLTWFSLRATLQERKIVSVYVDTLIEDPVSLSGQLVDSFSERIYSKKRPSMPSGFCMDLWH

SEQ ID NO: 63680 - protein, 274 aa, Zea mays
  Clone ID: LIB3060-080-C5_FLI.pep
DLVVFAETHLAAGPASHPWLYYDSSPQLSFKQIYGLRALVPGTLIVDGGSGYCKYGWSKYAAPSGRCATFLEFGNIEAPMYARLRHFFSTIYTRMQIKPSTQPVIVVLPLCHSDDTESARASRKQYKETLYSVLFDMNVPAVCAVDQAVLSLYASKRTSGIVVHIGFNTTSVVPIFQGRVMYEIGVETVGQGALKLTGFLKELMQRRNISCESLYTVRTIKELLIMKLNCVKIHKRPARSMVKGVSLCRKRDSRLQKSYFSPIWEECAKYSDIV

SEQ ID NO: 63681 - protein, 666 aa, Zea mays
  Clone ID: LIB3060-080-B7_FLI.pep
SSRINHLLGPQPQPHPPSRSPQPEPAPTQPEPARPSSTRGNEAAGWEQQPDPDAMSPPAMLLPVCSAAPSCSPLCPVTASHVVARVARRVDVGAALRSYADPLVAQVPDRPPLADSSILSPYIAAPDDIARAFGAPASELPPLPSADPSPGLCCTGTDQPLAAVADLAATAVVNSAPTDAAERALSDAPFPSTFPSDASEVEDSVARLIDKVGKQVFQAEDALTEAYDKLRLSAYDALGAWRKTVRDAIGGLKASVDAGKQQAAGGVTDASGALHEKVAGAGTVAVDVLRKAIVAAEDSLGSAATFVVYSYGSAKESLPPNVRDLLSSSEEKASLVLRPIGNALQQVYVVVEGVEKNVGLDPSDPIVQLAVVLGGSVTIGTTYWLFTYSGYSGDLSPESAFDLLKNDDKAVLIDVRPEDLREKDGVPDLRLRARSKYASVASPEIKDPVKSMLKDEREFDDALLAVVIRNLKLVKGDSKVIVMDSNGARSKAIARLLKKLGVQRPYLVKGGFQAWSKNLRVKELKPETALTSINEDVEEILEQIKPTPTLVFGSLLGLSALSYALLEWEMTLQYIAVLSVGLTIYLRFSTYEDSEDLEKDLKLLLSPVRVGADALSWAAKKIEPNKVGLPTSPSTTAVKDRVLQAAAKHESQPSDADESSVQTAEA

SEQ ID NO: 63682 - protein, 228 aa, Zea mays
  Clone ID: LIB3060-079-D7_FLI.pep
KQCQRHLGMRSGFFSSENFASQTSKLPSADHEEDDDFYELQPADYYNLISNRMGEHFKMLKTRKMREAELAAQRAKRTKTVMRVRFPDGYILEADFIPSERIHSLVDLLLKVLARPDLPFYLYTVPPKKRILDTSQDFYTAGFVPGANVHFSYDLPEVSLLNADDLKAGPFLREEILSLDGLSLLLKPASQPDDSRMNSSSLQSDASQSVPVPTTTNKKPGRPKWLKR

SEQ ID NO: 63683 - protein, 410 aa, Zea mays
  Clone ID: LIB3060-078-C9_FLI.pep
ESPPSCLQGSVLALHYDRPAVLAIGTAFWALSTGAVGVSQYFGQVAFWRAINGVGLAIVIPALQSFIADSYKDGTRGAGFGLLSLIGSVGGIGGSVLATIVAGGDYYGFPGWRLAFISVAFVSFLIGLLVYLYTVDPRKLSPSHFGGGEDNERLHLVSNGILPPHSIWKDSWIAAKSVMKVRTFQIIVLQGIVGSLPWAAVVFFTMWFELIGFDNSSSAALNSFFAIGCASGSFLGGVIADVLSRYYPDSARVMCAQFSAFMGIPFSWILLTVIPQSVDYWSAYAVTLFLMGITISWCATCANNPMFAEVVPPRHRTMIYAFDRAFEGSFGSLAAPAVGLVTEKIYGYNAKAVDLSHGSVDGAYALSRGLLTMMIVPFALCLMFYTPLYTVFKRDRENARLASIKEQELT

SEQ ID NO: 63684 - protein, 493 aa, Zea mays; identical to SEQ ID NO: 55720
  Clone ID: LIB3060-076-E11_FLI.pep

SEQ ID NO: 63685 - protein, 248 aa, Zea mays
  Clone ID: LIB3060-075-F6_FLI.pep
GGSMGYLPSLSSKAAHFVSDLTTVILSPVSERETSHLPEVDEVLENLDDDKDSEHNSDSLDGPDTSSFRAFLISFLSSSSSNNDSMEIIPEQNGDMGYPTLTPMGKGSKGRTGLLSRGKHSIGKIINKAARISGFKQTTAEPKIDREAVTHTEPDAPVLEHQEPKEVASFGSLPTMSEPSVLLSELMQRILYASLPVLAQGRNWVLLYSCAVHGGMAYLYLLYIEGACFALVSHSWLLGIKKAQFLVV

SEQ ID NO: 63686 - protein, 316 aa, Zea mays
  Clone ID: LIB3060-075-B3_FLI.pep
YTVNVCMYIVTGHVTRSSERDWSLHYMAMAPLPPPSFSSLAVLMVVVGFLVQFSSWLGLQRSSELITTQSYTVGLLGVPGASSPPPPPILAFPRSFFVQPSPLGVVAAASIMSRWRPCREIQQKSAVLRFFFVSDLQYHLAIPKIHSAGQNRNTTHTHTQTETARAGGKKETWWRQPVTCAEGRIRSAACGRRGRRRGAGLAAGRRDDGQRRRPPQHGQAPRHGARRRRGARRRRRRHRRRRRRRGGEGGVLAELAEAGVRARPGHRVVPQLVQEPHICTGACASYVRAKWPAGDGVVRVLLRERCSCSVSFGSLV

SEQ ID NO: 63687 - protein, 305 aa, Zea mays
  Clone ID: LIB3060-071-E10_FLI.pep
PQLWCRVSLLARALPSGSACARVPQACARAQHLPVFARRSTPLRAQPSSRHVGEALALARPLFSPACRLLCSRREPPAPSVRSWHVHILQLAGRESLPMAEVPFLRACSPSLLLCRGRRAPARSSRPASPCCGLSSSLRMRSLLFRCLSCARKFSARNGVSSFRVELLSCVPVVVSELILSCRSIFSYPGCVYGRQIIRVVQLADHLLVDHRFSICHDTTPLLNPVSNPPWRSSSSSPSSTPPHQLAPDFSSKSSSFRASARNPKNRVKTKLAAPYSPSARQIAWTGKSLPISRIRVSCGNEDQN

SEQ ID NO: 63688 - protein, 484 aa, Zea mays
  Clone ID: LIB3060-068-E10_FLI.pep
AYAYTAPIRIVLLASLADPPLPSPRFKMQIFVKTLTGKTITLEVESSDTIDNVKAKIQDKEGIPPDQQRLIFAGKQLEDGRTLADYNIQKESTLHLVLRLRGGMQIFVKTLTGKTITLEVESSDTIDNVKAKIQDKEGIPPDQQRLIFAGKQLEDGRTLADYNIQKESTLHLVLRLRGGMQIFVKTLTGKTITLEVESSDTIDNVKAKIQDKEGIPPDQQRLIFAGKQLEDGRTLADYNIQKESTLHLVLRLRGGMQIFVKTLTGKTITLEVESSDTIDNVKAKIQDKEGIPPDQQRLIFAGKQLEDGRTLADYNIQKESTLHLVLRLRGGMQIFVKTLTGKTITLEVESSDTIDNVKAKIQDKEGIPPDQQRLIFAGKQLEDGRTLADYNIQKESTLHLVLRLRGGMQIFVKTLTGKTITLEVESSDTIDNVKAKIQDKEGIPPDQQRLIFAGKQLEDGRTLADYNIQKESTLHLVLRLRGGY

SEQ ID NO: 63689 - protein, 309 aa, Zea mays
  Clone ID: LIB3060-063-D6_FLI.pep
EENREQRDMARHHQQRALLLFPLVFLLLLLAPPLAGAWGKEGHIMVCKIAEKYLSEKAAAAVKALLPESAGGELSAVCPWADQVRWHYHWASPLHYANTPQVCNFKFSRDCHNSRGQQGMCVVGAINNYTDQLYSYGQKTSYNLTESLMFLAHFVGDVHQPLHVGFEDDEGGNTITVHWYRRKANLHHVWDVSIIDTAIKDFYNKSMDTMVEALKMNLTDGWSDDIVHWENCKNKHATCANDYAIESIHYSCNYAYKDVEQDITLGDDYFFSRYPIVEKRLAQAGIRLALVLNRIFGGGEADDIPLKVQ

SEQ ID NO: 63690 - protein, 238 aa, Zea mays
  Clone ID: LIB3060-061-E6_FLI.pep
IAAGTAVMDRATMSSNQAGKVLKKGKKKQAKDELDRQKQAEKKRRRLEKALANSAAIISELEKKKQQKKEEQQRLDEEGAAIAEAVALHVLIGEDSDEPCHLMLNKHHIRCNHWAPSAAFEFTVDAQPAEVYPSEDGLVCGSHAYAPRAPKGRRADWGIGQALPCWGEVSDLQGPYYQGTFRQSVTCPGFIAAQAVSSLQIREESPEVTSPSHGADAAATVVNRMLGGTSRLNLYRGI

SEQ ID NO: 63691 - protein, 728 aa, Zea mays
  Clone ID: LIB3060-059-F10_FLI.pep
QTPPSFFTSLPLLQEASEGAQTDKAAHARVGRRRCRPAGRQHGREQQGGQPVVRRRGAAALCRRRRRGASATAGVASSGAGTGNPRARDAGRRRGVGAGAAQGVAAGAADDGEGAAAAPGRGVLPGRPAAPVQEPVVGAAPRAGAALLLPHLPVGVRLQPAPPALRPRRRPHHCQPRHPAGNQLRQARQPAANRWPIFQLRAAAHLRAAGELAGPGGGAGVHRVAGDGVHAPGRRVAGRAAAPLPAAGLHRHLLRRRLPGVPGIPQAGLHRGLPVQGDADGLHGRRRRHRVAAAAQGPARHLPLHLPHGIPRRHALRRQPPRRVEVADDRHGLRLPRHPPPHAPNQRQEPKAFLGISRCSPGVGDHLHHPLLHLEIPQHQCYWHPPQGSEPSFGEHAQLQRLLCGADDQNRDHDRHPVLNRRDRSGQDLRVHQQLPGGREQGDDGDRADEHGGLLRLLLRDDGVLLPVGGELQRGLQDGAVQRRDGGGGAGDAAVPHAAVPLHPERDPGGDHHHGGGGAGGRARRRQAVEGGQAGLPGVRGGVPRRAAGVRADGPGRRRRHLALQGPAAGHPPQRRGGGPRPGDAELPQRGAVPRGRPRAGLPRRRRRVRRLLRQLHVPGGAGHALPPRRGGARAQVQPPLHPMRRPRHGRRRGDRHERSRRAVRAQESPGQKKHRAGACQPGGVGGGEDVQLGGGRELRVGPPLLQRSGGRRGGGVQSGAALTTTTG

SEQ ID NO: 63692 - protein, 173 aa, Zea mays
  Clone ID: LIB3060-059-B2_FLI.pep
GDGASKEAAAADGWIRPRRAAWFGSSLITGKKNWRDTTTHLRLDRSSSLTFAELARTMQPEEEEAAAAALGARRRSHGCTGAKMVRGSIQASSSPCVCVPVCSSSGSTRCLAASPFEYDVSQLGAQRRHEYPYSLAQPPNVAIASGTTTSIFLSTMLFGQRGMRHIRCELLWF

SEQ ID NO: 63693 - protein, 472 aa, Zea mays; identical to SEQ ID NO: 63601
  Clone ID: LIB3060-057-D5_FLI.pep

SEQ ID NO: 63694 - protein, 302 aa, Zea mays
  Clone ID: LIB3060-054-E9_FLI.pep
DRVTLAGVLRPEDEVVDRALADAPDTELTRLAKNYFSSTNQASLLCLSLRRALRRARSLYGPITDLLALIPQSPQLATPHCDCAFDAFLLFDQMPNPFPAPAAGFQCMQRSFSGLKNHLDLRLLSVRRRRRWLRCAKRGSGICLIACATGAAVAGLVLATHAITALLAMAPACAASNSCCCPLAASMKRLQRHMDRLDATARGTYVLNNDVATIERLVGRLHATVESDKMLVRLGLERGRGQHHTIEEVVRQLRKNHPSLQRQLADLAEHICLYFAAVNRARLLLVHHLNAQSDAESESPLS

SEQ ID NO: 63695 - protein, 508 aa, Zea mays
  Clone ID: LIB3060-051-H2_FLI.pep
ICAVTHHCTAQAQIHMGSIVADADRRPHAVCVPFPAQGHVTPMLKLAKVLHSRGFHITFVNSEFNHRRLLRSRGASALDGLPDFRFAAIPEGLPPSDADATQDVPSLCRATMENCLPHFRSLLAELNSSPDVPPVTCVVGDDVMSFTLEAAREVGVPCALFWTASACGYLGYRYYRDLMEKGIFPLKDAEQLTNGFLDTPTDWALGMSKHTRLKDFPSFVRSTDPDEFMFHFALKVTEQIVGADAVILNTFDELEQEALDAMRAMIPSSASIHTIGPLAFLAEEIVPRGGPTDALGSNLWKEDVSCFEWLHGRAPRSVVYVNYGSITVMTNEELVEFAWGLANSGHDFLWIIRPDLVNGDAAVLPPEFLEAIRGRGHLASWCPQEVVLRHEAVGVFLTHCGWNSTMESLCGGVPMLCWPFFAEQQTNCRYTCVEWGVAMEIGQDVRREAVEEKIREAMGGEKGMEMQRRAGEWQQTGLRATRPGGRSYANLDKLVADVLLSGTSGKSS

SEQ ID NO: 63696 - protein, 485 aa, Zea mays
  Clone ID: LIB3060-051-A4_FLI.pep
IFLPRPDPSMAAPTVVLLPVWGAGHLMSMLDAGKRLLTRGGRALSLTVLVMRAPTEQLAADLDAHIRREEASGLDVRFVRLPAVQPPTDFHGIEEFISRLVQLHAPHVRAAISSLASPVAAVVMDFFCTALLDVTRELAVPAYVYFTASAGMLAFFLRLPSLHEEVTVQFEEMEGAVDVPGLPPVPPSSLPVPVMDKNHPNYTWFMYHGRRFAEADGIIVNTAAELEQSVLAAIADGRCTPGVRAPTVYPIGPVISFSPPPTNTEHPHECVRWLDTQPAASVVLLCFGSQGFSAAPQAHEIAHGLERSGHRFLWVLRGPPAPGERHPSDANLSELLPDGFLERTKGRGLVWPTKAPQKEILAHAAVGGFVTHGGWNSVLESLWFGVPMAPWPLYAEQHLNAFTLVAYVGVAVAMKVDRKRNNFVEASELERAVKELMGGGEEGRKAREKAMEMRDACRNAVEEGGSSYSSLRRLSEKICKVDKNL

SEQ ID NO: 63697 - protein, 771 aa, Zea mays
  Clone ID: LIB3060-046-B1_FLI.pep
PAPPSPPPRLFRAAMDEAFARAVEDGLKLTKRLVLPSGGGMPPPPPRPHLAMDRDDPAAALQQLMPAAPMAYAVVVDPAAVDSPDVPSYQPHVYGRLDPPALIPLQMREVELRVDCAAGCATAEVALRARWWLHCITRSRACHCRIVVPMAHQGSILGAEVTVGKRSYNTHVIDTEDNCSVKIAMPESGGLLKQEFFSLTIPQVGGGEDIFATIRWSQKLLYDNGQFSVEVPFRFPQFVNPLPKVFMKKEKIQLIVNSGVTKEILLQGTSHPLKEKSRQGEKLSFLHEAVVENWSTKDFTFAYTVYSGDLSGGVLVQPSTLRDYDDRDMFCLFLLPGNNENRKVFRKAVVYIIDTSGSMQGKPLESVKNALSTTLSDLIPGDYFNIITFNDELHSFSSRLEQVNEKTIGNAIEWMNLNFVAQGGTNIMHPLSEAMTLLSTSHDALPQIYFVTDGSVDDERNICHTLKTQLIKSGSKSPRISTFGLGSYCNHYFLRMLASIGKGHYAAAFDTGSIEGRMLQWFQKASSTIVSNVSIDAIKHIQDFEVDSVYIPDISAKYPLCVSGRYNGKLPETLIAKGHLADMSEISIELKVQHIKDIPLDKVLAKQQMDLLTAKAWLMENKELERKVVKLSIQNSLPSEYTRMVLLQTSLDKIDPAQQAKNKPTKQSSSADELPAMPLGGLAVGFGDVAATTENLTTGFGDMKAAEKFVMLEKAAGCCSRMADCCCCMCFIKACSKMNDQCAIVMAQACAALACLGCFECCSELCCGGPN

SEQ ID NO: 63698 - protein, 435 aa, Zea mays
  Clone ID: LIB3060-044-E7_FLI.pep
SSRHWQQSICSTSSTIRGLQSANELIHGIHHHHQAPRPKKRSRRRPEGLHEEREPGRPGLLLEPEPALERAPGAEHHDGAARRVAAEPPAVQVPEHVDGRAVHEHRLVAPEVPAQAARVHGALAVHADPQLVLLPGPAAQPAAAAHGHLVLRRALREPHPRRVRRGARTRRRDDDHAGHGQDGARPRDLALQLRLHEPRRQVAHGQHHLGAGDGHHVEPGDRLRGRRARPVVPGACEVPEDRERRGVCGGGGEAVGAPAAPEEDGGRRRRGPREGERRLPARGVRPGEAQEERRRRRDLRRGAVGDGDGERGRRRRRGGGDRERGRRGGAGDADGAVGDAGGQVPHRRREQQARRAHHSSDLRAQSREGEGAETAWESVLWEKRCGLVPGGDWTAGVMDGRPASGGGPGARAATWQGDPTARVAGGRHRTAHALH

SEQ ID NO: 63699 - protein, 517 aa, Zea mays
  Clone ID: LIB3060-043-E5_FLI.pep
DFGGEVERVLNMVEGVLLVVDSVEGPMPQTRFVLKKALEFGHAVVVVVNKIDRPTARPEFVVNSTFELFIELNATDEQCDFQTVYASGIKGKASLSPDNLADDLGPLFEAILRCIPEPRVEKDGALQMLVSNTEYDEHKGRIAIGRLHAGELQRGMEVKVCTPDDACRVGKVSELFVYQNFSRAPVESVSAGDICAVCGIDDIMIGETIADKVTGTPLPTIKVEEPTVRMSFSINTSPFVGREGKYVTSRNLRDRLYRELERNLAMKVEDGETADTFLVSGRGTLHLTILIENMRREGYEFMIGPPKVINKTVDGKLLEPYEIAAVEVPEESMGSVVELLGKRRGQMVDMEANGTEGTTLLKYKIPTRGLIGLRNAILTASRGRAILNTIFDSYGPWAGDLSSRDQGSLVAFEDGSTTSYALLNAQERGMLFVQPGQDVYKGQIVGIHQRPGDLAINVCKKKAATNVRSNKETTVVLDEPLSYSLDDCIEFIQEDEIVEVTPASIRMCKNPKVSKKK

SEQ ID NO: 63700 - protein, 399 aa, Zea mays
  Clone ID: 700211133_FLI.pep
NLLEMQSAAAFRPCPTRLLVSSPCRPLLSARPLRVSAAGAVATRSSAVGPRGLGLGLLPASPDRDGKCRQRQVSCSAAGDAVAAPKAEEGGGLMKTLWLGSLFGLWYLFNIYFNIYNKQVLKVFPYPINITEVQFAVGTVAALFMWITGIIKRPKISGAQLVAILPLAIVHTMGNLFINMSLGKVAVSFTHTIKAMEPFFSVILSAIFLGELPTIWVVSSLLPIVGGVALASLTEASFNWAGFWSAMASNVTFQSRNVLSKKLMVKKEESLDNLNLFSIITVMSFFLLAPVTFFTEGVKITPTFLQSAGLNVNQVLTRCLFAGLCFHAYQQVSYMILAMVSPVTHSVGNCVKRVVVIVTSVLFFRTPVSPINSLGTAIALAGVFLYSQLKRLKPKPKTA

SEQ ID NO: 63701 - protein, 151 aa, Zea mays
  Clone ID: 700219379_FLI.pep
EENNQVDPDAPRRPPRPHVFLQSYNSTPRMTPPDSPPRRFASVSPPRRHSISVTSMNMFNDRSSGFSGQHSSPFDAPSQTGRTRVDGKEFFRQVRNRLSYEQFGAFLANVKELNAHRQTREDTLRQAYEIFGPENKDLFTIFEGLISRNIR

SEQ ID NO: 63702 - protein, 312 aa, Zea mays
  Clone ID: LIB3060-062-E9_FLI.pep
VALSSLQKLDFKFPLTVSCVHFICSSIGAYIAIHVLKAKPLIQVEPEDRWKRIFPMSFVFCINIVLGNVSLRYIPVSFMQTIKSFTPATTVILQWLVWSKHFEWRIWASLVPIVGGILLTSVTELSFNIFGFCAAMVGCLATSTKTILAESLLHGYKFDSINTVYYMAPFATMILALPAMVLEGGGVMNWFYTHDSIVPALTIILGSGVLAFCLNFSIFYVIHSTTAVTFNVAGNLKVAVAVLVSWSIFRNPISAMNAIGCGITLVGCTFYGYVRHLISQRQAAAPGSLGTAQARNQTEMLPLVVDEKQEKV

SEQ ID NO: 63703 - protein, 420 aa, Zea mays
  Clone ID: LIB3151-058-C10_FLI.pep
AVLFSGTSKGGTNLRAACLPADMGSSLKYRSGLCLIVAVVLIWVISAEVTQGIFTKYRHPFAVTYLGASLMVIYLPLSFLKDFIYNLLRRHSRNTSASKIASKSSFGGSAPLKNGEFQKMLEMESQKTIVVNCPDVSIPVVEETKPLICGITELDDGLFKDKQLSTKEIATYGLYLCPLWFVTEYLSNAALARTSVASTTVLSSTSGLFTLFIGVLLGQDSINAAKVIAVFISMAGVVMTTMGQTWASDESEAGKSGFTQRTLLGDMFGLMSAIAYGLFTVLLKKFCGEEGEKVDVQKLFGYLGLFTLVALWWIVWPLTALGVEPKFSMPHSAKVDEVVVANSLIGSVLSDYFWALSVVWTTPLVATLGMSLTIPIAMVADMIIHGRHYSAVYILGSVQVFSGFVIANLADRFSRSLGLS

SEQ ID NO: 63704 - protein, 159 aa, Zea mays
  Clone ID: LIB3279-023-E5_FLI.pep
ASTTNHSTCATLAGHGLVFVDVGLGHDGAIVAGERLVLVLAGEAGALVGQRGRDEPLDVVGHLVAALAAAAGELGWELVEERDHVPGARVHEEVEGVQPLPPARRCPVEHAHLVLHGHRHDLVRQLREQRRETEQERLAARRPLGADHQVALGQEAPDH

SEQ ID NO: 63705 - protein, 385 aa, Zea mays
  Clone ID: LIB3279-223-C11_FLI.pep
TNQLPSPSHTTHRERERATHCTWLAQARRSPKRGGGRNAAAPASVSEHSAVMAKEYYTTSSLVVGYALCSSLLSIINKYAVTKFGFPGLLTALQYSTSAAGVWILGKLGFLTHDPFNLETAKKFAPAALVFYLAIFTNTNLLCHANVDTFIVFRSLTPLLVAIADTTFRKQPCPSKFTFLSLVVILGGAVGYVTTDSAFSLTAYSWALAYLVTITTEMVYIKHIVTSLGLNTWGFVLYNNFLSLMLAPVFWFLTGEHRSVFAAMESRGEGWFQLDAVVAVALSCVFGLLISFFGFAARRAVSATAFTVTGVVNKFLTVAINVMIWDKHASAYGSVCLLFTILGGVLYQQSVTVKGNGAVVAQRELVPEQPEEVDEEKQSLVSSAK

SEQ ID NO: 63706 - protein, 253 aa, Zea mays
  Clone ID: LIB3354-088-E12_FLI.pep
RGAGIQRARLQVLPRRALPGAGLLLPPPHHRRMRARRRHRAQLQHGWIHGGNDLQPGIRRPDHLLQEGDEGQVRERDELLRLPLHHVAGDPPALRRRHGGAQGVGSGLADSSRRDRSQLRLVGGGAERVLPPVQPGVLHVPGRDLAAHLLHRQHHEADLRHRRVHHHLPDARPAHQRARGRHRHPRNLHLLPGQAVAALGARVWLSGLSSVHRRISSALEDITDYITFEDIYLACIIVLLLDPLFFFSVFSFS

SEQ ID NO: 63707 - protein, 221 aa, Zea mays
  Clone ID: LIB3587-208-F8_FLI.pep
SVLSSTSGLFTLFIGVLLGQDSINAAKIIAVFISMAGVVMTTVGQTWASDESEAGKSGFTQRTLLGDMFGLMSAIAYGLFTVLLKKFCGEEGEKVDVQKLFGYLGLFTLVALWWIVWPLTALGVEPKFSMPHSAKVDEVVVANSLIGSVLSDYFWALSVVWTTPLVATLGMSLTIPIAMVADMIIHGRHYSAVYILGSVQVFSGFVIANLADRFSRSLGLS

SEQ ID NO: 63708 - protein, 188 aa, Zea mays
  Clone ID: LIB3592-092-G8_FLI.pep
TAVCWAAARERRWPLVLILLLLLVLGRDTAVGASEHAVLLLARDGRALEAKLSAERLLDIVGHLDGRLAAAAREVFGELGEERDLVRRTRVHEEEVGIHELEAAHGGAVEHGLLGVDGHGHDAVGELGEERAEAQQEGLAAGGALGADDQVALLQQAADVLGVLVALPRQRDGLDGRGELGEERAEAQ

SEQ ID NO: 63709 - protein, 248 aa, Zea mays
  Clone ID: LIB3594-049-D4_FLI.pep
VEANYIVVKSYQYTSLTSVMLLDCWSIPCVILLTWVFLKTKYGARKFLGVGVCVLGLILVVFSDVHASDRAKGPNPLKGDLFVILGSMLYACSNVTEEFVIKKSNRVELMAMLGLFGALVSAIQISVLEREELHSITWTSGAVLPFLGFAVAMFLFYSAVPVILKLCGATMLNLSLLTSDMWAVLIRIFAYHEKVDWIYFVAFAATAGGIVLYSYKGSNEVEETAQVAGASDEHGKGRDEEAGTRNPA

SEQ ID NO: 63710 - protein, 288 aa, Zea mays
  Clone ID: LIB3595-011-E11_FLI.pep
GNQLLFLLGLGFTNASYAAAFQPAIPVFTFLLAAIVGVEVINIFTKHGVVKVLGTAVCVSGAVLMVFYRGPSLIGTGGAADATALSVVIDHSHAYNYAPQWLAAAMLRNGVEAWHLGVVCLIGNCFLMGAYLVIQAPVLIKYPASLSLTAYSYSFATLFMVVTGAFATSGLHEWALTATEILAILYAGVVASCLNYAIMTWANKILGPSLVALYNPLQPACSTLLSTMFLGTPIYVGSVIGGLFIIAGLYLVTWARYKEAQSALVAGYLRPLLLPTTKAEGSSFRGLH

SEQ ID NO: 63711 - protein, 168 aa, Zea mays
  Clone ID: LIB3689-261-G2_FLI.pep
EIAAAFGLLALRPQYTVQTRDYDHRTYDSSNVECVAKEDGGHDGDHDGLQWLEDGNEVRPSFVYAPDHEIPGDSKHHNARMVKSSPPELIFHLSTSLSKNGATTASWTKPNARVMVKDDSLAGYFFRTGTCRTIHADKQMQFANMMRHPATHPPSVWVPSSVCVVPSA

SEQ ID NO: 63712 - protein, 231 aa, Zea mays
  Clone ID: LIB3912-052-F7_FLI.pep
PRVLHSVEAISVFTKDGILKVTGTAVCVSGAILMALYRGPSLIALLRSMPTAWTSAPYHPAATPAVLEQGVEAWQLGVLCLIGNCLLVAVYLVVQAPVMIKYPASLSVTAYSYFFATTFMVLTGVCATSGLHEWALTKAEVIAVLYAGIVASCLSYSIMTWANKVLGPSLVALYNPLQPAFSTALSTVFLGDPVYLGRFGFAHCPMMTTKPILLFEHCYWIIPQTSIHSFL

SEQ ID NO: 63713 - protein, 348 aa, Zea mays
  Clone ID: LIB4185-039-C6_FLI.pep
QELIHPGQAPARPPAAEMARNETAAAAAPGVDFHLPDEILAVIPTDPYEQLDVARKITSMAIASRVSRLEADAARLRRDLADRDRAEADLRACLADSDARLATALDENAKLAKERDSLAATVKKLTRNLAKLEAFKKQLMKSLSEDNLLQLSETSQDHNAEDLTARVPFWKDEVSSSNTSSDASSRSTITESVHDGGYQFSITPYMPPKLTPGSTTMISSSSGSPRAYSTGPPSPKFLSGPTSPAKARSEGQLAFSSWQGSSSHQYSAPTSPPQRRSFTGRPRIDGKEFFRQARTRLSYEQFGAFLANIKEFNAQKQSREDTLSKAEEIFGTEHNDLYISFQNMLNRN

SEQ ID NO: 63714 - protein, 248 aa, Zea mays
  Clone ID: LIB4570-003-E5_FLI.pep
GTLRAVLAILQWWGFNVTVIIMNKWIFQKLDFKFPLTVSCVHFICSSIGAYIAIHVLKAKPLIQVEPEDRWKRIFPMSFVFCINIVLGNVSLRYIPVSFMQTIKSFTPATTVILQWLVWGKHFEWRIWASLVPIVGGILLTSVTELSFNIFGFCAAMVGCLATSTKTILAESLLHGYKFDSINTVYYMAPFATMILALPAMVLEGGGVMNWFYTHDSIVPALTIILGSGVLAFALTSPSSTSSIQQQQ

SEQ ID NO: 63715 - protein, 429 aa, Zea mays
  Clone ID: LIB4606-006-H2_FLI.pep
AVVVCRDLSRADGLIPGRGVSALDLDPDPGRRSWFIGGSEEAMIPSVRLSPGPAAFSGSSLRSKLPSIPSISSLKPSKYVVSSLKPLYLAPLDGPRTAELKSRRRPLEFRCSASAADDKESKTQVVPVQSEGAQRLKISIYFATWWALNVIFNIYNKKVLNAFPYPWLTSTPSLACGSAMMLFSWATRLVEAPKTDLDFWKVLFPVAVAHTIGHVAATVSMSKVAVSFTHIIKSAEPAFSVLVSRFFLGETFPIPVYLSLLPIIGGCALAAVTELNFNMVGFMGAMVSNLAFVFRNIFSKRGMKGKSVSGMNYYACLSIMSLVILTPFAIAMEGPQMWAAGWQKALAEVGPNVVWWIAAQSVFYHLYNQVSYMSLDQISPLTFSIGNTMKRISVIVSSIIIFHTPVRAVNALGAAIAILGTFLYSQAKA

SEQ ID NO: 63716 - protein, 381 aa, Sorghum bicolor
  Clone ID: LIB3478-004-F2_FLI.pep
GSHEGRARPPHEPRRWRGQLRLQLQALGEVHTEDEAGAPQGRGGGARVVALLRRRRHGRRGPRLLVGAQHAARRLRGARSRRRQARGSGNGRWRPTAARAVLPERPARERLQPRVPIPGAVQEAGRQGQGGRAAAVLRRRAAGLLLHAAVPGPLRPPLPLLLLPHVALQGPRRARRRRRRQRGQHVHLGDHAAGGGGAVPEAVPGGLLAVPQAAPQGARVRWPDGAGVPRQEEQGRAPWRGQLHVGPPRAGSSVTRQTGTCGEGEAGLLQPAVLRAVGGRGEGRDQAEPGVRRHPHPALRVQLGSARRHGGRRRRPRARRRPERRQRRQVHQGRDRATHRAPLRRPRTRRPLRALCQERRRAPPESEDQVPCHRRFTQGIN

SEQ ID NO: 63717 - protein, 352 aa, Sorghum bicolor
  Clone ID: LIB3481-015-E6_FLI.pep
SGVQSLLKPLVEEAIAALCRPAVPCRVGVADLGCSSGPNALALVSAAVDSLRHHHRRRRLGCQSSSSPEPNRRRRAEISVYLNDLPDNDFNLVFKAVPAFLEKHMGASGGDDDDGDGDGPLVLVLGAPGSFYGRLFAAQSLHLVCSSFSVHWLSKVPQELADGVLVNKGNTWAGRTSTPAVAAAYGRQFEHDLSLFLSSRAEEIVPGGWLVLSVAGRPGKDLSSQDRQSEFTAEVLCDMAARGVVTAEDVDSYNVPFYAPCADELRAAAELEGSFEAVRVESHAVLTCDGDPAKSAAMARSLRVISESTLVRHFGRVDDVGGEFARAAEARYRGPPAPVMEGVVHVLSLRRK

SEQ ID NO: 63718 - protein, 320 aa, Sorghum bicolor
  Clone ID: LIB3476-045-B2_FLI.pep
LLPGRGCCASCVPWVEHHWEWKKGIMFRRKHASHFNSNDAEQQEAKINELKYALGPLSAHDEKYCSDTCFRRYLEARNWNVTKSRKMLEESLKWRATYKPEDIRWPDVSVEAETGKMYKASFRDREGRTVIIMRPTKENSTSHDGKIRFLVYVLENAILGQHEGQEKMVWLIDFAGWTMAHATPIKTARESTSILQNHYPERLAVAFLFNPPKVFEAFYKAVKYFLDPRSIEKLNFVYLKDEESMKVLYKCIDPEVLPVEFGGRNSVMYNHEEYSKLMLQEDIEPSSFWEDDAKTVDHAVNGTLVPDVAPRSLQLAAKAS

SEQ ID NO: 63719 - protein, 377 aa, Oryza sativa nipponbare
  Clone ID: LIB3598-041-F2_FLI.pep
CNVRITTSRAGDGEGVGVGVTPPDFPRLDEPPQPRDRSGGGRPRPSPAPKSCPDLPRPRQWGPPPTTPSSSSPSSWTKNVHQGYPKETLLRFLKAREWNVSKAHKMLVDSLNWRIQNEIDTVLERPIVPVDLYRSIRDSQLVGLSGYTKEGLPVFAVGVGQSTYDKASVHYYVQSHIQINEYRDRVILPMLTEKFGRPVTTCVKVLDMTGLKLSALSQMKMLTSISTVDDLNYPEKTETYYVVNVPYIFSACWKVVKPLLQERTKKKVKVLHGCGRDELLKIMDYSSLPHFCRREGSGSSKHSSTDADDCYSLDHPFHKELYGHIEELASCKELIKMGSLHVSIPEPDPDDAKIVEVIQAEFQKIGEQNGSANGHKV

SEQ ID NO: 63720 - protein, 436 aa, Zea mays
  Clone ID: LIB3958-023-F1_FLI.pep
FLYEGAPYINPSRVPPRVYWHLVQVQSKKLITKMSFRSIEQLLRRNSKTKISRNIVDRNHDQKEEQLVQSLRELLLASKQLPDKFDDYYVLLRFLKMRGFNILKAKEMFLNMLKWREDCSVDAIANDFKFEEYDAVKRCYPHGFHGVDRFGRPLYIERVGSVDLSKLMQVTTIDRYVKYHISEQEKTISLRYPVCSLVAKKHIASTTAIFDVKGLGLNNFSKSAREMFAEIQKIDSNYYPETLNQLYIINAGTGFRALWKVLKTFMEARTLAKIQVLGTNYLNTVLEAVDPSNLPEFLGGTCTCPTGGCLLQDKGPWTDPEMIRASKEAFGKGQKSFNELAATIACESFTGCQEPSAKQVDSTSRKRRTLGMLFKDDQVGFDTGENILRKQVDEQILEKIRELEHCAAKSGETLQILICKQQELTGHIEQLRKILQ

SEQ ID NO: 63721 - protein, 262 aa, Glycine max
  Clone ID: 700560508_FLI.pep
SFIHSSCRVVFFATMLLRTASSFSLFNANGDHILLPSSVRYSQGKHLVPCATKNSNNRPLTGVVFEPFEEVKKELDLVPTVPQASLARQKYTDESEATINEQINVEYNVSYVYHAMFAYFDRDNVALKGLAKFFKESSEEEREHAEKLMEYQNKRGGKVKLQSIVMPLTEFDHEEKGDALYAMELALSLEKLTNEKLLNLHSVASKNNDVQLADFIESEFLGEQVEAIKKISEYVAQLRRVGKGHGVWHFDQMLLHEEGVAA

SEQ ID NO: 63722 - protein, 262 aa, Glycine max
  Clone ID: 700905636_FLI.pep
SFIHSSCRVVFFATMLLRTASSFSLFNANGDHILLPSSVRYSQGKHLVPCATKNSNNRPLTGVVFEPFEEVKKELDLVPTVPQASLARQKYTDESEATINEQINVEYNVSYVYHAMFAYFDRDIVALKGLAKFFKESSEEEREHAEKLMEYQNKRGGKVKLQSIVMPLTEFDHEEKGDALYAMELALSLEKLTNEKLLNLHSVASKNNDVQLADFIESEFLGEQVEAIKKISEYVAQLRRVGKGHGVWHFDQMLLHEEGVAA

SEQ ID NO: 63723 - protein, 262 aa, Glycine max; identical to SEQ ID NO: 63721
  Clone ID: 700988241_FLI.pep

SEQ ID NO: 63724 - protein, 282 aa, Gossypium hirsutum
  Clone ID: LIB3584-030-C2_FLI.pep
SLNLYLLQLFVFGLESSVFLLPFSSKSFNLSTMLLKASPAFSLLKNPQVETRVPLFSRNGSGVGSGAVVVCATKGANNKPLTGVIFEPFEEVKKELNLVPTVPQMSLARQKFADECEAAINEQINVEYNVSYVYHAMFAYFDRDNVALKGLAKFFKESSLEEREHAEKLMEYQNKRGGQVKLQSIIMPLSEFDHAEKGDALYAMELALSLEKLTNEKLLNLHNVAERNHDSQLTDFIEGEFLAEQVESIKKISEYVAQLRRVGKGHGVWHFDQMLLHEGAVA

SEQ ID NO: 63725 - protein, 262 aa, Glycine max; identical to SEQ ID NO: 62139
  Clone ID: LIB4167-004-D11_FLI.pep

SEQ ID NO: 63726 - protein, 276 aa, Glycine max; identical to SEQ ID NO: 44423
  Clone ID: 700653059_FLI.pep

SEQ ID NO: 63727 - protein, 384 aa, Glycine max
  Clone ID: 701107751_FLI.pep
NCWIPSILGTQTYFVSSDVGAGKMQWYAFHKEPPGGVDEPNGKKERLLRIFEGWCDNAVDLILATEEEAILRRDIYDRIPTLTWGKGRVTLLGDSVHAMQPNMGQGGCMAIEDSYQLAWELENAWEQSIKSGSPIDIDSSLRSYERERRLRVAIIHGMARMAALMASTYKAYLGVGLGPLEFLTKFRIPHPGRVGGRFFVDIMMPSMLSWVLGGNSDKLEGRPLSCRLTDKANDQLRRWFEDDEALERAINGEWILLPHGDGTGLSKPISLSRNEMKPFIIGSAPMQDNSGSSVTISSPQVSPTHARINYKDGAFFLIDLRSEHGTWIIDNEGKQYRVPPNYPARIRPSDVIQFGSEKVSFRVKVTSSVPRVSENESTLALQGV

SEQ ID NO: 63728 - protein, 259 aa, Zea mays
  Clone ID: LIB3332-039-F3_FLI.pep
RRRANSGDLARALGRRQSSTRMEGEAETVVGSCSKPCGPLEDYYIPDYILKPGAQQVLVDHAAPCPVVVFINSRSGGQLGSSLIKTYRELLNEAQVFDLSKEAPDKVLHRLYANLERLKMEGDILAVQIWRTLRLIVAGGDGTASWLLGVVSDLKLSHPPPVATVPLGTGNNLPFSFGWGKKNPSTDQEAVKSFLGLVKHAKEIKIDRKVTTHSVEDFGITLVWVRLQCCSHLYCYTNAARPLCTYTIQLFIYIFYLDM

SEQ ID NO: 63729 - protein, 247 aa, Zea mays
  Clone ID: LIB3245-507-E4_FLI.pep
VLWPRLVANKLFRKTSGSHAFVADFPAADDDDDIVFGTEADGGGGCSPDADASRCVKRARPHERNKILKYRLFASTWNVGGVAPPDGLDLSDWLDGGDDGPYDMYVLGFQEVVPLRARNVLGADKKRVGMRWVELIRAALNRSHSQRSRGGGSGDGGGGGKQKVHPVRDGCGGELGREYRCVVSKQMVGILLTVWVRSDLRRFVRRPSVSCVGCGVMGCLGNKVSIYSPVLGYSRIWWPPRHLAKLS

SEQ ID NO: 63730 - protein, 337 aa, Zea mays; identical to SEQ ID NO: 59818
  Clone ID: LIB4171-001-H7_FLI.pep

SEQ ID NO: 63731 - protein, 75 aa, Gossypium hirsutum
  Clone ID: LIB3166-021-A3_FLI.pep
EELLLLILTISILRNKSLDFFLFLFLSYKPLCFGYVFLLLSVFDSSLIIVGLCHHNHISSIFSLSFGIWVVMLYV

SEQ ID NO: 63732 - protein, 346 aa, Oryza sativa nipponbare
  Clone ID: LIB3432-052-D8_FLI.pep
APRASIADVSCSADNSKKKEKSKKYGRVLEPDEPFKLFLRDRETTEFLTAKEERHLFSKIQILMKIEEAHRKLEVQCGREPTLAEWAEAVGMSSKELQSSIRTGRRCREKMARSNFRLVIHVARKYEGYGLDIQDLVQDGCSGLMKTFEKFNPSKGCRFPTYAYWWIRQSIKKSIFKNSRLIRLPESVYALLRKVGKARMECIMEGEQPTNANVARRAGITIEKLAKLRAKTRKPRSMQDHVWSDEGVTFQEITEDPNVEPPDLSVDRMMMRQQVRDFLGILSPREKEIIEHRFGIHDGEPKTLHVIGDMFGLSKERIRQLQNRALEKLKRSASLQGFDVYFDLLT

SEQ ID NO: 63733 - protein, 402 aa, Zea mays
  Clone ID: LIB3632-037-A7_FLI.pep
SGQSPRSTPPATFFLLRSRSGPTEGDHMGAEAAHGHPQQQPPSSLRPGREAAAPPAVVGLQLSALIDHVARVDWSLLDRVPGDRGGSQQVSIDELNHILDEVNAHILPSRNDLTPVTTIAGGSVANTIRGLSAGFGISTGIIGACGDDNQGLLFVNNMSFSGVDLTRLRAKKGHTAQCVCLVDASGNRTMRPCLSSAVKIQANEFRKEDFKGSKWLIVRYAQQNMEQIVEAIRIAKQEGLSVSLDLASFEMVRDSRSKLVNLLETGNIDLCFANEDEAREVIGGSLESDPEEALAFLGKYCKWAVVTLASKGCVAKHGKQVVRVPAIGESNAVDTTGAGDLFASGFLYGLVKGLPLEECCKVGACSGGSVTRALGGEVRPENWQWMYKQMHARGLLLPELKN

SEQ ID NO: 63734 - protein, 403 aa, Zea mays
  Clone ID: LIB3060-057-E8_FLI.pep
CSGQSPRSTPPATFFLLRSRSGPTEGDHMGAEAAHGHPQQQPPSSLRPGREAAAPPAVVGLQLSALIDHVARVDWSLLDRVPGDRGGSQQVSIDELNHILDEVNAHILPSRNDLTPVTTIAGGSVANTIRGLSAGFGISTGIIGACGDDNQGLLFVNNMSFSGVDLTRLRAKKGHTAQCVCLVDASGNRTMRPCLSSAVKIQANEFRKEDFKGSKWLIVRYAQQNMEQIVEAIRIAKQEGLSVSLDLASFEMVRDSRSKLVNLLETGNIDLCFANEDEAREVIGGSLESDPEEALAFLGKYCKWAVVTLASKGCMAKHGKQVVRVPAIGESNAVDTTGAGDLFASGFLYGLVKGLPLEECCKVGACSGGSVTRALGGEVRPENWQWMYKQMHARGLLLPELKN

SEQ ID NO: 63735 - protein, 498 aa, Zea mays
  Clone ID: LIB3959-022-H4_FLI.pep
SEAVAAAGRAPISSRGSGPDYPNPFPHQIRHGGAARSLPTMALTTASTVSSPSRIIRRFSSSQDSRPPSSLLHLAPRRGTGNSPRACSWHRLVVRRMGWAARALLGGLSDAGASESDEEEEHALRVGQREGEIDDAVELSATAVGPERWDVLGLGQAMVDFSGMVDDEFLDRLGIEKGTRKVINHEERGRVLRAMDGCSYKAAAGGSLSNSLVALARLGSSQSAGYPELNIVMGGSVGSDPLGSFYRAKLRRANVHFLSKPVKDGTTGTVIVLTTPDAQRTMLAYQGTSSTLSYDSDLASLVSKSNVLIVEGYLFELPHTIEAIKQACEDAHKNGAIIAVTASDVSCIKRCYNDFRDIVRNYADILFANANEARALCELPSTDSPMSATRYLSHSVPLVSVTDGMHGSYIGVKGEAIYIPPPQCVAVDTCGAGDAYASGILYGVLRGASDLKGIGLLASRVAAVVVGQQGTRLRVQDADRLAGSFEHHLDSLEFCSDV

SEQ ID NO: 63736 - protein, 472 aa, Zea mays
  Clone ID: LIB3592-001-C10_FLI.pep
HQIRHGGAARSLPTMALTTASTVSSPSRIIRRFSSSQDSRPPSSLLHLAPRRGTGNSPRACSWHRLVVRRMGWAARALLGGLSDAGASESDEEEEHALRVGQREGEIDDAVELSATAVGPERWDVLGLGQAMVDFSGMVDDEFLDRLGIEKGTRKVINHEERGRVLRAMDGCSYKAAAGGSLSNSLVALARLGSSQSAGYPELNIVMGGSVGSDPLGSFYRAKLRRANVHFLSKPVKDGTTGTVIVLTTPDAQRTMLAYQGTSSTLSYDSDLASLVSKSNVLIVEGYLFELPHTIEAIKQACEDAHKNGAIIAVTASDVSCIKRCYNDFRDIVRNYADILFANANEARALCELPSTDSPMSATRYLSHSVPLVSVTDGMHGSYIGVKGEAIYIPPPQCVAVDTCGAGDAYASGILYGVLRGASDLKGIGLLASRVAAVVVGQQGTRLRVQDADRLAGSFEHHLDSLEFCSDV

SEQ ID NO: 63737 - protein, 231 aa, Zea mays; identical to SEQ ID NO: 53471
  Clone ID: LIB3150-027-G3_FLI.pep

SEQ ID NO: 63738 - protein, 267 aa, Zea mays
  Clone ID: LIB3354-063-H5_FLI.pep
RRRLQGAPGVQSRGGRVPAASAEPCRPRGRAGVAVLAQARGGQGRAADQGAGAVRVRDERAGPREPRVPAPQRQADGERAGRPGPLHKQGLQRQPGQAAGHHRRHLRAHPARPRPQRRPVRGHLQLLLRRLRPHLGAGRVPDLRGVVPGRHGRLRRLRGRLRPGQAPPDRLPLQDLLHLLPPGHPGPAQGPALHARPALPHRRAHARRQGRRAARLRQQLHQLTDQLQPRNHLCLPCLSLTRFVCLYGLGPSIRTFVRGSTNKHAID

SEQ ID NO: 63739 - protein, 286 aa, Zea mays
  Clone ID: LIB3593-006-E4_FLI.pep
RRRLQGAPGVQSRGGRVPAASAEPWRPRGRAGVAVLAQARGGQGRAADQGAGAVRVRDERAGPREPRVPAPQRQADGERAGRPGPLHKQGLQRQPGQAAGHHRRHLRAHPARPRPQRRPVRGHLQLLLRRLRPHLGAGRVPDLRGVVPGRHGRLRRLRGRLRPGQAPPDRIPLQDLLHLLPPGHPGPAQGPALHARPALPHRRAHARRQGRRAARLRQQLHQLTDQFQPRNHLCLPCLSPLPLTRFVCLYGLLGSSIRTCVRGSTNKDAIDRVVCASPFTCSFSSS

SEQ ID NO: 63740 - protein, 359 aa, Zea mays; identical to SEQ ID NO: 60448
  Clone ID: LIB3279-233-B11_FLI.pep

SEQ ID NO: 63741 - protein, 303 aa, Gossypium hirsutum; identical to SEQ ID NO: 62107
  Clone ID: LIB3825-003-D1_FLI.pep

SEQ ID NO: 63742 - protein, 334 aa, Gossypium hirsutum
  Clone ID: LIB3585-041-H7_FLI.pep
LFSLSFSFLHTRQSKLHTRKCVWQKRKKKKKSKMAEKEDLGLSLSLSFPQNHHSLQRNLRPSLVPSSANSCSSLSTLTLNKHSWNDSSPPSDHNSESFRAEMGSIFRGIDMNILPSTVDCEEEAGVSSPNSTISSVSGKRSEREGNGDELEIEKSSSRGISDEEDGDTSRKKLRLSKDQSAILEENFKEHNTLNPKQKLALAKQLGLRPRQVEVWFQNRRARTKLKQTEVDCEFLKRCCENLTEENRRLQKEVQELRALKLSSTQFYMQMTPPTTLTMCTSCERVAVPPNPPSSATVDPRSHHQLAQTHHRAFHMNPWAPSAAHRPLDALRPRS

SEQ ID NO: 63743 - protein, 327 aa, Gossypium hirsutum
  Clone ID: LIB3582-060-H8_FLI.pep
FFTPDNLNYIQEKSVFGKREKKKKSKMAEKEDLGLSLSLSFPQNHHSLQRNLRPSLVPSSANSCSSPSTLTLNKHSWNDSSPPSDHNLESFRAEMGSIFRGIDMNILPSTADCEEEAGVSSPNSTISSVSGKRSEREGNGDELEIEKSSSRGISDEEDGDTSRKKLRLSKDQSAILEENFKEHNTLNPKQKLALAKQLGLRPRQVEVWFQNRRARTKLKQTEVDCEFLKRCCENLTEENQRLQKEVQELRALKLSSTQFYMQMTPPTTLTMCTSCERVAVPPNPPSSTTVDPRSHHQLAQTHQRAFHINPWAPSAAHRPLDALRPRS

SEQ ID NO: 63744 - protein, 521 aa, Zea mays
  Clone ID: LIB3608-002-B2_FLI.pep
RRRANSGDLARALGRRQSSTRMEGEAETVVGSCSKPCGPLEDYYIPDYILKPGAQQVLVDHAAPCPVVVFINSRSGGQLGSSLIKTYRELLNEAQVFDLSKEAPDKVLHRLYANLERLKMEGDILAVQIWRTLRLIVAGGDGTASWLLGVVSDLKLSHPPPVATVPLGTGNNLPFSFGWGKKNPSTDQEAVKSFLGLVKHAKEIKIDSWHIILRMRVPEEGPCDPIAPLDLPHSLHAFHRVSSSDSLNMEGYHTFRGGFWNYFSMGMDAEVSYAFHSERKKNPEKFKNQLTNQGTYAKLGLKQGWFCASLSQPSSRNLAQIAKVKIMKRAGSLWEELHIHHSIRSIVCLNLPSFSGGLNPWGTPGTRRAEDREFTAPFVDDGLLEVVGFRDAWHGLVLLAPNGHGTRIAQAHRIRFEFHKGAAEHTFMRVDGEPWKQPLPKDDDTVVVEISHLGQVTMLANEPCRSKSVNDQSSLSPAHDSHGDYNDIAEEDEDEWEDGRRKFGAADTFKIPDEIDIAHFS

SEQ ID NO: 63745 - protein, 359 aa, Gossypium hirsutum
  Clone ID: LIB3585-022-B2_FLI.pep
ICRSFLYIIDRKLKTPAIPDSYLFFFISQFKPMTETPFSKLPEDVVLNIFSKLEEDLASWASLACVCTRFSSLIRNTCLKLKCSKTIPAVSADLLSSSSAPPGGWASLHKLSVCCPGLLHAGVLLDNSDFGLERELGPDENYQRPAHSHLSTPSADPNSSKTECNSNPNMETDVPGSDCPWSLFDDLYFDTVYNASDSMDSYPSETMDTATIKTGREFPVCKRRKISRSLRSHLATGVRNLSREQGNKLLASRFRGDCLYICDWPGCVHTEEKRNYMLFRGVFKNFKKSRVWRTINDGNRSKIDLDCAFCSCKETWDLHSAFCLRRVFGYHDDGEPVVRAFVCENGHVSGAWTDLPLYT

SEQ ID NO: 63746 - protein, 140 aa, Gossypium hirsutum
  Clone ID: LIB3145-042-F2_FLI.pep
PWRQQAKPTTSHGYFILKTHKQQNILFLKDKGVSASRELWLWSLIIYNCKGCRCSCLHTCSRSQPRIPSQLPQSVLSGVLHQEPESQLWSSRQRSGLGTSCILHSHCHTCSQNRSHSFHHSKTFFSDKENWSDFDANERG

SEQ ID NO: 63747 - protein, 265 aa, Oryza sativa
  Clone ID: LIB4309-038-G9_FLI.pep
REYEEVSIVAGVIRLPEMVLVVKQHRCMHSASCVCIKGHLSEDALFLVFRHMNWNPRLIAVLSCVCKWFDEVAKQVLWKEFCHARAPKMMLDLHSGGSHIVDGNWKALGKLLIYCNGCTKGGLFNNIHVPGHFVFRTRFSRTAGKSFLPQQCRNDVLYVSDPCEHLDQGDEGDLGFFRGIFMSFATSKVKKMLIEKRARFHPSESCPYCKAKLWSMLEANMSPGSSSARLGAYEDSVEYFVCLNGHVIGIGTLLPLSDSEEVPEE

SEQ ID NO: 63748 - protein, 396 aa, Zea mays
  Clone ID: LIB3354-007-B12_FLI.pep
PNKQSTVSYLRGSIKQITLPIAMDEQQAEEGESARVKRTPEEGSSPLSALADDVLLQILGRLEADPRDWARASCASPRLAALLRAACLPPRLSRALPAELLPAPSPDGAPAAWAALHKLSVCCPGLLRAGVLLEPTDDFGLDLDIGPDVPIYARTDASSAEGFEATATSRHSGTIVAAGSAPRAGESANVAAWSLYDDLYLDAAYDCSSELQIPPAAAAVEPAPPAPVAAIRDVEEATTTNAVSCGVARRGVVAGSRLHPRRWLGTVGAHLASGSWTLSREQGNKLLASRFRGDRLYLCDWPGCVHKEERRKYMVFRGVFHNFARSQVRRALRDTRRPTVAIECAFCGCKETWDLYSAFCLRSFYGYHDDGEPVVRAYVCENGHVAGAWTDRPLYS

SEQ ID NO: 63749 - protein, 382 aa, Zea mays
  Clone ID: LIB3354-032-B9_FLI.pep
KQITLPIAMDEQQAEEGESARVKRTPEEGSSPLSALADDVLLQILGRLEADPRDWARASCASPRLAALLRAACLPPRLSRALPAELLPAPSPDGAPAAWAALHKLSVCCPGLLRAGVLLEPTDDFGLDLDIGPDVPIYARTDASSAEGFEATATSRHSGTIVAAGSAPRAGESANVAAWSLYDDLYLDAAYDCSSELQIPPAAAAVEPAPPAPVAAIRDVEEATTTNAVSCGVARRGVVAGSRLHPRRWLGTVGAHLASGSWTLSREQGNKLLASRFRGDRLYLCDWPGCVHKEERRKYMVFRGVFHNFARSQVRRALRDTRRPTVAVECAFCGCKETWDLYSAFCLRSFYGYHDDGEPVVRAYVCENGHVAGAWTDRPLYS

SEQ ID NO: 63750 - protein, 270 aa, Gossypium hirsutum
  Clone ID: LIB3493-037-C5_FLI.pep
HFFSIPKNLSTMLLRPVSSLCVQAKQGDNLICSLKGSPVTSSSSSALSFLPRKHGRALGVYASIGTDNHALTGVVFQPFEEVKKEELDIPIAPHLSLARQKYADACEAAINEQINVEYNVSYVYHSLYAYFDRDNVALKGFAKFFKESSEEEREHAEKLMEYQNKRGGRVKLHSILMPPSEFDHAEKGDALYAMELALSLEKLTNEKLLCLHDVAVQNNDAQMADFIESEFLAEQVEAIKKISDYVSQLRRVGKGHGVWHFDQMLLHEGA

SEQ ID NO: 63751 - protein, 264 aa, Gossypium hirsutum
  Clone ID: LIB3166-026-C6_FLI.pep
KNLSTMLLRPVSSLCVQAKQGDNLICSLKGSPVTSSSSSALSFLPRKHGRALGVYASIGTDNHALTGVVFQPFEEVKKEELDIPIAPHLSLARQKYADACEAAINEQINVEYNVSYVYHSLYAYFDRDNVALKGFAKFFKESSEEEREHAEKLMEYQNKRGGRVKLHSILMPPSEFDHAEKGDALYAMELALSLEKLTNEKLLCLHDVTVQNNDAQMADFIESEFLAEQVEAIKKISDYVSQLRRVGKGHGVWHFDQMLLHEGA

SEQ ID NO: 63752 - protein, 281 aa, Gossypium hirsutum
  Clone ID: LIB3166-014-B7_FLI.pep
LNLYLLQLFVFGLESSVFLLPFSSKSFNLSTMLLKASPAFSLLKNPQVETRVPLFSRNGSGVGSGAVVVCATKGANNKPLTGVIFEPFEEVKKELNLVPTVPQMSLARQKFADECEAAINEQINVEYNVSYVYHAMFAYFDRDNVALKGLAKFFKESSLEEREHAEKLMEYQNKRGGQVKLQSIIMPLSEFDHAEKGDALYAMELALSLEKLTNEKLLNLHNVAERNHDSQLTDFIEGEFLAEQVESIKKISEYVAQLRRVGKGHGVWHFDQMLLHEGAVA

SEQ ID NO: 63753 - protein, 284 aa, Gossypium hirsutum
  Clone ID: LIB3583-011-D11_FLI.pep
FEKLCFPFFPFHQKLGFLFLLFCAMLLKAVPTFSSLNPQLENQGALFSSFSSSINHQLSSLRNGPGSLVVCAAKGANHKPLSGVVFQPFVEVKKELDLVPSVPQLSLARQKFTDDCEASINEQINVEYNVSYVYHAMFAYFDRDNVALKGLAKFFKESSLEEREHAEKFMEYQNKRGGKVKLQSIVMPLSEFDHAEKGDALYAMELALSLEKLTSEKLFNLRNVAVRNHDVQLTDFIEGEFLAEQVEAIKKISEYVAQLRRVGKGHGVWHFDQMLLHEGEEAIA

SEQ ID NO: 63754 - protein, 281 aa, Gossypium hirsutum; identical to SEQ ID NO: 63752
  Clone ID: LIB3828-005-G6_FLI.pep

SEQ ID NO: 63755 - protein, 607 aa, Oryza sativa
  Clone ID: LIB4370-017-D9_FLI.pep
EAMAVMTDVSTTGTALRTPAAGAVKEGDVEKLRFIDEMTTNVDAVQERVLGEILGRNAGTEYLTKCGLDGATDRAAFRAKVPVVSYDDLQPYIQRIANGDRSPILSTHPVSEFLTSSGTSAGERKLMPTIMDELDRRQLLYSLLMPVMNLYVPGLDKGKGLYFLFVKSETKTPGGLTARPVLTSYYKSDHFKNRPYDPYHNYTSPTAAILCADAFQSMYAQMVCGLCQRNDVLRLGAVFASGLLRAIRFLQLNWEQLADDIESGELTPRVTDPSVREAVAAILLPDPELAKLIRAECSKGDWAGIITRVWPNTKYLDVIVTGAMAQYIPTLEFYSGGLPMACTMYASSECYFGLNLRPMCDPSEVSYTIMPNMGYFEFLPVDETGAASGDATQLVDLARVEVGREYELVITTYAGLNRYRVGDVLRVTGFHNAAPQFRFVRRKNVLLSIESDKTDEAELQRAVERASALLRPHGASVVEYTSQACTKRIPGHYVIYWELLTKGAGATVVDADTLGRCCLEMEEALNTVYRQSRVADGSIGPLEIRVVRPGTFEELMDYAISRGASINQYKVPRCVTFPPIVELLDSRVVSSHFSPALPHWTPARRSE

SEQ ID NO: 63756 - protein, 643 aa, Zea mays
  Clone ID: LIB3245-189-A1_FLI.pep
ARRTRLAARRPACLVGVGALAGGPVRQRGAEVAGHDAGVQELDDGRERHAPGHLVLVDGRAAGDGVVHELLEGARPDHPDLQRPDGPVRHAALPVHRVQRLLHLQAAPLQRPLAHRGAARGALGQELPVDDVVARDALGVGLAGVLHHGGAVRAEQRGRALHGALQLGLVRLVGLDGQQHVLAPHEPELRRGVVEAGHLEHVADAVPVQPRVRGDHQLVLAPDLHAGEVHQLARVAAGRRRGVHRQELEVAHVGHQGVGHLRGVAHGAEVQPEVALGGRVHGARHREPAAVVLERRDVLRHGAGDDDVQVLGAGPNAGDDASPVALGALGADQRRELGVSAEDAGDRLAHRRVGDARGERAGFDVLRELLPVELEEANGAEEARREHRADAQHVLALAQPAQHLRVHALERVGAEDGRRGARVVVVGVERAVLEVVALVVARQDGPRREAARRLRLRLDKEEMESLPLVHPGHVQVHYGHLEAVQQLAAVELVLDGGHELALAGGRAGAGEELGHRVPRQDGRAVAVGNAADVRLQVLVRRHRHLGAEGGAVRSSGGEAVLGEVLGAGVAGEDLPQHALLHGVHVGGHLLDELELLSVCVLHRGRQRLRGRAPERRAGGRHYFGHHRHCLDLDGTLLLLANAS

SEQ ID NO: 63757 - protein, 448 aa, Zea mays
  Clone ID: LIB3594-029-C6_FLI.pep
FLGQALELPSMPDSNVKWIDGLQFTSLYWPPPLDAEQKQAQILAYVEYFGQFTADTDQFPEDIAQLIQSSYPSKENRLVDEVLATFVLHHPEHGHAVAHPILSRIIDGTLCYDRHGPPFSSFISLFSHNSEQEYSEQWALACGEILRVLTHYNRPIFKVERQHTEAECSSTSDQATSSDSTDKRSNNSPGNESDWKPLRPLTPWITDILLAAPLGIRSDYFRWCGGVMGKYAAGGELKPPTTACSRGSGKHPQLMPSTPRWAVANGAGVILSVCDEEVARYETANLTAAAVPALLLPPPTTPLDEHLVAGLPPLEPYARLFHRYYAIATPSATQRLLFGLLEAPPSWAPDALDAAVQLVELLRAAEDYASGMRLPKNWMHLHFLRAIGTAMSMRAGIAADTAAALLFRILSQPTLLFPPLRHAEGVEVHHEPLGGYVSSTGKRTSRGA

SEQ ID NO: 63758 - protein, 226 aa, Zea mays
  Clone ID: LIB3594-014-D7_FLI.pep
AVQAELMATSEPVQESLVVHYSQPSRPRVLLAASGSVAAIKFESLCRSFSEWADVRAVATTSSLHFVDRSSLPSGIVLYTDDDEWSTWKKIGDEVLHIELRKWADVMVIAPLSANTLAKIAGGLCDNLLTCIVRAWDYSKPLFVAPAMNTLMWNNPFTERHLHTINQLGIALIPPVTKRLACGDYGNGAMAETSQIHTSVRLACKTQPHDASSSLAGPVSNNRPSS

SEQ ID NO: 63759 - protein, 536 aa, Oryza sativa nipponbare
  Clone ID: LIB3477-010-C5_FLI.pep
ACIMSSNMFGKKGWDSNGMDTSGSVCRSSSDINYINQRARLKSASLNCVGSPPRKNNNATQYRMFVATWNVGGRTPNKRLNLQDFLQVEESPDIYVLGFQEIVPLTAGNVLVLEDNEPAARWLALIHQALNMPQEPADGDEPSPLTPPPSSSTTTSESSNGARTRRRDAVSRSASGNLFFHTPSLKMLSNSYRVDSALVKTCNCSPEHSSVRRRAAEVRESVYLADAPAPAGETAAPAADEDDAPTTEAQCEAGCGGGGGMSYCLIASKQMVGLFLSVWVRKELVEHVGHLRVDCVGRGIMGWLGNKGCIAISMTLHHTSLCFVCSHLASGEKEGDELRRNADVAEILKSAHFPRACRPAPAAARRVPERILDHDRMIWLGDLNYRMSLSYDETRTLLEDNDWDALLEKDQLLIEREAGRVFRGWNEGKICFAPTYKYTHNSDAYAGETAKSKKKRRTPAWCDRILWQGDGIEQLQYLRGESRFSDHRPVCGVFAVEVDGGDGDGGGAAGKIMKGYYSLNARIGGDRSQCHQGDVS

SEQ ID NO: 63760 - protein, 600 aa, Oryza sativa
  Clone ID: LIB4506-012-A5_FLI.pep
PHFALALPGKKTAYHDRLPDEGPYRLLASFTSSWMSNHNSPCDIPKPASVDEFVKNGKKKKSFMSSIFRKKGRSGTGSSDKKLLSRRDIVFGLDEKCDDRSELLDSSPAVRKSFSDRHCATKIESLTLSCLDSPHRQFDTREYRVFVGTWNVAGKPPNSSLNLEDFLQIEGLPDIYVLGFQEIVPLNAGNVLVIEDNEPAAKWLGLIYQALNKPQDQSSGDELSPPETSDSRQGGGSGSRDSIPKSSSGGMLFFQKPSLKMLSKNYRVDSALVKTCTCLTDPSTMQRRAREMREFLYRIEASPPPSLASAAAAADEDGGPDAGGELARSSVNYCLIASKQMVGIFLSVWVRRELVQYIGHLRVDSVGRGIMGRLGNKGCIAMSMTLHQTSVCFVCSHLASGEKEGDEVRRNSDVAEIIKSTQFPRICKVPGQRIPDKILDHDRVIWLGDLNYRVALSYDETKTLMGENDWDTLLEKDQLMIERQAGRVFKGWKEGKIYFAPTYKYKQNSDSYAGETAKSKKKRRTPAWCDRILWHGQGIEQLQYIRGESRFSDHRPVCSVFVIEADVDNGSMIRKGYSTLDSRIHFESPIPQRHSFYDDF

SEQ ID NO: 63761 - protein, 372 aa, Zea mays; identical to SEQ ID NO: 59949
  Clone ID: LIB3689-229-G10_FLI.pep

SEQ ID NO: 63762 - protein, 613 aa, Zea mays
  Clone ID: LIB3066-047-B4_FLI.pep
SPLSSGVYWAGSETAVPLALLDRGGKKNKREAGRSSRGEEFANHAFSLRSFLECLLSGGTSTETADLTTSEANNQESSVQDGLDTTCAKENKGNDGVDNAAENSTQISESSDGGQLSLQDNKMGDSDAADANRSSASSTIVSEGKESILKHDCDSVQAPKLGASAANGPSSKSKRSYRVNILRCESLASLAPSTLERLLARDYDIVVSMIPLPSSSVLPCPSGLVHFGPPSYSSMTPWMKLALYTSGTCGPVSAVFMKGQRLRLLPEPLASCEKALIWSWDQSVVGGLGGKFEGNLVKGSLLLHYLNSMTKHSAVVVQPLSEHDLDETGSIVTIDVPLPLKNADGSIPSTVVGTDLPEDQVSSLILLLEDLSNRVELSTVGYLRLLRLHRANESSEHGSFEWVPLTIEFGIPLFSPQLCERICERVVESQMLQKDDIAEHYETMQNVRRRLRELCTEYQATGPTARLFNQRGGSKNNSPRKLVQIVSGRWSPFHDPSTPTHSSSPPAEHERAKPARRQRCFTEVLSFDGRILRSYALTPVYEAATRSVSEEQPTTPAAKPDHEDANTKDVALPGVNLIFDGTELHPFDIVACLQARQPLSLIAEASATSLAMK

SEQ ID NO: 63763 - protein, 384 aa, Zea mays
  Clone ID: LIB3060-023-G9_FLI.pep
YDGNSLQAAGRQGQTLVWWCLQDELLAVNVKRLRRGQVRLLHAAEVGDGADGCADGPLQIAAPAAVLHDGPHGAEQVAVGDPARLALQRPDEAVRHGPDDRRVGVGHHGEVAFALAVSADEHGVASAGALPGARRRALVLPLPEPVPGHAALVGEVQDRGAVAGVHHGVQPGAVHQRAHDDLVDLVVQDGPALERVQRADGLVVPVRLVAVVVRHLRADAREVEHQGVAVAAALHQPVHRHPDVLLRGQPERVPLVVSEHDDALAGEAEALAEEVPHALDVVDGAPQVAAAPARAGVRDADQDGALLAPGALERRRHVRRPRQRDAVGPPDAGHAVALRALDGALAGDHAQARPAVLAPDRRVAIPTEIHGCLLVKPGASDLIT

SEQ ID NO: 63764 - protein, 382 aa, Zea mays
  Clone ID: LIB3732-055-H1_FLI.pep
FPYGRRGRRMELLSKNCRRQQVAVRETRPMVETAVKQVYAALFPRTMVVADLGCSAGPNTLLFISSVLSSIAAAAGAERCKPPSGGGDDDDHHVELQFVLNDLPGNDFNHLFRSVEEEFRRAAGCERGPPPPPYYVMGLPESYYNRLFPRQSVHLFHSSYCLQWRSQEPEGLEAWRKPCLNEDNIYIARTTTPSVAKLFQEQFQKDFSLFLNLRHEELVHGGRMVLIFLGRKNEDVYSGDLNQLFALVATALQSLVLKGLVEKEKLESFNLPVYGPSVGEVEELVTRSGLQFSMDLIKQFEMNWDPFDDSEGDNDVVVVEDSARSSVNVAKLIRSVLKALVVRHFGEAVLDACFAEFRRLVAEHLGKEKTKFTTIAMCLKKE

SEQ ID NO: 63765 - protein, 118 aa, Zea mays
  Clone ID: 700424732_FLI.pep
PQAFGLNVEAKLRPTTDFFLARGFSVEEVGVMANRFGIVHTLSLEENLLPKYEFFLAMEYPRCELVKFPQYFGYSLDRRIKPRYARMTGCGVRLILNQMLSVSDARFEKILEKKTARL

SEQ ID NO: 63766 - protein, 561 aa, Zea mays
  Clone ID: LIB3912-035-G4_FLI.pep
TCADSARAAGEPTPAPAPAPAPPKKWQRLGRNFAGAIAAFKNTLSLDGGGGGGGLPRDPSPRAEKPPPLLLRGLAQLYSRGAANQQLPEKLVADLRRHFDALPNSYAQAGYDMKDVLLHARLAEQATGEDQPAVNIEEVHGRGSCEEGTVFQLTFACTAPLSWQSMSGSLDSPSFCCKKIQIFEKRGLTLGVVMILVQTGNEALFKNQVESALKSVVKKQRKNSGGVKLPFGLCGCQEEGSRNFDEESMFDPDDDRVLDNEPAHRPQLPTPLPQASVFVSVDEWQTIRSGGEELGRWMLRSEEIEFVDWFGANSFRGVYKGKKVWVNKLRGCDMGSAYDVEIRQDLLQLMSCGQRNILQLHGVCFSENHGLCIVTRMMEGGSVHDILVQRNKRLSLRDTVRIALDVADAMAFMNGYGIAYRDLNARKILLDRQGNACLGDMGIVTPCSNVGEVTEYETSGYRWLAPEIIAGDPETVSETWMSNVYSYGMVLWEMITGEEAYSTYSPVQAAVGIAACGLRPEIPRDCPPFLRSLMNRCWDSSPLKRPQFSEITSILQRQNVR

SEQ ID NO: 63767 - protein, 378 aa, Zea mays; identical to SEQ ID NO: 62701
  Clone ID: LIB3969-011-H1_FLI.pep

SEQ ID NO: 63768 - protein, 602 aa, Oryza sativa
  Clone ID: LIB4506-010-B7_FLI.pep
SRTVMTEVLSRPLEHRLSSPTLDGHYEEKRKSNVEYSEDEKKAKIISLKKKAMSASQKLRHSMKKGRRSSKVISISIADERDPEEVQAVDAFRQLLVLEELLPSHHDDYHMMLRFLKARKFDVEKAKQMWVDMLQWRKEFAADTILEDFEFEEADKVAECYPQGYHGVDKEGRPVYIERLGQINVNRLMQVTTMDRFIKNHVREFEKNFAVKFPACSIAAKCHIDQSTTILDVQGVGMKQFSKAARDLIGQLQKIDGDNYPETLCRMFIINAGPGFRLLWSTVKSFLDPKTTAKIHVLGNKYQSKLLEVIDASELPEFFGGTCQCEGGCMKADKGPWKDAEILKMVQSGAGWCGNLSLNHLDAEEKMMICEDDTMHTKRQESFKYEGCTLSRKISCARIEHPSLSPVCEELPPTILPTLGSAYSCDVPMVEKAIDAICQSKGLPDENVTVTKAIVNASNGSNPPLYGGIMALVMSIATMLRVSRNMPKKVLGATLGAQSTSKIQAQQLSEISVEAVSVAEYVSSTKRLSDIEEKVIAILTKPAEMPADKEEMLKTAVSRVSALEEELAATKKALQETLERQEEIMAYIEKKKKKKSKRLFRW

SEQ ID NO: 63769 - protein, 241 aa, Zea mays
  Clone ID: LIB3151-046-A12_FLI.pep
GSGSAPLPGQRRRDRRLCLLLLPYRCSVPRRNHGMRRRRRRRRRSGRSSPPESEKATTGFAPPPPPLALGTAAQRTTCRGRSRRSRTPPGAAGTTGSGGAARRRPCRGTCSATATSRGPHASASPEPAPSPRFTAAASWSPPPSPRSSRRTTAPRSATPGSSAASSPAAGTWRAQGGALLTVVYLFPTLQLIDDSSSASCVASIFAAVLCSDRVAVLVSIWREMLRCLFFLLGRIQDLVQK

SEQ ID NO: 63770 - protein, 379 aa, Zea mays
  Clone ID: LIB3245-407-F6_FLI.pep
TVEAKRRKRARNKYTFRWPPSDCRLNLPPRFAPPAPRRARIICARDRLFPRQMGADSEDAVKQLSLLMEQVEAPLKRSFQNMHQGYPKETLVRFLKAREWNVAKAHKMIVECLNWRIQNEIDSVLERPIVPVDLYRSIRDSQLIGLSGYTKEGLPIFGIGVGHSTYDKASVHYYVQSHIQINEYRDRIILPRLTQQFGRPVTSCIKVLDMTGLKLSALSQIKMLTSISTVDDLNYPEKTETYYVVNVPYIFSACWKVVKPLLQERTKKKVKVLTGCGRDELLKIMDYSSLPHFCRREASGSSKHSSTDVDNCFSLDHPFHKELYGHIREQASRRELIKMGSLHVSIPEPDPDDAKIVEVIQAEFQKIGEQDESTNSHKD

SEQ ID NO: 63771 - protein, 362 aa, Zea mays
  Clone ID: LIB3632-023-E12_FLI.pep
QVAFLRSPTESTSLRASSSAPGLPNLCSGSSLPAAMGADSEDAVKQLSLLMEQVEAPLKRSFQNMHQGYPKETLVRFLKAREWNVPKAHKMIVDSLDWRIENEIDSVLERPIVPVDLYRSIRDSQLIGLSGYTKEGLPVFGIGVGHSTYDKASVHYYVQSHIQINEYRDRIILPRLTQQFERPVVRCIKVLDMTGLKLSALSQIKMLTSISTVDDLNYPEKTETYYVVNVPYIFSACWKVVKPLLQERTKKKVKVLSGCGRDELLKIMDYSSLPHFCRREGSGSSKHSSADVDDCYSLDHPFHKELYDHIKEQASRRELIKMGSLHVSIPEPDPEDAKIVEVIQAEFQKIGEQDESTTGHKD

SEQ ID NO: 63772 - protein, 625 aa, Zea mays
  Clone ID: LIB148-003-H4_FLI.pep
RRPPSPPQGSPLGGLIGNPIMAEVLSGSHEHRLSSALDGHYDEKRKSNVEYTEDEKKAVIAALKKKALSASQKFRHSMKRGRKSSKVMSISILDEREPEEVQAVDAFRQLLVLEELLPSQHDDYHMMLRFLKARKFDIEKAKQMWSDMLKWRKEFGADTILEEFEFEEADKVAECYPQGYHGVDKEGRPVYFERLGQIDVNRLMQVTTMDRFVKNHVKEFEKNFAVKFPACSIAAKHHIDQSTTILDVQGVGMKQFSKAARELIGMLQKIDGDNYPETLCRMFIINAGQGFRLLWGTVKSFLDPKTTAKIHVLGNKYQSKLLEVIDASELPEIFGGTCRCEGGCMKADKGPWKDPEIMKMVQSGDGRCGSLGTASFEAPEKMICEDDTYPKKQALFDGETQLAGDEHSQSQKISRGRIEHPHVSPLHEELIPTSIHTPGSPYSCDVPMVEEAIDAICKSHGTPPDEKIAITKAIINVSNGSKPPLFAGIIALVMSIATMVRLTRSMMPGKVLGAAIGGATLSEGKSKVQERQRSKLSEEAVEEAEDAVSAKRLSELEEKVIALLTKPASMPADKEEVLQAAVSRVSALEEELAATKKTLQETLERQLEIVAYIEKKKKSKRFFRW

SEQ ID NO: 63773 - protein, 683 aa, Gossypium hirsutum
  Clone ID: LIB3197-044-C8_FLI.pep
KMRKPTKESELNTEPIGQNLIKLISNLCFSVFVLSVLIFTAIAITYQPPDPWLESAPSLTKLFTQTENATFKIDDSIVKTGEDLVSSPVPAIPPALAPNPITETDDSIVKTGEDLVSSPAPAIPPALATNDSVVKTGEDSVSSPVPAMSPVLATNDSVVKTSEDSVSSLAPAMSPVVAPNPVTKTNDSVVKSGKESKSSLAPAMSPALAPNPVTKTNDSLVRTGPAPAPATSLALAPTPIVETEAKSPKSDCEELKHVNCSDPLVLRAIKKFNSKTFKSIVILEYQTPVNSSKPDECDVAWRFRNKKERSWRKYRDFRRFEFGIGVNCTYRVIHTGRWHSGINARRPWIRPNPKFTQPIRDEEINDTIPTLPETNFRKGKYLYYARGGDYCKGMNHYLWSFLCGLGEAVYLNRTFVMDLNMCLSATHSSSHKDEEGKDFRFYFDFEHLKETASVVEETEFLRDWKKWDKGHKRKVPLKKIKSHKTTPMQLKKDKSTIIWRQFDGPEPDNYWYRVCEGQAAKYIHRPWHTIWKSKRLMNIVTEISGRMDWDFEAIHVIRGEKAQNKQLWPNLDSDTSPNAILTKLQQLVQPWRNLYVATNEPFYNYFDNLRSHYKVHLLDDYKELWNEASEWYNETTLLNSGKPVEFDGYMRAVVDTEVLYRAKTRVETFYNLTKDCKDGINTC

SEQ ID NO: 63774 - protein, 683 aa, Gossypium hirsutum; identical to SEQ ID NO: 63773
  Clone ID: LIB3585-052-B3_FLI.pep

SEQ ID NO: 63775 - protein, 576 aa, Gossypium hirsutum
  Clone ID: LIB3583-017-F6_FLI.pep
GHFSSFRMLGRPGLSRTGSFRPENLGQNALHMIGNLCFTIFVIGVLVFTIIAATYEPEDPLFHPSTKLTTFLTSTSNATFQSDNTVVKTGEDFMAANQTAFATFINVTDVVEIKEERTDQTSSSECEGDPRKPLNCRDPEVFHLMMKEAIERFKDIHFYRFGKPAPGPEENTCDMAWRFRPKEGKTAAFYKDYRRFVINRSENCTLSVLSIGDYHSGVNARKRKNKNQKPGFEKTSGRQEQVVAALPVVGETVNDLLPVVESENAFSRGKYLIYVGGGDRCKSMNHYLWSFLCALGEAQYLNRTLVMDLKLCLSSIYTSSNQDEEGKDFRFYFDFEHLKEAASVLDHEQFWQDWNKWQKKDGLSLHLVEDFRVTPMKLSEVKDSLIMRKFGLVEPDNYWYRVCEGETESVVQRPWHLVWKSRRLMDIVSAIASKLNWDYDSVHIVRGEKARNRDLWPNLAQDTSPDALISTLQNKIEDGRNVYIATNEPDTSFFDPLKDKYSTHFLDEYKDLWDENSEWYSETKNLNNGVPVEFDGYMRVSVDTEVLLRGKKQIETFNELTNDCKDGINTCNTASS

SEQ ID NO: 63776 - protein, 576 aa, Gossypium hirsutum
  Clone ID: LIB3582-061-F4_FLI.pep
GHFSSFRMLGRPGLSRTGSFRPENLGQNALHMIGNLCFTIFVIGVLVFTIIAATYEPEDPLFHPSTKLTAFLTSTSNATFQSDNTVVKTGEDFMAANQTAFATFINVTDVVEIKEERTDQTSSSECEGDSRKPLNCRDPEVFHLMMKEAIERFKDIHFYRFGKPAPGPEENTCDMAWRFRPKEGKTAAFYKDYRRFVINRSENCTLSVVSIGDYHSGVNARKRKNKNQKLGFEKTSGKQEQVVAALPVVGEAVNDSLPVVESENAFSRGKYLIYVGGGDRCKSMNHYLWSFLCALGEAQYLNRTLVMDLKLCLSSIYTSSNQDEEGKDFRFYFDFEHLKEAASVLDHEQFWQDWNKWQKKDGLSLHLVEDFRVTPMKLSEVKDSLIMRKFGLVEPDNYWYRVCEGETESVVQRPWHLLWKSRRLMDIVLAIASKLNWDYDSVHIVRGEKARNRDLWPNLAQDTSPDALISTLQNKIEDGRNVYIATNEPDTSFFDPLKDKYSTHFLDEYKDLWDENSEWYSETKNLNNGVPVEFDGYMRVSVDTEVFLRAKKQIETFNELTNDCKDGINTCNTASS

SEQ ID NO: 63777 - protein, 561 aa, Oryza sativa
  Clone ID: UC-OSFLCYP047H06_FLI.pep
EPLNQKPDLILHNFPRINAAPPHGQGREHVQYTLSVHEDLRQHGVLGRRWRLHEAPPVPVPRPDGAHGLERHPLGLRQERPHEGGHDGDPGRVVEERGVLEAAQHGEERLREHEGGAEVDGHADPLPRRPDLHREYLAGDHPRQRAPRPPERRREDARQRQHRHGVAPRHRRLAVPPDLRPHDPRHRDLAGDHHEAAGQEQHPAAVPVHRGDGDEGGAEVDGAEDDGPHQRRVAAEPGRLEEHRREEGDDDDAGELLEQRHGDGHHQVGAVLPPEDPAVRALLVGARRLDRARHALQLGVHVRLGAAHAPERGARLLHPPAHEEAAGGVRDEQRADEDDGRRRRRQAEGETPPPPRDARRAVVCQVGRQVADAEEELEPRRECTPPLRRRRLRQVHRRRLVGEANAEAEQHAADDEHGDVDRGGVDGGAGEEERPAREHDGLPPDRPGDAAGRQRRGQPGQVQRRRERRQHVAVVDAVLVPPRRRHPPEHPREEGRQERLHRRHSPGDADVVAEDEAAGGGHEAGDDDGEGYAAAIVARRGAAGHGEPTSSHRSTARRGTQ

SEQ ID NO: 63778 - protein, 372 aa, Oryza sativa
  Clone ID: UC-OSFLM202107H10_FLI.pep
SRSRSDASGFPTPRRTPTTPRSIGRRTTTPFTCPQILPRSPPTAAMGAASDDAVKQLALLMDQVEAPLRRTFQNVHQGYPKETLLRFLKAREWNVSKAHKMLVDSLNWRIQNEIDTVLERPIVPVDLYRSIRDSQLVGLSGYTKEGLPVFAVGVGQSTYDKASVHYYVQSHIQINEYRDRVILPMLTEKFGRPVTTCVKVLDMTGLKLSALSQMKMLTSISTVDDLNYPEKTETYYVVNVPYIFSACWKVVKPLLQERTKKKVKVLHGCGRDELLKIMDYSSLPHFCRREGSGSSKHSSTDADDCYSLDHPFHKELYGHIEELASCKELIKMGSLHVSIPEPDPDDAKIVEVIQAEFQKIGEQNGSANGHKV

SEQ ID NO: 63779 - protein, 235 aa, Zea mays subsp. mexicana
  Clone ID: UC-ZMFLTEOSINTE087G02_FLI.pep
VRRTRPFGSEQEPEQDQEDHYQEKLGDMANAGGGAAGEGEWLKVAQLRALVQEDHRAKEVDNLTLRRFLRARGHNVDKAAAMLLKFLRWRAEAAPGGGTVREEQVRGELEQDKIYMGGVDRTGRPIIVGLLAKHYSANRDMAEFKSTSTTWPSFCFINQKNACVRTCGGFLSYFLAVERVRVCALSLLFLCRFCGLLLRQDLCQDPQRPGEVPRHHGSQGLGLRKLRRPGLHRGH

SEQ ID NO: 63780 - protein, 403 aa, Zea mays
  Clone ID: CC-ZMPO148046B12_FLI.pep
CLPADMGSSLKYRSGLCLIVAVVLIWVISAEVTQGIFTKYRHPFAVTYLGASLMVIYLPLSFLKDFIYNSLRRHSRNTSASKIASKSSFGGSAPLKNGEFQKMLEMESQKTIVVNCPDVSIPVVEETKPLICGITEMDDGLFKDKQLSTKEIATYGLYLCPLWFVTEYLSNAALARTSVASTTVLSSTSGLFTLFIGVLLGQDSINAAKIIAVFISMAGVVMTTVGQTWASDESEAGKSGFTQRTLLGDMFGLMSAIAYGLFTVLLKKFCGEEGEKVDVQKLFGYLGLFTLVALWWIVWPLTALGVEPKFSMPHSAKVDEVVVANSLIGSVLSDYFWALSVVWTTPLVATLGMSLTIPIAMVADMIIHGRHYSAVYILGSVQVFSGFVIANLADRFSRSLGLS

SEQ ID NO: 63781 - protein, 607 aa, Oryza sativa
  Clone ID: UC-OSFLM202042G12_FLI.pep
EAMAVMTDVSTTGTALRTPAAGAVKEGDVEKLRFIDEMTTNVDAVQERVLGEILGRNASTEYLTKCGLDGATDRAAFRAKVPVVSYDDLQPYIQRIANGDRSPILSTHPVSEFLTSSGTSAGERKLMPTIMDELDRRQLLYSLLMPVMNLYVPGLDKGKGLYFLFVKSETKTPGGLTARPVLTSYYKSDHFKNRPYDPYHNYTSPTAAILCADAFQSMYAQMVCGLCQRNDVLRLGAVFASGLLRAIRFLQLNWEQLAEDIESGELTPRVTDPSVREAVAAILLPDPELAKLIRAECSKGDWAGIITRVWPNTKYLDVIVTGAMAQYIPTLEFYSGGLPMACTMYASSECYFGLNLRPMCDPSEVSYTIMPNMGYFEFLPVDETGAASGDATQLVDLARVEVGREYELVITTYAGLNRYRVGDVLRVTGFHNAAPQFRFVRRKNVLLSIESDKTDEAELQRAVERASALLRPHGASVVEYTSQACTKRIPGHYVIYWELLTKGAGATVVDADTLGRCCLEMEEALNTVYRQSRVADGSIGPLEIRVVRPGTFEELMDYAISRGASINQYKVPRCVTFPPIVELLDSRVVSSHFSPALPHWTPARRSE

SEQ ID NO: 63782 - protein, 385 aa, Oryza sativa
  Clone ID: UC-OSFLM202109F02_FLI.pep
RTHHHLAGWRWRRSRSRSDASGFPTPRRTPTTPRSIGRRTTTPFTCPQILPRSPPTAAMGAASDDAVKQLALLMDQVEAPLRRTFQNVHQGYPKETLLRFLKAREWNVSKAHKMLVDSLNWRIQNEIDTVLERPIVPVDLYRSIRDSQLVGLSGYTKEGLPVFAVGVGQSTYDKASVHYYVQSHIQINEYRDRVILPMLTEKFGRPVTTCVKVLDMTGLKLSALSQMKMLTSISTVDDLNYPEKTETYYVVNVPYIFSACWKVVKPLLQERTKKKVKVLHGCGRDELLKIMDYSSLPHFCRREGSGSSKHSSTDADDCYSLDHPFHKELYGHIEELASCKELIKMGSLHVSIPEPDPDDAKIVEVIQAEFQKIGEQNGSANGHKV

SEQ ID NO: 63783 - protein, 1168 aa, Oryza sativa
  Clone ID: UC-OSFLCYP009D07_FLI.pep
GQALELPSMSASNEKWIDGLQFSSLFWPPPQDSQQKQAQILAYVEYFGQFTADSEQFPEDIAQLIQSCYPSKEKRLVDEVLATFVLHHPEHGHAVVHPILSRIIDGTLSYDRNGFPFMSFISLFSHTSEKEYSEQWALACGEILRVLTHYNRPIFKVDHQHSEAECSSTSDQASSCESMEKRANGSPRNEPDRKPLRPLSPWITDILLAAPLGIRSDYFRWCGGVMGKYAAGGELKPPTTAYSRGSGKHPQLMPSTPRWAVANGAGVILSVCDEEVARYETANLTAAAVPALLLPPPTTPLDEHLVAGLPPLEPYARLFHRYYAIATPSATQRLLFGLLEAPPSWAPDALDAAVQLVELLRAAEDYDSGMRLPKNWMHLHFLRAIGTAMSMRAGIAADTSAALLFRILSQPTLLFPPLRHAEGVELHHEPLGGYVSSYKRQLEVPASEATIDATAQGIASMLCAHGPDVEWRICTIWEAAYGLLPLSSSAVDLPEIVVAAPLQPPTLSWSLYLPLLKVFEYLPRGSPSEACLMRIFVATVEAILRRTFPSETSEQSRKPRSQSKNLAVAELRTMIHSLFVESCASMDLASRLLFVVLTVCVSHQALPGGSKRPTGSDNHSSEEVTNDSRLTNGRNRCKKRQGPVATFDSYVLAAVCALSCELQLFPFISKNGNHSNLKDSIKIVIPGKTTGISNELHNSISSAILHTRRILGILEALFSLKPSSVGTSWSYSSNEIVAAAMVAAHVSELFRRSRPCLNALSALKQCKWDAEISTRASSLYHLIDLHGKTVTSIVNKAEPLEAHLTLTPVKKDEPPIEEKNINSSDGGALEKKDASRSHRKNGFARPLLKCAEDVILNGDVASTSGKAIASLQVEASDLANFLTMDRNGGYRGSQTLLRSVLSEKQELCFSVVSLLWQKLIASPEMQMSAESTSAHQGWRKVVDALCDVVSASPTKASAAIVLQAEKDLQPWIARDDEQGQKMWRVNQRIVKLIAELMRNHDSPEALVILASASDLLLRATDGMLVDGEACTLPQLELLEVTARAVHLIVEWGDSGVSVADGLSNLLKCRLSTTIRCLSHPSAHVRALSMSVLRDILNSGQINSSKLIQGEHRNGIQSPTYQCLAASIINWQADVERCIEWEAHSRRATGLTLAFLTAAAKELGCPLTC

SEQ ID NO: 63784 - protein, 607 aa, Oryza sativa; identical to SEQ ID NO: 63781
  Clone ID: UC-OSFLCYP081G08_FLI.pep

SEQ ID NO: 63785 - protein, 634 aa, Oryza sativa
  Clone ID: UC-OSFLM202043E05_FLI.pep
IAQNPRLELLLGRLILESEEGMSGPLDRFARPCFEGFTHNDEKKEIRSDADNSEGEKKTKIGSFKKKAINAGNKFRHSLRRRSKKKNEPRGSIEDIRDVQDLQAVDAFRQCLVDEDLLPQQHDDYHTMLRFLKARKFDVEKAKSMWSDMLKWRKEFGADNIEEFDYTEADEVMKYYPQFYHGVDKEGRPIYIELIGKVDANKLMQVTTIERYVKYHVKEFERCFQMRFPACSIAAKRPIDSSTTILDVQGVGLKNFSKAARDLITRLQKIDNDNYPETLRRMYIINAGQGFKMLWSTVKSFLDPKTASKIHVLGSKYQNKLLEIIDENELPEFFGGKCKCEAFGGCKKSDKGPWKDPNIIKRVLNGEANYGRQIVTISSTDGKIIRYAGPQYPTRKGSDGSAESGSEVEDGASPMASRNLITNPLLTPVHEESKLAAHGFTSASPSIIEESIPVVDKVVDDGWGSPRASSSPSRSLPITFDGLWTQVITWLTVLIVSLFAMVRSVPSRMAKRFSSQSTDHDHSYVEYPQEAEYKEEFRPPSPAPSYTEKDVLSSMVRRLGELEEKVQALETKPSEMPFEKEELLNAAVRRVDALEAELISTKKALYEALMRQDELLAYIDKQDMIKFRKKKFCF

SEQ ID NO: 63786 - protein, 553 aa, Zea mays
  Clone ID: UC-ZMROB73022H08_FLI.pep
LYQRMETEPGLSKLVHNESGLKKAIEPLLQMAEKLIPRHAHKHTPLFLYATAGVRKLPSADSEWLLDKSWDILNNSSFLCSRDRVKIISGMDEAYYGWIALNHNMDMLGTSSSKMTYGSLDLGGSSLQVTFENDKSVQDETSIRLSIGSVEHHLSAYSLTGYGLNDAFDKSVAHLVKRLGGVASNGKVQVKHPCLQTGFKEDYICSYCHPLKQDGSPSVGEKNSGKEKQGIAVELVGAPQWNECSALAKVTVNLSEWSSASPGLDCNIHPCALASNFPRPYGQFFAISGFYVVFKFFNLTADATLGDVQKRGQEFCEKPWKVAKSSVPSQPFVEQYCFRAPYISSLLREGLQIKDSQVIIGSGSITWTHGVALLEAGQALSSRLDIQGYRILHREINPNILIVLFLISIVLVICAILCVSNSIPRSFRKSYLPIHRHNSGGSSVLGMGLPFKHLLWNPISSGDGRTKTPLSPTVAGSDPHPFAGLGGSSVELMESSRQSLGAYHSYSVGSLGQMQFSSGVRNPSRGQTTLQSRRSQSREDLSSSLADIHFPKV

SEQ ID NO: 63787 - protein, 812 aa, Zea mays subsp. mexicana
  Clone ID: UC-ZMFLTEOSINTE115F12_FLI.pep
VAGRTLADCRGLRTLNLSGNHLVGPFPPDVAALTSLAALNLSNNNFSSDLPADAFTELQQLKVVALSFNHFNGSIPDSLAALPELDVLDLSSNTFSGTIPSSICQGPNSSLRMLYLQNNYLSGAIPESISNCTRLESLDLSLNNINGTLPASLGKLGELRDLILWQNFLEGEIPASLENLDKLEHLILDYNGLTGSIPPELSKCKELNWISLASNQLSGPIPAWLGQLSNLAILKLSNNSFSGPIPAELGNCQSLVWLDLNSNQLNGSIPAELAKQSGKMNIGLVIGRPYVYLRNDELSSECHGKGSLLEFTSIRPEELSRMPSKELCNFTRVYMGSTEYTFNKNGSMIFLDLSFNQLDSEIPKELGNMYYLMILNLGHNLLSGVIPPELAGAKKLAVLDLSHNQLEGPIPNSFSTLSLSEINPSNNQLNGSIPELGSLFTFPKISYENNSGLCGFPLLPCGHNAGSSSSDGHRSHRNQASLAGSVAMGLLFSLFCVVGIVIIAVECKKRKQINEEASTSRDIYIDSRSHSGTMNSNWRLSGGFGDVYKAQLKDGKVVAIKKLIHVSGQGDREFTAEMETIGRIKHRNLVPLLGYCKCGEERLLVYDYMRFGSLEDVLHDRKKTGIKLNWAARKKIAIGAARGLAYLHHNCIPHIIHRDMKSSNVLIDEQLEARVSDFGMARMMSVVDTHLSVSTLAGTPGYVPPEYYQSFRCTTKGDVYSYGVVARATGAPKNRLCMLGRQTVEASDNAEGHGNVQGDAGQFDGGLKDFGVHRRCMFCRCGDDDPERRQGGEGLTRPPTREELLLVHLPRG

SEQ ID NO: 63788 - protein, 560 aa, Zea mays
  Clone ID: UC-ZMFLB73008B07_FLI.pep
VRLIARIFCWPSSSWRRRERERERESAGIGARKHPAAMAGGGVAALGVKTERAAQYKGRMTLAVATTCLVAAVGGAIFGYDIGISGGVTSMDPFLEKFFPVVFHRKNSGGKNNYCKYDNQGLAAFTSSLYLAGLVASLVASPVTRNYGRKASIVCGGVSFLIGAALNVAAVNLAMLILGRIMLGVGIGFGNQAVPLYLSEMAPAHLRGGLNMMFQLATTLGIFTANLINYGTQNIKPWGWRLSLGLAAVPALLMTLGGLFLPETPNSLIERGRVEEGRRVLERIRGTADVDAEFTDMVEASELANTVEHPFRNILQPRNRPQLVMAVCMPAFQILTGINSILFYAPVLFQSMGFGGNASLYSSVLTGAVLFSSTLISIGIVDRLGRRKLLISGGIQMIVCQVIVAVILGVKFGAEKQLARSYSVAVVVVICLFVLAFGWSWGPLGWTVPSEIFPLETRSAGQSITVAVNLLFTFAIAQAFLSLLCAFKFGIFLFFAGWITVMTVFVYVFLPETKGVPIEEMVLLWRKHWFWKKVMPDMPLEDGWGAAEGHAAPASNNPKG

SEQ ID NO: 63789 - protein, 546 aa, Oryza sativa
  Clone ID: UC-OSFLCYP011G10_FLI.pep
VARARHKQDAAGNVYVEPNREQLANRSVAMTKDDAVPVAVAPAKRPPINKYAFGCALLASMNSVLLGYDISVMSGAQIFMKEDLKITDTQIEILAGVINIYSLFGSLAAGMTSDWLGRRYTMVLAAAIFFTGALLMGLAPNYAFLMAGRFVAGIGVGYALMIAPVYTAEVAPTSARGFLTSFPEVFNNSGILLGYVSNFAFARLPVHLSWRAMFLVGAVPPIFLGIAVLAMPESPRWLVMRGRIEDARRVLLKTSDSPDEAEDRLLDIKKAVGIPEDASDGEDVVAIVRANKASQGEGVWKELLLNPTRPVRRMLVAGLGLMFIQQATGVDCVVMYSPRVFERAGIKSKTNSLGASMAVGVCKTFFIPIATLLLDRVGRRPLLLASGGGMAIFLFTLATSLLMMDRRPEGEAKALGAISIAAMLSFVASFASGLGPVAWVYTSEIYPVRLRAQAAAIGTGLNRLMSGATTMSFLSLSNAITIAGSFYLYASIAAAGWVFMYFFLPETKGKSLEDTVKLFGKDTDDDDDVDTSRHERKRSTELSAQH

SEQ ID NO: 63790 - protein, 1174 aa, Oryza sativa
  Clone ID: UC-OSFLCYP112B04_FLI.pep
EFSQFLGQALELPSMSASNEKWIDGLQFSSLFWPPPQDSQQKQAQILAYVEYFGQFTADSEQFPEDIAQLIQSCYPSKEKRLVDEVLATFVLHHPEHGHAVVHPILSRIIDGTLSYDRNGFPFMSFISLFSHTSEKEYSEQWALACGEILRVLTHYNRPIFKVDHQHSEAECSSTSDQASSCESMEKRANGSPRNEPDRKPLRPLSPWITDILLAAPLGIRSDYFRWCGGVMGKYAAGGELNPPTTAYSRGSGKHPQLMPSTPRWAVANGAGVILSVCDEEVARYETANLTAAAVPALLLPPPTTPLDEHLVAGLPPLEPYARLFHRYYAIATPSATQRLLFGLLEAPPSWAPDALDAAVQLVELLRAAEDYDSGMRLPKNWMHLHFLRAIGTAMSMRAGIAADTSAALLFRILSQPTLLFPPLRHAEGVELHHEPLGGYVSSYKRQLEVPASEATIDATAQGIASMLCAHGPDVEWRICTIWEAAYGLLPLSSSAVDLPEIVVAAPLQPPTLSWSLYLPLLKVFEYLPRGSPSEACLMRIFVATVEAILRRTFPSETSEQSRKPRSQSKNLAVAELRTMIHSLFVESCASMDLASRLLFVVLTVCVSHQALPGGSKRPTGSDNHSSEEVTNDSRLTNGRNRCKKRQGPVATFDSYVLAAVCALSCELQLFPFISKNGNHSNLKDSIKIVIPGKTTGISNELHNSISSAILHTRRILGILEALFSLKPSSVGTSWSYSSNEIVAAAMVAAHVSELFRRSRPCLNALSALKQCKWDAEISTRASSLYHLIDLHGKTVTSIVNKAEPLEAHLTLTPVKKDEPPIEEKNINSSDGGALEKKDASRSHRKNGFARPLLKCAEDVILNGDVASTSGKAIASLQVEASDLANFLTMDRNGGYRGSQTLLRSVLSEKQELCFSVVSLLWQKLIASPEMQMSAESTSAHQGWRKVVDALCDVVSASPTKASAAIVLQAEKDLQPWIARDDEQGQKMWRVNQRIVKLIAELMRNHDSPEALVILASASDLLLRATDGMLVDGEACTLPQLELLEVTARAVHLIVEWGDSGVSVADGLSNLLKCRLSTTIRCLSHPSAHVRALSMSVLRDILNSGQINSSKLIQGEHRNGIQSPTYQCLAASIINWQADVERCIEWEAHSRRATGLTLAFLTAAAKELGCPLTC

SEQ ID NO: 63791 - protein, 592 aa, Oryza sativa
  Clone ID: UC-OSFLCYP126G04_FLI.pep
VHEFDGSTFRECFSLSWRNPYVLRLAFSAGIGGLLFGYDTGVISGALLYIRDDFPSVDKNTWLQEMIVSMAVAGAIIGAAIGGWANDRYGRRTSILVADALFFAGAAVMASATGPAQLVVGRVFVGLGVGTASMTSPLYISEASPARIRGALVSTNGLLITGGQFLSYLINLAFTKAPGTWRWMLGVAAIPAVVQFFLMLFLPESPRWLYRKGREEEAEAILRKIYSAEEVEREKEELKESVEAEARERSSSEKTSLVALLMTTATVRRGLVAGVGLQVFQQLVGINTVMYYSPTIVQLAGFASNQTALALSLVTAGLNAAGSLVSIYFIDRTGRRKLLVISLAGVILSLALLSAVFHEATSHSPPVGAAETAHFHGGALTCPDYSSRSSSSFWDCTRCLKAAAASAGCGFCAAGGGDKLRAGACLAAAAAASNATARDACRGEGREWYTRGCPSRYGWLAMAGLALYIAAFSPGMGTVPWIVNSEVYPLRHRGVCGGAAATANWVSNLAVAQSFLSLTDAIGAAWTFLIFGGLSVAALAFVLVCVPETKGLPIEEVEKMLEGRELRLRFWAKRRHHHGGDGDGGGEKTGGV

SEQ ID NO: 63792 - protein, 513 aa, Oryza sativa
  Clone ID: UC-OSFLCYP020G01_FLI.pep
DEMAGGGVAALGVKKERAAEYKGRMTLAVGMACLVAAVGGAIFGYDIGISGGVTSMDPFLKKFFPVVFRKKNDDGQNNYCKYDNQGLSAFTSSLYLAGLVSSLAASPVTRNYGRRASIVCGGLSFLAGATLNAAAVNLVMLILGRILLGVGIGFGNQAVPLYLSEMAPAHLRGALNMMFQLATTLGIFTANMINYGTQHIRPWGWRLSLGLAAAPALLMTVGGLLLPETPNSLIERGRVEEGRRVLERIRGTADVDAEFTDMAEASELANSIEHPFRNILEPRNRPQLVMAVCMPAFQILTGINSILFYAPVLFQSMGFGGSASLYSSVLTGAVLFSSTIISISTVDRLGRRKLLISGGIQMIICQVIVAVILGVKFGTDKELTRSYSIAVVVVICLFVLAFGWSWGPLGWTVPSEIFPLETRSAGQSITVAVNLFFTFVIAQAFLSLLCALKFGIFLFFAGWITVMTVFVHVFLPETKGVPIEEMVLLWRKHWFWKKVMPDLPLEDGDSHHK

SEQ ID NO: 63793 - protein, 520 aa, Oryza sativa
  Clone ID: UC-OSFLCYP126G11_FLI.pep
TFKMAGGVIVANDGDGSAVDHGGRLTFSVVITCLVAASGGLIFGYDVGISGGVSTMEPFLRRFFPGVVRRMAEARPGNEYCVYDSQALTAFTSSLYVAGLVASLVASRVTRAMGRQAVMVMGGALFFAGGAVTGFAVNIAMLIVGRMLLGFGVGFTNQAAPLFLAEMAPTRWRGSLTAGFQFFLAVGVVIATVTNYFASRVPWGWRLSLGLAGAPAVVIFLGALFLTDTPSSLVMRGDTARARAALLRVRGAGADVEAELKGIVRAVEVARQGEDGAFRRMAARREYRPYLVFAVAMPMFFQLTGVIVISFFSPLVFRTVGFGSNAALMGNVILGAVNLVCLMLSTLVIDRYGRKVLFMVGGAIMIIAQVGVAWIMGAQVGKNGSEAMARPYAVAVVAFTCLHTAGFGWSWGPLGWVIPGEIFPVDIRSAGQAMNVSIGLGLTFVQTQSFLAMLCRFRYGTFAYYAAWVAVMTVFIAVFLPETKGVPLESMATVWARHWYWKRFAREQPKTSADEPTGTY

SEQ ID NO: 63794 - protein, 226 aa, Zea mays subsp. mexicana
  Clone ID: UC-ZMFLTEOSINTE026D07_FLI.pep
GSGASPIPPATYTYLLLRSARPFGSEQEPEQDQDQEDHYQEKLGDMANAGGGAAGEGEWLKVAQLRALVQEDHRAKEVDNLTLRRFLRARGHNVDKAAAMLLKFLRWRAEAAPGGGTVREEQVRGELEQDKIYMGGVDRTGRPIIVGLLAKHYSANRDMAEFKSTSTTWPLLSSSIKMHVYVRAEVFFLSWPLSARVCVRCALSLVLVQVLWSTSSTRSVPGKRKY

SEQ ID NO: 63795 - protein, 502 aa, Oryza sativa
  Clone ID: UC-OSFLCYP022A11_FLI.pep
DRRMDGHTNGTNGSCSKPCEPLTDYCIPDYILNPDSEQVLVDQAPCCPVVVFINSRSGGQLGSSLIKTYRELLNKAQVFDLSEEAPEKVLHRLYCNFEKLKSNGDPIAFQIQSNLRLIVAGGDGTASWLLGVVSDLKLSHPPPIATVPLGTGNNLPFSFGWGKKNPTTDQEAVKSFLGQVKKAREMNIDSWHIIMRMRAPQEGPCEPIAPLELPHSLHAFHRVSGSDSLNMEGYHTYRGGFWNYFSMGMDAQVSYEFHSERKRNPEKFKNQLTNQSTYAKLGLKQGWFAASLTHPSSRNIAQLAKVRIMKRPGGQWEELKIPRSIRSIVCLNLPSFSGGLNPWGTPGTRKVQDRDLTAPFVDDGLIEVVGFRDAWHGLVLLAPNGHGTRLAQAHRIRFEFHKGAAEHTFMRIDGEPWKQPLPKDDDTVVVEISHLRQVTMLASDPCKSKSVNDPSSPMCCSNHDDDERNSLEDEDEWEEGRKKFGAADTFKFPDEVDVAHLS

SEQ ID NO: 63796 - protein, 339 aa, Gossypium hirsutum
  Clone ID: UC-GSFLMAXXA088B02_FLI.pep
ETTRFISPPTLKMTETPFSKLSDDVVLNIFSKLEHHPKSWACLACVCTKFSSLIHNTCFKQKCFKTIPAVCAGLLSSSSVPPGGWSSLHKLSVCCPGLHHAGVLLDHSDFGFAREIGPEVKYPKLANSQFSPPPTEPWSSKVEGNPNPDPENNAAGSDCSWSLFDDLCYDTVSNPSESIDGYKVERIDNRDIKTGREFLVCKRRKLSRPLRSHLADGVWNLSREQGNKLLASRFRGDCLYICDWPGCIHMEEKRNYMLFRGVFNDFKKSRVWRTINDGNRRKIDLSCAFCSCKQTWDLHSAFCLRRVFGYHDDGEPVVRAYVCENGHVSGAWTDLPLYT

SEQ ID NO: 63797 - protein, 517 aa, Oryza sativa
  Clone ID: UC-OSFLM202018F10_FLI.pep
RRHGGLRRRWRQRRRPHVPGRGYLPHGGLRWPHLRLRHWHLRWCVGDGVIPGEVLPGLAEGDGAREQGRVLHLQQPGAHGVHLVAVRVRHGRDAGGEPRHPADRTAGRHADRGQHVPGRRARERRRGQHCHAHHREDAAWPGARVLGPGHAGVPRRDVAAAVARRVHLRLPAVHQRRVPHRQPDQLRHVADPRVGMAPVARPRGVPGRRHGGRRGVHPGHAEQPGPAREARPRPRRAPAGARQGRRRRRRVQRHPRRRGARPQERRGRVPADPAARVPAVPGHGHRVPGVPQPHRRGRHGLLLPDTVPHSRVRERCRADGRRHSRPHEHLRHRRLGLRHGPLRPEAALHDRRRAHVHLPGGNGEHRGVAAGAREQDGEGVRGDGAGDDVRLLGELQLVVGGAVLGHPRRDLPGGGQVGGAGRGGGAQPGPQLRAGAVLPRHALLLQVRHLPLLRVVARRHDRLRRRLRAGDQGRAARVHGPRLRAPLVLGQVRQGPQVRRRVDLKFAPHMPMRNVWL

SEQ ID NO: 63798 - protein, 517 aa, Oryza sativa; identical to SEQ ID NO: 63797
  Clone ID: UC-OSFLM202092H07_FLI.pep

SEQ ID NO: 63799 - protein, 561 aa, Oryza sativa; identical to SEQ ID NO: 63777
  Clone ID: UC-OSFLM202132E03_FLI.pep

SEQ ID NO: 63800 - protein, 517 aa, Oryza sativa; identical to SEQ ID NO: 63797
  Clone ID: UC-OSFLM202094H12_FLI.pep

SEQ ID NO: 63801 - protein, 493 aa, Zea mays subsp. mexicana
  Clone ID: UC-ZMFLTEOSINTE063D12_FLI.pep
EDTPQGKTIFTSYGTTLYQMFVLFTTSNNPDVWVPAYKSSRWNALFIVIYVLLGVYFLTNLILAVIYDSFKEQLAKQLAQIDSIRKSILQKAFDLIDTNGQGYLNKEQCISLLDELNKYRSLPKTSREDFELIFSELDRSGDFKVTSEEFADLCNTIAIKFQKEPPPSYLEKYPFFYHSPQCERLKSFVRSRLFEYIVVFVLLVNLIAVVIETTLDIENSSSQKVWQEVEFVFGWIYVVEMALKIFSLGFGAYWMEGQNKFDFVITWTIFIGETLTFAFPSTLPFLSNGEWIRYLLLGRMLRLTRILLQIRRFRAFVATFFTLMSSLLPYLGTVFCILCVYCSIGLQFFGGIVYAGNLKLEETDLFGNDYLLFNFNDYPSGMVTLFNLLVMGNWQVWMESYAHLTGSSWSLVYFISFYLISVLLLLNLIVAFVLEAFFAEMELEKAGEADTQDSTPQGRNKRRSMRARTKGTMVDILLHHMLSNELDGSQNSD

SEQ ID NO: 63802 - protein, 87 aa, Gossypium hirsutum; identical to SEQ ID NO: 62132
  Clone ID: UC-GSFLNU33B005F05_FLI.pep

SEQ ID NO: 63803 - protein, 473 aa, Oryza sativa
  Clone ID: UC-OSFLCYP024D07_FLI.pep
TAMRPRRRDASASDSDDADARSSSPRPRRRPDPAPPRAPLLSSLVVKLQPRGPEEEHGAADRLERRRDPPPAARRPPREPSPPGFMRRRESRQTPPPQQPHAAPRRRGGSASPPPPRRRGSPLGFRPRYPQPREEPQGYHPHSGSMIPPRGRGVESSNFNDGSRYGYELASKGGERLQYVSPPNGRGRPHRRDGGAPGKDFIFINGEYVHRNDPNLSPREGDWICQNPTCGNLNFARRSHCNNCNKERYAPAMYKSSYSPDRRQFNSPPQGPPSRVIGPPSGRDLPREKQRYRSPPRGWGMVRPDDHRDYSTQLSQDRPGRMADPMHRDRINFGDELPHRQRGKFDWDGYNHREHPRDGPYLDRREPRLGSPRGNWGQAVRDRSHSPMRNKPMNRGLDLRERSRSPFRDRPLNKASIGRGGPDRDYVHPFDTHGRPHNLGNSRGHGYRQEDDLFPIRNQGDQRVLSRHWNGIH

SEQ ID NO: 63804 - protein, 526 aa, Oryza sativa
  Clone ID: UC-OSFLM202141F04_FLI.pep
LHLIDLVVVVDVINGGWFRRRGQGRRRRRAAGVQGEDHVVRVAVRHHRGDERAHVRLRRRHLRRRDRHGRLPDQVLPVGVRAEAPREGEQLLQVRRPAAAAVHLVAVPRRAGRQLRGVEAVHAAGAAAHDAARVGVLPRRDGAVRRRGEPGDADRGEDLPRRRRRVRQPGGAAVPVGDRAGAHPRRAQHPLPARRHHRHPHRQRRQLLHLERPPEHRVEVLPRRRRSARGGAVPGLAGDHRDADEPRGARAARRRARHAGEDPRHARRRRRAGRDRARMRGGGGAERGGVGVPEAAAAGVEAAAGDRGGDAGVPAVHGDQRHHVLRARAIPDHGVQEQRVAALRRRHRRRQRRLHARLHRRRRQDRPPQAPPPGLRPNAHRTDSGGGDHVGTREGERQSGREVGGGDRGAHLRLRLELRVVVGAPGVANPVGDIPPGDEDDGVLLRRELQHALHLPHRAGLPLHDVQYEGLHLLLLRYLDRYHGRLRLLAAAGDEGGAHRRDGRHGVAPPLVLEEVLHRCRGWQDW

SEQ ID NO: 63805 - protein, 209 aa, Zea mays subsp. mexicana
  Clone ID: UC-ZMROTEOSINTE085F07_FLI.pep
DDTQVSSDGPLSPAPGVETVVVFPKNAGKTVLAGEETELLVGLQNDGESILNVVAVHSTLHLPFDHNMYGQNLTVQNFFNSSVPVSVQATFPYKFVVSKFLQPGAYDLVGYIVYEIDQHPYQNVFYNGTIEVVEAGGLLSVESVFLITLGFALLGLFGLWAYGQAQQLSKKTKKAPKVELGTGTTDANIDEWLEGTSFVQRSKSKKKQT

SEQ ID NO: 63806 - protein, 339 aa, Oryza sativa
  Clone ID: UC-OSFLM202096G05_FLI.pep
QAQERTHHASVEKWRELRGINGDDGSWEERRAVWRAQARAWAWAQPRRRRWCSRRRAAAAAPWCRPAAAAAAVRLERRRSLLLVFLRSSGEVGDDGVPRRHRDAVPAGDRREPCAGGRDDHDDGEGAQLQRGRRGARRVLPQQHALQPQRQARRTICRHRRRRRRQRRRGLRRRIPQEAPPLQGPSRRPRGHLQRAQHPQSQAEGGAGEAAESEAAAGGGVVPEQEGEDEAEADGGGLRAAQALLRDAHRREPPPPPRAPGAPRPQARHRRRRAAPPLRRPRPAAHHPHHVPLLRARRLRSHHHPQQLRRRPRAAGAHPPVAAGGGAEVVGVETPLLIN

SEQ ID NO: 63807 - protein, 93 aa, Triticum aestivum
  Clone ID: UC-TSFL189010D01_FLI.pep
ANKPFDILGVDVVGVRRERPPRHALIPLLLAGPHLALVVFRRRRRDLLVGRCRCHVLGRGPGGRGARGAGGEEEEDGERGHEHQCRCPRHGVR

SEQ ID NO: 63808 - protein, 561 aa, Oryza sativa; identical to SEQ ID NO: 63777
  Clone ID: UC-OSFLM202028F12_FLI.pep

SEQ ID NO: 63809 - protein, 536 aa, Oryza sativa; identical to SEQ ID NO: 63759
  Clone ID: UC-OSFLM202101F11_FLI.pep

SEQ ID NO: 63810 - protein, 185 aa, Zea mays subsp. mexicana
  Clone ID: UC-ZMFLTEOSINTE085D03_FLI.pep
NFITCQPEYSQHGKLCCFQRGSINSTNSNSLRREVPSSAQASASTRTKTGLSPSLSRPFSSANSMTQAHSTTFAPTRSISLTAAQSVPPVAIRSSTTRARSLACTAPTCISILSVPYSREYSSEITSPGNFFGFLKGTNLAPMARAIGGPKMNPLASTPAITVIPWSLYTVAYYSHQLRIILIGA

SEQ ID NO: 63811 - protein, 633 aa, Oryza sativa nipponbare
  Clone ID: JC-OSLELIB3474028D09_FLI.pep
AQNPRLELLLGRLILESEEGMSGPLDRFARPCFEGFTHNDEKKEIRSDADNSEGEKKTKIGSFKKKAINAGNKFRHSLRRRSKKKNEPRGSIEDIRDVQDLQAVDAFRQCLVDEDLLPQQHDDYHTMLRFLKARKFDVEKAKSMWSDMLKWRKEFGADNIEEFDYTEADEVMKYYPQFYHGVDKEGRPIYIELIGKVDANKLMQVTTIERYVKYHVKEFERCFQMRFPACSIAAKRPIDSSTTILDVQGVGLKNFSKAARDLITRLQKIDNDNYPETLRRMYIINAGQGFKMLWSTVKSFLDPKTASKIHVLGSKYQNKLLEIIDENELPEFFGGKCKCEAFGGCKKSDKGPWKDPNIIKRVLNGEANYGRQIVTISSTDGKIIRYAGPQYPTRKGSDGSAESGSEVEDGASPMASRNLITNPLLTPVHEESKLAAHGFTSASPSIIEESIPVVDKVVDDGWGSPRASSSPSRSLPITFDGLWTQVITWLTVLIVSLFAMVRSVPSRMAKRFSSQSTDHDHSYVEYPQEAEYKEEFRPPSPAPSYTEKDVLSSMVRRLGELEEKVQALETKPSEMPFEKEELLNAAVRRVDALEAELISTKKALYEALMRQDELLAYIDKQDMIKFRKKKFCF

SEQ ID NO: 63812 - protein, 520 aa, Oryza sativa nipponbare; identical to SEQ ID NO: 63793
  Clone ID: JC-OSROLIB3475005G05_FLI.pep

SEQ ID NO: 63813 - protein, 399 aa, Zea mays
  Clone ID: JC-ZMXLIB3526P099AB10_FLI.pep
LLHHRHIAADLIPPPLEESAEPTEGDHMGAEAAHPQQQPPSSVRPCREAAAPAVLGLQLSALIDHVARVDWSLLDRVAGDRGGSQQVSIVELNHILNEVNTHILPSHNDLTPITTIAGGSVANTIRGLSAGFGISTGIIGACGDDNQGILFVNNMSFSGVDLTRLRAKKGHTAQCVCLVDASGNRTMRPCLSSAVKIQANEFRKEDFKGSKWLIVRYAQQNMEQIIEAIRIAKQEGLSVSLDLASFEMVRDSRSKLINLLETGNIDLCFANEDEAREVIGGGLESDPEEALAFLGKYCKWAVVTLASKGCMAKHGKQVVQVPAIGESNAVDTTGAGDLFASGFLYGLVKGLPLEECCMVGACSGGSVTRALGGEVRPENWQWMYKQMHARGMLLPELKN

SEQ ID NO: 63814 - protein, 370 aa, Oryza sativa nipponbare
  Clone ID: JC-OSROLIB3475020F09_FLI.pep
VQALLPPEARAHARTLGASSSPAHRPKSSGFSEESPRISLRPIMASSDVSVDVRPEFNSFDHLRSIRYIATDRPWLTLYGIRVQPVTPFSSLSSRPDLALIHQCLPDELLFEIFARMSPYSLGRAACVCRKWKYTVRNPTLWRNACLKTWQRTGMEANYQMVQSLYDSSWRKMWMLRPRIQFDGLYVSRNTYIHTGTAEWQFTKTVNVVCYYRYLRFFPSGKFLYKISPQKIKDVVKCMHFRASKGDCVFKGDYVLSEDGQIELALLYPGRRYTLVRMRLRLRGTTLGANNRLDVLKILTTGVNATELRNWKGSVLELVETWDEDETHDPEVPAVTHSRGLTPFVFVPFEEADTSVMNLPVEKMDYFVPG

SEQ ID NO: 63815 - protein, 613 aa, Oryza sativa nipponbare
  Clone ID: JC-OSROLIB3475022E03_FLI.pep
TDLGREGEEEGDRSAMGTYKCCLIFKRRFRWNDAPPPDDVRALFANHSAGGGPHMAADGLRAYLQATGQDGDVDMERLVEQIRQLQGRGGRIPRVGRALPLLTVDDFHRFLFSHELNPPIRHGQGQVHHDMAAPLSHYFIYTGHNSYLTGNQLSSDCSDLPIIRALQRGVRVIELDMWPNSSKDDISILHGRTLTTPVSLLKCLLSIKQHAFEASPYPVIITLEDHLTPDLQDKAAKMVLEVFGDILYYPDKDHLKEFPSPQDLKGRVLLSTKPPREYLQAKDGNAATIKEDAKAAATDDAAWGKEVPDIHSQIHSATKHDQREDDDDTDEDEDDEEEEQKMQQHLAPQYKHLITIKAGKPKGTLLDALQSDPEKVRRLSLSEQQLAKLADHHGTEIVRFTQRNLLRIYPKGTRVTSSNYNPFLGWVHGAQMVAFNMQGYGRALWLMHGFYKANGGCGYVKKPDFLMQTDPEVFDPKKSLSPKKTLKVKVYMGDGWRMDFTQTHFDQYSPPDFYARVGIAGVPADSVMKRTRAIEDNWVPVWEEDFTFKLTVPEIALLRVEVHEYDMSEKDDFGGQTVLPVSDLIPGIRAVALHDRKGIKLNNVKLLMRFEFE

SEQ ID NO: 63816 - protein, 289 aa, Zea mays
  Clone ID: JC-ZMSHLIB3587P010B01_FLI.pep
RIESGAVPCETLLLDRHGRRAQVPGIRQGLGPRRRGARQGAPGVQSRSGERGPAEPRRRRRRAGVAVLAQARGGQGRAADQGAGAVRVRDQRAGPREPRVPAPQRQADGERAGRPRPLHQQGVQRQPGQAAGRHRGHLRAHPARPRPQRRPLRGHLQLLLRRLRPHLGAGPVPHLRGVVPGGHRRLRRLRGRIRPGQAQPDRLPLQDLLHLLPPGNPGPAKGPALHARPAVAHRRAHPRRQGRRAARLPRQLHQLMIDESIIIHLCSVCRGCQNLTRQAPLLLISTPHS

SEQ ID NO: 63817 - protein, 465 aa, Zea mays
  Clone ID: JC-ZMSHLIB3587P045D02_FLI.pep
ASAPSKADASAAASELDGLPRFEKNFYVESPAVAGMTEEEVEAYRRRREITVDGRDVPKPVLEFRDVGFPEYVLQEITKAGFVEPTPIQSQGWPMALRGRDLIGIAETGSGKTLAYLLPAIVHVNAQPILSPGDGPIVLVLAPTRELAVQIQQEATKFGASSKIKSTCIYGGVPKGPQVRDLQKGVEIVIATPGRLIDMIESHHTNLRRVTYLVLDEADRMLDMGFEPQIKKIVSQIRPDRQTLYWSATWPKEVEQLARNFLFDPYKVTIGSEDLKANHAIVQHVEILSESQKYNKLVNLLEDIMDGSRILIFMDTKKGCDQTTRQLRMDGWPALSIHGDKSQAERDWVLSEFKSGKSPIMTATDVAARGLDVKDVKYVINYDFPGSLEDYVHRIGRTGRAGAKGTAYTFFTAANARFAKELINILEEAGQKVSSELAAMGRGAPPPSSGYRDRYRGYGGGRSWS

SEQ ID NO: 63818 - protein, 193 aa, Zea mays
  Clone ID: LIB3608-037-F5_FLI.pep
PAFTVLVSKFLLGETFPVPVYLSLLPIIGGCALAAVTELNFNMVGFMGAMMSNLAFVFRNIFSKRGMKGKSVSGMNYYACLSIMSLVILTPFAIAMEGSQMWAAGWQKAVAEVGPNVVWWIAAQSVFYHLYNQVSYMSLDQISPLTFSIGNTMKRISVIVSSIIIFHTPVRPVNALGAAIAILGTFLYSQAKA

SEQ ID NO: 63819 - protein, 313 aa, Zea mays
  Clone ID: LIB3332-020-B6_FLI.pep
RTTLVANTSNMPVAAREASIYTGITIAEYFRDMGYNVSMMADSTSRWAEALREISGRLAEMPADSGYPAYLAARLASFYERAGKVKCLGSPDRNGSVTIVGAVSPPGGDFSDPVTSATLSIVQVFWGLDKKLAQRKHFPSVNWLISYSKYSKALESFYEKFDPDFIDIRTKAREVLQREDDLNEIVQLVGKDALAESDKITLETAKLLREDYLAQNAFTPYDKFCPFYKSVWMMRNIIHFNTLANQAVERAAGTDGHKITYSVIKHRLGDLFYRLVSQKFEDPAEGEEALVGKFKKLYDDLTTGFRNLEDEAR

SEQ ID NO: 63820 - protein, 335 aa, Zea mays
  Clone ID: LIB3332-020-B7_FLI.pep
LLSLASGWQSSLEASRLVSPLLPQLCRCVPPLAVALQRSPASLELLARPSPQSSDMEFEDRCHKVQEPKFDCLLFDLDDTLYPLSAGIAGHVKKNIEDYMVEKLGIDETKIENLGNLLYKNYGTTMAGLRAIGYSFDYDEYHAFVHGRLPYDNIKPDPILKHILKNLRIRKLIFTNGDMVHAVRALKRLGLEDCFEGIICFETLNPPCPPQGDQEPEIFDIAGHFARSGTADELPKTPVLCKPNVDAMEEALRIANVNPHKAIFFDDSVRNIQAGKQIGLHTVLVGKSQRVKGADHALESIHNIREALPELWEEAEKAEDVLYPERVAMETSVTA

SEQ ID NO: 63821 - protein, 347 aa, Zea mays
  Clone ID: LIB3353-003-D4_FLI.pep
MLNSRTVGMKKTLIFHEGKAPKGDRTDWVMYEYRMEDEDLVSAGFSKDAYVLCKIFKKSGLGPRIGEQYGAPFNEDEWDNAEVETSLFPLTCSEVNPTEGQRAQPTVLAGALLEPEPPLHNSSSTCAGEESSFGHATAEDLTFSHSVASSAIQDTPARMSGDGVVSVNNISNVANDMRSPRDCDEFLSELSRFMNDSPLRNTPLGECSGLPPMSEAEAHAFEVNSFGLYNELSELVGLGCADNNLNTSNVETTDYLMLPPDRELSANDYMELNDLLAPDPSFPSEFSAQDNQYMQHPLAQYNGHYDLSGPSEPTMPSIFDVFPPNNGVLATDDPANYLDPAMQFPFS

SEQ ID NO: 63822 - protein, 323 aa, Zea mays
  Clone ID: LIB3353-008-A6_FLI.pep
RAKLVQFVPSGRAQEYLHSFMVQITTETSSVQHNVLARRGPVASLRPWCELGGVDPGVVGDGVVEVVEQVLEGPLAGDDGLDEEAEHGEHGEAAVLDLLDLELGEGDGVVGEAQRVEVLAAGVEVVALADAVEAVDAEALDEAHEDDLEAEHGQDALRVHQVGVAQVVQPALREDLRAGLEPHGLLEVHAHPLLQHLRGDAAQRTQHRPPPVDHLQRPVPRERLRVRGQPGGVPAVVAGELAGQVRGRLGGEGAQVLDAVRAVPQVVAHGDPAASSGGGDVAEGAGIGGGGGGATLAKKRRLGRDDAGGGGHDRRRHLLRFVW

SEQ ID NO: 63823 - protein, 145 aa, Zea mays
  Clone ID: LIB3354-016-E7_FLI.pep
GITILPLLSKTRPSVTFTDEEAEELTKRIQNAGTEVVEAKAGAGSATLSMAYAAARFVESSLRALAGDPDVYECTFIQSEATDLPFFASRVKLGKSGVESIVSADLEGVTECEAKALDALKAELKGSIEKGVAFASKQQEAAASV

SEQ ID NO: 63824 - protein, 401 aa, Zea mays
  Clone ID: LIB3332-015-B12_FLI.pep
QQRWHRKRRRICPFCLSSVDLRATPRHQALTRDLSSTTRCPSTSVPRGRPRPWRQHAPWGSPDPPRRPPCPSSTTSTSSTSIVNPSTTSTMTTRMAIRRSRPWCSLRTRSTTPPLKRCTGPGMEALVMDEDEQPLEQPIVADALALFEKMRGKGYHADVMRLRDADRAVQVLGEMMEAGFRPWNLTLTYSFVVAVLVKAGRMEEALKLKDQMLLVAGKMDVVLATTLMHGYCLLGEVGKALDLFNEAVRDGVTATNVTYAVLIKGCDAEGMTDKAYELCRQMIEQGLLSSTHGFNLVIKGLLRDKRWEDAIGLLEVMVDIPSAGTAAKWEELDIMTECVVQCNLVTTASSDFHPEFISLFVKNFGGSVAVSSKRVLFLSWGYMEEYEVLIPFQFLQVRESQ

SEQ ID NO: 63825 - protein, 454 aa, Zea mays
  Clone ID: LIB3332-019-H2_FLI.pep
LLVTVAHEQPVISSLSLSAAGCCCISWMAGVYSVAIDVDNHKVSVTGDVDSETLIRKLTRGGKHAELWSQHKGGSAQQKQQAQQQQQQKQGGNPSKDGHSKSSNNNGGQKKDQGKQGGGGGVGGGLVQGLKAFKNQHGGNKQHHQLPELLSSEDDDGMFDDDDGEFDDDYEEELRFLGDKMSQLGLHGNGNGNNQHHHQNKNGNNVVAVNSNHSNGKKGNGGAAANRHQSQNQKNVNVVNVAAANGKMGGGGGVQNHKNANAINMAAAANAKMGNGAQRNAGAMGGIGMLGLSHGLGAGGAAAAAPPPGFQQGYAGFNHPPYAAAAGYGGGLQQQQQHLQHHQQQQSNSLMASMQGYHHHQYPAATAAVVNNLRGLNGNMVMMHQHQPQPQPQAQMMYHSSPQISSPYTGYYNPYNYYYHHHPHPGSAGYPATASNGDVESMFSDENTKGCVVM

SEQ ID NO: 63826 - protein, 137 aa, Zea mays
  Clone ID: LIB3332-030-C2_FLI.pep
FILHLIKNGATARVSGQLLQRNGEDGARQRRDARRTRDLRKVGQFNCKVGVLWPKAKEGVGVLLIRNIPFPQQFHPKAFCVVLDCAVQIPNTVNCMEHPLFVLFMPVNHNLSCLRGFTIGCHPQDARPPPRRPLVRS

SEQ ID NO: 63827 - protein, 600 aa, Zea mays
  Clone ID: LIB3353-004-A11_FLI.pep
APSRRPHDRARGIDRPIAAVLPPRSTMTLASTDKVVLGCIAFSIFWVLAVFPSVPFMPVGRTAGSLLGAMLMVLFRVMTPEEAYKAIDLPILGLLFGTMVVSIFLERADMFKYLGSALAWRSRGSKDLLFRVCLVSAVASALFTNDTCCVVLTEFILKLARQNNLPPQPFLLALASSSNIGSSATPIGNPQNLVIAVQSGITFGQFLVGVFPAMIVGVAANTCILLCYFWRCLSAPEKDQEGGAAAAGPDVAVVADEEVTSHRFTPARMSRASSVNGGGADADCVGELIRRSDSLSRADTTLGMSMRSRSYNSEGGDIQVAIRSMRASSMSQEMVEVSTVCDRRDDGGAGPRKVTRTTSHQRSVIIEDAPEADAADDDDDGHKGKDGDSVTNKEKRWKVLVWKTAVYLTTLGMLAALLMGLNMSWSAITAALVLLALDFTDAQACLEKVSYSLLIFFCGMFITVDGFNRTGIPNALWELVEPHSRIDSAKGTALLAVVILVLSNVASNVPTVLLLGTRVAASAVAISPESEKKAWLILAWVSTVAGNLTLLGSAANLIVCEQARRAQFFGYNLTFWSHLRFGLPSTIIITAIGLLIVASY

SEQ ID NO: 63828 - protein, 365 aa, Zea mays
  Clone ID: LIB3353-009-H8_FLI.pep
LFLSENCLCQLFIQAAAASNWMMASRQSGNNAQEAASPLASPPHSNIASIIPSLPLETRCPPFPLRRYANFWVPEVILKADLPGIHSCFKPRPTDVFVASFPKSGTTWLKALAFATLKRSTHPPLDGDHPLRRCNPHDCVRFLDANFNQQKDELEALPSPRVLATHLPYSLLPGSITGDRERSGCRIVYVCREPKDALVSAWLFTRKAASALGADARSFTIQEALELFCDGRCMCGPQWEHVLQYWEESVRRPDRVLFLRYEEMLIDPEAHVRKLAKFMGCGFSEEEEEHGVVSAIVELCSLGKMRDMEVNRNGSNMLGVKNESYFRKGVAGDWSNHMTPDMAQRLDKVVEDALQGTGFSFTSKA

SEQ ID NO: 63829 - protein, 184 aa, Zea mays
  Clone ID: LIB3354-009-A2_FLI.pep
EYLVCSSMRLGVPFIAPRQLGAVENKSGRPSLPSVIGRTGQSGAHRTVSGARFLSLNGEADRCRSGSRWRTGHVRCTPDSPVPPSDRWLGHVSRAESAADRWPGRPLAHRTVRCTPNSPVIFSRTPSANSRERPLRPRQPGAPDTVRCTTGQSGAPDRSSLLAVYSQLFFFSFFFLFPILRQVY

SEQ ID NO: 63830 - protein, 287 aa, Zea mays
  Clone ID: LIB3354-014-B2_FLI.pep
AHLFGHTREEREERNPTRSLARQELPGPKPKAPPPPISAFSSAAAAAAAEEVDEMLSADIPPNQTIYLNNLNEKVKKEELKRSLYALCSQYGRILDVVALKTQKLRGQAWVVFSEITAATNAFRGLQDFDFYGKKMRVQYAKTKSDCIAKEDGTYAPKEKRKKQEEKAAEKKRRAEEAQQAGPNAAAAQSNGTGYQASRMGKASQEPPAPPNNILFIQNLPDQTTSMMLQILFQQYPGFREVRMIEAKPGIAFVEFEDDGQSMVAMQALQGFKITPENPMAISYAKK

SEQ ID NO: 63831 - protein, 124 aa, Zea mays
  Clone ID: LIB3354-025-F7_FLI.pep
VRFLTGHSRNGGTDPLYVAGNAADPDTTLVVYMGLSTLPSLAPKLMKHGLPPDTPAVAVERGTTPQQRTVFASLKDLVDEVKSADLVSPTLIIIGKVVSLSPFWVESSEHDALKVQSSYANEAR

SEQ ID NO: 63832 - protein, 573 aa, Zea mays
  Clone ID: LIB3354-032-G5_FLI.pep
TKVIHKDKEQTNRLARPKLELVWMRTIAVAPGGRRQVAGANRVGITSHHHLVLLSSTCRRRPPLYHLGQRGGGGAPVAEPLGGGLLQLGHLGPDRGALPFPAHHLAHRVRDNLPPLGRLGHPERSADAVGEQHGVLPLLGVERPRHHGHAVDEALEHGVPAAVGEEGARGGVRQHLGLRRPGRDHQPHAGGAGAVHEALGEVGEGVALALRVVVVVVDGAPVAGAPHHPQEPLAAELQPQRQLPHLLRRQRAAGPERDEHHRPGRLPVQPLQARRRRRAVLPPGVGVDERADRVHRGPPAAGAARLRLAQDLGGARLDGVERVDEDGVRVPVLGAVVHHPAVAGVGLVLQRHEHVGPRDGHAPGQAQRLRHVPERAGHGGVQVRQVEDEREHVQVGWEEDAPAADPRGAGRVQRVGAEEVGHERRQAPGRAPPEVGEDGRQRRHRARALLRHARLDGGGAGQVGEVDGREGQRGHRGRERGQERALRGRRRGRERDERGRGAVPRRQPLRQLRQRDQVPHPGRRQHRHVRPAVNFAVAAGGGGGGAVAAAVVHFGAPAFFFSFFLSFFCCTGW

SEQ ID NO: 63833 - protein, 614 aa, Zea mays
  Clone ID: LIB3354-048-D6_FLI.pep
RALQLLCCSSPLRRSVTEHRPEVPLPVAVAVAWPSKMAEQFYTVASDSETTGEDKSQPSFPDVAVGIDIGTSKCSVAIWNGHQVELLKNTRNQKGMRSYVMFKDDTLSAGVTGGAAKENAHEERDILSGSAIFNMKRLIGRMDTDEVVQASKTLPFLVQTLGIGVRLFIAALVNNMWRSTTPEEVLAIFLLELKALVEMHLKHPVRNAVLTIPVAFSRFQQTRIERACAMAGLHVLRLMPEPTAVALLYAQQQQQLVHDNMGSGIEKIALIFNMGAGYCDVAVAATAGGVSQIRALSGCTAGGEDILQNIMRHVLPNFDGIYAGQTMDRIKSMSLLRIATQDAIHRLVSQESVEINIDLGNGHMVSKVLDHSEFEQVNRAIFDKCEKIINQCLADAKLVPEDINDVILVGGCSKIPRIRSLVLGLCKKEVSYKNIDALEAAVSGAALEGAIASGVNDPSGSLDLLTIQATPMNLGIRADGDSFAAIIPRNTTVPARRDMLFTTTHDKQTEALIAVYEGEGERAEDNHLLGYFKITGIPAAPKGAVDISVCMDIDAANVLRVFAGVVKPQGPAIPPFIEVRMPTLDDGHGWCGQALAKMYGKTLDLAVLPKKLQP

SEQ ID NO: 63834 - protein, 176 aa, Zea mays
  Clone ID: LIB3354-051-C8_FLI.pep
SPKPPTPFLSPSAAAAHAGNKRHGRLHLCVPQQRRRVDRQAALRRDRGFRRYPIRAAAPPRRRRLRGRLCLRRPVVLLHGHPQLRRVPGDRRCCRWWCNDGERRWRRRRCCCIWWCCCRGSQGGEEGRGEGRERRRHGILPVRLELCVSSGSQKWWFGPVAVVNFAVLSVNLKNSW

SEQ ID NO: 63835 - protein, 205 aa, Zea mays
  Clone ID: LIB3354-051-D5_FLI.pep
RRHVQISVGRRPVVGLKLLLEGAKQNRLAIHLQHLVSLPKIFLPHWDSHITIGPPKWQGPEEQDSRWFEPIKWKNFAHVSTAPIEYTETNITDLSGVYIVTGAQLGVWDFGAKSVLHLKLLFSRVPGCTIRRSVWDHSPSSSSIHKADESSSSSSDNAKLLKIIDMTETLKGPQDAPGHWLITGAKLGVEKGRIVVRAKYSLLNY

SEQ ID NO: 63836 - protein, 480 aa, Zea mays
  Clone ID: LIB3354-061-A12_FLI.pep
PEKSSTREMWYLCVFYHRLLDYRRPEVESLAELFAGPGARESVEWRMPENHHVDSPFHLVRLPGDERLAAQVANRSLLVKGIYELWGYGTTYEELEKSVREYPDERKLPFLVPESSFKIVIDSFGKVISSQEQNEIIQSLTYIPFKGRVNLKKPDHRFFVMETDDYGSNNGLPPVVKRSIFFGREVGAADRHLLPTYQLKSRKYIGPTAMDAEMAFLMANQGLASPGKLVYDPFVGTGSILVAAAHFGAMTMGADIDIRVVRDGRGPDCNVWSNFEQYKLPEPLCLLRADNNLPPWRPGLKEMFDAIICDPPYGVRAGGRKSGGRKLIKGVKGPYTVPDEKRDNHIPSTAPYSLAECVHDLLHLAARMVVMGGRLVFFYPVLRGEDGTANPQFPEHPCFKLITSSEQILSFRYSRVLLTMVKVAPYTEEIEKLAAERHREFRENHQKWMEEGNLHSAVFEPAQDGKPDRDSKPKYRGKYV

SEQ ID NO: 63837 - protein, 182 aa, Zea mays
  Clone ID: LIB3354-066-C9_FLI.pep
PDMFCCFFLQALPNQGTVDYPSFKLVIVGDGGTGKTTFVKRHLTGEFEKKYEPTIGVEVHPLDFTTNCGKIRFYCWDTAGQEKFGGLRDGYYIHGQCAIIMFDVTSRLTYKNVPTWHRDLCRVCENIPIVLCGNKVDVKNRQVKAKQVTFHRKKNLQYYEISAKSNYNFEKPFLYLARKLAG

SEQ ID NO: 63838 - protein, 249 aa, Zea mays
  Clone ID: LIB3354-092-A6_FLI.pep
CESPTSVLLDLLKTHSIHWYFTSALPRSMIVAYPLCMVGALLDRRIVPYMFPVFLFVVLYSKLPHKELRFIIGSIPMFNVSASLTASRLYNNRKKAGWNLLFILMLGAFLVSLGYSTVTFMASYNNYPGGYALKALHEADSSVKEKMVHIDAFTAMSGVSRFCENEYPWRYSKEEEIPIEEFEKRNFTYLLNEHRSIGGYQCLFAVDGFSRVKLTPQIPPLSLVKEPKVFAHGNTRDPDILSLSWPGCP

SEQ ID NO: 63839 - protein, 190 aa, Zea mays
  Clone ID: LIB3354-107-A1_FLI.pep
PVEPIFSELLEQIDRDVKRTHPDISFFSSKSNQESLRRILIIFSKLNPSIRYVQGMNEVLAPLFYVFKNDPDPSNSASAEADAYFCFVELLSGFRDNYCKHLDNSSVGIRSTLSKLSQLLKRHDEELWRHMEVTTKVYPQYYAFRWITLLLTMEFSFNVCIHIWDAILGDPEGPSVHYHHWNKFVDILQC

SEQ ID NO: 63840 - protein, 238 aa, Zea mays; identical to SEQ ID NO: 63690
  Clone ID: LIB143-020-G2_FLI.pep

SEQ ID NO: 63841 - protein, 494 aa, Zea mays
  Clone ID: LIB143-024-F10_FLI.pep
AMAARAKAAAVDDHDPMPPPLPLPWPRPAPLLVMLSLLATASYLALTRFPAALLPIAPRSRPHDAPAHAPGDSCAGFYAGAGPAREVWASVEEFGAVGDGATLNTAAFRRAVAELGARAVGGGGARLDVPPGRWLTGSFNLTSRFTLFLHRGAVILGSQDPEEWPLITPLPSYGRGRERLGPRHISLIHGEGLNDVVITGSNGTIDGQGHMWWELWRNRTLNHTRGHLIELVNSTNVLISSVTLSNSPFWTVHPVYCSNVVMKDLTILAPLDAPNTDGIDPDSSSEVCIEDCYIESGDDLVAVKSGWDQYGISFGKPSTNIVIQRVSGTTPTCSGVGFGSEMSGGISNVLVRDLHVWNSAQAVRLKTDVGRGGYITNITIASVAMEKVKVPIRFSRGADDHPDDRYDPAALPRISNVLVSDVVGVHLQRAPMLEAVPGAVYEGICFRNFSFRGIRRQQDSRWHCESVYGEAHDVFPAPCEEFRRDGSSSWCGLL

SEQ ID NO: 63842 - protein, 323 aa, Zea mays; identical to SEQ ID NO: 62831
  Clone ID: LIB143-039-H1_FLI.pep

SEQ ID NO: 63843 - protein, 410 aa, Zea mays
  Clone ID: LIB143-049-D5_FLI.pep
FPLFPHSVVSPPPPPECVIADSPGMAAPPGGAGIVWQTPANPPESHDYIIRNGRRYVRPYYFEFISHVKNRWAGKTIVDLFTDEFKGRSRDYYVHAVKCGRLQVDGQMVHTDYIVKSSQKISHFLHRHEPPVLAGDISILKNEVDVVTICKPASVPVHPCGQYRKNTVVGILQAEHGLTPLFPVHRLDRLVSGLLIFAKNADRAECFRQQIEAGLLQKEYVAKVVGVFPDGEQTVDANVNFNAREGRSTVEISGGAGEEPNGKQALTRFQRICTDGTHSIVLCKPVTGRTHQIRVHLKQAGYPIANDELYLSGNFCPRSTKGTNASKKIAPSDPDSSAADHGSKDAGTDVEFDIDPMCTNCPNLAPVGYDRDEEGLWLHCVRYTGPDWSYECPYPDWAFLGSVSTKKMKS

SEQ ID NO: 63844 - protein, 185 aa, Zea mays
  Clone ID: LIB143-054-H1_FLI.pep
SLPRSRSRHCRSFEAAAAPMAAEAKTPSLAEEYSLPPQEVPVEKAAEEKPSSGTETESAPSTNDETPSSVEDKNETSEVQDAAEKSDAEETNTAAEEASETAEEEEAEKPEIKIETAPADFRFPTTNQTRHCFTRYVEYHRCVAAKGEDAPECDKFAKYYRSLCPGEWVERWNEQRENGTFPGPL

SEQ ID NO: 63845 - protein, 386 aa, Zea mays
  Clone ID: LIB143-060-F4_FLI.pep
ACTTSSSFALLALASPLHSLTGVRLVLAQLAIMAPHIVVNKTVITFTAVALTILAVTTMMAEARDLSSTSTGGYGEEAMKVRHQQWMAEHGRTYRDEAEKAHRFQVFKANADFVDASNAAGDDKKSYRLELNEFADMTNDEFMAMYTGLRPVPAGAKKMAGFKYGNVTLSDADDDQQTVDWRQKGAVTGIKNQGQCGCCWAFAAVAAVEGIHQITTGNLVSLSEQQVLDCDTDGNNGCNGGYIDNAFQYIVGNGGLGTEDAYPYTAAQAMCQSVQPVAAISGYQDVPSGDEAALAAAVANQPVSVAIDAHNFQLYGGGVMTAASCSTPPNLNHAVTAVGYGTAEDGTPYWLLKNQWGQNWGEGGYLRLERGANACGVAQQASYPVA

SEQ ID NO: 63846 - protein, 296 aa, Zea mays
  Clone ID: LIB143-061-H5_FLI.pep
FCCLPLIGIDDQTEQLLQSRLRPPSALNPFGILERGGACLDCTASASVHILWAFAILSSLLTIQFWFKERLSEVSWIMGAFCSCLQPDYSDHHGNQASSAFRNCMCLRCFTQQLINAYTVLFRAGAVHSVSPAIEATPVDSTESSFDTYRSPPRPLPYDDPRFSPPARDWLRSENPSHSPEESEPLRANEDDEEMETPSIIQKASKTNYNTKMKICSSTYGDKVPPREHGNYFSYFSPSAEDEDVCPTCLEDYDSENPRIVMQCSHHFHLGCIYEWMERSEACPVCGKKMEFDETT

SEQ ID NO: 63847 - protein, 325 aa, Zea mays
  Clone ID: LIB148-005-B3_FLI.pep
PSQSMSSSAGSPRVTERKADRDSHEHHDDDDDGEKGSGFFDKVKDFIQDVGEKIEEVVGFGKPTADVTGVHIPHISLEKAELVVDVLITNPNPVPIPLVDIEYLIESEGRKLVSGTIPDAGTIHAHGSETVTIPFLLVYDDIRSTYREIEPGSVIPYKVRVVLHVDIPVVGRVSLPLEKDGEIPVPYRPDVSVDRIKFEQFSFEESTATLHLSLDNRNAFDLGLNSMDYEVWLGGVSIASAELREATDIKRREVTTMNLPISFRPKDFGSAMWDMIRGKGTGYTIKGHIDVDTPFGHMKIPISKEGGTTRLKKGDDDDDDDDDKD

SEQ ID NO: 63848 - protein, 205 aa, Zea mays
  Clone ID: LIB148-019-G2_FLI.pep
VSDTTMQAMRPAAEGEAQEQAVRAEADEVKREVAKAHDEEEAVPEEKDVAVVGEEVEAEAETETETEGEAEAEVEAEVEVEVEAEAGASSAKKNRIQVSTNKKPLYFYVNLAKRYMQNYDEVELSALGMAIGTVVTVAEILKNNGLATEKKILTSTIGTKDEAKGRLVRKAKIEILLCKSENFNSIMSSKKSERPKPPAEEEIKV

SEQ ID NO: 63849 - protein, 587 aa, Zea mays
  Clone ID: LIB148-022-A5_FLI.pep
FRFDFIPFLLSIHPPNPIKLVMSKGAIIGASTVLVVAVVAAVCVVSFKGNSGKGDGDENLSMSVKSVKAFCQPADYKETCEAELSKAAGNASSPSDLAKVIFKVTTDKIHKAISESATLEELKNDPRTSGALHDCKEMLGYAIDELKSSFDKLGGFEMTNFNKAVDDLKTWLSAALTYQDTCLDGFANATTTEASAKMQKALNASQELTEDILAVVDQFSDTLGGLSIGRRLLLTPSWVSEPADPARQRLLAADSPAGSPDFKPNVTVAADGSGDVKTITEALEKVPVKNADLYVVYVKAGTYKEYVTVGRPQTNVAFIGDGAEKTIITGNKNFKMNLTTKDTATMQAIGNGFFMRDIRVENTAGPENHQAVALRVQSDLAVFYQCTFDGYQDTLYTHAQRQFFRDCRVTGTIDFIFGNSQVVLQNCLIQPRKPMENQANIITAQGRRDKRSVGGTVLHNCTIEPHPDFKEEAGGKIRTYLARPWKEYSRTIYIQNDIGGFIDPKGWLEWNGDFGLETLFYAEVDNRGDGADMSKRAKWGGIKTVTYEEAQKEFTVETFIQGQQFIPKFGVPFIPGLLPQEQKGRTH

SEQ ID NO: 63850 - protein, 405 aa, Zea mays
  Clone ID: LIB148-028-E5_FLI.pep
EPQKCKWTKKARKKKKTKNEQNGLAALVEEISLSNSPKHRAAAGEILRIGNHNIPSRVFTFRELVDATNSFCPENLLGEGGFGRVYKGCIPDTMEVIAVKQLDKDGLQGNREFLVEVLMLSLLHHPNLVTLVGYSTDCDQRILVYEYMSLGSLQDHLLDLSPKSQPLSWHTRMKIAVGAARGIEYLHEVANPPVIYRDLKASNILLDASFNAKLSDFGLAKLGPSGDNTHVSTRVMGTYGYCAPEYAMTGKLTKTSDIYSFGVVLLELITGRRAIDTTKPTREQILVHWAAPFFRDKRKFVKMADPLLDMKFPLKGLYQALAISSMCLQEEASSRPLISDVVTALTFLADPNYDPPDDIKDPLPITVPNLDMETTGQNGTEGGKEQLQQNEGESRHSTKNEEEGS

SEQ ID NO: 63851 - protein, 366 aa, Zea mays
  Clone ID: LIB148-046-G2_FLI.pep
PGTTFGGINHTAQAQRSTMTMEGAVSDNTKGLALAVASSAFIGASFILKKIGLLRAAKCGDRAGGGGHTYLSEPLWWAGMTTMLLGEVANFIAYIFAPAVLVTPLGALSIIVSSVLAHFVLKERLEKLGVLGCVSCIVGSVVVVMHAPEEHMPNSVKEIWNLATQPGFLAYVVTALLLVGALVLFFEPRYGQTNILIYLGICSSMGSLTVVSIKAIGVAIKLTLDGVNQAAYPYTWLFLMVAIVCGVSQINYLNKALDTFNLAIVSPIYYVMFTTLTIVASGIMFKDWAGQSLSSIASESCGLITILSGTILLHTAEEGANNSAALLPWPLDKGSISWCINLSSDNLLKNVEEDYFTALQSSPAPV

SEQ ID NO: 63852 - protein, 314 aa, Zea mays
  Clone ID: LIB189-002-A1_FLI.pep
RLQPPLEEAPAHLLPQLLVRLPHVEARLGHVHLAVQDVVMPEEAVGDAHEDVLAVLRVALDAHGAVPQAEHLHAGLIRPRQHLGAGGQLPHLVVVELDHRHVHRQLQRREQPRRRSRRVDAAHPDVPALGRPPGAPAQRPAQDLVAEADAEDALAGGVEAADEADEVQDPGLVAVRVGAAPGDDEPVEAGRLGVGGELPADGAVHAPALAVLLQQRAEDGEVAAVLLPHVLRVLAALQHRVRARCRGGAGLRQGRGLSGRRGVLERPHSHGWRQRGAGEGLRPANGDGGDRRGSGVRCCVLGCLACGWGGVGWE

SEQ ID NO: 63853 - protein, 298 aa, Zea mays
  Clone ID: LIB189-003-G1_FLI.pep
FGSPAPLIIISYLSSHSRPKKKKKNCTIYYNPARARVTSLPLARVAGVAPFLRDVGDLHPGVVDAAGLPPARQHLRLRPHPLAVVATGHHQPELQRPRRRLRRAPRRPVVPRHEPPVGRPHGGDVDGDDVGLPALVQEPDGQVAWRPALLLHAYRQVAVLGVLAGYPLVLDVDDAPVPEARGLAVAGAGHSRVRRGAQHQGRAVRRPRLVRHHHLGAGGAAQLAVPAPHLEAGAAADAAPVQLGAGCGEQAAVEGRRQGAVPARPGVEGERGGLVVGGLGPAHAAVAAVSRRRGRGED

SEQ ID NO: 63854 - protein, 403 aa, Zea mays
  Clone ID: LIB189-003-G10_FLI.pep
PYPSRTAGCSAITRAVEPSRRGECLQSQVQRRMESGLLDTAAAAGLCPVAAGRRRVGSTGTARCFLSCSCASRDCRVSASYSHSISRMLSGVRSAARKRLFRSDPAELLGVANWSETGGGGAGGHQHWWTALENNFVLEATDDEYGGVVVDADRLPADRAAFARSLAASLSYWKSVGKKGVWLKLPVDLAEFVPLAVKEGFKYHHAEEAYLMMTYWIPDEPNMLPANASHQVGVGGFVINDQMEVLVVQEKYRGSSLDGVWKLPTGFILASEEIYTGASREVKEETGVDTEFVDVVAFRHAHNVAFHKSDLFFICMLRPVSSEIKIDETEIQAAKWMALEEFVKQPFIQEDHMFQKIMDICIQRLRKCYCGLTPHHVVSKFDDRTSTLYYNVAEPEDVNCSAA

SEQ ID NO: 63855 - protein, 737 aa, Zea mays
  Clone ID: LIB189-017-A10_FLI.pep
NPSDPVQISASGSLRGAAMAPPALDSLPAPLRSLRLKTKQQELLLRVSALALIYVLAFAVRLFSVLRYESMIHEFDPYFNYRTTLFLTENGFSEFWNWFDFESWYPLGRVVGGTLYPGLMVTAALLHRLLRALYLTVHIREVCVLTAPFFAANTTLVAYAFGREIWDSGAGLVAAALIAIVPGYISRSVAGSYDNEGVAIFALLLTFYLFVRAVNTGSLAWALASAFGYFYMVSAWGGYVFIINLVPLYVLVLLVTGRYSQRLYVAYNCMYVLGMLLAMQIRFVGFQHVQSGEHMAAMGVFFLLQVFFFLDWVKYLLNDARLFKSFLRITLTCVITIGTLALGLGTASGYISPWTGRFYSLLDPTYAKDHIPIIASVSEHQPTAWSSFMFDFHILLFLFPAGLYFCFKRLSDATIFIVMYGLTSMYFAGVMVRLILVAAPAVCLISAIAASATIKNLTTLIRTKSKSPQTTGKTTGSKAGAKGAVDQSLPFQHNAAIALLLGAFYLLSRYAIHCTWVTSEAYSSPSIVLAARGHNGGRVIFDDYREAYYWLRQNTPPDAKIMSWWDYGYQITAMGNRTVIVDNNTWNNTHIATVGRAMSSYEDEAYEIMQSLDVNYVLVVFGGVTGYSSDDINKFLWMVRIGGGVFPVIKEPDYLVNGEYRIDKGAAPKMLNCLMYKLCYYRFGELTTEYGKPPGYDRVRGVEIGNKDIKLEYLEEAFTTSNWIVRIYKVKPPKNRS

SEQ ID NO: 63856 - protein, 557 aa, Zea mays
  Clone ID: LIB189-025-G10_FLI.pep
EGHDAFPFLRPLAEPRREHLAADRQRAERGLPRVLVAAQGAEAHHAGAAQLPGVRVGRGQALRVVLRGGGAVPAAVARGLRRRRVRPRRLRGPVPVPGQRRPPVLAPVPAHLPGRERHLLDQHRLLPPLHAQLRLQQPRRGEPRHQLPGPQRQGVHQPGGLGTRPGGQRLQGQDLPPPQRRRADARRRRGGAVAQGGPAQERGEHGVGRGIPRNVRHHARHGSLRRGRQHRVHVRQRGAVVEGARDQPRRAAGHPRTHPAGAQGAREPQQDTGHQAGEQDPRSRRRRRRGRWRRRRRRRGRCRPREQGGRGRRRRLGETTGGDRRPPAAEEAGLLALLLQLHVQWHPGPGVPEQPWTDSRVATARADFHAGLAVVLVWILRSPAPVLLGLLLRQEWVLHLKDGIHGVADGAHGGRLLPAAELERLLPVPEHGRDRHVHGRHRVGGRVGDERAVRGRELRREPQRGGEQHPRGLPVLRLPRGLPVPARGGGQQQPPVHRRRLLQGHVRGVGRHVRRRHAALRRPLRARSSSPRSSAGRSNKDGTSLARLAIAASCLPS

SEQ ID NO: 63857 - protein, 375 aa, Zea mays
  Clone ID: LIB3059-011-G2_FLI.pep
QAWKTASYMACNRGVKEQEDPSAASAAPAPAAVARARAARPPRPRSRKGLGVRHLLKPCRFLAAVQRANARVREAGEATLVAALAAAQKESERENEVVADVCGGWKSEDGSLNCGYSSIRGRRVNMEDFYDIKSSRVDDKQINFFGVFDGHGGTHAAGYLKQHLFENLLKHPAFIGDTKSAMSQSYKKTDADFLDTEGNIHVGVGSTASTAVLIGNHLYVANVGDSRAVLSKAGKAIALSDDHKPNRSDEQKRIEDAGGVVVWSGTWRVGGILAMSRAFGNRLLKQFVVADPEIQDLEIDGDTEFLILASDGLWDVVPNEHAVAFVKDEDSPEAAARKLTEIAFRRGSTDNITCIVVEFCHDKMVDGSPPSTNKS

SEQ ID NO: 63858 - protein, 360 aa, Zea mays
  Clone ID: LIB3059-017-D12_FLI.pep
TERERENLRLRLVAAEASVLASLGSNITMSSNCGEDEKELVCVTGAGGFIGSWVVNELLQRGYRVRGTARDPADSKNAHLLALEGAKERLTLCRADVLDRASLRAAFAGCHGVFHVASPVSNDPELVPVAVEGTRNVINAAADEGARRVVFTSSYGAVHMDPSRSPDAVLDETCWSDYDFCKRTDNLYCCAKMMAEVTAAAEAGARGLQLAVVLPCMTTGPMLQQTLNFSTNHVARYLMGTKRSIPNAVAAYVDVRDVARAHVLAYERPGARGRYLCIGTVLHRADLVDMLRDLFPQYPVTAKCEEDGKPMAKPFKFSNQRLRDLGLEFTPLRKSLYETVLCLQQKGHLPVIQPQQRAYL

SEQ ID NO: 63859 - protein, 327 aa, Zea mays
  Clone ID: LIB3060-003-G8_FLI.pep
STEHPASPNKGISLPFLSRVAMFGLRARAAAQLQRPTPSPSSASSASFSLARLGCASPLAALAPLASAPPSPSARETQPTSLSARWPAAPMRPWGTRGHSRPTTRVLCTAAGSVQREGKELLVQHLLVGEKDVRLLVDLEKNIIAEGADLSDLAVEHSLCPSKENGGMLGWVRRGQMVPEFEEAAFSAPLNKVVRCKTKFGWHLVQVLAERDQCVLQDIDPEELHSKLQDPSFLEEAQLIDVREPDEVEKASLPGFKVLPLRQFGTWGPVMTDEFNPQKDTYVLCHHGMRSMQVAKWLQSQGFKKVYNVAGGIHAYAVKADSSIPTY

SEQ ID NO: 63860 - protein, 301 aa, Zea mays
  Clone ID: LIB3060-005-B11_FLI.pep
KLPRSNEHEPWQNEAEVVRCEPSMANAPRILALGLLLALLCAAAGPAAAQNCGCQPNFCCSKFGYCGTTDDYCGDGCQSGPCRSGGGGGGGGGGGSGGANVANVVSDAFFNGIKNQAGSGCEGKNFYTRSAFLSAVNAYPGFAHGGTEVEGKREIAAFFAHVTHETGHFCYISEINKSNAYCDASNRQWPCAAGQKYYGRGPLQISWNYNYGPAGRDIGFNGLADPNRVAQDAVIAFKTALWFWMNNVHRLMPQGFGATIRAINGALECNGNNPAQMNARVGYYKQYCQQLRVDPGPNLTC

SEQ ID NO: 63861 - protein, 404 aa, Zea mays
  Clone ID: LIB3060-017-D1_FLI.pep
QSGACCARLRSTPYLSPIPPAVPSSTTSRGTPAEPPLELAPEPPKLCQISPNPAGRTPQHIAKTNRAGRHKPQPVAMDLASSDLAALGAAELVRVSASIPRAAPRTFALLTACLVFPLSFAVLAHSLFTHPILLRIQGATHSELAQWLRLFAYQFLYLIVLFTFSLLSTAAAVFTVASLYANKPASISSSLTALPPILPRLLRTFLWVSLLMLAYHLVFALTVLLLIVVFIPNASESESAPPSLAFVLFLVVVVFVFLGIHVYISALWHLASVISVLEPLCGLAAMAKSKDLLQGRTGTAATLVVSYFAVCGVTSVLFRAAVVKGRAEEGSFGLALPGRLLVGAVLLCVLVCVNLLGLLVQSVFYYACKAFHNQQIDRTALYEHLGGYLGEYVPLKSNIQMENL

SEQ ID NO: 63862 - protein, 139 aa, Zea mays
  Clone ID: LIB3060-036-H6_FLI.pep
IQGWLDLASARHSMGTSRVSSTLFDHKEQSAATKLQVVDHDGLKSSESIPHFALSKWSLQEECHSTYDLSERDFTEPKMRHRGSVTTPEKGNHESANTTTLSTGADASNRVSLVQKFLSSKALECQIVKYCLEGAKIYD

SEQ ID NO: 63863 - protein, 453 aa, Zea mays
  Clone ID: LIB3060-045-D3_FLI.pep
LRPRPPGVALAMRTSTATCAILPPPTCSSRSLPLRSFIGLRWSAPRFQVRERAGASVAVVNGKPGCSFRLGVPTLNVCQSRQRSVVIRNEHAQNADLPRKYSKREKKPFPIPVLELRRRAKERMKAAQGKPKQPMPPPKNGMLVRRLIPVAYKVYNARILLINNLKRLMKVVPVKGCKYCSEIHVGSVGHPFRTCRGMSSDQRRGEHDWGSTLVEAVFLPVEAYHLEDRLGNRIPHDQRFTVPRIPALVELCIQAGVDLPEYPTKRRRKPIIKIGRKEFVDANEDDLPEPEPDRFRQPLLEELRYDEIIAPSSPEETVALAEETLEAWEAVRDGALKLMKGYAVRVCGYCPEVHVGPTGHKARNCGAFKHQQRNGQHGWQAAVLDDLIPPRYVWHMPESGEELQRELKTFYGQAPAVVEMCIQGGAKVPEKYKATMRLDIGIPSSLKEAEMVV

SEQ ID NO: 63864 - protein, 1005 aa, Zea mays
  Clone ID: LIB3060-046-A6_FLI.pep
WRSAGIEEEEGKRRGRKSSGNPRTVRMTMVERRYGPCTSHGSFLLRLLLLLPFFFLCFIDVPPAGAAATTQSPPLDNTQKAIMNDVASLVNSGSANTRWNTAESNPCNWEGITCTSNTSSSAVTRIALSNYGLANSSIFAPLCRLGTLRYLDLSRNFLADLSAPFFASSSSSCSMKEGLQSLNLSTNRLASPLGELAGFPQLQVLDLSFNSFASRNLSAELGYFPKLRSFNTSSNDLNGDVPTSMVGSLEELVLSSNNLSGPIPLRLFEYENLTLLDLSQNNLTGAIPDNFTSLSKLETLLLSGNKLIGEIPSSLSNVTTLSRFAANQNGLTGPIHSWITKHIGMLDLSYNKLNGTIPSDFLSHQGLQSVDLTSNLLNGAIPATLSQSLYRLRLGGNQLGENIPGSVCDTMGLTYLELDDNQLTGVIPSELSKCKNLTLLNLASNRLHGLVPSITGELDKLVVLKLQNNTLTGQVPSTFSELKSLITLNLSKNSLSGAIPSGIFELPKLSNLYLQGNQFSGFIPFSISSSKDLIELNLGDNALTGNIPTMPTTVTTSLLNLSHNLLDGSIPSNINSLGELEILDLSHNALSGAVPSSLWSLQSLTLLDLSYNNLSGSIPRFGPSQTVDIVGNPGLVIVNGTGNNNDTPTTGKKKRHYLVVIIFTIAGTLVGLCVLALIIVMSLSKRVYRVEDEGLPAGESVPQIISGRLITMNSIHTSAVDFVKAIEAVSNHQNIFLKTRFCTYYKAVMPNGSTYSVKKLNSSDKIFQIGSQEKFSHEIEVLGKLTNSNVMVPLAYILTADCAYLIYEHAYNGTVSDLLHGGKSEVIDWPSRYSVALGVAQGLTFLHGCTQPVLLLDLSTRTIHLKSKNEPQIGDIELYKIIDPSRSTGSFSTIAGTVGYIPPEYAYTMRLTMAGNVYSFGVILLELLTGKKSVSNGTELAKWALSLSGRPDEREQILDTRVSGTSIAVHSQMLSVLNIALSCVAFSPDARPKMRNVLRMLFNAK

SEQ ID NO: 63865 - protein, 372 aa, Zea mays
  Clone ID: LIB3060-053-B10_FLI.pep
GRIRSDALLAYERLHRLDERTIVGELGEEEERVNGVRELHHPYLLPPPPQHVGVPPLPLLQRVEATDHHHHRRKAVRQVGVVVCHVRGGVVPIGAFRKERPPHPVRASHGHHRHVPIQPDLSFRPLLAAKVRLHQDGAGEADGDGTRRGGGRRPALRHVVGDVGAGAVPGEEAAGEVHGDVDAVGEARGGEVSKHGDAVLVRGGAAVLGCEAVVDGHDDGAQLAAEPAAHGVVDVRGRREQREGAAVEVDHDRERGRGRLRRRPEHARPQAARRVHVHVHVGGPDALPVRARAGGGTKVEEVEDGAVDGAVATHRETGNDIEAEEQEPHLPRQGQSARCACCCFPGACFHYWQWKAHNNVTLTAHGNNELSP

SEQ ID NO: 63866 - protein, 418 aa, Zea mays
  Clone ID: LIB3060-053-F8_FLI.pep
PHRLQGTKEEMTSPKRAAGREGCGCLAAVARGLRGACFRPAVTADGDGGGSAKGSHVHDAAETRYLNASNRELGDHFQTKRDGENGVDASIEKRTPKLLQFTFQELKSATLNFRPDSILGEGGFGYVFKGWIEPNSTAPAKPGTGVTVAVKSLKPDALQGHREWVAEVDFLGQLHHKHLVKLIGYCIEDDQRLLVYEFMARGSLENHLFRRALPLPWSNRMKIALGAAKGLAFLHGGPKPVIYRDFKTSNVLLDVEYNAKLSDFGLAKAGPQGDKTHVSTRVVGTYGYAAPEYVMTGHLTSKSDVYSFGVVLLEMLTGRRSMDKKRPTGEQNLVAWARPYLNDRRRLYQLVDPRLGLNYSVKGVQKVAQICHYCLTRDSKSRPSMDEVVKQLTPLQDLNDMASASPRPRSTQRGKVHR

SEQ ID NO: 63867 - protein, 356 aa, Zea mays
  Clone ID: LIB3060-058-E11_FLI.pep
PQPAAQGVARSARGGEWVQTPEGGEGRRMSEEAARAGVEESIGQRRRRDGRGEAAAAGRVWEFERDLVAGALMGGAVHTVVAPIERVKLLLQTQDGNAALLGRARKFRGFADCVARTVRDEGVLSLWRGNGTAVIRYYPSVALNFSLKDLYRSILKDAGTSSDNKFTSIALSNFFAGAAAGCTTLVLIYPLDIAHTRLAADIGRTDTRQFRGIRHFIQTIYKKNGIRGIYRGLPASLHGMVVHRGLYFGGFDTAKDVLVPLESPLWQRWVAAQAVTSMAGLISYPLDTVRRRMMMQSGMEVQMYSSTLDCWRKIYRLEGIRSFYRGALSNMFRSTGAAAILVLYDEVKKFMDRGRL

SEQ ID NO: 63868 - protein, 420 aa, Zea mays
  Clone ID: LIB3060-058-G11_FLI.pep
GLRPRAKRSEHRTRGMAMARAELRTVTVRSSPLPRCVLSRLLPLLLSVSAIGAASAAPLKFGINYGQIANNLPQPTQVSGLLQSLNVNRVKLYDADPIVLTAFAGTGVEFIIGNDDLYNLTDARKARAWVAQHVQPFLPSTRITCITVGNEVLSGKDTTAMQSLLPAMQTVYQAVVALGLGGQVNVSTAHSVNILASSYPPSSGAFREELGQYIQPILNFHAEVGSPFLINAYPFFAYKASPGSVSLPYVLFEPNPGVVDPNTNLTYDNMLYAQIDAVYAAMEAMGHSDLTVRISETGWPSRGDEDEVGATVANAAAYNGNLMKRIAMGQGTPLKPHVPVDVFVFALFNEDMKPGATSERNYGLFYPNGTPVYSLGFNGASFSPSPTYSSSSKLVITFQMAVVVLLASFSILHTAVPCHA

SEQ ID NO: 63869 - protein, 375 aa, Zea mays
  Clone ID: LIB3060-063-A5_FLI.pep
AALRTAGSGRRRGAGSQQTGLNGGRFLMMQRRELVTKAGIPLAVSCSMATSPASANGAAQGLEILPFKADGYNFWTWRGRRIHYVEQGAGRPVVLIHGFGASAFHWRYNIPELAKKYKVYAIDLLGFGWSEKALVDYEATIWMEQVSDFLREIVKEPAVLVGNSLGGFTTLFTATEVPELVRGVVLLNSAGQFADPNKPAAAPAEEEEGGSALSRYIVQPLKEAFQRVVLGLLFWQSKQPARVEKVLKSVYIDPSNVDDYLVGSITAPAADPNAGEVYYRLMSRFMSNQSRYTLDRLLGKMSCPLLLLWGDLDPWVGPAKAARIQEFYADTAVVHLQAGHCPHDEAPEQANRALLEWLAALDARAKSAEPSLQTV

SEQ ID NO: 63870 - protein, 347 aa, Zea mays; identical to SEQ ID NO: 42318
  Clone ID: LIB3060-070-B12_FLI.pep

SEQ ID NO: 63871 - protein, 353 aa, Zea mays
  Clone ID: LIB3060-071-A2_FLI.pep
TLESLELSVPDPLDLDILGRLGPEVGVGRLHALEDADDLAGLRVALGDAQRDVAGGGGGVLDVLLLELLLVTSAPGGERDGVVVAGGAAAALGVEEGGAAVAGHEEGPAEALGLAGGDELLDGEEERHALAPRELHGDGGVVDAVLLLELERAVGADLERALDLVQRVREAGHELGLLELGRGVLGDALRLDGEGRRLQAQLLHLVLAGLERERLHAAVDGRALVRRARALHLHVRFALDLVVGQPLGRALRARARDEERRGGEREAGELRGVDAPAGDVLQGARDPGGAGVDAERPAGELRRRAGRQRGKGRPAADLGRLHQGGRGLERGCHRRRGGDAFWLLPFSSGGCVS

SEQ ID NO: 63872 - protein, 577 aa, Zea mays
  Clone ID: LIB3060-071-E12_FLI.pep
HLADGGHTPSRFSNTAAAVLPTSPRPGRWVSPYPSPSRLHLLLHCAPRPRPRRAPCSDPSHGACRTTAPSKRWAASGACADHALVGLICKILDRDGSPVSCLMKIGKGRKKMRNKQRKSSALGSDAGCGSSLSCIVWSLVGFGLVCFIFLKHQADSGQTHVYFSPLHATRELEDIEEDHFRLPPPHKVNPRAVKRRGPRKQPKVIDDYLEESSAVHALFFPDQMTAVDPTKGGNDSMYFYPGRVWLDTDGNTIQAHGGGIMYDHKTARFYWYGENKDGPTYQARPKGTQRVDIIGVSCYSSKDLWSWTHEGIVLRGEPSNVIHDLYKSKVLERPKVIYNDRTEKYIMWMHIDDANYTKASVGVAVSSSPTGPFTYLYSFRPHGCESRDMTVFKDDDGMAYLFYSSRDNTELHVSPLTEDYLQITAAMKRILIRRHREAPAVFKHQGTYYMITSGCSGWAPNRALAHAAESIMGPWETLGNPCVGGNRFYRLTTFLSQSTFVLPLPGLSGAFIFMADRWSPSNLRDSRYVWLPLFVGGLADEPLDYSFGFPLWSRVSIYWHKKWRLPEDWKIANTANT

SEQ ID NO: 63873 - protein, 746 aa, Zea mays
  Clone ID: LIB3060-072-G6_FLI.pep
FVGQSSPEAQMSEEYNMDVALKAKNVAETKFHARDIRGARKYALKAQNLCPTLEGILQMVSTLEVHLAAESKIDGESDWYRILCLGAFADEEEVRKQYRKLALLLHPDKNKSVGAEEAFKLISEAWSVLSDTSRKVVYDEKRRNHSVVNVTNGIYTYDKKANKRARKNAAAAAAAAAAAAAAEATTRPVGIDTFWTSCNRCRMQYEYLRIYLNHNLLCPNCHNAFLAVETGFPCNGSSSSFSWSTKQQPQQNHNSTKHSYGSTSRTSSIPGTGNGGYQQDNTYDSYNNQGFQWNQYSKTTTAAVTNAYSTQALEKQRRKHDESYSYNYSESGNTYVHEKAASRRGRFSKRRRHNYDAYTTVDYGGDNKETVAATASTEPTAVFTDVGRVNGTSVERFKSAVSGRRANILGEITQIDTRNLLLEKAKATVCEKLHELNITPSSRAADRRGSEGKLYPCDNNIKVNGVLSDKPGKGVKLCNSRSMEIQVPATDDKNPEQRRVPVSIDVPDPDFHDFDKDRTEKAFDTDQVWATYDCEDGMPRLYVMVQKVLSTRPFRIRMSFLNSKSNIELAPINWVASGFQKTCGDFRVGRYQVSETVNIFSHRVRWTKGPRGIIRIVPQKGDTWALYRNWSPDWNELTPDDVIYKYEIVEVADDFTEERGLTVIPLLKVAGFKAVFHRHVDPEEVRRIPKEELFRFSHRVPSRLLTGEEGSNAPKGCHELDPAATPVDLLKVITEHKEDAVAQSPK

SEQ ID NO: 63874 - protein, 488 aa, Zea mays
  Clone ID: LIB3060-073-A12_FLI.pep
AVVAGRGRRSIPRGGLGLQSTNLFSISSSGTIWRRSPCYCLGLGLSRFGGSDTRHSPPIPLPLPKPVLQGSFAEAVFDRRERKRERGREVGMDAAAAAAAQMERHSSAAAQMERHSSAAAFVEGGVQDGCDDTCSICLETFSDSDPSAVTSCKHEFHLQCILEWCQRSSQCPMCWQAISMKDPTSQELLEAVEEERNDVQENHARTTTVFRHPLLGDFEVPVDADDAEIEERIMQHLAAAAAIRRSHRHARREGRRSSRAAAAHGHGHPQPQTQVLFFPSAGEATPGGSGSPSPHPRQEHAASSVVSPPPLPAVASAEGTDADSTASVGGAVGPDDSVSRSQSSPVNHDEAGPSADAQSFSDTIKSRLQSVSTKYKDSITKSTRGWKERWFAQSSAMSNLGSEMRREVGAGIAAVSRMIEKQLETRPDGSGTAPSPATASSPAHAHPGSDASSQGQGAAVPATPAAALNNATPAAAAALNDASSSSTA

SEQ ID NO: 63875 - protein, 361 aa, Zea mays
  Clone ID: LIB3060-074-B5_FLI.pep
SFLLLCSLDIAIAIDSLLLHYLNFCRLHLEILPLQLHLDQEQLNFLINFFKNDSCNNDPHSHCENETVDVKNTSNGSNTVVDEALLPFFQKFDVKPLVLHINYIPRQFDPIALGKGNYAELLNILPWKGIDLKLKHVSAMGVYGWSSIGDTVAAEWLEDISKNQVHKLLKGLAPIRSLAAVGSGTRKLVSLPIKSYKKDRKLLKGVQRGTVAFIRSVSIEAVGLGVHLAAGAHDILMKTEHALTTVPPPLASCEAKRTKHNIRANQPESAQQGMKQAYESLTVGFGRTASALIGNPIKVYNRGAGVGSVLATAICGAPAAAVAPVSASARALHYALLGLRNSLDPEHKKESMYKYQGPSQA

SEQ ID NO: 63876 - protein, 1137 aa, Zea mays
  Clone ID: LIB3060-076-B12_FLI.pep
SEGLMTGAREPVAMEIPAEEGPAAARAPPRRIRRRLVEGARGGGAPASVEEIEARLREAELRRQQFREWLACKARKKPRSPSWSSQEEDHGQRLEAKLLAAEQKRLSLLAKAQNRLAKLDELRQAAKNDVEMRFEKEREELETRVESRVRQAEENRMRLLHADMQKRAALKERTARSLVQKAKSESKYMEQVRSAISLKRAAAEKKRLRLLEAEKTKAQARLLRIQKAAMTVCSRRESERRKLKEQLDNKLQRAKRQRAEYLKQRGSPRGSTHADYLKHAYALSRKLARYWRIFVKSRKTTFALAQAYDALGINEKSVKNMPFEKLAMSMESPVVLRSTKALLDRLEKRLVISHSVASSSVENVDHLLKRLGSPPRRRAPPSREGKTRAVVKRPAKSSEASIKLPRYSLRVVLCAYMILAHPSAVLSGQGEREKQLIESAANFIKEFELLIKVILDGPGQSSGVTGQRKFRAQLANLDKAWCSYLYSFVVWKVKDARLLEEDLVRAACKLELSMMQTCKLTADRHSQNNLTHDMKAIQKQVIDDQKLLRDKVQHLSGDAGLERMNSALSDTRSKFFEAKENGSPLTAPVANVSTPLSINSSGKAPLSEVPESSRTNVVGTSSVVRSLFSASSSSVSSSPEKQPTENEKMVNEMLHEDASALAGRSDSASTAEEEFQNKVRETMEKAFWDMVTNSMRGERPDYSQLINLVKEVRDSLHDLAPKEWKEKILENIDLEILSQVLGSGSQDAQYLGQILEYSLDMVRKLSAAAKEDEMKKNHDKLLSELSTNSEVNGDGINSFVIAVIKGLRFILEEIKELKAEVSKARIQMMQQIIKESAGVEYLQKAFADRYGPPETAPASLPLTLQWILTSKNIAEEEWSEHSDCLSVMPAAGQAPALVPVLRSGHGAPVGQPSPSAGDTSGQPECKGEKLDKLIRIGLLQLIGSVEGLQLQSTPESFQINLLRLRAVQSQFQQVIVIATSMLVLRQILMSENSRATPLELENAISELVKALADILDSSPDSGTEEIVQAMVNASASVGSPSEEKVQARMQMITRVFLKSLQPGDVVFKKVSRAVYCAFRGIILGGSGPKGQKLADAALRRIGAIKVVDRVLKAAEVLIKVATVSEKVHGPWYKALIV

SEQ ID NO: 63877 - protein, 648 aa, Zea mays
  Clone ID: LIB3060-076-G6_FLI.pep
PTHPPSAPQAKYAVARVAMPPQFPTARLLLPSHRLLPLLSPLPSASLSPAPRTLRLPPPQLLHRVARRRPLLRGMASAAAPGSHAAAEAPPVDVGGGGAGAPRRLVLEELPWDHSFVRELPGDPRSDTIPREVLHACYSRVSPSAKVDNPKLVAWSDSVADLLDLDHKEFERPDFPQFFSGATPLVGSLPYAQCYGGHQFGVWAGQLGDGRAIALGEVVNSRGERWELQLKGCGKTPYSRFADGLAVLRSSIREFLCSEAMHGLGIPTTRALCLVETGKSVVRDMFYDGNAKEEPGAIVCRVAPSFLRFGSYQIHASRGKEDIEIVRRLADYTIHHHFPHLENMKKSEGLSFETAIGDSPTIDLTSNKYAAWAVEVAERTAYLIARWQGVGFTHGVLNTDNMSVLGLTIDYGPFGFLDAFDPSYTPNTTDLPGKRYCFANQPDVGLWNIAQFTGPLSSAELISQDEANYVMERYGTKFMDEYQSIMTKKLGLTKYNKQLISKLLSNMAVDKVDYTNFFRLLSNVNADPGIPENELLVPLKAALLDIGKERKEAWISWVQTYIEELVESGVPDEERKAAMNSVNPKYILRNYLCQSAIDVAEQGDYEEVRRVLRVMQNPYDEQPGMEKYARLPPAWAYRPGVCMLSCSS

SEQ ID NO: 63878 - protein, 637 aa, Zea mays
  Clone ID: LIB3060-077-D6_FLI.pep
DRQYISRDRSGMVFIDTYTILVHSLLVCVPPRDEQVDAEVSGAEHGQEPEEVVEVRPVDVVGDPAVPPAPRGGARHHGDERGADVVPEREGRHGEPRAEAPHRVGRLVVEELHLADEREHLRRAHHHVLRHLPEDGQRQVRPVPAGARVGVVHAVTRDDAAPRHLQRPRGEHGGREHDEAHTHARQLREPAVVARGAPRQRDHQAVVERHPQHDAERVEDGEHGGGHAEAAHVRVQRVALQDEGGGHLRVRRREHDPARPHRQQPEHALELLHLRHRAQTPRTRRTRLVVRWLHRRCLVQEPELIGVREPAAPLYRGHAADVLALVQRGRVFRHLDAALPARGDDDLRDPGERAAGRRLVAAVRGGAGQERRDGQRAEERRDAVPEPPADAGLHPHQHGAAEQRADVDGEVEPVEEGALAPALLLVELVGAERRQHRLQRAAQRQQVQPRVEGRALQRRRRAHREHHVGQDGDDQEERDGPVSAEEGVGEEGGDEGRDGARAHPVGDAVRGGFAALVQAVLEVVHQVRRHGEVGDELEAVTRQDEDAGPGDAAIPLGRPATGAAVRLHGLHLHGSSSSSSCGSGDTENLRQVTTNTTLSLSLPLTLTMANSVTMEPFCRKQISETESSEVRRQGRNR

SEQ ID NO: 63879 - protein, 384 aa, Zea mays
  Clone ID: LIB3060-079-G11_FLI.pep
VSSFIENYGTHIIISVTVGGKDEVYIKQHSSSQLSGLEFKNYVREIGRERFSDVENKSNATPINYSEKDITVIFRRRGGCDLVQSFSDWKGTVASAPDVIGMTFLSIVSLVDDVPGKKHLARAVELYLTYKPPIEELQYFLDFQVPLVWAPAPPGIASHHRKEPVCPSLQFSLMGPKLFISTEQISVGRRPVVGLKLLLEGAKQNRLAIHLQHLVSLPKIFLPHWDSHITIGPPKWQGPEEQDSRWFEPIKWKNFAHVSTAPIEYTETNITDLSGVYIVTGAQLGVWDFGAKSVLHLKLLFSRVPGCTIRRSVWDHSPSSSSIHKADESSSSSSDNAKLLKIIDMTETLKGPQDAPGHWLITGAKLGVEKGRIVVRAKYSLLNY

SEQ ID NO: 63880 - protein, 746 aa, Zea mays
  Clone ID: LIB3060-080-B4_FLI.pep
LFGSCSSAAAVVLRTGEVEMEERLFATEKHGGRALYRLHAVTVFLGICLLLCYRATHVPAAGSGGRAAWLGMLAAELWFGFYWVITQSVRWCPIRRRTFHDRLAARFGERLPCVDIFVCTADPRSEPPSLVVATVLSVMAYNYPPAKLNVYLSDDGGSILTFYALWEASAFAKHWLPFCRRYGVEPRSPAAYFAQSDEKPRHDPPHALQEWTSVKNLYDEMTERIDSAARTGNVPEETRAKHKGFSEWDTGITSKDHHPIVQILIDGKDKAVADNEGNVLPTLVYVAREKRPQYHHNFKAGAMNALIRVSSVISNSPIILNVDCDMYSNNSDTIRDALCFFLDEETGHRIAFVQYPQNYNNLTKNNIYGNSLNVINQVELSGLDAWGGPLYIGTGCFHRRETLCGRRFTEDYKEDWDRGTKEQQQHRHRVDGETEAKAKSLATCAYEHDDDTRWGDEVGLKYGCSVEDVITGLAIHCRGWESVYSNPARAAFVGVAPTTLAQTILQHKRWSEGNFGIFVSRYCPFVFGRRGKTRLPHQMGYSIYGLWAPNSLPTLYYAVVPSLCLLKGTPLFPELTSPWIAPFVYVAVAKNVYSAWEALWCGDTLRGWWNGQRMWLVRRTTSYLYGFVDTVRDSLGLSKMGFVVSSKVSDEDEAKRYEQEMMEFGTASPEYVIVAAVALLNLVCLAGMAAALDVFFVQVALCGVLVLLNVPVYEAMFVRKDRGRMPFPITLASVGFVTLALIVPFF

SEQ ID NO: 63881 - protein, 551 aa, Zea mays
  Clone ID: LIB3060-081-B8_FLI.pep
EGSPSQSQSRRVITPYDTEDTEPEAKPVRSARVAASRRPSSNCMAALPASAPAPAPAPSEAAELVPTLSSLEPVYGAGAQLDEARLRFARLGDRFHAVYGARPALFARSPGRVNLIGEHIDYEGYSVLPMAIRQDMIVAIRRANGAQVRVANVDDKYPLCVYPADPDKEIDVKNHKWGHYFMCGYKGVYEYCRSKGIDLGKPVALDVVVDGTVPQGSGLSSSAAFVCSATIAIMGILDKNFPKKEVAQFTCLSERHIGTQSGGMDQAISIMAKPGFAELIDFNPIHATDVQLPSGGTFVIAHCLAESKKAETAATNYNNRVVECRLAAIVLAIKLGMDRKKAISSVTTLSDVEGLCVSFAGREGSSDPAVAVKKLLHEDPYTAGEIEKITGEGLTSVFQGSQTSLDVIKAAKHYKLFQRATHVYSEARRVYAFRDTVSSKLSEEGKLKKLGDLMNESHYSCSVLYECSCPELEELVKVCRDNGALGARLTGAGWGGCAVALVKEPIVPQFILKLKEMYYKSRIDRGVIKQGDVGLYVFASKPSSGAAILRL

SEQ ID NO: 63882 - protein, 379 aa, Zea mays
  Clone ID: LIB3060-083-F5_FLI.pep
SSYSFILYPPCKSTMAARLTQAHTVRLHCIALPKTDQSTNQPQPRMLRHPHLPSGHDGRCRLERLAPVHEDVLQQRVAAGVADDGVEHGARGVHGVGGEGPLPLADLGLALHLPVARQLLRGQHLLRAAGVVRVQPRHRVRRPVVVRRQLRERRGQPARRRHERLLLRRGAHRRRGEHRLVVAAGRRRRRLLQPAALLVVDAAQDPVIQPEAVLLARRAVDVGEAVLVHDPIGLLALGRLAGVEDERLLDGQRLGRAHRLVSAGGLPVAGPSGAVGPRPVRVLAVPRGEEVPLLLAVQRHPWELPWVELVEVDLGDDGDGDGQAGAAAAEVVHHQLLVRRVEPEPRWQLQIRTGAAHRVPPCCLLVLAVATAAANGRKR

SEQ ID NO: 63883 - protein, 335 aa, Zea mays
  Clone ID: LIB3060-083-H4_FLI.pep
EREMSALKKSDKKAALDFAAWSFNVTTSVGLIMVNKALMATYGFSFATTLTGLHFVTTTLMTIVFRWLGLSQPSHLPLADLVKFVIFSNLSIVGMNVSLMWNSVGFYQIAKLCMIPASCLLEVVFDHVHYSRDTKLSIMVVLIGVAVCTVTDVSVNARGLIAAVIAVWSTALQQYYVHFLQRKYSLNSFNLLGHTAPAQAGSLLLVGPFADYLLTGKRVDHFSFSSLALFFLALSCFIAIGVNLSQFICIGRFSAVSFQVLGHMKTVLVLSLGFLFFGKEGLNLQVVLGMVLAVLGMIWYGNASAKPGGKERRSVLPLRSASLKGSSEEKGGAEK

SEQ ID NO: 63884 - protein, 808 aa, Zea mays
  Clone ID: LIB3060-084-D1_FLI.pep
SPPSPPSLSLASLSSPQRARHDTGQSPSRRRRRSPELGAGASEHAPLGTMVRSGSIRRSAVPAPMPAPAFTVSPADYRLLEEVGYGANAVVYRAEFIPTGRTVAVKCLDLDRVNSNLDDVRKETQTMSLIDHPNVIRSYCSFVVGHNLWVVMPFMSEGSCLHLMKVAYPDGFEEPIIASILKETLKALDYLHRQGHIHRDVKAGNILIDNPGVVKLGDFGVSACMFDRGDRQRARNTFVGTPCWMAPEVLQPGTGYNFKADIWSFGITALELAHGHAPFSKYPPMKVLLMTLQNAPPGLDYDRDKRFSKSFKEMVAMCLVKDQTKRPTAEKLLKHSFFKNAKPPELTVKNILTDLPPLWDRVKALQLKDAAQLALKRMPSSEQEALSMSEYQRGVSAWNFDIEDLKAQASLICDDDPPEIKEDDDTGRITDIDKDTSSDDYFGKTAPSNGNNCSDRSSVPANPGQNGPEINEILSSNNGNAYSERKPDGRKNPESENDSLPSTSKHDADGKDYRCDFRQKQRTYSGPVLQSGPNNSSMTERGHIIERDAGVQSVSDKQKNGTRRANNLSGPLSLPTRASANSLSRANNLSGPLSLPTRASANSLSAPIRSSAGYVGSLGDKPKRTMVEIKGRFSVTSENVDLAKVQEIPGSSASRKLQEGPSLRKSASVGDWSANDKTTSTNHQRKELCNSSVSTSILIPHLQNLVKQTAFQQDLITNLLSSLQQNERVDAAQSRVQSTTSDTVVEAATAEREHSLLVKIFELQSRMISLTDELIAAKLKHVQLQEELNVLYCQEEILDMREDESEEA

SEQ ID NO: 63885 - protein, 276 aa, Zea mays
  Clone ID: LIB3060-084-H7_FLI.pep
LLPLPQHQRRTGQAEKKQTRRDLSRSVLLPAPAAVPLLPQFSRPLLPSVRVQIPPPTDPAPSSMAGAGAKAAGALALALVLALAGANSEGDALSALRRSLRDPGGVLQSWDPTLVNPCTWFHVTCDRDNRVTRLDLGNLNLSGHLVPELGKLEHLQYLELYKNNIQGTIPSELGNLKNLISFDLYKNNISGTIPPALGKLKSLVFLRLNGNHLTGPIPRELAGISSLKVVDVSSNDLCGTIPTSGPFEHIPLSNFEKNPRLEGPELQGLAIYDTNC

SEQ ID NO: 63886 - protein, 520 aa, Zea mays
  Clone ID: LIB3060-085-C5_FLI.pep
SCFCLHHGAVTCLGDPSMASLATSTAAAAAGPRPRPDRPHVVLVPSPGVGHLMPMAELARRLVSHHALAATLVTFNLSGDPDAKSAAVLSSLRAANVSTATLPAVLLDDLPDDASIETVLFEVIGRSIPHLRAFLRDVGSTAGAPLAALVPDFFATAALPLASELGVPAYIFFPSNLSALSVMRSAVELHDGAGAGEYRDLPDPLPLPGGVSLRREDLPSGFRDSKESTYAQLIDAGRQYRTAAGILANAFYEMDPATVEEFKKAAEQGRFPPAYPVGPFVRSSSDEGSVSSPCIEWLDLQPTGSVVYVSFGSAGTLSVEQTAELAAGLENSGHRFLWIVRMSSLNGEHSDDMGRDYCDGGDENDPLAWLPEGFLERTRGRGLAVSSWAPQVRVLSHPATAAFVSHCGWNSTLESISSGVPMVAWPLFAEQRVNAVDLSEKVGVALRLRVRPDDGLVGREEIAAVVRELMEGEDGRAVRRRTGDLQQAADLAWAPDGSSRRALEEVVSRWKAGAIRRAAV

SEQ ID NO: 63887 - protein, 376 aa, Zea mays
  Clone ID: LIB3060-085-H12_FLI.pep
RPIPPDSSIQTLSRASRLSSPRFPSPPAVSLTPPARALSFLAFAAGDELELELVPRIEDDGRGMEPMNVDNGGCGGLDAQIEQLMQCRPLAEQEVKALCEKAKEILMEESNVQPVKSPVTICGDIHGQFHDLVELFRIGGKCPDTNYLFMGDYVDRGYYSVETVTMLVALKVRYPHRITILRGNHESRQITQVYGFYDECLRKYGNANVWKTFTDLFDYFPLTALVESEIFCLHGGLSPSIENLDSVLSLDRVQEVPHEGPMCDLLWSDPDDRCGWGISPRGAGYTFGQDISEQFNHTNNLKLVARAHQLVMEGYNWAHEQKVVTIFSAPNYCYRCGNMASILEVDDCNSHTFIQFEPAPRRGEPDVTRRTPDYFL

SEQ ID NO: 63888 - protein, 527 aa, Zea mays
  Clone ID: LIB3060-090-H2_FLI.pep
TIHAVPARSPWQAASLARTSSMAPTEESVADTPAPPPPPPHFVIVPLVAQGHTIPMVDLALLLAERGARASLVTTPLNGARLRGVAEQAARAKLLLEIVELPFPTDVDDLPPGIENMDQVTDNGHFVPLFDALQKLAGPLEAYLRAQAPRPSCIVSDWCNPWAAGAARSLGIRRLFFHGPPCFYSLCDLNATDHGLRELAAGAAAADVDDGGQERFVVPGMPVHVEVTKATAPGFFNSPGWEALRGECVEAMRAADGAVVNTFVGLEGQFVSCYEAALGKPVWTLGPLCLRSRDADAMSSRGADGGQQHSAVAAWLDSKETGSVVFVSFGSLARKLPKQLFEVGHGLEDSGRPFLWVVKQAEASPPEVREWLGALEARAAGRGLVVRGWAPQLAILSHRAVGGFVTHCGWNSLLESVAHGVPVVTWPHFADQFLNERLAVDVLGVGVPIGVTAPVMVFDDESVAVARGDVARAVSALMGQGEEAGERRRRAREYGEKAHGAMEKGGSSYENLTQLIESFGQVEARKG

SEQ ID NO: 63889 - protein, 280 aa, Zea mays
  Clone ID: LIB3060-095-F10_FLI.pep
KLKITSHIAAVGADDLAVDPLGGVGAQEADHRRDVTGLAEPLHRVCLHGVSHHGLALALEEHVRGRGPGRDAVGRDAGAPELLGHGPHQRLHRRLGRRVGPEPRREAPHHGRRHGDDAPAAAAAEAVGRLPEAQERAAQVHGEHAVEGLGGGAGHGGVRVVQHPGAGHQDVRAAEGLVRRVEERPRAGLVRDVRPHGHRARERRRQRARLVGARRVAQHQARAEGGQVRGDGAADAPRRARHDRHAPRQRLGAAAARRSRRGLGGGGDVTGVRHRTASGC

SEQ ID NO: 63890 - protein, 446 aa, Zea mays
  Clone ID: LIB3060-097-F9_FLI.pep
KPCARRFGTLKLIILGLRKNNTSARHALSRETIFYFERATMELYSGYLDDHFNPHKLSIAGSAVSPPEYMASASPAQFAAAPLRMGYGRPAPAPPPPVMGMWSSEPFRVDSGSAHATSASTVNTKLEETRLEDDAQVALEPARSTEQETSRPPERAQRRLAQNREAARKSRLRKKAYIQQLETSRMKLSQLELELQRARQQGAYANSGSMGDSALGYRCPIDPGVSVFEIDYSHWVDEQKRHTAELTSALQGQQTSELELRLLVETGLSNYEHLFKIKAAAANADVFYVMSGLWKTPAERFFLWIGGFRPSEVLKILSPQLEPLAEAQRMLVGGLQHTSAQAEDALSQGMEKLQQNLAETLTAEADPFGPPDPYMLQMATAVGILKELVNFVTQADHLRLTTLQQMHKILTPRQAARGLLALGDYFQRLRTLSSMWAARPREAAVS

SEQ ID NO: 63891 - protein, 191 aa, Zea mays
  Clone ID: LIB3060-098-F12_FLI.pep
QSHRRSSWTTMASPLLKSHSQLAAATALHSVRRADRCPATIHLGKFHDHGLRSGRSKRSGSAKVGAFPSLDVVPLMVTMVEHVDMSRDYVVTKSIWHLSDAALKSVYTFYAMFTVWGVCFFASMKDPFYDSETYRSQGGDGTVHWYYDRQEDLEASAREELLREELLEEIEQRVGGLRELEEASKEEQLTK

SEQ ID NO: 63892 - protein, 407 aa, Zea mays
  Clone ID: LIB3060-100-B10_FLI.pep
IPSSNSASRTSSIRQILQPTKSPHRILHPESAAFARYPVPSIIILFHDNMVGPFLLLLVAHAVLMDHLPEEIREDSLVSWHLGVAREVVDVNDEIAVAGADVADHVEVEELQAQRAAEAARDLVDECGGRHDGVLETLFAVVLLRRALSGEVGDLGEGDGSLGRCVILGGHVGQATALDASDVAADDVDLEDDAAMVDELLEHKRRAELAEALAVVDERHLVGLGGAVGDEGLGDEREAERGKESEVGERGSVVDDDLAGDTESAVLVGGVVELGDDLEHGDAVVEAVDGVGRVDDGDGRVARGEGHELGAPVVSVELVDEEVEGPLLCQGLRRIHGDEVHAPRRRLGHQRRLDEALLLLRRERVTDDVARGVGDAGGGLGGGVGGHRVGFGRNRSMEIEICWEIRW

SEQ ID NO: 63893 - protein, 383 aa, Zea mays
  Clone ID: LIB4172-034-H1_FLI.pep
LCTHHHQVQKTATSYLNTASQNKQRKERKKEKARTRLRIADSAAPAALPRRPLIAGAEHVRRVPGALPRRGPLGAALAPVGAPAVGFLGEHEYCRGFVLLVRPDVDPLGRRPLLAPDHRAAPVEAERVRRAVGVQAEEEHGVAFHRFHCQSFVCTLGESGVLGLGLPTLGVGEHGLASLADGGQVHEHGGVAVAAPGLVDPVVEVVEVRLVLLPRLVAQHLHVLGVLLRKKRPCRDPLLDPTHHRVLALVEEHAGAGAHLAHDALAGLVVRHHGPLDLLLRQSHEVVALGVGEEPLVHEDPWMPRDGLDTRGVERRRRCDAVVVVLAKEQHRHDGGGGEEEHEDEQHAAEPHGDRSMTMPSLPNRYCRTYRWRNASSSYYCYC

SEQ ID NO: 63894 - protein, 1117 aa, Zea mays
  Clone ID: LIB4172-035-G7_FLI.pep
LDIGATGPSFSYPMGGGGGFRGSCRVGAVLLFSAWVALAALSRLLRPVPNGCVMTYMYPTYIPIAATPRNISSDRYGLFLYHEGWKQIDFAKHIRGLRGVPVLFIPGNGGSYKQVRSLAAESFRAYQNGPLEPTFYQEASSSLPGDGLNNFSIPSRYGRMLDWFAVDLEGEHSAMDGQILEEHTEYVVYAIHRILDQYKESHLERSKGGAQSSPDLPSSVILVGHSMGGFVARAAVVHPNLRKSAVETILTLSSPHQYPPIALQPSLGHFFSHVNEEWRKGYKTGVSHAISSKLSNVVVVSVSGGIHDYQIRSRLASLDGIVPSTHGFMVGSSSMKNVWLSMEHQSILWCNQLAVQVAHTLLSIIDPVDRQPFSSTQKRVFVFTKMLQSAVPQSLSSMTHVPASLSRNLPANENQDAGELHKKDSLSCPSSTEWTSDGLEKDLYIQSNSVTVLAMDGRRRWLDIKKLGSNGRGHFVFVTNLAPCSGVRIHLWPEKHHSPVQNELPASKKIVEVTSKMVQIPAGPAPKQVEPGSQTEQPPPSAFLLLSPGEMSGFRFMTISVAPRPTISGRPPPAASMAVGQFFSPEEGASSFSIGTIIRSSFAPKEIFLLEDHPLALNLSFSASLGLLPVTLSLKTAGCGIKNPGDQMEAERNNLCKLRCFPPVALAWDSVSGLHIIPNIYSETVVVDSSPAFWDSPEGTDKTTVLILADPHCSYEVTSRASLSDAASRFFLLYSSEILGFMVAIMFFGIMRQTSAWECDSSMPSILSAIESNLGLPKAFMFLCFMPILVFCAFFIFTAEQKPPFGTFLLVTLICYIVANGFTILLILSSKLLLYVVAILHVFTKRRWQSWGNGVQSAFLGQFLSFSSFQSVKIVQMLRNNPNIIVAVATLPLVCLVHPAIGLGLLLLSHAFHAHSNLCSFLAASFRSITQKKDLYKSKMGDGSVLLSKSKSDGLQQLLPMDDSPTASKSFTDSQLELFDYRHGVMILHLLSTLMFVPSLVAWLQRIGMGQNFPWFIDSAICVGVILHGLFGSQPNVSCCIFFKLPGRRGREIGLSFLYLVGGYYSFVSSMALAPYRALYAMATIGYICFISRILERRNMVRGDINSRRTRKHSHRH

SEQ ID NO: 63895 - protein, 364 aa, Zea mays
  Clone ID: LIB4738-023-D6_FLI.pep
LEAGREKKRKGTEISSTFSGLHRETRRSLQIPSQSTPRAKTPISPRGWDFVGSVMLERHRVHRDADGDLPAAVTAPLLAHPPSPAEPWPANFGSSEITDEEIDAASAACCRICLESESEPGDVLISPCMCKGTQQFVHRSCLDHWRSVKEGTAFSHCTTCKARFHLRVEFLEDDICRRMKFRMFVARDVIIIFLLIQATIAAIGGMAYFLDKDGNFRNKFSDDWERFLSKHPVPFYYCVGVVVFFVMVGFFGLILHLSSYNNNDPCLVGSRDCCFGCGLVDLPASMEACFAFAVIFVIMLAILGVAYGFLAATVAIQRIWQRHYHILTKKELTKEYVVEDLPGGYTPPKMDPEHEQRLKVLQLM

SEQ ID NO: 63896 - protein, 212 aa, Zea mays
  Clone ID: LIB4738-023-F12_FLI.pep
KGTDAGGVDDDGGRAAGQTRDLELATVSDLHLLGGGAAAGAHLLDGLDDLHALDDLAEDDVLAIQPGGLHGADEELRAVGVGAGVGHGEHPGAGVLADELLVGELLAVDGLAAGAVAAGEVAALAHELGDDAVEGRALVVERLPGLAHALLARAQRAEVLRGLGHLVGVQLHHDPAGWGTADGHVEEDAGVRHRDPKLGFGEIFPSLSAAVV

SEQ ID NO: 63897 - protein, 185 aa, Zea mays
  Clone ID: LIB4738-023-H4_FLI.pep
LCPPPLPNPFTTAGAGSNRRRRKMTVGMINANPVVHERPERASHPHAADVLDPLDVFGRVLQSSPHTVRDIKDPEHPYSLEQLSVPSEESVSVDETLGRIQITFTPTVQHCSMATVIGLCLRLKLMQNFPPHFKVDIKVAPGSLANEESVNKQLNDKERVAAALENPNLRQLVDECLCFNDPYSR

SEQ ID NO: 63898 - protein, 297 aa, Zea mays
  Clone ID: LIB4738-026-D3_FLI.pep
SSSGAGGRWTDRVLAWPPTAAMDDGDLDFSNPDTYLCPALGTDPPSSCSMDSYFDEILKDTEHHACTHTHTCNPPVHDLSHTHTCVHVHTKIVAASPGDDTADSPSENNTNGSGGNGSNAASKKRPSGNRAAVRKYREKKKAHTASLEEEVVHLRALNQQLVKKLQSHAALEAEVARLRCLLVDIRGRIEGEIGAFPYQRPPPAAKNVDLVSGVDQGGFLAGAAAQVTSSCDFRCNDQMYCSPGMQGAVGGQVLGQGACDVSSIQCVGSTRSASTKLPVCGGMDAAPAACLPNVQNK

SEQ ID NO: 63899 - protein, 318 aa, Zea mays
  Clone ID: LIB4738-029-F2_FLI.pep
DRHLEAAASAPLRPTLERDRPDDHLVVDGSQRSADEGADPEDPVVSPGMVLVVNYGGAKAPRGVDAGAGDRDGGQVDEEHGKPDWKRGEDRHMGVPGVPLGVGGGEDGVDEDEGADDLGAEAVALGVAGRDDVGAAAVAHVQPLLEPLDDARAADGAQALHDDVKHRPGEGQLPRQEQPEGHRRVDVPAGDAGGAVDEGEDHAAEGPGDALDADGGALGGGLGDAHDGEDGDVEEEEGGDELGDAGAVEGPGLELPGLEERRRRGLLVVLVVRALRRRADGLALRELVGAQADVLLLPLHACAVTFSQQTSLARARRS

SEQ ID NO: 63900 - protein, 319 aa, Zea mays
  Clone ID: LIB4738-029-H6_FLI.pep
SPSLTRKQALLQLLAFALICIHIPMAGLSLQHPWAFTFGLLGNVISFMTFLAPTPTFYRIYKSKSTEGFQSVPYVVALFSAMLWIFYALIKSNETFLITINAAGCVIETVYVVMYFVYATKKGRMFTAKIMLLLNVGAFGAILLLTLLLFKGDKRVVMLGWICVGFSVSVFVAPLSIMRRVIQTKSVEYMPFSLSLSLTLSAVVWFLYGLLIKDKYVALPNILGFTFGVVQMVLYVVYMNKTPLPVADGKAAGKLPSAADEHVVVNVTKLSPGRLPPVTQMAAVPTKSCATEAAAPATLPSRDVVDVLVNRHSPAVHVT

SEQ ID NO: 63901 - protein, 298 aa, Zea mays
  Clone ID: LIB4738-032-B5_FLI.pep
ACSIGSWNKTMESEIMASYETKQNCEIRVFESSDEMATDLAEFISQASEISVKERGCFAIALSGGPLVRHMRKLCEAPYNKTLDWPKWYIFWAEERAVAKNHAESNYRLTKEEFLSKVPILNGHVYSINDNATVEEAASDYEFVMRQLVKVRTVGVSESNDCPRFDLVLLNIGPDGHVASLFPNHPALELKGDWVTYITDSPEPPPERITFTLPVINSASSVAIVATGEDRARAVSFSVSACQDQEEEGPADDDAGTTMIPPASMVQPTDGKLVWFLDEAAASSLEASNGACEHQEGY

SEQ ID NO: 63902 - protein, 172 aa, Zea mays
  Clone ID: LIB4738-032-G6_FLI.pep
TPQTSRLTPPSSSPVLRRSCHSRRVSAPLGPPPRRRHMSTQSISPASASAQFTYPAAAAPSYFPVPFHLQNAQYTAWTAAAPAVPVYNAIYPMPQVQQAQQLFQKDSKIITPEALATVKAAIANSEKDKKVDATKKAVPRKAAGQSWEDPTLADWPESAQGCDEPNRLPHVI

SEQ ID NO: 63903 - protein, 338 aa, Zea mays
  Clone ID: LIB4738-035-B9_FLI.pep
REDSRAYINNKTLEEAQARSACTVIRSKRLPPPTRPTTTLTSGSAVHPNKSAGRRSTSTPRAELSRAACVQDVPVPHEQRGDRLPEPGDAAGLDPGHRRGPLAGQGLGNAHVLLHPSSTAPRRRLRRAARVPRGLRRRLLPRGLGAVAVSRRRDAPHRLPPRPHRVRVRRHRRRRRRAGVRSAVPGVPRRRLLPVAAEARAGRQVLAPRTRLRRRVQGVPQDPQLDSHGLPPARPHADTVRLLQAADGVPVQRGRGRRGAGRGLLPLEQRPGRPLLPVRLVQGRRHGAGAPGLAQDRRAQRRRARRPRLHLLLRLLRLQERPPLPLRVPVRGKPNVQD

SEQ ID NO: 63904 - protein, 332 aa, Zea mays; identical to SEQ ID NO: 52151
  Clone ID: LIB4738-037-F12_FLI.pep

SEQ ID NO: 63905 - protein, 165 aa, Zea mays
  Clone ID: LIB4738-038-A8_FLI.pep
YHNYRLNNWSTIKRAHKLGNRDIDHNTWLPIAAYAMSDNPHEKKNTDFDSTVQARLAQPDALSKGVVFPLVLVRVESNKDIDRVDDSGDVAKDCEQQADAELYSAAAESEEDAEGREDDGEEDLQEGAAAAVRHRDLRAGRDRDGWLWRRGTRGSIPPLSLFPRS

SEQ ID NO: 63906 - protein, 209 aa, Zea mays
  Clone ID: LIB4738-040-D9_FLI.pep
SKKKETKKGRGRRHFCSVLEPHLSAERVVGRAAPDLVGGVLGAAVTGGGGVLLVLLDGPEGGLEDGDLAGDAEHALLLEPELLLGLPQQRREGAVLQVLRRDHEPLRRGAHAHGEVALGRGPRGRCVRERKRPLQELLSLALANGIAAAAAGRRAWLLGGDRQLAPLLQHPLHPHDLGDLVRLLGAGLLHLRLFELGTTTILGIFFCGL

SEQ ID NO: 63907 - protein, 433 aa, Zea mays
  Clone ID: LIB4738-040-G11_FLI.pep
CCSSPPISPHTYTSMLALLSLCPPFVILLWYTMVHADGSVVRTYEHLRDHGVLEGLKAIWPMPTLVAWKIIFGFGLFEAVLQLLLPGKRFEGPISPAGNVPVYKANGLQAYAVTLITYLGLWWFGIFNPAIVYDHLGEIYSALVFGSFVFCIFLYIKGHVFPSSSDSGSSGNVIIDFYWGMELYPRIGKYFDIKVFTNCRFGMMSWAVLAVTYCIKQYEMNGRVADSMLVNTALMLIYITKFFWWESGYWCTMDIAHDRAGFYICWGCLVWVPSIYTSPGMYLVNHPLNLGPQLALSILLAGMLCIYINYDCDRQRQEFRRTNGKCSVWGKAPSKIVASYQTTKGETKTSLLLTSGWWGLSRHFHYAPEILSAFFWTVPALFNHFLPYFYVIFLTILLFDRAKRDDDRCSSKYGKYWKIYCNKVPYRVIPGIY

SEQ ID NO: 63908 - protein, 313 aa, Zea mays
  Clone ID: LIB4738-041-F1_FLI.pep
RAIQPSRWLHHPKAQDTELVCLVGKPSVRFSPIMEDERNTQQHQGGEQAQDQENEVKDRGLLDSLLGRNKHDDQEKKNQQAEEELATGMEKVTVAEPDHKEEGHEAAEKKDSLLAKLHRTSSSSSSSSDDEEEEVIDENGEIVKRKKKKGLKEKVKEKLAAHKAHDEGDHHQTPAPPVVVDTHAHHQEGEHFPAPAPPPHVETHHPVVVHKIEDDDTKIQTPPQAPEEEKKGLLDKIKEKLPGGHKKPEDAAAAAAAPAVHAPPPAPHAEVDVSSPDGKKGLLGKIMDKIPGYHKSSGEEDRKDAAGEHKTSS

SEQ ID NO: 63909 - protein, 332 aa, Zea mays; identical to SEQ ID NO: 52151
  Clone ID: LIB4738-042-B11_FLI.pep

SEQ ID NO: 63910 - protein, 360 aa, Zea mays
  Clone ID: LIB4738-042-B5_FLI.pep
STPIVVAVAVERTTCTHTRARAIVGRARNNRALLHGALGGEALLVALGVGAVVVDHVLALHPAHPLLQGEVQLLVVPVPGAGGGGGGAGALGADGGAAAGPAARDGDAGVGLEPAVGGGEGGVGPVRLDAPALRRPVVRVPQAGVEPHRLALGERHPLALQVAEVPDGHVVHHEDDVLGVPEDGVGVEVGGGVEPEAELLLPLPLPPREHVGVQRVGLAGHVAQELEVDLVVRAALRRQVVGGDGAGGVARHQPQLHVDLAEQVLVPGLEPGAGRAVQRQRQQPPVVKDLAPPVAPRDVQLLVQAARREGAGHQHAQAQQQQGHPTRRRRHDRCNQPPRETDTYRHSTLMIEQVATRCST

SEQ ID NO: 63911 - protein, 159 aa, Zea mays
  Clone ID: LIB4738-042-D9_FLI.pep
PGRAPIPRPGHLPAVTTPKPVPSPTSSRTQVSRDETVDMARTQSAVAVAVVAAVLLLAAAATTSEAAITCGQVSSAIAPCLSYARGTGSAPSASCCSGVRNLKSAASTAADRRAACNCLKNAARGVSGLNAGNAASIPSKCGVSIPYTISTSTDCSRVN

SEQ ID NO: 63912 - protein, 241 aa, Zea mays
  Clone ID: LIB4738-042-E6_FLI.pep
PLHCWMKHGPLSRGAPSLVIIFILLTTLFIILVIDLRLGLVRLLFIFLLFLLGRSLLSCSALALVVGSDGLVVLELELVSLGYIGSLVRPAQGFPPVASSFPHRSDRLVLRVLLLELLAKFLHEHEESAGSPLRLVGVLAGLPFPALGGLLRPLALHRQLGIGLGGALGFGPLHGGFERRHGAQRSDPRLAEGIPVAGGRIGVESRAKLPLAARGEREGGKGKGRRRALQEGRAGAARPAS

SEQ ID NO: 63913 - protein, 221 aa, Zea mays
  Clone ID: LIB4738-044-H12_FLI.pep
GGSNPLQVKILFNPFQSTSIPMVLGSNEHGFQVCRSKNFSIATENAANPTHPKHVALGPPFTAKAPPVTQPATAVLVVSCFARTFSMVHSAAEKIRPMTAKVLALLILLLPICFAVYTICCLAVICSAIIGFSKAPKKSPISTPRPPPMTPLTTLRTAQLFQMSCPLISSTVGIRIGSTAAAWLVDSPPVPASAADGSGEAITLYLVPLHSPLDERDSSRR

SEQ ID NO: 63914 - protein, 347 aa, Zea mays
  Clone ID: LIB4738-045-C7_FLI.pep
SIDQLFTFVMRSTWLAFALSALVVVSSSAAHAHASPGKLEVGFYEHSCAQAEDIVRNAVRRGIAREPGVGAGLIRMHFHDCFVRGCDGSILINSTPDNKAEKDSVANNPSMRGFDVIDDAKAVLEAHCPRTVSCADIVAFAARDSTYLAGGLDYKVPSGRRDGRVSKEEEVLDNNVPAPTDEVDELIESFERKGLNADDMVTLSGAHTIGRSHCSSFTQRLYNFSGQLGQTDPSLDPAYAGHLKARCPWPSSDDQMDPTVVPLDPVTPATFDNQYYKNVLAHKVLFISDNTLLDNPWTAGMVHFNAAVEKAWQVKFAKAMVKMGKVQVLTGDEGEIREKCFVVNPQY

SEQ ID NO: 63915 - protein, 406 aa, Zea mays
  Clone ID: LIB4738-048-E3_FLI.pep
IGIIEGAGSKSAGNLYLHPVSRGSSVVVSSVMDTSKSKQGPEHLLVLVHGIMASPKDWTYGEAVLKRRLGDDFFIYASSTNSYTKTFDGIDVAGRRLANEVLDVVNKMPSLRNISFLAHSLGGLFARYAIAILHPVSVETKNAGQSSALTVPTTRGPAKSRCASGLGSIAGLQPINFITLATPHLGVRGRNQLPFLQGLSILEKLAAPLAPLIVGRTGAQLFLTDGDPSKPPLLLQMASDCDDKNYISALAAFKNRVLYANVSYDHMVGWRTSSLRREKNLIKPSHRSLDGYKHIVNVEYCSPVSSEGPHFPSKAARAKEAAQRTPNRENTEEYHQMMEEEMLHGLQKVGWKKVDVNFHSSFWPYSAHNNIHVKNEWLHNAGAGVIAHVADSIKQQESRPCLPANL

SEQ ID NO: 63916 - protein, 386 aa, Zea mays
  Clone ID: LIB4738-049-C5_FLI.pep
GNLRLLPDQLTSAPFTPHLLLRRRLPLLRLAWPWPPPALRSHAAMERYEVIRDIGSGNFGVTKLVRDVRTKELFAVKFIERGQKIDEHVQREIMNHRSLKHPNIIRFKEVVLTPTHLAIVMEYAAGGELFERICSAGRFSEDEARFFFQQLISGVSYCHSMQVCHRDLKLENTLLDGSVAPRLKICDFGYSKSSVLHSQPKSTVGTPAYIAPEVLSRKEYDGKVADVWSCGVTLYVMLVGAYPFEDPDDPKNFRKTITRILSVQYSIPDYVRVTMECGHLLSRIFVGNPEQRITIPEIKKHPWFLKNLPIEMTDEYQQSMQLADMNTPGQSLEEVMAIIQEARKPGDAMNLAGQLPCLGSVDLDDIDFDDIDDIDTENSGDFVCAV

SEQ ID NO: 63917 - protein, 172 aa, Zea mays
  Clone ID: LIB4738-049-H3_FLI.pep
SAGAEMLVYQDLLSGDELLSDSFTYKELENGVLWEVEGKWVTQGPVDVDIGANPSAEGGEDESVDDTAVKVVDIVDTFRLQEQPPFDKKSFVSYIKKYIKNLTAVLEPEKADEFKKGVEGATKFLLSKLKDLQFFVGESMKDEVSVVFAYYKDGATNPTFLYFSHGLKEIKC

SEQ ID NO: 63918 - protein, 475 aa, Zea mays
  Clone ID: LIB4738-051-E9_FLI.pep
GLFASNSAGPPALTAASLPLRYCSSPPHSPAGAAAAAARSYPTSASGGGTAGGKGKMFGRAPKKSDNTKYYEILGVPKSASQDDLKKAYRKAAIKNHPDKGGDPEKFKELAQAYEVLSDPEKREIYDQYGEDALKEGMGGGGSHVDPFDIFSSFFGPSFGGGGGSSRGRRQRRGEDVVHPLKVSLEDLYNGTSKKLSLSRNVICSKCKGKGSKSGASMRCPGCQGSGMKVTIRQLGPSMIQQMQQPCNECKGTGESINEKDRCPGCKGEKVIQEKKVLEVHVEKGMQHNQKITFPGEADEAPDTVTGDIVFVLQQKDHSKFKRKGEDLFYEHTLSLTEALCGFQFVLTHLDNRQLLIKSDPGEVVKPDQFKAINDEGMPIYQRPFMKGKLYIHFTVEFPDSLAPEQCKALETVLPPRPSSKLTDMEIDECEETTMHDVNNIEEEMRRKQAHAAQEAYEEDDEMPGGAQRVQCAQQ

SEQ ID NO: 63919 - protein, 491 aa, Zea mays
  Clone ID: LIB4738-052-C10_FLI.pep
TLLQVPRSASGPCRRRAPASYHCAVSKMARRGLMEQDLSKLDVTKLDPLSPEVISRQATINIGTIGHVAHGKSTVVKAISGVQTVRFKNELERNITIKLGYANAKIYKCEDDRCPRPMCYKAYGSGKEDSPLCDVPGFENTRMKLLRHVSFVDCPGHDILMATMLNGAAIMDGALLLIAANESCPQPQTSEHLAAVEIMRLQHIIILQNKIDLIQESAAMNQHEAIQKFIQGTIAEGAPVVPISAQLKYNIDVICEYIVKKIPIPERNFTSPPNMIVIRSFDVNKPGSEVDEIRGGVAGGSILRGVLRVNQKIEVRPGIVMKDENGNIKCTPIYSRIVSLYAEQNELQFAVPGGLIGVGTTMDPTLTRADRLVGQVLGEVGSLPDVYVELEINFFLLRRLLGVRTKGTEKAGKVSKLTKGEILMLNIGSMSTGARVLAVKNDLAKLQLTAPVCTSRGEKVALSRRVEKHWRLIGWGQIQAGTTLEVPPCPL

SEQ ID NO: 63920 - protein, 310 aa, Zea mays
  Clone ID: LIB4738-053-D7_FLI.pep
PARHRTVTLGYGGRRRSGGLGHRTMSSSINSTVATELLVAEKSRGIEPLPFINDKHGGVIIEMTTPMDPGAFSASLKAALVKWREQGIRGVWIKLPITLSNLIPPVVEEGFWYHHAEETYLMLAYWLPNTTHTLPVNATHRVSVGAFIMNDKREVLAVQEKSGVLRGLGVWKFPTGVVEPGEDINVGAVREVKEETGIDAEFVEVLAFRQSHKSFFDKSDLFFVCLLRPLSYDITKQDSEIEACQWMPVEEFAAQPFVQKHELVKYILEVGLAKVDKEYAGFSPISIKSAFTDKLSLFYMNRRDLDRASG

SEQ ID NO: 63921 - protein, 258 aa, Zea mays
  Clone ID: LIB4738-053-E7_FLI.pep
GKADHQPTWYQSTGVNRSMSDFSSTPSPLSTITTASLLNMSSTAVPIHHAVTIRLTKANYLLWRAQLLPHLRGNGLMGYLDGTNAAPDQQLPASSAAGATLIVNPNYTAWYNKDQQILSGLLSSMSEEILRDVIDAKTSKDVWDSLQKKFSSSTRARTVQLRVELATAQKKDLSAADYFGKIKNLATEMAAADAALRDDEILAYLLAGLPSEYDSYVTSMTTKDPITLRSHDQAQKLNTRLLLMLPLKLSGFRFCFVN

SEQ ID NO: 63922 - protein, 212 aa, Zea mays
  Clone ID: LIB4738-054-E5_FLI.pep
RQEAVMAGDEEDHLADAPRVVGVLSALLERVVERNDAVADELAAGTESAAPPSAFRATARPDISVRSYMARIARFAGCSPACYVVAYVYLDRLLRRARSAPAVDSYTVHRLLITAVLAAVKFMDDVCYNNAYFARVGGISLSEMNYLEVDFLFAVGFDLNVSPGTFGHYCTVLRAEMLYLELEGPPPPAASTSLHRCCLSEDDDGSSSTSSS

SEQ ID NO: 63923 - protein, 150 aa, Zea mays
  Clone ID: LIB4738-055-F2_FLI.pep
RGAAAAQSTRTPLSTSTCLLLPLLYLRSQRGVVHGDGFNKPRHHGGGKAPRSLHHRREEPAGGALASTRRQVLAQMGMSAGEVPAQVRRGADVLPSEGQGEGRREGLPRVRGVRRRRPRRLPQGPQLHLGRRRRRRQALQLRPLLKPYIS

SEQ ID NO: 63924 - protein, 310 aa, Zea mays
  Clone ID: LIB4738-055-F8_FLI.pep
RARERGVDLYLYRAGGAMMPYGTAAEAEAALGRSMTWAEALWFRYSAGMPDLCLTWHVSLVYLVLYALVPLPVMVIQKLAPGYALRHKLQPGVPEPSPVSTYVEYIRDSRGVTLAALGPFPLIYSIAFKLFGVRTGLPLPSVWETATHLAVYSLVEDYTSYWLHRFLHTRWGYEKIHRVHHEKTAPSGFAAAYATGTELSLYLTTLFLGPAIVPSHVTTHWLLFSIRIMEAFDTHSGYHFPFSLARFIPFYGGAEFHDYHHYAGEKTRSNFSSVFTYCDYIYGTNKGYMYHKRSLAELKTKEAEHSGKED

SEQ ID NO: 63925 - protein, 156 aa, Zea mays
  Clone ID: LIB4738-056-F3_FLI.pep
YREAGRGLPAMAENLAPEKRHSFVHNGQKVFEWDQTLEEVNMYIELPKGVPTKLFHCSIQASHVEVGIRGNPPYLNHDLTHPVKTDSSFWTIEDGEMHITLQKKREGENMVISNTRARDFGSICCRSRAKAAYAPKVSGREPWVRLFTGSVQWNLP

SEQ ID NO: 63926 - protein, 220 aa, Zea mays
  Clone ID: LIB4738-056-H3_FLI.pep
TALATGRAEPDQVSSSLTSSPMEGGDSSGAGAGGAVAAAAKWRSDASRAFQYYLDRSTPHATGRWLGTLAAAAIYALRVYMVQGFYIVTYGLGIYLLNLLIGFLSPTVDPELDPSAASEGPALPTRGSDEFKPFIRRLPEFKFWYAITKAFVIAFVMTFFSVFDVPVFWPILLCYWIVLFVLTMKRQIVHMIKYKYVPFSIGKQKYGGKKSAVSPSSSKD

SEQ ID NO: 63927 - protein, 451 aa, Zea mays
  Clone ID: LIB4738-057-D9_FLI.pep
RPGAPAQNAPQNSPLQAGSSARLPLPGCHAVAVSPPKTSLAPPSHHSAHLSSRRRSRRVAAGTCLCGVPYWLSLPFAEEEHRSREVGMAEVHLGLPGPWAADYREMADHYTTKIGGVPDWPTGDMGFEPETLQCSLCGTKLCLVAQVHAPVAKLNIEERIIYVLVCPTPECGPKPQSWKVLRVQKCHNVMQTEGGGDELGQSNGPSSTSLPEEQSDKNKIPETNDDDFDLDALAEALEQAATMASNPKKKNKSKHANAPVKRPVLKEQACDLSIPVLPCFYIHYNKELYGGKGDVGSSSSELVLDKEIMDAANDEEEKWEGEKYEYDRAIGADRTFLKFKKRLDAYPQQCFRYSYGGKPLLATTKLQDPGTCRLCGSPRRYELQLMSPLSYFLHEAGDGSSNYAPSSWTWLTVIIYTCPKSCCPSSCGGKPQSCCWGAAEEEILIQEDEVL

SEQ ID NO: 63928 - protein, 124 aa, Zea mays
  Clone ID: LIB4738-057-H12_FLI.pep
LATLTNQVFMSDLDIQIPTAFDPFAEANAGDSGAAAGSKDYVHVRIQQRNGRKSLTTVQGLKKEFSYSKILKDLKKEFCCNGTVVQDPELGQVIQLQGDQRKNVSNFLVQAGIVEKEHIKIHGF

SEQ ID NO: 63929 - protein, 664 aa, Zea mays
  Clone ID: LIB4738-058-D11_FLI.pep
RELASVAMMNYVIFGVLLLVVGGGLRPSPAAADVFCDNLKQVAATLPQNTSSSPVQFATAIVGQAPDVVYALAFCQGDYSATACRECVAQAFNVTPACNKDGIFSYKACPVLYAGDNFIDPSNATEQADDTPFVRWNINNVTGDADDVRLITGLIRELLVDTVDRAASTAPRRFATGVMDSGRPFPTMYSMAQCTPDLSASDCLACLRRLVGMVNSTMALRMGAQIHVIRCYFRYEAYSLYDSQPMLRVGPPSVPAPAPAPAIGARRKSKLWVIPVVVVPLAVAAAAALCFIFYSPWFRRYRKGETTMAKAGSQELQGELVLDGKNSEFRVFDFEQVLEATNDFSDENKLGEGGFGAVYKGQFADGLEVAVKRLASHSGQGFTEFKNEVQLIAKLQHSNLVRLLGCCSQEEKKILVYEYLPNKSLDSFIFDENKRALLDWSRLLSIIEGIAHGLNYLHKHSRLRVIHRDLKPSNILLDREMNPKISDFGLAKIFSSNNIGGNTTRRVVGTYGYMAPEYASEGIFSVKSDVFSFGVLVLEIITGKRNSGSHQCGDFINLIGYAWQLWDDGRWIDLVDAYLVPMNHSAEMTKCIKIALLCVQENASDRPTMAEVVAMLSLSNDTAMIVAEPKQPAYFNVRVGNEEAYTTTESCSINDVTISVTTPR

SEQ ID NO: 63930 - protein, 192 aa, Zea mays
  Clone ID: LIB4738-059-E2_FLI.pep
ACLCVILIVSARTVRASCSCAHLLLPDVTKREHALGAQDLGGAELAELAPVVAGGGEEDVDPLIADDLAGEELGACGEVGVVRPEHGARRLLGRGDDERRLAELQHHERAVDVRQVPQRPVRQHVHEVVHAADDGQLPRPWRQPWPRLEGHLHQLQQCHSKDGEEERLVDVLVHAGYRLLYRHIARRLDTAD

SEQ ID NO: 63931 - protein, 169 aa, Zea mays
  Clone ID: LIB4738-059-H12_FLI.pep
RGARGASNGCSRSVHPGGFVRSKAASELEDAGQAVGRRGGRASPGDGPGEAPQGHHRPPARHQQRRGRRQLQAGAVDAVDPDDAGDAVVVDDAARRRQRVAQRLPPGEQPGHQGHGRQPLRPAAAQLPHRLRLALQRRDQEQPPLDRARWTVKRPGVSVRPCLLVLVVI

SEQ ID NO: 63932 - protein, 355 aa, Zea mays
  Clone ID: LIB4738-061-A11_FLI.pep
PGNLLISFSSERSTSPSPSTQATTANLLRLQLIMGSTTWLAAVLAALVVAASSTVASHASPPGKLEVGFYEHSCPQAEDIVRNAVHRGIAREPGVGAGLIRMHFHDCFVRGCDGSILINSTPGNMAEKDSVANNPSMRGFDVIDDAKAVLEAHCPRTVSCADIVAFAARDGRVSKEEEVLDNNVPAPTDEVDELIESFKRKGLNADDMVTLSGAHTIGRSHCSSFTQRLYNFSGQLGQTDPSLDPAYAGHLKARCPWPSSDDQMDPTVVPLDPVTPATFDNQYYKNVLAHKVLFISDNTLLDNPWTAGMVHFNAAVEKAWQVKFAKAMVKMGKVQVLTGDEGEIREKCFAVNPHY

SEQ ID NO: 63933 - protein, 251 aa, Zea mays
  Clone ID: LIB4738-061-B3_FLI.pep
RALCLSRVFDFSRRRCSSHIPREDACYSPIDTMAVFSDLHTADGLKSLEAHLAGKTYVSGDAISKDDIKVFAAVPSKPGAEFPNAARWYETVSAAVASRFPGKAVGVNLPAGSAPAAAAPADEAEDDDDLDLFGDETEEDKKAADERAAAAKASSKKKESGKSSVLMDVKPWDDETDMKKLEEAVRSVQMEGLTWGASKLVPVGYGIKKMTIMLTIVDDLVSIDTLIEDHLTQEPINEYVQSCDIVAFNKI

SEQ ID NO: 63934 - protein, 382 aa, Zea mays
  Clone ID: LIB4738-064-C11_FLI.pep
SAMDATGDAGGGRRPNFPLQLLEKKEEQPCSTSPAAAVGAGANGSGEMQMKKVAPPKRTSSKDRHTKVDGRGRRIRMPAICAARVFQLTRELGHRTDGETIEWLLQQAEPAVIAATGTGTIPANFTSLNISLRSSGSSFSIPAHLRAAGSPGPRFSGARGDPWERVVGLGFGGAEGPPSATSSPLLLSFHSGSVGLDVSSPSSSSAAANSDLSKKRRWEQEMQQQQQQQYQQQMAGYTQSQMPGTVWMVPSSNAQAAAAAGGGGSSSNESIWTFPPQPGSGDGGAAPVYRGVPSGLHFMNFPAPMALIPGGQQLGLGHENGGSSSGGEGHMGVLAALNAYRAHAVTVAAPAAQNGAEGGSSQQQQRGGGERQDSMSPSDDDS

SEQ ID NO: 63935 - protein, 444 aa, Zea mays; identical to SEQ ID NO: 63026
  Clone ID: LIB4738-065-E6_FLI.pep

SEQ ID NO: 63936 - protein, 228 aa, Zea mays
  Clone ID: LIB4738-067-B5_FLI.pep
GTIHKPYTGKTNTTQTEQMMRRRRSEHPPLQCNMQDIHGPVAVQRSSNRRPTDGQPEISIAFTSGFFTSVLGTVTVSTPFSRPAFTSSSLAFSGRRKRLMNWPLLRSTRCHLPFLSSSSSSLLRLPLMTSTLPSSTSTLTSSFLTPGRSALNTCASGVSFQSTRALAKAAVSEPPPEEAADGTMERNMSKGSHQRSREKGSKCPTRCCCGDSQATLLSMMLCYIYAYV

SEQ ID NO: 63937 - protein, 480 aa, Zea mays
  Clone ID: LIB4738-068-D10_FLI.pep
IHHFRTDSPEMSCWAAGRRSSASAMAENAGARGAKEAVVTSGKRVALGNISNVFRGSWGSGAANSASDAKLSSTKPDDVKKGSYACLRNVNTERGSSRRLASEQFDQAVSLLQKNTSLPSVPDVVSTGCSSPGLSQDCSVSMEDAMSTCNSTESSDVEYLNNNDDPSMTSSSHWWASDRPHFSDSMDVAEFNWRKHSPNHYTYKDPRLSTTLACEIYESLREAETRKMPPTNFLETTQTDMSKTMRAILIDWLVEVTEEYRLVPETLYLTVNYIDRYLSVKEISRHRLQLVGVACLLIAAKYEEICPPLVEELCYITDYSYTKEEVLQMEASVLNNLKFEMTVPTAKCFLRRFVRVAQVPDKGSSLHLEFLVNYICELSLLEYSLLCYLPSMVAASSVFLAKFILMPIKNPWNSSLSYYTRYTPSELRGCVRVLHRLFRLGPGSNLPAIREKYSQHKYKFVAKKYCPQSIPTKFFQDLTS

SEQ ID NO: 63938 - protein, 455 aa, Zea mays; identical to SEQ ID NO: 40951
  Clone ID: LIB4738-069-H2_FLI.pep

SEQ ID NO: 63939 - protein, 368 aa, Zea mays
  Clone ID: LIB4738-071-C3_FLI.pep
REIHDQPIQEEDYIDMDLSSPAASGAATTTASLFCYNSAMAASPQHSREFEFHMSAPPDLWEPVASPADELFYKGKLLPLHLPPRIQMVEKLLESASEKGLLSASTAPATPYQSAANSCYPSGELAAEYYFHDCISTGSDAAEEAAACEKKPWSKKLKFIRHLNLGLKLKASKAYLKTIFASKGGNPDGKNGVPRANELSSTQFSTWRKNPFGHIGSKRYIASPISNSTTVGGKFKEGESGHRRSFSSIIVRYSSSNKTSSVSSSSSSSSCSSSNSSSFSIPSSNGSGGVGPVLRRSSSASSEMDNPIQGAIAYCKKSQQLASVRKSASDAGFRFMSSSASKIAAESEDADGIFEITRNTNVNSVSPQ

SEQ ID NO: 63940 - protein, 268 aa, Zea mays
  Clone ID: LIB4738-073-A8_FLI.pep
TPQTSRLTPPSSSPVLRRSCHSRRVSAPLGPPPRRRHMSTQSISPASASAQFTYPAAAAPSYFPVPFHLQNAQYTAWTAAAPAVPVYNAIYPMPQVQQAQQLFQKDSKIITPEALATVKAAIANSEKDKKVDATKKAVPRKAAGQSWEDPTLADWPENDFRLFCGDLGNEVNDDVLAKAFSKYPSFNMARVIRDKWTGKTKGYGFVSFADASDLTSALKDMNGKYVGNRPIKLRKSTWKNRIDLEALEKGKTQPQKKIKLQKRSVLHK

SEQ ID NO: 63941 - protein, 203 aa, Zea mays
  Clone ID: LIB4738-073-C2_FLI.pep
PGHTPHTYAHTREYTAQHRQHLSSNPAGTMAAAVPLVLLLLPTTLMAASAASGGEKSTHIKLYWHDVVSGPSPTAVPVAQAAVTNTSKTAFGMVVVIDDPLTEGPDLKSSKPLGRAQGTYVGAGKDELSLMMNMNFVFQAGEYNGSTVAIMGRNAVFDAVREMAVVGGTGAFRMARGYAQARTHTFDLNTGDATVEYNLYIKH

SEQ ID NO: 63942 - protein, 197 aa, Zea mays
  Clone ID: LIB4738-073-H10_FLI.pep
LIYKLQNMFKNTFQSGFLSILYSLGTKPLQIWDKEVVNGHIKRPQDEDIQSNVLEIVGTNVQSTYITCPADPSATLGIKLPFLAIIVKNLKKYFTFEIQVLDDKNVRRRFRASNFQSVTRVKPYICTMPLKLDDGWNNIQLNLADLTKRAYGTNYVETLRVQVHANCRLRRIYFSDRLYSEEELPPEFKLYLPIQKP

SEQ ID NO: 63943 - protein, 216 aa, Zea mays
  Clone ID: LIB4738-074-H7_FLI.pep
SRPAGVVLFLRRRDETRRRESRGVEEDRGSGKMNRKPGDWDCRACQHLNFSRRDICQRCSEPRGVADRGGGGGGGDYASFGARGGSSFGGGFGAAGSDVRPGDWYCSCGAHNFASRSSCFKCSAYKEEAAVNSGAGGFDGDMSRSRGYGFGSGAAGAGAGAGAARTTNRPGWKSGDWICTRSGCNEHNFASRMECFRCNAPRDSGSAAMTYENYLH

SEQ ID NO: 63944 - protein, 306 aa, Zea mays
  Clone ID: LIB4738-076-G9_FLI.pep
RPLPCSALPPAGAASRACPRVPRFVVYLRKFTIDQQDLVQPYFSNHYGYPFLQLGKRRMSVIMLGSKKERNLSMHFQSDQKSSAKFCLFSKVQSASPPPGNTLVYLNVYDLTPVNGYVYWAGLGVFHSGIEVHGVEYAFGAHDYSISGVFEVEPRQCPGFKFRKSICMGTTSLDPLQIREFMEIQSVNYNGDTYHLISKNCNHFCEDICKRLTGNFIPKWVNRLARMGAVCNCILPESLKINAAGHDPASRAEDSERKMLTSSFSCFCSISLCQRHFSTSSPSLRSSANGTSWDTKQSNSTRLKKS

SEQ ID NO: 63945 - protein, 275 aa, Zea mays
  Clone ID: LIB4315-008-E8_FLI.pep
AETETARHLPFARRNAPCSEQPALLAHTTPRMQEEPGRRPVPPFAGVDLRRPKGYPVAVAKEEERPAPGGDPCPRCGSRDTKFCYYNNYNTSQPRHLCKSCRRYWTKGGSLRNVPVGGGTRKSSSSSSSSSSSATTTSTSPGAAPKATKRSKNSKRRRVAPAPDPAAPGTDASTADVASTAPSAATVTASEKPSATEHAAAAVATEKPPAALPVSVGAFADTSPAPDAGSGGVRELLPHPSRFEWPSGCDLGPPYWGWGTSVFADTDPALFLNLP

SEQ ID NO: 63946 - protein, 127 aa, Zea mays
  Clone ID: LIB4315-038-E12_FLI.pep
PRQGQAPRGGPAQAAEPRAQEGRGGEPAVREEAEAVRHQWRPAAQEGPPPVCQLAQGHAHPAPVPHPQAAPQGAPGTPPVHPHPRQEHRSFCEGRQGKEWGIWHKAGDRVYALSSMERPKFSLTEST

SEQ ID NO: 63947 - protein, 273 aa, Zea mays; identical to SEQ ID NO: 52645
  Clone ID: LIB4315-040-B12_FLI.pep

SEQ ID NO: 63948 - protein, 246 aa, Zea mays
  Clone ID: LIB4315-040-D4_FLI.pep
RARHGANRGGGERRAWSGSGRWRQDGEEGAEGGGGRGRERGEPARAVVGAGQRRAVPPGRDARRRSRPTRRRPLRLPRRRARYRRHRVRPVLGGGVRAGGAGGELPQGRSARAGHLQGEAGGRHGGRRGGRRQGGHPPGRGAYAGRASRPRQPGPRRDQKGVPGQRERLPHPSRLLPGAGRQAQADQVNSPIVLEQYSSNVRSALCRCAVSNTSICMLIEKKCRKLNKEPMHGCICTNYQRASLPA

SEQ ID NO: 63949 - protein, 228 aa, Zea mays
  Clone ID: LIB4315-040-F12_FLI.pep
PFCIAQLSMHPIGNPCTRDCRRTGRIKTQEPRTPLFHFLPPSKSNPNLTALGLNLRSRALGTLLADLSDSLALGGLGSELSLLGLLGSSIGLLLLLALLDGLGSGSGTGLGSDVALLLDHVERSTNDASLRLDGAASSLLGNLLRDTLAVLSAVEDGPCDTAGVLPLQEERLRLAVLESEDLAVATDVELTLARVDSRAGEGVLVGSHLVAGCALKATRCCVVDRGLA

SEQ ID NO: 63950 - protein, 307 aa, Zea mays
  Clone ID: LIB4569-002-H1_FLI.pep
IRKQESSREDGAVRQVAEEADRAEPPGVAGPVPALQGAEAVRQGPLRRLPAVARGGGRVRGRDRRGDREDQRLLPRPGGGVHHPPPGAAEPHRARAGPRQAQAGAGAARGRGRRHPQGDRQLPRRHGAAPQLQQHQLHRPGQDPQEVRQAHRRDAAACRDGVGAAAALLQDGDGVASGAGVRVLDGGRVPGGARSGPGRRRGARRRGGGAGHLPQHRGRAPHHAGRPRGELHQRKPLAAAAQPAGLRLAPVLRPAVSDPDPMTYVGLLLAPSWLAPASSISLPFRLLGPVHAVLALVFHFSRFLSSN

SEQ ID NO: 63951 - protein, 576 aa, Zea mays
  Clone ID: LIB4569-003-C2_FLI.pep
IRALLRPPGPRRSSPPLRHPYPQQSRSPYSFTSAARGAAMEDYPEELRTPPVSLVSIVGCPELHPSISTALSSQQPPMNTLALPDFAKASILARSVKPRDPLAPPQPPAGILKKDWLLKHRTRVPAAVAALFRADQVSGDPAQWLQACSDLENLKSAIQGKNTKSVVVLVQAQANDELSEDVIVALRKRAEIDSKHLVVLVEHDEAEWNRSLNKLKNVFVELCAAFYKEEGRRIKARIEKKNFASVELSIRYCFKVAIYAEFRRDWPEALKFYEEGVRVLREMIGTSTRLPPTQRLVEIKAVAEQFHFKISTLLLHAGKVVEAITWFRKHIKSYERVVGTPEVAFLHWEWFSRQFLVFGELIETTSTTIPDTLSPRFGTADNTLTEWEFQPAYYYQLAATYLREKRYAIECSSSMANLTTEVNGVPESVMPSVYVGQYVRLFEQGDTVSLLPLSDTEYTSYALSEAERFQDSYEIIALFRKAYESFQSLGATRMASACSSGMAIEYYAAGDFSNAKQLFDSVAGLYRQEGWTSLLWENLGYLRECSMKLNSPKDFISYSLEMAALPLFSGSGEENR

SEQ ID NO: 63952 - protein, 432 aa, Zea mays
  Clone ID: LIB4569-004-B6_FLI.pep
LEAGRARALGLFFSSLRPRSTTSSSRLCLLPLCSPHAAQPPTHPARRRRSPSPALRFASNRRCRVASGVPMDSAFRGALNEPMCLEETVVQQGIERCPFLRNINEPTSFSFSSVNFPIPARGAKGPIFEDGPNFDMAFRVFHGRDGVVPLSEGSLAQIEKPLPKPNPEFNPLAAKAATISLSAFGGFFSFGDFSNKRNKKNSNKKNPNNLPQNKGQPNNNNHEALSNEWLEMGQCPLAKSYRALSGIVPLVAKMMTPPAGMKLKCPPAVVAARAALSRTAFAKGLRPQPLPTKILVIALLGMAANVPLGIWREHTQKFSLQWFAAVHAAVPFIGMLRKSVLMPKTAMALTIAASILGQTIGSRAERIRLKRAAAAKLARESHGDAADYIKAPMSLKTGNHTVQFWDPLSLRAESTVAAGTTAVLVPAISAFN

SEQ ID NO: 63953 - protein, 228 aa, Zea mays
  Clone ID: LIB4569-005-H10_FLI.pep
YPPCQHPGACIHRAYGGACVQMRLSYSSMAPIFLNLIQWMDCSCSLSYTLPSYLGLLEVLVYKVYVDEDASISTIERRASLKEFYTIIYPFLQQLEDNLMDKDCKDKGWSAAAGGGGGGRKLVAEDDREDECGICLETCTKMVLPNCNHAMCINCYRDWYTRSQSCPFCRGSLKRVRSRDLWVLTGDDDVIDTVTLEKENVKHFLSFIDSLPLIVPDNMLLVYYDYLV

SEQ ID NO: 63954 - protein, 376 aa, Zea mays
  Clone ID: LIB4569-006-G5_FLI.pep
RGSLLGSDAAMSRAPRIVSVLFLLLGPLPVSLVHVTADGPVTATVHRQDGTAWRSFKQLLDARRGSHVEGLGELKRYLARFGYMPGAGAEHEPTTDAFDAHMEAAVRRYQSMLSLPVTGQLDSTTLDRIMAPRCGVGDGGHAVPVSLSGSAAASPDGAVSRFTFFKGEPRWTQPDPLVLTYAISPTATVDYLPAGTVRAVFRRAFARWARVIPVGFVETEDYEAADIRVGFYVGSHGDGIPLDGPLGVLGHAFSPKNGRLHLDAAERWAVDMDTETVHSAVDLESVATHEIGHVLGLGHSSSPKAVMYPSLSPREKKAELTVDDIEGVQWLYGSNPGFSLSSLYQQDSSMASGGSSWLPASARLVCAVLVMLVTHL

SEQ ID NO: 63955 - protein, 237 aa, Zea mays
  Clone ID: LIB4569-007-B6_FLI.pep
PLHCWMKHGPLSRGAPSLVIIFILLTTLFIILVIDLRLGLVRLLFIFLLFLLGRSLLSCSALALVVGSDGLVVLELELVSLGYIGSLVRLAQGFPPVASSFPHRSDRLVLRVLLLELLAKFLHEHEESAGSPLRLVGVLAGLPFPALGGLLRPLALHRQLGIGLGGALGFGPLHGGFERRHGAQRSDPRLAEGIPVAGGRIGVESRAKLPLAARGEREGGKGKGRRRALQEGRAGAL

SEQ ID NO: 63956 - protein, 549 aa, Zea mays
  Clone ID: LIB4569-007-D9_FLI.pep
YSSLVYTCSKHEAAKSGSAAMAMMDKWTGLGSALASMLFLWSMVQNHLPAAFGYRLSTWGNKLASLFSPYLEITISEYGAERFRRSDFFLAAEAYLSDACSRRARKLRADLGKDSKNLQVSVDDNDEVTDDFSGATIWWYASKQLARSQVISFYPGEDERRFYRVVFHRRHRDLVVDEYLPHVLEEGRAVTVRNHQRRLFTNNPSGSWNSYRGKSVWSHVPFEHPATFDTLAMDPDDKEDILDELRAFRDAKAYYTKVGKPWKRGYLLYGPPGTGKSTMIAAMANFLDYDVYDLELTAVKNNTELRKLFIETTGKSIIVIEDIDCSVDLTGKRKDDKKRASAEADDKPKTPTDPDKDGGSKVTLSGLLNFIDGLWSACGGERIIIFTTNHKDKLDPALIRRGRMDRHIEMSYCRFRTFKVLAKNYLDVEEPHELFGQIEKLLEETDMSPADVAENLMPMSKKKKRRDANACLESLVEALKQAKEDAAAAAAAKALADARAAKEEAEEAKEKEAKEKDEATNSKGAADPAGKDTKMSNGDVTVNKEGGDE

SEQ ID NO: 63957 - protein, 233 aa, Zea mays
  Clone ID: LIB4738-021-H9_FLI.pep
RVTAVYNLPDTNRREPPLDLVELVCLHHRISLGNGVPGSSPVVELAVVLVGVAVERAVQVPTPAVESREPNPLPAGAAPVRPYLPPFGDRRHPLAGSGNISGLLHVHCLQLDLGNSYYRVAASNNRLHDGVAAVHDAVDRGGSQLGLILLRYHLLVALRAHVHGRRAAEEATVIDAEDGSLGGLAPSLLVLHGFLNSDETALFAIPLRRSPRGRRGGEGRGIAGNSVGYEMGP

SEQ ID NO: 63958 - protein, 414 aa, Zea mays
  Clone ID: 700346311_FLI.pep
ELVPVLFRLLSSRHARYFYGTGPALLPRLAVPRAPAGPGEAMNCLQNLLKEPPIVGSRSMRRPSPLNLAMVRGGSRRSNTVKTLQAPGASTSGAESSAVEMGTEKSEVYSTNMTQAMGAALTYRHELGMNYNFIRPDLIVGSCLQSPLDVDKLRKIGVKIVFCLQQDSDLEYFGVDIRAIQDYSLQFKDIVHCRAEIRDFDAFDLRLRLPAVVSKLHKLINCNGGVTYIHCTAGLGRAPAVALAYMFWILGYSLNEGHRLLQSKRACFPKLEAIKLATADILTGLSKNTITLKWEADGSSSVEISGLDIGWGQRIPLTYDEEKGAWFLEKELPEGRYEYKYVVDGKWLCNEHELITKPNADGHVNNYVQVSRDGTSDEEKELRERLTGPDPDLTDQERLMIREYLEQYADAAER

SEQ ID NO: 63959 - protein, 353 aa, Zea mays
  Clone ID: 700356463_FLI.pep
PLLHPTADTSFPPPAHIPAVCCASPPDLVAPERPRARERRPPEPGLHSGGSERMLRCAYTQRRWAHRRGGFVTGSTGWSKPPPPGLGRAAGVGTKKSEWWTVDGEMHEIGESVPHRERFAIPRDNLPNRRRKQMREQFMRRTRLVLKDSEHETWCKNYMELYQELRENWERLYWDEGYSKKIAESHANYDSAEEDDIDFSPYSRRRQSNVEPNKDLGFGVNKRGETWERVTQIRDKFEYDRERRMRERAFAPMNTENNYARRDPRFRSQDDSSFAHTNLSDDFGLHGQTFGNRSDQSYENESNFRNKRDSSFQHEPRDRNQRNLNIQNEPSFRNHRYPDFQNQGGTRSQTFDE

SEQ ID NO: 63960 - protein, 549 aa, Zea mays
  Clone ID: 700466555_FLI.pep
RQTEKKNCSRRAQPQPPRRGQGKMADGSASASPPSVSPHQYHRDAIKSSVRNTAANRRREHAIAIGKERREALMRAKRVCRAPLSGSDEAAGEEGDMVVDEEKADLETRTTQAVEELKSALSSQGKGAQNRKTEVLRALRRLLSQSEVPPVDAAIKAGAVPLLVQSLSFGSPDEQLLEAAWCLTNIAAGKPEETKSLLPALPLLIAHLGENSSTLVAEQCAWAIGNVAGEGAELRNTLLAQGALWPLARLMLSNKGSTTRTAAWALSNLIKGPDSKAANELIGIDGILNAIIRNLEKADEELVTEVAWVVVYLSALSEKATSLIVRSSMPQLLIGRLLASENLQLLIPVLRGLGNLVAGDGYMVDSVLIVGNSVTDQALSSLIKCLKSDHRVLKKEASWAMSNIAAGSFEHKKLIFGSEATPLLMHLLRTAQFDIRREAAYTLGNLCVVPAGSGNPPTIIVEHLVAIVDGGALPGFINLVRSADIESARLGLQFLELVMRGYPDSQGPKLVETEDGIEAMERFQFHENEMMRNMANGLVDKYFGEDYGL

SEQ ID NO: 63961 - protein, 427 aa, Zea mays
  Clone ID: LIB3205-339-D9_FLI.pep
EGETNADCSRSGAGGEVQGVREMPPVKKSKKGKRKSKDGKLKIVRARGAPPALPPELRALDTEWWYAFLNKQVELEHAVPPDEGEAFRHFFRTSRKTFDYICSIVREDLISRPPSGLINIEGRLLSVEKQVAIAMRRLASGDSQVSVGTAFGVGQSTVSQVTWRFIESMEDRARYHLAWPSQERLEQIKAVLEDAYGLPNCCGGVDATHVIMTLPAVESSADWCDHAKNYSMFLQGIVDDQMRFIDIVTGWPGSMTFSRLMKCSGFFKLCEAGERLNGSVKVSAEGAEIREYIAGDSCYPLLPWLMTPFEGKHLPAPLQNFNARQKAARLLGTNALARLKGSWRILHKVMWRPDKNKLPSIILVCCLLHNILIDCHDELLPSVQLPEHHDTGYNRENCEQVDPNGKVMRENITAHLQHCEASKFLCN

SEQ ID NO: 63962 - protein, 343 aa, Zea mays
  Clone ID: LIB3206-117-D9_FLI.pep
RIATQYTHRYDNAPHVHAHGSMCLLQSYSLLHARHDTRLPSSHVGLDRVAVPREPVVVPRPEHDAPVLGGVLDHRQHLRHEVARRHEPAASGLGRGGEAEEHPPRPDGRPLRPRLRQAAHAGARAVLARRVVVELHPHVVEQPRGERGAQRRVRERALRRRRQVHGPPRAPAPAPGVGLEEPGQVVPVHAPAALDVEVDAVEDGVAEGPGLGPAAAEVVVPEVRRDAPGVGPGREAVAADAPADGEQDLDAHALARLDVRAHARAPAARRVAVARQVQRRRLAPAERREEGHVDEPVVARGAGLRQRPLVAVLAPVDGDAAAGARCGGYPAQCHQHRGHGQCH

SEQ ID NO: 63963 - protein, 464 aa, Zea mays
  Clone ID: LIB3206-117-H3_FLI.pep
DIGPHAKHLVHLGLRGAGTRPVQLPPAPHPPRRRMIAAGAASMGRAATPAPGAQSSRLPRAVSRLRLVLRSSEAAARSGSKRWIGCFRPSPSPATAAAGAAVVKEAKGKRPEVEVEPARGGGEDVWSADAETEVAQGGAFPEHLVIMVNGLVGSADDWKFAAEQFVRRMPDKVIVHRSQCNSATQTFDGVDLMGERLANEVLSVVEQRRGVKKISFVAHSLGGLVARYAIGRLYEPNSRRKSSGGESRDDVVHLNGHIAGLEPMNFITFASPHLGSSGNKQLPFLCGLPFLERRASEAAHLIVGRTGKHLFLTDNDDGRRPLLLRMVDDSDDLQFRSALRSFKRRVAYANANFDHMVGWRTSSIRRQHELPKHRLLVRDEKYPHIVYVEKEVTDNNETKAHADHYDPEEEMIRGLTQVPWERVDVSFQKSTQRLVAHNTIQVKSYWLNSDGADVINHMMDNFIV

SEQ ID NO: 63964 - protein, 326 aa, Zea mays
  Clone ID: LIB3206-118-F3_FLI.pep
GHRSVGIRGSRDSERMATYFVLNTGAKIPSVGLGTWQADNGLVGDAVYAAVKAGYRHIDCAQAYNNEKEVGFGLRRVLDEGIVKREDLFITSKLWDINHAAEDVPVALNGTLKDLQTDYVDLYLMHWPVRMKKGAGFGPHAVVPSDIPATWAAMEELYDAGKARAIGVSNFSSKKLADLLAVARVRPAVDQVECHPVWRQGRLRAFCASQGIHLSAYSPLGSPGTATVKAGAVLEHPAVVSAAETLGKTPAQVALRWGVQMGHSVLPKSTDEGRIRANLDVFGWSLPEDLLAKFSEIEQERLIRAGFFVDPDGVFKSIEEFWDGEI

SEQ ID NO: 63965 - protein, 735 aa, Zea mays
  Clone ID: LIB3206-121-A12_FLI.pep
PPSIHLPIHLHSRNKRGALQGYAPRRLYINQRLASNQSHHSCLPLRVARMPANDHHPNGLLQESAPGLQHDDMENQQQQVCWERFLLKDTLNVLLVESDASTRQVVSALLRCCMYQVISAKNGQQAWSYLEDKGNNIDLVLTEVFMPGVSGISLLNRIMRHSVFKNIPVIMMSSSDDMSTVFKCLSKGAVDFLVKPIRKNELKNLWQHVWRQRCHSSSGSGSESGIQTQKCAKSKGVNESGNNSGSNDDEAGMGLNARDDSDNGSGTQAQNLWTKLAVEIDSPQATSLDQLADPPNSTCAQVIHSKSEICSNRWLPDKSNRNCKKPKNTNDDFKGKDLEIGGPENLYMGHQSSPNGRSIKAADHENNSKESMMENLEEPTVRAADLIGSMAKNMDTQQAARAAEDTPNFSSKVPEGKGKNNQNDKYVLPSLELSLKRSRSCGDGANNKNTVKDDEQRNCVLRRSNLSAFTRYHTSAASNQGGTGLVGSCSPHDNSSEAVKTDSTYNMKSNSDAAPIKQGSNGSSNDNDMGSTTKDVVTKPMLPSAIKANGYTSAFHPVQQWMVPANATAGKTKADENTARNHYVHFENGGSGALQCGSSNVFDPPLEGQATNNYGGVKAGSNSGSNKGQNNGSTAAANAGLAETEIQAMDKSGVGGGNGNGSGSGSGNDTYVRRLAANMTPRQAQLKKYREKKKDRNFGKKVRYQSRKRLADQRPRVRGQFVKQAVQNQDGARER

SEQ ID NO: 63966 - protein, 257 aa, Zea mays
  Clone ID: LIB3236-032-D12_FLI.pep
LKGQDQHTLQKLLSENHFYQLVPESHWLIQWPPGHHAVPQGPMGFCVFGNIAVAARYAQHQHGLKRVMIIDFDVHHGNGTSDSFYDDPDIFFLSTHQLGSYPGTGKINEVGQGDGEGTTLNLPLPGGAGDYAMRCAFDEVIAPSAHRFKPDIILVSAGYDAHALDPLAGLQFTTGTFYMLASSIKQVAKELCGGRCVFFLEGGYNLQSLSSSVADTFRAFLDEPSLAAQFDDPAILFEEPTRKIKEAIEKAKSIHSL

SEQ ID NO: 63967 - protein, 354 aa, Zea mays
  Clone ID: LIB3239-017-G6_FLI.pep
MERGDGGSGRPPAERKAAWRDGAVTYFHLLFYIAISGGQIFFNKWVLSSKEINFPYPVALTLLHMVFSSVVCFAITKVFKIIKIEEGMTTDIYITSVIPIGGMFAMTLWLGNSAYLYISVAFAQMLKAIMPVAVFLLGAAFGLEEMSYKMLSIMSVISVGVIVASVGEITISWVGVVYQMGGVVAEALRLIFIEIFLKKKGVKLNLISMMYYVSPCSAVCLFIPWLFLEKPKMDDSISWNFPPFTLFLNCLCTFVLNMSVFLVISRTSALTARVTGVVRDWSVVLLSAAIFADTQLTFINIIGYAIAIAGVVAYNNHKLKVKPQANPQQGDENKVISGSTQDVVLSVSSAKETS

SEQ ID NO: 63968 - protein, 447 aa, Zea mays
  Clone ID: LIB3239-037-B2_FLI.pep
LASASSRPASGGATILPSPAGSPRTPPPLQIDHDDRENLSLLRFEALWEAEFAQDSLLVFSTGRTPVSYKGLRRDKPLVTPDVTIMSVGTVIAYGEEMVRDVGWEERLDSDWDRAVVVEETARLPQLTRMQPERNQGPHKVSFFVDKQGAQEVMDYLPKKLERRGVDVKIVYSSGNALDVLPRGAGKGQALVYLLKKLDSNGKPPKNTLVCGDSGNDAELFGVPSVHGVMVCNAQEELVQWYQENARDNPRIIQATERCAAGIMQAIGHLGLGPNVSARDLVGFPAYYPNNNKKGAAATAKPADVVVRFYVLYEKWRRGELPSSNYFSSSSAMRYLKSITHPNGTIIHPCGSERSLHASVDALLSSCYGDKKNFRVWVDRLVTSPIGTSSWLARFDSWEMEGGVRYCCRTTILLNIKPESPEGLELTHIHKTWVQGHSAGPGSALVF

SEQ ID NO: 63969 - protein, 293 aa, Zea mays; identical to SEQ ID NO: 48333
  Clone ID: LIB3239-038-D9_FLI.pep

SEQ ID NO: 63970 - protein, 200 aa, Zea mays
  Clone ID: LIB3245-008-G3_FLI.pep
AAWAASSMVHVNFYRNYGKTFKKPRRPYEKERLDAELKLVGEYGLRCKRELWRVQYALSRIRNAARELLTLDEKNPRRIFEGEALLRRMNRYGLLGEGQNKLDYVLALTVENFLQRRLQTIVFKNGMAKSIHHARVLIRQRHIRVGRQLVNIPSFMVRVDSEKHIDFSLTSPLGGGEPGRVKRKNQKKASGGGGDDEEEE

SEQ ID NO: 63971 - protein, 460 aa, Zea mays
  Clone ID: LIB3245-027-C4_FLI.pep
GLVAAFNSIQKPWSESPHSKSRALSADATACASPRQAGENLVPSAASARLFQSTAVSSPPGTGMQSTAAIGLVRPCAARPLPTYPSPRRGAGACSGAAQPILAPRGLCLSARASLLPDSPLEEEYRRCRAGRHVAAAGKVAAADGAVEEAGGGLVKTLQLGSLFGLWYLFNIYFNIYNKQVLKVLPYPINITTVQFAVGSAIALFMWITGILKRPKISGAQLFAILPLAIVHTMGNLFTNMSLGKVAVSFTHTIKAMEPFFSVLLSAIFLGELPTPWVVLSLLPIVGGVALASLTEASFNWAGFWSAMASNVTFQSRNVLSKKLMVKKEESLDNINLFSIITVMSFFLLAPVTLLTEGVKVSPAVLQSAGLNLKQIYTRSLIAACCFHAYQQVSYMILARVSPVTHSVGNCVKRVVVIVTSVLFFRTPVSPINSLGTGIALAGVFLYSQLKRLKPKPKAA

SEQ ID NO: 63972 - protein, 401 aa, Zea mays
  Clone ID: LIB3245-027-C6_FLI.pep
ETAGEGESKGSSGRAAMGHHCCSKQKVKRGLWSPEEDEKLVKYITAHGHSCWSAVPKHAGLQRCGKSCRLRWINYLRPDLKRGTFSDHEERTIIDVHRILGNRWAQIAKHLPGRTDNEVKNFWNSCIKKKLIAQGLDPKTHNLLPASRTLLHGNGANPSSNNPAHFNSNGCAAVVSVATTPFTISSPTKAAAYGTVTATPPPETMAPATYDVPNNYPDGMLMRHDQAATAAAIPGYPYHPGNGGGVLMSFRDQNAGLQTSVDFVNGSSSSSSMDHAAGMPNGNGFSQQGMGAAFMDVTAGMWSTAAVDSGMCAGMEVAQPPPPPPQQPLPPQGLVQGEVLVGRQTVMNGGGAVADKGMDMMDVSSVYGGAGAMAFDLELMESCALFCGSTGNTMEQLQWDC

SEQ ID NO: 63973 - protein, 442 aa, Zea mays
  Clone ID: LIB3245-034-G4_FLI.pep
IRRFELRARLMESMAQERDALDSPALSIDKRLRSDAVESPLVDDATQPKEGADGYPVKVRKPYTITKQREKWTEEEHGKFLEALKLYGRSWRQIQEHIGTKTAVQIRSHAQKFFSKVVREPGASNSIEIPPPRPKRKPLHPYPRKCADSTVTNAPMGEPKNAPVSSPSGSDQENGSPVSVLSAMQSDAFGSSISNPSTGGTSPASSDDGNNVPEIVNGEENLLTQQIEDRSHQESKQDNSDGELSEEDSSRVQETSLKLFGKTVIIPDPKKVCSSDGGAGDDTQEVMQTSWVGGGVAAYPAHNGWFLPFHSFPAHMYESGDARISPLHMWWPYYGFPAGHPRGFGTGLLNEGAIESDADNSPSVETNSDRTGNVHVQTTTPTIHNNAVKESVGPVEMPESGPSIELKPSANSAFVRVKPSSSVSGDQSLVRGFVPYKRCKVE

SEQ ID NO: 63974 - protein, 614 aa, Zea mays
  Clone ID: LIB3245-037-C4_FLI.pep
LCLPALPVVSHAEDIEISLCDGNSEDERRRRKIGSLRRKAIHALKKRGRRRVDFRFPPAAISIEDVRDAEEERAVASFRDRLAAHGLLPDKHDDYHMILRFLKARKFEADKAMQMWSEMLKWRKEFGTDTILEDFDFAELDDVLRYYPQGYHGVDREGRPVYIERLGKVDPNKLMQITSVDRYIKYHVQEFERAFRERFPACTLAAKRHIDSTTTILDVQGVGFKNFSKTARELVHRMQKIDSDYYPETLHQMFVVNAGSGFKWIWNSVKGFLDPKTSSKIHVLGSNYQSRLLEVMDSSELPEFLGGSCTCSDKGGCLGSNKGPWNDPYILKLIHNLEAGCVREIKPVSEGEERNSSSFRLEQMKWQGLLSDTSNAESGSDVDDFGASFVHKVSDYGCLTPVHEEVKGTDRVTYFSYDDQSHPDMAPESYHGARRATGMEHHKPMADFSQYSANRRPGNSALNVNGTAAQSGWENVVKLVVTTLVKLFYFIRLFLSTAERRLESIHRPAPPAAPAAAEEPRPRAISDEEVCACLQRLDNLESMCSHLAAKPPQIPEDKELILLSSFERIRSVEADLERTKRVLNATVVKQKALVETLESVQESSSRVKKRMFCS

SEQ ID NO: 63975 - protein, 303 aa, Zea mays
  Clone ID: LIB3245-038-E12_FLI.pep
YWLSSCSGVAKSRSTTRSRRPPPPAGHRALSRAPSVAFIAGSSCGYSLAGAKDEQWERPMECAPDSVTRSSALRFLDAKRPRSCVRLKDAGGRLAVASDAFDTRPSSRPDGIANRMPPMMRAASRAANATMSAHDTVPGHRRSTTRFARLITLNPRRLGKLGGDVFSTVLFPGLPVGSSSSTDASHPCQGAQLHYCIVRLGWGWASNNPTYPDEAVVEEEPDQARPVAGVLADGGVDDGLDEALGGRAAAVVVPHLQLRRLRGVEACHRHRHGRDELPAYMGGPSSGLGAHRRPRPAASCYHY

SEQ ID NO: 63976 - protein, 384 aa, Zea mays
  Clone ID: LIB3245-047-B6_FLI.pep
SSRGESIYLAPSDGSELPHRRPRAKRSMAHAATLAAAAAVVVLIVVCCCSSSEAASHSANARQPPLAPGLSLDFYKRSCPRAESVVRRFVQDAVRRDAGLAAGLLRLHFHDCFVQGCDASVLLDGSATGPGEQQAPPNLTLRPTAFKAINDIHDRLQKECGGAVVSCSDVLALAARDSVVVSGGPSYKVPLGRRDSASFATREDVLSGLPPPTAAVPALLAVLSKINLDATDLVALSGGHTIGLGHCASFESRLFPRQDPTLNATFAGHLRRTCPAKGTDRRTPLDVRTPDAFDNKYYVNLVNREGLFTSDQDLFSNPGTRPLVEKFARSQRDFFDQFAFSVVKMGQIKVLTGAQGQIRRNCSARNAGMTWSVVDEAAQQSFVF

SEQ ID NO: 63977 - protein, 221 aa, Zea mays
  Clone ID: LIB3245-068-B3_FLI.pep
HLLQVAAVLAAAVVLMATASEGFISKKTWSAIRRADRDGPFVGLVVPNAYEMVPVLNSPDFKPSSNIPILDVQGRRFRFGTIGSQNVVMVMTGLSMLNAGLTTQLLLSLFRVKGIVHWGIAGNANEDLQIGDVTIPESWAHLSLWNWQRHGDGPENELPLENAGDYTREYGFLNFSDYTVGQDAGNPELAANTLNSVWYQPEEIFPISGTPEERQHAFWCP

SEQ ID NO: 63978 - protein, 395 aa, Zea mays
  Clone ID: LIB3245-068-G10_FLI.pep
IDERSVHGGAALVLRLLVCVVAARAVSAVADGPLLNGNFEDPPNQSQMSGSVVTGEHAVSYWKTSGHIEFICSGQKQGDMVLTVPDGAHALRLGSGASIQQQISLTRGLYYSLTFSASRTCSQDEMLNVTAAPVSGSPAQTGELPTQTVYTSSGWDSYSWAFRADAGLMSITVTHNCGEEEDPACGPIVDAFAIKTLSQPEASQNNMLRNGDFEEGPYIPPDSQWGVLVPPVDEDDVSPLPGWKIMAYKKSVKYIDSAHFAVPSGARAVELVSGVETALMQEVYTTVEGSWYRLEFSAGDADGCASSYDDGSSSGMKVKAYAGTAETTVDVDFRDAGGSKRGKIEFRATASPTRVVFVSLGYHTKSDNSGTLCGPVVDDVSLVPIPQPYARRLLL

SEQ ID NO: 63979 - protein, 347 aa, Zea mays
  Clone ID: LIB3245-069-C9_FLI.pep
SSPSTTHSLPVSRAIEIVAERVSIHGRRHAAGQIGGRGRARGRGPFPGAAAHRHGGGRPGPRLQRAPGGAAVRGVGALLVVLLPRRHRRVRGHVPLPLRDRADGDGREQVPLQVRHRGHPGHRVGVRRHDLRARVLHRGRVGRPHQPGRHVRPPPRPEAVADAGGLLRGDAVPGRRLRRRRREGVRQRAVRVRGRRRQRRQPRVHQGRRPRRRGRGHVRARVHRLLRHRRQAHRQGLPRPRAGPAAHRLRRIPGAPRHHPHHRHRHQPRQEPRRRHHLRQPARVARPLDLLGGPVRRSGACGGVPPGRPQGHPLQVQRSLLVLLALPSYTEFCCHIGRSMDHHSANV

SEQ ID NO: 63980 - protein, 506 aa, Zea mays
  Clone ID: LIB3245-069-H5_FLI.pep
RSRQQHPEAAGHTHSTRRSSITTMGSLGSAAQQQQQPHAVCLPYPAQGHITPMLNVAKLLHARGFHVTFVNTEYNQARLVRTRGAAAVAGLPGFRFATIPDGLPPSEDDDVTQDIPSLCKSTTETCLGPFRRLLADLSDPPVTCVVSDVVMGFSIDATKELGLPYVQLWTASTISFLGYRHYHLLKSRGLAPLKSVEQLTNGFLDTAVEDVPGLRNMRFRDFPSFIRSTDPDEYMVGYVLQETGRSAGASAVILNTFDELEGEAVAAMRSLGLARKVYTLGPLPLLAREDPPTPRSAISLSLWKEEEECLRWLDGRDPGSVVYVNFGSITVMTSDQLVEFAWGLANSGRPFLWIIRRDLVRGDTAVLPPEFLSETAGRGLMATWCPQQAVLDHPAVAAFLTHSGWNSTLEAMCGGVPVISWPFFADQQTNCRYQCNEWGVGMEIDSNVRRDAVASLIAELMEGEQGKEMRRRALEWRDKAIEVAKPGGTSHRNFDDLVRNVLLPKN

SEQ ID NO: 63981 - protein, 279 aa, Zea mays
  Clone ID: LIB3245-070-F9_FLI.pep
QQLAYIARASSIDLLCLHHQSTASLALPVSSASARASAIRSDPAGRRPTDGVHGRRGAGGDAGAGGRVLGVRGHVRGAAGAHHGAGQVQAALEAGRGDQEHRLPEGRRQRGAPAAVYPGRHLRRRPQAGRTRTRTRTRTRCRCRRSRRGAGGGGAVPGVGGAVRRGDAGAGRVAVLHAQAHALRPVHVPAVPLVAPPRGGALRVRGAVRPPRGRRAHGDAVGRRGLPGLRHVPARRRGLLRLRHRQGRRRPLRRRRAVEPVPRRVPQQHRLPRRAPPAR

SEQ ID NO: 63982 - protein, 305 aa, Zea mays
  Clone ID: LIB3245-075-A3_FLI.pep
PSSSSGMAAVVALTPAYPAFLHVPFRVRRDGRVRLSPRRPRYSAGRCRAMAQTFQGGAAASYAREMERLSAKESLLLAFKDAGGFDALVSGKTTEMQRIDVNERIVGLERLNPTPRPTTSPFLEGRWNFEWFGDSSPGAFAARLLFERSPTSVAHFMGLDVLIKDGYSKLSSNLKFLNMIQSKFLLTTQLSVEGPIRMKEEYVEGLIAIPRINEESLPEQLKGLLGQTAGALQQLPSPIREAVSEGLKLPLGGAFQRLFMISYLDEEILIIRDAAGAPDVLTRLEGPQPSPGDGTADAVISEYES

SEQ ID NO: 63983 - protein, 202 aa, Zea mays
  Clone ID: LIB3245-080-A5_FLI.pep
WASDSQFARDALFEYAKQVKDLGHRLFGLLSESLGLNPSYLTDIECDQGQIILGHYYPPCPQPELAIGTSRHSDSGFLTILLQDKVGGLQILHDGQWVDVAPTPGAFIVNIGDLLQLVSNDKFSSVEHRVVAKNAEARVSIACFFSTHFHPASTRMYGPIKELLSEENPPLYRETLVREYVARYYSVGLDGKQKTALADFRL

SEQ ID NO: 63984 - protein, 741 aa, Zea mays
  Clone ID: LIB3245-086-B11_FLI.pep
FPWPVAADDLFERTNDSSSRLLPLPALCLVNLAPRPASAVAFVAISLRSPPLLQVGAKSSLWPKIQVESASPAEARDSGAMSLDSEASSQGGDYRSFRQITRDRLLFEMLRSTRKNSKSTWKVLIMDKFTVKIMSYACKMADITEEGVSLVEDLYKRRQPLPSLDAIYFIQPTKENIVMFLSDMSGRSPLYKKAYVFFSSPVHKELVAQIKKDSSVLPRIAALSEMNLEYFAIDSQGFITDHERALEELFSENAEGSHKYNACLNTMATRISTVFASMREFPRVHYRIAKTIDASTMTTLRDLVPTKLAASVWNCLAKYKTTIPEFPQTETCELLIVDRSIDQIAPIIHEWTYDAMCHDLLCMDGNKYVHEVPTKNGSATEKKEVLLEDHDPVWLELRHAHIADASERLHDKMTNFISKNKAAQLHQARTDGELSTRDLQKMVQALPQYSDQIDKLSLHVEIAGKLNNIIREQCLRDVGQLEQDLVFGDAGTKELINFLRTQLVVSRENKLRLLMIYAALNPEKFESDKGAKLMQLAGLSADDMIAVNNMRCLCGPDTKKSSVGGFTLKFDVHKKKHTNRKERTGEESTWALSRFYPILEQLIENLSKGELPKDEYNCMNDPSPTVHGLPTSSSARTSPAHSMRSRRTGGTWARPRGSDDGYSSDSVLKHASSDFRKLGQRIFVFVIGGATRSELRAAHKLSSKLKRDIILGSSSLDDPPQFITKLKLMSVEELTLDDLQL

SEQ ID NO: 63985 - protein, 429 aa, Zea mays
  Clone ID: LIB3245-087-G1_FLI.pep
AHRVLQILNRCKRNHQNCTHNPRLRCATTPPWRLVVVEVPGTRQPLGAEFSDSGFGYLVVGGHGGPVLSAGREQVKVSELEISMQIREGPARRQAPSAAGALRSPMSAMMLAMFATMASFYVAGRLWQDAQNRLHLIKELDRRTGQGQSAISVDDTLKVVACRQQGKRLASLEMELAAAKHKGFVGKYTPETNGTHSGKKPLIVIGIMSSFGRKNYRDAVRKSWLPTGSMLKKLEEEKGIVVRFVVGRSANRGDTFDREIDDENRSTKDFLILDDHIESDEELPKKTKSFFANAAETFNAAFYAKVNDDIYINVDTLSAMLETHWDRPRVYIGCMKSGEVFSDLTHKWYESDWWKFGDGKSYFRHASGEMFVISRAIAQFISINKSALRTYAHDDVSVGSWMIGLAVNHVNEAKLCCSSWPSGALCSAL

SEQ ID NO: 63986 - protein, 153 aa, Zea mays
  Clone ID: LIB3245-087-H6_FLI.pep
QFSRLQQSTTMALRAMRPLLPAATFVMVAMASWGAHGGASDDASSLLAFKAELAGSGSGVLASWNGTAGVCRWEGVACSGGGQVVSLSLPSYGLAGALSPAIGNLTSLRTLNLSSNWFRGEVPAAIGRLARLQALDLSYNVFSDHQSAVKTFS

SEQ ID NO: 63987 - protein, 461 aa, Zea mays
  Clone ID: LIB3245-089-C4_FLI.pep
LLCVLGFDVFSLIVWIRYKLHTYDRNCMLKLISSHPKITVRMQYTPHTTQLALHTPGTRKCKGGSTWTAGQMANEMVVRTSDVRLEGVELPEVHGGDVLGVAVDDVLGEQHVGGLAWVVRVPEHVLVPGVAQARRRPARHQPVVRAAVAAARHAGRLEPVVGVVGDELHDEVVDVGEAEPGAGEAGVEVDDELPEPGVVLRRQLVGQLHALVLAHSVDGLLVRDAAQRPHVGHHELARVQRVQPRELVPEVEDEVVDEGVRRLADPRARGQHGHEVVVEEVVGSDGDGEDGLPPQKLAGPVPAQQRVQLPPRDVEVVHLDVHPDAVHEHLPRGVQDPAAARRVVDAVQDGSARRVGRQERRRVVRLPQHLADDVRDGPPVREPPRGRPARRREVDAVRGHVGPGQRRDVVVVAGVHQRVPEDEGRPAAELVHHLRSRQGHAEAEHRHGGQRRRQPTHMLAS

SEQ ID NO: 63988 - protein, 490 aa, Zea mays
  Clone ID: LIB3245-090-A11_FLI.pep
PTVGHRAPGLLPELLGHLPYCLRVLTVAHHSPDGLRDHLTTNHGAPGLQHGRVVRGSHGDTDLEQLHYQLLVVELVGVPRPRHHRHAGAHGLQRGVPPAVRDEPAHRRVGQDEHLRRPAPDDKAAVAARHQLREPIGHPFRLLGVRAADDPDEVLAGQVEAARELAHLGRREMGQRAEGHVHHRALWFRVQPLLAGARVPREPVVGAPRRHVLAGERHRPDEPCAAPQRRGVVLHEVRLQLVEAVEHLAVAPLVRSVHALEEGPALRPLLGLHHLAAPQLDAARQPRKQHERVRSSGAASTGLLRSVDSLQARENKLLPRNAIRGTPCSAAASADQSKKLSVTAASGRFSAKNRSNGSRSNWAPWKNFSRSSMVLSAGAHSTPGGRPTSGKGTTAMSMARAPSVPREASLARSTAERMSWAFTGVVRMVHLTPRAAKSAAMSAIGMRCPGARNGKKRMCSGCGSSLMAMAGCATAAAQLHSCIFYKEGYS

SEQ ID NO: 63989 - protein, 232 aa, Zea mays
  Clone ID: LIB3245-092-A1_FLI.pep
PIELKRLHFQQCEPVEPPAKHPRVEQLPPNNMLLQRSMSSTAERSAEILRSPVRAPLGIPFCSASVGGARKFPPPPIVTGEDHFNSCFEDGGLFSTELLHRRMEKTAETLGLAGVTMHSAELLNIALDEYMKNLIRSSVELVGGSVQRDARKGTLPHKNQVYGNRINGVWLPNHVHMQSGSGSSGTTNEIGSNQLISVSDFKVAMQLNPQHLGENWPVLLEKICLCSSEEND

SEQ ID NO: 63990 - protein, 344 aa, Zea mays
  Clone ID: LIB3245-092-C3_FLI.pep
NPTNHWPLRRKDYFKNGLLQAHCTGTCRGSCSAPRPCPDGHRSQLQPLPGLHRRHLQRRQVHRRPHQPEGPLRLHPRLRDRLHHRDGAAHPDQRPVQHLLAGLGADGVRGGRHQAEQPERAGGRQHRRRHRERPPCVLQHHLRRLLGPERRLLPDHHHPEVQPGRHRHRLRAVPGRPGHLRRVHRPPGHHAQEQRGDQLRVHRPVRQRRRAAPLPGPVGDLRKRHRLRQLPVLRLRRQHDRGAVRRLLQPAACQLPRRQHPGQLHHGAHHHVGAHQHVAQRLPDIAVAGQALRDLHLGSRPFQEPRLQVRHTSTSTARQRPCWLLVDGYHTFNAFKLDLDFIFR

SEQ ID NO: 63991 - protein, 312 aa, Zea mays
  Clone ID: LIB3245-116-C12_FLI.pep
KNRPTSTSQFCLQKIQNIIRPRRHPVRPTNPASMRSMFATRSLLAAAASAPTVLRASAFPSRSLLLSLPFPRGRAARNMLGAARSISSAAPSRVGGRAAMEVRAAQSGEIHVIVGPMFAGKTTALLRRVQAEAGNGRSVALIKSDKDNRYGLDSVVTHDGTKMACWALSELSSFHDKLGIEAYNKVDVIGIDEAQFFDDLYDFCCKAADRDGKIVVVAGLDGDYKRRKFGSILDIVPLADSVTKLTARCELCGRRAFFTLRKTQETKTELIGGADVYMPVCRQHYMDGQIVIEATRIVLDLDRSTVTAKALK

SEQ ID NO: 63992 - protein, 361 aa, Zea mays
  Clone ID: LIB3245-117-A1_FLI.pep
SLMGRAPCCDKNNVKKGPWSPEEDAKLKEFIEKHGTGGNWIALPQKAGLRRCGKSCRLRWLNYLRPNIKHGEFTETEDRVICSMYASIGSRWSIIASQLPGRTDNDIKNYWNTKLKKKLLGSTAAPHPHRAPRQQQQHHHHRPGLNLMLQQTLPSLPQLATYNSFFSVAGGGALHHDDPIIPALALPPPHQDYMLSPGGGGGGLGIPTSLLHAQQQFQQQHQQHVVKEESGSMIVFGRDQQSCSSSDGGGGAHSQHQQPQYGNGHGKELSFDGYLFGYSNGGSGMEHDNCGRLMQQLQDAHQQQAHQHLVPVEYNYEEIKQLLMSTAAADTLHAAGSHDDDDDNGGIEGFGGSQGNKVTMM

SEQ ID NO: 63993 - protein, 452 aa, Zea mays
  Clone ID: LIB3245-118-C5_FLI.pep
LHISSYILTDRYRPQSITLQSTDLAQSTHPAMGLLPTDRMDSLFSPRCVWVTGPIIVGAGPSGLAVAACLREQGVPFVVLERADCIASLWQRRTYNRLKLHLPKQFCQLPRMPFPEDYPEYPTRRQFVDYLERYAAEFEIKPEFGTTVLSARYDETSGLWRVVTNGGAGGDMEYIGRWLVVATGENAEAVVPDIPGLAGFDGEVTHVSEYKSGEAYAGKRVLVVGCGNSGMEVSLDLAEHGARPAMVVRDAVHVLPREVLGTSTFGLAVLLMRWLPLWLVDWLMVLLAWLVLGNLARLGLRRPAAGPLQLKETHGRTPVLDYGALARIRAGDITVVPAVTRFAGKGGQVEVADGRTLGFDAVILATGYRSNVPQWLQGNDFFNKDGYPKTAFPHGWKGESGLYAVGFTRRGLSGASADAVRIATDLGNVWREETKPTKRAGACHRRCISVVF

SEQ ID NO: 63994 - protein, 449 aa, Zea mays
  Clone ID: LIB3245-120-H12_FLI.pep
ATRSTTRLRPKVPKQTVESEKAEADVPRSDLTTSHKLLLHIPQSTHPDRARPHLPDLICDDLLPPDPAPSPPTATAAAAASPTEVLSSAIQPEPAAATMYGWEMLSFNIHDGFLEAIVRGNRSGLLTAADYNNLCQCETLDDIKMHLTATEYGPYLQNEPSPLHTTTIVEKCTLKLVDEYKHMLCQATEPLSTFLQYITYGHMIDNVVLIVTGTLHERDVNELLEKCHPLGMFDSIASLAVAQNMRELYRLVLVDTPLAPYFSECITSEDLDDMNIEIMRNTLYKAYLEDFYKFCQKLGGATAEIMCDLLSFEADRRAVNITINSIGTELTRDDRRKLYSNFGLLYPYGHEELAVCEDVDQVRGAMEKYPPYQSIFSRISYGESQMLDKAFYEEEVKRLCLSFEQQFHYAVFFAYIRLREQEIRNLMWISECVAQNQKSRVHDSVVFIF

SEQ ID NO: 63995 - protein, 405 aa, Zea mays
  Clone ID: LIB3245-188-B8_FLI.pep
LSSRLPAPPRSPIGMALPKPRPPTPTASAATGTSSSRIDSPSLKAALAMALIHYNRLPGKANATAGTSPPSLLHWKRKAKDRKREILRLREELKVLQDGVRGEEMEPPVASCRCHFFDGCRDLRPQQGGGGGEHWVDEVLRRRFLRLVRWKEKRRRVDRSLPSSSLIDFNSEDEMQQLSMSTDFLVELSDGIFAKSEAGHSFATFSHQAVDFILATLKNILSSEREKDLVGEIIDSLVTRLMKRMCTVPEKLVTSDSGSTGCSDAQFSVQHLFRKLGNDEFIGQRVILVVSQKISNVSERLFLADPFADAFPDMHDNIFIMIQLLEFLISDYMKVWLCCEHINKRLFEECTRSILKARNDLQILENMNGLYVVYIERVVGRLARDVAPAAHQGKLDLEVFSKLLC

SEQ ID NO: 63996 - protein, 477 aa, Zea mays
  Clone ID: LIB3245-193-D12_FLI.pep
PSAMDKFLVPAPPHCGEEPAPPPRRHRWRRIIAELDGRIDSRFQHRDSRLLLDSFTEVGAFDHKYYIHGEERCRTYVDRIISASTINFHPVREGVSAIEFDRKGIYIASVTLSGCLTVHDFETLYCSKYGPPCSMPDESSNYVLHISNRIPLNAVRWNPGNQDEIACTSNQSDNVFLFDIGYVSSTPTEVLHKGKSKFPSLYSESCKSLTDITFTSDDKSRIFASGLDGAVYMWDRRSSKTHCLELVASPEAQFNTVKLTVDNRTVFGATKNGTIHVWDLRGGRASAAFQSHNEVQQLMSVKLSTLLGKIASLKEQSNIVSSPILSIDFNPSCSYQLAFHLDDGWSGVLNVNNLNVTHLHCPPPAWLEGTDLVLQKQLRKPTWLLTSSIYAVGSSSYDGIYLLDFHPDTSSACHVDYKEETRVSGENQPAGNKFVPLSQRVLSCAAHPLSHTIIAGTQFSSLLMLSQKYKSIRNPEP

SEQ ID NO: 63997 - protein, 429 aa, Zea mays; identical to SEQ ID NO: 45748
  Clone ID: LIB3245-195-C6_FLI.pep

SEQ ID NO: 63998 - protein, 414 aa, Zea mays
  Clone ID: LIB3245-195-E3_FLI.pep
ARPLPRHLGRRRASPGHQVAYIFFPFLKMDHSSDEDTEISDSEIDDYEGKIYARLMSGDLKLNKNGENYICPFCSSKKKNYSKSSLVQHASGVSAAPNREAKEKAVHRALFKYLKNGLAKSPEPGSHATPVEPQPLQNRDEKFVWPWMGVLVNVPTEWKDGRQIGESGNRLKEQLSHFCPLRVIPLWTFRGHTGNAIVEFGKDWNGFRNARTFESHFAAGGFGKKDWIGKKNQGSELYGWLARAEDYNSPGIIADHLRKNGDLKSVNDLAKEGARKNDRLVANLANQIEVKNRYLQELECKYSETTASLEKMMGQREQLLQSYNEEISKMQQLARRHSQKIIDENQKLRSDLEAKMNDLDVRSKQLDEIAAKSDYDRRSLEQEKQKNAIKSSHLKLATLEQQKADENVLKLVEE

SEQ ID NO: 63999 - protein, 411 aa, Zea mays
  Clone ID: LIB3245-199-D10_FLI.pep
IDGSSVFQYVRRGVTLRNRRSGSRAPGRCSWTHTHLIKDPTSVLQVGLQPGRWRWLLWTGVDNLGRRRRDRRLAGDDGGEGRERRHGQHGAVAAVCRLLLHAAGGCCSREDGLASMVARRQWRRLHAVVGVAVVEGGAATRVREGMPGWVLLEAEAGRVHRHGQVVGALHHHQLAILVACLVQYPADDPFLLAGAASGGEVAVEAILVQDPLGLLAARRPALVEDERLLHAEERAGGGVEHLAVLPGGLPVPGAGGAVGTEARGVLAVAEAEEVPLALPHTRRVGELPRLAPVEVHLGDVDATAGAVEHLGGEVEGDQLLVGGVEPKPRGQPVLPARRCHLLPEQVPQRVAHGLVLVVMVHTEWLATQARSEIDLARTKQEEENPRGERYLIDQEPYTLANLTLTLSFLQD

SEQ ID NO: 64000 - protein, 537 aa, Zea mays
  Clone ID: LIB3245-236-E7_FLI.pep
EIYVWVGRVTQMEDRKSATKAVDEFLINQKRPKTTRVTQVIQGYESHAFKSKFESWPVGNAAGNPGTEEGRGKVAALLKQQRVDPKGAAKSTTPVNEEVPPLLDGGGKLEVWCVDGNTKTALPKEDIGKFYSGDCYIILYTHHSGDKKEEYYLSYWIGKDSLVDDQVSASQIINTMWNSLKGRPVLGRIYQGKEPPQFVALFQPMVILKGGIGSGYKKLIEEKGAMGETYTTEGIALIRVSETSIYNNKTLQVDAVATSLSSTESFVLQSGNAMFTWFGNSSTYEQQQWAAKVAEFLKPGVAVKHCKEGTESSAFWFALGGKQSYTNKNTPQDIITREPHLYAFSFKNGRLEVTEIFNFSQDDLLTEDMMVLDTHGEVFIWIGQYVESKEKQKAFDIGQKYVEHANSIEDLSPHVPLYKVMEGNEPCFFKTYFSWDNTKSLVHGNSFQKKLSLLFGLRSEGAPRSSGNGGPTQRASALAALSSAFNPSSQQRLSNERPKSTGDGPTQRASALAALSNAFNPSLKPKTSPPSRSGPLC

SEQ ID NO: 64001 - protein, 329 aa, Zea mays
  Clone ID: LIB3245-244-D3_FLI.pep
STSQWKCTVVQRPSTSIRLLRHGALRRRALREALGVGAVVVDHVVVPRPLHGLLRRGVHLLPVPAVRRRGRRRGREVAVLRHEGGPRPVRLDAAALRGPVLGVPQRAVEAHPLRRRVRHAPVRVVLELPDRRPVHQHEDVLLRPLDGVGVEVGGGVEPEVELLLPAAVAAGVHVGVQRVRLPAGVAQELEVDLVVDIPRPLRDEVEGGDRAGGVVGDELDLHVGAREEVRVLGAEPGAGGAVERQRQHLAVGRDAPAAVAPRHLQPVVDPARRRAGGAEPQEQRQQRACPRAKRARHCSSLARTGSAFFFSKKVYMYLRQECVVYSCVR

SEQ ID NO: 64002 - protein, 297 aa, Zea mays
  Clone ID: LIB3245-269-H7_FLI.pep
AGVLDCSCQRHLRAALPAPAVPPSPMERAASVISSLLGGGGGSGAQAATVKSVLVYPIKSCRGISVPQAPITATGFRWDRQWMLVNSKGRACTQRVEPKLALVEVQMPPEAFAEDWHPTPDDHMVIRAPGMEPLKVPLSVECATISDVSVWEWTGAAYDEGAEAAEWFSTFLGCPTRLVRFNEDSETRLTDPDYARGYKTMFSDGFPYLIVSQGSLDALNEILKEPIPINRFRPNILVEGCHPYAEDMWKSVKINKLTFQGVKLCGRCKVYFGQNAVCKESLSANGEGRIVKVGDPV

SEQ ID NO: 64003 - protein, 306 aa, Zea mays
  Clone ID: LIB3245-270-B3_FLI.pep
FLVLQRAHRAVSGADKTWAPVAAVGPSLVLDLERRLEVEARGVGGLGRPVPGDHVAGRERLPRGQRGEPHGEGAHERAPHQAPGCPPHVPHVQPLHRVGLLYLHGSYVALAVLELDEQREPEVSRALVHTERDVLPAVLAGRPPVHDGQLAPVAQPAAGPGDGHPAERGAAEVEVGAAERAQPAGALVRDDHRDGTARAHAAVQAPDLVAGAAALAVLEQHGAHRPHPRLHRHHVHQRPVPARAAVAAVALCLAVPRRSGRPPLRVDARLLGRLAAAEQQCGRDRGRGQQGAEEEESESESARGSH

SEQ ID NO: 64004 - protein, 513 aa, Zea mays
  Clone ID: LIB3245-270-B5_FLI.pep
ATGFPKSRLPAVTHLGSAPPSAREVPRPQRGVTMVEVMMVPSSHGCGEGGGVGSDGKAEDGQQQGQGQGQVLALLLAALRKSVVLPCQMADADDPSGAAWGMEIGWPTDVRHVAHVTFDRLHGFLGLPVEFELEIPGQVPSASASVFGVSPESMQCGYDDKGNSVPKILLLMQERLYAQDGLKAEGIFRITPENSQEEHVREQLNSGIVPDDIDVHCLASLIKAWFRELPEGVLDRLSPEQVLHCNTEEQCIELVKLLPATQAALLHWVVELMADVVEEEESNKMNARNVAMVFAPNMTQMSDPLTALMHAVQVMNLLKTLILKTLREREDDDAGAYSSFSSSLSSSGELDEDDGHDQQDDENDSGSEKNYNGSANGRPRDIDKATALRVDSEQLIGVSRRHTSTDFHLPYIRYSNDSEDVSLDDIEECFLRRLEWKSVRESVDEGDSRNSPPSEKEAEWLSSSENVTEASNAIGEERGRTSNATDVSFNELRQTETRIEMTSAAKGELILCS

SEQ ID NO: 64005 - protein, 374 aa, Zea mays
  Clone ID: LIB3245-272-F6_FLI.pep
QQQQQILGGDMDTPTAKAAWNANYGVVGSGDRRLAFSRQLSSNATTPRLARSDSSISMPAPLPLPPVYEGPKPSRKLLRLATASRPMRRLALLLALNVAYSATEFAIGLFTGRVGLVSDAFHLTFGCGLLTFSLFAMAASRTKPDNLYTYGYKRLEVLAAFTNALFLLFLSFSLAVEALHAFMQDESEHKHYLIVSAVTNLLVNLLGVWFFRNYARVNIVYRNAEDMNYHSVCLHVLADSIRSAGLILASWFLSLGIENAEVLCLGIVSVAVFMLVLPLFKATGNILLQIAPSNVPPSAFTKCSRQIAACEDVSEVWQGRFWELVPGQAVGSLSIRVKSGADDRAVLEYTHGLYQDLGIQDLTVQTDEFVGPVS

SEQ ID NO: 64006 - protein, 233 aa, Zea mays
  Clone ID: LIB3245-276-A2_FLI.pep
THPRSLLSSPPVPPITSHQRRGNGGRAVDAASGGGPVGGAGLEPPRGGDGDGGGGGGERGAPRAPAAGGPAAGGDHGVPARRRHGGVRGPAGRALHGALRGRPPLQRHRLRGHQPRPDRRHLRRRRAGPLHVVPRPRHQGRHPLLRRHLLQRRRRQEAPPARRLRRAAGLHARPAPAAAGGRGRGRIGRGGRRGVPAMMGGGERRRVRRRRRARITSAVLRGERAIAGLLRCT

SEQ ID NO: 64007 - protein, 366 aa, Zea mays
  Clone ID: LIB3245-277-B2_FLI.pep
PLERKLCILKGVFPRQPKKKVEGNHKTYYHTKDIAFLAHDPLIEKFREIKVHRRKVKKAVAKKNRDLADRLLNRPPTYKLDRLVLERYPTFVDALRDLDDCLTMVHLFAALPAVDGERVEVKRIHNCRRLSHECLTFISVKGIYYQAEVQGQKITWLTPHALQQVLTDDVDFNVMLSFLEFYETLLGFVNFKIYHSINVNYPPILDPRLEALAVELYALCRYMSAGSRRMIGNSQTDEVMEDKDEKSKAEEVIEEEKVVKNKASSKADESEFRLAQLQHQLPTNEPGALMNLVEESTADDADDDDTKDCKGLFKNLKFYLSREVPRESLLFIIPAFGGTVSWEGEGAPFKEIDEDITHQLKTCPTH

SEQ ID NO: 64008 - protein, 398 aa, Zea mays
  Clone ID: LIB3245-278-B2_FLI.pep
YYLILFSCRHTNLRAFLLVLTKSAHHQFWNIEERTRLMILLLWVDKIDGVRERSVLVEQAEVPPRLVVSKLLVLVERGEYVGLYGPGALRRALADVVDEVLAVGLRVGRVGRVAPGRRPPALRHDDGDVPGPGVLQRRVEAVDHRIEQAVVAVPAVLHHHRAGGHGEERVVDVDGARVADVRVVRVQVGQQRRAGALQVPRDVRHVARRRSEGARGGREAAADHVCRHRRGHLDVVGEAGRGERAVEVAHGGQQDAPPRDDLVPDGDVAELDGREGQHVALDPGGGGRGARGEAAHVRVGDAHGDGDARAAQRLEHVGVRGVDAHRVDAVVLVQLHHVARRRQVVAVHAVAHADGSHTCRNGCKCSKNQCQCSHGKEDSLLRHLLQLQLASTQARLLR

SEQ ID NO: 64009 - protein, 434 aa, Zea mays
  Clone ID: LIB3245-288-C12_FLI.pep
AAAAMSVAAGVSDAAIAVRDKLRGKIGQTKVKRYWPGKAPEWADDVDEDVDLRTARVSLDKAFPRDEDGDVPAKDDRRLRRLAETRAENKEELRADHRRIRQAEIVSTAEEENERQEADADEEDEEAQEERRRRIRARQLLREQEELLPQEEEEPVEAEESEEESEYETDSEDEQMGMAMVKPVFIPKSQRDTIAERERLEEEERQLEELVKKRLEARKIETRQIVVEEIRKEEHIEKALNEEANIEDVDTDDELNEAEEYESWKNREIARIKRDREERDARLKEKEEIEKVRNMTEEERREWERKNPKPLRQTKQKWKFMQKYYHKGAFFQEGADDVIQSAGKEDIYTRDFSEPTGEDKMDKSILPKVMQVKHFGRSGRTKWTHLVNEDTTDWNAPWSTNGPLRAKYNAKMAGMNAPIAKPKGSKKLKDWDAK

SEQ ID NO: 64010 - protein, 376 aa, Zea mays
  Clone ID: LIB3245-293-D6_FLI.pep
HRCRSSSSSPLPRGQAKGPAMARSPRLLALLLAVVWICGAALVARADPMLERFEQWMGRHGRLYADAGEKQRRLEVYRRNVELVETFNSMGNGYRLADNKFADLTNEEFRAKMLGFGRPRSGGGAGHSTAPSTVACIGSGLMGRQGYSDLPKSVDWREKGAVAPVKSQGDCGSCWAFSAVAAIEGINQIKNGKLVSLSEQELVDCDTKAIGCAGGYMSWAFEFVMKNRGLTTERNYPYQGLNGACQTPKLKESAVSISGYMNVTPSSEPDLLRAAAAQPVSVAVDAGSFVWQLYGGGVFTGPCTAELNHGVTVVGYGETQGDTDGDGSGVPGKKYWIVKNSWGPEWGDAGYILMQREASVASGLCGIAMLPSYPVM

SEQ ID NO: 64011 - protein, 488 aa, Zea mays
  Clone ID: LIB3245-307-C4_FLI.pep
LTRSLVRRPAPHLLSSASAAAATAVELDTNGDGSAGGGAGVVRPQWKAAIDFKWIRDNRDAVADNIRTRNSTANLDLVFELYDQYLTLQKEVERLRAERNAVANKMKGKLDPSVRQALVEEGKNLKEGLIALEEDLVQLTDKLQLEAQSIPNTTHPDVPVGGEESSVLRKEVGSQRSFNFAIKDHLQLGKELDLFDFDAAAEVSGSKFYYLKNEAVLLEMALVNWAISEVSKKGFTPLITPEIVRSSVVEKCGFQPRAKNTQVYSIEDSDQCLIGTAEIPVGGIHMDSILAESALPLKYVAYSHCFRTEAGAAGAATRGLYRVHQFSKVEMFIFCRPEESGKWHEELITIEEDLYASLGLHFKTLDMATGDLGAPAYRKFDIEAWMPGLERYGEISSASNCTDYQSRRLGIRYRPSPSEPPSTSTKKGKGAASGPTQFVHTLNATAVAVPRLIVCILENFQQGDGSIVVPEPLRPYMGGLELLSPKFK

SEQ ID NO: 64012 - protein, 138 aa, Zea mays
  Clone ID: LIB3245-318-H3_FLI.pep
WKNRQYILRLWHFRNEDLKQVLNDVGNLTEERLDELLDQFLRDFKVGTAEARGWPVAFAAYKVSKAAVNAYSRMLAAKQPALRVNCAHPGYVKTDITLHSGLLAPEEGASNVVKVALLPDGGVTGAFFEEGNELASFV

SEQ ID NO: 64013 - protein, 306 aa, Zea mays
  Clone ID: LIB3245-323-H1_FLI.pep
KPQQTEFHTSSEQYRTAGKIKEEAMAGGGQAAISFMTRMAKVAAGLGVAASAASTSFYTVDGGERAVIFDRVRGVLPRTMSEGTHLLVPILQKPFIFDIRTRPHSFSSTSGTKDLQMVSLTLRVLSRPDVEHLPDIFTSLGLEYDEKVLPSIGNEVLKAVVAQFNADQLLTERPHVSALVRESLTKRAREFNIVLDDVAITHLAYGQEFAQAVEKKQVAQQEAERSRFLVARAEQERRAAIVRAEGESESARLISEATTTAGNGLIELRRIEAAKEIASVLSRTPNVSYIPAGDNGQMLLGLNAAR

SEQ ID NO: 64014 - protein, 168 aa, Zea mays
  Clone ID: LIB3245-324-A1_FLI.pep
DSFLRLRDRNNSLVRDISRMQQRNYGREGFSHITVTGALAHGTKEVEVWLQTFGPGQRTPIHRHSCEEVFIVLKGKGTLLLGSSSLKYPGQPQEVPVFQNTTFSIPVNDPHQVWNSNEHEDLQVLVIISRPPVKIFIYDDWSMPHTAAKLKFPYFWDEDCLPAPKDEL

SEQ ID NO: 64015 - protein, 171 aa, Zea mays
  Clone ID: LIB3245-334-A7_FLI.pep
RDLGTSRMLCCAGHQASLLLFALLSVSSLLLVDGSHQDQEFGEAVGSRILQTNPDAHEVHCSRERSRAAWEAIDEYLMPFVEKEKYELPSKCRLRPDNDMFREQEQHKIHFDINEWHCGFCKKAFRAEKFIDQHFENRHKNLVDNSEGRCMADLCGALHCDLMMQFKKTKK

SEQ ID NO: 64016 - protein, 293 aa, Zea mays
  Clone ID: LIB3245-335-F2_FLI.pep
YVFIRIFNLPSHILTSLPVVHGGGGAAAGCVPGDVDDADAGVVDLAGAPVGRQHLLLGPHPLAVVAARDHRAELQRAGGGPVRAPHRPVRPCHEPPLRRRPHGGHLHRQYVGLPALVQQLHHQLAPAPVARFFHPDRQVLLLVLAGNPFVLYGEGVSPVQLLGHPGLGQARERRPGEQEVRTVAPVEVGQHHPHSPGAAQPCVSASHLETAATAEAPAVLPGPAGGEEAPIDLGGHGAVPARSAATVRGRGERGRVGRLPLPHAPLAAGGRGGGQEKQQAAAEEDVHGDGRSR

SEQ ID NO: 64017 - protein, 359 aa, Zea mays
  Clone ID: LIB3245-339-D6_FLI.pep
SGTYKGFSSVFSESAYGQLQQQQRLLLSSETLLKLNNGMVSVDDEGGTHEGIKTIPVQRACEFTTNSVLCVCIVTWNMNSKMSAEDVAKLVSSDRKFDLLVVGLQEAPKPDVSRVLQEALAGTHVLLGQKSMQSLRMLLFGSRSSEKYIREMKVDKHAVGGCGGIIGRKKGAVAMYINFSGIRMVFVSCHLAAHEHKVEKRNAEFQHISQSLFARYGAPTPYAQSADITVWLGDLNYRLQGISSTPARKMIEENRQSKLRGRDQLLQEAEKGQVFSGYCEGTLSFKPTYKYDVGGSVYDTSYKVRVPSWTGRILFKVGQSSGLDAVLSSYESLDCVRSSDHKPVKAHLCLKVRSDGDAD

SEQ ID NO: 64018 - protein, 408 aa, Zea mays
  Clone ID: LIB3245-341-F3_FLI.pep
FPPQLQPSAPLLSFPFLCSPLHSCSQSHPPYRHPRSLLIASASSFFPTAAYMAAQEEKTAVAAAADVAAEEPAPAPEQQPQPAGAARRAGPSAPGGAPPNPFDFSTMMNLLNDPSIKEMAEQIAKDPAFTEMAEQLQKTVVSPRQQQQQQARQQQQQLDPQKYVATMQQLMQNPQFVAMAERLGSALMQDPAMSAMLGGLTNPAHKEQLEARVARMKEDPTLKPILDEIESGGPAAMMKYWNDPEALQKFGRAMGVGVGPSGEAGGAEHAEAEDDAGEEGEYEDESIVHHTASVGDVEGLKKALENGADKDEEDSEGRRGLHFACGYGELQCAQALLEAGAAVDAVDKNKNTALHYAAGYGRKDCVALLLESGAAVTLQNLDGKTPIDVAKLNNQDDVLKLLEKHAFV

SEQ ID NO: 64019 - protein, 308 aa, Zea mays
  Clone ID: LIB3245-350-F4_FLI.pep
IVPYVHATMEGLRIGAPIMQVYHEKSFILPDVSRVLACLYEKDVKFETHTASYRSLLGLQASSHAPVPFYEGPTFLEESREICRYIAEKYENQGYPFLLGKDALERASIEQWLHNEEHAFNPPSRALFFHLAFPLGEGEDDDIDVHTRKLEEVLEVYEQRLSDSEFLVGNKFTLADLVHLPNSHYIKASNKFLYLYDSRKNVRRWWDAISDRSSWKKVLRYMKSVEEKNKQEELKKQQQQQEEAPRTSTDPTRVDSRKQSRTEPRTILVPPADNESSASIVPRTKKPLPGDHLVSTQQIDGVGMPATN

SEQ ID NO: 64020 - protein, 246 aa, Zea mays
  Clone ID: LIB3245-358-G7_FLI.pep
IHQVKCNFHVQDHKTRNPQLTCNHSVFLLVGRGAEPLKQHGEEPGEIEPLLWVIFLHLPVCVFRLVSFSRSFRSSSSSLNWNFSFSFRCCLLQSCGDSLNLLYGLLQHIRFCSLVSRGTLLLFDALRCLAFFGLLFRLRFFIFGSMSTQMESISKAHHLVLDLFHRFWVALLHLVHHCTDLLHHFWVALYLVHHCTESIHVLASLFFASLLSSNKPQIRRPATSGESLTGENREEKCAAAASRAVD

SEQ ID NO: 64021 - protein, 211 aa, Zea mays
  Clone ID: LIB3245-362-D3_FLI.pep
HDIDPSNSNSPSHSRFQRTSKRSANTSSQLGIIGGASPPTYFALLCSSMASSYYSLMLLLLLAATAVAEEAAAEASGGGGNATETSPTAYEMLERYGFPRGILPAGVTGYELGADGAFEVYFPRACEFLLARTWLVRYEARVSGSVAAGSLTALRGISVKVLFLWLGVGEVDRAGETLSFYIGPVATSFPIDDFAESPRCRGYDAEAAASS

SEQ ID NO: 64022 - protein, 508 aa, Zea mays
  Clone ID: LIB3245-363-B2_FLI.pep
CPLSPLPPPRELSSRTAADSAAALSSSPSALPPPTAAGRRRHPMAPTGRLLAVAALSFLCLQGPWGDSGSAFAQSQPPLHRTVRAEANDGGGLMPELPPSGLMPMPELSPSGSPTPFVPFLAPAPLAPFFNNSTPKLSGKCTLNFTAVDKLMTTTAVDCFTSFAPFLANVICCPQLQATLTILIGQSSKQTGSLALDPTVANYCLSDVQELLLSQGASDNLHSLCSVHLSNVTEGSCPVSTVDAFESAVDSSKLLEACRKIDSVNECCSQTCQNAINEAAQKISSKDAGLTSYTGSPKTDSCRNVVLRWLSSRLDPRSAKEMLRQISNCNVNGVCPLSFPDTSKVAKECGGTMTNSTACCKAMLTYVAHLQKQSFITNLQALNCASFLGAKLQKMNVSMNVYSSCQITLKDFSLQVGSQESGCLLPSMPSDASFDSTSGISFTCDLNDNIAAPWPSSMQAPSSSCNKSVNIPERPAATSAQSGVNHKNLKLRLLASLVSLLLVLLVQV

SEQ ID NO: 64023 - protein, 372 aa, Zea mays
  Clone ID: LIB3245-363-B7_FLI.pep
HPHPCPRRNTISHSERGSPPDSVMAAPAADEAWCRKTVPRVMELVCRRLPQRDACALLAVSPWCYRALVANSRLWEVLDLREMKNAGNRLISALSLARYRHLKVLNLEFAQDIEDRYLVHLKEMSGISLENLEFLNLNACQKISDKGIEAVTSLCPNLQHLAIYWIVGLTDSSIGHITKNCKHLVHLNLSGCKNITDKGMQLIANNYQGLKRLNITRCVKLTDDGLNQVLLKCSSLESLNLYALSSFTDSVYREIGSLSNLTFLDLCGAQNLTDDGLACISRCGRLTYLNLTWCVRVTDAGILAIAQGCRALELLSLFGIVGVTDACLEALSKSCSSSLTTLDVNGCIGIKRRSRDDLLKLFPSLSCFKVHS

SEQ ID NO: 64024 - protein, 223 aa, Zea mays
  Clone ID: LIB3245-383-G2_FLI.pep
TLTETSLTSMSKGSNAYDFLAKVLIIGDSGVGKTCLLLRFCENNFTTSHLATIGIDFKMKTIEVDGKKVKVQIWDTAGQERFKTITQTYYKGAMGIILSYAVNDRESFQNIENWMKQIRQHASDDVCKILVGNKSDMPDRVVDTEEGRRLADSYGIKFFETSAKEDLNVNDAFHTIAREIKEKIVHRESDKATAGGSGFTGGNGTKLDSKGKTDGKKAGCCPN

SEQ ID NO: 64025 - protein, 324 aa, Zea mays
  Clone ID: LIB3245-395-F8_FLI.pep
LVWCPWHSAPAVSFSGISILIWERAGEIHSSRPHSLPFLVRPLPPSDPPLSLPAGPPLPRASGDLSPRTGGRKMLTKFETKSNRVKGLAFHPRRPWILSSLHSGVVQMWDYRMGTLLNRFDEHDGPVRGVHFHATQPLFVSGGDDYKIKVWNYKTQRCLFTLHGHLDYIRTVQFHHECPWIVSASDDQTIRIWNWQSRTCVAVLTGHNHYVMCASFHPKEDLVVSASLDQTVRVWDIGALRKKSASPADDILRLTQMNTDLFGGIDAVVKYVLEGHDRGVNWASFHPTLPLIVSGADDRQVKIWRMNDVILPPAVRIFSSTISQ

SEQ ID NO: 64026 - protein, 428 aa, Zea mays
  Clone ID: LIB3245-423-B4_FLI.pep
EVNGGSYIYMGTRGKRKLHVQARRERVLLLGGQTRIGISQANYILALQPSVGSDEAHDGVNQLLRPLSCAGVHVNGELVEVERMAHAAADQHLHLLTGGAQGVTVLEVCVADEVLLADGHQHRRERHGLQGRRLRTHGARERVLLGGANRQRHGLALVQHVQREEHRLSHLQLRPAPCCAHESRLDQNAPGDAQGRPDASAVLAHTRGGEVADVRARAVADEEHPGDVGGLTEELSCLVTKSSVLRQRDAAEPADRGDGRVDVRWQASLGRERELDRDDHGRDGARETRVELVVHEPGRVGEAEAAAVEVHDDGQAPALAAVVDLGEVDPEIGLPWEVVQRVPVAGHVVRRHGLHHREDLGWAGPRAVDAAVVQNAQPAGHLVHHLAATRRLHLRLQLGDSGIGHHCCHRPAAGATTRARAALYEGGG

SEQ ID NO: 64027 - protein, 192 aa, Zea mays
  Clone ID: LIB3245-426-C11_FLI.pep
GFLMRSYMGQQEDGMSDGLYTYKHHRERGADIHTIFVKKSKFRILLSFIGTTFLLVSVCCALLSKDGLCLCSLWSISFASVIAKCLRCDPVKKESLVIMPTFGIQLEQHFWSGRVHRKFVPIGKILRPVLNEHVTPVSCYWSLALLVREEYELMLVFKSLNPPVKMLVPIWKALCAFVDSNSLGNSALPQPT

SEQ ID NO: 64028 - protein, 315 aa, Zea mays
  Clone ID: LIB3245-438-D6_FLI.pep
TATERRAAGGEKWRKKTRMATYFTLNTGARIPSVGLGTYKAGPGVVADAITAAVKAGYRHIDCAPLYKNEKELFDDGVVKREDLFITSKIWCSDLAPEDVPLAIDSTLNDLQLDYLDLYLIHWPFQIKRGSELSPENFVHLDMPKTWQAMERLYGSGKARAVGVSNFSTRKLADLLAVARVPPAVDQVECHPGWQQARLRAFCHSSGVHFSAYAPLGRMKAVASDPVVASVAESLGKTPAQVALRWGIQQGQSVLPKSANESRLKENIDLFGWSIPDELCAKFSEIEQVKQIRNDAFVHPQSIYKTIDELWDGEI

SEQ ID NO: 64029 - protein, 375 aa, Zea mays
  Clone ID: LIB3245-459-G11_FLI.pep
VGLGNFLEMGPLDVDLKPRNSTWLHKADLIFVDNPVGTGYSYVEDDSLFVTSDWQQAADMTTVVRALAKEVPTLASSPLFLVAESYGGKYAATLGASIARAVRAGELNVTLGGVAVGDSWISPEDFTLSYTPLLLSVSRLDDNAGDEANKKAETVKEQIVAGQWAASQKSWGSLLDFIDTKSGNVDVYNFMLDSGMDPVALPVGSSSLMSSLQAMKYSTYGQDSQPGSNTIDGIMNGVIKQKLKIIPKNFTWGEQSDSVYNALVNDFMKPKIDEIDELLSYGINVTVYNGQLDVICSTNGAEAWVQKLKWDGLRTFLSLPRQPLYCGASKGTKAFVRSHKNLHFYWILGAGHYVPADQPCIALSMISSITQSPAS

SEQ ID NO: 64030 - protein, 286 aa, Zea mays
  Clone ID: LIB3245-463-F5_FLI.pep
DPATATMAAMANTSRLPTPCSLPTISIGAKSRRLAVAAVRCGPGGSRSHRRSLGVLLCRSSSTAGAQGSTRMEDYNTAMKRMMRNPYEYHHDLGMNYAVISESLIVGSQPQKPEDINHLKNEERVAYILCLQQDKDIEYWGIDFQSIVNRCKELGIQHIRRPAVDFDPDSLRSQLPKAVSALEWATSQRKGRVYVHCTAGLGRAPAVAIAYMFWFENMDLNTAYQKLTSIRPCGPSKRAIRAATYDLAKNDPSKEPFENLPEHAFEGVADWERKLIHDRVRALHEA

SEQ ID NO: 64031 - protein, 337 aa, Zea mays
  Clone ID: LIB3245-465-A8_FLI.pep
TKREGEGQQDTHTDLAPARSHRMVTLCHPIRIRASGSTASWRRRNAAAAAKVLCSVQQMPPPPPAATAAQSTIKVVIVGATKEIGRTAVVAVSKARGMELAGAIDSQCIGEDAGQISGMDEPLEIPVLNDLTMVLGSIAQSRATGVVVDFSEPSAVYDNVKQAAAFGLSSVVYVPKIELETVTELSAFCEKASVGCLVAPTLSIGSVLLQQAAIQASFHYSNVEIVESRPNPSDLPSQDAIQIANNISDLGQIYNREDMDSSSPARGQLLGEDGVRVHSMVLPGLVSSTSINFSGPGEMYTLRHDVANVQCLMPGLILAIRKVVRFKNLIYGLEKFL

SEQ ID NO: 64032 - protein, 562 aa, Zea mays
  Clone ID: LIB3245-468-D9_FLI.pep
FDGKMNGAEEEEPPHVSSMPKTQDGVTKPSLGKEPIPGSELWTDGLICAFELVKSHRKPVQHKSWLATEQIQEKGPTMCTRKHSRRNGHQITEPKVDESIVLENPQQTDFSNDPSVLKDRPLYAGEILDHKWVPIGWNRIAELVLRVQSDSSWENELMEMSDSEDDYTVADLAAPYWQRPVGPTWWCHVTAGHPSIDAWLNSAHWMHPAIRIALRDESKLISDRMKYLLYEVPVRVAGGLLFELLGQSIGDPNHEEEDIPIVLRSWQAQNFLVTTMHVKGPSSNINVLGVTEVQELLLAGGSQTPRSVHEVIAHLVSRLSRWDDRLFRKYVFGEADEIELKFVNRRNHEDLNLVSIILNQEIRRLATQVIRVKWSLHAREEILIELLRHLRGNATRAILESIRKCTRDMLEEQEAVRGRLFTIQDVMQSTVRAWLQDRSLRVTHNLAIFGGGGMVLSIITGLFGINVDGIPGAQNTPYAFGLFAGLLFFVGIVLIGMGMLYLGLQNPVNSEKVKVRKLELQHLVSMFQHEAEQHGKVREGVSRHGASPSSSTASDEGYILIS

SEQ ID NO: 64033 - protein, 373 aa, Zea mays
  Clone ID: LIB3245-483-H5_FLI.pep
LPPPRLTAPMAAAARAALPRPHLSLFSSSHRSPHLSLTPSSAPRLRSGAATSPALQQHHQVTTRLGDVIEAQQFDRDALNEIFEVAREMEAVERGSHGAPSRVLEGYLMATLFYEPSTRTRLSFEAAMRRLGGEVVTTENAREFSSAAKGETLEDTIRTVEGYSDIIVLRHFESGAARKAADTANIPVINAGDGPGQHPTQALLDVYTIKREIGTLDGIKLGLVGDLANGRTVRSLAYLIAKYQNIKIYFVSPDVVKMKDDIKNYLNSKGVEWEESSDLLEVASKCDVIYQTRIQKERFGERIDLYEAARGKYIVDKKVLDVLPKHAVIMHPLPRLDEITVEVDSDPRAAYFRQAKNGLYIRMALLKLLLVGH

SEQ ID NO: 64034 - protein, 121 aa, Zea mays
  Clone ID: LIB3245-484-B6_FLI.pep
RSKMDIIIIISLVILLALGALFVIPKSQNKGKSKRNDLGAGTTSRSFTTEEISKHSTRKDCWIIIKDKVYDVTPYVEEHPGGDAILNNAGGDSTEGFFGPQHGTRVFDIIEDFCIGQLKAS

SEQ ID NO: 64035 - protein, 319 aa, Zea mays
  Clone ID: LIB3245-487-A2_FLI.pep
TEHHIMEGGAVPKPSEKRVALVTGGNRGMGFEICRQLASSGLTVVLTARSETRGAEAARELHGFGLPDVVSHQLDVTEPTSAARLADFVRTKFGKLDVLVNNAGIMGVTMEVGDDEAAVKEMMVGKDQNEIAEWLKQRTTQSAEQAEECVRINYHGTKTVTEALLPLVQSSSSSSSGGRIVNVTSSFGLLRFFSGEELRQELSSVDTLTTQRLDELSALFLEDYRSGRLEPRGWPTDRVYAAYQVSKALVSAYARVLARDNPALRVNCVHPGYVQTEMNRNTGDLTAAEGARVSVAVALADQGGVTGAYFDRTQIASFV

SEQ ID NO: 64036 - protein, 504 aa, Zea mays
  Clone ID: LIB3245-489-H6_FLI.pep
GKEPPQFVALFQPMIILKGGIGSGYKKLIEEKGATGETYTTEGIALIRVSGTSIHNNKTLQVDTVATSLSSMECFILQSGNAMFTWFGNSSTHEQQQWAAKVAEFLKPGVAVKHCKEGTESSGFWFALGGKQSYTNKNAPQDIITREPHLYAFSFKNGRLEVTEIFNFSQDDLLTEDMMILDTHGEVFIWIGQCVESKEKQKAFDIGQKYVEHANSIDDLSPYAPLYKVMEGNEPCFFKTYFSWDNTKSLVHGNSFQKKLSLLFGLRSEGASRSSGNGGPTQRASALAALSSAFNPSSQQRLSNERPKSTGDGPTQRASALAALSNAFNSSLKPKTPPPSRSGQGSQRAAAVAALSSVLTAEQSGSSENLRAKASSTGDKTDVDRPVITPAGPSGPSSPQSEAGESNVFRQEKDAAVDGAPSDTDGAVAETREEETTENVGEATFSYDRLISKSTDPVRGIDYKRREAYLSDSEFQSVFGMTKDAFYRQPNWKQELQKRKADLF

SEQ ID NO: 64037 - protein, 635 aa, Zea mays
  Clone ID: LIB3245-493-A3_FLI.pep
SSSRACDSKLRFLSGDSGWKEMKSPLRRFRGFALHHHHHHRERKDHRPPSAKLDELVYAAQEMEDMRNCYDSLLSAAAATTNSVYEFAEAMGEMGTCLLEKAALNYDDDESGKVLMKLGKAQFELQKFVDDYRTNIINTITNPSESLLKELQVVEEMKDQCDQKRVEYEAMRAAYGEKGGRLRHLKNESFSLGQLQTSFLEYQEEAALFIFRLKSLKQGQFLSILTQAARHHASQLSFFRKGLKHLEALEPCVKAVAEKQHIDYHFSGLDNNSDIDDYSSYQDNHSDGSELSFNYEINDRDKDLPTFRSPMDMDQAHPVSSPRPLKEQQENAEEIKATLGVPHMKPEIGTQSAPIFAENVPDPSMRFRKMNLLTRTVHSYKLPTPADDKNPASVIANKSPHSDQPESKSHVAVNLWHSSPLAKDFMPNSMHSGPVKMPSSNEGVSLAYSYSTTDFKKVKREAFSGPIPSKVGLSTPLISATDRKPSGKRPSYVLPTRPPGPGWQSSVPPKATPRVTSLPTTTPRISELHELPRPPANAGLVGYSGPLVSRRPMPTAVSTTRVSPPSHTASPLPRPPAAMTRSYSIPSNSQRTPIITVNKLLEARHSRESSEVSSPPVTPISLADVSRRPTTEAAV

SEQ ID NO: 64038 - protein, 399 aa, Zea mays
  Clone ID: LIB3245-494-E8_FLI.pep
PKSIISLQRDTKHTSSNNHPMMGWCEVGMMKVLVLSLVAGAVAAVRPSKLLPAAVPAVYVFGDSTLDVGNNNYLPGKDVPRADKPYYGIDLPGSGKPTGRFSNGYNTADFVAQALGFKKSPLAYLELKARKMLIPSAVTRGVSYASAGAGILDSTNAGNNIPLSQQVRLFESTKAEMEAAVGQRAVRKLLSASFFLVSAGSNDFFAFATAMAERNRTATQGDVTAFYGSLLSNYSATITELYKLGARKVGIVNVGPVGCVPRVRVLNATGACADGLNQLAGGFDGALRSAVAALAADQLPGLAYSVADSFGFTQASLADPLGLGFASADSACCGSGRLGAQGDCTPAATLCADRDRYVFWDSVHPSQRAAMLGAQAYYDGPAQYTSPVSFKQLARMRIG

SEQ ID NO: 64039 - protein, 487 aa, Zea mays
  Clone ID: LIB3245-500-B3_FLI.pep
SREQGAAERRRAPPGPPKQLPVLGNLLQIGSRPHRYFQAVARRYGPIVEVQLGRVRTVVVSSPDAAKEVLRTNDLHCCSRPNSPGPRMLSYDFLDVAFSPYSDYWREMRKLFILELLSMRRVQSFAYARAAEVDRLVSSLASTPPGAAVDLSEKLYALSDGVVGTVAFGKMYGSAQFERSSFQRVMDETLRVLGSFTFEDFFPASRLARFADVLTGAAGRRSRIFRQIDRFFDSVIDKHLEPERLQAGVQEDMVDALVKMWREEQADGYEAPHGLTRDHIKGILMNTFAGGIDTCAVTMIWIMAELMRNPRVMQKAQAEVRTLVGNKPRVDEEDVKSLSYLKMVVKENFRIHPPGTLLIPRETMRSCVIGGYDVLPGTRIFVNVWAMGRDPSIWDRPEEFSPERFEGSHVDFRGSSFELLPFGSGRRSCPAIAMGVANVELVLANLLHCFDWQLPEGMVEEDIDMEETGQLAFRKMVPLCLVPIKRV

SEQ ID NO: 64040 - protein, 265 aa, Zea mays
  Clone ID: LIB3245-507-H10_FLI.pep
LPPLPPAAQSAMADPTERDQFTDDEEEEDYLEDGEQGLGSEDEEGGGAGGKRKRLGNTLGGIGKRGVCYLSRVPPHMNPSHIRQMLSKYGEVLRIYLVPEGQGHHKHTSVKAKAYSEGWIEFAKKSVAKRVANLLNGEQIGGKKRSPFYYDIWNIKYLRKFKWDDLVGEMAEKTHIREQKLTLEIAAAKKQRDHYLSNIEKSRALKHIQELRKKRQKTEGAEASNVPETKTARSIPQKKPVVETDAKTKSTLSKDILAGVFGGSS

SEQ ID NO: 64041 - protein, 407 aa, Zea mays
  Clone ID: LIB3245-512-B4_FLI.pep
METSAPPNAPAPPAQPRRRLPDFQQSVRLKYVKLGYHYLISHGMYLLLSPLMALVAVQLSTVSPHDLADLWEQLRFNLLSVVACSTLLVFLSTVYFLTRPRPVYLLDFACYKPESERKCTRETFMHCSKLTGSFTDENLEFQRKILERSGLGEDTYLPPAVLRVPPNPCMDEARKEARAVMFGAIDQLLEKTGVRPKDIGVLVVNCSLFNPTPSLSAMVVNHYKLRGNIVSYNLGGMGCSAGLLSIDLAKDLLQVHPNSYALVISMENITLNWYFGNNRSMLVSNCLFRMGGAAILLSNRRSDRRRSKYELVHTVRTHKGADDKCFGCVTQEEDEIGKIGVSLSKDLMAVAGDALKTNITTLGPLVLPLSEQLLFMGTLIAKKVLKMKIKPYIPDFKLAFEHFCIHA

SEQ ID NO: 64042 - protein, 318 aa, Zea mays
  Clone ID: LIB3245-516-D4_FLI.pep
LLPGRGRRRNGGRALFPSGGCCWRWSHSCVPDTVSRRSWSSSPVCASSWNASSWSCSFASTPFTAPVVSAWCSVFCNRAIVRCNQSLFFLQLLRFLWVSVEEKIYHDVPLVSWKNCTAHLEDHSGEQPEQTTNALFPLVIGGNADINIAHRGISITEGDGGNVSKGRLLNGLMISPRVSQDKKAWLTEGGLQLVGECTRSVPASNGMGTSVLRKLEDSPLAIGPSRLHDNVLRILNGNDDPGGQLKLVPGLSKVNNVDTISAALVHVALHLEVAVLGAEVDIGGEHHLDVLLPLGQCPRAAACRCRRHSRRIRLRFRF

SEQ ID NO: 64043 - protein, 295 aa, Zea mays
  Clone ID: LIB3245-520-E11_FLI.pep
AGSPSQRSEPTIRLLFVFVLSLPSCRSPAPSSPLRRPSCETLARRAREKLAAMFGYRKADPDLEAGGSSLLYPGMTESPELRWAFVRKIYVILAVQLAMTAAVSAFVVKVPAVSNFFVSSNAGLALYIFLIILPFLVLCPLRYYHQKHPVNLLLLGLFTVAISFAVGMTCAFTSGKIILEAAILTAVVVISLTAYTFWAAKRGHDFNFLGPFLFAAIMVLMVFSLIQIFFPLGKISVMIYGGLASLIFCGYIIYDTDNVIKRYTYDEYIWAAVSLYLDVINLFLSLLQLLRAADS

SEQ ID NO: 64044 - protein, 382 aa, Zea mays
  Clone ID: LIB3245-540-C3_FLI.pep
GTQMAMEGRRRRRLVLWLVISAQTMLVAAAAGAKRQAPVMFVFGDSTLDVGNNNFLSGAAVPRANKPHYGVDFPGGHPTGRFSNGDNTADFVAKSMGLKSSPPPYLSLAPNGSSPLLAQTALTTGVSYASADAGVLDSTNEGKCIPLSTQVRYFNGTKAKMVAKKGAAAVSKLLADSVILMGIANNDLFVFAAAELLRGRSAAEQKSDAAAFLTDLLSNYSAAITDLHSIGARKFAIINVGLVGCVPVVRVLDADGGCAEGLNKLAEAFDVALGPLLAGLADKLPGLTYSLANSFRLTQDAFADPKASGYSDVASACCGSGRLLAEADCLPNSTVCSDHDSHVFWDRYHPAQRACNLTARAFYDGPAKYTTPINFMKLAQAS

SEQ ID NO: 64045 - protein, 325 aa, Zea mays
  Clone ID: LIB3279-020-E6_FLI.pep
GTVVVAGDPRDQEMGSGRNGAVVRRYVRSKEPRMRWSADLHRSFVQAIDSLGGQHKATPKLILQFMGARGLTISHVKSHLQMYRAASLGAERGGGTPAQLLQRRYSCSGDERGGPKEEFLCCPPPPPLKRARMGYESMQGSHGVSDARTTAGGGGLYCIDDYMQAMAVGWRIKEEGLIRWQRRDAAAAAAAPSNLQAMGCLVQESAPFKVRRPEAHRLGSALKQQDDDDSSKEDGNGRPQSSNAAKEDGPSEQCSLSLSLGNLDAKCGRGTAAAASSRSGESSCILTASPARRSSSDDCSGHSGCFVVGPGGVVSLELSLSICGS

SEQ ID NO: 64046 - protein, 120 aa, Zea mays
  Clone ID: LIB3279-020-E8_FLI.pep
GKRREEAMASIGSSNIGFQLLKKSGWKEGTGLGAQEQGRLEPVETRVKNNKRGIGSKEPKPQPKVGDDIETHPQKPKEMQSKKRAKLAAKRIRKMQEEEKRLKEKEFEMAFFREFWPDNV

SEQ ID NO: 64047 - protein, 297 aa, Zea mays
  Clone ID: LIB3279-033-B9_FLI.pep
KPPESSLPSDSTSKLPVPAMASHDHHHSHSHDDHHHHSHGDGGGHAAGGSWVGEDGRVWHSHDGLAPHSHEPIYSPGDFTKRAPPLASRDFADRAFTVGIGGPVGTGKTALMLALCRFLRDKYSLAAVTNDIFTKEDGEFLIKHGALPEERIRAVETGGCPHAAIREDISINLGPLEELSNLYKADLLLCESGGDNLAANFSRELADYIIYIIDVSGGDKIPRKGGPGITQADLLVINKTDLAPAVGADLSVMERDALRMREGGPFVFAQVKHGVGVEGIVNHILQAWEIATGNKRR

SEQ ID NO: 64048 - protein, 200 aa, Zea mays
  Clone ID: LIB3279-044-C6_FLI.pep
CVIIFEIFFTCSHLIFNNAYESLRFYYDKKYSHVTRFGRSCPRSASLTFVGASRVEPKVPSPTHQTQHIVSAFSPFTPASVRRWLAAAGRIEAESRDERRAGEGGGAADPGPIPGAPPPRRLRPRLYPLALLLRVPVQEGFAEPFQARQGHHVRPQGEGDRHGDCFSLPHPGHSQGVPRQVGVPVHVRRPRNILQLDSQD

SEQ ID NO: 64049 - protein, 389 aa, Zea mays
  Clone ID: LIB3279-044-G12_FLI.pep
LLSISFLKEKKVQRAVKHSRTTTTMYHPQCELLTMAHETPDLDAGQPHLTVSGVASIPAELSFHLLHSLDAAAAVNPVTAPPQSTIDYFLGGADPHQQAMQYEPLPPAAGGHHQYTMDMFRDYCDGHYPTAEPYIRGTMTGALVFGATDDDDSAAAYMPGGHFETSPPPPRATGRGRKRGRALGGGFHAVLANGVEKKEKQRRLRLTEKFTALMHLIPNVTKTDRATVISDAIEYIQELGRTVEELTLLVEKKRRRRELQGDVVDAAPAAVVAAAGEAESSEGEVAPPPPAVPRQPIRSTYIQRRSKDTSVDVRIVEEDVNIKLTKRRRDGCLAAASRALDDLRLDLVHLSGGKIGDCQIYMFNTKIHKGSSVFASAVAGRLMEVVDEY

SEQ ID NO: 64050 - protein, 423 aa, Zea mays
  Clone ID: LIB3279-045-F6_FLI.pep
KIQQHFSAAHTTTTATRRSDLGAPQSGGSTGQRIKGPVEYGAAPLAGAGAGAGPGPSSYIRRGEQTQNPRRQKANAAASAAPLSHSDSPAAASPHTPPSRAQGFGMEAEAAAKRTRESGEDAAAAGISAVIPGWFSEISPMWPGEAHSLKVEKVLFQGKSDYQNVMVFQSSTYGKVLVLDGVIQVTERDECAYQEMITHLPLCSIKDPKKVLVIGGGDGGVLREVSRHSSVEQIDICEIDKMVVDVSKQFFPHLAVGFEDPRVSLHIGDGVAFLKNAPEGTYDAVIVDSSDPIGPAQELFEKPFFQLVARALRPGGVVCTQAESIWLHMHIIEDIVVNCRQVFKGSVNYAWTTVPTYPSGVIGFMLCSTEGPAVDFQHPVFNIEEDEHPMKSKGPLKFYNSEIHTASFCLPSFAKRVIESKAN

SEQ ID NO: 64051 - protein, 234 aa, Zea mays
  Clone ID: LIB3279-175-F1_FLI.pep
EVKCQSKPNRVSWSKLSQSNVLGSLVCHHRVLSSVLSLSSSLELSEVSVVITLHLEIEDLGLGGSGRRHKMGLKQLEDAITDLGQLSLNLATIILDECYSVLIASALLLLLMEEMMRHEARRAPMTFLYATDRRFRSSTVSSSESTVLATFSMNSTISSYLSACSASFAMYTFSSRESSADAILQFSFQNLQYAGSLRASSVVLVELRRSNGGCGKRWCRLRSTKGLSPSPAAQ

SEQ ID NO: 64052 - protein, 469 aa, Zea mays
  Clone ID: LIB3279-176-G5_FLI.pep
EGGQEACSQGAREEEDNHALLLLLVLSVCSRLEADKQLREHKGGMASCGSFYFVPLLLLMLLLASPATAALVTSSQPGGNATAARPRPGMEQLKRKRIRALLTKLNKPALKTIQSSDGDIIDCVPSHLQPAFDHPKLRGEKILDPPERPKNRNFTFGGSGRSRVGEVVVQAWHATGEACPEGTVPIRRTTEKDLLRASSLRRYGRKPARRGVRRDSTSSGHEHAVGYVNSEQYYGAKASVNVWSPRIGDPSEFSLSQIWVLSGSFGNDLNTIEAGWQVSPELYGDSNPRFFTYWTTDAYQETGCYNHNCRGFVQTTNKIAIGAAITPESVYNGRQFDITLMLWKDPKHGHWWLELGPGLVVGYWPSHLFSHLARHANMVQFGGEVVNTRPSGSHTATQMGSGHFPREGFDRAAYFRNLQVVDWDNNLIPAANLKLLADHPGCYDIQGGTNSYWGSYFYYGGPGRNAKCP

SEQ ID NO: 64053 - protein, 137 aa, Zea mays
  Clone ID: LIB3279-178-C9_FLI.pep
GSDSPSQPPVSRDYRRGRPRRRGGRKRKRRVGGPWTLNSWLLAFCSLGEHARRRRRRRGGVGWFRPASRVRPGVAPPVPRPATVASRSLPLLSTCEICFRFLYASFCLGRKRSSRHRIKAGSQFRLWIFCRLDSGST

SEQ ID NO: 64054 - protein, 375 aa, Zea mays
  Clone ID: LIB3279-180-H5_FLI.pep
SPSLSLLSTILLPLPSTSHPPPASPPGQPIIQGIPVLMDRLEMQDDSKRSNRPKYSKFTQQELPACKPLLTPAIVISAFLLVGILFVPIGLASLSASQEIVELVDRYDTSCVTVADKVGFIQNTKTDKSCTRTLTIPKHMKSPIQIYYQIGDFYQNHRRYVKSRSDKQLRYKDAAHLTKDCEPEVYSAGGAPIVPCGLVAWSLFNDTYTISVNKKAIVVNKKDIAWQSDKKKKFGSDVYPSNFQNGNLIGGARLNESIPLSEQEDLIVWMRTAALPTFRKLYGRIETDIMENDELTVVIQNNYNTYSFGGSKALVLSTTSWIGGKNNFIGFAYLIVGGFCLFLALVFVVLYMIKPRTLGDPSFLSWNRGTMDYPS

SEQ ID NO: 64055 - protein, 123 aa, Zea mays
  Clone ID: LIB3279-181-F8_FLI.pep
QYLHVLVCPKREVKRFADLSSDEISDLWVTAKEVGARLEQYHKASSLTFAIQDGPQAGQTVAHVHIHLIPRKKGDFEKNDEIYDAIDVKEKELKEKLDLDIERKDRSMEEMANEANEYRALFS

SEQ ID NO: 64056 - protein, 372 aa, Zea mays
  Clone ID: LIB3279-182-F4_FLI.pep
RHGTAMAPLPASLTPCLWLFLCLLAAPCPAARAARFACNATAPRASTCQALVSYAPPNGTATPTLAAVRALFQLRSHRALLAANGLPLSTPPTAPAPVPLRVRLPCLCSGGAGATFQRPTYRVRAGDTLDAVARGVFAGLVTYQDIAAANNVSDPNRVAVGQQLWIPVPCSCDPVGGQPVVHFTYVVPAGGSVSGIAEEFGTTEETILTLNKMPDAKSLLAGQVLDVPLRACGSAISSTAIDRNLLVPNGSYILTANNCVKCGCSSSTWQLDCQPTQGLSSSFCPAAKCGDMFLGNTSSSTSSCESTACSYAGYTNSTSFAILANVTTSNVCNAGMTPTAQPAHSSALRLEPVWLRWTELFALSLLTLSCFV

SEQ ID NO: 64057 - protein, 240 aa, Zea mays
  Clone ID: LIB3279-190-E3_FLI.pep
RTAQSAYRKAREVNKMAASSYFLLAAFLAVVASHATASDPSPLQDFCVADMHSPVKVNGFVCKDSMAVTADDFFKAANLDKARDTMKSKVGSNVTLINVIQLPGLNTLGISLARIDYAPLGENPPHTHPRATEILTVLEGTLYVGFVTSNPNKLFAKVLNKGDVFVFPQGLIHFQFNPVYNKPAVAIAALSSQNPGVITIANAVFGSKPPISDDVLAKAFQVEKGTIDWLQAQFWENNHY

SEQ ID NO: 64058 - protein, 277 aa, Zea mays
  Clone ID: LIB3279-197-G1_FLI.pep
ESSLPLVDQQRQADGMVSSMPLSSLLLLLSAASFGGGVRLGDGGYEDWRLGTATYVKEFQSHPLNDGGGACGYGDLDIFRYGRYTTGLSAALFGRGGACGGCYELRCVNHIQWCLRGSPTVVVTATDFCPANMGLADDDAGGWCNFPREHLELSEAAFLRVAKAKAGIVPVQFRRVSCDRAGGMRFTITGSAHFLQVLITNVAADGEVAAVKVKGSRTGWIPMGRNWGQNWQCDADLRAQPLSFEVTGGRGRTVTAYSVAPADWMFAQTFEGKQFAE

SEQ ID NO: 64059 - protein, 688 aa, Zea mays
  Clone ID: LIB3279-202-D12_FLI.pep
PDRCSPAEFCSRLVSEAAEMASAGVAGCSGSAGDALFRELWHACAGPLVTVPHQGELVYYFPQGHMEQLEASTDQQLDQHLPLFDLPPKILCKVVNVELRAETDSDEVYAQIMLQPEADQSEPTSPDSEPPEPERCNVHSFCKTLTASDTSTHGGFSVLRRHAEECLPQLDMTQNPPWQELLAKDLHGNDWHFRHIFRGQPRRHLLTTGWSVFVSSKRLVAGDAFIFFRGENGELRVGVRRLMRQLNNMPSSVISSHNMHLGVLATASHAISTGTLFSVFYKPRTSRSEFVVSVNKYLEAKNHKMSVGMRFKMRFEGDESPERRFSGTIIGLGSMPANSTSPWANSDWRSLKVQWDEPSAILRPDRVSPWELEPLDATNPQPPQPHLRNKRARPPALLSIAPELPQVFGFWKSPAEPAQAFSFSRPQQTQELYHSNPSSIFSSSLNVGFSSKNDRSTPINSHLYWTMRQTRTESYSASINKAPTEKKQESATSGCRLFGIEIGSAVSPVATVASVGQDQPPALSVDVESDQLSQPSNANKTDAPVASSERSLNESESRQVRSCTKVIMQGMAVGRAVDLTRLDGYADLHRKLEEMFDIQGELSANLKKWKVIYTDDEDDTMLVGDDPWNEFLRMVKRIYIYSYEEAKSLTRKAKPPVVGDTIKPDPNKLPPESDVIKQQCSVAADYQD

SEQ ID NO: 64060 - protein, 299 aa, Zea mays
  Clone ID: LIB3279-204-D9_FLI.pep
FQKGKAEPARGEATEGYGSPPRPHRRAAPRGGLPALRCRPGRQSPGRNRARGGVQLRRRRRERAGALGQHQGGVGQLQRRADAVPHRPLPRARLAGAVPRLPHPLLPPRRGRHRQPRPRHHGEVQGRRRLPGDQRHGVLPEADALALAHRAHRRRPQVRHGAAPGARELGEQGGGDRHALRDRRRGPVPASAGAVHPPDRRQAGPGGGHRRGGPPARARQGQRLLPLRGLPHHAALHRGGHLDRRQEGPHRVQAPAGAAQGSRARRHGEEREAGSGRQRQGHQHLPPKATQALLVLAML

SEQ ID NO: 64061 - protein, 429 aa, Zea mays
  Clone ID: LIB3279-212-G5_FLI.pep
ETEREAELGNGAPVGNAAAAAAGPLRLVLVIVVGCCHARRQRSAPTACSSSSSCSRRRRHAHQRQLRDGAAEAEQDPDRGAPLAAGVDGAGPRGVRLGRSPARGHVLRGAARRARAAPRQPRVGVAERDGAAGGAVRAHVRGDADVRAGRGPARRGGAVALGARRRRRAHALQRRVRRHLGLGLPRLLPRRAGHVRQPRRAGGPRVRPAAGRRRHQGAARAVPDQRQPDQERRLRDRSPGAQELDGRRAAAPQAEGRDVAAARLDHRVAQGGAIHRRGPLLCPRGAVRGGAGGRAGERHRAGHPHRAQPRLQPVVRRRRRPERLPRLYACGGVRGQRHAEGAVRFRRERWVQDGGVQVRGRRRPHPPHLLQLLLPHQGHRRRLALRPRAGPGQGCACQGVVKCIVRAPSDGLLCSSSVAVLLVIWCGGL

SEQ ID NO: 64062 - protein, 501 aa, Zea mays
  Clone ID: LIB3279-218-A5_FLI.pep
SHAPPRSAAMPPFPAATTTSHLALLVLFSSSSLFFLYKSLRLRRKPSPARTATPTLLFASVTGTSKTLAARLSARLTADAGFPVRATDAATFDPDDLPSVHLLLLVIPTHDGGATPPSAAFLSRWLEESAADFRAGALLLSGLRFAVFGVGSRAYGETFNAAARNFSRWLRALGAVEVVPLGEGDIDSGDLEAVFEEWNRRVLRVVKGEEVGYGANEKNNGLDELELEGEDWDDDDEEMVDAEVDMEDIAGKAPARRKNGNLEGVLANGVHNGVKDMVTPIIRTSLEKQGYKIIGSHSGVKICRWTKSQLRGRGGCYKHSFYGIESHRCMEATPSLACANKCVFCWRHHTNPVGKSWKWKMDDPLDIVNAAIDQHTKMVKQMKGVPGVKPEKLDEGLSPRHCALSLVGEPIMYPEINALVDELHRRHISTFLVTNAQFPEKIKALKPITQLYVSVDAATKESLKAVDRPLFSDFWERFLDSLKSLHEKDQRTVYRLTLVKG

SEQ ID NO: 64063 - protein, 184 aa, Zea mays
  Clone ID: LIB3279-221-G6_FLI.pep
QGGGGKGSRRRRRRRRPRPVPPRRPAATGFKMSTCTFATSCVLLGNARTTDVPQKALKSRVSFLGRGALQLPSLRSSSKKKLDVSAAATYKVKLVTPEGEEHEFEAPDDAYILDSAETAGVELPYSCRAGACSTCAGKIEAGAVDQSDGSFLDDAQQEEGYVLTCVAYPKSDCVIHTHKEGDLY

SEQ ID NO: 64064 - protein, 335 aa, Zea mays
  Clone ID: LIB3279-233-G8_FLI.pep
RATIMGIQGNKAATHEHDFLSLYAAAAAKDAPLLLHDSKAPPPSQGNFLLKTHDFLQPLDQKPGAPPEPSPLPASAAESRHQPQQQVVVANQHALPLPGGVGTFSISPAPVSVALPAAVVKSEPPFVLWGQPAATLHPGARGHQQQWALPFAGAGQVRLPPQQAPPDRKGRGGAGGGVMESGSRSSGGAGFDDDDGLTTRREVSSSLQDLTVRVDRKGGSCSDGGTDQRPNTPRSKHSATEQRRRSKINDRFQILRELLPHSDQKRDKATFLLEVIEYIRFLQEKVQKYEATFPEWNQENAKMLPWVIASFSKAPMLASCYCCQGRNSQFLIVCV

SEQ ID NO: 64065 - protein, 218 aa, Zea mays
  Clone ID: LIB3279-234-D4_FLI.pep
RPATRSNRRSEPRLRRRSKLEMVGLVGGSTARAEHVVANAGGETEYVRRLHRHAPAEHQCTSTLVKHIKAPVHLVWELVRSFDQPQRYKPFVRNCVVRGDQLEVGSLRDVNVKTGLPATTSTERLEQLDDDLHILGVKFVGGDHRLQNYSSIITVHPESIDGRPGTLVIESFVVDVPDGNTKDETCYFVEAVIKCNLKSLAEVSEQLAVESPTSPIDQ

SEQ ID NO: 64066 - protein, 872 aa, Zea mays
  Clone ID: LIB3332-002-E7_FLI.pep
GSINTSKGKGKAVLKLSLDEPKGPHTRNAARRKATSEKDVELKPSHGHITSEDEDLDASPVEIDDALILDDDDEDVPDDEDDDHEAVLRGSLPSCVPERVHDVKLGDADDSSVASLANDNQAQPSSGSSTKNTSSRGLDTAEFRSPATFGSRGAMSFAAAAMAGLTPVGGRGIRGSRDRNGLPLGARATEHYNKLIFTAAGKQLNKHLTVYQAVQRQVVHAEDDEDRFGGSDLPDDGNHFWDDIRGDVFTITYQKADNTAEKGSVGGSASVPKSSKSDSCRTLSEKQCTSLLDSILQGELPCDLEKSNQTYNILSLLHVLEGLNQLSPRLRLQSACDDFAEGKVATLNGLYDVGAKVPSKEFINSKMTPKLARQIQDVLALCSGSLPSWCYQLTKACPFLFPFETRRQYFYSTAFGLSRALHRLQQQPGNDNNTAFEREVRIGRLQRQKVRVSRNRILDSAAKVMEMFSNQKAVLEVEYFGEVGTGLGPTLEFYTLLSRELQRVDLGLWRSHSSDNSGMQIDANADDLIRSKNHESESLTESRNIVQSPLGLFPQPWPPTAAASEGSKFFKVVEYFRLVGRVMAKALQDGRLLDLPLSTAFYKLLLGQELDLYDILSFDTEFGKTLQELQILVARKQFLDSCSSESQKIDLCFRGAPVEDLYLDFTLPGYPEYVLKEGGENAEVNICNLEEYISLVVDATVKTGIMRQVEAFKAGFNQVFDISSLQIFSPQELDYLICGRCELWEPETLPEHIKFDHGYTSKSPAIINFLEIMAEFTPEQQHAFCQFVTGAPRLPPGGLAALNPKLTIVRKHSSVANNNSNATGATESADDDLPSVMTCANYLKLPPYSTKAIMLKKLLYAINEGQGSFDLS

SEQ ID NO: 64067 - protein, 671 aa, Zea mays
  Clone ID: LIB3332-002-G6_FLI.pep
PRPQLTRVVHPSPPTRQELALPPPVPGGGGEAAAARERHQAQGVRRAAGRMFGRDPWGGPLEISNADSATDDDRSRDLDRAALMRQLDETQQSWLLAGPGDQAGKKKKRYVDLGCVVVDRKIFMWTVGTILGLGVFIGFIMMIVKLVPHKRPPPPPPDQYTQALHKALMFFNAQRSGPLPKHNGVSWRGNSCMKDGLSDSTVRRSLVGGFYDAGDAIKFNYPMAWSMTMLSWSVIEYRAKYEAIGELDHIKELIKWGTDYILKTFNSSADTIDRIVAQVGVGDTSKGSSQPNDHYCWMRPEDIDYKRPVTECHSCSDLASEMAAALAAASIVFKDSKTYSDKLVKGAKALYKFGRLQRGRYSPNGSDQAIFYNSTSYWDEFVWGGAWMYFATGNNSYLTVATAPGMAKHAGAYWFGSPNYGVFTWDDKLPGAQVLLSRLRLFLSPGYPYEEILRTFHNQTDNVMCSYLPLFNSFNFTKGGLIQLNHGRPQPLQYAVNAAFLASLYSDYLEAADTPGWYCGPNFYTTEVLRKFARSQLDYILGKNPLKMSYVVGFGNKYPKRPHHRGASIPHNGVKYGCKGGYKWRDTKKANPNILVGAMVAGPDRRDGYKDVRTNYNYTEPTLAANAGLVAALISISDIKTGRFGIDKNTIFSAIPPMFPTPPPPPSAWKP

SEQ ID NO: 64068 - protein, 448 aa, Zea mays
  Clone ID: LIB3332-008-F12_FLI.pep
TVVEEEVGGREVDFRMQAQRSPAMAGGGGAATAVAAGAAVGMPSQATLPVRRRCEGTAMGAITLDLRPGLGVGPFTLGMPISDAFTQIERQPNIYDVVHVKYFDEEPLKLDFVISFPDHGFHLRFDPWSQRLRLVEIYDVKRLQLRYATSLIGGPSTLATFAAVYALFGPTFPGIYDKERGIYTLFYPGLSFAFPIPSQYTNLFTNGEVADLPLEFPDGTTPVTCRVCIYDSSTDSKVGVGSLMDKAMVPALPAGSLYMEEVHAKLGEELWFTIGGQHIPFGASPQDVWTDLGRPCGIHQKQVDQMVIHSASEARPRTTLCGDYFYNYFSRGIDILFNGQTHRIKKFVLHTNFPGHSDFNSYKKCNFVIYDAEAEGTCQPNNASKNCITPSTKWEQVKEILGDCGRAAIQTQGSMNNPFGSTFVYGYQNIAFEVMKNGYIATVTLFQS

SEQ ID NO: 64069 - protein, 226 aa, Zea mays
  Clone ID: LIB3332-011-F4_FLI.pep
PPMAAGGGAPWAERARVVGTQIRNRFRVAPVDHRSLWLRADGRVATEAVRRWSDRVRALLQRGRSADRNSTSTDTSPEAVAKPSSSVLRFYRKRVGKEVNGIEDSVIFRSLQALAVPLIGNACYVFMHGLNSVQVYGVEKLHQALHGRPKGKALLTVSNHVAAMDDPFVIASLLPPSVMLEAQKLRWTLCATDRCFTNPVLSTFFRSVKVLPVSRGDGIYQKVSIL

SEQ ID NO: 64070 - protein, 569 aa, Zea mays
  Clone ID: LIB3332-017-B2_FLI.pep
RHCPLYRHYFVSMAPSNIVVQSSSTPPVAGGDEEFAPSVWGDFFVTYAPPVSQASEQRMSERAELLKAQVCQAFDAASMDVAGLVTYVDTLERLGLDNHFRDLIGAALERIGAEELPEHGGGLHIVALRFRLLRQHGIWVSTDVFDAFREDAGGFCSSLCSDDPRGLLSLYNAAHMAVPGEVVLDDAIAFARGRLLDIISKGEVRSPVSEQITRALDIPLPRFTRRLETMHYIAEYEHEEAHDGLLLELARLNFVLVRALHLRELKDLSLWWRELYNTVKLPYARDRMVEIYFWTCGMLHEEEYSLARMFFAKTFGMVSLMDDTFDVHATLDECHKLKEAMQRWDESEVSILPEYLRLLYIKTLSNFKEFEEILEPNKKYRMAYTKEAYKLCSKNYLKEAIWSNQKYQPSFKEHEELSIMTSGLPMLTILTLMGFGDEATPEAFEWVSSVPEMVRAGSQVTRFLNDLSSYKLGKNKKDMPGSVETYMVENGLTGDEAAAAIAALLENRWRILNQTRMEIDHTLLPAVQVVVNMARANEIIYLHGRDAYTFGADLKDLVTTLFLKQVLPL

SEQ ID NO: 64071 - protein, 426 aa, Zea mays
  Clone ID: LIB3332-024-B6_FLI.pep
VSPSLRIENVFCPLWVRTSKRSRESVTTGGGEGRIEDRRSRKEGNREQLNPLAMALLMEPGAEPLTESEQADLAGIAAIKESAAREYKEQGNQFVRMGRRHYAAAVSCYTKAIAQMEPLSSLDASAAADASVLFANRAHVNILLGNHRRALDDAEQAIRLSPSSVKAYYRAVKAALALDLLTDAASFCRKGLEQDPPNEEFKKLLSEVDSKLREQDRQRAKVAQAIAKAKDLAAAMGKRGVKLGKAAYQELTGVKKPVLDEQGVLHWPVLLLYPEVMSSDFIEDFPDTDTFSPHLDVMFSETSPPLPWDDNHVYTRDSIELYYQGGFGKPLSRSEVLRYLLEGNVDSKALPDSLLDGEDEEHDSTKCTTVTSTDSSSKWIKVKEGKTLQEVLQDKGYIVPAIPVFFVVSRKSTFYKDFKAGNWSLP

SEQ ID NO: 64072 - protein, 584 aa, Zea mays
  Clone ID: LIB3332-025-F7_FLI.pep
VGRGEVVHSSRDPSREPSRSDRPWYLGGLFCTLSLILVLGCIAFGIFWVMAVFPTVPFMPVGRTAGSLLGAMLMVLFRVISPEDAYAAIDLPIIGLLFGTMVVSIFLERADMFKYLGNLLSWKSRGSKDLLFRVCIVSAFASALFTNDTCCVVLTEFILKVARQNNLPPQPFLLALATSSNIGSAATPIGNPQNLVIAVESGISFGQFLLGVFPAMIVGVLTNAAILLLYFWKYLSVEKDQEGGQPTGPEVVADDEVTSHRFTPARMSHVSSLNPDDMDCVSEPIIRSNSVSTTGNENLRSRSINSEADIQLAIKSLRASSMSHEMVEVSTVPDRRDEGASSRKFTRTASQQRSVIIEDLAPSPEINGEKEKETEVAEKRWKVLVWKTAVYLITLGMLIALLMGLNMSWTAITAALVLLALDFTDAQACLEKVSYSLLIFFCGMFITVDGFNKTGIPNTLWELVEPYSRIDSAKGVALLAVVILILSNVASNVPTVLLLGTRVAASAASISHGSERKAWLILAWVSTVAGNLTLLGSAANLIVCEQARRAQFFGYNLTFWSHLRFGVPSTIIVTAIGLLIVISY

SEQ ID NO: 64073 - protein, 581 aa, Zea mays
  Clone ID: LIB3332-029-A7_FLI.pep
TDDSTDKAPTRHPPATMPSRSDSDSLLVRAEGMRDAALDYHGRPADRGATGGWRSALFIIAVEIAERFTFYGVSANLINYLTGPLGQGTAAAAAAINAWNGVAQLLPLLGGALADKWLGRYRTIVIASLLYILGLGMLAFSTFLSSGSGHQCTAAGGQICAPSGLKVTFFYVSLYIVAVAQGGHKPCVQAFGADQFDQTDPKETVSRSSFFNWWYFGMCAGTAVTLVLLSYVQDNIGWGLGFGIPCAVMAAALAVFLLGTRTYRYYVTAGQGLFARAGEAFAEWRSRRKAGQLVQDSQELDPPAADAPRFSAGVDVEEQAAVRNNGGLVKEAKAIIRLFPIWAACLLYAVAYSQSSTFFTKQAATLDRRIGRHVQVPPAALQSFISVTIVVIIPIYDRVLVPVSRRYSGKPSGITMLQRIGTGMFLSLLSMVIAALVEKHRLRVAGDAGLVDKPKVPVPMSLWWMVPQYVLFGAADVFTMVGLQEFFYDQVPDKLRSLGLALYLSIFGVGSFISSALVSVIDRVTTDRGGSWFSNNLNRGHVDYFYWLLAALSAVELLAYVFFAVTYKYKNRGAVHATVDG

SEQ ID NO: 64074 - protein, 385 aa, Zea mays
  Clone ID: LIB3332-029-B1_FLI.pep
IRSLSPSLPPSRSRFSVSIRQAGEIFMATSFDRWEKDPFFLAAEEVQESADRMESVYRVWVQERSGGDSEAASVTGGPTAAQLRRELHTALGTAKWQLDELARAVRSNDLVMSAGKDTRARHDDFVTAIGYRILEVENYLKESNLADGRGPLSWVHLDEDERDDLAAFLSASPFQQKDKVVTIPSAGDIEVGSNAARMKNDISTDSSKDSAGSTDLISGTAKQDLHRGHRRAASASADIGSWSMSIPNECEGTTEQLSDGSDKLPLHKIVKTCALTSTLQSKTRTKWKNGAVRWAGSNQQDVEEAIPLNTSQLSQGLEECFERNKSCLSTCDEHTYNKKLHGWLGALRRQLQRSQYQIQYGHHIQLIVLALAALVIIVCIVRTIW

SEQ ID NO: 64075 - protein, 458 aa, Zea mays
  Clone ID: LIB3332-035-G8_FLI.pep
VLRRRRSHRGRRRGRRSLGRVGDDDDDEGGREPVLLVSGMGGSVLHARRRSNSKFDLRVWVRILFANLDFKKYLWSLYNADTGYVEPLDDDVEIVVPEDDHGLFAIDILDPSWFVELLHLSMVYHFHGMIDMLINCGYEKGTTLFGYGYDFRQSNRIDKAMAGLRAKLETAYKTSGGKKVNLISHSMGGLLVRCFMSMNHDVFTKYVNKWICIACPFQGAPGCINDSLLTGLQFVYGFESFFFVSRWAMHQLLVECPSIYEMLPNPEFKWKEKPIIQVWRKNPEKDGTVELVQYEATDCVSLFEEALRNNELTYNGKKVALPFNMSVFKWATKTRQILDNAELPDTVSFYNIYGTSYETPYDVCYGSESSPIGDLSEVCHTVPSYTYVDGDCTVPIESARADGFSAKERVGVKADHRGLLSDENVFKLLKKWLGVSEKKSEWRCVSKSYSKVGNWVAL

SEQ ID NO: 64076 - protein, 636 aa, Zea mays
  Clone ID: LIB3332-036-E3_FLI.pep
QPGAAIGTVRERAAAAMTRCGRCRQCECAGASTTTSHGDARNRDNDAPDAVLEGLAMAGLVDILRQLGDLAELAAEVFDDMQDQVMAASARGRRLAARARKLLAADLDLVLDLDLPPPSTQEHRCLSSAAAATALATSGGAGRLGCRSYLGGAPPMPRVVVQRIERCRGPPRLSLLDKFDAAGDGACLKRYTDPSFFFRAHSAKIDEQGTLKQHRRQAEAAAAAGAAGSMFLLMQQTAAHRVEQPNMEQKLQEGSTAQPSPSELERTSSFEAWLSPQARRFPTATAATTHHHLQEPPDDDDGGGGGGATTCSGSISSQVDTTSNAAAVSSSSTVKAVRLNSASLVKGGESNTTRSRYKGKIASRVSSLPRKLFMNTTKHHNDHSRSFRAGSSSLRVTQATDIGDCSPELEAIAVAIPTPDRCSNSNSSTPETCTAADSKNLLLLLPGSGPVLEPPDNSSAAAAEDAKVHTPLAPIPPMQWLSEKGTPPASPKHRTPCFQQQFGSSGQSDEKPSQEHEASDHSSNLLQESVFFSAAQELAKMSPPPPWVPRPKYPLLDVKALRNGPSPIHPSRNILDSRSAQIKDIAISSKLKPASRASSHVTGTGSPTNATILNRADGIRQVHDDETDQIWSDDTQ

SEQ ID NO: 64077 - protein, 449 aa, Zea mays
  Clone ID: LIB3332-038-G2_FLI.pep
VSNLTTATSRLHSAPPPSQSAATMPPHATKDPVAAPAAATAAALSRALAAARPFLRGEEAEVDPALPGLAAVLRGAGAGECWHKHGTFLAHLLDVHRILRLWGAPDAVARCGLYHSAYSNSYVNLAIFQPDTGRAHVAAVVGGPAERLVHLFCVVPRQQLVHDDLLFHYSDQDLADDLASSEESVRDARRGVFDDAQPWRRKIQRLLPADGITVKHIRTGEDVSLSRRIAATFLLMTIADFSDQLFDWQDRLFDNSNGRLEFSGNTWTSLWPGTGKPGLWVTSSSRMAALYTLIVREEEIHITQRARDTHGRDEDMDLVIPPVFNGCTRLLNAEDQKVARDLYWEAVCGEEASDWLKVEQLLQQSIAKNPFVGEPHLVLAQVYLNMERYGEAQMQAEEGLRLLLEWGSSWDKRMPWEGWVSWGRAMLTKATDKDWPHTSFGILSLGLVK

SEQ ID NO: 64078 - protein, 390 aa, Zea mays
  Clone ID: LIB3332-039-C7_FLI.pep
RPSKKAKPAMASAATAVALVVVAALASLTQLAASECSAADRDALLSIRAALSEEERQLGVFSTWAAGTDCCAGWYGVACDPTTGRVADLSLRGEADDAVMAPAGRPASGVMSGYVSDAVCRLDRLSTLVLADWKRISGPIPACVATSLPYLRVLELPGNRLTGAVPPLGGGQSRLAVLNLAGNQLSGAIPASLTSLTELKHLDLAGNRLSGRVPPDLGRLRMLSRALLARNRLSGPIPASVASLPRLADLDLSENQLTGAIPEGLGAGPGNSGVLTTLYLGGNRLSGGVPASLLRSGGLGMLNLSRNALGGGVPDAFTPRSYFMLLDLSRNRLTGGVPRSLASAAYVGHLDLSHNRLCGTIPAGPPFDRLGAESFVGNSCLCGGPLGKCT

SEQ ID NO: 64079 - protein, 192 aa, Zea mays
  Clone ID: LIB3332-042-H3_FLI.pep
RWCTPWPPTARRSALSCLRRGWWQHWLIFMLMLLQSRLGLSTRKQTGLVLLCGWFCCFALADPLDLLFIRQGNLSQRKCSYVVIGRVIFSILGIFMAAVVTYTVITDGLPFRKELLTPWMAATLIDFYINVFAISVWVAHKESSWISTTIWIVLLICFGSITTCGYIVIQLFKVSYQDPIYHVLLNSHSKKI

SEQ ID NO: 64080 - protein, 441 aa, Zea mays
  Clone ID: LIB3332-046-D8_FLI.pep
RAEEMATRSLTSALPLSRTPRVPSHRPSLRRLQTLTRALTSSSPQAMASSPTPKKVLVPIANGTEPMEAVITIDVLRRAGADVAVASVEPGATSVAASWGIKLTADALLADLADDEFDLISLPGGMPGSSTFGECKVLEKMVKKHVEKGKLYAAICAAPAMTLGTWGLLNGLKATCYPSFIDKLPSEVHAVESRVQIDGKCMTSRGPGTAMEYSVILVEQLYGKEKAKEVAGPMVMRPQHGVEFSMKEVNSTSWNVGETPNILVPIANGTEEMEATMILDILRRAKANVVVASLEDKLEIVASRKVKMIADVLLDDALKEQYDLILLPGGLGGAEAYAKSDKLMDLIKKQAAANRLYGAICASPAIALEPHGLLKGKKVTSYPAMWNKLADQSECNNRVIVDGNLITSQGPGTSMEFSLAIVEKLFGRERALELAKSMVFI

SEQ ID NO: 64081 - protein, 388 aa, Zea mays
  Clone ID: LIB3332-047-E10_FLI.pep
FDFAGSIREQAATSPMPSSMAKSLLLPPQFVSVSPRHPHRAGFPVLKPRRASLLAATGGDVTPAPDADNGSNTNPLVEVPRALWRRTLQPLGDYGFGKRSVWEGGVGLFMVSGAALLALALAWLRGFQLRSRFRKYNTVFEFTQACGICVGTPVRIRGVTVGSVVRVDSSLRSVDATVEVGDDKIIIPRNSVVEVNQSGLLMETLIDITPKDPLPAPSVGPLDPDCTKEGLILCDKERMKGQQGVSLDALVGIFTRLGRDMEEIGVSKSYKLAEKVASIMEEAQPLLTRIEDLAEEMQPLLSEVRDSDLLKDVETIAKGLADASVDLRRLKSSMLTPENTDLIKQSIFTLIFTLKNIESISSDISGFTGDETTRQNIKLLIKSLSRLL

SEQ ID NO: 64082 - protein, 280 aa, Zea mays
  Clone ID: LIB3332-048-F9_FLI.pep
HNMAQLPPRVPTAVHRWPEGGHHGAAAWADDFAEFAASRRGAHRRSLSDSVAFVEVAPAAGEFDRLDDDQLMSMFPDEAAAGGGGGGSSAAGSENNGGSSDSYGDRRGGGGPAAGGTSTTTSCNGFDGGEHNEAADAQATGQAAAAAAASTELIRDPKRVKRILANRQSAQRSRVRKLQYISELERSVTTLQNEVSALSPRVAFLDQQRTILTVGNSHLKQRIAALAQDKIFKDAHQEALKKEIERLRQVYEQQNLKMSAGAAASDHGPPPVRAEKELMS

SEQ ID NO: 64083 - protein, 348 aa, Zea mays
  Clone ID: LIB3353-005-A12_FLI.pep
TVAMSTGRTEEAAGSAETACVTGAGGYIASWLVKLLLSRGYTVHGTVRDLSDNKTAHLKRLENASENLKLFKADVLDYDAMAAAVAGCQGVFHVATPVPSGKITDPEREMLGPAVTGTINALKAASAANARRVVVVSSMVAVEINPKDWPKDKIKDENCWSDKEFCRNEENWYSVAKISSEEAALEYAKQTGLDVVTVNPAVVFGPLLQPTLNTSCQFLVYFLKGGPDRMRDKLWHIVDVRDTADALLLVYETPQASGRHICAPHFISARDLLELLKTMYPDDYPFISKESIYDMEHPAPMTSDKLKKLGWKVRPLKETIAETVEFCQHAGFLEDVEGFRFPPLYNII

SEQ ID NO: 64084 - protein, 486 aa, Zea mays
  Clone ID: LIB3353-008-D4_FLI.pep
VRATEIVWTIILVVHAAAVVAPGGRVEVAGLGVSAPLRHGHADMLRRLAIQVVVVVCVAQRRLAEVLVCQLHALHVLLLLHQHAPVLHELVQRHPRLLERGRALLGVDEPPGDVLHAGLGHPPPHLVVVHPGAEGAEEVDGLAREGVHQPHHVLVGDAVAAEDALAHAHAVLAGGSPVELVHAPVADQRRIQRREVVARDDDGHAGVLLLVVHPRELHVGGVVGDVHQRRVHHLVVHRVLRRAAHPPRAGVQVVDEQHAHLALLDHVGRLAVALADQLRRLAGVAALQLAGAHNDGVDSHLGQDKLTLEGLPLALASPDTQDEGHLDVWQGHEVLGDVDNELVHERGSDVVAIHHVVQAVVPEPLADVVVGAEHGDVGAVPHGRLEQRVHAALPPGDVLLVVRGVQGQAPPPVLLRLLVHRHGSDSDGGRGAMQGVVPLLLIPDDDAGDELLAEEAARRESSDDGSGGESCSGSHRWSTDGSELQF

SEQ ID NO: 64085 - protein, 159 aa, Zea mays
  Clone ID: LIB3354-004-G8_FLI.pep
FASKLTAKAKPCRRPRRAAPTHYTLAAAETRQTASRSMGCVGSTPATKDAGGSSDVNHGTKRVRKPKAWKHPQPITMAQLRQMREEFWDTAPHYGGQKEIWDALRVASESEVSHAQAVVESAGIIVSNADLTLCYDERGAKYELPKYVLSEPTNLIRDS

SEQ ID NO: 64086 - protein, 266 aa, Zea mays
  Clone ID: LIB3354-009-G8_FLI.pep
ESPPTALALRSLADYTVGAIPTLFYVPDFISHSEQSQLLHHIYQAPAPKWKTLKNRRLQNWGTLCLLRTWWFWLGDCFSFLLSLTRCRIEQEEWCMRRGSCRRPPHQDGPAYYPVVAIISLASPVVINFTPHQKLKEQQDTDPQDLLAHELPSPAETENNGSGSQERGATNESDPSSSSLMLMPCSLLIFKDQAYTDYLHGIQDSELHNLDKVENVSQCQELKHLHSDSILGGMSMEEHDTFRRSATRVSLTCRLVLKVHKKLFKI

SEQ ID NO: 64087 - protein, 312 aa, Zea mays
  Clone ID: LIB3354-029-G11_FLI.pep
PNASRQRLRIYAIFTSEGINADDPSKPKVAQDLIQRWQNQNSETGRPLNAEVMELDLLSLDSVANFADAWNARMAPLHVLINNAGIFAIGEPQRFSKDGHEEHMQVNHLAPALLAMLLIPSLLRGSPSRIVNVNSIMHTVGFVDAEDMNLRKHKYRSWLGYSNSKLAQVKFSSMLHKKIPAEAGIGVVCASPGIVDTNVARDLPKIVVAAYHLIPYFIFDAQEGSRSALFAASDPQVPEYCETLKSEDWPVCACINYDCSPMNASEEAHNLETSQLVWEKTLEMVGLPPDALEKLIAGESVQCRYGQQDTTF

SEQ ID NO: 64088 - protein, 576 aa, Zea mays; identical to SEQ ID NO: 63398
  Clone ID: LIB3354-032-G12_FLI.pep

SEQ ID NO: 64089 - protein, 408 aa, Zea mays
  Clone ID: LIB3354-033-D8_FLI.pep
FILEWNGTSSKEHMGGVCTAVRIGICYSFITCIQAYTTTCRQYHAPSRTSVSGVHWIRSQRRCHGDGGDHAVDAAYVASAAQAVVPLLTPLLSPRVLDDPVGAVAQPQRREAARAVADEEHAVVDPRARADERARHPAHVRLHERRVEPHREGPAADERRADLGLVAGRHGGEVGHADGDLGRVEAAGPRRARVRVRALLHQAAGLHQVRVRVRHQPAGAAVVALVLRHRAARVVAVDQLLLAEVDELPRGDEVGALHRARRAERPARPARALRLDARDGALVAPVEAGRQPGHLLLRGRRGGRHATHEPLDVPAGAQAREARLELLPREVGEGRDPVARRRVQRLVRRRAGQVGREHAQPTRILLGPGVPPPVPPHERCELRLREQTRARAGAGTLRRHLPDKFVVG

SEQ ID NO: 64090 - protein, 360 aa, Zea mays
  Clone ID: LIB3354-071-A5_FLI.pep
VLPVPSPPSPYSSSAPGPAMAAPSGTMRAVQYDRYGGGAQGLKHVEVPIPSPKKGEVLIRMEATSINAVDWKFQNGFARPFMPRRFPFISGFDLAGEVVELGAGVSSFKPGDKVIAINFPNGGGLAEYAVASASRTAARPPEVSAVEGVCVPIAAVTALRSLRTAGVTVTLDDPARAPATPKNVLVTAASGAVGHFAVQLARMGGHNVTATCGARNLGLVRSLGADEALDYKTPEGARLRSPSGRKYDAAVHCAAKGLPWSVFRPVLAASGTVVDITPGFVAVVTAILQVATFSKKRLVPLMVTPKKEEMELLLGMLKQGRLKTVIDSRHPLGSAHEGWAKSMSGHATGKVVIEIGAAQP

SEQ ID NO: 64091 - protein, 275 aa, Zea mays
  Clone ID: LIB3354-071-E10_FLI.pep
MARSSANQDDMLFLFLAVQPGRPQRVPPLLLEQPEAVLPLPLLDHGDEPHDEVERKQDPARPQQVYREETEGELVGRSDRDHGDQVPQQQDDRERDGHRPAPGRAPAGGARALGVLRVAASDQRRVHLLLLLLFRLVLRPGHPHAVSDGHRDISRLGFLGRNGVARLKVLEANLADGASLLVAPPLHASPVSVLEGAGTGAGRLHGGAPLVLLVVANPALPQRRGARFLLLHLLLPRCFLDSQISLSLSLSASVSLWSLAALPLLPSLPHTIPLS

SEQ ID NO: 64092 - protein, 244 aa, Zea mays
  Clone ID: LIB3354-075-C5_FLI.pep
GSRSRHRVAEAMATSMLSTVKVSNVSLKAAQRDIKEFFSFSGDIVHVEMQSFDELSQVAYITFKDKQGAETAMLLTGATIVDMAVIVTPANDYELPSSVLAALEPKDTKPSALQKAEDIVGTMLAKGFILGRDALDKAKALDEKHQLTSTATARVSSFDKRIGLSEKISVGTSVVNDKVKEMDQKYQVSEKTKSALAAAEHSVSTAGSAIMKNRYVLTGAAWVTGAFSKVTSAANEAGARLRKK

SEQ ID NO: 64093 - protein, 503 aa, Zea mays
  Clone ID: LIB3354-077-D1_FLI.pep
SLSLSLHSPYYKAGKNTHTQKKGSQYPPPFSYYYSLAVFPNQQIDLARHKSARRRSAARTTHRAAAEAGQSAGSRGRARRHGRAGARRPRLVPPAPGGGRGGARGDGAAGTHIASHRLRRYRRSGGRSQLQLRAGGAAGFALHGAGGTGGEGAAPADAGGRRREAQRHHLRAAERGAGAGPGPGVQALPAGAAQPQVAAGAAALPRPPLAPALRLLARGVPPHAVRRGGRARRRHARRPRRRHAPGRRAQARRGHPRHRAPPRAALRAGGLQPPPQPRGDLGRAAHGRARGGPQDAPPQEARAAGGPRRAPRAPGLGRHGARPLHRPRAGAWPGLREAPLRRPQPGQGLHPDAAPLRRLQRARRHPRQPHLPRHRDGPPRLRGLRPHRARPQRRGHGAPHHGPAQRARLAREHPLLPHDPRVPDRGVHVQRRAPLRQGALRHAAPAAQGRGAGGRRLRQVRPGRGLRLPLRPGHLHRREDLRAGHRRRAVRAGRHQGHADSRP

SEQ ID NO: 64094 - protein, 341 aa, Zea mays
  Clone ID: LIB3354-084-A4_FLI.pep
LRPVGGQHQVSQSSYCLAPASFCPAPPRRQNPKPVNHSGNNLAAPAWRQAAHKASRRCSCCFFDRSMAVVTRDAACLPLVLLLLVFSAAPSPADGCDRCVRRSKATYYQASSLALNAGSCGYGSLAASLNGGLLAAASPELYRGGVGCGACFQVRCRDSELCSAAGAKVVVTDQARTSNRTALVLSAAAYAAMASAGKAARLRDRRVVDVEYKRVPCEYAKDRNLLIRVEEKSRPPSNLSIRFLYQGDQTDIVAVDVATVGSSNWRFMARDHGPAWSTAQAPPGPLQFRLVVTGGYDGKWVWAESEVLPRRWEAGRVYDAGVQVSDVAQEGCYPCDTREWQ

SEQ ID NO: 64095 - protein, 276 aa, Zea mays
  Clone ID: LIB3354-089-C10_FLI.pep
LSLRSTIGMDDAQGYQEGDDHDLVLQKQEWIKTQDMLKSKLILEDEFAWSLPSVGSGLDEPEWCKLKYIGGTDISFLKEDPSTACAAVVVLNVDTLEVVHEEFNVVRLQVPYIPGFLAFREAPVLLGLLEKVKINAPHFCPQLLMVDGNGLLHPRGFGLACHLGVLADIPTVGVGKNLHHVDGLNQSEVRRLLGSKENCNRELVLLTGQSGTKWGMAVRSCPGSSKPIYVSVGHRISLDSATAIVKSCCRYRVPEPTRQADIRSKVFLQKLQKPRQ

SEQ ID NO: 64096 - protein, 218 aa, Zea mays
  Clone ID: LIB3354-096-E8_FLI.pep
VDNMSSSNQMCSDGKFGRGPRELSGAVDLISRYKLLNHHSFFCKKPLPLAISDTNYLNNVVGDTEIRKGEGMELDQLFQNSCSSEKTAYIQPFDMETLGQAFQLRETAPVDLPSAEKGTPTISGKSKVKSKDKVKKHKKHKEKDRDKEKEQKKHKHRHKDRSKDKDKDKDKEKKKDKSGNHDSGGDHSKKHEKKRKQEVTGSSANVQNHKKTQKHKIQ

SEQ ID NO: 64097 - protein, 212 aa, Zea mays
  Clone ID: LIB3354-098-D10_FLI.pep
ENEKAPSRTPLSLTLPDFRGRGRWSTRRSGAPMDPACEELERRSRYLSALVRRTKFADPPQPEPEAKADVEPPQLKAPPHVGGEGKGGKDEAKAEERTPMKKPRGEAAAAEAEGRKVAVCVRAADMPLPLQRRAVRIALEAVAAMPRLESKRLALALKKDFDTTYGPAWHCIVGTSFGSYVTHSLGGFLYFSVDKAYVLLFRTAVQPLVQLQ

SEQ ID NO: 64098 - protein, 407 aa, Zea mays
  Clone ID: LIB3354-104-H7_FLI.pep
SFVATMGSAWANVREICRAQRADGPAAVLAIGTANPANCVPQDEFPDFYFRATKSDHLTGLKEKFKRVCQKLGVQKRYLHHTEELLSAHPEFLDRSSPSLDARLDIVKTAVPELAAQACRKAIAEWGRPAADVTHLVVATNSGAHIPGVDFQLVSLLGLRPTVRRTMLYLNGCSAGAAALRLARDLAENNRGARVLVACAEITVLLFDGPEEGCFQTLVNQGLFGDGAGAVVVGADPAAPAERPLFEIVSAAQTVIPDSEGVITMHLTKGGYGGNISTRQVPVLIGDHIERCLTDAFAPLGVGAGWNDLFWDVHPGSSAILDQVDAVLKLKPEKLAASRRVLSEYGNMFGVTVIFVLDELRRRMTNGEEEGAPAEWGVMVAFGPGLTVETMVLHRSGTPAETKLGEA

SEQ ID NO: 64099 - protein, 461 aa, Zea mays
  Clone ID: LIB3354-106-H3_FLI.pep
PRLPVTPPAINALFLHLRPSPPPPLRSPPLLRPPLRSWLALDGVAATEPVGETEMKPLHLRSSGSFKRLLLLSIGHRSPPTTNPPVADADARESPEEPGSPRCSSSGPAWRCFSYDEVDRATGGFHERNLVGRGGSSEVYRGELPGGRAVAVKRLLGASACERRERDFLAELGTVGHARHPNVCGLLGCCVDRDLYLVFDLSRRGSVAANLHDEALPAMGWAARYGIAVGTARGLEYLHKGCRRRIIHRDIKASNVLLTDDLQPQISDFGLAKWLPSEWTHRAIAPIEGTFGCLAPEYYTHGIVDEKTDVFAFGVFLLELVTGRKPVDGRHRSLLSWVTVARPLLSGDGKVEALVDPRLGGDYDGEQARRVTFVASLCVRAAATWRPSMTEVLELLEGGEIRQDRWAMPETAVANDDGEQQPWWFDVLDDFDDDDDDQDAGGEEFSTPSPSSSSSSSTTSN

SEQ ID NO: 64100 - protein, 358 aa, Zea mays
  Clone ID: LIB3354-108-D3_FLI.pep
PSLTPPPRSSRAALHHGPHNSTASSSQQTPVGMAVALLLLLVTPVGLLAALALLTRPRAARVPLKGRHVFITGGSSGIGLAMATAAAREGARVSILARNLARLEDARAAIQRDSGRDDVGVHAADVRDAGAVARALQEAGPVDVLVCNHGVFVPQELEGQDVDEIKWMVDINLMGSFHLIKAALPAMKARTRETRLPGSIAIMSSQAGQVGIYGYTAYSASKFALRGLGEALQHEVIADNIHVSLIFPPDTETPGLEEEHKRRPELTNIIAGSSGGMKADDVAKKALDGIKSAKFIVPCNFEGAMLAVATAGLSPQSSPLMAFLEVVGAGLMRFAAICFQWNWFSTIESYYAKKKKSE

SEQ ID NO: 64101 - protein, 353 aa, Zea mays
  Clone ID: LIB3354-113-B12_FLI.pep
TPKATALFLPQTTGTRLHYNPAGILVCKDPVVELEGLGEEGRPAEVGGEDAADGGGAHEHVHDDDLQLDGLKRRRAAHDEPRHGARQRDEPHRLGAVDHRGQRDDQRPLHLLQRRLPRRRAQRQRRLHQVPLDLDVLPELLHGDAGDGHGVADHHAGDGDDVARGEGEDVEEDKQEHGDAGADEDGDAGDALPARHLPGALPRRVPGDRHHEEVGEEDPERVLLGEDELEDEADGGELEEGARDGVEHLALEPQALREAEPDGHGHHGRGRRRLEHANQEVAPEPRRARVHLPRHQVQERRARVPRHRRPTGPRNGLSRACCPAPRRVVSSPLWTGAPRAAEEGGGGGGWAAR

SEQ ID NO: 64102 - protein, 326 aa, Zea mays
  Clone ID: LIB3354-114-E3_FLI.pep
TPTRGENSEAEEVPTAREREGTGGEGRGGERTRETMMRCAAAALAVALIAAVAAATAAGSPAAGTCARRGAPPFLDAVGSRCPFVRIDPSPPLEVRGETVDTELNLRRRGASYSILFYAAWCPFSSKLRPIFGTLSTMYPQIHHFTVEESSATPSLFSRYGVRGFPAILLVNETTMVRYRGSKDLNSLVDFYKETTGLDPIAYIDVVEQESTGSLSSVMPWDRSLREMAKDEMYLLVAVLFIIVKVVAHFIPVVMSHLRAFLVVRVQNLNLGIRRGSNQLLERALNVLDVRRLWSKLRLSNKATDLRKGASNARAWASSFPSVFAG

SEQ ID NO: 64103 - protein, 494 aa, Zea mays
  Clone ID: LIB3354-115-C5_FLI.pep
GGAIRAGQRGVRDPERETAGFFSSAAPLFQSLLNLIRPRPHPAGTITKKVPAFFFFFFFSSAPACRLLVLPHPLSDSARVPSAARRVAMGNCWGAKISSDSPSRGASSPSGTASKLASRNGAAAALSGCSSHASSASMLPTPRSEDEILESANVRAFSFNELRTATRNFRPDSVLGEGGFGSVFKGWVDEKTLAPARPGTGMVIAVKKLNQDGYQGHKEWLTEVNYLGTLSHPYLVKLVGYCLEDEQRLLVYEFMPRGSLENHLFRRSSYFQPLSWNLRMKIALGAAKGLAYLHSDEAKVIYRDFKTSNVLLDANFNAKLSDFGLAKDGPTGDKSHVSTRVMGTHGYAAPEYLATGHLTTKSDVYSFGVVLLEMLSGRRALDKNRPNGEHNLVEWARPYLRSKRRIFRILDPRLGGQYSLARAQKAAALALQCLSVESRHRPSMDEVVTALEQLQDTKEGGNHHLQKRPGSRSLDNNGGKAAGKGKPAPHVKPV

SEQ ID NO: 64104 - protein, 389 aa, Zea mays
  Clone ID: LIB3354-115-E2_FLI.pep
RWYRSSPPRCSRRRFCPCRPRGSPAAASRSASPCTTPSPTARPCGGSWAPGPPPPATDPPSPSPSPRRTIAGRPSTSPTATSSRARCSRWSRPTCPRCARTIAMHGTPAAPFFCASVTEPLACVHAGGHRCGLRLQPALPPGAPDVLPRRRRHQGTEAPHLRARRGRGRGRGRRRRRRQKQEEAGVDVRGAVGAGMDVVRAVQGPGRRRRHVPGVPGGPARAHGPARGGRLPGQLHQGVPGDGGRRGPAGRARPAGGVPRDPGGGGGDGGGAAGRLGAVDPEDDGAAVRAPRQRGGQPAVPRVRGVRLRVRPPRARGARVHEQRRRDGARRRQGRRRGAAVRVAGPRAHGGLQGARLRHLRGAVGLGGGGGQLIDGGRGVWWTRGIRIM

SEQ ID NO: 64105 - protein, 160 aa, Zea mays
  Clone ID: LIB3354-118-B10_FLI.pep
FLLFPCPAVLAFLPPASWRQRNNQSVRSMLRELELDAGRPAAQSVEFDMATPLVAGLSVAAAALSGRYMIRAWQAFRTQAAMPRVRRFYPGGFQGEMNRREAALILGVRERATVDKIKEAHRRVMVANHPDAGGSHYVASKINEAKDMLMGKGKSGSSIF

SEQ ID NO: 64106 - protein, 543 aa, Zea mays
  Clone ID: LIB3354-121-D11_FLI.pep
LAPPGASAAAGLQGRAEVDTSTPFKSVREAVDRFGGSAAWSSDLIKRMFALPPSPKKQEGGDELADLEEQTAQLEKELGVKERETLDVLKELESTKKVVADLKLKIQNEGAGAFCIPEESVRGQAELPTAAEEVAEVQPENAETDVVMGALHVQLHQSPGTSVLKGLEQAKANLNRTTSDLAAIRASVESLRNDIAKERILVERSREKVCANTTLIASLEDELNRTAQKLQTLRDLQRRRDDQSDIFIEIKKMTSELEQLRNAASAAKSEAAMLSAEIEQMRASIGTAEVRCRAARKIEEAARAAEALALAEIKILLRNEASVEDLQGMEDVSLSLEEYSELAAKAQEADERSRKKIDAAMVQVDEANRTESDSLRKLEEARLQVEECKKALQDAQKRVDAANRGKSAVEEALRRCRSTTGHRRRSVHDPPRFKHPAPRSRDSQNMDIVGVSKGPLKPTLSIGQILSMKLMGPDGYDKSVWDDASEASTMSLGHILNRRHAVVYSSDATAQKKFPGKRKKFAFTGLSIFLARQAKRKKEKGSH

SEQ ID NO: 64107 - protein, 463 aa, Zea mays
  Clone ID: LIB3354-122-B1_FLI.pep
ARSFQHHKLHTALLSPLPAPPPSMPSASLRLAVVGAGAAGLVAARELRREGHAPVVFERAAAVGGTWLYTPPATSSDPLGAAATHSSLYASLRTNLPRETMGFLDFPFAAGAAGSRDPRRFPGHEEVLRYLEAFARRFDLLRLVRFETEVLSVRREDGGRWAVTSRKLGDKGSGEEEFYDAVVVCNGHYTEPRLAVIPGVDAWPGKQMHSHNYRVPEPFLDQVVIIIGASASAVDISRDIASMAEEVHIADRSAPASTCNKQPGYDNLWLHSMIDHAQEDGTVVFQDGSSIKADVIMHCTGYLYDFPFLGDDSTITVDDNRVDPLYKHIFPPEVAPHLSFIGLPWKVIPFPLFELQSKWVARVLSGRINLPSEDRMMEDVKAFYLKLEAHGWPKRYTHNFANYQFEYDDWLAEQCGHPPVEEWRKQMYAVTSMNKAARPESYRDEWDDEHLVAEANEYFKKFL

SEQ ID NO: 64108 - protein, 95 aa, Zea mays
  Clone ID: LIB3356-025-A2_FLI.pep
GAGPQHTIMQASDRFNINSQLEHLQAKYVGTGHADLSRFEWAVNIQRDSYASYIGHYPMLAYFAIAENESIGRERYNFMQKMLLPCGLPPERDED

SEQ ID NO: 64109 - protein, 214 aa, Zea mays
  Clone ID: LIB3356-033-F7_FLI.pep
HTIFVGNEWSCSSVEQRCYHAQDSNQRKQAALGAITTVCSGTVLPGDICARKPHLAFFALAGKQTWWILAIEVDVAEHCRCTFIALVIEVIVKRAREFLECGTALAGWKLRSFALACDDCVVLELKVHRATILGLQQAPPCRSGARLEDAIGQERTVRGRGELSHYGGREEEDQEPTPRRHRHASSHRKQELDAAAAAAETPGWLASKEWSSLS

SEQ ID NO: 64110 - protein, 207 aa, Zea mays
  Clone ID: LIB3356-062-E6_FLI.pep
FCAFDTSFTYSVFHTTAAMSSASSSAAAANAGEGSGGAEEGVEITYVSYGGEQHLPLVMSLVDEELSEPYSIFTYRYFVYLWPQLTFLAFDARDGKCVGTVVCKMGEHRGAFRGYIAMLVVLKPYRGRGIATELVTRSIRAMMESGCEEVTLEAEVTNKGALALYGRLGFIRAKRLYRYYLNGVDAFRLKLLFPRPDNDPQIFGIID

SEQ ID NO: 64111 - protein, 287 aa, Zea mays
  Clone ID: LIB3357-007-A5_FLI.pep
SCALRFARRACRPRASRGLAGERLLEMPPAAAALLRCAPAVPFAARSSAVSRSGMARRLVAASAAAGRLAPAYRGLLLDAGGTLLQVARPVAETYASIGRRYGVTKTKKRIMEGFKRAFSAPWPKTLRYQGDGRPFWRIVVAEATDCTDGDYFEEVYQYYAHGDAWRLPTGADAALRELKDAGVKLAVVSNFDTRLRKLLKDLNVSEMFDAIVVSSEVGYEKPSPEIFNIALDQIGVEASKAIHVGDDETADMAGANATGLECWLWGKDVTTFSEIQERILTTDDPQ

SEQ ID NO: 64112 - protein, 166 aa, Zea mays
  Clone ID: LIB3357-013-C5_FLI.pep
LGGADALVAGAGAGAAGAGAGGVALGGRVVHGAREGGGEVGVEADDAADVVVELADEADVAGEVVGRAGLVVLVDLADEHPVLVQQALHLHEAPVERVDQLPVHHLPAAAAVRHGAAGEAVAFHGSPPLALSVSSPHRLLGYWYWYWYWLHYSPSRNISVANPSFL

SEQ ID NO: 64113 - protein, 201 aa, Zea mays
  Clone ID: LIB3357-019-E8_FLI.pep
HRHRYCRSPRSDSLTSYIPSRPAFPVSQQRRRMAMAAGRGLLALFSVVVVAGLTSAANGPFLSDSVFQPSAGSTGRSLLQAKNSCPVNFEFQNYTIITSKCKGPKFPAGPCCAALKEFACPYYTYLNDESNDCASTMFSYINLYGKYPPGLFSSECKEGKQGLSCADVLERDSATASSGHHAQISLLALITVLSVVVALFH

SEQ ID NO: 64114 - protein, 217 aa, Zea mays
  Clone ID: LIB3357-022-D12_FLI.pep
QRTHQSPPPLEQPLMHKATQSLVQVLLLVGVDDAVCLGVGDAGEEVPLGHLAVVEEGPLRLVDLAGRHPPGAGGAGPGAAGEGQLHPGGLGRLEDVGVVGGLELVLRPVRADQLHLVQHGRRGRHEPAGQPWPGRAGRLPRVAGEGEGVGHRSRGRLIVIACPGSGSGQSWGGGSRHLAPLVIPDGWVTALPVPGRDGARRTPVPRRSAGRRGGLGG

SEQ ID NO: 64115 - protein, 367 aa, Zea mays
  Clone ID: LIB3357-024-E2_FLI.pep
GFCYAMAGTAAAAPMDIDAAAPPPPPPGAAAKGKAPLSAGGRAAPWVEKYRPQSLADVAAHRDIVDTIDRLTNENRLPHLLLYGPPGTGKTSTILAVARKLYGSQYSNMILELNASDERGIDVVRQQIQDFAGARSLSFGARPSVKLVLLDEADAMTKDAQFALRRVIEKYTRSTRFALICNHVNKIIPALQSRCTRFRFAPLDGSHVRERLQHIIKSEGLSVDDGGLTALVRLSNGDMRKALNILQSTHMASHQITEEAVYLCTGNPMPKDIEQIAFWLLNEPFSTSFKYISDMKMRKGLALVDIIREVTMFVFKIQMPSDVRVKLINDLADIEYRLSFACNDKLQLGALISTFTDTRTAMVAAAS

SEQ ID NO: 64116 - protein, 470 aa, Zea mays
  Clone ID: LIB3357-025-A6_FLI.pep
TAPPSAFPLSPLSPLRLAVHTPLSVKIAEMAIDKVDAKEREKIEAVRKLLCKQAPLSAKQAQYCNDACLERFLRSRGDSVKKAAKHLRTVLSWRESVGADHIMADEFSAELADGVAFVSGHDDDGRPVVVFRIKQDYPKFHSQKSFVRLLVFTLEVAMACMSRFVDQFVVLFDASFFRSASAFLNLLMGTLKIVADYYPGRLHRAFVIDPPSLFSVLWKGVRPFVELAPATAVVCSLDFEDSLEDASFTAYPRTASLRFEPAAVVGKNPGVGSVSSRFSVTPTDNPIKPWYLSTIPTSVGSRSVVPTSSSPSLVGASPLSARSFSFASPATLRSTVATPAPFPRGAGAPLTPSSAAKAQKTPPPPQQFPRTPRPSFLQSPSMLFAFRKDGQASRVERERESFLPYLRFYRRPYDEISYRAKMRPPLGGLISIVGDKFRQKPVPQPQPQPLRRHAGLHLHHQHHYQQQQRI

SEQ ID NO: 64117 - protein, 493 aa, Zea mays
  Clone ID: LIB3357-032-H7_FLI.pep
ARSGRVVCRRPVPVGLAMRRARGRRGLLLLLGVALSAAALLRGCAGQQGEDGSDAPAAAAAETAPMEEKERRALYAAIESFVGKGWNGSGLYPDPCGWSPIQGVSCDLFNGLWYPTVMSIGPVLDNSLQCGPDAKFSAQLFDLRRLRTLSFYSCFPASNPTAIPTGSWEKLAGTLETLEFRTNPGLNGAIPASLGRLASLQSLVLVENNLTGPVPAELGALSRLRRLVLSGNGLSGPIPVTLGGLTGLLKMDLSSNLLQGSIPPELAGLRSLTLLDLRNNSLTGGLPQFVQGMASLQDLLLSNNPLDGGLPQSGWGALAGLATLDLSNVGLVGAIPGSMAALTGLRFLALDHNRLTGAVPPELARLPSIGALYLNGNNLTGTLEFSAGFYQRMGRRFASWDNPGLCYNVAAVDAAHAPSGVVVCKDLQEPSVGGGARDMDGDAEEDGTKPEAGSSLVASSSSGMPVGSVGGLRYLVVVRGMVAAVLGFVSLLQ

SEQ ID NO: 64118 - protein, 434 aa, Zea mays
  Clone ID: LIB3357-033-E1_FLI.pep
QSPLRCFLCQVQSLTILPFTPLSLPLFPVGDALATSSAARSSATSASVCQVFVVRFAVDWCPAGTSGRMVIYLSTPKTDKVSEDGANDKLKFGLSSMQGWRATMEDAHSALLDLDNDTASFGVFDGHGGKVVAKFCAKYLHREVLHTEAYAAGDLGAAVHRAYLRMDEMMRGQRGWRELQALGDKINQFTGITEGLIWSPKASDSNDRHDDWAFEEGPHSDFTGPNCGSTACVALVRNRQLVVANAGDSRCVISRNGQAYNLSRDHKPELEAERERIQSAGGYIKMGHVNGSLNLSRAIGDMELKQNKFLSPDKQILTANPDINIVELCDDDEFIVLACDGIWDCMSSQQLVDFIREHINTEESLSAVCERVLDRCLAPSTMGGEGCDNMTMILVQFKKPFAQVKDASDAEQLTGDAGCSETHGAEENGSDKQI

SEQ ID NO: 64119 - protein, 241 aa, Zea mays
  Clone ID: LIB3357-037-H4_FLI.pep
LPGAHDNPETSRTAGRTESAPEMSAGELRLELDELRRLESLAKHPRVQILLANEIRNVEAKLAKATEPSPEPLAAASAPAPAPAARPVLSYVTLGSFSWEQDNEKIRIYVSLEGVEQEKVETTFKPTSVDIKFHDVKGKNYRCAIPKLNKEIVPEKCKVVVKPTRVVVTLFKGSKGNWLDLHFKEDKFKPNMDKEKDPMSGIMDLMKNMYEEGDEDMKRTIAKAWSDARSGKTTDSMSGLR

SEQ ID NO: 64120 - protein, 444 aa, Zea mays
  Clone ID: LIB3357-044-D5_FLI.pep
LIRTARCWLLRARVRGMARLPMALSPAAISPFSTLPLYYSSRPHRRLLARFFSVASAPGGAKGHRPAASAVEVGGVKIAREDVVKEDDPTNNVPDNIFSKIGLQLHRRDNHPLGILKNTIYDYFDKNFTGQFDKFDDLCPLVSVKQNFDDVLVPSDHVSRSYNDTYYVDGQTVLRCHTSAHQAELLRHGHTHFLVTGDVYRRDSIDSTHYPVFHQMEGFRVFSPDEWSGSRMGGTAYAAAELKKTLEGLARHLFGAVEMRWVDTYFPFTNPSFELEIYFQDDWLEVLGCGVTEQEILKRNGRRDHVAWAFGLGLERLAMVLFDIPDIRLFWSNDKRFTSQFSEGKLGVKFKPFSKFPPCYKDMSFWINDAFTENNLCEVVRGIAGDLVEEVKLIDNFTNKKGMTSHCYRIAYRSMERSLTDEEINNLQLNVREAVKDKLEVELR

SEQ ID NO: 64121 - protein, 417 aa, Zea mays
  Clone ID: LIB3357-044-G5_FLI.pep
PILHPHHQSTTPHPVTETEGRAGLRDATEMEHTNHRRRRQALATVSVTTTLLLLLLCLAALTTAEALREHRDEGGASSSGGSGSGCGSNAAGGKQSPAVWVFGDSYADTGNLGDLGRELTREWYDPYGTTFPGRPTGRFSDGRVLTDFIASAMGVPTPVAYKLRRGAARGLVARGMNFAVGGAGVMDTGNFQRNIGEQIDLFQAQRPPPPPSARGCDGGVAVVVVSGNDYSYAADKDNSTSVRAAIAYIPAVVRQLREQLLRLRDEAGMRKVVVTNLHPMGCTPLFTRALNYTACDPLANAGAVQHNAALQSVLAALDPANRTFLLLDLNTPFAALVDGAAAATAEERFAEPRRPCCESFSADGHCGQQDDSGRRQYTLCSDPSKHFYWDDVHPTQAAWAAVSRTFRPMIQEFLLST

SEQ ID NO: 64122 - protein, 289 aa, Zea mays
  Clone ID: LIB3357-048-E6_FLI.pep
TSSHSSTMEIQARQLLVSVFGILIAIGFANAALGETAPPVVVGLAKCSDCARRNMNAEAAFRGLQVAIKCKNSKGAYESAAVGQVNKSGAFSVPLAADAVGEDGELKSECFAQLIHSASSAPCPGQEPSRIVAAPPGHTAHTNGNGKTFLALGGRVYQPSPECASAFLCHPFFHSMHHHHVGVHTPVVIPHLPVHGHSVPPVTKPPPVDVPEHKPAPVPVPDHKPPSTPPVDAPEHKPAPVPEPEHKPPSTPANAAPSTPTEPSAPVNSPPKPAPIYHPPARHDAATGP

SEQ ID NO: 64123 - protein, 535 aa, Zea mays
  Clone ID: LIB3357-049-B12_FLI.pep
LSRGLLRSSAAPARRWRRLLLARLCPPAFPDPSSPLLPHEDLGVSSSDKAVQAGESACFEGAWSGAGAMGKKGKWFGAVKKVFSPESKEKKEERLRRKSAGSNPTPVDLTPSTSLEVNLSVPPPPAPPPVLHQAEEVGVPEAEQEQSKHVAVEEAPAAAPAQASVLPPAVPTQELAAVKIQTAFRGYLARRALRALRGLVRLKSLVEGNSVKRQSASTLRCMQTLSRVQSQISSRRAKMSEENQALQRQLLLKQELENFRMGENWDDSTQSKEQIEASLISRQEAAIRRERALAYAFSHQWKSTSRSVNPMFVDPNNLQWGWSWLERWMAAKPWEGRNGADKESNIDRGSVKSMSLNLGEGEITKAFNRRDSKLEKPSPPTPRPARPTSRHSPLTPSARVAPIPARRKSVTPKNGLSQVDDDARSVLSVQSERPRRHSIATSTVRDDESLTSSPSLPSYMVPTESARAKSRLQGSAMANGAETPEKGGSTGPAKKRLSFQGGTAAASPMRRHSGPPKVEIAPPQPEALVVNGGSK

SEQ ID NO: 64124 - protein, 885 aa, Zea mays
  Clone ID: LIB3357-052-E5_FLI.pep
PLHLLWSIPPGVLSLLCHCSGEPHHLPNKSELLAKAIPAPPSPLPTPPLLNLHACCMPRLHLTSTAMAGTNGAPRLLRLPTTATTSTSSTPLLRLLALLQLLCLASALNQDGILLLSFKQSLASDPLGSLSGWGYADATPCAWNGVVCSPDSRVVSVVLPNAQLVGPVDRELALIENLRHLDLSGNALSGTIPPDLLRAPELRVLSLAGNGITGGLPEQVGQLRSLRALNLAGNALSGAVPQNLTLLPNLTAVSLANNFFSGTLPRGGFPALQVLDVSANLLNGTLPSDFGGAALRYVNLSSNGIAGAIPSEMASRLPANVTIDLSYNNLTGAIPSVPPFSAQRPTAFEGNAELCGRPLDSLCGFTSSSSAAAEPPNATAKSPPAIAAIPRDPTEALPGDGSSSAAGASASGEQRGRMRLATIVAIAAGDVAGIAVLFVVVMYVYQVRRKRQRQEVAAKQRTGVVFKKPDPDDSPDAVSRSLSCCLRKKAGDDSDYSEEVTDTSPASFADHKNGKAAGAEAASNKKMGGDGAVLVTVDGGAELELETLLKASAYILGAAGSSIVYKAVLADGAALAVRRIGSECSGVRRFGELDAHMRAVAKLRHDNILRLRGFYWGPDEMLIIHGFAINGNLANHSVKRKQGSSPINLGWSARLRIARGVARGLAYLHDKKWVHGNVKPSNILLDADMEPLLADLGVDRLVRSADGGGLTKPSSAALAGRFGGSKRSAKSLPDLSPPPSHVGGTAAQPASPAVDTAAHYRAPEAVRSPRASGKWDVYSFGVLLLELVAGRALTSLELCQCAAAEGKAQAQAQALGVVDPLLRREVQGREEEEEAVASCLRLGAACCAMVPSKRPSIRDALQAVERMIPAAVASSSTSTAAAHRQ

SEQ ID NO: 64125 - protein, 346 aa, Zea mays
  Clone ID: LIB3357-052-F11_FLI.pep
MTPANGAPARAAEAGPHEVESEADAFRRQVDDLVSKTDVLERRVKEVADFYDGKKHGSGGRKGGGGGRYGASSRGMPDLMRQFGVLLKEITSHKDAWPFLEPVDVVTLQLPDYHNIITQPMDFSTIQKKMERKDGTCYTNVREICSDVRLIFANAMKYNDDQNVIHLMAKSLLEKFEEKWLHFLPKVESEEKRQKEEESKGVAATNTSREVAIVKLAKDTDDELNQINRKLEELRKMVVHRCRKMTTDEKRKLGAGICHLSPDDLSKALEIVAQDNPSFQTKAEEVDLDMDAQSETTLWRLKFFVREALERQANVASGKMDENAKRKREICNALAKTTSRRIKKQP

SEQ ID NO: 64126 - protein, 373 aa, Zea mays
  Clone ID: LIB3357-056-F12_FLI.pep
GSKQEQTGGAESPASEISAAMETLASAMRRENRRSKAPPSSSASSALASGRVPLVMAFLSCLAWLYVAGRLWQDAQTRAILSGLLEKSSTSVPKVLSVEDKLRNLGCKAIGRKIVEAEMDLTKAKSEGYLWGNRTAAVDSDKKQQLLAVIGVYTGFGSRLKRNVFRGSWMPRGDALKKLEEKGVAIRFVIGRSANRGDSLDRNIDDENRQTKDFLILESHEEAAEELPSKAKIFFSAAVEAWDAEFYVKVEDNINLDLAGLIEMLEGRRGSQGLYMGCMKSGMVISEEGQQWYEPEWWKFGDSKTYFRHASGSLFILSKNLARYININSASLQSYAHDDISVGSWMMGLNATYVDDDRLCCSSSRQEKICSNA

SEQ ID NO: 64127 - protein, 440 aa, Zea mays
  Clone ID: LIB3357-062-F9_FLI.pep
ADRDSAHQWSPSHGHASSSSSPPSPRREKPVAARPPHMATALGGGPNPTADAMEVDPPRASADEKHVATIIAGGSDAVTGHIISTTIGGKNGEPKRTISYMAERVVGTGSFGVVFQAKCIETGETVAIKKVLQDKRYKNRELQIMRSIDHCNVISLKHCFFSTTSRDELFLNLVMEFVPESLYRVLKHYKDMKQRMPLIYVKLYMYQIFRGLAYIHTVPGICHRDIKPQNILVDPLSHQVKVCDFGSAKILIKGEANISYICSRYYRAPELIFGATEYTTSIDIWSAGCVLAELLLSQPLFPGESAVDQLVEIIKVLGTPTREEIRCMNPNYTEFKFPQIKACPWHKIFHKRMPPEAIDLVSRLLQYSPNLRCSALEACAHSFFDELRESHARLPNGRPFPPLFNFKQELANAPPELVSRLLPEHARRHSGFGSLFGSGP

SEQ ID NO: 64128 - protein, 339 aa, Zea mays
  Clone ID: LIB3587-195-C11_FLI.pep
LLPKPPHTQTHRPPPRLPPLPLKLRPLRSNPSPRRSGTMVNDAAAMAVVRAARPALRGAHDGVAFAAHAAFLADGYSLCAVGPAALADPSPLGDEEVGIDGWNIMENCYAFLYSKEEKGKKKRVLVKCLVIGEVLAIDVLDLEAQDKAPYNIQINVKDFFVEEQPKNYGDMYKNFTSLIETVNSNVLCKLDGDGSGAEAAKSTAAAAAKNSDGRSSPIQSSGDPGPRTADPSGLIYPPIAPIGSDDLYPGPGAGFYPHSGIGSGGSMHVGPNDPRFFPSNPFSAPFGGLGSVPPGSRYDPIGPPDVPGFEPSSFVRRPRRPPGGSTHPDLEFFQQGPDF

SEQ ID NO: 64129 - protein, 232 aa, Zea mays
  Clone ID: LIB3587-200-E11_FLI.pep
AAASQVSTLASNRNAPEESQEEVTAAPRGRRDRSRMVDVSRVQKELTECNRDREVSGVSIALHDGANISHLTGTIAGPADSPYEGGTFVIDIRLPGGYPFEPPKMQFITKVWHPNISSQNGAICLDILKDQWSPALTLKTALLSLQALLSSPAPDDPQDAVVAQQYLRDYPTFAATARYWTEAFAKSASTGMEEKVQKLVEMGFPEDQVRSALKSVDGDENMALEKLCSGSG

SEQ ID NO: 64130 - protein, 238 aa, Zea mays
  Clone ID: LIB3587-204-G1_FLI.pep
EVSRHFCISNPKFLTFMSNINMNKIVFTLETYGVKNIVGIPFGYRGFFEKGLKEMPLSRGLVENINLNGGSFLGVSRGGAKTSEIVDSIQARRIDMLFVLGGNGTHAGANAIHEECRKRKLKVSVVAVPKTIDNDILLMDKTFGFDTAVEEAQRAINSAYIEARSAYHGIGLVKLMGRSSGFIAMHASLSSGQVDVCLIPEVPFTLDGEFGVLRQLEHLLKSKGFCVVCVAEAAGQVC

SEQ ID NO: 64131 - protein, 376 aa, Zea mays
  Clone ID: LIB3587-207-F9_FLI.pep
FALRTSFPALCIFQHVLQSPPAHPLRKQEQGQKTETIINKSASSRSPGPGPGPIQYSCFFSDATQRNATPTPQARGNREYLTLCNRRHAQVLTVDLMDQIMDFPVDPIMAAKAYKYKAEILFNEYLLADSYVLYTSVLAGLLMCKLSYDFTHIISSVYFKGYASLAKMKKIEWNNRGMSTVHAIFITMMSVYLVFLSDLFSDQLEGPVTFRSSHLSNLTLGVSVGYFIADLAMIFWFYPSLGGMEYVLHHILCLVCAVYSMLSGEGQLYAYMFLISETTTPGINLRWFLDVAGKKNSKAYIANGVAMFVTWLMVRIVLFVYLFYHILTNYDQVKQMDTFACVLISVAPTILFTMNIIWFSKIVKGLKKTLAKRHTE

SEQ ID NO: 64132 - protein, 319 aa, Zea mays
  Clone ID: LIB3587-212-D3_FLI.pep
SSSHSQVCSRESAMASLQVTPTSAFTQWNELKFEGLYLFHKYQGSGANQTQVISNKAPIGIGATVVNNWTVCDGPGPNAKLVARAQGLHIQAGNWVNSFSLVFVDQRFSGSTLEVTGIVVESGEWAIVGGTGQFAMANGVISKKLHGKTSEGDIIQLTIHAFCPVLGPTKRSATKVGPWGGSGGSPMDITAEPQRLKSITVATGIAVTSIAFSYVDSAGQTQSAGRWGGSGGETEPVIQLGDSEVLTELSGTIGNVDGLTVITSIKFVTSLKTYGPFGAWGDGSDTPFAIPVQQGSAIVGFFARAGIYLDALGVYVRSL

SEQ ID NO: 64133 - protein, 507 aa, Zea mays
  Clone ID: LIB3587-214-B2_FLI.pep
LTTLNIANNNFSGWIPKEFSSIPDVTLEGNSFANGPAPPPPPFMPPPPQRPRNRPKHPQGPGDAPKGSESHTVQSNKKQGLGTGPLVGIIAGSIVAVLCVFLLLLCCMCNAQKRTDDASSESKDFGGPLTVNIERASSREIPEQMDDTSIATVKLPPAEKMTPERVYGKNGSVRKTKVPITATPYTVASLQVATNSFCQDSLLGEGSLGRVYKADFPNGKVLAVKKIDSAALSLQEEDNFLEAVSSMSRLRHPNIVPLTGYCVEHGQRLLVYEYIVNGTLHDMLHFSVEISRKLTWNIRVRIALGTARALEYLHEVCMPSLVHRNLKSSNILLDEEHNPHLSDCGLAALTPNTERQVSTEVFGSFGYSAPEFAMSGIYTVKSDVYSFGVVMLELLTGRKPLDSSRERSEQSLVRWATPQLHDIDALARMVDPALNGMYPAKSLSRFADVIALCVQPEPEFRPPMSEVVQQLVRLMQRASIVRRQSGEELGFSYRVPEREGDLRDISL

SEQ ID NO: 64134 - protein, 314 aa, Zea mays
  Clone ID: LIB3587-224-B3_FLI.pep
AHHSATAAAGVMDSRGFDSAGRIFSSATEMWTEELGSSITASTAGEAEFTPAPAAAAEASEEGGGDGKRKEWYSKAIAYWQGVEASTEGVLGGYGCVNDADVKGSDAFLRPLLADRFGTAKRHLVALDCGSGIGRVTKNFLLGHFNEVDLVEPVSHFLEAARENLTGCMDQGEDSHKAANFYCVPLQDFTPEEGRYDVIWIQWCIGQLPDDDFISFFNRAKVGLKPDGFFVLKENIARNGFVLDKVDNSVTRSDAYFRDLFKRCGLYILSVKDQKELPKELFAVKMYALVTSQPKIQNSGKRRRPRNSPRMIRS

SEQ ID NO: 64135 - protein, 170 aa, Zea mays
  Clone ID: LIB3587-225-H1_FLI.pep
TPRMARPFAAKSRASRRPQDPELPTGDENDFAGSEVAAPTESIDKPLAEVLKELGKRVPDSLVKTRVEDNGFTMKYIPWHIVNKILNIHAPAWSGEVRNIVYSSDGKSVSVVYRVTLHGIDAEIYREATGTASVDDTIYGDPVQKAESMAFRRACARLGLGLHLYHEDMS

SEQ ID NO: 64136 - protein, 340 aa, Zea mays
  Clone ID: LIB3587-227-H6_FLI.pep
SCTYYLFLPPPTNLISSLPPRATEKNKTKEEKKPSMCSIFPSHSVIGVSSQAQAAGGGGGGFQSPESRASSMSSGSGGGGSLPSPSGGPACSRSWSISEDSLRRYVGYASESCIQELLAASSDSGRGGDDDDGWKVLVYHNGVEISKRRTGPAHVFRSRWLLQDVSPEQFMAAASAVDAAKQWESDQLVESSYIRELGDDLSIIHLKFGDASSSTRRPARRRDLVVYERRQAMDDGTLVVAVASLPKEIAAGLLPPPAATGKGGGGSVVGRSLLLQSGWVVERLDGDAGSCVVTYVVQLDPAAGWLPRCIVSRLNSKLVMIIAKLRRIAQATVPAAAAEV

SEQ ID NO: 64137 - protein, 308 aa, Zea mays
  Clone ID: LIB3587-228-B8_FLI.pep
LPLPVPKRKWEDQVNGVVPWESSVSTLQKKSEAHAAKQMKVEKQVKVEETGVDPKVLKSAFLKMVKLMNENEADKKNYWANGKLSQLKCPVCQRDSVDLHALLNHAYYAKNQEHRADHLGFHKALCVLMGWNYSVAPVHKTAYQALSTVDAEANQGDLILWPPTVIIENTYKSKNDGEKDVMSDKEVESKLREMGFAGVNVQPLPGKDGQRSVQAKFSASLDGLNNASRLAELFERQGHGRAAWARVRSAVPTGGGGDNNPMLVKVDGKGERTWVLYGYLATAWDLNVLDPESKQNATVKSRKELDLD

SEQ ID NO: 64138 - protein, 417 aa, Zea mays
  Clone ID: LIB3587-277-E2_FLI.pep
PASVRPSSTSRPAASHSRNPSPTRRPPALPLPIFSRRAAYSARTARASALPATRRELLPSTLPVARRKLCAGDGGALPVTGGYGGIVPLGPSSIPVRRRQPTGQEYHQASAMVSSALRRCLPCHASLCHAFPPHPLLAAAGVFRRSFQSGDGETMDEFEERLFGGKDTDKGSLYEKLDRAENTGRRYNMGSGMGGLTGLSDKSRSGLSKGGFTWLSDSSSSGFPGFPASGDRSNSGWMDGYDSFNDGLNDTIANAARNIQMEEDEDVDGDWEDDFEFRPDVRFRQGSTYSVRDLDLRKPAAAKNPPRRQFETTTAEVLKKADFRNVRFLSNFLTEAGIIIKRSQTRISAKAQRKIAREIKTARAFGLMPFTTMGRRPFIFGRSAEEHYWDDGYFGYVKQKDGEPVENEDAEPNVEAV

SEQ ID NO: 64139 - protein, 408 aa, Zea mays
  Clone ID: LIB3587-279-E12_FLI.pep
VALPSAFLYLTSSAATRATLLDLKPFSARCAPAVAPLRVFMYDLPARFHVAMMGAAAGAGFPAWPPSAGGIRRQHSVEYWMMASLQDGGAGPERGREAVRVRDPDAADAFFVPFFSSLSFNVHGRNMTDPDTEADRLLQVELVDILWKSKYWQRSAGRDHVIPMHHPNAFRFLRAMVNASILIVSDFGRYTKELASLRKDVVAPYVHVVGSFLDDDPPDPFEARHTLLFFRGRTVRKDEGKIRSKLEKILKGKEGVRFEDSIATGDGINISTEGMRSSKFCLHPAGDTPSSCRLFDAIVSHCVPVIVSSRIELPFEDEIDYSEFSLFFSVEEALRPDYLLNELRQVPKRKWVDMWLKLKNVSHHYEFQYPPRKGDAVNMIWRQVRHKIPAVNLAIHRNRRLKIPDWWG

SEQ ID NO: 64140 - protein, 471 aa, Zea mays
  Clone ID: LIB3587-285-D10_FLI.pep
SFSPHSSLVAVRSLQGGGLRGGHRAMARRCPCRLLLAVAAAAVLVAAAAQAQETCSGTVPAPPRRGARVSVASFGGAGDGRTLNTAAFARAVASIERRAAPGGAELYVPPGVWLTGPFNLTSRMTLFLARGAVIRATQDTSSWPLIEPLPSYGRGRELPGGRYTSLIHGNGLQDVVITGENGTIDGQGSAWWDMWKNRTLLYTRPHLLELMSSSDIIVSNVVFQDSPFWNIHPVYCSNVVIRNVTILAPHDSPNTDGIDPDSSSNICIEDCYISTGDDSIAIKSGWDEYGIAYGRASSGITVRRITGSSPFAGFAVGSETSGGVENVLAEHLNFFNSGFGIHVKTNTGRGGFIRNITVSDVTLDNVRYGLRIVGDVGNHPDDSYNRSALPIVDALTVKNVQGQNVREAGLIKGIPNSAFSRICLSNVKFTGGAPVRPWKCEAVSGGALDVQPSPCTELTSTSGTSFCTNSL

SEQ ID NO: 64141 - protein, 463 aa, Zea mays
  Clone ID: LIB3591-003-G8_FLI.pep
QQKASLVRDHTVFMDIKDMKTRGKTLTERYELGKLLGKGAFGKVHYGRDLESNQDVAIKIMDKDRVLKAGLSEQVKCEITTMRLVTHKNIVRLHEVMATRNKIYIIMEYAKGGELFEKIKRSDRLTEADTHKYFQQLIDALDHCHSRGVYHRDLKPENLLLDENGDLKVSDFGLSAFSESRRTDGLLHTVCGTPVYIAPEVIKKTGYDGAKSDIWSCGVVLFVLAAGYLPFQGPNLMEIYRKIHDRDFRCPSWFSHKLKRLLYKILNPNPSMRPSIQEIKESTWFRKGPREISAVNEKVLSENATTTNAAPVLPSRRKEIAHEDMKSLVATNLNAFEIIALSAGLDLSGLFIKECRKETRFTSDKPALSIIAKLEDVAKALNLRIRKKDNNTISIQGRKEGGNGVLKFDTQIFEITPSCHLVQIKQTSGNLLEYEKLLEEGIRPGLKDVVSAWHGDDLQQKQK

SEQ ID NO: 64142 - protein, 555 aa, Zea mays
  Clone ID: LIB3591-004-E9_FLI.pep
SAMATSLLRLSRPRRALLAISSVRLALSTQPHVPSPSPSPTPSSARRLPHFLSFLAAAAAAGGATVALCDSGLDHRVGGKDSADLVVRGERKFVPQEFIDELASFLGDNITLDYEERSFHGTPQNSFHKAVNLPDVVVFPSSQDEVQKIVMACNKHKVPIVPYGGATSIEGHTLAPHGGVCIDMTLMKKIKSLNVEDMDVVVEPGVGWIELNEYLKPYGLFFPLDPGPGATIGGMCATRCSGSLAVRYGTMRDNVINLRAVLPNGDVVKTGSRARKSAAGYDLARLIIGSEGTLGVITEVTLRLQKLPSHSVVAMCNFKTIKDAADVAIATMLSGIQVSRVELLDEVQIKAINMANGKNLPEVPTLMFEFIGTEAYALEQTLLVQKIATEHHGSDFVFVEEPDAKAELWKIRKEALWAGFAMKPDHEAMITDVCVPLSRLAECISTSKRLLDASPLTCLVIAHAGDGNFHTIILFDPSQEDQRKEAERLNHFMVHTALSMEGTCTGEHGVGTGKMKYLEKELGIESLRTMKRIKAALDPNNIMNPGKLIPPHVCI

SEQ ID NO: 64143 - protein, 373 aa, Zea mays
  Clone ID: LIB3591-076-B4_FLI.pep
FGMTCKFNHPADRKLAVAAARMKGEYPQRIGQPECQYYLKTGTCKFGATCKFHHPREKAAMATRVQLNELGYPLRPNEKECAYYLRTGQCKFGSTCKFHHSQPSTMMVAVRGSVYSPGQSATSPGQHAYQGAVTSWPLSRSASFIASPRWPGHSSYAQVIVPPGLVQVPGWSPYTAQIGSSSSEDQQRTPGAAQYYTGSRQSGTSIGDQGMFSSYQAGSVPVGLYAVQRENLFPERPDQPECQFYMKTGDCKFGAVCKFHHPRERIIPTPNCALSPLGLPLRPGEPICSFYNRYGMCKFGPNCKFDHPMGNAMYGQAPSPASEAPAPRRMLAHVPPSHPEASPDGGSGRSRRIAHSDSQQIPSGERSAEREAS

SEQ ID NO: 64144 - protein, 199 aa, Zea mays
  Clone ID: LIB3591-082-C5_FLI.pep
LGDRRCSRRPGAPGLPLVLLRRRAPVSSYCGRCSFVFIIFLVLFGATTTLGISVRQTNSNMGRKGSEMSPSKRYPLRSPHSSGRVLRSALANDNKDSEPLNAAAATQAAVKKRSGSQLDSPNSSVRLFHSTSKNKNEACSGPLNDRIPDKPAANKRKRASPSQVGSSSNSVRVLRSAIKNKDEACSKSLSDRTAGEPAA

SEQ ID NO: 64145 - protein, 278 aa, Zea mays
  Clone ID: LIB3591-091-G7_FLI.pep
ASQWVGRWRRSHKGVSDGSMMSGRSGGRDAEGEWEVRPGGMLVQRRDGEAAGPVIRIRVSHGANFREVVVPAQATFGELKRILVQTTGLEPERQRLFFRGKEKSDREFLHTAGVKDGAKLLLLEKPAPANIEQKVEPVIMDESMMKACAAVARVRVEVDKLSAKVCDLEKNVLGGRKVEDKEFVVLTELLMMQLLKLDGIEAEGEARAQRKAEVRRVQSLVETLDKLKARNANPFSDHNKAVSVTTQWETFENGMGSLSAPPPRVSSTQANTDWEQFD

SEQ ID NO: 64146 - protein, 477 aa, Zea mays
  Clone ID: LIB3591-092-A9_FLI.pep
PLALAQLQDLRDRISDRLRPWSRSAQFWVRAADIYTSYKVCQLRAGFVKDEDELETMWERQHELGAEKMYSLCSELGGLFLKAAQILGKPDLAPMAWVKRLVTLCDQAPSTPFDVVRDVVEKQLGKNFDDMFEFFDVEPVGSASIAQVHRARLKLSKTDVAVKVQHPGAEQLMMVDIRNMQAMALFLQKHDLNFDLFSATKEMEKQICYEFDFVREARAMERIREFLRVTNKKPPVMVPRVIPGMVSREVLIMEFIKGTPIMNLGNEMAKRGIDPGGKIAAMAKQKILSDLTLAYGQMILKDGFFHADPHPGNILICKDTEVALLDYGQVKEMPEDLRLAYANLVVAMADDDFSRAEESFRELGIRTWAITDNKLEELFQLSLRMFDTRLPPGVTVMSPFADDSSLNKIGVESFPEELFSVLRTIQLLRGLTVGMGLTFSCAQHWRPIAEEALLKAGRQSASKSRKQKRSFLRRLFW

SEQ ID NO: 64147 - protein, 145 aa, Zea mays
  Clone ID: LIB3591-095-F7_FLI.pep
MRAIESPSSLDDQQWLTYWVLYSLITLFELSSWKVLQWFPLWPYMKLLLCCWLVLPVFNGAAYIYEAHVRRYFKMGTYVSPSYGERQRRVLQMMSLDARKSVERFIDTHGPDALDRIIRAAEEEAKREKPELFRVETEASLPSVG

SEQ ID NO: 64148 - protein, 779 aa, Zea mays
  Clone ID: LIB3591-103-E1_FLI.pep
LAPAPPPAPFVGAMSKRPKLEGFSIPRPTSYNFERSQSVQRLYRPTDDPDLDDIAFSDDAPSDAQASTAVEGKAENEEEMDPLDAFMAEIQEEIRAPPPPPKPEALRRTDSDDDEDDPVESFLRAKKDAGLTLAADVMRAGYDSDEEVYAAAKAVDAGMMEYDSDDNPIVIDKKKIEPIPALDHSTIEYDAFTKDFYEEKPSISGMSDQEVTDYMKSLSIRVSGFDVPRPIKNFEDCGFHVPLMNAIAKQAYEKPTTIQCQALPIVLSGRDIIGIAKTGSGKTAAFVLPMIVHIMDQPELEKEEGPIGVICAPTRELAHQIYLEAKKFAKPYNLRVAAIYGGVSKFDQFKELKAGCEIVIATPGRLIDLLKMKALKMFRATYLVLDEADRMFDLGFEPQIRSIVGQIRPDRQTLLFSATMPYKVERLAREILTDPIRVTVGQVGGANEDIKQVVNVLPSDVEKMPWLLGKLPGMIDDGDVLVFASKKARVDEIEKELNQRGFRIAALHGDKDQASRMETLQKFKSGTFHVLVATDVAARGLDIKSIKTVVNFDIAKEMDMHIHRIGRTGRAGDKDGTAYTLITQKEAHFAGELVHSLIAAGQDVPNELMDLAMKDGRFRAKRDSRKGGKKGGKGKGGVGGAGRGRGVRGVDFGLGIGYNAESGSQVPAARSAAVNSLKTGMLQRFKSSFVSGSSNTPSSSAPSFVRPALRGFVSGGTIGGDTRPAQAAPTFIPASRPAQPAPAVPASQPAGNNNENGNPNPESSRDQFRERKRPSGWDR

SEQ ID NO: 64149 - protein, 175 aa, Zea mays
  Clone ID: LIB3591-107-F1_FLI.pep
RSSHTNSDPSHTQAAGNTKTERMAVRRSRRGLGGLGLGRARSPGLLRRRVTGLGVRGAGLDEVEEAAAHLLGVELQRLDPLLHGGGGGASRGGRGVEGLGLDGARRGLGVGGRHRTVALAEDGVSRERLHEAPHHRVPRALRRRPDAEREGRGVVSPGRGGGDGVGELVGGHFRK

SEQ ID NO: 64150 - protein, 355 aa, Zea mays
  Clone ID: LIB3591-110-A11_FLI.pep
TSIHQTRKRERKGGRERRDYFGPVPPLNLQDRHPPRRRRSPQACADMGRRGSYDRLEALSLEIERKLHKALMSNSQRLQILQQLFADIALKVDDRARDAIMSESDDGIAPADEREDGWLCFYEILANHFVRVPESGRRILELIVQLWSQSFAANIFALLFQKWLFEAPLDEKEISLRYSSALVQGATNVFWIDIQTNTRHFLSLYHYLLEDVALVPERLSKISLQAGRDLFLLLSRFMFFYDQDHMLSSFLEHFPNFPNSFLVGGPADYFVIELADQLQKLKIEPVLLHYLSRMSILQGLELRLSTSTRLKACLYSFTSPGGPTYPTRAVRHAAWNTLDLLFPVSTTFSPTLVQL

SEQ ID NO: 64151 - protein, 621 aa, Zea mays
  Clone ID: LIB3591-113-F12_FLI.pep
LSGNQIKIIWSGLPAPDGLDYVAIYSPPSSRDRDFLGYLFLNGSASWRGGSGELSLPLLPTLRAPYQFRLFRWPAKEYSYHHVDHDQNPLPHGKHRVAVSADVSVGDPARPEQLHLAFADEVDEMRVLFVCGDRGERVVRYGLQKEDDKEWKEVGTDVSTYEQRHMCDWPANSSVAWRDPGFVFDGLMKGLEPGRRYFYKVGSDTGGWSEIYSFISRDSEASETNAFLFGDMGTYVPYNTYIRTQSESLSTVKWILRDIEALGDKPAFISHIGDISYARGYSWVWDHFFSQIEPIAANTPYHVCIGNHEYDWPSQPWKPWWATYGTDGGGECGIPYSVKFRMPGNSILPTGNGGPDTRNLYYSFDSGVVHFVYMSTETNFVQGSDQHNFLKTDLEKVNRSRTPFVVFQGHRPMYTSSDETRDAALKQQMLQNLEPLLVTYNVTLALWGHVHRYERFCPMKNSQCVNTSSSFQYSGAPVHLVIGMGGQDWQPVWQPRPDHPDVPIFPQPERSMYRGGEFGYARLVATREKLTLTYVGNHDGQVHDMVEIFSGLVSPSNSSVAEAVDGTKLGTGVSTVRKISPLYLEIGGSVMFALLLGFSFGILVRRKKEAAQWTQVKNEES

SEQ ID NO: 64152 - protein, 444 aa, Zea mays
  Clone ID: LIB3591-115-G10_FLI.pep
RSRSSMASSLLQQLLSLLLLLLPSPLRLREHLSGNHAVSANNFHPIFLVAGVSCSDLEARLTEEYRPSVPHCGAMKGKGWFGLWKNSSELLSRDYVQCFEEQMSLVYDPAINEYRNLAGVETRVPNFGSTRAFSHKNPLKSDWCLGKLRAALEDMGYRDGDTMFGAPYDFRYAPPSPGQTSEVYSRYFKELMELVEAASERTRKKAVILGHSFGGMVALEFVRNTPPAWRREHIERLVLVAPTLPGGFLEPVRNFASGTDILYVPATTPLATRAMWRSFESAIVNFPSPAVFGRLQAPLVVTRERNYSASAHDMERFLAAVGSGEAAEPFRRRAVPKMGSFAAPMVPMTYISGVGNRTPLRLVFWGEDFDAAPEVAAYGDGDGKINLISVLAFEKEMRRQPEQKKQFKSIKINKAQHSTIVTDDFALHRVIQEIVEANNQKIPS

SEQ ID NO: 64153 - protein, 628 aa, Zea mays
  Clone ID: LIB3591-120-E1_FLI.pep
QARRQVEQTATSSTKHRPCTHPPFASRNRGPTAAPRPPAFRPAAASLPCSLPSRPRTNPCYLRFFASSFFLEPPLRLIPNETREVPAPPVGEMALELSLASASPPAGGGLAQPPPLAPPGKEQQVAGVGILLQISMLVLSFVLGHVLRRHRFYYLPEASASLLIGLVVGGLANISNTETNTRTWFNFHEEFFFLFLLPPIIFQSGFSLSPKPFFANFGAIVTFAILGTFIASVVTGVLVYLGGLTFLMYKLPLVECLMFGALISATDPVTVLSIFQELGSDVNLYALVFGESVLNDAMAISLYRTMSSVRSHAAGGENFFMMILQFLETFVGSMSSGVGVGFISALLFKYAGLDVDNLQNLECCLFVLFPYFSYMLAEGLGLSGIVSILFTGMVMKHYTYSNLSDNSQRFVSAFFHLLSSLAETFVFIYMGFDIAMEEHSWSHVGFIFFSIIFIVVARAANVFSCAYLVNMSRPEHRRIPVKHQKALWFSGLRGAMAFALALQSVHELPEGHGKTIFTTTTAIVVLTVLLIGGSTGTMLESLDVVGDENTSRENYEDNNGYMPPSYEEGTSSGGGLRMKLKQFHKSTTSFTALDKNYLTPFFTSQTDDDNDDDFSQQPQNRRLAFYDQ

SEQ ID NO: 64154 - protein, 356 aa, Zea mays
  Clone ID: LIB3592-001-H12_FLI.pep
GAGIRVLSSENLPQCALQSDELVQISGAPSLVRKALYEISTRLHQHPRKENRPLEQIIDASTQRKHESPTLQHENPMLPHLHSHHPPPIPLLDPYRSGPQYPVSETEEFSIRILCASELIGSVIGKSGANVRRVEQQTGARIKVQEIDKDASGERLIIVSSNEIPTEPISPTIEALILLHDKVSASSEKHHSSTRLVVPSNKVGCILGEGGQVITEMRRRTGAEIRVYSKADKPKYLSFGDELVQAAGQIHGLEDYRGLPSASGRFSSTIELRIPNSSLESIVGVGGVNLAEIRQISGARLRLHEAHAGSSESVVEIQGTLDQAKAAQSLLEGFISANSRQQQSHSSRMPLYPRWG

SEQ ID NO: 64155 - protein, 450 aa, Zea mays
  Clone ID: LIB3592-003-E7_FLI.pep
KNESFSLGQLQTSFLEYQEEAALFIFRLKSLKQGQFLSILTQAARHHASQLSFFRKGLKHLEALEPCVKAVAEKQHIDYHFSGLDNNSDIDDYSSYQDNHSDGSELSFNYEINDRDKDLPTFRSPMDMDQAHPVSSPRPLKEQQENAEEIKATLGVPHMKPEIGTQSAPIFAENVPDPSMRFRKMNLLTRTVHSYKLPTPADDKNPASVIANKSPHSDQPESKSHVAVNLWHSSPLAKDFMPNSMHSGPVKMPSSNEGVSLAYSYSTTDFKKVKREAFSGPIPSKVGLSTPLISATDRKPSGKRPSYVLPTRPPGPGWQSSVPPKATPRVTSLPTTTPRISELHELPRPPANAGLVGYSGPLVSRRPMPTAVSTTRVSPPSHTASPLPRPPAAMTRSYSIPSNSQRTPIITVNKLLEARHSRESSEVSSPPVTPISLADVSRRPTTEAAV

SEQ ID NO: 64156 - protein, 291 aa, Zea mays
  Clone ID: LIB3592-005-A1_FLI.pep
ISISTVAHREATLRRSMASVTARAPVAALRPSASLKSSSSSAAAFLGHSSRLGRTATASPTRRSLKAEAKGEWLPGLPSPAYLDGRSVVFLFLINSGQRRRLTRTHGHVSLPGDNGFDPLGLAEDPENLRWYVQAELVNGRWAMLGVAGMLIPEVLTKAGLINAPQWYDAGKSEYFASSSTLFVIEFILFHYVEIRRWQDIKNPGSVNQDPIFKSYSLPPHECGYPGSVFNPLNFAPTLEAKEKELANGELHCIAPSHLTAARRSSSATSDPSLTLLILQGGWPCWRSWPS

SEQ ID NO: 64157 - protein, 455 aa, Zea mays
  Clone ID: LIB3592-012-B10_FLI.pep
PTVGERAKYIILYKCALRYLYHKPNHLCFWEQQPVISHATSWLMDVLPVGSERESQTDSHPLLMEHAIGIPRHDVASTSTPHRDNNDGMDQLPRDSESSSGTTDASYSPNAPLARRDDNRLRRQQSLNSGFWISIELAVNLSQIIAAICVLSVSKNEHPHAPLFEWVIGYTIGCIATLPHLYWRYLQRNQLATVQGSNQNYVPDNSFESSSFTGISPPPVSEAGVVTVSNGVLRNNVVTTNLRAQAFADHFKMALDCFFAVWFVVGNVWVFGGHSSAHDAPNLYRLCIAFLTFSCIGYAMPFILCALICCCLPCIISLMGFREDLDENRGATSDAINALGTYRFRSKKPRNGEANEGSGGVFAPGTDKERAVSAEDAVCCICLARYVDNDDLRLLPCGHFFHKDCVDKWLKINALCPLCKAEIDVVPRTAPPAIGFGRRDSHRRVGNDIESQRLP

SEQ ID NO: 64158 - protein, 242 aa, Zea mays
  Clone ID: LIB3592-051-A1_FLI.pep
LHQRTRSARHGRLRFPRASRAGDRGHGSQRLRQINRRGNARRSPGLQLHRSRRLPFRGKQSQDERGRAALRRRPRAVAGVGAGRHPGAAGRRRGRGRQLLGAAARVPGCAPRGRPRLRAGALRRLQGEVRVPEGAGGGARGEGAAEVGGRGALHAGEPAAEPARPAAGRPRGGGRRGRRDGAPRRHRPRHRRPVQGRASGVVRRPCLTCFWMRTRCSFMVSSHDAVSIHSSTIKEPPCSRFE

SEQ ID NO: 64159 - protein, 308 aa, Zea mays
  Clone ID: LIB3592-061-B4_FLI.pep
LTNPLLLLLLLPLPRQVVALHIYTHAVGVGEGDSALTTRTKLLFPFLSIHRTIDHNFHGGQGLRRAQGLRVRAGAAVPAVLRGGRGSDPPGPLHRARRVAGAAPPQAPVLPAGPVGAVPERDAAGVHVPVHDDAGDGGGAQPERARGRVLRPGGRVRGVQGRGDHGADAAARAVPGAPGRVRVVPVPARPGRRRAAPAAAGRGAGAGRDGGLRARRRPRRRLGPLEGRHQLDLRTLPPPRQLPRAAHRQRRQGQLRRQHRRRHRILPLPAGSGLRRRRLAVLSLSLYQLAVFANSSIESKDDASFVGV

SEQ ID NO: 64160 - protein, 338 aa, Zea mays
  Clone ID: LIB3592-081-E1_FLI.pep
KQCRRKLAGLKRHKHGLHLIHGLLQLKKMQIAENSAADRVEIPTDGASEWEIDVKLLKFGNKVASGSYGDLYRGTYCSQDVAIKVLKPERINADMQREFAQEVYIMRKVRHKNVVQFIGACTKPPNLCIVTEFMSGGSVYDYLHKHKGVFKLPALVGVATDVSKGMSYLHQNNIIHRDLKTANLLMDENGTVKVADFGVARVKAQSGVMTAETGTYRWMAPEVIEHKPYDHKADVFSFGILMWELLTGKIPYEYLTPLQAAVGVVQKGLRPTIPKHTHAKLSELLQKCWQQDPTQRPDFSEILETLQRIAEEVGEEHDGKHKDRTLGGFFSALRGRSH

SEQ ID NO: 64161 - protein, 304 aa, Zea mays
  Clone ID: LIB3592-089-G1_FLI.pep
LRLEAGMGAGASGLAGAEPGGKVARGAGLGDLPELCTAEVLLRLGAPDICRLARLNLAFRGAAGADFVWEAKLPGNYARLLRFVDEAEEEGGSGRDWSAVGRKDVFARLARPVPFDGGKREFWLEKNEGGICMALSSKALVITGIDDRRYWINMPTSESRFHSTAYLQQIWWFEVVGEVDFCFPAGTAYSLYFRLHLGKSSTRFGRRVCSSEQVHGWDKKPVRFQLSTSDGQHAVSQCYLDEPGRWILYHVGDFDAPPSSGQPTRLKFSLAQIDCTHTKGGLCVDSVLVYPKGFQPERVVRARK

SEQ ID NO: 64162 - protein, 398 aa, Zea mays; identical to SEQ ID NO: 53395
  Clone ID: LIB3592-097-D6_FLI.pep

SEQ ID NO: 64163 - protein, 254 aa, Zea mays
  Clone ID: LIB3592-097-H12_FLI.pep
IYSGLPSLVLLASRCFRAQGRQRPGVAAWAREVDQQQAGAAMAAIMGVKKGLLVLALGLAMAATSSAVIYKVGDTSGWTILGNVNYTDWTSKKNFRVGDTIEFTYPPGIHNVLEVKKADYDSCTNSTPIATHSSGDDKIVIKSPGHRFFICGVPGHCAAGQKLNVRVLKTRSSDAPSPAPSARSAAGSAAATPSPTTETTGASSASGGSSTPDATTAPAPNANGAGVGAAGHQNVVVVVVAMAVAALASMTMLH

SEQ ID NO: 64164 - protein, 312 aa, Zea mays
  Clone ID: LIB3592-104-D3_FLI.pep
NEKPHRLHSNPSFPYPLSLPSFAMATVFLRSLAMAMADTALPPTHKLLPTVSLPLLPSSTRAAPLLLCASRRLPPAPLVASSDAVETSIEWVDDEEEEAGEAFDEEGEDVEEEVLASGDEGEGEYAAVEPPEEAKVYVGNLPYDIESEGLAQLFDQAGVVEVAEVIYNKETGQSRGFGFVTMSTIEEADKAIEMFNRYDISGRLLNVNRASPRGTRMERPPRQFAPAFRAYVGNLPWQADDSRLVQLFSEYGEVVNAAVVYDRETGRSRGFGFVTMVSKEELDDAISALDGQELDGRPLRVNVAAERPQRGF

SEQ ID NO: 64165 - protein, 395 aa, Zea mays
  Clone ID: LIB3592-104-G1_FLI.pep
CPVDPSHTVLEENLEAHVGKCPLKKQVAALTAQPYYSKGINSGTPEAGCGVTSAEKRAAVYRLTEEEFRLLLGKIRSVHAAVAAPIRESNLITAACDKWMSGQVDRKMPYQERHVAQQASIVGNMEAFGLLQKASHEVVDGENAAVSAQAVVEFGAGRGYLTQVLVDCYGIRNVFLVERRSYKLKADRSLRQNEDVTLERLRIDIEDLKLHGIEALRGLQYLAIGKHLCGPATDMTMMCCLPERYDQTEENGKRSLQGLALATCCHHLCQWKHYTNKSFLSGLGITEEDFHAMTWFSSWAVDGDHSYPDAPVEVEDTPSEVRGREKLDQEAVGIERVIRSIPAGERATLGSMCKDIIDTGRLLWLGQKGLIADLVSYVPSSISPENRLLIAKCTS

SEQ ID NO: 64166 - protein, 398 aa, Zea mays
  Clone ID: LIB3592-106-D8_FLI.pep
HIHPAVPAASRVLRATPPFFLILLAAVYLLASVTIFSAPTPLLRLRLASPRPLILPKPAPPPPPPAPELFDLDGGSVRVRLTNVGAAVTSFLVPDKNGVLADVVLGFDSLDPYLNGTSPYFGCIVGRVANRIKDGKFTLNGVQYNLSINNPPNTLHGGFKGFDKTIWEVAEYNKGDKPSITFKYYSKDGEEGYPGDVSVTARYSLLPSATLKLEMEAIPLNKATPISLAQHTYWNLAGHSSGDVLSHSVQIWGSQITPVDQTSIPTGELMPVTGTPFDFLTGTRIGSRIDQVPGGYDHNYMVDSGEVRSGLRHVAHVADPSSSRALDIWADAPGVQFYTGNSLGGVVGKGGAVYGKHAGLCLETQGFPNAVNQPSFPSVVFGPGERYSHTMLFELSTE

SEQ ID NO: 64167 - protein, 466 aa, Zea mays
  Clone ID: LIB3593-001-D10_FLI.pep
YLGGGEKCGAGAGERPSSRAGSRAQASGRPSRRRRAAVRLGVRPSELVQSSRRATVRPGVGFQELMDKATKLLIYGASAHLLLSMMAMVIESRKRKRDSRRVGITYGPMEERDRMRLDYLNTKIWMSDTTCVNMLRLSRSSFFRFCKGFRDRGLLEDTIHMCVEEQVAMFLNTVGHNLRNRLLGTNYGRSGETVSRYFNKVLRAIGELRAELIRPPSLETPSKIAGNPRWDPYFKDCIGAIDGTHIRALVSIDMESSFRGRKSYASQNVMAAVDFDLRFTYVLAGWEGSAHDALVLRDALERENGLRVPQGKFYLVDAGYGAKPGFLPPFRAVRCHLNEWGNNPVQNEKELFNLRHSSLRVTVERAFGSLKRRFKILDDATPFFPFSTQVDIVVACCIIHNWVIQDGGDELIIEESNWPIHNHATTSSGQASEHAFMVNLRQEIANQMWEDRKTTMLPNLLLFFLL

SEQ ID NO: 64168 - protein, 298 aa, Zea mays
  Clone ID: LIB3593-001-E12_FLI.pep
VLGGRTALRLRPGGARRALDAVVVARASSEAETAEAGGGGGGAEEERPYEEYEVTIEKPYGLKFTKGRDGGTYVEAIQPGAAADLTGQFEVGDKVLATSSVFGEEIWPAAGYGQTMYCIRQRIGPLYMKMERRFGKWDGAGDLTEKEIIRFERNSGVVSGRVREIQLQNYQRKMEQKMQREEDLRMGLKLYKDGKYEEALEKFESVLGSKPEPSEAAIASYNVACSYSKLGRVEAALSALEDALKSGYEDFKAVRTDPDLANLRKSEEFEPLLKNYDESFINENAINAIKSLFGLGNK

SEQ ID NO: 64169 - protein, 161 aa, Zea mays
  Clone ID: LIB3593-004-A3_FLI.pep
CTGSFRSVSDLATRPPATATITSFYFSSSSLAIPCPAAAPNGTTARGSYQSRSIDRDRDRERESMAGRSFLIRSPKEEESNAAVREAVLLGAKNAAIAGTVVAVPTLVGCRVLPWAKANLNYTAQALIISAACIAGFFITADKTILRNARQNTIGKLDKST

SEQ ID NO: 64170 - protein, 155 aa, Zea mays
  Clone ID: LIB3593-004-F10_FLI.pep
SAVAGVALAAATAAAAVGGLAGLRRGLDELGRGLLLRGHAEDDGGLRGGARLLQVRVLLAEKGQRANGLNYSIQINFVLVCLFVLQWKKINKEEGKLTRQDKKKAGEINHARCTYILLCIYYPHLQLEPQPQLDPQLQDILDLVVQKKLDLFKNQ

SEQ ID NO: 64171 - protein, 346 aa, Zea mays
  Clone ID: LIB3593-009-E11_FLI.pep
LSLSASAYLRCLRDPKTRTRASRAWRQITRGLLSRNQQQRGRERQVVAARHINTPRMAGGGDLDASDAELRAGFETLAVTRPDPSAGVYEVRLNRPAQRNALSPAAFAEIPRAMSLLDRAPSARAVVLSAAGPHFCAGIELGGPGDPLSAASASADPVAAAEGLRRAVLDMQAALTAIERCRKPVVAAVHGACVGGGVDLVAACDIRCCSRDASFVLKEVDMAIVADLGALQRLPRIVGYGNAADLALTGRKITAMEAKEMGLVTRVFDSKQDLDAGVAKIAKEIADKSAWAVMGTKAVLLRSRDATIEQGLEHVATWNAGMMRSNDLKEAIRAFLEKRKPVFSKL

SEQ ID NO: 64172 - protein, 521 aa, Zea mays
  Clone ID: LIB3594-001-E10_FLI.pep
VLVEIFSPDPEIPIMDNSAYYCYCCLLALLPPLYFLVKFWWRTSCARRSHGLRLPPGPWQLPIIGSIHHLRGSLVHRALRDLSLRHGPLMFLRLGEVPVVVASTPDAAKEFMKTHDATFATRPMTLSAKVFAKDGPGIVVAPYGGDHWRQLRKICIVELLSTRRVRSFGPVREEEAARLVQAVAGASTRRAPAPAPLVDLGRLAAVYVADASVRAIVGRRFGETDALLRFVDESVRLAGGFTPVDLFPSSLLVRVLTLRRAVRRLEHFRESLFGFMDGVVREHLERKQSSRGGGGEEEEADMVDVLLRIQQEGNLKFPLTMRIIEAVIFDLIAGGIETASSTLQWAMAELMRNPAAMSKAQAEVRGVYAGQTKVTEDRLGELPYLQLVIKETLRLHVPGPLLIPRECQEHCRVLGYDVPKGAMVLVNAWAIARSPEYWEEPDAFDPDRFSGDAARDFRGNDFEFIPFGAGRRICPGMAFGLANIELGLASLLFHFDWSLPEGIVPSEGLFGYFQSIWIEGD

SEQ ID NO: 64173 - protein, 326 aa, Zea mays
  Clone ID: LIB3594-001-H5_FLI.pep
LHNSLPHSPPVARACGRRPGRIAVVTGGNKGIGLEVCRQLAASSTSGVAVVVVLTARDEARGAAAVGKLRGLGLSNVFFHQLDITDAPSIARLADFLKSRFGKLDILVNNAGFVGLEYIQDRIDGTSTTSEEFCGMDMDKRLELLLKWCLRETCDAGKECMRINYHGTKQVTRALLPLLLASDSGRIVNVSSVLGQLRFFGSEALKRELDDVASLTEERLDEVAGAFVADLEAGAVEARGWWPAGFSAAYMVSKAALNAYSRVLARRHPALRVNCVHPGFVRTDMTVNFGMLTPEEGGSRVVAVALLPDGGPTGAYFQERQQAPFV

SEQ ID NO: 64174 - protein, 212 aa, Zea mays
  Clone ID: LIB3594-002-B5_FLI.pep
REPRPNEEKREEPQSGSEKDQKKPEATPGSWAMLRAGARQLLAPGLRRLGLGTGAAGQVGPAAAAAGMRAYHERVVDHYNNPRNVGSFDKEDPNVGTGLVGAPACGDVMKLQIRVDEDSGKIVDACFKTFGCGSAIASSSVATEWVKGKPMDEVLTIKNTEIAKHLSLPPVKLHCSMLAEDAIKAAVKDYEAKKAKMGQKSEDSPSEKAAEA

SEQ ID NO: 64175 - protein, 255 aa, Zea mays
  Clone ID: LIB3594-004-C3_FLI.pep
SSPASLSLSLSHTHTHAHTHKHTHTHTHTTSYAAASRARTIAAAYVLAQRTTTDAMAAFFARGGAAAAAALVMVAAVLAASWAGVARADFAQDRAMCADRLMGLATCLTFVQDKATARAPTPDCCAGLKQVVAASKLCMCVLVKDRDEPALGFKINVTRAMDLPSLCSNPATFSDCPKILGMSPDAPEAEIFKEYAKKHESNNGTTIPAAATGAAAATGKSTSAAPTADGAGRQPGTVFFYVVSALLVSVAVLLC

SEQ ID NO: 64176 - protein, 511 aa, Zea mays
  Clone ID: LIB3594-007-H7_FLI.pep
LSPHSQSKKLARYSTGPLLTQSVQRVSTEQPCSNFNCKLQRDEYGAMDDGAATTIVQGGDAHVLLLPFPGMQGHANPMLQLGRRLAFHGLRPTLVVSRHVLSTTSTSRSCPIPVAAISDGFDDGGISSCPDTAEYVRRMEAAGSETLAGLLDAEARAGRPVRVLVYDSHLPWARRVARAAGVAAAAFMTQMCAVGLVYGEAWAGRVALPLADGAALRGRLAVELGPDDVPPFVAAPEWYPAFTESALSQFDGLEHADDVLVNSFRDLEPMEADYLESTWRAKTVGPTLPSFYLDDGRLPCDKTYGVDLFSSTDSEAAPCMTWLDKQEPCSVVLASYGTVANLNKEQLDELGNGLCDSGKPFVWVLRSNEAEKLSRQLGGRCKERGLIVPFCPQLEVLAHKATGCFLTHCGWNSTIESIASGVPMVAMPQWADQPTTAKYVESAWGIGVRMRKGSLVRKEVERCIREVMGGERKHVYGRNAARWMHKAKEAMQEGGSSDKNIAEFAAKYLPK

SEQ ID NO: 64177 - protein, 584 aa, Zea mays
  Clone ID: LIB3594-009-B9_FLI.pep
LSLSISHFLTHVSQLPRHTAPLLLLLLLLLLPSREKGCCQRDEDERGSFRAMEQYEVVEQIGRGAYGSAYLVLHKAERKRYVMKKIRLSKQNDKFQRTAYQEMSLMASLSNPYIVEYKDGWVDEGTSVCIVTSYCEGGDMAERIKKARGILFSEERVCRWFTQLLLALDYLHCNRVLHRDLKCSNILLTRDNNIRLADFGLAKLLMEDLASSVVGTPNYMCPEILADIPYGYKSDIWSLGCCMFEILAHRPAFKATDMAALVNKINRSSISPMPPIYSSALKQIVKSMLRKNPEHRPTAGELLRHPHLQPYLSESSNCSPIYLPVKPTKGNLVDKQSKKPSSGRKRAVKANGSNGTLETAAEHAVEARDSSTNFSDVSTIGTQEALILQMPVDPDAGSKEEQNVDVVPFQHAAENLMATTDRQVDATIRLKAIRTSNAKEAAPVTVADQKFNEAPIPNEELTIGVVQEQRKDVKPRSYQAGKPEMCDTTVTEESSPISTLKLAHTESAPAEWDHLNIVQQRADALESLLELCAKLLEQERLDELAGVLRPFGEGAVSSRETAIWLTKSLMTPPPKFGESPTKLL

SEQ ID NO: 64178 - protein, 295 aa, Zea mays
  Clone ID: LIB3594-010-H12_FLI.pep
LPLSSTPPLLSCATARGKGSVDRFVPASVPPLASPAPMAAVAIHQFAECITCHAWSPDQSMIAFCPNNHEVHIYKFFTDKWEKLHVLSKHDQMVSGIDWSKSSNKIVTVSHDRNSYVWTQEGSDWVPTLVILKLNRAALCVQWSPKENKFAVGSGAKSVCICYYEQENNWWISKVIRKKHESSVTSLAWHPNNIYLATSSTDGKCRVFSTFIKGVDTRGSKSSTSTDSKFGEQIAQLDLSSTWVFGVRWSPSGKTLAYAGHNSMIYFIDEVESSPVAQNLALRDLPLRDVGSFCL

SEQ ID NO: 64179 - protein, 346 aa, Zea mays
  Clone ID: LIB3594-016-E7_FLI.pep
TLRSVSPLESAMKGGKSNAAGRSLGEETPTEDCGADTMQRKLMDLPGPRWKKGKDCKGFAALAAANPMSSIVAELQASLRDSEAVAILAAHARDAILEVGPRQAALLNGAAFGRAVEGAGAESQWFQLGPEEVFFLCHALKCLRVESNNKTRIGAPELWGLLASGSEQFPEMYRAYQYLRLKNWVVRSGLQYGADFVAYRHHPALVHSEFTVVVAPEGKAFGTRCARMEVWSEVLCALRASGSVAKTLLVLTISTKSCELGSLDCLEQMIVHERTITRWIPQQCSEQQDKPCREETNRDGQRQKSCIEVSSNEEQEHTSGGVVFSYWPVVLSYTILFSVLVYKLKS

SEQ ID NO: 64180 - protein, 524 aa, Zea mays
  Clone ID: LIB3594-021-F11_FLI.pep
LRSIFEQLTCRRNNTIAMDVYIYQALLLSVLAVALLQLVKMALKPRPRLPPGPWKLPVIGSMHHLVNVLPHRALRDLADVHGPLMMLQLGQTPLVVASSKETARAVLKTHDTNFATRPKLLAGEIVGYEWVDILFAPSGDYWRKLRQLCAAEILSPKRVLSFRHIREEEVMLRVEEIRAAGPSTPVNLSVMFHSITNSVVSRAAFGKKRKNAAEFLAATKAVVGLSSGFNIPDLFPAWTTVLAKLTGMTRSLKEIHKTVDTILEEIIEERKRIRDEKIMGGAAAEDVDENLVDVLIGLQEKGGFGFQLTNSIIKAIILDMFAGGTGTSGSAMEWGMSELMRNPPVMKKMQALIREAFRGKTVVTEGDLQASNLQYMKLVIKEALRLHPPAPLLVPRESIEECELDGYTIPAKSRVIINAWAIGRDPKYWNDADEFKPERFEDGSRDFTGSSYEFLPFGSGRRMCPDFNYGLASMELAFVGLLYHFDSSLPDGVKEVNMGEVPGLGVCRRTPLMLCATPFVPVPA

SEQ ID NO: 64181 - protein, 282 aa, Zea mays
  Clone ID: LIB3594-025-B9_FLI.pep
RSSSPFLLSLPFPKHLSESNRSEGDGPAGCGRGRGGAGGAGADGGGVRAAASDGGRAPPLRRGGGPMLLAAGAAHPRAAGRRLGHRPPLRLPAGVQALHPQLRGPAGPGRRRRPPPRPPPRGVRHLGPPRQHQHRAPGPPRRRRQGVRLLHHRGRAPPPELPLRHHRLRARGPRDLHRRARVLRRRRPRRQHRGRHPPLRRHRHQAQPPEAQVRRRGQHLQFRTPAAVGVAGGRNRQGEKRSSKFWAFFCYFTSLGNGLSELNLIVDGFGLDERRRGGVGSA

SEQ ID NO: 64182 - protein, 272 aa, Zea mays
  Clone ID: LIB3594-027-D6_FLI.pep
APPSLQASNIYLQVLSSTRNQARRCRKRCPALHGQAQVQEQEAAPAGDGHPSPERGEPAGAHHLSELAEVDPAVAVAVHAADHAPALLRGAALPQPQRRQHRAQLVRGDVPVAVGVEHAERLPHVVVVVVLLLLLLRGAVHDAAVELPELLRVHAPVAVGVHARHHGRQLVVARHAHAQLAQRLRQLLPRDAPVAVLVEQLEHARQLRRLRLAAARLLLLLLLRGRRHLLGRRRRGGCCVRGALAPAREDGCGEVREEAARQEGQLNEVRGR

SEQ ID NO: 64183 - protein, 517 aa, Zea mays
  Clone ID: LIB3594-029-A10_FLI.pep
NKPPYSIASASSGAGRTAAMGGDASTIEGGPLPHLGGRPASRVPDTPLVRTAGDAARMVWDESKRLWGIGLPIGVGMLSMYAISSITQIFIGHLGNLPLAAASIGLSVFATFALGFLLGMGSALETLCGQAFGAGEVAMLGVYLQRSWIILVAACVVMTPVFVFAESLLLLIGQDADVARESARFATYIVPSIYAMGINFAASKFLQAQSKVTVPAWIGFGALLACALLNYLFVSVLGWGLPGAAAAYDIAHWIIALGQVVYIIGWCKDGWKGWSVAAFHEIWPFVRLSLESAVMLCLEVWYMSLITVLTGDLEDAQIAVDSLGICMNINGWEAMIFIGLNAAISVRVSNELGSGRPRAAWNAVMVVVGEALVIGILCMALILIFRDSFSIIFTSDTTLQRAVARIAGLLGLTMVLNSVQPVVSGVAVGGGWQGLVAYINLGCYYIFGLPLGYLLGYKFSFGVGGIWSGMLCGITLQTLILLGVVWRTDWKAEAAQASGRVQKWGGKGTDEVKPLLE

SEQ ID NO: 64184 - protein, 437 aa, Zea mays
  Clone ID: LIB3594-032-H3_FLI.pep
ERCQTTMAILLLLLFVLSSASADEYGEELLQRAWGEREWMVSVRRRIHAHPELAFREHRTAALVREELEHLGLPARAVAGTGVVADVGSGAPPFVALRADMDALPLQELVEWEHKSKVDGVMHACGHDVHTAMLLGAAKLLSQRKDQLKGTVRLLFQPAEESGAGASHMIREGVLDGVEAIFAMHVDYRIPTGVIAAHPGPTQAAVCFFEAKIEGKTGMAETPHLNVDPVVVTSLAILSLQQLISREDDPLHSQVVSVTYVKAGKALDATPNLVEFGGTLRSLTTEGLYCLQRRVKEVVEGQAAVHRCKGAVEIKVEDYPVYPAVVNDEKLHRHVEDVGRGLLGPGKVRPGEKIMAGEDFAFYQQLVPGVMFGIGIRNEEAGSVHSAHNPYFFVDEDVIPVGAALHAAIAELYFTDGPLFRQRRLVVSRSCGWSRVQ

SEQ ID NO: 64185 - protein, 236 aa, Zea mays
  Clone ID: LIB3594-037-F3_FLI.pep
RTQSKPNETQTATRQLSSHSTAPSAHGSPAVSHTTSTTPSVPGLPPLQLPLASPRKLTPKSSAFGTSTTRPAQEMGRRGEPYYVEAVPPVDVNKNTEWFMYPGVWTTYILMLFFACLLVLSVSGCSPGAAWTVVNLAHFAITYHFFHWKKGTPFAADDQGIYSRLTWWEQIDNGQQLTRNRKFLTVVPVVLYLIASHLTDYKQPMFFLNTIAVFVLVVAKLPNMHKVRIFGINADI

SEQ ID NO: 64186 - protein, 522 aa, Zea mays
  Clone ID: LIB3594-040-D2_FLI.pep
KLKNLSAETATRRTPRPAPLDRLAPTVPPRRAASSGTHLADRHMDPTAAPGSGGTPADSDATSPTNTTVTLPPLTLRDVPRLASSSPAAAAAAAVPNPISRHPYFHPPANFYISPGDVSLRHAFFDLVSAAPTPLVAYRRGGPRRDLAVDPAAARAALVTCGGLCPGLNTVLRELVVGLQELYGVRHVFGVAAGYRGFYGADEDHVRLHPAAVDDWHKKGGTVLKTTRGGFDLGKIVDGIVARGYTQIYAIGGDGTMRGALAIFEEFKRRGLNISITGIPKTVDNDIGIIDRSFGFQTAVEVAQQAIDAAHVEAVSAVNGAGIVKLMGRSTGHIALHATLSSRDVDCCLIPEVDFYLEGKGGLFEFLYERIKKKGHAVVVVAEGAGQELIPRTDDQKREQDESGNTVFLDVGPWLKSELGRWWKREHPDELFTVKYIDPTYMIRAVPANASDNLYCTLLAHSAIHGVMAGFTGFVPGPINGTYSYIPLEDVAVAKNPVDVNDHKWAWVRSVTNQPDFLKSQA

SEQ ID NO: 64187 - protein, 152 aa, Zea mays
  Clone ID: LIB3594-042-A10_FLI.pep
HMPLLKSIPPVTRMAMGRGTWVTVLCRKLKDWWHWVAEGDLPIVASHGTEIETYKTLEPAIRLLILKAICDIRVEQEDIRNFIDSSLKHGHDLSTFRKERIGGDSLGISYWYYFIYLECKEFPLFHFHARPCKTGMKMMRFSGIDCIVKLDE

SEQ ID NO: 64188 - protein, 267 aa, Zea mays
  Clone ID: LIB3594-046-A9_FLI.pep
VRSAPPASAAAVALSQVPWSPSPGASPATRILQHLGACRAMLGARVQLKGWQQAAVAFGSAFGALLDPRRADLIAALGETTGKPAFERVLQRMKNSAEGREVLSERPRVVSSQVSHAWDMPQNTFGAAYAQFMGSRNFSPDDRPPVRFMDTDELAYVATRAREVHDFWHVLFGLPTNLIGETALKVIEFEQMFLPMCMLSVVGGSARFSDKQRALFFQHYFPWATKAGLKCTDLMSVYYEKHFHEDLEEVRRNWGILPCPSPKKSSV

SEQ ID NO: 64189 - protein, 353 aa, Zea mays; identical to SEQ ID NO: 59348
  Clone ID: LIB3594-047-C10_FLI.pep

SEQ ID NO: 64190 - protein, 381 aa, Zea mays
  Clone ID: LIB3594-048-D3_FLI.pep
PAIQILARTQGLRAPTGSDPVPMAPTPTHTAAAVALAAHDSSGHLAPLTITRRSTGDDDVAIKILYCGMCHSDLHSIKNEWHNATYPMVPGHEIAGVVTEVGKNVTSFKAGDRVGVGCMVNSCQSCGSCDEDFENSCRAVIFTYNSVDRDGTVTYGGYSSSVVVHERFVVRFPDAMPLDRGAPLLCAGITVYSPMKYHGLNVPGKHVGVMGLGGLGHVAVKFAKAFGAKVTVISTSPGKKQEALDRLGADAFVVSKDAEEMKAAASTMDGIINTVSANLTLAPYMGLLKPNGKMIMVGLPTKPLEIPPFDLIIGNKTLAGSCIGGMRDTQEMINVAAKHGVTADIELVAADYVNTAMERLAKADVRYRFVIDIGNTLKNSE

SEQ ID NO: 64191 - protein, 256 aa, Zea mays
  Clone ID: LIB3594-049-F6_FLI.pep
RFPGGRGRERQKEEARRGRDRMLGFRQMPWSSAQEQEQAPSEQLCEGVSAVVAARQGMEKPLTAVAEAFEELARGMEADGGELRLAPFSDSCALVSVLFSSLGMAFRFAEIEYVTKVNDLIGAGKSYRTLSDILDKDIQNDCVKKQGSHSRNLRRVRLGLGLIKALFEQFLDTEGTLYDAATIAYGQVCAPFHSWAIRKAVGAGMYTLPTREQLIVRLNETDFSVQKEMRRYIDASSPIIEYIDNLFLSRNISLDW

SEQ ID NO: 64192 - protein, 722 aa, Zea mays
  Clone ID: LIB3594-055-D9_FLI.pep
STPKPRTQPAATLAAAAARRRHHTTAVATPMAAPSEDALRRALAARKAAVDAQAEAVRALKAGGGASKADVDAAVEALKALKVEAGAAARRLQQAVGAGAGGAAREELRQAVVNTLERKLFYIPSFKIYRGVAGLYDYGPPGCRVKANVLSFWRQHFVLEENMLEVDCPCVTPEVVLKASGHVEKFTDLMVKDEKTGTCYRADHLLKDFCKEKLEKDFALPQEKADEFKRILAILDDLSAEELGAKIKEYGIVAPDTKNPLSDPYPFNLMFQTSIGPTGLSVGYMRPETAQGIFVNFKDLYYYNGQKLPFAAAQIGQAFRNEISPRQGLLRVREFTLAEIEHFVDPEDKSHPKFVDVADLEFLMFPRELQLSGESANLMKLGEAVSKGTVNNETLGYFIGRVYLFLTSLGIDKGRLRFRQHLPNEMAHYAADCWDAEIECSYGWIECVGIADRSAYDLKAHTDKSGVPLVAHEKFSKPREVEKLVIVPSKKDLGLAFKGNQKMVLEALEAMSEKEAFEMKAELETKGETNFKVCTLGKDVVITKKMVSISMEKKLEHQRVFTPSVVEPSFGIGRIIYCLFEHSFYTRPSKSEEEQLNVFRFPPLVAPIKCTVFPLVKNQEFDDAAKVIAKALTTAGISHIIDTTAISIGRRYARTDEIGVPFAVTVDSATNVTIRERDSKEQVRVDIDEVAPMVKQLTEGQSTWTDVSAKYPAHVGPQSEQE

SEQ ID NO: 64193 - protein, 408 aa, Zea mays
  Clone ID: LIB3595-003-H7_FLI.pep
KYPQRKLKTFLRDGSRLRSLPPTRADPDRRPPAVLLSVSLAASPRGSPLRPTGAMAEPEREQRPLLEVEQSVTSIPEDHEATCWGCGLRLVFAGYSPIYKCGWCGAITQSNQTTRKPDSVWFSHWRRVRDRFFVTVLILFMLFVICGGVWAVYPIVFKISNFCGIFHCMVTAVLAVFTITSYCLASSKSAGAPTNVRWGSYPLVGKRDLENYTFCTYCNKPKPPRAHHCRSCKMCVVDMDHHCPFIGNCVGASNHQVFVIFLISVVISCSYAAGMTIYASYQIWPSVDFPNLASSRDSMSFWKIWLEIITTVAGSAFFLSARGLVLVYLAFASLSVNAGIGVLLCQQLSYIYEGNTYLNHLSSPNALHGERGLHNIIRFFGCPYPISRVLLRYSNAGKLQDNSGSKLL

SEQ ID NO: 64194 - protein, 277 aa, Zea mays
  Clone ID: LIB3595-005-H7_FLI.pep
QSIPCAATKLAYFPSLHAASGGRPSAAMATTTAPVLLVFLVAIATSVAPSFPILTMAADADNGTTHLSFFMHDITSGASPTAVKVIKGPGAGSTPTAPALGMTFGDTMVIDDPLTEEASPASAALGRMQGFYMLASQTGAALMVCANLLLTSGAHNGSTLAVLGRDDTGQDVREIPVVGGTGTFRMATGYVLWKTPDGINGTDATVQLDVYVTTDGNGTTDAGDADGGGGSPSAGSGSSGSSGGSKSTSGAESRRRRMTGGWVVAVVVAVVGSFWVW

SEQ ID NO: 64195 - protein, 376 aa, Zea mays
  Clone ID: LIB3595-028-F11_FLI.pep
CFLLRQPRRRPPPQLSGAAMEALHEEMPFDLDFHPSSPLVVTSIITGELCLFRYGPESQPERLLLLKAHKESCRAVRFVDSGKVILSGSADCSVLASDVESGKAIARLEDAHENAINRLVCLTESTIATGDDEGCIKVWDTRERSCCNSFEVHDDYISDMTYVAETNQILATSGDGTLSVNNLRRNKVRSRSEFSEDELLSLVLMKHGKKVVCGTPSGALLLYSWGYFNDCSDRFIGHTQSVDTMLKLDEDTLVSGSSDGVIRLVGILPNRIKQPLAEHSEYPIEALALSNDKKYLGSISHDKMLKLWDLEELLSGPQVANGDEPAEAGSDDSDDDSDDDVMDVDMAATSSKGSRSKKAGKGQSSSRPASDFFADL

SEQ ID NO: 64196 - protein, 179 aa, Zea mays
  Clone ID: LIB3595-031-B1_FLI.pep
TASLSLAAPAPAGRHHNNGHRPEQPPRAGLDLPLLSPRRGSTGGAGHRGAAACGGQQGTGHGRPWRQAARAGHLQREARDAGGGGGAAVSRRRVHPGPGPGGRHRPALLLPRGVLLLLRRQGRRRQRRPVRPELPRRRPDRRRMGAHLPRLPHLRRRHRHALGGRAHRLIIMCYICMHD

SEQ ID NO: 64197 - protein, 224 aa, Zea mays
  Clone ID: LIB3595-034-H9_FLI.pep
IPPPTDPAPSSMAGAGAKAAGALALALVLALAGANSEGDALSALRRSLRDPGGVLQSWDPTLVNPCTWFHVTCDRDNRVTRLDLGNLNLSGHLVPELGKLEHLQYLELYKNNIQGTIPSELGNLKNLISFDLYKNNISGTIPPALGKLKSLVFLRLNGNHLTGPIPRELAGISSLKVVDVSSNDLCGTIPTSGPFEHIPLSNFEKNPRLEGPELQGLAIYDTNC

SEQ ID NO: 64198 - protein, 230 aa, Zea mays
  Clone ID: LIB3595-040-G10_FLI.pep
VCPSIHPSSCTSKKSRTHAGVAHLPSSSSSRREFHAGSGMSIELLTKFLTLLFGYAMPALECFKAIEQRPGRADQLRFWCEYWIILVLLVMFDEIAGVLISKIPMYYELKLAFLVYLWYPKTRGTDIVYETFLQPLVMQYQPNIEARLQYLRANAGDILVFYLKNFTERGYELFLRVLDYVRSQASRGSRTRSFFSFRGERSERPSFTDDYVTGGDRRDGGRHRRPRSGY

SEQ ID NO: 64199 - protein, 348 aa, Zea mays
  Clone ID: LIB3595-041-D6_FLI.pep
TSWDQIQEHLESERMANTAKGKVCVTGASGFIASWLVKRLLESGYHVLGTVRDPGNGKKVGHLWGLEGAKERLQLVRADLLEEGSFDDAVMACEGVFHTASPVVTGSNSKEEMLDSAINGTMNVLRSCKKNPSLKRVVLTSSSSTVRIKDEADLPPNVLLDESSWSSIEFCESLQIWYAVAKILAEKAAWEFAGEHRIDLVTVLPTFVVGPTLSPELGPTASDVLGLFQGETGKFTTYGRMGYVHIDDVARCHMLAYEAAGARGRYICSAAVLDCGDLAALLARRFPAYPVPRSLPRAYGEQSYGFDTSKARALGLAEFKGVEEMFDDAVASFIGHGHLPAAEERRHA

SEQ ID NO: 64200 - protein, 377 aa, Zea mays
  Clone ID: LIB3595-046-C7_FLI.pep
LVSPALVLAVGGVSVRHRPPLRLSHCCSPPASTRTTGCTEVQFGSVVVGCDGEAAAGGGRHSSRGRRARVRRGRAALGGVLLVELPRRAQHRAPGHVAGRHEQHAQRRRRAPRLLPRLLRQWLRRLAAAGRHAHDARREGRRPQRRRLHRRLRPHRHHQGAGRGRLPRHRLLRRHPGAHRARRRQPARRPELGRAAGPARRDVPQQHGRGDGPPGPGLRPGRPGGRVRRQGPEPARPRGAVGRAHGGDGALRQLPHPRLLRRQREPGVRRAAAPGLPVGRRRRRARAARLAHPRPVRQRLLPEPHGRRRPAALGPGALQQRRTRLARAPLRHQRRRLLVGLRRVHGQARQHRPAHGFRGGGQAQLQDGEFEFVTSGR

SEQ ID NO: 64201 - protein, 556 aa, Zea mays
  Clone ID: LIB3595-051-D9_FLI.pep
LDISGNRFNGSLPDDIASLSGLRVLDISTNNFSGPLPAAVSKLGALTDIDISTNQFTGPLPEDLPDNLQSFNASYNDLSGVVPENLRKFPESSFHPGNSKLEYPASSSGSGSSPSGSAGGKSLSTGAKAAIVAASIVLLVILILIAIVCHYKRISRQFSSSEKVSDKSLHRTTKDSAVMQGKDNKGGLVSADELATPRKGSTSEALSQEEKSAAGGFSPSKGSRFSWSPDSGEAYGQEGLARLDVRSPDRLAGELHFLDETITLTPEELSRAPAEVLGRSSHGTSYRATLENGVFLTVKWLREGVARPKKEFAKEAKKFANIRHPNVVGLRGYYWGPTPHEKLILSDYVAPGSLASFLYDRPGRRGPPLTWAQRLKIAVDVARGLNYLHFDRAMPHGNLKATNVLLDGLDLNARVADYCLHRLMTQSGVAEQILDLGVLGYRAPELAASKKPAPSFKADVYAFGVALLELLTGRCAGDVVSGPEGAAGVDLTDWVRLRVAEGRGSDCFDAAMASDSESNPQAVKGMKEALGIALRCIRPVSERPGIKSVYEDLSSI

SEQ ID NO: 64202 - protein, 418 aa, Zea mays
  Clone ID: LIB3595-057-E3_FLI.pep
FVFLRRLNSRRRGMATPSLPTQIVEFNYKAIEDKLKRLALEVSHHENNIRFLKSQLNTVEEACVDLGIKLGNYHSSVAAVVNNDTSAQEAEQRTIRSILDQGKTAAGIICQLKVRHHELASKMPLMKDILGFVATLGKVNNDNLSRLLTEYLGMDNMLALVCKTYDGVKGLEKYDKDGIIDNTSGIHGLGRSVGKFLDGRFTVFCLENLRPFSGDVIIDDPQRKLILHRPRLPGGESPPGFLDFAVNMIHLDRAHLRFLTASGHGLRETLFYTLFSHLQVYKTRTDIQSALPLIKDGAVSLDGGLLRPNGSFCLGHSKNLEVKFPVTTDVSSLPENVAEMEEQVKRKNWEKEMVLEDMKREEDLLKQVKELYRKQKQELMDYVTQPAVTQMSRDSPATHSPATPGSNPFGAKLSNKWR

SEQ ID NO: 64203 - protein, 313 aa, Zea mays
  Clone ID: LIB3595-058-A10_FLI.pep
PSRRKVALYLALLTLQYGAQPLISKRFVREDTIVTSLVLATEAAKVICAIILLIAEGSLKKQFSNWTLTGSLTASGLPAAIYALQNSLLQVSYKHLDSLTFSILNQTKLLWTAFFTFLILGQKQSSRQVLALALLIGAAVLLSVGESSSKGSKGGGSDYILLYGIIPVTVASVLSGLASSLCQWASQVKKHTSYMMTIEMSFIGSMCLLASTYRSPDGEAIRKYGFFHEWTFWTVIPVLMNAVGGILVGLVTTYAGGVRKGFVIVSALLVTALLQFIFDGKPPSLYCLIALPLVASSIFIYQKHPYVDRKKKD

SEQ ID NO: 64204 - protein, 328 aa, Zea mays
  Clone ID: LIB3595-064-H6_FLI.pep
RMRAVVITCAGGPEVLEAREVEDHPALGEGEVLLEVAAAGVNRADTVQRMGRYPPPAGASPYPGLECSGTILALGPNVPSRWAVGDKVCALLSGGGYADKVVAPAGQLLPIPEGVSLTHAAGLPEVACTVWSTVFMTSHLSPGESFLIHGGSSGIGTFAIQIAKHLGIKVFVTAGSEEKLAACKALGADVCINYRTEDFVERIKQETNGKGVDVILDNIGGSYLQRNLNSLGVDGRLFIIGFQGGIAAEVNLQAVLARRLTIQAAGLRNRSLANKAEIVSEVEKNVWPAVAAGKVKPVIYKTFPLCEAAEAHRLMEASTHIGKILLLP

SEQ ID NO: 64205 - protein, 339 aa, Zea mays
  Clone ID: LIB3595-065-A2_FLI.pep
SSKAMEKWRRRRHLLLAVAAVALVAAITLPSAEAKLSPDYYRSTCPDVEAIVQAVVAKKVNETFVTVPATLRLFFHDCFVEGCDASVIIASRDNDAEKDAPDNVSLAGDGFDTVVRAKAEVEKKCPGVVSCADILAIAARDVVTMSSGPHWTVQLGRLDGLVSKAGNVAGKLPGPNMRVKDLAALFAKHNLTTLDMVALSGAHTVGFAHCTRFADRLYHHGVGDSDGASVDPSYNPAYARQLMDACPPGVGADIAVNMDPITPTAFDNAYYANLAGGLGLFTSDQALYSDGASQPAVRDFAKNQTRFFEAFKDAMVKLGSVGVKTGRHGEIRSDCTAFN

SEQ ID NO: 64206 - protein, 150 aa, Zea mays
  Clone ID: LIB3596-002-F1_FLI.pep
AEERKAWRKNHPHGFVAKPESLPDGTVNLMIWQCTIPGKQGTDWEGGYFPLTLHFSEDYPSKPPKCKFPQGFFHPNVYPSGTVCLSILNEDSGWRPAITVKQILVGIQDLLDQPNPADPAQTDGYHLFIQDPTEYKRRVRLQAKQYPALV

SEQ ID NO: 64207 - protein, 533 aa, Zea mays
  Clone ID: LIB3596-027-C6_FLI.pep
LVSQPKFSSLATAMGEAQDYYNTSTALAGAAAAGLALLAVCSYYLLVGRRRGKAPKRYAPVVGTVFHQLYHVRRLHDYHTDLFRQRKTFQLLVPAGRRQIYTCDPAVVEHILRTNFANYGKGSFNYENMTDLLGDGIFAVDGDKWRQQRKIASYDFSTRALRDFSGAVFKRNAARLAGIVSGNAASGQPMEFQGLALRATMDSIFTIAFGLDLDTLGGSAEGSRFAAAFDDASEFTLLRYVNAFWKAQRFLGVGSEAALKKRVKVVDEFVYKRIRERAQELSDSKMATEDTVPDSRQDMLSRFIHTATNESGTVDYKYLRDIILNIVIAGKDTTAGALAWFLYMACKHPEIQEKICQEAAKATSASETAGVDEFAQSLTDEALNKMHYLHAALTETLRLYPSVPLDNKQCFGDDVLPDGSSVSKGDIVFYVPYAMGRMEYLWGKDAEVFRPERWLDQDGEFQQESPFKFTAFQAGPRICLGKEFAYRQMKIFAAVLLRFFVFRLRDGDKASVNYRTMITLHIDEGLHLTATAR

SEQ ID NO: 64208 - protein, 239 aa, Zea mays
  Clone ID: LIB3596-041-C5_FLI.pep
VRPRALRQHAGQQLPTDAAAGGACGARARQRPAPPGDRVLLAAPLAARARAGVPSRRRPQRRQTAAAVPTTRNDDDVSDRQLRLHRGHGRRPPLLHAHGRRPQRRHHQTHGGEQRPLRRPRPPLRLPALPVLDPRHPSRHVREQVLAPRAAGHRQDVRERDDRRLRVDPPPSSRPLRGEAGVPRRCQEQHRDQAFGLAVPALLPSRDPGSCGNQGIGRGSWSLTLMIGIGLLYLGFPFV

SEQ ID NO: 64209 - protein, 293 aa, Zea mays
  Clone ID: LIB3596-043-C10_FLI.pep
EPWQNEAEVVRCEPSMANAPRILALGLLLALLCAAAGPAAAQNCGCQPNFCCSKFGYCGTTDDYCGDGCQSGPCRSGGGGGGGGGGGSGGANVANVVSDAFFNGIKNQAGSGCEGKNFYTRSAFLSAVNKYPGFAHGGTEVEGKREIAAFFAHVTHETGHFCYISEINKSNAYCDASNRQWPCAAGQKYYGRGPLQISWNYNYGPAGRDIGFNGLADPNRVAQDAVIAFKTALWFWMNNVHRLMPQGFGATIRAINGALECNGNNPAQMNARVGYYKQYCQQLRVDPGPNLTC

SEQ ID NO: 64210 - protein, 207 aa, Zea mays
  Clone ID: LIB3596-054-A6_FLI.pep
HTPPRCQAAPNQREHPDQTPKSIAMAMKPAAAAPPTPAAAHSVFVYGSLMADEVVRTILKRVPPAAPALLPNYHRFNIKGRIYPAILPVESKRVAGRVIMGVTDEELQLLDAFEDVEYTRTRVEISLADSSENMLADTYVWSDAEDLNLYGEWDFEEWKKLHMKDFLAMTNGFMHELEQPESKTRVETYQEFMQQQEQPAPGTQVEG

SEQ ID NO: 64211 - protein, 127 aa, Zea mays
  Clone ID: LIB3597-001-G11_FLI.pep
PIGPVQIQSLLPSEFQGQPWPKRRATECGCASPEEPGSSAPGSSGSSSRKATPSTPPCGTPGTRRRRGCCVGWSPAQRSGCGCSRPTSSTPPPSRRRSLGASSSSSSPRHSGSIAPAPSIRARRKLW

SEQ ID NO: 64212 - protein, 478 aa, Zea mays; identical to SEQ ID NO: 57943
  Clone ID: LIB3597-003-E3_FLI.pep

SEQ ID NO: 64213 - protein, 428 aa, Zea mays
  Clone ID: LIB3597-006-F10_FLI.pep
RSMEMEQLCSLLRDLDALKQHPDDLTSTIDRMRERLVAMMNPAAGAASRSKIKDMSAEVVDNNPYSRLMALQRMGVVENYERIRDYSVAIVGIGGVGSVAAEMLTRCGIGRLLLYDYDTVELANMNRLFFRPEQVGMTKTDAAVQTLSGINPDVVLESYSLNITTVKGFETFLASLKAQSSHERSTGVDLVLSCVDNYEARMVVNQACNELGQTWMESGVSEDAVSGHIQLLVPGETACFACAPPLVVASGVDERTLKREGVCAASLPTTMGVVAGLLVQNALKYLLNFGQVSPYLGYNSLKDYFPAMEMRPNPQCLNPACVHRQKEYMESKPARDAAAKTKMEAEASTENECPVHLDNEWNISVLDDEETETSSIRNTPDILPEGLVRELPDADSYAGPAAPVSSSAIDDDDDLEELQRQLDALNAS

SEQ ID NO: 64214 - protein, 300 aa, Zea mays
  Clone ID: LIB3597-010-D12_FLI.pep
LELREERGDSKRHNTEVTGSRLSRWPWAIMATVGQSGALRRVTVHYANSPTGSTVAEVSFDDLDDELLLFVLADLLPGQEGLHQSILEGTYNNQENHMRGAAPSAPYGYSRPEEYRAESSTAAAAATGSRNSGMDEQIASDFEYAKQLQQEMEDLSVKDEDDNDISCVPSPSDSDDEHEHHDEEEEADRQEDGDGDDDPDNMTYEQGQALVESVGTEYRGLSDELISYLQPWKYKAVKASGLFSRKTNHEDCPICLSTFRNRETMITLPCRHHYHAACVTRWLKVNKTCPVCKYELFGPS

SEQ ID NO: 64215 - protein, 245 aa, Zea mays
  Clone ID: LIB3597-019-A10_FLI.pep
RCFQISHRTVVVGPSENIPPRPPPRAPPRPRTPAGHQASMDTVSQSEHLCYVRCTYCNTVLAVGVPCKRLMDTVTVKCGHCNNLSYLSPRPPMVQPLSPTDHPLGPFQCQGPCSECRRNQPLPLASPTSTDLTPRMPFVVKPPEKKHRLPSAYNRFMREEIQRIKAAKPDIPHREAFSMAAKNWAKCDPRCSTTASTATSNSAPEPARVVVPTPHVTEPRFDLEDRAKEHVIESFDIFKQIERNI

SEQ ID NO: 64216 - protein, 305 aa, Zea mays
  Clone ID: LIB3597-026-D9_FLI.pep
CTTYSDTKNVTPAAGRQPTRNARAPHRVTSSDVVRQVEVLDAEHLQRGVLDEEHEAALGGAKAVPERELDGARHGLLRRGALPHGGHLLETAHHVVVEQRLALVLAAPAVGHQPALVQRHQHARAAWALHAAAQGARERRLQCCGARPLERDLDGGRGVARGVADGQRERVLVGADAVRAALQDDLRREERVEAERLHVGLLAHGPGAGREGVLPPAVVPVVDVERQHHDGAVPGPGVLRQPRRHGVRLGRRPAPLRPEQLHQHRASGGRLQLALASRVVRRRRDAAPEARQQPRRHSVEPSELS

SEQ ID NO: 64217 - protein, 243 aa, Zea mays
  Clone ID: LIB3597-032-A9_FLI.pep
TKEHSSQHDRPLRTRYNSTAATLPSADCRLLGDGDLHGLGLLLRRRQLLDGDGEHTVLAARRNAARVRILRQPELAHERPRRRAALQPDVSAPFAVHVLLLIALPLPAAALHHQHPVLLQRHLKHKRMRLGSVAGALDPTELRDRAPQVAGAVPGCLTWRGRARRARRRTRGGSPRCPPALRRRRRARGRVRGRARAPRGCRPTAGRRLRRRGGPAPPAGGGGWSRPCRTAPSWLSLSLTPSI

SEQ ID NO: 64218 - protein, 374 aa, Zea mays
  Clone ID: LIB3597-041-D6_FLI.pep
AGWVGSLSAGWRERQAMAEAGEKARVVVVGGGVAGSLLAKTMQGHADVVLLDPKEYLEIPWAELRSMVEPSFAERSLIYHKDYLSDATIVTSSAVNITEHAVLTADGHSLPYDYLIIATGHALASPASRAERIKEFQRDNGKIESSESVLIIGGGPTGVELAGEIVVDYPGKRVTLIHRGPRLLEFIGDKASKKCLDWLTSKKVDVLLQQSVELGSLSDTENVYKTSGGETVTADCHFVCIGKPLSSSWLRDTILKESLDSKGRVMVEKDLRVKGFNNIFAIGDITDIPEIKQGYLAQKHALLVAKNLKLLTKGLPNSKLATYSTGYPLALVSLGRKEGLAQFPLLTLSGCLPGMIKSGDLFVSKTRKQMGLNG

SEQ ID NO: 64219 - protein, 323 aa, Zea mays
  Clone ID: LIB3597-043-H4_FLI.pep
GRTPSRISSPSLSLIHLSSTTAPVKVHGDAQTTAHPVAHRRPRRRGVAIGAGGGGRQRLVQGHGDVLRRGRRLGHDGRRVRVRGPVLVGVRDGDGGAELGAVQRRRGVRGVLQGDVRRRRVPVVPAGDGEEVGDRHGHQPVPAQPRALRRRRRLVQPAPPPLRHGAARLAPDRPVQGRHRAGALPEDGVREAGRGAVHGVRIQLLRAGAHQQRRRQRVGEGGVGEGERHGQDAHGQELGRQLAVARGSCRPGAHLRGHLHRRPHRRRPRRRAGLVEVRAVFHLRRPVLQLRLGSLWENGAAQPREQSHTLLHYLIQFHDSLMI

SEQ ID NO: 64220 - protein, 262 aa, Zea mays
  Clone ID: LIB3597-043-F7_FLI.pep
IENVFRADTARSMEQRRARLELRHCRHAALSSRLANLAYTSSARIPPSLYQDTTSNPWGRAEQDQRKKHRHRLGCLSLKGSFTRCSKCRGRRRPPRRRRRRRTGSPPPRRGTSRAASPRPRPTSTTPPRSARRRGPSPRRSRPRPRPRPCPRRRTRPARSEPFPARATTRPRRHLLLLLLRRRRRRGSWPPRRAGPPRASLWRLTWAASAVCPGAAALGWRRGPAAPRPWAAALWFSSCLAGGSPLRGRVECVSWDGGRLGL

SEQ ID NO: 64221 - protein, 530 aa, Zea mays
  Clone ID: LIB3597-045-F12_FLI.pep
PTPLRPPPGLQGVRRFARPPERRHGMASSISAAAKASAAFAQKKELAAPAPHRAGSSRRTKPCRVRAVASPARTPRAPSSTGSVKTAMTMTEKILARASERAALEPGENVWVDIDVLMTHDVCGPGTIGIFKKEFGEDAKVWDREKVVIIPDHYIFTSDERANRNVDILRDFCLEQNIKYFYDIKDLSDFRANPDYKGVCHIALAQEGHCRPGEVLLGTDSHTCNAGAFGQFATGIGNTDAGFVMGTGKALLKVPPTIRFVLDGEMPPYLLAKDLILQIIGEISVSGATYKSMEFVGSTVESLTMEERMTLCNMVVEAGGKNGVVPADETTFKYLEGRTSVDYQPVYSDAEARFFSDYRFDVSKLEPVVAKPHSPDNRALARECKDVKIDRVYIGSCTGGKTEDFLAAAKVFLASGKKVKVPTFLVPATQKVWMDVYSLPVPGSGGKTCAQIFEEAGCDTPASPNCGACLGGPRDTYARMNEPTVCVSTTNRNFPGRMGHKEGQIYLASPYTAAASALTGYVTDPRDFLM

SEQ ID NO: 64222 - protein, 290 aa, Zea mays
  Clone ID: LIB3597-047-F1_FLI.pep
AGGLGRCGIQRAEDGRGGGGRLRAPHGVLRQRRGRARDGVGVGAPWRRRADPALAAAGAAGAGRGVPHPAGARAHPAGPAPSVRSHGGAAAARAAVVAGHLLLPPRPPGGEGGRRGGLGGGDYHEQQQTAPAGLDAAAAQAVRGRGGAPGDQEGGAQDHHGADERGRSDAGERGQPPAEVPVVREADAGAGSVPVRPHLRTHTGARRRRRHGAHGQRPGVPLPVQRRRGRRQMTPASATTPESSFLLGKTGRQIQNGTSDCLPHSILYSLQIIQSFYCTPSVPFQGIRYF

SEQ ID NO: 64223 - protein, 256 aa, Zea mays
  Clone ID: LIB3597-048-B6_FLI.pep
KVIHRAFRLASGSCSVVSRRRHIGRLPHREAAVDDEVVAIDTLGLIGRQVQGGAGHVLHLEHGAVHLVHVLLHDPPALLGGGAGEPLGHGAHDERRGDVGGRDGVDADARPRELPGHGAHQAQHGGLGHAVGRQRDAAQHAGHAGRAHDAAGAAGHHDARRVLDARHRGAGVHGHDAVEVGQVQRRHGGRRQAAADAGVAEHHVEAAVQLHGQVHRRRDLRLVGHVAAGVVDGRRRAGPPRQAQLRGDVAPQLPCR

SEQ ID NO: 64224 - protein, 369 aa, Zea mays
  Clone ID: LIB3597-066-A5_FLI.pep
EMALITNVSDYEELAKQKLPKMVYDFYAGGAEDQWTLKENKEAFSKILFRPRVLIDVSHIDMSTSILGYKISMPIMVAPTALHKLAHQEGEVASAQAAAAAGTIMTLSSWSSCSIEEVSSIAPGLRFFQLSVFKDRDIVQQLVRRAENAGYKAIAVTVDAPRLGRREADVRNRFRLPENVVLKCFEGLDLSKMDKTKGSGLAAYATSQIDSSLSWKDIKWLQTITGLPILVKGVITAEDARIAIECGVAGIIVSNHGGRQLDYLPATISCLEEVVREAKGRRVPVFLDGGIRRGTDVFKALALGASGVFIGRPVLFALAVDGRAGVRNALRMLRDELEITMALSGCASLKDITRDRVITERDMIRRSRI

SEQ ID NO: 64225 - protein, 624 aa, Zea mays
  Clone ID: LIB3597-069-E2_FLI.pep
SPLLACTPCTVRARHTASCSHSRAQQMVSGAGHGGYGGGDDGQAVDFRGNPADKSRTGGWLGAGLILGTELAERVCVMGISMNLVTYLVGELHLSNSKSATVVTNFMGTLNLLALVGGFLADAKLGRYLTIAISATIAATGVSLLTVDTTVPSMRPPACLDARGPRAHECVPARGGQLALLYAALYTVAAGAGGLKANVSGFGSDQFDGRDPREERAMVFFFNRFYFCVSLGSLFAVTVLVYVQDNVGRGWGYGVSAVAMALAVAVLVAGTPRYRYRRPQGSPLTAVGRVLAAAWRKRRLPLPADAAELHGFAAAKVAHTDRLRWLDKAAIVEAELAGKQRASAAAASTVTEVEEVKMVAKLLPIWFTCILFWTVYSQMTTFSVEQATRMDRHLRPGSGAGAGGFAVPAGSFSVFLFLSILLFTSLNERLLVPLAARLTGRPQGLTSLQRVGAGLALSVAAMAVSALVERKRRDAANGPDHVAVSAFWLVPQYFLVGAGEAFAYVGQLEFFIREAPERMKSMSTGLFLVTLSMGFFLSSFLVFAVDAATAGAWIRNNLDRGRLDLFYWMLALLGVANFAVFVVFARRHQYKATSLPASVAPDGTGHKEMDDFVAVTEAVEGVDV

SEQ ID NO: 64226 - protein, 399 aa, Zea mays
  Clone ID: LIB36-007-A1_FLI.pep
FPRQARTTRARTQSNCFDLSVSVLYSLANRGRPGEVAMGSEDMLVEIHPRELRFLVEVKKQSSCCIHLVNKSDQYIAFKVKTTSPKKYCVRPNIGVILPLASRDFTVTMQALKNVPPDLQTKDKFLVQTTVVPFGTADEDIVPAFFSKETDQYIEEKKLKVVTVSVSEPQVEKLINGVPHAKETAGVTVAEQTLDSVNEAPNVVNEVRHSLKASFPSLSGTPATFNENSSSVNECPTILQEFLVPSKQASFALSESASNLQESSVASIETLFSSTEASVDLKESPPLEYTPAPSEVPSLSDKESTNADNVYIPQVTKDFQNLQMKLNNLEVKLDEAKTLIVKLREANRTTILERDKLQKEMVFLKRAEAAARSQSIGFPLLFVIYVAVVGILLGYLLHL

SEQ ID NO: 64227 - protein, 208 aa, Zea mays
  Clone ID: LIB36-010-H6_FLI.pep
QLTQAPYLCSIVGTRVSRARRDSAGMARWRARRLLPLATFVTLGMILGSLLQLALLHRLDGYSVHADSDPEAVLLRLGYVKPEVISWTPRIIVFHNFLSSEECDYLMAIARPRLQISTVVDVATGKGVKSDVRTSSGMFVNSEERKSPVVQAIEKRISVFSQIPKENGELIQVLRYEASQYYRPHHDYFSDTFNLKRGGQRVATMLMY

SEQ ID NO: 64228 - protein, 221 aa, Zea mays
  Clone ID: LIB36-013-B1_FLI.pep
RRRQQLQCSRNGVQDDARRGRLGCPRARRLSGRLLHGALASETRFLMDIAIRGSPQVFEGIASLVDAGGGTGAAAQAVAAAFPDTRCTVLELPQVVDAAPIDGPVRFVGGDMTKFIPPADAVLLKNVLHDWSDKDCVIILKRCKEAIAASGKVIVIDIVLGSSSLAICNETQLWLDLFMSTVTTGKERREEEWYRLFKEAGFSAYKICPVLGLLSVIEVFL

SEQ ID NO: 64229 - protein, 284 aa, Zea mays
  Clone ID: LIB36-014-D11_FLI.pep
DYSSWVWFVAGWLAGYHTGNSGRESNHVHGHLTVISPPDFLLSFPFCSDPIRSMTKSKGGSVDARTLVAHVLAAGAVVLVLLWCIHFRGGLALRSQDKPLIFNVHPVLMVLGPIVLGGEAILSYRSLPLARDARKKVHLALHAAGLAAGVLGVYAVFKFHVESGIPNLYSLHSWVGIAAITLYGLQWTAGFLAYFFPGASPATRRRTLPWHAVFGLLVFVLAVGTAQLGFLEKLTFMQGPPLRLPKYGAEALLVNFTSVTVLLLGVAVVLAIVDIDGTRYNTII

SEQ ID NO: 64230 - protein, 250 aa, Zea mays
  Clone ID: LIB36-015-C4_FLI.pep
RNSTVHSSTHTDSETDTTKLKYQSSLTQAWFYLLQLQAQYRSTRACGDGQSFPEERLEPPHPLGVGGRGVALRRRVVLRRPVQLAHVVAFLLGPLHQLVVHVLVDARLPAQDPEVLAARLADERVLVVIVDVEHPVVADDGDDGEEEREVELDLELGLVAAGVGLVGRALDVVALALAPRLVEHVHRGAVLQQPVGGARVAAVPRLEEGRERRDLVPPPHVPRHVQPPHHRHLLPAAAALRLLPLLRRHL

SEQ ID NO: 64231 - protein, 292 aa, Zea mays
  Clone ID: LIB3600-004-B3_FLI.pep
HLAVPKEVATTSTEHRPWIRRTRATTATETQKDLLPLHLLHFLLRTEDKAHVGRAGRPNVVTFAPGGRHIVKAGGSRPPRSSNTTVAARSGHKLLLPLRLRKMSTASESDGTHGSNQSQCVVSQESPPATESNNDAESIDIEDEDEEEDVVAGSKRKRTFAVWKEFTEVRIGGNVHAKCNYCSKKLSGSSKNGTNHLRLHLKSCVQKRIKVNGKTMAHASLRFGKTDAGTVLVENYIFDQDIARQELSAMIVLHEYPLSMVDHVGFRRFVGALQPLFKIGTRNTIRYNRCDF

SEQ ID NO: 64232 - protein, 466 aa, Zea mays
  Clone ID: LIB3600-008-D4_FLI.pep
YSPSRGQSQPKMVNPLLIFLPFLSVAALPGNADAAGPDPCAGRRIHIRGLPPRFNTDLLRHCGANAFPLADPSAAATSVPPCESLANHGLGPRTHPRSRSWYRTDARLLEAFFHRRILERDCLADDPADADAVFLPYYAALDALPYVIDPALLDESARHGVALAEFLSRDQAHILSRRHGHDHFLVVAGSAWDYAQSPVAEPRLWGSTSLLRLPELANFTFLTLESRTWPWQEHAIPHPTSFHPSSLGHLRAWLARARRSRRATLMLFAGGASRPSRPNIRGSILSECANRTDACVVVDCSGGKCAHEPVRYMRPMLRSKFCLQPPGDTPTRRSTFDAILAGCVPVFFEDLAARRQYGWHLPPVRYDEFSVHMPKEAVVFGGVRIVETLQAVPEEEVRRMRQRVLEMAPRVVYRRHGSTPELREAVKDAVDLAVDGVLQRIRWRTRALEDGPPERIYAQEEDSVDR

SEQ ID NO: 64233 - protein, 205 aa, Zea mays
  Clone ID: LIB3600-028-E11_FLI.pep
AVTVLPLPPVTSNDSGWARRSASHCQFWPQFRPIGIHPVLEPFTFTAATSPSAATLVMSTCRKWALPVMVNRMPPALSQLTLHGHHHIHMPTPELHRHDAGLGLGDAEERGLRQLEVLPREVAPAAGVVVGEAHVGRAEVRRRHHHRGAAPEAPLDVVDAPQLVAAAAGAAAPEQRRAQPRRVAPVPEDVQVAVPAGATAVIERV

SEQ ID NO: 64234 - protein, 295 aa, Zea mays
  Clone ID: LIB3600-029-E7_FLI.pep
RCAGAARRSPSEPTTNPMPPHRAGGAAGGGDTSAFFAATLVLWAVSVGFEIGVRGRRELAPVAAGFAFFQAANTAVRGSVSRDPLFVNTAVSLLHSSLTSVSVIFVLANQWRNKGLENMFEHEELFGGSWIGAYSALCFSCGYFAYDQLDMLRYRLYSGWLPGILMHHLILLICFTLALYRNVTINYLNLSLVCELHSIFLHVRKVRRMVGFRDFDRTVVKLEWVLNWTTFVTARVICHILITYKLISDAHKFGKGIELPLALLGMAGMNLLNIFLGLDLLKAFTRERNKQNHQD

SEQ ID NO: 64235 - protein, 285 aa, Zea mays
  Clone ID: LIB3600-030-F2_FLI.pep
STLQKSDSELRGEKAGTVSSTMLPGRHPARRADATGTGPLLPDATRAVVAEFVATAMFVFAAEGSVYGLWKLYKDTATPGGLLAVAIAHTLALVAAVAVASNASGGHVNPAVTFGLLVGRRISFGRAAVYWLAQMLGAVVASLLLTLVSGGTRPVGFGLVRGVHERHALLLEAVMTFGLMYAVYATAVDHRSRGGAVAIAPLAIGFVLGANILAGGPFDGAAMNPARAFGPALVGWSWRHHWVYWVGPLIGAGLAGGLYEFVMVEQEPEAPLAAVPRMPVASEDY

SEQ ID NO: 64236 - protein, 206 aa, Zea mays
  Clone ID: LIB3600-031-A7_FLI.pep
IPKSSQFPPPARPRSRPRSTGHGAGVGGAGLRGGRGGGHAAAADAAGARRPAPGHGLRGAERAQAHDVRGALLPLPAHGHLLEVRDAAHLRRRARLHPLRAPPPPQVRHEVAAQRAPHRRRAPPLLDPLLRHPARRQARPDAAARRQAQEARRLMGLAFAPSPRPPGGLVLPSASYFLFFLCWSADVLDLDRNLRHGASFALTVFR

SEQ ID NO: 64237 - protein, 328 aa, Zea mays
  Clone ID: LIB3600-038-H4_FLI.pep
AFPDPARFPAPLGTIRPRSPLPAPRPVRRRAPGASAAGAMATGGGNEQPPAEAEPLELVLFQVAECYVYLIPPRKTAASYRADEWNVNKWAWEGALKVVSKGEECIIKLEDKKTGELYARAFLREGEPHPVEPVIDSSRYFVLRVEENIDGRQRHAFIGLGFRERPEAYDFQAALHDHMKYLNKKKAAEEMIQHYEKQSSVDYSLKEGETLVLQLKNKETGTKTKSTFFEQGLNKLSVNEKTSAKEAPVSLKLPPPPPSPVSPTDSGVAASPFKAEFPPQEQPAAEPVSRTSALPSKGEPAPELPAAAEKMEEQETVDEDFGDFQAAG

SEQ ID NO: 64238 - protein, 261 aa, Zea mays
  Clone ID: LIB3600-054-G4_FLI.pep
VKYAHTHSITHEGPPAPRMAAACPPNPCRSTTPANPGGGCTCTPTPPNAPTSKATPPPPASWAGCCCCRPLRPTSSASRSSRSALAATAACTPASAAQNATRSSCPIAPPLSSASIHAIAGLPASRSFRIASSARSCLAFTASSCARSSPCWRFSSETARSSPPLAEWPAPAPAGEGDDEARKRSTTDSTDGWPKEKALPAGEKTTAATSAPQRMDSSLAFLNSPARRFEKHTCRASSLSMRRISIFCRPMLGRRGGAIAS

SEQ ID NO: 64239 - protein, 391 aa, Zea mays
  Clone ID: LIB3606-012-B7_FLI.pep
QELTELDENEMRMAKSQQCAGTRKKLAFLSTPVELKSVVPHETTKHCQDMEPEKTEGPLCKRNSHCIKDGSSLKIPESTKGKWLAEEDEILIKMVTKHGKNWQTVAFAIPGREAKQCQIRWTRSLDPAIKKQDWSEQEDLKLIRAHQIYGSQWLKMVKHFPGRTNHALKEHWRNRIKGKLNFYLASGLLEQVPDLEEGGISVPESSQSEIPKDSQGSADRSGPPPVLRAQPKSKPELPENAGTSGEGTSDSIRLKGPNAHPTEVSEKVLAKSKQRARARRRLDFLSTPVELKLCTAAASCQRPPQKMDQPGPVAENISPSDACQDISQNVPPERADAITPLAASNHHSPATPVDPFSLEMHEANASDLLDMSYCDGLIIDSPRDPHDGSLM

SEQ ID NO: 64240 - protein, 213 aa, Zea mays
  Clone ID: LIB3606-014-C8_FLI.pep
RLLRLRMASRSCSRCAALAPHAALPLSSLLAPSPSAARPRSAPLSCAARPCRGHAAASALHGAAGRRPPSVAAMSSSTPPPGSVQKSEEEWEAILTPEQFNILRLKGTEYPGTGEYDKFFEEGIYKCAGCGTPLYKSSTKFNSGCGWPAFYEGLPGAIRQTPDPDGRRTEITCTACGGHLGHIFKGEGFKTPTNERHCVNSISLKFNPSPEEA

SEQ ID NO: 64241 - protein, 361 aa, Zea mays
  Clone ID: LIB3606-015-D11_FLI.pep
SFFACVLSPTRELAIQIAEQFEALGSAIGLRCSVLVGGVDRVQQVLSIGKRPHIVVGTPGRLLDHLTETKGFSLKKIKYLVLDEADKLLNVEFEKSLDDILSEMPKDRRTFLFSATMTKKVNKLQRACLRNPAKVEVSSKYSTVDSLKQEFYFVPADDKDCYLLHVLNERLESMIMIFVRTCESTRLLALMLRNLGLKAMSISGQMSQDKRLGALNRFKAKDCNILICTDVASRGLDIQGVDMVINYDIPMNSKDYVHRVGRTARAGRSGYAVSLVNQYEAQWFVLIEQLLGKKIDQCKVDRDEVLILKGPISDAKRIALTKLKDSGGHKKRRNVGDDDEEVEDHSSHSRRPKSLKRSNRR

SEQ ID NO: 64242 - protein, 318 aa, Zea mays
  Clone ID: LIB3606-015-G11_FLI.pep
LPVSLPARSFSGARASPVSGAVSGSSTSEEGQQLQSELIFLGTGTSEGIPRVSCLTHPTKICPVCTKAAEPGNPNRRRNTSILLRHATPSGTTNIVVDAGKFFYHSALQWFPTFGLRTIDGVIITHSHADAIGGLDCLRDWTNNVQSSIPIYVAERDYEVMKMTHYYLIDTSVVIPGAAVSALQFNIIKEEPFMVHNLEVIPLPVWHGQGYRSLGFRFGDVCYISDVSDIPEETYKLLENCELLIMDALRPDRSSSTHFGLPRALEEVRKIKPKKTLFTGMMHLMDHEKVNSDLARLIGTDGLDIQLSYDGLRIPVRL

SEQ ID NO: 64243 - protein, 273 aa, Zea mays
  Clone ID: LIB3606-018-F12_FLI.pep
VPSFSEQRSKRPRSVAVPSSVEHLKRPTRLWSLHDEIVILRGLATYRAKRGVLPGSTYDISKLHGRIRSELSVKVTTTQLGDKVRRLKQKYNLLASRGKSGRDPDLPSQHEQSVYEIGKKVWGGSANGGGSTGGDGYEIGGDSEEEHEFRESDEDVENGRDERARKNRRVMPIAMANGNGAGLGAVNANSRGKFETEKGKDAYPYLWETVEDLSKEHPNGVAFKKAFESIEGPKARGMEEKLRKFRLTEIRHQLRRMELMKETVKMVLDALEG

SEQ ID NO: 64244 - protein, 271 aa, Zea mays
  Clone ID: LIB3606-019-A8_FLI.pep
QCLMVIVTRSGEVQEKYSNCRSLRNSTQSRTEKSDPLIQCYSQVRYHMSKELVYTASGSDLYLTSTEFAEHKNFLPVLDASNPRSGRRKEGDQPAGGVSTGRSARIIKEEVLWNAAGAVRGDDGAEDAEEDEEGERVRQERGREGEGDDGGVVDAEVAEVAAQARGGLGEGVGAGESRSVQQLRPWAPVRERAPRRLGQPAHEEAEGRRGERRVGEARGGGRRGAAAGSRAGHGEQRRRCRSGGHGWCWCLSLTACFAESELGLGRPLPRR

SEQ ID NO: 64245 - protein, 282 aa, Zea mays
  Clone ID: LIB3606-020-D8_FLI.pep
GFPDLPSSSTAAVSESAATMLELRLVQGSLLKKVLEAIRELVNDANFDCSGTGFSLQAMDSSHVALVALLLRAEGFEHYRCDRNLSMGMNLNNMAKMLRCAGNDDIITIKADDGSDTVTFMFESPKQDKIADFEMKLMDIDSEHLGIPDSEYQAIVRMPSSEFMRICKDLSSIGDTVVISVTKEGVKFSTSGEIGSANIVCRQNQTIDKPEEATIIEMQEPVSLTFALRYMNSFTKASSLSEQVTISLSSELPVVVEYKIAEMGYIRFYLAPKIEDDEEMKP

SEQ ID NO: 64246 - protein, 561 aa, Zea mays
  Clone ID: LIB3606-025-E7_FLI.pep
SIIPAITNRIKRDLIHNPLHLIFSVDFLGVTKSTLSSLSKGFAELSTDGQFLQLRSKQVWSRRITGVGDGLVQGTEAFAQGLAFGVSGVLRKPVESARQYGVIGIAPGIGRAFVGFIVQPLSGALDFFSLTVDGISASFMRCVNILSNKSVPQRIRDPRAIHRDGIVRDYDKFEAAGQMALYLAEASRYFACTDLFREPSKYAWSDYYEDHFILPSQRIALVTNKRLMLLQCLDLDKMDKKPSKILWDVPWEEVLSLELAKAGYQRPSHVIIHLKNFRRSENFVRLIKCNIDNEREPQALSLCCSIRKMWRSHQAAMKVIPLKVPSGQRHVYFVSDDDKKESHSLSRPLLSSGGTSTDVEQQFINNTVHFQKMWSSEPEIQSRCKLVAKQIADDGRVFSIWRPLCPNGYVSIGDIAHVGIHPPHFAAVYKNINGNFALPLGYDLVWRNCAEDYKSPVSIWLPRPPGGYVALGCVAVPSFKEPTLDCAFCVDERLAEDAAYEEQIIWASSDAYPWGCYIYQVQSASMQFMALRVPKEQSELRPKKILESFLQQASETQTSRA

SEQ ID NO: 64247 - protein, 271 aa, Zea mays
  Clone ID: LIB3606-032-F10_FLI.pep
KRRTVSLSQQTAKDGGEAGEAPADDPGAGGARGRGVVGTGRPGGSVRGPALLGLPLGRGGRGGGRLGPEQLQGQEHLVDGVDGEGLDGAERVVDGDLGDARGDVDLVVGGGGDVERVGPVAAGGLGADGVAGGLEGVHAVELGQDVALHQRHLLLLRQRVERAGLEVVEGVVGGREHRVPAAAAGVRAVQLAVQLRVLLRLLHQPHEHGELPALLQDRRHVRRPARRRRGPGSLRQRGGSHHGQRQERCRHGDAPRHWGFVGGGGGGGLVG

SEQ ID NO: 64248 - protein, 361 aa, Zea mays
  Clone ID: LIB3606-035-C4_FLI.pep
SIMALTTSTNNQALLDAQLELWHTSFAFIKSMALKSAVDLGIADAIHSHGSNATLPQIVSRAALHPSKIPCLRRLMRVLTAAGIFSAAHRSPDDGGGELVYGLTPASQLLVGGSSSLAPFMSLVLHQVYVSPFLGLGTWLQHERSDPTLFEMTHGFTAWDLNDHKPAFGELFNQGMVCDSSFVMDIVVKECGDVFRGLSSLVDVAGGLGAAAVAISTAFPHVQCSVLDLPHVAANAPANTSVKYIAGDMFESIPPADAVFLKWVLHDWGDADCIKILKNCKKAIPSRDAGGKVIIVDMVVGGQSSNIKHKETQVLFDLFIMTINGAERDEHEWKKIISEAGFSDYKIIPVLGVRSIIEVYP

SEQ ID NO: 64249 - protein, 247 aa, Zea mays
  Clone ID: LIB3606-037-E8_FLI.pep
HHHLAPHPHRDEQIYRSIARSMAAGGDDTTIAQVHSGIDSSNKTLLKSEALYKYVLDTSVLPHEPESMRELRLVTDKHEWGFMQSSPDEASLLRMLIKLSGARRTLEVGVFTGYSLLATALALPADGKVIAFDVSREYYDIGRPFIERAGVAGKVDFREGPALEQLDELLADPANHGAFDFAFVDADKPNYVRYHEQLPRRAAQRPRPQVLRRHQGTQRPAFSGSPRRGLPARHRRRRHHLPPRRLM

SEQ ID NO: 64250 - protein, 219 aa, Zea mays
  Clone ID: LIB3606-042-F10_FLI.pep
TPTPHAPLNPTAAAQAHDLRVQRIAAMTGPLHSSSGHNAAAGGGGKTIEEMYQKKTQLEHILLRPDTYIGSVEKHTQTLWVYEDGAMVNRSVTYVPGLYKIFDEILVNAADNKQRDPKMDALRVEIDVDGCSISVYNNGDGIPVEVHQEEGVYVPEMIFGHLLTSSNYNDNEKKTTGGRNGYGAKLTNIFSTEFVIETADGRRQKKYKQVTCFGCILPF

SEQ ID NO: 64251 - protein, 437 aa, Zea mays
  Clone ID: LIB3606-044-F1_FLI.pep
MNPIATAAPTPSSFFASNRLFAPRLRSVLPAAAMSYAAVSASAPSPSSGTGEQAKAAPLPHSTLEIAGARRGLLSGFASLRAPYRAFPVLASNRHVETIFAALTRSLPAVKLRRECLRAPDDGAVALDWVSGDDRVLPNDAPVLILLPGLTGGSDDTYVRHMLMRARSKGWRVVVFNSRGCADSPVTTPKFYSASFTGDLRQVIGHILGRYPQSNVYATGWSLGANILVRYLGEETDKCPLSGAVSLCNPFNLVIADEDFHKGFNNVYDKALARALTTIFKKHALLFEGLEGEYDVHKAANARTVRDFDEGLTRVSFGFKSVDDYYSNSSSSDSIKDVCIPLLCIQADNDPIAPSRGIPRDDIKANKNCLLIVTPQGGHLGWVAGDEAPFGFPWTDPIVMEYLEHLENEKDSSTKNNTSYEGVSEASVSHLTVHGQR

SEQ ID NO: 64252 - protein, 363 aa, Zea mays
  Clone ID: LIB3606-045-E7_FLI.pep
SSPGRRPPPLTHQSTATPDPAVVMRPALLKSTAELLRRSRGYASSANPERKVAILGAAGGIGQPLSLLMKLNPLVSSLSLYDIAGTPGVAADVSHINSPALVKGFMGDDQLGEALEGSDVVIIPAGVPRKPGMTRDDLFNINAGIVKGLCTAIAKHCPNALVNMISNPVNSTVPIAAEVFKKAGTYDAKKLFGVTTLDVVRAKTFYAGKAGVPVTEVNVPVVGGHAGITILPLFSQATPASNSLSQEDIEALTKRTQDGGTEVVEAKAGKGSATLSMAYAGAVFADACLKGLNGVPDIVECSFVQSTVTELPFFASKVRLGKNGVEEVLGLGELNEFEKKGLENLKGELKSSIDKGIKFAHGN

SEQ ID NO: 64253 - protein, 330 aa, Zea mays
  Clone ID: LIB3606-046-C8_FLI.pep
DASTRPSSHAALVWPAMSCLAAPPAAPPKAGERMLRAAAPLRSPSPCRGLHYAVRGTVGREAGCGRRQLALLRCSPAGESRASGDGGLSSFCIIEGPETIEDFAQMQSQEIEDNIMSRRNKIFLLMEEVRRLRVQQRIRTSESKDANTEGNEMPEIPSTIPFMPDASPKTMKQLYMTSFSVISGIIIFGGLIAPVLELKLGLGGTSYEDFIRTLHLPLQLSQVDPIVASFSGGAVGVISALMLVEVRNVRQQEKKRCTYCHGTGYLPCARCSASGMLLNTKQFSLLGHNMWSMKGRCQNCSGAGKVMCPTCLCTGMAMASEHDPRIDPFD

SEQ ID NO: 64254 - protein, 351 aa, Zea mays
  Clone ID: LIB3606-049-H9_FLI.pep
LRRDLAAVAMPLGDDAAADFALPDELLAALPRDPYEQLDLARRITALAVAGRVSGLEREAGRLRAEAAGKDRESAELRERVALLDAALQETNARLRAALEDNIKLSKERDSLAQTSKKLARDLHKLESFKRHLMQSLRDDSSSTQETVDITTCDQPVASKASSSADGGSVSNPATNIFTESLDVGSTNRDGAAARPPIQKYSLTTHITPRLTPEATPKVMSTSASPRRMSTTGTPKLMSGSTSPSKTRIESHMSMTPWYPSSKQSSAANSPPRGRSNPGRTPRIDGKEFFRQARSRLSYEQFGAFLANIKELNAHKQSREETLKKAEEIFGPDNKDLYLSFQGLLNRSMVA

SEQ ID NO: 64255 - protein, 515 aa, Zea mays
  Clone ID: LIB3606-055-G8_FLI.pep
LTMLLHLVTSSPLTPACPSPKRRTCVVAAAVLVTVRCAASSSSSTPSSSASEAAAAGQRVAKVHSYGTVDYERRSPLRWGTLYRRIAVGHGGRPVGRTLGAWDEGERRLDKWELCRIAKELRKFRRFNLALQVYDWMTERRDRFPLSSSDMAIQLDLIAKVRGVPHAEKYFDELPDAMKDKRTYGSLLNVYAQAMMKEKTEETFEQMRKKGFASDTLPCNVLMNFYVDSGEPDEVLAIIDEMKERNVSFDVCTYNIWIKSCAAKQDAEEMEQVFSQMIADESVVANWTTYTTLASMYLKLGNSEKAEECLKDAEKRTTGREKKCFHYLMTLYSHLGKKEEVYRIWNWYKATFPMIHNLGYQELLSALIRIGDIEGAELLYEEWASKSYSFDPKTMNILLAWYAKEGLITKAEQTVNRFVEKGGNPKPNTWEILATAYMNDDKISEALSCMEKATAVKSASKWKPRPTNVETLLASFKEKNDAEGADRLVSVLTSRGCAEDEEYKSLIDTYAFAGT

SEQ ID NO: 64256 - protein, 282 aa, Zea mays
  Clone ID: LIB3606-060-G1_FLI.pep
PCIFRCLGNVWKEPSLNCGPRLPSHLAESHRFSKMVSSEMTSVTVTRAQGSKLFRGKILLPGGSSDVVPSENVEFDFSDVFGPSAVHTHTEVSVLTLGSPAPVAESNDEVYNDPDVIVKRSHSLVGPSSLVSQSLPFSKLTLHKKDSSLEISECLSKEKQINQGSFSDDEFDDVKKENEGVGLDDFEVLKLVGRGAFGKVYQVRKKGTSEIYAMKVMRKDKVVEKNHTEYMKAERDILTKVDHPFVVQLRYSFQTKYRLYLVLDFINGGHLFFQLYHQGLFR

SEQ ID NO: 64257 - protein, 303 aa, Zea mays
  Clone ID: LIB3607-005-B4_FLI.pep
SSPAFASCRPPCPAPAPPPPPGCWSALTTAQLHEKSNVNRELEVNGQHHKKQVPDIEDFIYEKAKTLTSSSKATTSLVKVEKKVGVSSVIKVGAPDNWEAVLGGIKSMRLSGEAPVDTKGCEKAGSLLPPKERRFAVLISTMMSSQTKDEVTHAAVERLSENGLLDPDAIVRTDETTLANLIKPVGFYQRKAQFIKEASKICLERFGGDIPDSLNELLALRGVGPKMAHLVMSIAWKNTQGICVDTHVHRISNRLGWVFREGTRQKTTTPEQTRISLEKWLPKDEWEPINPLLLDLGKLSVLH

SEQ ID NO: 64258 - protein, 359 aa, Zea mays; identical to SEQ ID NO: 41676
  Clone ID: LIB3607-013-B9_FLI.pep

SEQ ID NO: 64259 - protein, 321 aa, Zea mays
  Clone ID: LIB3607-013-C3_FLI.pep
SIEHESHLDLVELVVVDRDGLALQAAELEGGELLRHVLVAGRLLEADVGVGPGPGERAEDGAQEVDPEAGVEVARQRRPQRPRRVHRSARHCPCEDGRNANRGTNCQPRQLTHRSRVRGDGEGDEHHVEGDDDLDDERVPVRPRRRGGAQHGDGVQHGLEHERRADAAGELRRPVERDLDPGEMAEHGEREGDGGVHVRARDVADGVDHDGDDEPAGDRLPQLRDAVLVAAVDPRRPARDEHQQERGHHLRDHLLEEVRREDVRQRPVVVRGGHAGVLRRADVMDLVVEVGPGVGPRVGRHFRPAVDRSSYYAPACCAWSS

SEQ ID NO: 64260 - protein, 237 aa, Zea mays
  Clone ID: LIB3607-015-E12_FLI.pep
QEFHPSPLTPTISVVAYPQISLFLFAVGTMGSDFKSIPLIDIGPLVEKIDDPSMANDKDLLQVVRLLDDACKEAGFFYVKGHGIDESLMREVRNVTREFFQLPYEEKLKIKMTPQSGYRIGENITKGKPDMHEAIDCYTPIRPGKYGDLAKPMEGSNLWPKYPSNFEVLLENYIKLCRDISRKIMRGIALALGGAIDAFEGDTAGDPFWVLRLIGYPVDIPEEQRTDTGCGAHTDYG

SEQ ID NO: 64261 - protein, 401 aa, Zea mays
  Clone ID: LIB3607-015-G4_FLI.pep
PLSIPGCSSALGGGGAHLLPVGQRREDPGSLHLLHQKPPFVAIIAALGSRLILLLLLKPHAERGVAAVGTVAERGVEAEQLPHALAPRAALAVALGEVADEQLQAPARGVARARRRRRRPPRRADLRASLRADVVQAVHGLAQLHVHALLRALPPPLAPPHVGLVQALQDVELLPGVVLLQEAPGLGALHGRELLGQQPGAAQVQARRVAEAGQLQHVHHRVRGEARADGALARPLQPRHLVRVRQHQHLHRVLLHVVILILAAPAGVEEADEGRGGVVGDAADPDDGPPGLAALPVLPQATLQDAAEHRRRRGQDRGMRGDPPAPARRDDVDVGGGRVAGAGAVAEPRCLAHLVVWREVVEWKGTNRGRGGIKKISAEKVRGAAGAGDVAVACVACSCLG

SEQ ID NO: 64262 - protein, 210 aa, Zea mays
  Clone ID: LIB3607-015-H2_FLI.pep
PEGARSGPLTSCREGRAGLGRAAPRRPDRPPARPSTSHGLSAMGDAGADASSSPPPPSGSFSYFAVFRNYPLVAALLGFAVAQSIKFFVTRYKENRWDPKRLIGSGGMPSSHSATVTALAVAIGFQDGFSCSLFATATIFASVVMYDASGIRLHAGKQAEVLNQIVCELPSEHPLSETRPLRELLGHTPTQVVAGALLGCTIATAGQLFL

SEQ ID NO: 64263 - protein, 357 aa, Zea mays
  Clone ID: LIB3607-016-C5_FLI.pep
NYRSEPLYCWHLCSIDRRRRPMATNKPFAVNKLLPVVALLLLLAACSSPVVVAQLVAGYYSKTCPDVEEIVRDEMEKIISAAPSLAGPLLRLHFHDCFVRGCDASVLLNSTEGNLAERDAKPNKSLWGFGSVERVKARLEAACPGTVSCADVLTLMARDAVVLAKGPFWPVALGRRDGRASSATEAADHLPPAYGDVPLLTRIFSSKGLAVKDLAVLSGAHTLGTAHCPSYADRFYNFSSAYDSDPSLDTAYADRLRSRCKSVHHDDKALLSEMDPGSYKTFDTSYYRHVAKRRGLFQSDAALLADATTREYVHRIATGKFDDVFFKDFAESMTKMANVAVLTGAEGEIRKKCYIVN

SEQ ID NO: 64264 - protein, 245 aa, Zea mays
  Clone ID: LIB3607-017-F4_FLI.pep
QLEHQSQERRGTGHGEGRAFPGRGGRRRRRRQCGGGDAGRRQAAVQGRADAELGLVGVGGPGAQPEDADMARLLLHRRGRRARLRRRPALPQGLRRRRPQLPRAPPLPRPRRRRHVAQVHPARRRRRRRRQWRRHMQPAGATPPCSYGDASSSSGVSSPETGRNAGLCYGTTHYDDMDMDLAGDADADLAALADIEAFFQSPKCMEYAMMDPCSTFFAPAPVATDAASEWAEEGEIDLWSFSSLN

SEQ ID NO: 64265 - protein, 297 aa, Zea mays
  Clone ID: LIB3607-018-C9_FLI.pep
ASDKQDLMRLSAAALLLALAAAGSVCSAQQLRRNYYASVCPNVESIVRDAVAKKYRETFITVGATVHLFFHDCFVEGCDASVVVASTPNATAEKDHPINLSLAGDGFDTVIRAKAAVDAVPRCRNRVSCADILAMATRDAIALAGGPAYAVELGRLDGLSSTATSVNGKLAPPSFGLDQLTALFARNGLSQADMVALSAGHTVGFAHCGTFSGRVRAADPTLNRSLAEKLAAWCPDGVDPRVAVTMDVVTPRVFDNQYFRNLQSGMGLLASDQVLLGVVMDRDPNSSSQNVKALNKL

SEQ ID NO: 64266 - protein, 220 aa, Zea mays
  Clone ID: LIB3607-021-B9_FLI.pep
AAPAPAPAPAPVPAPTVVEWPEGGALTRDWVAGLASTLDWCSRHLPADRLPAVLPPALVQRLVLAAAAILHREPNLVRVDPPPGQAVVVVGDVHGQLHDVIFLLRDAGFPSEDRIFVFNGDYVDRGAWGLETFLLLLAWKVLLPNCVFLLRGNHESKYCTSVYGFEKEVMTKYKDQGPQIYRKFLRCFEDLPLATIIAGCVYTAHGGIFRGTIVVPSKKS

SEQ ID NO: 64267 - protein, 279 aa, Zea mays
  Clone ID: LIB3607-023-B8_FLI.pep
HRQFSPAHSLPWPSPVLCPRSIGLFTSLAWRSISMDPHLSSHVHAAAAAASAFPDGKKLESDVLPPGVVTLDVEAGAPTNAAGADPRDGDDGDAGFDYMARAQWLRAAVLGANDGLVSVASLMIGIGAVNATRKAMLVSGMAGLVAGACSMAIGEFVSVYAQYDIEVSQIKRDGEEAARDSLPSPTQAAIASALAFAFGALLPLLAGVFVPSWAARVAAVCAATSVGLAGFGVAGAYLGGANMLRSGLRVLLGGWFAMLVTFGVLRLFGTVFHIQVSSA

SEQ ID NO: 64268 - protein, 522 aa, Zea mays
  Clone ID: LIB3607-023-F8_FLI.pep
ASTLDMDKAYIAALSAAALFLLHYLLGRRAGGEGKTKGSQRRLPPSPPAIPFLGHLHLVKAPFHAALARLAARHGPVFSMRLGTRRAVVVSSPDCARECFTEHDVNFANRPLFPSMRLASFDGAMLSVSSYGPYWRNLRRVAAVQLLSAHRVACMAPAIEAQVRAMVRRMDRAAAAGGGGAARVQLKRRLFELSLSVLMETIAHTKTSRAEADADSDMSPEAHEFKQIVDELVPYIGTANRWDYLPVLRWFDVFGVRNKILDAVGRRDAFLRRLIDGERRRLDAGDDSESKSMIAVLLTLQKSEPEVYTDTVITALCANLFGAGTETTSTTTEWAMSLLLNHREALKKAQAEIDAAVGTSRLVTADDVPHLTYLQCIVDETLRLHPAAPLLLPHESAADCTVGGYDVPRGTMLLVNVHAVHRDPAVWDDPDRFVPERFEGGKAEGRLLMPFGMGRRKCPGETLALRTVGLVLGTLLQCFDWDTVDGAQVDMKASGGLTMPRAVPLEAMCRPRTAMRDVLKRL

SEQ ID NO: 64269 - protein, 242 aa, Zea mays
  Clone ID: LIB3607-023-H8_FLI.pep
SRCELNHSLLMGSLSAPPVLSPLVSGLIFSSDRVLKSRGLTTSSVMKSCRLSELSNAEVSSLKARPRIDSSSMSIFGTVNPIVEGVCVRGDAADKQYQVKNCRWRPTFALETDGPSNTDGQDFDEDSGFLGRTRLGRLIQAAARELLDKLNSARTNSPTKIFLVLLGFYTANALATILGQTGDWDVLVAGVVVAAIEGIGMLMYRKPIARPPGRFQSLISMVNYWKAGVCLGLFVDAFKLGS

SEQ ID NO: 64270 - protein, 347 aa, Zea mays
  Clone ID: LIB3607-025-B11_FLI.pep
AAMRQPRSGPGKRRGRGPRIPAATLQKQKTALANVDQITGAKIPKSFVFSRGKLPSTLRHLQQDLRKVMLPYTALNLKEKKRNNLKDFVNVAGPMGVTHFLILSNPQSLPHLRFAKSPQGPTFTFQIEEYSLAADIANSQKRPRCPPGIFKNSPLVVLGGLTGLGNPFRSLVEYFQHMFPSVDPTTVKLATCQRILLLKHDKEKDVIEFRHYSIKLQPVGVSRRIRKLMQNNQVPDLGEFEDVSEFVKKAGYGSESEADDEAAMVSLPSDIDKLNRASRKSAVRLQEIGPRMTMRLVKVEAGLCSGDVLYPWPVEKEVVGKKGTETGEVEGQEDDSEATDESEDEMV

SEQ ID NO: 64271 - protein, 401 aa, Zea mays
  Clone ID: LIB3607-041-A12_FLI.pep
IRNAAEQEAAVLLLWLLLGVTVPSIDQDLLLLGELNVAINHHLNELLEPNLGLPFEQLPRLGGVSLEAVDLCGAEVLLVNDHMILPVEAGVAEGSLQELLDCVGLLGGDDVVGRLILLQHEPHCLHVVPREPPVPGRREVAQEDLGLQAELDAADGARDLARHEVLAAARGLVVEEHAVAGEDAVGLAVVDGVPVRGDLGSGVGGARVEGRVLALRRRRGAEHLRGTSLVVANGPARQADGLQEAERPRGSDVGGVVGDLEGDGDVRLRREVVDLVGGDGVERAAEGGGVGQVGVVEPQRGPRGRRHRVWVVVDVVQPLRVEVGGAAHEAVHLVPLRQEQLREVAPVLPRDARDQRHFPRRREGPRHRGGLAVSGSGSGSGGMSHLGSEASKGGIASCRGV

SEQ ID NO: 64272 - protein, 399 aa, Zea mays
  Clone ID: LIB3607-042-D3_FLI.pep
SQFCEFITFPCQREIANIAREGEVTTTTRLARFRFLSGAGGRPAEGFPVGGGAAVHEEVAERRRAGRRDPVLVAQELPAARALHLPLVVVHHHLRLRALGPRHHRSRVDRRHPPRRSLHEPARAVDEDDVPGDVVELVGEVVDGEAALGEEQVLDGAALGGARGTGGVEEVGELAHRRGVGHVVGLQPRVLALQVGHVVRVLVQEHRAPAVVERAPQRRLRAQPEHQQVARRAPPEHRRDRAHVRLRHARRQVPCRRSVLHQRVEHVPRQAGLRGAGSAGRERRRLARRRPGRGARRGEHGQEGHAGEQGQEHHQPQAPRPAGRRRRRGRHPVQGLVRRRVDDEQLWPGHCLHLLRFCLFLCFACVEEDVVQMEWPLTLTFSGRRDQSCIGKGGRNGGW

SEQ ID NO: 64273 - protein, 319 aa, Zea mays
  Clone ID: LIB3607-043-G6_FLI.pep
LLMMQRKLYDRGGLKVEGIFRINAENSQEVYVRDQLNSGVVPNEVDLHCLAGLIKAWFRELPSGVLDALTPEQVMHCNTEGGCALLASMLPPVEAALLDWAINLMADVVEQENYNKMNARNIAMVFAPNMTQMADPLTALIHAVQVMNFLKTLILKTLKERNKKDEALEALQPCSSSPNDQDEHQVSEHLEKPSVLPNQKGFGFHMNDSATPVQVLGAEKTLHHHSQIRSHEPKKFGTDMDHKKRQSDASSLLGSDSSNRFNSSGREFGSRNGASDRFSFRKGVERLCRHPVFQLNRSMKKSADAVVFDAPREARQAWV

SEQ ID NO: 64274 - protein, 518 aa, Zea mays
  Clone ID: LIB3607-052-E2_FLI.pep
LHLSPFGTHCRPPRLHFLEVTAALRRKAAQMASAATQCFSYSSLPATWALRQRGGGASVLRLSSRRTFSVSAAAGFDNQNREYVIVGGGNAAGYAARTFVEHGMADGRLCIVSKEPVPPYERPALTKGYLFPPDKKPARLPGFHTCVGSGGQRQTAEWYKENGIEVLYEDPVVAFDGKTQTLKTSSGKVLKYGSLIISTGCEASRLPEKIGGKLPGVHYIRDVADADALVSSLGSAKKVVVIGGGYIGMEVAAAACGWNLDTTIIFPEDHIMPRLFTPSLAKKYEELYQQNGVKFIKGALIEKLGAGSDGRVSSAVLKDGSVVEADTVIVGIGAKPVVSPFEAVGVNPKVGGIEVDSLFRTSVPGIFAIGDVAAFPLKMYNRIARVEHVDHARKSAHHCIETLLTSQTKAYDYLPYFYSRVFEYEGSSRKVWWQFYGDNVGEAVEVGNFDPKVATFWIDSDSRLKGVFLESGTSEEFSLLPQLAKSQPVVDKSKLQAATSVEDALEIARSSLRSSATV

SEQ ID NO: 64275 - protein, 300 aa, Zea mays
  Clone ID: LIB3607-054-B1_FLI.pep
AEAMESPFRADVVKDKAALVTGGGSGICFEIAAQLARHGAQVAIMGRRREVLDKAVAALRSQGLRAVGFDGDVRNQEDAARVLAATVAHFGKLDILVNGAAGNFLASPEDLTPKGFRTVLEIDTLGTYTMCYEALKYLKKGGPGKGPSTGGLIINISATLHYSASWYQIHVSAAKAGVDSITRSLALEWGTDYDIRVNGIAPGPIQDTPGLRKLAPEEMSKGLREMMPLFKFGEKRDIAIAALYLASDAGKYVNGTTLVVDGGLWLSHPRHIPKEEVRELSKVVEKKVRASGVGVTSSKL

SEQ ID NO: 64276 - protein, 260 aa, Zea mays
  Clone ID: LIB3607-056-B7_FLI.pep
SQILAGGRRPRPVSLDDLPSAEARREEAVMAGAEVGEDKYRSFIHGEGERDTVWRYGAPPNYDVVNKLFEEERTQVWPEGSLEEKVQRLLKSWEMELVHKARPEDQKTVNSEKYSASTNGMSALTRAEVMAIGGYNNFLRTKLPPEHRIYDPDSETVESAMATFTTAFPRGFAIEVLDVYSGPPRIAFKFRHWGYMEGPFKGHPPHGQRVELFGVCIFHVDEDMKVDKSEYFYERGNFLAGFLSAPAPDGSGGCPVMRGN

SEQ ID NO: 64277 - protein, 572 aa, Zea mays
  Clone ID: LIB3607-059-A6_FLI.pep
LAKGGKMAPLLAAAMNHAAAHPGLRSHLVGPNNESFSRHHLPSSSPQSSKRRCNLSFTTRSARVGSQNGVQMLSPSEIPQRDWFPSDFTFGAATSAYQIEGAWNEDGKGESNWDHFCHNHPERILDGSNSDIGANSYHMYKTDVRLLKEMGMDAYRFSISWPRILPKGTKEGGINPDGIKYYRNLINLLLENGIEPYVTIFHWDVPQALEEKYGGFLDKSHKSIVEDYTYFAKVCFDNFGDKVKNWLTFNEPQTFTSFSYGTGVFAPGRCSPGLDCAYPTGNSLVEPYTAGHNILLAHAEAVDLYNKHYKRDDTRIGLAFDVMGRVPYGTSFLDKQAEERSWDINLGWFLEPVVRGDYPFSMRSLARERLPFFKDEQKEKLAGSYNMLGLNYYTSRFSKNIDISPNYSPVLNTDDAYASQEVNGPDGKPIGPPMGNPWIYMYPEGLKDLLMIMKNKYGNPPIYITENGIGDVDTKETPLPMEDALNDYKRLDYIQRHIATLKESIDLGSNVQGYFAWSLLDNFEWFAGFTERYGIVYVDRNNNCTRYMKESAKWLKQFNAAKKPSKKILTPA

SEQ ID NO: 64278 - protein, 273 aa, Zea mays
  Clone ID: LIB3607-061-A2_FLI.pep
RRRRTRHPTTPASGSSTWSTVPRRHWRLSAPAWSPAPTCSPSRPGTASCSPVASATRCRPDAVTGGYPMTPKPSTTCLRRSSTPPSWQTGSPPRTSLSRTWSCSPARTPSASHCSGFAGPTDLNGPVDRLYNFSSPDGIDPTLSKAYAFLLKSICPANTSQFFPNTTVFMDLITPERFDNKYYVGLTNNLGLFKSDVALLTNATMKALVDSFVRSEATFRTKFARSMIKMGQIEVLTGTQGEIRRNCRVINPVSATDDVVLARPSGFTGVAAS

SEQ ID NO: 64279 - protein, 271 aa, Zea mays
  Clone ID: LIB3608-002-C2_FLI.pep
TSTEKKEVQPRPSLHSASCTYNVKSALTHPRVRAARADKEQAEEELCQATMGISRDSMHKRRATGGKQKAWRKKRKYELGRQPANTKLSSNKTVRRVRVRGGNVKWRALRLDTGNYSWGSEAVTRKTRILDVVYNASNNELVRTQTLVKSAIVQVDAAPFKQWYLTHYGVDIGRKKKTPAAKKDNAEGQEVEAAAEETKKSNHVTRKLEKRKEGRTLDPHIEEQFGSGRLLACISSRPGQCGRADGYILEGKELEFYMKKLQRKKGKSAVA

SEQ ID NO: 64280 - protein, 226 aa, Zea mays
  Clone ID: LIB3608-003-E5_FLI.pep
RTQTIILYMTQTLQMRIYTYTHNTYYGARAHAVRDRSSSHAMHTQMRAYAHCMQPGSLPLLGSRVEGEERALAVDVARGVVAADDENAAVVGADDARAADAGGPAPHHLRVVAAHLAGVAGVAAQVVVPLLVHPRPQRVGGAPRPPRRAPEDVLAERPARVHQPAVPGALRRVVLRVPGHPGVPRHRAHAVRRARAVVQIHEVLRRVLRRGGRGHHRRRHGRSEGS

SEQ ID NO: 64281 - protein, 526 aa, Zea mays
  Clone ID: LIB3608-004-C11_FLI.pep
HPQDRLDKFEPDGIMGSGDLSSEMERTVLGLTLWVWIAIGVVALLVAILLMICIWVASRLRTKRTMDSLRQTQIPIYSKEIPIDRVGGRSLAQTMHEREQPSLPPPDKYANREPAGAAVGHLALSKSSDHDNMSQGSSVCNADRAGTGSMHSGEDGSSGPRRKPNSPAAFVSASPLVGLPEFSHLGWGHWFTQRDLELATNRFSKENVLGEGGYGVVYRGRLVNGTEVAIKKIFNNMGQAEKEFRVEVEAIGHVRHKNLVRLLGYCVEGVNRMLVYEFVNNGNLEQWLHGAMHQRGVFSWENRMKVVTGTAKALAYLHEAIEPKVVHRDIKSSNILIDDEFNGKVSDFGLAKLLGSDKSHITTRVMGTFGYVAPEYANTGMLNEKSDVYSFGVLLLETVTGRNPVDYSRSSNEVNLVEWLKTMVANRRAEEVADPSLEARPSIRALKRALLVALRCVDPDSEKRPKMGQVVRMLESEEVPYREDRRNRRSRTGSMDIESIAEGSNSAEFGKKVERTGSSISDRSQP

SEQ ID NO: 64282 - protein, 400 aa, Zea mays
  Clone ID: LIB3608-005-C1_FLI.pep
KMNGSSGSQGHHVSGEKKQVCHVSRPILNNGPKHRPLTPMRRCRGVACVVIILSTAFLLVVYLAPITTFAVRLFSVHYSRKATSFLFGMWLSLWPFLFEKINKTKVVFSGENVPPKRRVLLFANHRTEVDWMYLWDLALRKGHLGYIKYILKSSLMKLPIFSWAFHIFEFIPVERKWEIDEAIIQNKLSKFKNPRDPIWLAVFPEGTDYTEKKCIMSQEYASEHGLPMLEHVLLPKTKGFICCLQELRSSLDAVYDVTIAYKHRLPDFLDNVYGVDPSEVHIHVRMVQLHHIPTTEDKITEWMVERFRQKDQLLADFFMKGHFPDEGTEGDLSTPKCLANFLTVVCLTAICLYLTLFSFVWFKVYVVASCAYLSFVTYYSILPPQLIGSPEGDVKAKKVV

SEQ ID NO: 64283 - protein, 755 aa, Zea mays
  Clone ID: LIB3608-006-F2_FLI.pep
LAPPVLHSQSRSRSTSMADLATDLFGEPIEAHPPWFKPDAFLRASFDPDAYVAELRSYVPLESLAAELRAHLDALRAELVGLINRDYADFVGLSARLKGVDAAAARMRAPLADLRDKVAAFRAGASAALAALRAGLEQRAAAAAARELLELLLDAFHVVSKVEKLIKELPTAPSDLSNAEVPNSDTGTPNGVAGTGVSETQSILLERIASEMNRLKFYISHAQNLPFIENMEKRVQGATKLLDGSLERCFVDGLEHRDAKVIYNCLRAYAAIDNTSSAEELFRTAVVSPLIQKIIPQNYARAVAGTSSDELEDDYQQIKECVQKDCKFILEISSSENSGLHVFDFLGNSILKEVLSTIQKGKPGAFSPGKPKEFLRNYKASLGFLDFLEGYCISKSAVTKFRSEPAYTDFMRQWNVGVYFSLRFQEIAGGLDSTLTNTFSPTGLNEAQGKPLLLKQSIKLLESLDSCWSDEVLVFSHCDKFLRLSLQLISRYTTWLSSGLTARKASDGSPNSPADAEWALSIPIEDFIYIMHDVHAVIGELSESGSFIGHVNQLLGSCPIEVFNLVKQSILQAVEPLKELLPAIINVMIGIIVKKSNEDLKHLKGITATYRMTSKLPVRHSPYVSGILHPLKVFLEGDRIRYLSEDDKTKLCRGSTDKITAIYYDLVSEVVTVARKTESSLQRLRQGAQRRVGASTDASDNIISDTDKICMQLFLDIQEYARNLRAIGIDAREIDSYRALWQCVAPKDKQENIQF

SEQ ID NO: 64284 - protein, 416 aa, Zea mays
  Clone ID: LIB3608-006-H4_FLI.pep
STPGELPDTMEGDDRRAPLLAAGGGRPPSLRRRDSARSLRSSFLSRLPDKVRAGLDPEHLADVDLSRAKGMSRGVRQYYEKQLATLKTFEQVEARCMPGEFDSDVEASDSEDAEQKQSEFAMKISNYANIVLLVFKVYATIRTGSMAIAASTLDSLLDFMAGGILWFTHLSMKRVNIYKYPIGKLRVQPVGIIVFAAIMATLGFQVLVQAVEQLVENKPGEKMTSEQLIWLYSIMLSATAVKLALWLYCKSSGNSIVRAYAKDHYFDVITNVVGLVAAVLGDKFLWWIDPAGAVILAVYTIVNWSKTVLENAATLVGQCAPPDMLQLLTYLAMKHDTRVRRVDTVRAYSFGALYFVEVDIELAEDMRLREAHAIGESLQERIEKLPQVERAFVHIDFESTHKPEHKVRSRLPSTDP

SEQ ID NO: 64285 - protein, 292 aa, Zea mays
  Clone ID: LIB3608-008-C8_FLI.pep
ANRVSREESAFPLPRTAPHRTQPPSEREMASVAEMQPLAPAGYRRAPEMKEKVEASVVDLEAGTGETLYPGISRGESALRWGFVRKVYGILAAQLLLTTAVSALTVLHPTLNATLSDSPGLALVLAVLPFILMIPLYHYQHKHPHNFVFLGLFTLCLSFSIGVACANTQGKIVLEALVLTAGVVVSLTAYAFWASKKGKEFGYLGPILSSALTILVLTSFLQVFFPLGPVSVGLFGGLGALVFSGFILYDTENLIKRHTYDEYIWASVGLYLDILNLFLSILNMLRSMQSDN

SEQ ID NO: 64286 - protein, 220 aa, Zea mays
  Clone ID: LIB3608-010-B10_FLI.pep
AKPRVDERGGVGDEQMAGGGPAASALSSPWRALFQRALDANAHLRHSTYFQLATVGAAGRPANRTVVFRGFQELCDKIQINTDARTNKIGEIKSCPFGEICWYFTDSWEQFRISGSIDVIDASTTDPAKLQHKEKAWFSSSVKSRSQYLGPQPGIPVLDDEHVKDVHLDPLAGPVDAFCLLVLDPEKVDYLNLKSNQRLIFTRRQKDDGSNDWMAVKVSP

SEQ ID NO: 64287 - protein, 442 aa, Zea mays
  Clone ID: LIB3608-010-C10_FLI.pep
APMEMHADVDGCSVPLAVLLKRELCNQKVERPDILFGEANKSKKGEDFTLLVPRCHRTPGGSGGGENAGDDDTISVFAIFDGHNGSAAAIYTRENLISSVLAAIPPNLTSEEWKAALPRALVAGFVKTDKNFQIKAARSGTTVTFVIIDGWVVTVASVGDSRCILESAEGSVYFLSADHRLDANEEEVERVTASGGEVGRINIAGGAGIGPLRCWPGGLCLSRSIGDIDVGEFIVPVPHVKQVKLSNAGGRLVIASDGVWDALRFQEALNYTRGLPAEAAANRIVKEAVTSKGLRDDTTCIVVDILPPEKLSPPLKRPGKGVIKALFRRRPSDEMSEDQMDRGCLEIDVVEEIYEEGSAMLARRLNINYPEGNMFKLHDCAVCQLEMKPGEGTSVHGNMPKHSRVDPWGGPFLCSSCQLKKEAMEGKLHSRNSQSAVQPLPK

SEQ ID NO: 64288 - protein, 330 aa, Zea mays
  Clone ID: LIB3608-013-E11_FLI.pep
QKGGTAHADRCAWLRAPFRRQSAGSTPAAACPSSPHPMRALARAASLLRRAAGSAPTTASLYHPPRNVGPCLVKNLPGFFFNGYSTLLAPPNEVLIPPELLSSRTVWTPDRELGQYEDLVARVTNFHNEDKGFMVLDGDVFDVPIRKDIVHRVVRWQLAKRQQGTHSTKTISEVSGTGRKPYPQKGTGKARHGTLRGAQFRGGATMHGPKPRSHAIKLQKKVRRLGLKIALSARTAEGKLLIFEDLEVPSHKTKNIVQYIRQMDDSKKVLLVDGGDIDKKLKLATQNLHYVNVLPSIGLNVYSILQHDTLVMTRAAINRIVERMHTPINR

SEQ ID NO: 64289 - protein, 199 aa, Zea mays
  Clone ID: LIB3608-014-B10_FLI.pep
ADCSCRMIAPPLSNLEGLMSLDDFDDAEGGSKLERFSRETLDPSLSWKDVEWLKSITSLPILLKGIVTAEDARKAVEAGAAGLIVSNHGARQLDYAPATISALEEVVKAVAGAVPVLVDGGVRRGTDVLKALALGAKAVMVGRPVFFGLAARGEAGARHVIEMLNKELELAMALCGCRSVAEVTRAHVQTEGDRIRALL

SEQ ID NO: 64290 - protein, 367 aa, Zea mays
  Clone ID: LIB3608-017-B8_FLI.pep
VTAQDCLSATFSGGRTFGKCNSLPSLSASLHWTYHAENGTADVAFRAPSDPSGWVAWGINPDSGGSMEGSSVFVASQDGSGAVSILMTNLESTSPSLTNTTALKFKVPAGPAAEYSDRAYTIYATVELPRNSTQQFTVWQAGPATSNGGISPHPTAPANLASTQRLDFLSGSSTAASNSKLHRRNIHGMLNAIAWGVLIPTGAIIARYLRVFESADPAWFYLHIACQCSGYVLGVAGWGLGLKLGSESAGVTYQPHRSIGIAIFCLATLQVLALLLRPDKKNKYRLYWNIYHHSVGYAVIVLSAVNIFKGLHILEPASGYKTAYIVILATLAGIALCLEAITWPIAIRKRRRNADKASGGNGWQQGA

SEQ ID NO: 64291 - protein, 161 aa, Zea mays
  Clone ID: LIB3608-018-D3_FLI.pep
QVTLESSDGEKFKVDKEVAERSVLIKNMIEDVGESDNPIPLPNVNASVLRKVLEYCEHHRGDPLPAADADPSNDDNRKRATEISDWDQKFIQVDQEMLFEIILAANYMDIKPLLDVGCKTVANMIKGKTPEEIRKLFNIVNDFTPEEEAQIKKENEWAEDR

SEQ ID NO: 64292 - protein, 400 aa, Zea mays
  Clone ID: LIB3608-019-F6_FLI.pep
GDMEEEGHDIVIVGGGICGLATALALHRKGIASLVLERSEALRSDGAAIGVHANGWRALEQLGVAAELRETADLITAASRGVWKVTKKTTQAPIGKEFRCLRRKDLIETMAKNIPAGSIRFGCHVVAIQQDPGTHHGPILTTVDGGTIRAKVLIGCDGASSAVARYLGLSPPKAIPRTVLRGFTAYPHGHPFGAEFLRIRGGGEFVVGRLPVTRNLVHFFVTMPNPPTGIMLATKDASATTTKDFMLEKLRDCCAPEIVKMVQDSDPESLNVVNSIRYRPPWQVALAAFHRGAVTVAGDAMHAMGPFIGQGGSAGLEDAVVLARSLSRAAAAAAGGGHGAAVREYVRERRLRVALLSLESFVAGTLLRARSLVGKLACVAVLALLGTRSLRHADFDCGRL

SEQ ID NO: 64293 - protein, 453 aa, Zea mays
  Clone ID: LIB3608-020-F6_FLI.pep
SCPGPADSRSASLGPPDALRAASSVTSPPSARVSRPQRGTRLKRSPTDRQLKPLPTGSCFAGLRRTMQDMKPAAAAVAKVVAGDSPPSAASPAPAVANSNGTPQKPPPIPAAAFDMPKPNLRGLNKPKCILCGNIARSRCPFQCCKSCCYKAQNPCHIHVLKQTNTLPDKPSPATAPATTEHQSNNLPATSSASRLAALQKLPQHFLKFLQTKKSVTKKDVAGINKWRFMKLKEHMQGDTDAENEAYERYTQNVGLLEEAFCPMEEDADVDPEAEATSSSEEERMDLLVSAAKARLKSDNEAANSFRERVATILDQKLKDLRGSQSASEGDEPSGPSLDDRLTPTPMKFSTAQKMGRATELNELLGKLTGARSEDDLKPCRDIAEQLFGKENGSSVGNSNRVDTETEPGDQESAAAVARRYSVPTLCSRMEVGEDLASEMNDEFCSLTQVAQL

SEQ ID NO: 64294 - protein, 262 aa, Zea mays
  Clone ID: LIB3608-027-G12_FLI.pep
YKMGCVSSKILAKSGSFQEKVSGLGHAHGFQRSSAIEEIILSTSKSSGDQFMALLRTSSRASSSSAEAHSPAPPPAAAAAAARIETVDVAELLAGLEEGSCGTAGEAQAPPRPRASAGRARSFRTVEELDAMLLLTQHQQEDEKLATATEGAEAARVSEGAKRRGRARHLGELQVPPAAAAFDFSKSGSLRDWLRQGGQTFSPGSYVTPRFGTPAAAERGGGEQQQQEALLFDPELVAQLERAMEQLSEDRGRVLDQILGCK

SEQ ID NO: 64295 - protein, 299 aa, Zea mays
  Clone ID: LIB3608-029-C5_FLI.pep
NPAANSELVVIFLKFLLDKDPIKQLLEADERIECDMDTARHVEQLVVFGGFTDTQFLEKSLVNQFNELEDSLKEAFLMPFTAISSQIQCQGLLPLYPVTSSATLSSSCSPTSISFYKDEDSSHEESSYSLTDYVCLKIPDGSLNKVNCIGVIKGSGNCCTTLSMMSLSGFLLHIPDGYECVDLSLYKDNQVVLLLSETSCSDSPGKSWMVMLQIENFSFMPLSGTFPANIYSLQKLVALDLQLDTDYGKVRSIPHTVSTPFAVSASRGVACVFSSRRHALVYILDEDEEAEGDETSDME

SEQ ID NO: 64296 - protein, 250 aa, Zea mays
  Clone ID: LIB3608-029-G2_FLI.pep
SLPFPFFSSPAAAAAAALRPRPDPATPTDLPASSMAAGAGARAKAAGALALALVLALAGANSEGDALSALRRSLRDPGGVLQSWDPTLVNPCTWFHVTCDRDNRVTRLDLGNLNLSGHLVPELGKLEHLQYLELYKNSIQGTIPSELGNLKNLISLDLYKNNISGTIPPSLGKLKSLVFLRLNGNHLTGPIPRELSGISSLKVVDVSSNDLCGTIPTSGPFEHIPLSNFEKNPRLEGPELQGLAIYDTNC

SEQ ID NO: 64297 - protein, 488 aa, Zea mays
  Clone ID: LIB3608-030-B3_FLI.pep
KDNIICHGWSFSSPTQCHECSSGTYSSPQKGYQITMGGHGSVPTPMALVRMAVRRVPRQLAGDVRDEGAVLAGVDVEGGALERGPLVGEPQNAVAPHVQDTAAHQLHAVVPHRVEEVVRQRQVLQLPRPRQQAHHVGHLPVQLVPRQVELLHVAEAAERQRHGPRDLVPAGVEHGQPLHQPDLVGEAPGQAVVEEQHLRQRGRRVVDGARDGARELVVGHHQVLRARAAERVRDPPAKAVVVEEERLHREREHRRWHLPRVPVEAEVQEQQPAQRHHGLRERAREVVVGQVQLVEVAQLGQVRHVAGEVVGVGVEQRQVRERVDEPGQRRRAQPEPVEVDGRHRQHARRVRRVVAVESPVVRGGAAVVEEAVAELRARPRRRHAQRVARDRLLERLDHRVQRPQLVVPEPPRRRRRRLAPATLQRRRAVRPAVVPGRRRRWRCAAVVPAPAERAVRRGEHQHSYCRRCRPRHYSSRARSSSASGDSLS

SEQ ID NO: 64298 - protein, 252 aa, Zea mays
  Clone ID: LIB3608-031-E2_FLI.pep
GARAAAASRDGDCGRGVLRPRGTRADGAQDLALLPRRRVRGLRPPHGRALLPRRHLRAGPRRGRGVGGRARAAGPGRGASAHRAAPPPVAAPAMGGLPGRPRRRPEGDLLGPAPVHPRRRRGRRRHRAPPAGAGRRPRAAPRGRVLPAPVLPRGAGAQGRGGEGQGGGGDRAEGGRGGKGRHGPRRLRPAGEPRLRRRVRHGDRARAGPDRGRRVRRRRRWGGRHRRQAQGLVTHAMGCPPALSRASWFRCV

SEQ ID NO: 64299 - protein, 424 aa, Zea mays
  Clone ID: LIB3608-043-B10_FLI.pep
SPSIRVRAHSQPFTLTHERILSVASQKQAASRMVPRGDKRDVVDDGSAQRAVGLHDVAHADEHHPGLVRDRREVQHAARVAALALGLVRHLDAAPRGVRLDGHGAHAAVAGVPGRELEPVELSGNGGHVLHQRRLHAGHQLHGAGAVRHGVVRRVNVLHRLGGRQDHPRGQRGVVVLVHRRHQHPPLRVGEDVRAVLEVPVLQHIILAAPRSRHGLNGKQIDEGAAGCVLGDAGVVDDQGHDAARGLEGPGVGVPAAAGVDRLDREYVRLGGDRHVELLGLGAGPRRAEGDGVARARRHGEALLDGCLVPQPHGVGALRHRQQHVALLLARPDVLHVPGDLPVRYRVAPHHPRAVELRLGRRLLEVAVRQQAILDCRSRSSRQADDQEQRSSTGVRHCFASPSHRLPSPAQEGNHHKSTTLERN

SEQ ID NO: 64300 - protein, 270 aa, Zea mays
  Clone ID: LIB3608-044-G12_FLI.pep
THCAKAAMAYRAFATLLAVLAFVGFASVPRGLATDPTQLQDFCVADNKNPVLVNGVVCKNPNMVKATDFFSTIVPVAPNGQGSAVTPVAVNEIPGLNTLGISLARIDFVPGGQNPPHTHPRGSEILTVIQGTLLVGFVTSNQLLNNTLFTMQLNMGDVFVFPQGLIHFQLNNGKTPAVAIAALSSQNPGTVTIANAVFGAKPPILDDILARAFMLEKATVDWVQQAFGAAPVAGGGGGLPGGGGYPGSGGGLPGGGGYPGSGFPGYPGRS

SEQ ID NO: 64301 - protein, 548 aa, Zea mays
  Clone ID: LIB3608-044-F9_FLI.pep
ANSGDGTPPSPRELYTIPASSGWFRWDGIHETERRALPEFFGGAGGAGFGTATRNPRIYREYRDFIIAKYREDPARRLTFTEVRRALVGDVTLLRKLFAFLDSSGLINFSASSSSVPASRQQEVGVVVEAPVGLQVTPRPPASYFAEEKRVAAGGEKENEFRLPPLTSYSDVFGEWAPGKAPICGFCGEECNGADVETLQDGFKVCSKCSKSNNDNIKEEANKCPGDKKENMENHASSAWTDTETLLLLEGVLKHGDDWDLIAQHVRTKNKSECIAMLIQLPFGEHMLGTINGKFVSRLHINQTDDGKTNQHIMESSSHSTEMADGMQIDGSEDSADKSVEEYPTKRRRLFFSMDATTSLMEQLAILTTAASPDVAAAAADAAIKAFGNENPQARKAFRLNEQEYKTKAFASNHVQQIDHKVSNKDTAMHGQSGSDKQEKKFIASAYQLRAAVATAVGVAAARAKMLADQEEREMELLMASVIETQLRKMQYKIKHFEELDSLMDQEYTAIQQMKGSLMNEWIKVLEHAFRAGVSLPRDELLTKLLLN

SEQ ID NO: 64302 - protein, 443 aa, Zea mays
  Clone ID: LIB3608-047-A9_FLI.pep
CLPNQSHSPSATQSRCRQTRYQSKQEAVSLHVAREMATASLALLDQTLLPSPLAYNGGSDRLSQEIFSILESNFLFGASPLEGGACSAGRVRVLSIDGGADGGALAAAALVRLERRLQELSGNPAARVADFFDLAAGSGAGGFLAAALFACRMPAEAARDVVAKNRKVLSGRGGGLMSFRRPEAAFRKVFGDLTVRDAAKPLLIPCYDMATAAPFVFSRADAVEADAFDFPLWQVCAAACGVGPAEVASLDGRTRLRAASGAGAGGGGASAAVANPTAVALTHVLHNKREFPFAAGAGDLVVLSLGGRAAASLGRLSSSSLLRIAGACQADMVDQAVSMVFGESRATNYVRIQGNGIAPGETAEAALAERGVESVLFRGKKLMAQTNGERLDGVAEQLVREHHRRLESKTPVVLVKPSATPRTSSSSASTLITVSTNSSSESP

SEQ ID NO: 64303 - protein, 341 aa, Zea mays
  Clone ID: LIB3608-048-A10_FLI.pep
GSGEATARAMAGIRWPPEDPEIFPSRMVSGGAWVPVAPPGEMASDDDRSVAADSWSIKSDYGSTLDDDQRYSDTAEVLLASSSASSVAAPSTTVAVHPSSDFSFDKDVHDSSYVEPPLLGLQNFQDGAYAEDLANFHERSHADDWFGTDIMDIRVGWTKNLCSSRDLPSCSVLDIGTGSGRLLQQLAKQGFSDLTGIDYSESAIELARSLAIGDGFEHINFLVDDVLESKLERRFELVMDEGTLDAIGLHPDGPVKRMMYWQSVDSLVSRGGILVITSCSRTKDELVQEVENFNQRKLGAVGSGSEGLPASEAAVFSYLDHVQSYPSVDSSCITTVALLHK

SEQ ID NO: 64304 - protein, 264 aa, Zea mays
  Clone ID: LIB3608-049-C7_FLI.pep
QAAGGQDRCPSTTCRVPRQARREEAVSLPSAAAMAGAEVGEDKYRSFIHGEGERDTVWRYGAPPNYDVVNKLFEEERTQVWPEGSLEEKVQRLLKSWEMELVHKVRPEDQKTVNSEKYSASTNGMSALTRAEVMAIGGYNNFLRTKLPPEHRIYDPDSETVESAMATFTTAFPRGFAIEVLDVYSGPPRIAFKFRHWGYMEGPFKGHPPHGQRVELFGVCIFHVDEDMKVDKSEYFYERGNFLAGFLSAPAPDGSGGCPVMRGN

SEQ ID NO: 64305 - protein, 521 aa, Zea mays
  Clone ID: LIB3608-050-B4_FLI.pep
EKICNQRVRPDRTEMERATADPHFLLLPWQGAISHIIPMTDIGRLLASHGAAVTIITTPANALLVQSRVEDLAAALHRPHGHGAAGTITVTAIPFPAAEAGLPEGSERLDLLRSPADVPRFFHANRLFGEAVARYFRGEALPPRRRPSCVVAGMCHAWALGLARELRAPCYIFHGFGAFALLCVEYLYKHRPHEAVSSADELFSIPALPAFDCRVSRAQLPQHFAPSTSMGGGTLQEIREFDVAVDGVVVNSFEELEHGSCELLAAATGKTVVAVGPVSLCHQHPMTMTDDGGGGDRRVLEWLDTKETKSVVYVSFGSAGCMPPAQVVQLGMALASCAWPVVWVLKGADSMPDDVKEWLRESLDDKQCLLVRGWAPQVAILAHRAVGGFLTHCGWGSTLEAIAAGMPMATWPLFAEQFINERLVVDLLGVGVSVGVTKPTENILTASKLGADVEAEVGMEQVAKALERLMDQGSQGEHRRRKAQELKAKATGALQDGGSSYMNLEKLIVQSSVSRPNTCGV

SEQ ID NO: 64306 - protein, 201 aa, Zea mays
  Clone ID: LIB3608-050-E12_FLI.pep
QQLQQPRPQWADEITTVSEGRRDDADADPLVRRIRSLTIAPPLLSSQSEAEAESSLTDILVGKPSNSSATSGNLNPNVLAELFAMYREWQEENAKKISRKQEEIENKIETADALAVKLLQRFNYCLTYMRSTSHNLAEVHPLQIEVGESKGRLTEVISNCDALCKRIAAEGPESLRSSVQPFMAARAEAEGSGSLDPKQES

SEQ ID NO: 64307 - protein, 320 aa, Zea mays
  Clone ID: LIB3608-054-C6_FLI.pep
ILSPDTLARHSTLQSSSTSTSHTTRPHTPFPTHFAIQATASLLLIKACRFSRAFRCQQEQAIEAPGPLFHLPPLARELSHSHRRRDLYVEDRPEQPEHGEREEHGEPAAEEHPQAGPQHAGAAQVRAGHAERGQADASRGAHRGHPGGPRRHEHPRQQRQERAERERQRRRERGLRRARQAVPSGAFLLLLAAIAALDLRDLHVVLRVHGDELADGHAAGARHEPRRAGHQHGLGRGAHGADADHEGRHGHEAVVRAQDGRPEPLRAGHVVDAAGVPVGVARIVPGRVRRRARLDVDGDDSPRWQHVSTLRFLTIREGRG

SEQ ID NO: 64308 - protein, 383 aa, Zea mays
  Clone ID: LIB3608-054-E8_FLI.pep
DGVRPAVRRGPDRLLSRRRGSGSPADGPEEPHLVRPQCDPRIHEPRLAPHLRELLQQHPWAARVGTHVLHPRAPVSPRLPGHLLRPLPVLQARLPVRADRLGVLRPALRGRRRQQVPVPRPARRRLLPGVGRQPAHQRALHRQAQRRARRRAGAGLHVGAGAGHPVRRAPAVPGRPEDGRLGRRRGPAGHHLRRGARGAGRRGRRQLEPRGGARAVRVPHGPRQRRGGAPGRAVPGRGQRRAGDRRGLEGPRLRPAPRGRQPRAPQRGVQVLRPQRRRARRAGPDLPPGLRQRRRGGRGRQGPRHGRRRKVPGVRRHLRHQLRGRAVRWRGPRARGRRHRGGADRRALRQRQGQHWPGLQEVTTDEAGGVVFLLVCTCVLTYI

SEQ ID NO: 64309 - protein, 493 aa, Zea mays
  Clone ID: LIB3608-058-G5_FLI.pep
PYFIPSELGSDACESWSSFMEKKAATTEEPLLAPRSEHTVAAEAKRLLSLAGPLVASCILQNVVQLVSVMFVGHLGELPLAGASLASSLANVTGFSLLVGMASALDTLCGQAFGARQYGLLGLYKQRAMLVLALACVPIAAVWANAGRILILLGQDRDIAAEAGAYSRWLILSLVPYVPLACHVRFLQTQSIVVPVMASSGATALGHVLVCWALVFKAGMGSKGAALSGAISYSVNLAMLALYVRLSSACKRTWTGFSTEAFRDLLRFTELAVPSAMMVCLEWWSFELLVLLSGLLPNPKLETSVLSICLNTGALLFMVPYGLCTAISTRVSNELGAGEPQAARLAARVVMCIALSAGLLLGSTMILLRSFWGYMYSNEPEVVTYIARMMPVLAISFFTDGLHSCLSGVLTGCGRQKIGARVNLGAYYLAGIPMAVLLAFVLHLNGMGLWLGIVCGSLTKLVLLMWITLRINWEKEATNAKETVFSSSLPVAL

SEQ ID NO: 64310 - protein, 299 aa, Zea mays
  Clone ID: LIB3608-059-D4_FLI.pep
NMGDLPEPEAAMAVPEPSSSLALRVFYLRVSRCEVDESMLDTLALTHTPLTPDTILDVSGAEHQPGMGKGNGSVSFCLRRDRVDKRSGEATFVCTATVRVSGSVRFEVQSKDERIVVGILEACDVDSKGTKSWAMKCQAATQRGSGFLRCGGEKRDTKPPVVEVYVAGVFRGTPVVFTKATQLRFRRRRQVRAFMDPIPECREQVEETHHPEESGYRCYKPDPNWDDDDVDDDSLYMRSDGTDDGEEYSELSWFTAGVRVGVGISLGICLGVGIGAGLVVRSYQSTSRTLKRRLISNLL

SEQ ID NO: 64311 - protein, 169 aa, Zea mays
  Clone ID: LIB3608-061-H10_FLI.pep
ELPAAGARGRGSRRAMAGLAGRPGSWGGLVLRVGQALFAAACIGVMGSSLGFASYTAFCYLIASMGLQMLWSFGLACLDGYAIRANKDLTSPILLSLFVVGDWVTAILSFAASSSAAGVVILFQKDVLFCRRYPQLPCGKYELATAFAFLSWALSATSALIMFWLLAAF

SEQ ID NO: 64312 - protein, 302 aa, Zea mays
  Clone ID: LIB3632-002-H11_FLI.pep
LASYYLSIPPHHTKVTRRPARMATHHLAQGHPQAWPWGMAMYTNLHYHHHHHHQQYYEREHLFEKPLTPSDVGKLNRLVIPKQHAERHFPLGGGGGDGSEKGLLLEFDDEGGRPWRFRYSYWVSSQSYVLTKGWSRYVKEKRLDAGDVVRFDRVRGAGVGAADRLFICCRRRGESAAASAAATPTPPPVAPALNAGEQQQQQPWSPTVCYSTSGSSYPPSPASPPYAYHIDTPHAGAGEADAKSSGGTPTTGTAPTRKLRLFGVNLDCGPEPEPETPTAPMYGYGYVHQSPYAAVPAVPSYW

SEQ ID NO: 64313 - protein, 337 aa, Zea mays
  Clone ID: LIB3632-004-E10_FLI.pep
NRERQGNKTPCTYTRILLAAVPCCTAQISVEELPLRRGGRRVERLPFGRHHHRLQPRVGHLEHVQRLHALLHPLRLNVLLRRGVPGRRYALQLHRVPHQQLDQRRDLHLRHLVPSGNRFLDASYLIGELVHLERDGADGAVGALGRGVPLALDVAALDAGGVLGERHLGLVLDAACVQVLGVAPRPAPVAQLLVRRLQPRPRRQQLLQLPERGNGGHGHLVPRAAVLDAHLDLRRRRRPRRGAAGPRRVVPRLHDHPARPHLPPGPLLRRRHHGRRGVRPPAARPAVRARPVHHPRHGGKIATRTQTCSRQLPRGCGWLVPRLGVREAVAAWGREAE

SEQ ID NO: 64314 - protein, 383 aa, Zea mays
  Clone ID: LIB3632-005-F3_FLI.pep
ITPLPSISLLPIKRRPEARIQPPLPPAGPAPPSQAESSPRNAAPGRRAPRPGGYHRAAARRGGVAPVAAARQRDGCGGPWRVQGAGGLVGVREAGVPHGPGPGVGHHGAPDLVRALAGGAEAHDPRVPPLPVAFCRHPFAVRVGVVAHGAAVRGPDLGQRVGVGVAGRGEVGRAHVPRRAAVAHGHPGSGPRRRDGAHPAPARGRQRRRVPGAHVPGRRRGRLLRAGVRLPLLHLRVGGRVHAAVRVGGQLGAQVPRGVRVPVRGPGVRARAQARVPAQRRRRGGRHGQRHRARARGDGVQPARQRLVRRRRPVVPHGDRRPLRGHLRHRRGRGVHGAAAHGRALRRGLQRERRRRAQVPRAVGVEPRAQLLLRPQRARPVAV

SEQ ID NO: 64315 - protein, 741 aa, Zea mays
  Clone ID: LIB3632-008-G2_FLI.pep
DGSASNGALLPVNLAALPTRTPTPWRASAAMAADREKEREAELEGAMYTNCLLLGLDPAVLGSPSSPAGRVGLFRHSNPRLGEQLLYFLLSSLRGPAQSAKDFDKVWPIFDSAQSREFRKIVQGIISELEQHGALPRSNSRVSSLATCCGPRFVELLWQLSVHALREVHKRTFAADVVSNPLPAALTDVSYLHAASLLPVTKARIALERRKFLKNANIAVQRQMTWSNLAHEMTAEFRSLCAEEAYLQQELEKLQDMRNKAKLEGELWDERLSGSSGQNSHLVSKATRLWESILARKGQHEVLASGPIEDLIAHREHRYRISGSQLLAAMDMSSSVPHSELLSSKAGETSIILEKQEEFSQLFQEKEEALTRSDDRNGRTQQTVDVAEILRRWTHALQRIHKQSLHLAKANDGEGPELLRSASSGEASTHSDSLTATLAEHRQHLVSIQGLINQLKEAIPAMQQSIDELSEEVNSVSINSMDQLNSRLPLPVQIAGFGTSEESSSEVSEINSKLSSTHLDKPGGSPALKLPPLFSLTPSSSGKGIQTQKRSALARQRSQDITSEQKTLTIPSTKDQMNGSMHENDDYSAHDIRRSVREAALSKPLKNTERPQDKNSDDGSEHFFIPLSISAAKKEMDSVANRCNQRLGLSPQMKFPKSTSYNADTPINKSPILLSELNGHDSISAMSFLDPAGGLAHQSFITDDALDQVFSPLLMESSLFHDADEDLLAPLSETDAALMEY

SEQ ID NO: 64316 - protein, 361 aa, Zea mays
  Clone ID: LIB3632-010-E12_FLI.pep
SFSPPARSLSLVSRLLHSKRTGAGERREQRAAHSPPPDFLGVADRSPGQRGTAGPLGSPEMLPYATAAEAEAALGRPMTPAEALWFRYTAGVSDYHLYCCNILFLFVVFTVAPLPIALLELRAPAAVSPYKLQPRVRLSRAEFVRCYKDVLRIFFLVIGPLQLVSYPAVKFVGIHTKLPLPSLAELAAQLLVYFLVEDYLNYWIHRFLHGEWGYQNIHRVHHEFTAPIGFAAPYAHWAEVLILGIPSFVGPAIVPGHMITFWLWIILRQVEAIETHSGFDFPFTPTKYIPFYGGAEYHDYHHYVGGQSQSNFASVFTYCDYLYGTDKGYRFHKTYLAKLKDLGHNDGQKGDGSGPSYVKLD

SEQ ID NO: 64317 - protein, 271 aa, Zea mays
  Clone ID: LIB3632-011-A9_FLI.pep
KPPEAMCIAAWIWQAHPVHQLLLLLNRDEFHSRPTKAVGWWGEGSKKILGGRDVLGGGTWMGCTKDGRLAFLTNVLEPDAMPGARTRGDLPLKFLQSNKSPLEVATEVAEEADEYNGFNLILADLTTNIMVYVSNRPKGQPATIQLVSPGLHVLSNARLDSPWQKAILLGKNFRELLREHGADEVEVKDIVERLMTDTTKADKDRLPNTGCDPNWEHGLSSIFIEVQTDQGPYGTRSTAVLSVNYDGEASLYEKYLESGIWKDHTVSYQIE

SEQ ID NO: 64318 - protein, 545 aa, Zea mays
  Clone ID: LIB3632-011-C11_FLI.pep
QGNPKRKGLLALLSPFHQLRRAAMGARRRLLADTPPPPEHRHRQGAPASDWSEGYLNGWLSQPTPIFGLRLWVLVGIAVGAAIVLVLLLIFVCLSHRRRRRGGDLLAANLYPAADTKLLKQHLQHQATPTKDIQEIVRRQQAETPPPPAVQLAKAVAEPKTPPPPPPQQHRQPARKTPGSGATTSGGSERDGATPRSTGSAGMPEVSHLGWGHWFTLRELEEATDGLTEENVIGEGGYGIVYKGMLHDSTLIAVKNLLNNRGQAEKEFKVEVEAIGRVRHKNLVRLLGYCVEGAYRMLVYEYVDNGNLDQWLHGDVGEVSPLTWDVRMNIMLGTAKGLAYLHEGLEPKVVHRDIKASNILLDQQWNARVSDFGLAKLLWSEKSYVTTRVMGTFGYVAPEYASTGMLNERSDVYSFGVLIMEIITGRSPVDYTRAAGEVNLVEWLKTMVAERKAEEVVDPKMAEKPSPKTLKRALLVALRCVDPDANKRPKMGHVIHMLEMDDLLFRDDKKPGRDVHPHGSDRYSSKEEGSISKREHHHHHHHRHR

SEQ ID NO: 64319 - protein, 394 aa, Zea mays
  Clone ID: LIB3632-015-A11_FLI.pep
SNPPLHSKSHGGSHRSLARLRFPCSLGMELITNVTEYEKLAKERLPKMVYDYYASGAEDQWTLKENREAFSRILFRPRVLIDVSRIDMATNILGFSISMPIMIAPSAMQKMAHPDGELATARAAASAGTIMTLSSWSTSSVEEVNSVGPGIRFFQLYVYKDRNIVRQLVKRAEMAGFKAIALTVDTPILGRREADIKNRFALPPHLVLKNFQALDLGTMDKTNDSGLASYVAGQVDRTLSWKDVKWLQTITSLPILVKGIVTAEDTRLAIEYGAAGIIVSNHGARQLDYVPATISCLEEVVREAKGRLPVFLDGGVRRGTDVFKALALGASGVFIGRPVLFSLAVDGEAGVRKVLQMLRDELELTMALSGCTSLREITRAHVITDSDRIGRSRL

SEQ ID NO: 64320 - protein, 637 aa, Zea mays
  Clone ID: LIB3632-018-C12_FLI.pep
QSPTRRGSPPPPFCSASSPAMAPGADAGYGQWAAACPPLRRNLQLLAPDEVELAKMLLNEGQIHLFEHWPEPGVDDDNKRGFFDQVRRLNSSYPGGLVSYIQNAKKLLADSKEGKNPYDGFTPSVPSGEVLTFGNDNFVSLETAGIKEACNAAFVLVAGGLGERLGYKGIKVALPRETTTGKCFLQHYIESILAFQEASCKMVDEGCQTKIPFVIMTSDDTNALTIKLLESNSYFGMEPSQVKILKQEKVACLADNDARLALDPSDKYKIQTKPHGHGDVHSLLYSSGLLEQWKTEGRKWVLFFQDTNGLLFNAIPSALGVSATKGYNVNSLAVPRKAKEAIGGITKLTHVDGRTMVINVEYNQLDPLLRATGHPDGDSNCETGYSPYPGNINQLILELGPYIEELKKTHGAISEFVNPKYTDSTKTAFKSSTRLECMMQDYPKTLPPSAKVGFTVMDTWLAYAPVKNNPEDAAKVPKGNPYHSATSGEMAIYRANSLILRKAGAQIADPVVHTFNGQEVEVWPRVTWSPRWGLTFKSVKERVHGNSSVSQRSALVINGQNVFLEGLSLDGTLVVNAVDEAEVKLTGHIQNKGWTIQHVDYKDTSEKEEIRIRGFKLEKIEQLEVNYTEPGNHSLSA

SEQ ID NO: 64321 - protein, 631 aa, Zea mays
  Clone ID: LIB3632-019-E2_FLI.pep
LIKKKDWGHRKRDWGTIGRGQSETVPLRSVVDNVSLAKEKDLHESHADEKAFHKSHSVRRTRSPDMHNHRKRSREADVRSTKSATHPVNGAPRRLLQFAVRDAVRTVPPVTSGSESASKRLCSVVSTLASDSTLDITHIRLQKTNSDLRIPVATAALRAAAEAAEDALKDSFCGSVFSRLGRMPTINSSEQSPDRRSQDLEGKEYENIDNIQAENQVEFYGRNQHGGSDVYMRDRRTEEATGSLSNIDEYGHNSSVRYNGLGSLRSALPASGGKESLVLGYVRGASEVRSGRLIAQGPPAGSGPRSSEKILNVSGNTKTQKLRTHVTRDALAFDPQVPMEKVSGARKSIGQGPHAGSGPRPSERILNVSGNTNTQKLPTHVTRDDLAFDPQVPMEKVADARKSHVKIAHANDMSMTTDKSKDLIQSSSMLEAQKATSGAAGSNTTGQPEGGSDSRTVFVSNVHFGATKDALSRHFNKFGAILKTHIVTDGVTGQSTGSAYIEFLHKESAEQALTLNGASFMLRILKVVRKNSTEATRSPGLLRVSRGSPFASRLIRTAYPRPTFPGAIRGRLPLRGVAQSLQWKRSATDSSNAVKPSQAAPSAPGNQLVTPTPRSFTYTRTEPKPNDGAMA

SEQ ID NO: 64322 - protein, 644 aa, Zea mays
  Clone ID: LIB3632-021-D5_FLI.pep
VAETMEEVQNCVMKLRSNPRRHRDKVYVGCGAGFGGDRLMAAYKLLQRVKELNYLVLECLAERTLADRYRIMVSGGKGYDPRVKEWMSLLLPLAFERKVCIITNMGAMDPLGAQKEVLNLASVLGLEITVAVAYESSFETQGSPVLSDESTGGRGGCSTYLGAASIVHCLENYKPHVVITSRVADASLFLAPMIYELGWNWNDTQLAQGTLASHLLECGCQLTGGYFMHPGDAYRDFPFEQLLDLSLPFAEVSCRGEVIVSKVDGSGGLLSPHTCAEQLLYEVGDPANYITPDMVVDFCNVQFHQISKDKVSCDGAKPSNACCPEKLLQLSPTESGWKGWGEISYGGHQCLKRAQAAEYLVRSWIGERYPGINEKIVSYVMGYDSLKAIGGDEDSYLAKQVLDVRLRMDGLFELEEHAVQFVEEFIALYTNGPAGGGGISTGHRKEIILQKMLVDRENIFWRSHAKKASIPCLHNQATYSETGQARISQAQRNPTCRTMAIQHFEASTETPASPAPALPGKRVALYHVAHSRAGDKGNDMNFSVIPHSPADIGRLRSVITPDWVKNAVSPLLGSSSFPDERDVQHRNKLLELVTVEIYYVPGISSLNVVVRNILDGGVNCSRRIDRHGKTLSDVILCQQVILPP

SEQ ID NO: 64323 - protein, 509 aa, Zea mays
  Clone ID: LIB3632-026-A12_FLI.pep
VQARATLQLPRRKQRGNRAVDGRAAMAGLHFLLVPLVAQGHIIPMVDLARLLAGRGARVTVVTTPVNAARNRAVVESARRAGLDVEVAEIAFPGPGHGLPEGLENMDLLTRREHFLPFFQAAWKMDAPLEEYVRSLPRRPDCLIADSCNPWTAEVCARHGIPRLVLHCPSTYFLLAMHSLSKHGVHDRVADELETFEVPDFPVPALANRATFRGFFQWPGAEGFQRDVAEAEATADGLLLNTFRDIEGVFVDRYAAALGRKTWAIGPMCASGGLDADARASRGNRPDVDAGLFVSWLDARPPSSVLYISFGSLAHLPAKQVIELGRGLEVSERPFVWAIKEANSNTDVQAWLAEGFEERVRDRGLLVRGWAPQVTILSHPAVGGFLTHCGWNAALEAIAYGVPVLTWPSFSDQFSSERLLVDVLNIGVRSGVKVPAMFLPKEAEGVQVSSADVEKAVGELMDEGPKGTARRGRAKDLAAKAKVTMMEGGSSYADLTDMIHHVAVLGSRQ

SEQ ID NO: 64324 - protein, 199 aa, Zea mays
  Clone ID: LIB3632-029-B4_FLI.pep
ETGGSVLSREIHSWSPWPRPGTSEDDDGAEEDPRRKDPIGQPRRPQRLRHPVGRNRRHHSGHQQAGDDHRHRLRPRLPGLAVEGDGGAVAEGQRGVAGGRVAPDPEATAAAGSLGPEGEQRPEAVARLDAAHVEAVPPRARQVRPEDGHRAGTPPVQVHLHGRDALSRRRGRLQWRRSQRFLFRTRHRHPLAAGLLRCS

SEQ ID NO: 64325 - protein, 576 aa, Zea mays
  Clone ID: LIB3632-031-E9_FLI.pep
DTERTTSCSCSDLKMSEGDATQLALEKGLPQVSNDDGSSSPATMHKLKVDTEDAGSKIESPTPEKLESRSKGVVVSSLARNLLAERYKDRFANQFLEDEGDIDDEDYNDSISPGMSRSQRSRSIELLEKHKDLLNLFNRMESSIRLLRLRKRMATFNNIATQVEILAKRKLSYCHLAQMKYLFPEAIQIKRVLLHDEKSLCMYADMEIILVMDVVEYTSTDHSPSMTICDAFYSKLLTFLDAHHKGTDIPEAILPEPFNLRSRGQLNLEASHNGHAAEPHLQGTTKDGFSNASHFPQSFRKLMSQKVITDGAERTQLLLDPTKLSSVSAYDTEGTNRSPKKQDKHASVTVNSEISATPSRHLISRCQEGTPKQETLESPLLAQTPATQTPKRQLPTPLEKLEATCGHISEPRSASSARRSLNTSLKFEGGSPSYHDRMEHVATSKIGILSEDSSSFNKSLEENGPVFFTDRDKINLADPVGVQEKMASLRSTFGIVCDISHSIKNSLITKQELFHNILANNLEIEQMGEIEEQLHILEDLAPNWISKKVINGEEILYSFETIADQNSVWERLVEAV

SEQ ID NO: 64326 - protein, 397 aa, Zea mays
  Clone ID: LIB3632-032-E12_FLI.pep
LVFFFFLSSFACPPLFHRSPIPVPTEAAIVKEKHRAGRGLPRGRLLVLASSTIYSLWARPAGQAAKVPAYHPSMAFLVERCGEMVVSMESPHAKPVPAPFLTKTYQLVDDPCTDHIVSWGDDDTTFVVWRPPEFARDLLPNYFKHNNFSSFVRQLNTYGFRKIVADRWEFANEFFRKGAKHLLAEIHRRKSSQPLPTPLPPHQPYHHHHHHLHHHLSPFSPPPLAQPVPSYHHHFQEEPIATATAPHGGAQAAAGGGNNEGSGAGAGAGGDFLAALSEDNRQLRRRNSLLLSELAHMKKLYNDIIYFLQNHVAPVTSPSSAAHASLPSAGGGGAAASSCRLMELDPADSPSPPRRPEADDGTDTVKLFGVALQGKKKKRAHQEDGDDGNHEQGSSDV

SEQ ID NO: 64327 - protein, 456 aa, Zea mays
  Clone ID: LIB3632-034-D7_FLI.pep
LTATPRHERRMPPTLGLLLAAAAAVLLLLLPPPPSAGAQETCWSGPAPRRGAWMSVASFGARGDGQTLNTGAFARAVARIARRRGARGGTLLYVPPGVWLTGPFNLTSHMTLFLARGAIVRATQDTSSWPLIDPLPSYGRGRELPGGRYMSLIHGHGLQDVFITGENGTIDGQGGVWWDMWKKRTLPFTRPHLLELMYSTDVVVSNLVFQDSPFWNIHPVYCSNVVIANLTVLAPHDSPNTDGIDLDSSSNVCVEDCYISAGDDLISIKSGWDEYGVAFGRPSSGITVRRITGSGPFAGFAVGSETSGGVEDVVAEHLSFSGVGVGVHVKTNSGRGGFIRNVTVSQVTLDGARYGLRIAGDVGGHPGASYNASLLPVIDGVAVRNVWGRNVRQAGLIRGIRDSVFSNICLSNVKLYGIGSDSIGPWRCRAVSGSALDVQPSPCAELASTSGTGFCT

SEQ ID NO: 64328 - protein, 272 aa, Zea mays
  Clone ID: LIB3632-039-H6_FLI.pep
RYPILPIPLFAVDGAYRGKKGRAMAGAFAFRLVPRLAAEPAARGKGGGGGANRDAGSRALVSKKPNKQQHLWIRKETAGSGKKALRLIDAVSKLPNEREAIYGALDKWSAFEPEFPIIAAAKALGMLKRRRQWLRIIQVTKWLMSKGQVLTWTTYDTLLLALLMDKRVDEAESVWNTVIQTHTRSVPKRLFSRMILIYDIHQRPDKVLEIFADMEELGVRPDEDTARRIGKAFVASGQEEKEKHVLEKYLKKWKYIHFNGERVRVRRDGPLA

SEQ ID NO: 64329 - protein, 302 aa, Zea mays
  Clone ID: LIB3632-040-C3_FLI.pep
QLPPPPPRRPPMPSCLLPGIAPRPPPAALRSLLLRRSRMASSGTARAFQLRLNPLTGDSEWLVVDEAETEAEAPAPAPTQHKQLLAATSYLDMLNDASRNRAYRLAIDATVTDPTSRVLDIGAGTGLLSMMAARALAAAGGEGRGSVSACESYLPMGKLTRRVLRANGMENKVKVFHKRSDELGVGVELDSRPDILVSEILDSELLGEGLIPTLQHAHDMLLVKNPKTVPYRATTYGVLVESTSLWKMHDLHSNEANAEDGVRLIPSGTQIVLSVKSQQHAMQCDALADEIRLIVIVKQRLR

SEQ ID NO: 64330 - protein, 828 aa, Zea mays
  Clone ID: LIB3632-046-B8_FLI.pep
KTSRAPSHPPRLVTHSTRTHYLIGQSQTNWAPSPPLPLPMAQQLPCVSSPRPLLAVPAGRWRAGVRGRPNVAGLGRGRLSLHAAAARPVAEAVQAEEDDDDDDEEVAEERFALGGACRVLAGMPAPLGATALRGGVNFAVYSSGASAASLCLFAPGDLKADRVTEEVPLDPLLNRTGNVWHVFIHGDQLHGMLYGYRFDGVFAPERGQYYDVSNVVVDPYAKAVVSRGEYGVPAPGGSCWPQMAGMIPLPYNKFDWQGDLPLGYHQKDLVIYEMHLRGFTKHNSSKTKHPGTYIGAVSKLDHLKELGVNCIELMPCHEFNELEYFSSSSKMNFWGYSTINFFSPMARYSSSGIRDSGCGAINEFKAFVREAHKRGIEVIMDVVFNHTAEGNEKGPILSFRGIDNSTYYMLAPKGEFYNYSGCGNTFNCNHPVVREFIVDCLRYWVTEMHVDGFRFDLASILTRGCSLWDPVNVYGSPMEGDMITTGTPLVAPPLIDMISNDPILGNVKLIAEAWDAGGLYQVGQFPHWNVWSEWNGKYRDTVRQFIKGTDGFAGAFAECLCGSPQLYQAGGRKPWHSINFVCAHDGFTLADLVTYNSKYNLSNGEDNRDGENHNLSWNCGEEGEFASLSVRRLRKRQMRNFFVCLMVSQGVPMFYMGDEYGHTKGGNNNTYCHDHYVNYFRWDKKEEQSSDLYRFCRLMTKFRKECESLGLEDFPTSERLKWHGHQPGKPDWSEASRFVAFTMKDETKGEIYVAFNTSHLPVVVGLPERSGFRWEPVVDTGKEAPYDFLTDGLPDRAVTVYQFSHFLNSNLYPMLSYSSIILVLRPDV

SEQ ID NO: 64331 - protein, 625 aa, Zea mays
  Clone ID: LIB3632-047-C1_FLI.pep
VSFLYSCCPFAAAVAWFASHTAPQSRSILPLPRSGLVGRQQPPPRHLSYSRRVCSLFLSPSLSATTGCDTAAAALRWVPEPSPISSPAKSAHQIRRASMSPLALLQALIFILCCSPLASASSSELTLAGAACGDDQLVIFDASDGLLNLSVNGVLMQDRVFACQKLGFYFGSGCLRCSNLSDAWRSAVKQYCGEGSEKSHATLHQDVPRKLLRWSTENSSRNACERSGLNENNQDIGDSSEKQEHLLAVPGVILLCCGLMLPCFHAERKEVSRHDNATIQRNALESVSSYEGSMSSEKVPPTPHRIPPSPSRFAPSPQIARVGSVNLSIQQILRATQNFSPSFKLGEGGFGMVYRAVLPDGNVVAVKRAKKDQFAGPRDEFSNEVDLLAKIDHRNLVRLLGFTDKGNERIIITEYVPNGTLREHLDGQHGRVLDFNQRLEIAIDVAHALTYLHLYAEKTIIHRDVKSSNILLTDSYRAKVSDFGFARSGPSDTEKTHISTKVKGTAGYLDPEYLRTYQLTPKSDVFSFGILLVEILSARRPVELKRTPEERITIRWTFKKFNEGNTREILDPLLEDHVDDEVLEKLLSLAFQCAAPTRDDRPTMKEVGEQLWEIRKEYGKSVRKV

SEQ ID NO: 64332 - protein, 257 aa, Zea mays
  Clone ID: LIB3632-049-B2_FLI.pep
FPKLYLGVFSKNRVNCTRAGEGSLEAGLVLEMVKAKARVRYEPGPAFEEVKEEAMLDISPTDSTEFWLIQWPKDQIDVLDFHGKELSLKLHSDGNLGNLENSSGKSYEIASFAAQKPDATVFLPSGSETKAVGKISRRVSLVRYPKPEEFTKPSFGSLTPSIKKSAGSKKTMSRFTGVSKNPSSQGSALSLGQRSAEPTPKHKGKRKDESSLGHSNVSGKATEGSEARGAGSNTASEMPQSPPEKSKKRRKKDKIVE

SEQ ID NO: 64333 - protein, 277 aa, Zea mays
  Clone ID: LIB3632-050-D8_FLI.pep
LHHRWSAMCIAAWAWHCHPTHRLLLLFNRDEYHSRPTQPAQWWAAGEEAKEILGGRDELGGGTWMGCTRDGKLAFLTNVREPSSLIGAKTRGQLPVRFLQGSLCPLEYATEIAKEADQYNGFNLILADVNSGTMVYISNRPGGDPVIQTVAPGLHVLSNAAINSPWPKAMRLGQSFKRYLTIHDDAEASLKQMVEELMMDTARPDRSMVPDTGDDPEWEYKLSSIFIDTAKEQARYGTRSMVALAAKLEGEVTFYERYLENSLWKENLIQFQMEKAQ

SEQ ID NO: 64334 - protein, 769 aa, Zea mays
  Clone ID: LIB3632-052-F1_FLI.pep
LDSHITSMWRLTVAEGGGPWLRSTNGFVGRAVWEFDPDLGTPEERDEVERVRQEFSDHRFQRRESADLLMRMQCAKQNRSQRRDLPRIKLGEDEHVTEEIVLSSLRSALDQFSSLQASDGHWPGDFSGIMFIMPGLIFALYVTGSLNVVISPEHRHEICRYIYNHQNEDGGWGTLILGSSTMFGTCSNYITLRLLGEEPYANNSVLAKGRAWILSHGGATLIPQWGKIWLSVLGLFDWSGNNPIFPELWSIPQFLPFHPGKFWCFARMVYLPMAYLYGKKFVGPITPTILALREEIYDTPYGKIDWSDARSKCAKEDLICPRTLLQNVIWTSLYRCVEPVLSSWPINKLRERALGNIMEHIHYEDENTQYLCICPVNKALNMVCCWVEDPNSDAFKRHLARIPDFLWISEDGMKAQVYDGCQSWETSFIIQAFCATDLVNDYGSTLQRAYEFMKNSQVMRNHPGDQRYWHRHRSKGSWTLSSADNGWAVSDTTGEALKAVLLLSKISNKNNLVGDPIERERLHDAIDCLLSFANKDGTFSTYECKRTYSWLEILSPCETFPNIVVDYPYPECTSSVLQALILFKDLYPGYRTEEIEALVRSAATFIETKQQEDGSWLGNWGICFTYGAFFSIKGLVASGRTYKNSPCIRKACHFILSKQLSTGGWGESHIAIETQVYVNLKGDRAHAVNTAWAMLALIYAGQFERDPTPLHRAAKELINMQLETGEFPQQEHVGCFNCSLYFNYPSYRNLFPIWALGEYHRGLRAKKDK

SEQ ID NO: 64335 - protein, 219 aa, Zea mays
  Clone ID: LIB3632-052-G1_FLI.pep
VMEVPPLPTASEGERRSVATGSCLPRLVSGVLSGALTGIFAVAGGLTGAFTGALAGRASDSGVLRGAGLGAFAGAVLSIEVLEASRAYWSADRSSPQSTSSMGDFIEQLLHARFVQDQYEPSAYMAYRWQVGIADNDDMFDVLEDVLSEGLSQDTLKKLPHHVVPAPIGESLSCAICLQDVISGETARKLPKCSHTFHQPCVDRWFIDHGSCPVCRQDV

SEQ ID NO: 64336 - protein, 263 aa, Zea mays
  Clone ID: LIB3632-055-C3_FLI.pep
SNRCTQPCMTALVRLAGRAASRSRVGIAAAAAPPPVGLSVQRRRAFQGVRMETGGSKGGRGALVVLEGLDRSGKTSQCARLLSFLKGKGYNAEGWRFPDRATSVGQMISSYLANDSQLDDRTIHLLFSANRWEKRALMESKLLSGTTLIVDRYSYSGVAFSAAKGLDIEWCKAPENGLIAPDLVIYLDVQPEKAAERGGYGGERYEKIEFQKKVAEHYHSLRDSTWKVVDGFLPMETVEEKLRDLATSCIQDCQGNPLTNLAW

SEQ ID NO: 64337 - protein, 543 aa, Zea mays
  Clone ID: LIB3632-056-C6_FLI.pep
GGGFPANALGGGAAPAEMGSKYTRGCCGWLIVALIAALVATAAMFAIMKRKPGGRHIKPLPVPGPPGAIDSKYGDALGVALQFFQVQKAGKLENNQIPWRGDSALTDGKEAGLDLSKGMYDAGDHMKFTFPMAFTATVLSWSVLEYGDQMSAAKQLDPALDALKWITDFLIAAHPSDNVLYIQVGDPDLDHNCWERPETMTEKRPLTQINKKTPGSDVAAEAAAAMAAASMVFKSRDTTYSDVLLQHAQKLFTFADTYRGLSSESYPKLQDFYNSTSYVDELLWAASWLYHATGDQTYLSYVTVQNGKSYADWGRPTWFSWDDKNPGTQVLLSRLNFFGSKQISNAENEGLKMYRDTAEAVICGLIPDSPQATASRTGGGLVWISGWNSLQHATNAAFLSVVYSDYMLSTRTAAVQCSGKYYSPTDIRNFAASQANYILGDNPMKLSYLVGYGSSYPKQVHHRGASIPADAKTGCKGFEYLHSPSPNPNVATGALVGGPFQNDTFVDSRDNAVQTESSTYNSGTLVGLLSGLVTTSSVVQSFT

SEQ ID NO: 64338 - protein, 454 aa, Zea mays
  Clone ID: LIB3632-057-D11_FLI.pep
APPSTYARKRVKRPRLAFRFGSSPSRPSSSGDRSLGILSIWLLCVDWRPCELAEAARFMAVAERFGTRWPPSRFFVAVLLVLLTDGGAAWKRAEGLSLGINYGQIADNLPSPARVSYLVRSMQVSKVKLYDADPYVLSAFVDTDVEFVVGIGNENVSAMVEPAAARAWVERHVQPYLPGTRITCITVGNEVFKGNDSALKASLLPAMQSVYQALTAVGLQGRVNVSTAHSLDIMGSTYPPSAGAFGPDAVPYLQPLLAFLSAARSPFLINCYPYFAYKADPGNVPLEYVLFQPDAAGVTDAGTGLRYDNMLYAQVDSVYAAIQKLGHTDVDVKVSETGWPSRGDPDEAGATPEYARTYIGNLLQRIEMGQGTPMRPSAPVDVYVFALFNENLKPGPASERNYGLLYPDGTPVYDVGLRGYLPPMDYSQGTREAVRFFAFISFVAIASITLSLSS

SEQ ID NO: 64339 - protein, 344 aa, Zea mays
  Clone ID: LIB3632-058-D7_FLI.pep
HRSTIFPFPFPSQFPAVSFPPPPFPISTRFETGYQMHDRSHKPQPAEAGNGGPAGEGGGGNVDRVLFKNLVEMVPLVESLMDRRVNPAYSRRASLVYTPAPPKKASDLKSVKLPQSVSAKKRRDPGDIAKKSTPDSNGDNGSVVPLSLSGAENMPKDEVAVLSEQINDLQKKLLEKEEALRSAESSVTEMNAAYATIDELRRLVADKEALIRSTNSQLHDAKIMLADKQASLEKLEWEVKMSNKKVEDLQGDMSNMGFEISSLMVFFEKISENVSGDSYDDIIPSSYELETLQSMSEIDKIEVDKLDKERVTYAEALAAARENPDEEHLNIAAEARSRLQVLVL

SEQ ID NO: 64340 - protein, 210 aa, Zea mays
  Clone ID: LIB3632-058-F4_FLI.pep
LEFPASASAPHRLHLRPPPPRPTAGRMEAPGSPYASSPESAPKRAPRSPPQQQQSPSEEGDDKEKPTHLRFLVSNTAAGCIIGKGGSTINDFQSQSGARIQLSRSNEFFPGTNDRIIMVSGLFDEVMKAMELILEKLLAEGEEFNEAEARPKVRLVVPNSSCGGIIGKGGATISRLLKNHMLESKSRHRITTMLVCMIGLLQSQGPLITK

SEQ ID NO: 64341 - protein, 167 aa, Zea mays
  Clone ID: LIB3632-058-F7_FLI.pep
ESLDQPIRTYPPPPFPPPHLARRSRPCRSPRTSPIRFTKGLRPAAMAAKLAQLRTQVTRAAEFASKHGCSYYKEVMEKNKQYVVQPPTVEKCQELSKQLFYTRLASLPGRYESFWKELDCVKQVWKNRKDLTVEDLGIASLFGVELYAWFCIGEIVGRGFTLTGYKV

SEQ ID NO: 64342 - protein, 241 aa, Zea mays; identical to SEQ ID NO: 47787
  Clone ID: LIB3632-060-F6_FLI.pep

SEQ ID NO: 64343 - protein, 584 aa, Zea mays
  Clone ID: LIB3634-002-E12_FLI.pep
AVAQSGRFWKEEISASDSTCERSRRVEGFGRSRYPPAIRRRRATKGLHALRTEVKLVNSRGLSQKFLAGMDRFGNYKNYQTRRYEDGDDDAKQMLRPWEVPKGDWFPSDFIVGAATSAYQIEGGWNEGGKGPSTWDHFCHSFPSLIADGSNGDVAANSYHMYHEDVRLMKEIGLDPYRFSVSWSRILPKGTLEGGINQDGINYYKKLINLLLAEGIEPFITIFHWDTPQALVDKYGGFLDRRIVKDYTDFAMVCFENFGDKVKNWLTFNEPQTFSSFSYGIGLCAPGRCSPGQKCANPIGNSLIEPYIVGHNLLLAHAEAVDLYNKHYKDENGRIGIAFDVMGRVPYEKSAFVDQQAQERSWDINLGWFLEPLVRGDYPFSMRSLVRDRLPFFTVEEQERLVGSYDMLGLNYYTARFSKHIDISPNYSPALNTDDAYASQETYGPDDKPIGPWMGNPWIYMYPDGLKDLLMIMKNKYGNPPIYITENGMGDVDNGDLPMEDALNDQKRINYLQRHIAVIKDSMELGADVRGYFAWSLVDNFEWTAGYTERYGIVYVDRNDGYKRYMKKSAKWLKEFNTEKAGSA

SEQ ID NO: 64344 - protein, 505 aa, Zea mays
  Clone ID: LIB3635-002-D10_FLI.pep
MPVRKGFFSSLVPDGSMKALSKYTEMVDNIIRTQAEKLQQASEITRVRLKEMDLPDSILSLEGNITLPLDLKEDVEAVQISGGPAGLESELQQLRDLSRVNQELLVQTEELLQKEANEDAQFRTQFGSRWTRPQSSTLTKNIQDRLNLFASNLKKAADSDSLIERGVKENYPLMSILDKRPIESALPSISRPIMSLDGNEDAIVGALKQSLRQLESLGAHRAGLEDMLKEMKRKDDILPKLMAGVGSHDDLFKKEIAKYDPICADIADNIVAQEQLLLQIQAQNEQFASVFNIEDYKAARERCYKQIAAAVAKYREFKKNINEGLNFYVTLQEAIGKIKQQCSDFIMTRNIQCREMIEDVQRKLAGFSFSSSSHSSMQRNASVPPDQSSPSPPPHAQAPYASPPGVDSRLGYSQTEPRPAYSQPYPPSYGAPPQQPSYGAPHPGQYQPPAHQPPPGHDYGQPAYPGWRGPYYNAPQPQQSAPYPQPPYNAPGAYPPHQSNYYRPQ

SEQ ID NO: 64345 - protein, 528 aa, Zea mays
  Clone ID: LIB3636-001-D1_FLI.pep
PRIESFNFLLGASSERVICNDGIVLALAGVFGTMGDYYYRRRSPHLLPAAVLALLAVVVVVSSSLPSAAAAGAGRNVITHIKGFEGPLPFHLETGYVEVDEEHGARLFYYFIESERNPAEDPLILWITGGPGCSALSGLLFEIGPLKFDVAGYTEGFPRLVYFEDSWTKVSNVIFLDAPVGTGFSYSREEAGLNVSLTESGRQHHVFLRKWVAEHPEFASNPLYIGGDSYSGYTVPVTAMDIATSSDDEEPPRLNLVGYLVGNAATDDRYDTGGKVPFMHGMGLISDELYEAAKQGCGGDFYVAPDPTNARCASAMMAINMVTFAVNPVHILEPFCGAAVRAGGGSIFQGYGGGARRSMLVRDDVRHPGFFAKQRLGLPVECRDNGYRLSYIWADDPEVREALGILEGSIGSWSRCTMLSHYRHDVTTVIPYHVNLTKAGYRALVYNGDHDLDMTFVGTQEWIRSIGYPIVSDWRPWFANRQVAGFTRTYAHNLTFATVKGGGHTAPEYRPKECQAMLDRWTSAAGQL

SEQ ID NO: 64346 - protein, 451 aa, Zea mays
  Clone ID: LIB3636-002-H10_FLI.pep
VRCRRTAAMGGGDDAAAGVGDGFAWDADSQLYYHASTAFYHDPVAGWYYSSRDSQYYVYKNGNYMPLTTDLENEPTANHPYDEANQDVLEHSSGLETTILDNENEIPGPPSEWMEETLINLYLSGYSNNEVNAESSLVIAHSNEEDRIETTGNKLDSLTSDSASASLHDATSQQTEVETETKNSAYVYESLGEEEEKWHAQYGQVERSNDDQHLPPTIDIWDWDVVQDHVNKGQPVVRLVGCLSRGSNKLHPSLPTRGGLVRTAPVREVHLDLVQVSTGKLYRLRNPSRKYLATLSAYDSSNPTKDWGFPDINLNKQSTAKCQSEVLADKSCGGGSVSAANTMEPNTKVYRDRAAERRILHRGLGVGPGQKQSNTNNFDEYEESIEDMDSMGVASADLNFQSSGLLSAKRIMENMGWKQGEALGKSRKGIVEPIQPSINKHGAGLGWRQTR

SEQ ID NO: 64347 - protein, 285 aa, Zea mays
  Clone ID: LIB3637-197-F8_FLI.pep
RLSFESWLEQSRITSGESSSQGFCTPKKRPYVPTVCASFIPICVDRRKPVIGMSFHSCNDAEEFYKSYAHDGGFSVRVGSQNKALGEVINKRYMCSRAGFKKVKEADDPPKNQKNHALTRCGCDANMYVKLGPDKKYHITSMVEEHNHPLCSPNKIPFLRSNRVVSQRAKNTLFTCHKASIGTSQAFRILQVSDGGFNNIGCTKRDLQNYYRGLREKIKNADAQLFVAQLERKKEANSAFFMILLSTRRESCSTYSGLTLQAEKIIHFLVILCHLIPHIAQTTTI

SEQ ID NO: 64348 - protein, 187 aa, Zea mays
  Clone ID: LIB3637-213-B12_FLI.pep
PRSGVRPSGGERDWAAAVLEPVRWMRMLCRELGATFVAGVVLVYGLSQGFAGSFFRVASDYYWKDVQQVQPATVQFLSVFFFIPWVLKPLWGIMTDVFPVCGYRRRPYFLFSGILGTVSAAIVAVTIGLPMSSAVLCLMGISTAVAIADVTIDASIAKNSIDKPALAPDMQSLCAFSSSLGALVGYG

SEQ ID NO: 64349 - protein, 134 aa, Zea mays
  Clone ID: LIB3637-223-D10_FLI.pep
SAGAEMLVYQDLLSGDELLSDSFTYKELENGVLWEVEGKWVTQGPVDVDIGANPSAEGGEDESVDDTAVKVVDIVDTFRLQEQPPFDKKSFVSYIKKYIKNLTAVLEPEKADEFKKGVEGATKFLLSKLKDLQL

SEQ ID NO: 64350 - protein, 233 aa, Zea mays
  Clone ID: LIB3637-226-F8_FLI.pep
VYMPLALNINPKKYLQALFSACQNLADEASSLPSEQKEIKLYKQHVDNLHLLAGNYDSVIICLGAKACSLPELANKLPLRTCRGVIAEFQLPSTTVEEYDSQSASILSDAWLAFQGPRTVSIGSTWQWISENDSSTVSDEESLTAIEELLPKASGVYPRISKWDFVRARAGIRAMPPLTTNGSLPLLGCLDDLLGNKSNCTFWLVGGLGARGLLYHGLVGKLTAKAAISCNEN

SEQ ID NO: 64351 - protein, 392 aa, Zea mays
  Clone ID: LIB3637-227-H10_FLI.pep
LPRNSFFFFPFTGERMALPTANPGFRLGCQESPAMGLRSAPRLALRRPGAVSGHRSRTGRGKFPVASTSLDDYLPMRSTEVKNRTLTGDITSLRLITAVKTPYLPDGRFDLEAYDSLINMQIEGGSEGVIVGGTTGEGHLMSWDEHIMLIGHTVNCFGTRIKVIGNTGSNSTREAVHATEQGFAVGMHAALHINPYYGKVSTEGLISHFEAVLPMGPTIIYNVPSRSGQDIPPQVIETLSDYPNMAGVKECVGHERVKCYTDKGITVWSGNDDECHDSRWKYGATGVISVASNLVPGLMRSLMYEGENALLNEKLLPLTKWLFCLPNPIALNTALAQLGVARPVFRLPYVPLPLDKRIEFVRIVEAIGRGNFVGQQEARVLDDDDFVLISRY

SEQ ID NO: 64352 - protein, 288 aa, Zea mays; identical to SEQ ID NO: 61824
  Clone ID: LIB3637-241-A12_FLI.pep

SEQ ID NO: 64353 - protein, 545 aa, Zea mays
  Clone ID: LIB3689-002-F4_FLI.pep
LAMAPPTEDCGWLLYLSLAAKCGDPQRLLGFAAVFVAACVVTSLLHWASPGGPAWGWYWWTRRAGLGIVRAAIPGPRGLPVVGSMGLMTGLAHRKLSAAAERQASRRRLMAFSLGETRVVVTADPDVARELLASAAFADRPVKESAYGLLFHRAIGFAPHGAYWRALRRVASAHLFSPRQIAASAAQRAAIARQMVDATTTAAAHAPVVVARRFLKRASLHNVMWSVFGRRYDLMADSREAEELKALVDEGYDLLGQLNWSDHLPWLARFDLQKTRARCCALVPRVNRFVGNIIGEHRARLGRGGDTAVMDFTDVLLSLQGDDKLSDADMIAVLWEMIFRGTDTVAVLIEWVLARLVLHQDVQSKVQEELDRVVGLGQAVTESDTASLPYLQAVIKEVLRLHPPGPLLSWARLATSDVYVSGYLVPAGTTAMVNMWAITHDPSLWPEPMEFRPERFMGPAAEDVPIMGSDLRLAPFGSGRRSCPGKSLAVATVGFWVATLLYEFKWLPPSDEPRGGGVDLSEVLRLSCEMAAPLEARVVPRHAVC

SEQ ID NO: 64354 - protein, 773 aa, Zea mays
  Clone ID: LIB3689-002-G4_FLI.pep
AHSSGSSSPPAPVHHLLPPRGPNQPLLVSTYLCNNLLAYYASVGVSRGCFREARCLFDDIPYARRNAFTWNSLLSLYAKSGRLPDAHVVFAEMPDRDAVSWTIMIVGLNRSGRFWDAVKTFLDMVSEGFAPSQFTLTNVLSSCAAMEACGVGRKVHPFVVKLGLSSCVPVANSVLYMYGKCGDAETARAVFERMQVRSVSSWNVMVSLYTHQGRMELAVSMFENMVERSIVSWNTIIAGYNQNGLDGMALKFFSRMLSASSMEPDAFTVTSVLSACANLRMLKMGKQMHSYILRTGMPCSSQIMNALISTYAKSGSVETARRIMDQAVVADLNVISFTALLEGYVKLGDTKQAREIFDIMNNRDVIAWTAMIVGYHQNGQNDEAMELFRSMILIGPEPNSHTLAAVLSACASLAYLDYGKQIHCKAIRSLQEQSVSVSNAIITVYARSGSVPLARRVFDQICWRKETITWTSMIVAMAQHGLGEQAVVLFEEMVRVGVKPDHITYVGVLSACAHAGFVDKGKRYYEQMQNEHGIVPQMSHYACMVDLHARAGLLTEAHEFIQRMPVAPDTVVWGSLLAACRVRKNADLAELAAGKLLSIDPHNSGAYSALANVYSACGRWNDAARIWKLRKDKGVKKETGFSWTHVRGKVHVFGADDVLHPQRDSIYRKAAEMWEEIKKAGFVPDLNSVLHDVDDELKEELLSRHSEKLAIAFGLISTPEKTTLRIMKNLRVCNDCHTAIKFISKFVDREIIVRDATRFHHFRDGYCSCKDYW

SEQ ID NO: 64355 - protein, 464 aa, Zea mays
  Clone ID: LIB3689-204-B6_FLI.pep
SILLVRVLIRFGFGRVWAGRLYAMEKGLRIPQKERTKTTNSILISLMNQLEKDKKSLTLGPDDNLHLEGFALNVFVKADKQDRAGRADINTAKTFYAASIFFEILNQFGELQPDIEQKQKYAIWKAAEIRKALKEGRKPEAGPPGGDKDEAPVSTTTISQDMGQSPSFSSVHQGSEASPRPVNMDFSRRDSFSAVQPGNNVPHQSTEFNDHPSTQLPYSPPPPSQSQHPSPSQSYSSPSYQATTDYPSSDFHKPSPNYSTPGYTSTDFPTNEVHKPPSNYSPPPYTRTDRPSNDGYNPHSNGKPDVSAYPQAYQPSPYTFDPQHNSQNYYSTEAPAVPYNYPNFQSYPSFQDNTSASVLTHQSSFYPESDDPAATSHTPASNSSVPTHYHPTADCSPQVTPPAAPPASQYRYDSSYQPEVEKIAEAHKAARFAVGALAFDDVSVAVDHLKRALDLLTNPSAEPH

SEQ ID NO: 64356 - protein, 466 aa, Zea mays
  Clone ID: LIB3689-204-H2_FLI.pep
GEVLLCVCFVQTKKQRREAGAMRRRDRHHHHRRQPRDERCVSCTTFNILAPIYKRMDNENCRESQYRAYWFSRNEKIIDRLLADHSSIICLQEVWLGNDELVDMYQKRLGDANYMLFKLARTNNRGDGLLTAVHRNYFNVLNYRELLFNDIGDRVAQLLHVESAMPFLQNRSTSCVHQQSLIVNTHLLFPHDHSLSIVRLRQVYKILQYIEAYLEEHKLGPLPIILCGDWNGSKRGQVYKFLRSQGFVSSYDTAHQYSDSEEDAHKWVSHRNHRGNICGVDFIWLLNPDKCRKPLKTSWNEAVFGIIKYFLQVAFLSEENAFALLKADSLYDHITYSSFYRALCQLGMVHPDRLKSEEIEELWSEADRDGDGVINYKEFQCIWSPNCCSQEEDTEIDITDESLDTFEANNEAFGFTVKEAVLFPPEVEKGMWPENYSLSDHAPLTVVFSPIRMPCSPRNRGGALAI

SEQ ID NO: 64357 - protein, 638 aa, Zea mays
  Clone ID: LIB3689-207-C8_FLI.pep
AGFLSAGSMAKDYPASPKAQQLQESKKQRLTYILVVSALCIAFYVLGAWQNTTLPKPIGNSAITRVGCDPTAATTQSSGSVPSFGPGSGEVLDFDAHHRLTINNTDGDGELQQFPACPLNFSEYTPCEDRRRGRRFDRNMLVYRERHCPGKDEQVRCLIPAPPGYRTPFKWPRSRDYAYFNNIPHKELSIEKAVQNWIQVEGDKFKFPGGGTMFPRGADAYIDDINKLISLSDGKIRTAVDTGCGVASWGAYLLKRNIIAMSFAPRDTHEAQVQFALERGVPAIIGVMAKQRLPYPSRAFDMAHCSRCLIPWDEHDGLYLAEVDRILRPGGYWILSGPPINWKTHHRGWERTKDDLKREQDKIEDVAKSLCWNKVVEKGDLSIWQKPKNHLECANIKKTYKTPHICKSDNPDAAWYTQMEACVTPLPEVSNQGEVAGGAVEKWPERAFLVPPRIKRGMIPGLDAKKFDEDKKLWEKRVAYYKRTIPIAENRYRNVMDMNAASLVKYPVWVMNVVPVNSDRDTLGAIYERGFIGTYQDWCEAFSTYPRTYDLLHADNLFSIYQDRCDITGILLEMDRILRPEGTAIIRDTVDVLTKVQAITKRMRWESRIMDHEDGPFNPEKVLMAVKTYWTAEAEEEH

SEQ ID NO: 64358 - protein, 512 aa, Zea mays; identical to SEQ ID NO: 37457
  Clone ID: LIB3689-209-G1_FLI.pep

SEQ ID NO: 64359 - protein, 661 aa, Zea mays
  Clone ID: LIB3689-212-E2_FLI.pep
CSQWLPASPSSRRSAAPRLRCWRPEMMTRCGVQLLVARGISSSPCLSRRINQTESEIVRMFHPPIRQSEEAIATIVPRYTYSMRVLDERFIRILKIFKWGPDAEKALEVLMLRVDHWLVREVMKTDVGVNVKMQFFRWAAKRRNYEHDTSTYMALIHCLEVVEQYGEMWKMIQEMVRNPICVVTPTELSDVVRKLGNAKMVSKAIAIFYQIKTRKCQPTAQAYNSMIIMLMHEGQYEKVHQLYNEMSTEGHCFPDTMTYSALISAFCKLGRRDSAIQLLNEMKEIGMQPTTKIYTMLIALFFKFNDAHGALSLFEEMRHQYCRPDVFTYTELIRGLGKAGRIDEAYHFFCEMQREGCRPDTVFMNNMINFLGKAGRLNDATKLFQEMETLRCIPSVVTYNTIIKALFESKSRASEVPSWFERMKASGISPSSFTYSILIDGFCKTNRMEKAMMLLEEMDEKGFPPCPAAYCSLIDALGKAKRYDLACELFQELKENCGSSSARVYAVMIKHLGKAGRLDDAINMFDEMNKLGCAPDVYAYNALMSGLARTGMIDEALSTMRRMQEHGGIPDINSYNIILNGLAKTGGPHRAMEMLSNMKQSTVRPDVVSYNTVLGALSHAGMFEEASKLMKEMNTLGFEYDLITYSSILEAIGKVDHECDP

SEQ ID NO: 64360 - protein, 511 aa, Zea mays
  Clone ID: LIB3689-215-A11_FLI.pep
SSLKLKIMSWLNKIFKGSVNRVSRGHYDGDWHEGHSSDHTRDTYDDSDNEDIDRAIALSLAEEDQNKGKSVAIDTDYNLEEDEQLARALQESLNAESPPRQNVPIEDVPVPQWNIPVERVPPRQYVPANEPTPHVYPRGGSRICAGCQNPIGHGRFLSCMDSVWHPQCFRCFACNKPISEYEFAMHDDQPYHKSCYKEFFHPKCDVCNNFIPTNRDGLIEYRAHPFWMQKYCPSHEDDGTPRCCSCERMEPREIKYITLDDGRKLCLECLNSAVMDSPECQHLYMDIQEFFEGLNMKVEQQIPLLLVERQALNEALEAEKNGHHLPETRGLCLSEEQVVRTILKRPQIGPGNRILDMIIGPYKLSRRCEVTAILILYGLPRLQTGSILAHEMMHAYLRLKGFRNLSIEVEEGICQVLSHLWLESEIIAGSSSNVASSSEASSSSSSSAPTSSKKGAKTEFEKKLGAFIKHQIETDSSEAYGGGFRAGYPAVERYGLKRTLDHMKLTGSFPY

SEQ ID NO: 64361 - protein, 543 aa, Zea mays
  Clone ID: LIB3689-216-G5_FLI.pep
PTASHLCDRRDHSPSKFSSAHLTTPRPRPRRRLRPPDAAAMAPAVGLKRSATQTITLPPPDTRLAVRDVMRSTIPSQPAVAPASTERQAPAAALQGFLCLEEVDGRRWSYVVDGGAAKGRSSGGAVSAGAAVRAVPLQSPLPPAEEIMAFIRSYVVPEGFPDSVTPSYVPYMTWRALKHFFGGAMGVFTTRTLLSSVGVSQSKVTPGAIAINWILKDGAGRVGKMLFARQGKKFDYDLKQLRFSSDLLLEIGAGIELTTAAFPQFFLPMACVANVVKNVAAVTSTSTRTPIYKAYARGENIGDVTAKGESVGNIADLLGTGLSIFISKRNPSLVTSFAFLSCGYLLSSYQEVRSVVLNTLNRARFTVAVDSFIKTGHIPSLKEGNSQETIFNPPWRHEPVAIGSRFGEAFQEPASFLAIRPLLEDERYMVTYNPTKDKVYALLKDQAKSDDIIKAAFHAHVLLHFINASHARRLKQKQKQANPDRSEYLYSRNMDFLAHIAESCKIVSSSYGTFKKKAREQGWIMSESLLNPGKARLCAAKPQ

SEQ ID NO: 64362 - protein, 251 aa, Zea mays
  Clone ID: LIB3689-218-B7_FLI.pep
AGVEGEIREAMSFSAARVSEHGGEFEEARGMPAEVSWEMLDKSRFFVLGAALFSGVSAALYPAVVLKTHLQVAAPAQAAASAAAAAILRRDGPRGFYRGFGASLAGTVPARALYMAALEATKSVVGSAALRLGVAEPAASAAASAAGGVSAAVAAQVVWTPVDVVSQRLMLQTAPLAAARYRGGTDAFRKILLADGVRGLYRGFGISVLTYAPSSAAWWASYVTAQRLLWRAVGPAAHDSRGAAIALQGAS

SEQ ID NO: 64363 - protein, 410 aa, Zea mays
  Clone ID: LIB3689-218-D2_FLI.pep
PVPTTATARQRSTGCRPLAAASRENPRTRKSPPSSPPSMGGAAGEAMWAAVVAATVVFLAVEVSGAASALPRFAEAPEYRNGEGCPAAAAGVCDPGLVHIAMTLDAHYLRGSMAAVYSLLKHASCPESIFFHFLAAEAGAVDGADPEPELLRRAVAASFPSLRFEIYPFRAEAVAGLISASVRAALEAPLNYARNHLADLLPRCVPRAIYLDSDVLAADDVRRLWETRLPAAAVVAAPEYCHANFSRYFTPAFWSDPVLGARVFAGRRRPPCYFNTGVMVIDLRRWRAGNYRQRIERWMEIQKQKRIYELGSLPPFLLVFAGEVEAVDHRWNQHGLGGNNVHGSCRPLHAGPVSLMHWSGKGKPWDRLDAGRPCPLDHTWKSYDLYIPGDSGGAASPASGPALSASVFSW

SEQ ID NO: 64364 - protein, 497 aa, Zea mays
  Clone ID: LIB3689-218-E4_FLI.pep
EHHHHHSSPLLSLLARPVGSSTHTREKERHKEMALLLLLLAVLGVVLASSLLLRWNELRYSRRRGLPPGTMGWPLFGETTEFLKQGPSFMKQRRLRYGSLFRTHILGCPTVVCMEPELNRRALASEGAGFVPGYPQSMLDILGPNNIAAVHGPLHRAMRGAMLALTRPHMIRAALLPKIDAFMRAHLHGWAGRRVDIQEMTKEMALLSALRQIAGISAGPHSDALKAELYTLVLGTFSLPINVPGTNYSKGLQARKKLVAMLRQMIADRRSSGCARDDMLDALLSGNEGTRAKLSDDQIIDLLITLIYSGYETVSTTSMMAVKYLSDNPKALGQIRKEHLDIRKAKSPEDPLDWNDYKSMTFTKAVIYETLRLATVVNGLLRKTTHDVEMNGYVIPKGWRIYVYTREINYDPFLYPEPMVFNPWRWMETNLESHPHFMLFGGGARMCPGKEVGTVEIATFLHYFVTRYRWEEEGNNTISKFPRVAAPNGLHIRVQDY

SEQ ID NO: 64365 - protein, 968 aa, Zea mays
  Clone ID: LIB3689-218-G8_FLI.pep
AAHLYELRMSVSMKDLDPAFRGSGQKDGLEIWRIENFKPIPAPASSYGKFFMGDSYIILKTTALKNGSLRHDIHYWIGKDTSQDEAGTAAILTVELDAALGGRAVQYREIQGNETEKFLSYFRPCIMPQPGGVASGFNHVEVNEQDYKTHLYVCHGKHVVHVNEVPFARSSLNHDDIFILDTKSKIFQFSGSNSSIQERAKALEVVQYIKDTFHEGKCEIASVEDGRMMADAEAGEFWGFFGGFAPLPRRAPAEGNEKHDETAFKLLCFDQGKLEPVDCQSLAHELLETNKCYFLDCGAELYVWMGRITSLTERKGASEAAEKLLSDSNRTRTHIIKVIEGFETVTFKSKFKEWPQTPELKLSSEDGRGKVAALLKRQGLNVKGLMKAAPTQEEPQSYIDSTGNLQVWRVNDKDKVQLSPSDQSKFYTGDCYIFQYTYPGDDKEECLIGTWFGKKSIEEDRVIAVSLASKMVESAKFQAVQARFYDGKEPIQFFVIFQSFQVFKGGLSSGYKRFIAENGIDDESYSEDGLALFRIQGSGPENMQAIQVKPVASSLNSSYCYILHNGNTVFTWAGNLTTALDQELMERQLDVIKPNTQSRSQKEGSETDQFWSLLGGKSEYSGQKMVRELESDPHLFSCILSKGNLKVKEIHHFTQDDLMTEDVFILDCHTSIFVWVGQQVDVKGRLQALDAGEKFIVLDFLMENLARETPVFTVMEGNEPPFFTRFFTWDSAKSLMHGNSYQRKLAIVKGGGAPALDKPKRRTTVYSGRSTTQDKSQRSRSMSFSPERVRVRGRSPAFTALAANFESSSNRNLSTPPPVVKKLYPKSVTPDPSNTASKSPAIAALAGSLDHPSQTPALEFMKGGSESEKPKQEGDGKGVDTVATRVESLTINEDVKENEPEDDEGLPIYLYERLKTTAADPVTEIDITRRETYLSSTEFKEKFGMTKEAFSKLPKWKQNRLKIALQLF

SEQ ID NO: 64366 - protein, 245 aa, Zea mays
  Clone ID: LIB3689-220-D9_FLI.pep
PRLPSIQLDQGTNREANAARVARSVAPIGFTGGGVGMEAQNGSCGGAPVVLNVYDLTPMNNYLYWFGLGIFHSGIEVHGMEYGFGAHQFPASGVFEVEPKSCPGFIYRRSVWMGTTDLSRAEFRSFIENLAGKYNGNTYHLISKNCNHFTDDVCKSLTKKSIPGWVNRLARVGSFFNCLLPESIQVSTVRHVPTQSAFSDDDMDSVSSSVLGDSDLGELDQHLLPSSTADVHSIDVPPNLAKDLL

SEQ ID NO: 64367 - protein, 348 aa, Zea mays
  Clone ID: LIB3689-220-G11_FLI.pep
LEGRASAAAKKKSSRETLLTLTEGDMMRKLRELLQKSDNRVCADCGAPDPKWASANIGVFICLKCSGVHRSLGTHVSKVLSVTLDQWTDDEINSMIEVGGNSYANAIYEAFLPEGYQKPHPDSSQEERADFIRSKYELQEFLKPSLRLVSSNKGSLEATSTSSRKHKDNTVSLSASFSSEAGMVEFIGILKVKVIRGTKLAVRDLMSSDPYIVLTLGQQKAKTSVSKRNLNPVWNEELKLSVPQQYGPLKLDPTQQVFDHDMLSKDDEMGDAEIDLQPMISAATAFGDPDLLADMQIGKWLRSPDNALARDSAVNVVGGKVKQEVSLRLQNVESGEVELELEWIPLNQ

SEQ ID NO: 64368 - protein, 548 aa, Zea mays
  Clone ID: LIB3689-223-H4_FLI.pep
FFFPKRGSPQAAHGTPPTRPKSPMELPAPSSASFFLVAVVAGATLFLVTVLRLRARSTRKYRLPPGPRPWPVIGNLNLIGPLPHHSVHELSKRYGPLMSLRFGSFPVVVASSVDTARLILKTHDLAFIDRPQTAAGRYTTYNCAGLFYQPYGAYWRQARRLCQAELFSARRLMSLEHVRSDEVRAMLSDLRAASSAPAGGHDAVTLREHLYMVNLSVVSRMLLGKKYVVEGSSSPATPEEFRWLIDEHFFLNGVLNVADMIPWLSPLDPQGYVKRMKRSAKMLDRFLEHVVDEHNERRRREGEDFVAMDMMDVLLELADDPSQLEVPITRDNVKGFTLDLMGGGTDTSAVTVEWAMSELLRNPEVLAKATEELDRVVGRDRLVAEGDIPSLPYLDAVVKETLRLHPVAPLLTPRLCREDVSVGGYDIPAGARVFVNAWAIGRDPAVWEAPLEFRPERFAGSSVDVKGQHFELLPFGSGRRMCPGMGLALRMVPTILGNLLHAFAWRLPDGVAAEELGMEETFGLTVPRLVPLQAVAEPKLPARLYAAL

SEQ ID NO: 64369 - protein, 407 aa, Zea mays
  Clone ID: LIB3689-224-H11_FLI.pep
EKRSVAPAPAAESEPQSQREGEMASGDGDGGDGKKQSRRQLWAACLPRPGCFTVSAADEGPSAHGAGQGESKPKPTHLVVTVNGIVGSAENWRFAAKHFIRKHPEDVVVHCSGCNSAARTFDGVDVMGRRLADEVASIVDSRPELCKISFVAHSLGGLIARYAIALLYESETQKDSHEKFENHAVDYSSNQHSIGKIAGLEPINFITFATPHLGTRSHKQIPLLRGSNKLEKMAYRLSWIAGRSGKHLFLKDTEDEKPPLLLQMVTDYGGLHFMSALRSFKRRVAYSNVCNDFIVGWRTSSIRRQHELPEPRSFINNNRYPHIVYVEGPKIEDVDFLDAMIYEAKTTSEMEEVMLKGLNRVSWERVDVSFKKSRQRIFAHSTIQVKTYFLNSDGADVINHMIDHFVY

SEQ ID NO: 64370 - protein, 449 aa, Zea mays
  Clone ID: LIB3689-232-H2_FLI.pep
SYPFRPLPQLRTSVAARPNRRRRPPLVLSRNPGMGNKKSKRSRSKKNKTNADQALALDYVRAWVLPVPPPLKPSAADVDDFLPVQATRRGDVLFELHSHSNHSDGFLSPSALVERAHRNGVKVLALTDHDTMAGIPEAVSAASKFGMRIIPGVEISALYNPREVAGACETVHILAYYGMCGPSRCDELDGMLLNIRDGRYLRAKNMLEKLTTLKVPIKWEHVNKIAGDGVAPGRLHIARAMVEMGYVENLRQAFNKYLGDDGPAYARGSEPFAETVVQLISRTGGFSALAHPWSLKNPDAIIRSLKGAGLNGMEVYRSDGEVNGFSELAEKYGLLKLGGSDFHGRGGKDESDVGTVKLAITTLCCFLKMARSIWSSAMKDILLKFAEEPSAANLGNMLKFGRLTKFAGFSPINNGIHVVDFCLSSWSSNDDIEDVELEEVRLKLAHYAE

SEQ ID NO: 64371 - protein, 243 aa, Zea mays
  Clone ID: LIB3689-233-E4_FLI.pep
STFFQALKYVSFPVQTLAKCAKMIPVMIWGTIIMRKKYGGKDYFFAVIVTLGCALFILYPAMMDVSPFNRGRESTIWGVSLMFGYLGFDGFTSTFQDKLFKGYDMEIHNQIFYTTVCSCLLSLSGLILQNHLIPAVDFMFHHPDCFSDVLILSSVATASQFFISYTIRTFGALTFATIMTTRQLVSILLSCIWFAHPLSWMQWVGAAIVFGAIYAKSFLRTKPQKTAVASPSHGSSPNPANSS

SEQ ID NO: 64372 - protein, 318 aa, Zea mays
  Clone ID: LIB3689-236-A4_FLI.pep
SSLEIKNSSIGVSARSLSRKLLRRVLSRLLWTRWRRRHPWPRLSEWWRRHSRPHSRRWRPRHPGPHLGRPHRRRSPHVLLWRCPGERSRRRPRRAEWHRHLRRHSRTHWRRHPLRRAHDLRVRHRLGRQVGHRRARDLGLHHARGGSTHAPHRASKTRSCLEQRAGGHAAPSGAADARAGEGSARRRGLGARLVGRRRALDGHGDDLLAAEQEEAERAALLAFAGGLGGLGGREAAELLAVAEDEVHVAVERHELAHELAAVLDRHPHAVVDELEHLGALRVRHGDFAGRVRVSTKLKRGRGGGGGVNMREGFREGLF

SEQ ID NO: 64373 - protein, 299 aa, Zea mays
  Clone ID: LIB3689-237-H4_FLI.pep
KSFEIQRSSSEQAGFQPLSSKKRLAIGCLASDRSDGASTSTTSPATTRHTRSAMRWICFTLWETITVVSPLVFFSRTMASSMFCVEMGSSALVGSSSRSTSGSLARVRARATRCACPTDSSDAGLEHRAGSRSARCSRLFTSASVSFLPRNCGPYRTLSATVPSNMAGSWKSMPTLRRRARTSRAQMSAPSRSTAPGAGSQRRLSARSSVDLPLPLGPMTPMTAPRGTSRWTPRRISSPVASARRRSPRTRILGTAAAPPPSTSSKCSRRPSDEAEPITGMEEDVRGRGGRGWPGADRA

SEQ ID NO: 64374 - protein, 594 aa, Zea mays
  Clone ID: LIB3689-240-F1_FLI.pep
RLKNSTELDDTCIMQPSDIWKAHAGSSQSEASGLDMERNGCNHNCCPSPLQPIASAGQHSESSAAYFSWPTSTLMHGSAEGRANYFGNLQKGVLPGHLGRLPNGQQATTLLDLMIIRAFHSKILRRFSLGTAIGFRIRKGTLTDTPAILVFVARKVHRKWLSPTQCLPGALEGPGGVWCDVDVVEFSYYGAPAPTPKEQLYDELVDGLRGSDPSIGSGSQVASLETYGTLGAIVKSRTGNKQVGFLTNRHVAVDLDYPNQKMFHPLPPNLGPGVYLGAVERATSFITDDVWYGIYAGTNPETFVRADGAFIPFADDFEIASVSTSIKGVGVIGNVKAIDLQSPIGSLIGRQVVKVGRSSGMTTGTVVAYALEYNDEKGICFFTDFLVVGENQQTFDLEGDSGSLIILTGQDGEKPQPIGIIWGGTANRGRLKLKSGQGPENWTSGVDLGRLLDLLELDLITTSEGLQAALEEQRITLAAAAAAATNSTATESSPVAGPQEDDKIDKIYEPLGINIIPRDGSAISTDQPNEDVEELNLMSPMRNGEEGNGDFNNLMDLESENSPDGISIALNLGEREPERLRSVSDSMLDIDLQK

SEQ ID NO: 64375 - protein, 294 aa, Zea mays
  Clone ID: LIB3689-240-G10_FLI.pep
EHGGEQGEEGVVVAGGGRAALHPHHLPRRLHLELRRAASRQDSVLANRSGLSVPDSISAIDRTAQRGMINLFLNVQCTGLRRSGKSCRLRWLNYLRPDLKKEPISKREEETIISLQQSLGNRWSTIAARMPGRTDNEIKNYWNSRIRKRLNAAASRAAGCDGGDSAAEPSGAVAAGGKEDSANAATAVTAQPTPIPARFPVFGCQLPDGAGGGISSPGSGSGKSPQSSTTASMPQNEGDESEASDGGGGDSDMVHFLSFDDLDYPGDLLIDVPGAMDAWESQLCYANPMMSSLC

SEQ ID NO: 64376 - protein, 370 aa, Zea mays
  Clone ID: LIB3689-244-A6_FLI.pep
ELLFLVAGTRGGDLSVEVLVVGPRPERRRLVDAAQEVAEAGGFRGLDDDGAAAAVLLQLGGGGVQELVDVHASSRSRTAADGRRVERDHAAAAGAGRRCGVQGGLGRRRARDVEVDLGAVLAAVAAGRLRLLVEVDQLRRAPCLPALQRQYLGLELLVVGEEGVVVGLDGVQLALQRVVVLLQLLRLPPRPPVLEPDGHLPRLQAQRARQLQLALGLQLVPELEVLLQRPHLLHVQPPLLLPAGLGPVVRQLVLVHAAAAVHLLASDDLHVRPVHRTLPQHYWRHTSEVLERGALRRGEEGVVVRMKGRSSEVVLVVVVVVMLFLMLMIGGCLLHLEEEVWREEGRGCGRHAIAGHWPHQTRRASRMGSI

SEQ ID NO: 64377 - protein, 776 aa, Zea mays
  Clone ID: LIB3689-248-D2_FLI.pep
TLHPMELTLPFVILLALLASPSLPHANGDGGNTTTYIVFMDPARMPSVHRTPAHWHAAHLESLSIDPARHLLYSYSAAAHGFAAALLPGHLPLLRSSPEVLQVVPDEMFQLHTTRSPEFLGLLTPAYQPATGNLEAATHDVVIGVLDTGVWPESPSFAGGNLPPPPAHWKGVCEAGVDFPPSLCGRKLVGARSFSRGLRAANGGAIGVGKRTFRSARDRDGHGTHTATTAAGAVVANASLLGYATGTARGMAPGARVAAYKVCWPEGCLGSDILAGIDAAVADGVGVLSLSLGGGSAPYFRDTVAVGAFGAAAAGVFVSCSAGNSGPSGSTVSNSAPWVATVGAGTLDRDFPAYVMLPTGARLAGVSLYAGPSPSPRPAMLPLLYGSGRDNASKLCLSGTLDPAAVRGKIVVCDRGVNARVEKGAVVKAAGGAGMILANTAASGEELVADSHLLPAVAVGRAVGDKIREYAARGGGRPMAMLSFGGTVLGVRPSPVVAAFSSRGPNTVVPEILKPDMIGPGVNILAAWTGVAGPTGLAKDGRRTRFNIISGTSMSCPHISGVAALMKAAHPDWSPAAIKSALMTTAYTVDNTNSSLRDAADGSVANAFSYGAGHVDPQRALSPGLVYDISTHDYAAFLCSLNYSAPHVQVITKASNVSCGAPNKSRPGDLNYPSFSVVFGQKRKTKPAAALRFRRELTNVGPAASVYDVKVVGPESVAVTVTPARLTFRQAGQKLRYYVTFASRARQGHAKPDFGWISWVNDEHVVRSPVAYTWKM

SEQ ID NO: 64378 - protein, 432 aa, Zea mays
  Clone ID: LIB3689-249-F5_FLI.pep
SMGNCVASGGTTTVTAAGAAGEDGRRRGRRWKAPREEQLGSVPGRIFSNDGRSRTAAVFTQQGRKGINQDAMLVWDGFGGEEDVVLCGVFDGHGPHGHLVARRVRDAMPLKLMSAVRASKAGLDMPAAAWRKAFARAYKTMDKDLRSHATLDCFCSGSTAVTVLKLGSDLYMANIGDSRAVLGSRDGGDGGMVALQLTIDLKPDVPSEAERIKKCRGRVFALQDEPEVPRVWLPFDDAPGLAMARAFGDFCLKDYGVISVPEFFHWSLTEKDQFVILASDGVWDVLSNQEAVDIVSSSPSRSKAARSLVEAATREWKTKYPTSKIDDCAVVCLYLDGKMDHERDSTASMDNMSLDEGSAADPNEAQEQEPALTRNFTVRTVAGSAHEKALSGAVDAVVAGAAHDQSWSGLDGVTRVNSLVQLPRFSDEKAIG

SEQ ID NO: 64379 - protein, 344 aa, Zea mays
  Clone ID: LIB3689-250-A6_FLI.pep
ADRERDKGKDDRRRWAARCGFAVLGIMSTLLVYGVLQEKIMRVPYGADKEFFRYSLFLVFCNRITTSMVSAMVLLASKKSLDPVAPLHKYGVVSISNILTTTCQYEALKYVSFPVQTLAKCAKMIPVMIWGTIIMRKKYGGKDYFFAVIVTLGCALFILYPAMMDVSPFNRGRESTIWGVSLMFGYLGFDGFTSTFQDKLFKGYDMEIHNQIFYTTVCSCLLSLSGLILQNHLIPAVDFMFHHPDCFSDVLILSSVATASQFFISYTIRTFGALTFATIMTTRQLVSILLSCIWFAHPLSWMQWVGAAIVFGAIYAKSFLRTKPQKTAVASPSHGSSPNPANSS

SEQ ID NO: 64380 - protein, 673 aa, Zea mays
  Clone ID: LIB3689-250-E9_FLI.pep
YVCAPSLPPSLCHLPIWAAAMTLPCAGGCEIQASGINYRIAVSTRPLKVWSRSDDDVHSQDHHSVVRQVLRDVSCRARPGELLAIVGPSGAGKSTLLEILAGRLSPSPPPHLLRIDGAAAHSADLRRVSAYVTQQDVLFPLLTVRETLLFSARLRLGARLPSKDMHARVEALLDDLTLRRVAATRIKDLSGGERRRVSIGVEAVRDPPVLILDEPTSGLDSASALHIVGALRAMAEARGRTVLLSIHQPGARIVKMFDSVLLLAAGSVLHHGTVDQLRALLGDAGLHLPPHVDDVEFAIDSVDALRRHASSSLQAPSSGDREGRCTLQRLFQLHGKQVADAPVAVTMMASRYANSRAREVAVLSQRFFKNVARTRQLFACRTVCMLVAGLALGSIFYDLGQDKVAERVGLFAFLLTFLLSSTTEALPIFLQERDILARETASGAYRVSSYAVANAVVFLPFQLALAVVFAAPVYWLAGLRRTAAAFGYFLLVIWLILYTANSVVVCFAAAAPDFVVGNAAIQGVMGSFFLFSGYFIARSAMPGCWVFMHYLSLFKWPFEALLVNEFAGGGRCVVRALGECVATGDEVLRREGLGEECRWRNVGVMVAFMAAYRVLGYAVLRVRCSLALNKKGAVAAGPPGLGLSRRLRRQLAIIGTAAWPSPSSSSTPSLPVN

SEQ ID NO: 64381 - protein, 187 aa, Zea mays
  Clone ID: LIB3689-252-A11_FLI.pep
QASLPSFSNKMSDVEPLVLAHVIRDVLDSFAPSIGLRITYNSRLLLSGVELKPSAVVNKPRVDVGGTDLRVFYTLVLVDPDAPSPSNPSLREYLHWMVIDIPGTTGASFGQELMFYERPEPRSGIHRMVFVLFRQLGRGTVFAPDMRHNFNCKSFARQYHLDVVAATYFNCQREAGSGGRRFRPESS

SEQ ID NO: 64382 - protein, 1032 aa, Zea mays
  Clone ID: LIB3689-254-F9_FLI.pep
TSFEMAEAALLALSKIGSYLGGEAATFIATKFSNLIELPNTVRRIRRELLMMNIFIRKTGASYLSDELLKAWITEVRILAYRVENIMDNFSYHSLQFKQDPKGKRLANGLSYGLVFSGIAADLAQIEKEIEHVSKLKNLWLNSVHELLHTQVSSAEQQFPQYSLPQILKDENLVGLKEEREQLKEWLIPNAPVNMTNIPALKVVTLSGMGGMGKTTLLTSVYDKLKDIFEIHAWLTVSQTYRSVDTLLKELLKIVSASEHTTLVNNDYQKEVIVPVDIDIRDKKQLKPDVIDKMGILDLKSTLKAVLKHKRYIVVLDDVWNRRVHDGISDVFEDCGKESRIVITTRKQDVAALATPGYQLNLNPLDIKDALQLFCTKAFPNKNHFDWTSVLLEHAKDMMKRYEGLPLEKCPLELQELATHIVRKCEDFSVSKCPSELQDLATYTVNKFKGFSLSACPSELQNLATDIVNHCEDLPLVKCPSELQEIAIDIVKKCRGLPLAIVSVGSRLSSRKQIVPVWRQMCNELPCELEKDDQVRGILNLSYYDLPSDLRNCFLYCSLFPEDYHFSKDDLVRLWVAEGFVEKNGDSTPEEVAEGYLTELIHRNMLQLVENDELGRVNTCKMHDILRELALRISKAEMFGTVNDFGAMVQMDTDVRRISSYGWKKMKKNKSKLKFPHLRTLMASDTIVDYVPSILSESKYLTVLELQNSDFQALPTSIGNLFNLKYIGLRNTRITSLPDSIKNLSNLQTLDVKSTSIKALPPGIVNLTKLRHLLADKFADKNQSEFRYFVGVDAPEGLSNLEELQTLETVQASMDLPEQLDNLLQLRSLWVDNITSAHCAGLFATLSTMPLLSSLLLSAADEKETLLLNHFNPTCTKLHKLIVRGLWSLTGCPILQNHGRYLKYLALSRCHFVGDPLVVLASTVPNITYLRLNNIPSPPTLDLLEGSFPQLKTLVLKNMNDVSLLKISSGALPVIECLYITSLPKLQTVPRGIKSLSSLKKLWLLGLHSNFKARWDMEGLQKDLQHVLEIRT

SEQ ID NO: 64383 - protein, 292 aa, Zea mays
  Clone ID: LIB3689-255-B3_FLI.pep
SMLLSRRFSCALARAPSLVRGRPLPPCAARTTPPAPSSPPRRLMSSSSAGWQHSSHRPPPPPPPPPHPGADKDQLFRGLEAALGTAFSSEPLAPPPQPMILVISGPSGVGKDAVIKRLQEEREGIHFVVTATSRAMRPGEVEGKDYYFVSKEEFLTMIEREELLEYALVYGEYKGIPKQQIRDYMAKGCDIVLRVDIQGAATLRQILGESAVFIFLVAESEEALVKRLIHRKTETSDMLLVRVATAREEVKHMKNFDYVVVNAQGKLEEAVKQVESIIDAEKSKIHKRHVNI

SEQ ID NO: 64384 - protein, 648 aa, Zea mays
  Clone ID: LIB3689-256-E6_FLI.pep
ACAPSPTGRPPPPASPRSPSGPTTGSIGPLAGDKHHQRLIRSSRSKSIRTKYNQAYMAKPCDSSHHGVVDNSSNGSQARREEAGKLGPSWYFSRREIEENSPSRRDGIDLKKESSIRKLYCKFLQELGMALKMPQVTIATAMVFCHRFYLRQSLAKNDRRIIATVCIFLAGKVEETPKPLKDVIVVSYGIINKNDPKASQRIKQQKEIYDKQKELILLGERVVLVTLGFDLNINHAYKPLVEAIRRFNIDKRSPLPQVAWNFVNDGLRTSLCLQFEPHHIAAGAIYLAAKFLKVNLPSDGDKIWWQDFDVTPRQLEEVSSQLLELYEQNRTTQAQSSQGSEAEGSSAGVCNQRSTVKSEANSKEPSAHGHLQASRPPNLQHSSSTGASGHHDDGQSNSDKHISGHKMLQNDNFNHGGSREKNKSGTKTGTVMDKLHNDKKFSPGHHYSKASHESHNPVEEHQPHGSDDNSNETRDGVGGNEAPVVSTSRMDAMNKIDKDKVKAALEKRRKSKGGFATKVNVIDDDDLLERELEQGVELAVEFEKINQDKKQNSSDGSMHPPDLENADELMENGHHVKQSLPTTAEDMGCPMDSKERHPPALHKQNDVSEHKSQQLDDTLKHQKSCDHPQPVGSPEQDGKDYKRPKLDG

SEQ ID NO: 64385 - protein, 192 aa, Zea mays
  Clone ID: LIB3689-256-E7_FLI.pep
LFKGLGRAARPIAVRRTAEEFFFLVKSYCIHFTVMAMGLINANPIIHEKKERRARQAPETTDENAAEPIDQLEIFDHIRDIKDPEHPYSLEQLNVVTEDSIELNDESNYVRVTFTPTVEHCSMATIIGLCIRVKLVRSLPPRYKVDIRVAPGSHATEAAVNKQLNDKERVAAALENPNLLDMVEECLSPTFD

SEQ ID NO: 64386 - protein, 661 aa, Zea mays
  Clone ID: LIB3689-257-A11_FLI.pep
IETTMSLSPLDSSSPPAAAAAAATEVPLAPGFRFHPTDEELVSYYLRRRVLGRRLRVDAIAEIDLYRLEPWDLPSLSRIRSRDAQWYFFARLDRKVAGAGAGGRGGPGNRTNRATPRGYWKTTGKDREVHHRGKPVGMKKTLVFHAGRAPKGERTNWVMHEYRLLDADGPQDLHVVCRIFQKHGSGPQNGAQYGAPYMEEEWEEDDDAIENGSTHDASGQIAATTCAVDEESNEDDENAYCETNRPARVEPSHLPSVHEMLNPPEMAPLQGQDSKETSDGSCSDVAISLEEILQEPLSNISVENMHRLEGQNATDDNISVDNLLSAYPTKDNGYVGQYNTMNGSAPADEAHARWPLRTYSNQNYVNGPLADEFFDTGNDTNGVAYSRQQQADGFPAPRQVDESMVFYDAPSDYNLVDGKDDFVYLNDILNEPLGNESLFDGDDMMAYFDATENDFKYDILGSGQGLDYPLADMPLNFAQKSDKEDKFTFEGISEVPEANPQYGASSSGSHEDLYTDTEFLGVPTDDTADKTYGNRLASMLGSIPAPPAMASEFPPSTGKSAGMLSAVSSSSIRFTAGIIQLDGLTFSSGSGQWPLQKNGDLSLLVSFAVEGDVASKLPVGLGRATRISTVPMVLRSGFYLFFMSAMILLFSYKVGSCIYSR

SEQ ID NO: 64387 - protein, 477 aa, Zea mays; identical to SEQ ID NO: 37132
  Clone ID: LIB3689-257-H11_FLI.pep

SEQ ID NO: 64388 - protein, 543 aa, Zea mays
  Clone ID: LIB3689-257-D4_FLI.pep
RLSRTHSAMTKRERKDPGRMTSLGSLTKQPNLSWVPPGGFCKAKKCNWRIHASQLPDGKTWQVKKMSKRHYCRSRSKMEKNCMANQYWVRDKVVPMLRENPNLGAGALVKKLQEKYLIQVSYCVAWKGKELALDELMGKWEDSFDHIYAFKAAIEKESPGSVVEIQTEKVGEKIRFCKMFVAFKACIDGFLQGCRPYLGIDSTVLTGRWKGQLASAVAIDGHNWMFPVALGLFESESKDSWKWFMEKLQTAIGSPHGLVISTDAGKGIDSALTNAFNNGVEHRECVRHLFKNFQKRFHGEVFERNLWPAARAYRRTVHDKHYNIMKIASPAAIKWLEDTHKHLWARCYFSTASKCDYVTNNIAETFNCWIKDEKSLPPVELIDRIRQKILEKFFVRKNLADKLTGTILPSVMKQLHDAGRGLVGYVVHKGPDHTAEVSGVHKDLTPWRHTIDLVNRECSCKKWQLTGLPCTHALSVIGCFRNLKLEDYVDSYYSVEKFKTAYVGKIPTLTDKTEWEQPEVGYKVWPPILKRAAGSQGQEGSLE

SEQ ID NO: 64389 - protein, 402 aa, Zea mays
  Clone ID: LIB3689-259-H4_FLI.pep
LSCLQPFSLHQSRAAMSETESAAAAPVAAAESKPRRLRGHKKGAVTCCVASSARPGVVASSGEDGCLCWFDLRTKDVLLTMEAANKPISSICFKPGNEDFVYISAGNEILSFDVRMGTQTKPLETYNYNRDEINQIAVSSKGFLAAADDSGDVKIVNTIQKCLYKRLREAHTSICSSVQFIPWRPWTAITGGLDSKLAAWDFSKGRTLFSIDYGSPELQNGSSSGSAGQCFNPAFVHSVAVSEEGILGGLYKVCAVARGDGAVDVVDLEYELAPAKSKGPPRAAILTTRSKGAELGDGSCNQSRAKRIHLDYTMGGHTAAVSCVAFSAFGEKGKFLISGGNDASVKLWDWSKGFYSETNSKVDLVLDIDVKKKVNWLCTAPTDSDNLIVCDTSKVVKVYSFR

SEQ ID NO: 64390 - protein, 579 aa, Zea mays
  Clone ID: LIB3689-261-D2_FLI.pep
ETKILDVVQMNSIMSDSKPKCLVIDEIDGALGDGKGAVEVILKMINAEKSNNSDKSTNGEETQARKTSRKSHRTAKLLRPVICICNDIYAPALRQLRQVAKVHVFVQPTISRVVNRLKYICKNEGFKASSIALSALAEYTECDIRSCLNTLQFLNKKRVALNITAIDSQVIGQKDKSKSILDVWKQVLQKKRLKRAGKAESLFNEDKDIDFLFTLISNRGDYEVTMDGIHENFLRLSYHDPMLQKTVKCLDILGVSDSLTQYVYRTQQMPLHAYQPPIAITISRMVAQVEKPNINWPKALQRSRALLLEKKDMLKTWQNQMSPFVSRHLSVESFVEDTASPLLHILSPLSLRPVALNLLSEREKDELVQLVDTMVSYSVTYRNTKFVPQEKANLSVVPHEVSSLSLYPPINDVINFEGYQSEHIGLSLAMKQVLVHEVEKQKIIKDSAGKLLNQSNDGNMKSEALSTIRKKTVANSIRPALHSSKDSSKCNSSTLEMQSNSASIVNDNDSISAKKHSSRAANFFDRFRKERPVDAKTHSDVGLQRATLQRDSRPLIFKYNEGFTNAVKRPVRVRDLLLS

SEQ ID NO: 64391 - protein, 757 aa, Zea mays
  Clone ID: LIB3689-262-H2_FLI.pep
LRESAGERGQPQPEAMEVVALVSGGKDSCFAMMRCMDYGHKVVALANLIPLDDTVDELDSYMYQTVGHQIVVSYAKCMGLPLFRRRIRGSTRDQGLRYSVTAGDEVEDMFALLSEVKRRIPSISAVSSGAIASDYQRLRVESVCSRLGLVSLAYLWKQDQTLLLEEMIRRGIVAIIVKVAALGLKPSSHLGKELAELKCHLLQMNENYGINVCGEGGEYETLTLDCPLFRNARIILDDSEVILHSADSIASVGILHPRAFHLEQKPDSSDRIGDGSAVQESSSCVYEVDEVTTHDDVGEKQALGPAVDAYTNIDLCISKTGNNLRSMSCWIQDPSRASEGLKADLIAVLSRIENQLKEEGLGWVNVLYVHLYISSMKEFGLANEVYVSFITEKKCYLGVPSRSTIELPLVQAGLGKAYVEVLVSNEVVKKVLHVQSISCWAPSCIGPYSQATLYEEILYMAGQLGLDPPTMKLCLGGPRAELELALQNSEAVANAFSCSIYISAIHFLVYCSAQLTSSEKEEIEQTLKSSYITRLDRSKGGSCPTVLYVFASDLPKGARVEVKPILYVPSTDDWVVAEETETGVPLPAPSKTWTDCTAPYSALRDSCCQVHTTGGRICSAVVSITDDIASKICSAAGQLHHGEENLKIMARFCAFQIVKTLADNRFSWDSVTMLRLYYSVDLAVAADAVSGAFSEALAELAQDNPSMRTDVPFYNVVPVAGAGRSACANDIMTCELLASNVSSAKSIPAEPFAVTPA

SEQ ID NO: 64392 - protein, 350 aa, Zea mays
  Clone ID: LIB3732-003-E5_FLI.pep
AASKFRCPPLPLSTTFFLVLHGHQLKQKKNKEDEKLILAFSRLDNEPVAGGDGDGHRRRGRQGARPLDRARRVAVLALVRHHQHGRVVGGPLHVLPRRASPHSAALVVAPWVRGALDGLLAVLPPRVLVRRDVGDLRADRRHSDAPLHAVLPSLGAVAPAAVGGGLGVGAGAGLPLVAGQRRLPGGHEAPALGDAAIAGRDRREEGRGGDGRGGRHGQVRLREVQRQALRRLRHADGRQGGRTGDDRRRRRRRRRRRRLDGPAAEAGVPRAVEDGDDLAELGDGLAGDLAERLISGPVRRGGLRGQGRHQQLQVAEPGRRRLLDGELVVGAARGVAAHQVHGHGSRCFAW

SEQ ID NO: 64393 - protein, 279 aa, Zea mays
  Clone ID: LIB3732-004-E6_FLI.pep
SPFPSPRIKIRCPRQEDAAHYHLRLRDRSSSQTVIVAMAAAAPASSVKEVLPSPLTSASEPPPLFDGTTRLYVAYHCPYAQRAWIARNYKGLQDKIKIVAIDLADRPAWYKEKVYPENKVPSLEHNNQVKGESLDLVKYIDSNFEGPSLLPEDPSKKQFAEELLAYTDAFNKALYFCIVSKEDVSEEAVAALDKIEDALGKFNEGPFSLGQFSLVDIAYVPFIERFQIFYSNIKNYDITKGRPNLQKFIEEVDKIDAYTQTKQDPQFLLEQTKKRLGIA

SEQ ID NO: 64394 - protein, 284 aa, Zea mays
  Clone ID: LIB3732-006-F6_FLI.pep
SSPRTHHHHQQSSTMGGALIVALLLATVPLSLGGGAHPGYSDADESACTVDAGAELLRRLEERGPGGRSIIDITHAVVPDLPAFATGAVAGPMLRLRESMADGSEYNLSELRMECHTGTHVDAPGHINQAHFAAGLDVDTLDLHVLNGPALLVDVPRNTNITAEAMEFLNIPRGVRRVLFRTLNTDRKLMWRKGGDMSYVGFTEDGAQWLVDNTDIKLVGVDGLSVASFDHLISAHVVFFKTPDIIPVESLNLDDIEAGIYMLHCLPLRLVGAEGAPTRCILIK

SEQ ID NO: 64395 - protein, 411 aa, Zea mays
  Clone ID: LIB3732-006-G1_FLI.pep
AQVTDFPFRFRRDTHAHTPQSIGGANENLHSETHTRASTGHTYNCASRPCYATPSRRRRPVQINITNLQLHTSDDDDGSGDSAVGPDLAAGAGEHADGAHLDHGGGEVGLEGGRVVGVGDDLHGGVLVAEQRLVRGQQAPVGHDALVEALVEGVGGDVVHGHERVAALRALPRQLRHVRRVHGRVLPARRRGRPRQPAAEGAAVRGADGVRARQDDHLLLRQALGAEDLRELRDVGRRRRQVAVGVRRARHGPVPPPRRHLVRVPTGECDAVPGREREYVRAGDDAEAGLLDARLDAIDDLEAPQAEVGPGVLLRGVALGGVDEHGRVAAPNETVVEVEAEQAGGEARVGRHRPAHLLLHDDLRRWARAVVEAHPQLRAQPRRHQQHRHRRHLQVQYCHRHSFSLSLSLWH

SEQ ID NO: 64396 - protein, 351 aa, Zea mays
  Clone ID: LIB3732-008-F1_FLI.pep
RRAPPTPGRYLGAGAMPGGSSGPDGEVDAGFAKLQGEDFEYYMQTYSIMLGRNSKKSTVDVDLSSLGGGMNISRHHARIFYDFQRRRFALDVIGKNGCLVEGVLHLPGNPPVKLDSQDLLQIGDKKFYFLLPTRSIFASAAAPRHAPIIPQQLPPPPYAHARAGRPRLSEFHDRSFEGDYGREVDEIGNGISETGMRGKLVKRNKKSSGDLDIYGGHRINVEPIGTLGEDSRSEIRSRGDRDIDNQQALQAEEKDVVSSVATVLSDLCGPGEWMPMAKLHNELLEQFGNVWHPSRVRKYLTQDDWSPTETKGRPWFGLLALLRKYPEHFVINTRSKGRMTSEFVSLVSLLS

SEQ ID NO: 64397 - protein, 252 aa, Zea mays
  Clone ID: LIB3732-013-A8_FLI.pep
RRSHKGVGDGRMMSGRSGGRDGEAAGPVIRIRVSHGATFREVVVPAQATFGELKRILVQTTGLEPERQRLFFRGKEKSDREFLHAAGVKDGAKLLLLEKPSPANIEQKVEPVIMDESVMKACEAVARVRAEVDRLSAKVCDLEKNVLAGRKVDDKEFVVLTELLMIQLLKLDGIEAEGEARAQRKAEVRRVQSLVETLDKLKARNANPFSDHNNAVSVTTQWETFENGMGSFSAPPPHVPSEQVNTDWEQFD

SEQ ID NO: 64398 - protein, 328 aa, Zea mays
  Clone ID: LIB3732-021-E3_FLI.pep
RIPMEATAVPRALSLLGPSLSTAQLLPWMRMNCLRVAVGGGVRRQGGVVWAKKTRRGRDDVAEERVDTHSFAPKAVLLRKKMVREDGQVSPEFADANEEKLYDFLNIQLKSDMKRIQRRNLLSTMLSAWTILLLGPGQVSLAETTGGAFREYIDTFDGYTFLYPKNWIQVRGAGADIFFRDPMVLDENMSVEISSPSSSRYTSVEDLGPPEKAAEKVLGQYLTEFMSTRLGVRRESNVLSASSKVADDGKLYYEVEVNIKSYASNNELAVMPQDRVQSLEWDRRYLSVLGVENKRLYELRLQTPEQVFMQEEEDLRRVMDSFRVIKAA

SEQ ID NO: 64399 - protein, 163 aa, Zea mays
  Clone ID: LIB3732-024-G5_FLI.pep
HNTNKLTLSVYLSFYPHSHPETGEGKDAAPELPLRVRVAAAAAAQLPWRSPGAADRGGQAADGAGGDDQGGQDGRGGGGAPGSTPQVQAPGAHQEEVPGARPRRPVQGRRRRRAPTLPSHLQDQALPRHPAPAPRHSPQVSAPTAAPVRRRPGAVLARVIDCD

SEQ ID NO: 64400 - protein, 754 aa, Zea mays
  Clone ID: LIB3732-025-B5_FLI.pep
AILDFVCFHSTEEGMAGSSVRGGSNCPPLFVTEKPTRMARYAYRLFASTVLAGVLLVWLYRATHVPPMSSGARWWAWLGLSAAELWFGFYWVLTLSVRWSPVFRRAFPDQLLRRYKEEQLPGVDIFVCTADPTVEPPMLVISTVLSVMAYDYPKEKLNIYLSDDAGSIITLYALYEASEFAKHWLPFCNKYQVEPRSPAAYFGTEASPPDACDRKEWFSLKEMHKDLAARVNSVVNSGKIPEVSKCKLMGFSRWSENASFRDHPSIVQILIDGNKRKATDVDGKVLPTLVYMAREKRPQEHHHFKAGSLNALIRVSSVISNSPVIMNVDCDMYSNNSGSIRDALCFFQDEQLGQDIAFVQYPQNFENVVQNDIYGNPINTVNELDHPCLDGWGGMCYYGTGCFHRREALCGRIYSPDYKEDWTRVARKTEDVIDLEGMAESLVTCTYEHNTLWGVEKGVIYGCPLEDVITGLQIQCRGWRSVYHNPPRKGFLGMAPTSLGQILVQHKRWTEGFLQISLSKYSPFLLGHRKISLGLQMGYSVCGFWAANSFPTLYYVTIPSLCFLNGISLFPEITSPWFVPFAYVAVAAYSCSLVESLQCGDTAVEWWNAQRMWLFRRITSYLLAAIDTIRRMLGVTESGFTLTAKVTDPRALERYKKGMMEFGSFSVMFAIITTVALLNLACMMLGVAKVLLRKGAVSLGAMFVQAVLCALIVAINFPVYEAMFVRKDSGRLPASVSVVSLCIVLPFCILPTKL

SEQ ID NO: 64401 - protein, 244 aa, Zea mays
  Clone ID: LIB3732-033-G7_FLI.pep
PPARRAMAGRREGEHQASPWRSGTPAAEEDSGAFPSAIIFFALVGATATTAAVGQLRRTVSWFYTQLSRSEPYVFWEDIPRRPNRHRCGEAWERYHQRMRDRTEDQRERVERIRHMQDVFKKERSKCRDYRNWDSHNPNYYQHHQRDDWYWNAEAFYANQRTNFRAMTREAMTYTMSHHYSVLGLDRSRSEPFSDAEIKNAFRRKAMEYHPDQNQNNKEVAEAKFKEVMDSYEAIKRERRDRSC

SEQ ID NO: 64402 - protein, 596 aa, Zea mays
  Clone ID: LIB3732-034-E6_FLI.pep
FMASAPTTASSPLPASSRPTATPPDTAATPPPLTSPAPAAPPPSSHSHSHSQPSPGPPQHTASSPPRAAAAPPRPPLLSPPPTSPTPSAAPTPSPSPPASPAPAPPPFSAPPPSARPLPTPAIAVDPARGKNPSWNKSSSPGAPSRSPSAPFGGLGNGVVAIAAAVVALLLLSLLVTAVWFNRKRKRKQMSGYRAGLMSPFSSQQPSGESANVGWSADPSVHTNYSAGSPRLKQCLSDISMGNSRFFSYDELYQITDGFSAQRLLGEGGFGSVYKGRLPDYKDVAVKRLKDGGGQGEREFQAEVEIISRVHHRHLVSLVGYCISNDQRLLVYDFVSNNTLHYHLHGHGMPVLEWSARVKIAAGAARGIAYLHEDCHPRIIHRDIKSSNILLDNNFEAKVADFGLARLALDAVTHVTTRVMGTFGYMAPEYASSGKLTERSDVFSFGVVLLELITGRKPVDASRPMGDESLVEWARPLLSRALDTGDLEGLVDPRLEMKLDEVEMFRMVEAAAACIRHSASRRPRMSQVVRVLESSADIDLTNGVQPGQSQLFNVANAAEIRMFRRMVAGAQDDDSSDLTQYDWSRGSDAAPGSRIL

SEQ ID NO: 64403 - protein, 627 aa, Zea mays
  Clone ID: LIB3732-036-E1_FLI.pep
NNVASRLLVALFYSTPPLDPPPPPLAGSIAMSPAVASASSGDRIRTYEDFVRVHAYLLAAAGIPPSLHQRLYRKLADEVFDGGEVFAVEPCEDGRQRRLVLTADQSLGKESDVFLVDHAWSFRLPDALKQLREVPGLAERMAALMCVDLDRKIEEDEQDDDESGSLEHVSQVVEKERARVQERSDSTAWLELEELGIDDDMLVALDLSANFPNLVALNLWGNKLRDPEKVMQEIRKCTKLKALWLNENPVLGKSIDKAVLDGLSGLEIYNSHFTSKAGEWALGFCADIVGVDNPCSSVESTLFGSIGTIDLSDRCIHKLPEVFSPSKLPSLSKLNVRGNPLDQISGDDLLKLFGGFTQLQELEVDIPGPLGNSAISILESLPNLSLLNGVDSSSIIESGKHIVDSALEPRLPEWSPEEPLAERVIGAMWLYLMTYRLADDEKIDETPVWYVMDELGSAMRHSDNANFRIAPFLFMPEGKLHTAISYTILWPTHDVHTGEECTRDFLFGIGEDKQRSARLTAWFRTPENYFIQEFRRYQEQLQSNSICSSTKIEETQTPSTKSVRPRDGRVLRVYTDIPHVEEFLTRPEFVLTTDPKEADIIWVSMQVDSEVKNAVGLTDQQYKPISF

SEQ ID NO: 64404 - protein, 409 aa, Zea mays
  Clone ID: LIB3732-045-A11_FLI.pep
ANRSQASVPLPVIAMGSTEKQEPEASPEIIFRSKLPDIAITNTLPLHRYCFERLPEVGERPCLIDGGTGAVLTYAEVDRLTRRLAAALRRAPLGLGRGSVAMNLMLNSAEFVLSFFAASRVGAAVTTANPMSTPHEIAGQIAASGATVVFTESMAADKLPAMGDKLTVVLIDARRDGCLHFWDDVMASVPDEEAGGGEQDLDFDPDDVVALPYSSGTTGLPKGVMLTHRSLSTSVAQQVDGDNPNIGLTAADVVLCSLPMFHIYSLNTILMCGLRVGAAIVVVRRFDLRRMMELVERHRITVAPLVPPIVVAVAKSDEAAAHDLSSVRMVLSGAAPMGKDIEDAFVAKLPGAVLGQVIFRGTYWFRFWRLLQKEESHQQILDVCQALEVVAMEVFANHGWRSNARIEDA

SEQ ID NO: 64405 - protein, 565 aa, Zea mays
  Clone ID: LIB3732-045-C1_FLI.pep
TKQRMSFPSLLIYLSHLSYPVIQTAPQGTAIQKQGPWPQRTWMAGLEELKKKLQPLLFDDLDRVGASTRVPLPEDTCDSYAVSDGGTVNLLSRSLGEYKINEHGFHKRSAGPDELDSDEKAYRCASHEMHIFGPIGNGASSVVERAIFIPVHRILALKKINIFEKEKRQQILNEMRTLCEACCYPGLVEFQGAFYMPDSGQISIALEYMDGGSLADVIRVKKSIPEPVLSHMLQKVLLGLRYLHEVRHLVHRDIKPANLLVNLKGEAKITDFGVSAGLDNTMAMCATFVGTVTYMSPERIRNENYSYAADIWSLGLTILECATGKFPYDVNEGPANLMLQILDDPSPTPPVDTCSLEFCSFINDCLQKDADARPTCEQLLSHPFIKRYAGTEVDLAAYVKSVVDPTERLKQIAEMLAIHYYLLFNGPDGIWHHMKTFYMEQSTFSFSENVYVGQNEIFDILSNIRKKLKGDRPREKIVHVVEKLHCRANGETGVAIRVSGSFIVGNQFLVCGEGIKAEGMPSLDELSIDIPSKRVGQFREQFIMQPGNLMSCYYISKQDLYIIQS

SEQ ID NO: 64406 - protein, 448 aa, Zea mays
  Clone ID: LIB3732-045-D1_FLI.pep
FYAWLGCAAHTEPLAVAARLGSAPTDRSIRPAVGAMASPNPEAAGLQAVAVAGAGEGGSSSSLSAVAGAAALSGELVPRRALALRKERVCTAKERISRMPPCAAGKRSSIYRGVTRHRWTGRYEAHLWDKSTWNQNQNKKGKQVYLGAYDDEEAAARAYDLAALKYWGAGTQINFPVSDYARDLEEMQMISKEDYLVSLRRKSSAFYRGLPKYRGLLRQLHNSRWDTSLGLGNDYMSLSCGKDIMLDGKFAGSFGLERKIDLTNYIRWWLPKKTRQSDTSKTEEIADEIRAIESSMQQTEPYKLPSLGFSSPSKPSSMGLSACSILSQSDAFKSFLEKSTKLSEECSLSKEIVEGKTVASVPATGYDTGAININMNELLVQRSTYSMTPVMPTPTKSTWSPADPSVDPLFWSNFVLPSSQPVTMATITTTTTFAKNEVSSSDPFQSQE

SEQ ID NO: 64407 - protein, 200 aa, Zea mays
  Clone ID: LIB3732-050-A8_FLI.pep
DLVGFRRRRRRFARFAGSVASRKVMEHRAFDCSGSDDDLPPTYQIRVPRMHFSGNRRPLAGAFSQPRPHNKLDSDIHQIEQQAYTGVLRAFKMQSDALTWEKESLITELRRELKVSDVEHRMLLNMVNEEEAIHTIRQSRQGCGMQSSLPYNSVVDHNLGPIKRQKKSHPIYSLPVDPHSPSMPLKALVGNKTYTLAPET

SEQ ID NO: 64408 - protein, 361 aa, Zea mays
  Clone ID: LIB3732-052-H7_FLI.pep
RTISTIPPTRRRATPSCSTPVTTALQASTSVQPNHRHRRMASRLLLHLHLRRRGRGIPGCPVPALPLHAARLLSSSPPTAAAASSSAAGGGGIEKVLVANRGEIACRVMRTARRLGVATVAVYSDADRGALHVRAADEAVRIGPPPARESYLNARAIIEAALRTGAQAIHPGYGFLSESADFAQLCEAEGLKFIGPPASAIRDMGDKSASKRIMGAAGVPLVPGYHGADQDVELLKLEADKIGYPVLIKPTHGGGGKGMRIVERPDEFVDSVLSAQREAAASFGVNTLLIEKYITQPRHVEVQVFGDQHGNAIYLYERDCSLQRRHQKIIEEAPAPNVPAEFRSHIGGAAVSAAKVNVSEH

SEQ ID NO: 64409 - protein, 271 aa, Zea mays
  Clone ID: LIB3732-054-G10_FLI.pep
RSSPALITSVGGGGGELGRRRLLLAGELVPDHPEDPQEPVGAHQLQPRRHRLDEDGVVGRHGDVGEVRPDAHPGGGEGGGEEHVDEEVQLRVPHAQLLEHLPQVQQRAGHLRHEHAGHHLRPAPLVGEPRADADDADQVVHGVVQPRVAVEVAARRVVHHVRQRNRQRLHLATGGCGGERADGARPVVDGEAGEAHGGDGVHGGDGAVAEVVGALGEQRPHQQEGGRPQHHPGRHPAHHVAAVDDVRLLHGRRRRRRRSRHSQRLPLPPLS

SEQ ID NO: 64410 - protein, 397 aa, Zea mays
  Clone ID: LIB3732-059-F11_FLI.pep
NVAMVSSGTGSIAKRWRELQGEKSWKGLLEPLDMDLRKSIISYGELVAATGDGFNNEPHSPHVGLCKYGHDDLLTKSGVAAASHYKVTKFVYAWEDSKLTWIGYVAVATDGEGVAALGRRDIVVAWRGSMTGAEWWKDVEVLPTCPWPTLGLEDHSVGHGHPCARVHSGFLSLYTEPPKPPKDTNSDMAFFVNGSARDQVLAEVRRLMELHRDEDTSITVVGHSLGSALAILNAIDLVGNGVNSSGLLGGRPPCPVTAIVFACPHVGNDSFRDAFTSFKYLKVLHVKNQQDWVPFLMGWLHDLGVTLHIDTALSHYLKKPNLVTAHSLESYMHAVAGEVGSDGKFRLLVDRDVALVNKSADALKDEYHVPASWWVPHNKNMVKNDQGKWELKDFEQF

SEQ ID NO: 64411 - protein, 632 aa, Zea mays
  Clone ID: LIB3732-060-B8_FLI.pep
RKGGSYSDFGDYDDGRRRTSDLLQRTGRGSDLDDDEDDDAGPVGFEGSSVRQQGGRRGKMAKSVGPHRVGRGSDTDFGHRQPRGLKKIDFGLSEDDDEVGEVDEEDEPSGFEDDLFEDEGDKEDVGHIIGNKSGSSMLPEDEPAKNESVQGRSAGGGDSYLSQKRFDECPLSPLSLKGVKAAGYEQMTAVQEATLPIILQGKDVLAKAKTGTGKTVAFLLPAIEVISKLPPVDRDLKKPPISVVVVCPTRELADQAAAEANKLLKFHPSIGVQLVIGGTRMALEQKRMHTNPCQILVATPGRLRDHMENTPGFATRLLGVKVLILDEADRLLDMGFRSDIEKIVAALPKQRQTLLFSATVPDEVRQVCHIAMKRDLEFVNTVQEGSEETHSQVKQMHLIAPLDKQFSNLYGLLTDHISENVDYKVIVFCTTAKVTSLVAELLSELKLNVREIHSRKPQSYRTRISKEFKESKGLILVSSDVSARGVDYPNVTLVVQLGVPTDREQYIHRLGRTGRRGNEGTGVLLLAPWEEYFLRSINDLPITEATQPLIDLDTKKKVDKALAHVEVKDKESAYQAWLGYYNSNKVIGRDKYQLVSLANEFSRSMGLNNPPAVSKLALRKMGLNNIPGLRSK

SEQ ID NO: 64412 - protein, 165 aa, Zea mays
  Clone ID: LIB3732-060-D3_FLI.pep
HEESHKGAGVGVIVAEERGEVLFLAGGGRDECVDPADVARRRPLVVHRRRDVEVGVGHVGPQLDALPRGLGAPQHPLRLHEPLHRHLLLLPVDLHRLHPSHAGKGVPDLELAAVAVHPDLELHRVELLPLPALPLPAGSHQLRRHASHCASRRSKVQGLLCLLAS

SEQ ID NO: 64413 - protein, 227 aa, Zea mays
  Clone ID: LIB3898-001-C5_FLI.pep
SSGTLKPSPQERRGQSNRTKTSRPHKAKLISMVVYTQEHVYRHPWDRVTAAAWRKFTDPASCTALSHVADVHTLHRRLDSDTGRLQAARSITVRSPPLPFVLRRLLPSAAASPNGAALCHCVETSLVDAQRRAMDVVVRNVSLRGLIEVEERASYRPHPDRPDDWTQFRQETTIRCRPLAALAAVAEKVETRCAERFLQNSAKGREVVERICRYLEAESAGAAPSVT

SEQ ID NO: 64414 - protein, 353 aa, Zea mays
  Clone ID: LIB3898-004-D1_FLI.pep
VPATTPRRARDTTTSCSPALRPSFPPPRCRRPPHSTVESPDPSMAAAVAAVAAATTAEDEARLLRLEEQAEHGGGGAWDYLCLARRLRARRPAHVLRVGLALLNNASARSGLASEQWTLYEQVATAAMDCQRLDVAKDCIGVLSKQFPGSTRVARLEALLFEAKSEWAEAERAYTQILEINPFDQIVHKRKIAIAKAQGNMSLAIGYLNKYLELFMADHDAWRELAETYVSLQMYKQAAFCYEELILSQPTIPLYHIAYAEVLYTMGGLENLQTAKKYYASTIQLTGGKNTRALFGVCLCTSAINQLTKGRNKEEDGSELQRLAAEVLLNNYKQQAPSKAPLISSLLKNMKLS

SEQ ID NO: 64415 - protein, 477 aa, Zea mays
  Clone ID: LIB3900-001-G7_FLI.pep
RLSLLGLVDSSPARLLISRAEQRAGAMASDPDVSGGEQAEPPDDVDDPDVDEVDPTGRYFRYKEVVGSGAFKTVYKGFDVVEGIEVAWAKVEINGRTMGSPKELQRLKTEIQLLRSLHHKHILKLYTSWVDNKKRAVNIITELFTSGNLREYRTKHKKVDMKAMRRWAKQILTGLAYLHSQKPPIIHRDLKCDNIFINGNHGKVKIGDFGLAMVMQQRKTQSIQGTLEFMAPELFGENYNELVDIYSFGMCMLEMVTGECPYSECQGFVQIYKKISEGVKPVALSKVKDAEVRSFIESCLASAADRLPASELLKSPFLMKDDIIINDKTSNPVQEPIAFPPNLDLDLEATPIFVSLLPNGTVDNGKGSFSLVLRRGGFVLEGDMSGSNPVNLLLRIPVPNDKCKNIEFAFDLENDTSLLVATEMVQELELPSWSMPIVAKLVDAFLLKTVRGWRPCVQVGQMIQAVQNTASVNGKSI

SEQ ID NO: 64416 - protein, 357 aa, Zea mays
  Clone ID: LIB3900-002-B2_FLI.pep
APFFFIAFGQPLGRTKKLPTASCHALSRRDRQAAPSYHSSMASLGLVLLVAVVVSAALMPPSAVAQQLTPDYYASTCPNLEAIVRRSVQQSMVQSQIAAPAALRLFFHDCAVMGCDASIMIVNSNGDDEWRNTANQSLKPEGFQAILSAKAAVDSNQQCQYKVSCADIMALVAREAVFLSGGPYYQVELGRFDGRVSTRDSVRLPSVNFTLDQLNAFFSGLGFSQNEMVALLGAHTLGAADCPFFQYRIGDPSMDPSLASQLRGTCGSNPSGGFAFFDPSPVRFDNAFYRNLQGGRGLLGTDQVLYSDQRSRSAVDSYASNQGAFFTDFVAAITKLGRIGAKTAATGEIRRVCNFPN

SEQ ID NO: 64417 - protein, 361 aa, Zea mays
  Clone ID: LIB3900-005-F8_FLI.pep
SSPAHSRVAHQLQFLLSERPHPPRRLASAVEISRARGGMATRNRTPLYRKYRDALRHVRAPPGAPSSSGGGGGGGGPVIEMASLLRSDRPYAPLSTDDPSASSRGAATVGLPPAWVDVSEEISANMQRARTKMAELAKAHAKALMPSFGDGRDDQRAIEVLTHEVTDLLKRSEKRLQKLSMKDSSEDSNVRKNVQRSLATDLQNLSMEFRKKQSSYLKQLRQQKEGQDGVDLEMNINGAKSTFEDDEFDDVGFTEVQMSKLKKSEAFTREREREIEQVVESVNELAQIMKDLSVLVIDQGTIIDRIDYNIQNVAASVEEGYKQLQKAERTQKKGGMVMCATVLVILIFIMIVLLILKEIIF

SEQ ID NO: 64418 - protein, 180 aa, Zea mays
  Clone ID: LIB3900-008-A3_FLI.pep
PRSGRGALLLGMAGTPSQASLLLQKQLKDLAKNPVDGFSAGLVDDSNVFEWQVTIIGPPDTLYDGGYFNAIMTFPQNYPNSPPSVRFTSGMWHPNVYPDGRVCISILHPPGEDPSGYELASERWTPVHTVESIVLSIISMLSSPNDESPANIEAAKDWREKRDEFKKKVRQCVRRSQEML

SEQ ID NO: 64419 - protein, 328 aa, Zea mays
  Clone ID: LIB3911-001-B9_FLI.pep
FWKLAGPMASEAAIARAQCLLRFRRWSPLPLLPLPSPPATTRAASCRRSVRMASSDGSAAALPSATVDVPGAGAPVLVVGAPGLPEADFRNAVESSLFKQWLRNLQSEKGVLTYGRLSLTRVLIQGVDMFGKRVGFLKFKADIVDEETKTKVPGIVFARGPAVAVLILLESNGETYAVLTEQVRVPIGKFLLELPAGMLDDEKGDFVGTAVREVEEETGIKLNIEDMVDLTALLDPATGGRMLPSPGGCDEEIGLFLYRGRVDEETIRSLQGKETGLRDHGELIKLRVVPYSELWRSTGDAKALSAIALYEMAKREGLLPQPTPSANL

SEQ ID NO: 64420 - protein, 393 aa, Zea mays
  Clone ID: LIB3912-009-E4_FLI.pep
RMWPWLERIASACWDRVRKYALTRKGEDDADTDADVDAVADELLWSRDLTRHAAGDFSFAVVQANDVLEDQSQVETAAAATFVGVYDGHGGAEASRFISNHLSAHIVRLAQEHGTMSEDVVRKAFSATEEGFLSLVRRTHLIKPAMATIGSCCLVGIIWRGTLYLANLGDSRAVVGCLDGANRIFAEQLTRDHNASMEEIRQELRSLHPDDSQIVVLKNGVWRIKGIIQVSRSIGDAYLKKREFAVDPSTARFHLSEPLRRPVLTSEPSISSRILGSQDRFLIFASDGLWEHLSNQQAVEIVHNSPREGVARRLVQTALKEAARKREMRYGDIKKLEKGVRRYFHDDITVVVVFIDHELRAEHSSSTSVPELSVRGFVDAGARSSFSGMNDIT

SEQ ID NO: 64421 - protein, 224 aa, Zea mays
  Clone ID: LIB3912-014-E6_FLI.pep
ERATAAKLALAGGRAGRHGASHGERAAAGPVGGGAAGAGGRGARAPHVPGARAGDVHVAGDAARGRAAGRRVAHRARLRQPAAVQALHQVVRPQGRRRRHRGQRPRGHRRLGPPGLHQHRAPRDPRRPPPHPQLPRRRRRPPPPQLPLRHLRHRVPAGPLLRRPRVLRRRRPRRQHRGGHAHVHRHRRQAQPPEARRHRHLFIGQLIPPPPPPVPVVPRIIVTS

SEQ ID NO: 64422 - protein, 285 aa, Zea mays
  Clone ID: LIB3912-015-C11_FLI.pep
TKEAMEKESSATYEPKRNSEIRVFESSDEISTDLAEYISQVSEISVKERGYFAIALSGGPLVSFLGKLCEAPYNKTLDWSKWYIFWSDERAVAKNHAESNYRLTKEGFLAKVPILNGHVYSINDNATVEDAATDYEFMIRQLVKVRTIGVSERNDCPKFDLILLTMGSDGHVASLFPNHPAMELKDDWVTYITDSPQPPPERITFTLPVINSASNIAIVSTGDDKAKAVHIAVSDMAEGLDAPTSLPARMVQPTDGKLVWFLDKAAASFLDSKNDDDDACYDRHE

SEQ ID NO: 64423 - protein, 313 aa, Zea mays
  Clone ID: LIB3912-024-B10_FLI.pep
IFSSSRAAPPLNLRRRSPGASASPTRAEGPRRSNYRCPKPRYSSSPDLQGSAAMPQGDHIELHQKRHGKRLDHDERKRKREAREVHRRSKDARNLIGAKGKRFAKKRYAEKAQMKKTLKMHDESNKRQKVDDDVQEGALPPYLLDRDQTQRAKVLSNTIKQKRKEKAGKWDVPLPKVRPVAEEEMFKVLRTGKRKTKQWKRMVTKATFVGAGFTRKPPKYERFIRPTGLRFTKAHVTHPELKCTFNLDIISVKKNPNGPMYTSLGVMTRGTIIEVNVSELGLVTPAGKVVWGKYAQVTNNPENDGCINAVLLV

SEQ ID NO: 64424 - protein, 278 aa, Zea mays
  Clone ID: LIB3912-027-C11_FLI.pep
GSYPKVCHWGQHQRRRWTTPTPSTSSHPWPPTHGPTRRRPRARTPTSGPPRKTTASGVPTRATMTGTPPRGRGASSRCLVRRLTAGAAAAMVAAGAAQASQRHRKMFFKTKLCCKFWARTCPYVTNCNFAHGMEELCKPPPNWQEIVATHEDATTKQGEEHQIPIMTSRSVIAGDDGGGGRAYKGRHCKKFYTEEGCPYGDTCTFLHDEQSKARESVAISLLPTIGGGGYNAASASGSMAQNSSNWKTRICNKWEMTGYCPFGSKCHFAHGSTVIPNL

SEQ ID NO: 64425 - protein, 430 aa, Zea mays
  Clone ID: LIB3912-028-F1_FLI.pep
ALALQHSTTGSAVAPPSSFPGAAAPCSCRSATVRLPVMEHLRWRPTVNERDFIECALQSDLRVDGRHSFDFRKLKITFGREDGSSEVQLGETHVMGYVTVQLVQPYRDRPNEGTLAIFTEFSPMADPSFEPGRPGELAIELGRVIDRGLRESRAVDMESLCVVAGKHVWSVRVDLHILDNGGNLIDAANIAALAALSTFRRPECTVGGDDGQQVTVHDPEVRDPLPLTIHHMPIAVTFAYFGEGNIVVLDPTYKEEAVMGGRMTAIVNSNGDVCAIQKAGGEGVMSSVIMQCLRIASVKAADITSKIKKAVDSYTTEKALKKVKRLPTSVPQKINVTNVTMDGKGDGELEKQSVQMHSDVQQISKDPPTMVKASSREDAQPMTESSNAEVNTSSAVAAGESESHEIGSPKSLKDAIKPKHKRKKKKSDRS

SEQ ID NO: 64426 - protein, 462 aa, Zea mays
  Clone ID: LIB3912-031-D2_FLI.pep
LASGVLRSLPLNTSRPRPKMPSLAAFLVLLLPPLLLSAAGAAEAEELIGFKATLRHVDADAGYTEEQLLSRALRRSSARVATLQSLAALAPGDAITAARILVLASDGEYLMEMGIGTPTRYYSAILDTGSDLIWTQCAPCLLCVDQPTPYFDPARSATYRSLGCASPACNALYYPLCYQKVCVYQYFYGDSASTAGVLANETFTFGTNETRVSLPGISFGCGNLNAGSLANGSGMVGFGRGSLSLVSQLGSPRFSYCLTSFLSPVPSRLYFGVYATLNSTNASSEPVQSTPFVVNPALPTMYFLNMTGISVGGYLLPIDPAVFAINDTDGTGGTIIDSGTTITYLAEPAYDAVRAAFASQITLPLLNVTDASVLDTCFQWPPPPRQSVTLPQLVLHFDGADWELPLQNYMLVDPSTGGGLCLAMASSSDGSIIGSYQHQNFNVLYDLENSLMSFVPAPCHLM

SEQ ID NO: 64427 - protein, 228 aa, Zea mays
  Clone ID: LIB3912-033-D5_FLI.pep
SFPSPSARVRRRRPALVSPPTTPVTTTGHRPDPHPGDPQAGRSARRAARPSRAGARDGNGTGPQNLRSFLLARPCPSARRSCRPRPTSALSSSRGIRYATGCAMVLWVFGYGSLIWNLGFDFDDKILGFIKGYNRTFNLACIDHRGTTEHPARTCTLETDGEATTRPYHGTSLQGESLSKKQVELLQHEPEVGYELPYKVPFQSLPCYIVNFPKQSTCQAPICHRGSH

SEQ ID NO: 64428 - protein, 151 aa, Zea mays
  Clone ID: LIB3912-042-E2_FLI.pep
LLTVNILYGTLMEFCTPATCPTMSAGPKFEYRWADGVQIKKPIEVSAPKYVEYLMDWIEAQLDDESIFPQKLGTPFPQNFKEVVKTIFKRLFRVYAHIYHSHFQKIVSLKEEAHLNTCFKHFTLFTWEFTLIDKAELAPLIDLIESIVSVC

SEQ ID NO: 64429 - protein, 433 aa, Zea mays
  Clone ID: LIB3912-042-H5_FLI.pep
RSSVLLRRSDQRCSLLVTPAGCCSCLRHGRMAFLFNKFQEAIRTIAKSPMFARDPRHLQFEADVNRLFLYTSYYRLGENADEKDAEEIIDLASKASIADQQKQVQDNVHYELTHMCQAMDSILCPDTINDPSKGPSEAHNHSQRSGLSFAVGGAASANKQSAIIPATRPLTRAELSKKFRDHFGYTLDIGPSGIPHKDAGQGLFLSGQANAGAVLAIYPGVIYSPAYYRYIPGYPRIDVCNNYLITRYDGTIIDAKPWCFGGETRALWDGSDLVDYNAMAPKGSENNSDRVWRMLSKPLEKGVRENFGEVLERRNPLAFGHFANHPPKGSSPNVMICPYDFPLTEKDMRVYIPNITFGGQETIRMKRFGSFYFKSGGSDNQAGDSLVLKTLVLVSTRSICDEELFLNYRYSNSKRRPEWYSPVDEEEDKRRWS

SEQ ID NO: 64430 - protein, 306 aa, Zea mays
  Clone ID: LIB3912-043-A9_FLI.pep
YQAQRPRRKKIRVPVSLLDDDILNSETAMSRLLPPVLSPLPAFSLPPPLLPRIHIRTSAVRGGAAENAMASGTTARERRLVKVREERRRREYDREHTYPGWAKVLENACRDDEELRAILGDSIGNPELMKQRIQERVRKKGRAQFNKSKTGSIVAFKVSFRDFNPLNSFIWFELFGEPTDRDVDLLGGVVQAWYVMGRLGAYNSSNLQLANSMMDYDPSYDSEEASTVMPSSFHDISDVEFQDNWARVWVDLGTSDYLGLDVLLNCLTQLSSEHLGIKQVVFGGKKMGDWEEGMTSSDYGYKHFKI

SEQ ID NO: 64431 - protein, 438 aa, Zea mays
  Clone ID: LIB3912-058-E12_FLI.pep
VGEREGGGIMGISSKWIKSLVGIRKQEKAQNAEKQEKGWNAESSETKSSANQSLHKRKHSLDPGAALAVEEITVQSEALTDNKSAQMVSNSFFSDSTPLDVHISQAEHHSNEDLAATVVQSAFRAFLARRALRALKGIVLLQALIRGHSVRRQTAETLQCMQALVKAKARVRARQVRVALENQVARKKIPEQDDHENHVREVEGGWCGSIGSMEEMQAKALKRREAAAKRERAMAYALTHQRQAGSKQQNSLSLQGLELGENHWESNWLDRWMAVRPWENRLLDCNAKESLPTHEDKDEEANSQITPKGKVSTSNTPGLSKKKGVNHKKSYSDVSCTSFARPANVLPSTSLGSSKQKAKAVGEVFEEVSSQPTDIGSKDVHNSKDKLVQVNGPAKKRLSLPNNVGRESGKGPTRRNSLNRSAPKARADSPNQGDELEA

SEQ ID NO: 64432 - protein, 278 aa, Zea mays
  Clone ID: LIB3918-010-E5_FLI.pep
GSTDPSKCPNPISASLFACLHTPPPAMAACDDDVAPSTASAYLDPSYWDARFGKEEHYEWFKDFSHFRHLLAPLLSPSLSVLEVGCGNSRLGEDLLREGVAGGITCVDLSPVAVQRMRDRLAALGTKGVDAVVADMLDLPFEQESFDLVIEKGTMDVLFVDSGDPWDPNPTTVENVMKMLNGIHRVLKPEGIFVSIAFGQPHFRRRFFEAPEFTWSIEYSTFGDSFHYFFYTLKKGKRSLESSSYQNTLPSPVAPRINMVHEELESEDFIFLTNLDGL

SEQ ID NO: 64433 - protein, 489 aa, Zea mays
  Clone ID: LIB3918-304-D12_FLI.pep
ECINTLNEGLLLHHASAGCPKPQWSKYLSFLKSRRFSELTKPKYWKGEQVDSIMTMQHVALSKANNEYPKIHTLFSTECSSYFDWQTVGLMHSFRLSGQPGNITRLLSCTDEDLKNYKGHDLAPTHYVPSMSRHPLTGDWYPAINKPAAVLHWLNHVQTDAEFLVILDADMIMRGPITPWEYGAKRGHPVSTPYEYLIGCDNILAKIHTRNPSACDKVGGVIIMHIDDLRRFALLWLHKSEEVRADKAHYATNITGDIYNSGWISEMYGYSFAAAEINLRYIIRRDIMIYPGYVPLPRAKYRVFHYGLRFGVGNWSFDKADWRNADVVNTCWAKFPEPPDPATITKQDLDARERDLLSIECGRALNKALYLHHKRRNCPRLDTISSTSKKTDQVSASNKIVSVAQKSRSISRGNIESMDEGRLKTVKRTAASVQPLHRSRRLARSSRMWIIAVWALSIVVFLLVISMFFTEQRRNASRSRVSRSLKAHV

SEQ ID NO: 64434 - protein, 336 aa, Zea mays
  Clone ID: LIB3957-006-C6_FLI.pep
GRKANSNWGKRARDESHRAGEDRQRQGGGRRNRRRREAGMEDLSVEELASNLSTYKEQLREVKKLIKEKKDDAGISEYIDMEKELQEVITLTEEILATAKQTESAQNVAGLSPPSYSAGVQSEGLDDLSHSHKFAVGTRVQAVWSEDGEWYNATVEALTPNGYYVAYDGWGNSEEVDPDNVRLLEEEAADALGQAEKEAEATKMAIKRKIEQAATSDFQARSLPAKLRIEPSDPEDVKAAKRKKIHAFKSKSRFEQLEFAQNKRQNAWQQFQTKGKAKKVGFFSGRKKESIFKSPDDHRGKVGVTGSGKGLTDFQRREKHLHLKGGSGDAADDDEE

SEQ ID NO: 64435 - protein, 335 aa, Zea mays; identical to SEQ ID NO: 42932
  Clone ID: LIB3957-025-A8_FLI.pep

SEQ ID NO: 64436 - protein, 222 aa, Zea mays
  Clone ID: LIB3957-025-G4_FLI.pep
SYRGDRDSTAAYVAAATAFKGHMPPRRQWFKEVARAVRSSVVLLSRPLRLVDAVLCCILDVAGLGRQPRLGVVQLVGARRVLARQVLVHPGEHGQRSDAEAAGGDEPGRHERQRDGGRHQHRAEDHQHGGGHRERDHGAGQDQPGQHQHRPAEGRGRRGLERRHHGALLLLLLRLAVHAAPALEVAVAPATSRRTPVVISHGRLAERARYPTCARCPELLPL

SEQ ID NO: 64437 - protein, 137 aa, Zea mays; identical to SEQ ID NO: 60594
  Clone ID: LIB3958-004-C12_FLI.pep

SEQ ID NO: 64438 - protein, 139 aa, Zea mays
  Clone ID: LIB3958-010-B7_FLI.pep
GRQHSSFLSSGDGEESQRCRSGGGDARRGRGTGSACSDGEGALLRPRAGPNGRGGFRGGGAAGEHRGGVPRAGPSPVPQAGGDPGLRRARAQRGVRGRLGRGRRRRRARCHTAHQWRLTLLTTADLCGGDNKRYEDIDR

SEQ ID NO: 64439 - protein, 532 aa, Zea mays
  Clone ID: LIB3958-018-B10_FLI.pep
LDDVWMCVSSSPAACRAYLSPGCLGACIAFWSEELAIASACRSSNVQRRRTADDRAAGGGPAEPRQEAAFRHRERAVGHVVARPHHLPPVGGDEAVDEDEHLELGQVVAGARVHAAPERQERAGPRRHLESGRVELVWVLEVVRAVVQVTEQGHHLPPFGNQEPLVVHVLDGLSEREGDDARQPQALQDNQVCYGHLPRLRPRQREPPAIVLLVGCHLLHLDGFQKLRVVMEELEDPGEHAGRRVLRREQHADNVVGDLVVRERRRRPAVVTGAHEGVQEAMVVVVVAPPRPPLRQDAAQHRAQPLPRLDGLAVAGAGDRDGEAVVAFLHGEVVPPQLLLHVAGQPVAEDGDDADVEGEPLHGMEGAGDAAFPPVERGRHGGLDVGHEAAERVRAKPALHEAAQAEVVVALVEEEGLRANHALLARWVRRFEQVRLRHQHHPRRLRARQDHAGATQHVCLEHLAVPLQPGGEEDLRVLGVELESLAEERQTQGARRQLVLLRAATATSGCSPSSARVEQQHQQSEGDDVDAS

SEQ ID NO: 64440 - protein, 306 aa, Zea mays; identical to SEQ ID NO: 62473
  Clone ID: LIB3958-020-G10_FLI.pep

SEQ ID NO: 64441 - protein, 205 aa, Zea mays
  Clone ID: LIB3958-022-F7_FLI.pep
FSGLTCLASRLPSPPRSRFPPTAAAAAAAAAHLTVPCPLPSMWGSTDGGTPEVTLETSMGAVSVEMYYRHAPKTCRNFVELARRGYYDNVIFHRIIKDFIVQGGDPTGTGRGGESIYGAKFEDEIKTELKHTGAGILSMANAGPNTNGSQFFITLAPCQSLDGKHTIFGRVCRGMEIVKRLGSVQTDKNDRPIHEVKILRAVVKD

SEQ ID NO: 64442 - protein, 281 aa, Zea mays; identical to SEQ ID NO: 59202
  Clone ID: LIB3958-022-H9_FLI.pep

SEQ ID NO: 64443 - protein, 209 aa, Zea mays
  Clone ID: LIB3959-001-A11_FLI.pep
MAQTHDGLERSAEVNELEWSCGRNPDVLIPIANGCEEMEIIILVDILRRAKINVVLASVEKYPAVLGSQRMKIVADKSIMSASDSIYDLIILPGGPAGAERLHRSRILKKLLKQQMQAGRMYGGVCSALKVLQQEGLLEDKTVTAHHAVASELTCQVIDQPNVVIDGNLITGKGLGTVVDFALAIIRKFFGHGRAKAVANGIVFEYPKS

SEQ ID NO: 64444 - protein, 303 aa, Zea mays
  Clone ID: LIB3959-002-C9_FLI.pep
APPTRPIAILPASEPVSSPCCPRGLAVAASSTFLSSAPSAMWRATRRSPPFLRWLSSDAASSKAPRQRVAALWGNGDYGRLGLGSLESRWSPTVCPFFLARAADPPASLACGGAHTLFLTQNGRVFATGLNDFGQLGIGTSVTHMLEPVEISGFHERVVEVSAGNHHSCAVTADGKLFVWGRNSGGQLGLGKGAGKVVSTPTKVDCLTDLRVKTVALGSEHSIAVTEEGEVLSWGAAGSGRLGHGRQSSILGFSLTSTEYTPRLIKNFDGIKIKKIAAGMLHSACIDEKGIWKTERRIQTKYC

SEQ ID NO: 64445 - protein, 307 aa, Zea mays
  Clone ID: LIB3959-003-E1_FLI.pep
RPRSTGTAVWLLPAAVLLLLLNRWSHMASYPSVSPRGSGSVQVGRAELYSKMARDLDERGAAFLKGGETSQSLTLSDLFDTADDGGVVPRLKAADPPVRANVLYMDPKFAAVISKAVKDVFLPYFDQAIWFQNTSMYHFSMFHASHHLEPIVATEDEIEAEVEAVKGVTKNLCPLKIVLDRVVLTSTGVLLGLWQVESGTDPAEIRSRLREALPRAPQKQLYDPVLLHTSFARILRHPRLPKEQSASSFDNVKFFHELVAQINEKICGFQATISELWYVEEYDVLALALNGKMKVRRLHLGCNRQGN

SEQ ID NO: 64446 - protein, 480 aa, Zea mays
  Clone ID: LIB3959-004-G2_FLI.pep
SSSSLQVVNEHTTTMASSSSALLALPVLVLSIAFCIVHGADDDAQRYMVVASSSLEPSEVCSGHKVTSSKNGATVPLVHRHGPCSPVMSKEKPSHAETLGRDQLRAANIHAKLSSPRNSSAKELQQSGVTIPTSSGYSLGTPEYVITVSLGTPAVTQVMSIDTGSDVSWVQCAPCAAQSCSSQKDKLFDPAKSATYSAFSCSSAQCAQLGGEGNGCLNSQCQYIVKYVDHSNTTGTYGSDTLGLTTSDAVKNFQFGCSHRANGFVGQLDGLMGLGGDTESLVSQTAATYGKAFSYCLPPPSSSTGGFLTLGAAAGGTSSSRYSRTPLVRFNVPTFYGVFLQAITVAGTKLNVPASVFSGASVVDSGTVITQLPPTAYQALRTAFKKEMKAYPSAAPVSILDTCFDFSGINTIRVPVVTLTFSRGAVMDLDVSGIFYAGCLAFTATAQDGDTGILGNVQQRTFEMLFDVGGSTLGFRPGAC

SEQ ID NO: 64447 - protein, 373 aa, Zea mays
  Clone ID: LIB3959-010-A9_FLI.pep
PDPSSVTASVSPRGGGTARCGKAALSLTLCQSQPEFCSALLLAMVASRILLPLLLSLFLCSHCCTGAAAAKRQLLQAQSQVKFDFSPFLIEYKNGRVKRLMGTNVVSASSDALTGVTSRDVTIDASTGVAARLYLPSFRASARVPVLVYFHGGAFVVESAFTPIYHAYLNTLAARAGVVAVSVNYRLAPEHPLPAAYDDSWAALRWVLASAAGSDPWLAQYGDLFRLFLAGDSAGGNIARIKGVALLDPYFQGRSPVGAESADPAYLQSAARTWSFICAGRYPINHPYADPLLLPASSWQHLGASRVLVTVSGQDRLSPWQRGYYAALQGSGWPGEAELYETPGEGHVYFLTKLGSPQALAEMAKLVAFINRD

SEQ ID NO: 64448 - protein, 347 aa, Zea mays
  Clone ID: LIB3959-011-F6_FLI.pep
QKPPKLGAFYVLLQLTSRRRTLARARTRAKRSKPSDVEAPAPRASFQSAGPRPSRGIYHRSRSPAARTEVEHQTSSHSATPSSCHPPEAVQAYGAPCQPAPRRGAARRRRCRGGAADVRAHRVPGVRGGGQRQRVRDPAVHGRHVDHHGAHRGHLLRRRHAHRLPTAVRLHPGQERVQPDDRDDGAGADAGVAQRRALLRLRLRRELLRAGQEPGGPAAGRGPARGPLGRGQVRGRAPLRGLRGGRRRRGAGGAARGQPPGHPVGRRRQRRAQGRPGLALHRRAVQLALRVHRQGQRDLDALRRGRRRQYVMRFQACSRGTEAFREGRACTCAVQLCYHEVFRALVR

SEQ ID NO: 64449 - protein, 550 aa, Zea mays
  Clone ID: LIB3959-016-A8_FLI.pep
ICVGQSWESAREPFLVTMNLLEELIRAIELWLRIVKEQVPLIDPTLDPVLLVPGIAGSILEAVDDEGSKERVWVRILAAEHEFREKLWSKFDASTGKTVSVNEKTRITVPEDRYGLYAIDTLDPDMIIGDDTVYYYHDMIVEMIKWGYQEGKTLFGFGYDFRQSNRLSETLDRFSKKLESVYTASGGKKINLITHSMGGLLVKCFISLHSDIFEKYVKSWIAIAAPFQGAPGYITTSLLNGMSFVEGWESRFFISKWCMQQLLLECPSIYELLANPNFQWKDIPLLQIWRENLDNSGKKSALLESYEPEEAIKMIKEALSSNEIIADGMHIPVPLNLDILNWAKETYDLLCSTKLPESVKFYNIYGIDYDTPHTVCYGSEQQPVSSLSSLLYAQGKYVYVDGDGSVPAESAKADGFNAVARVGVAADHRGIVCSRRVFRIVQHWLHAGEPDPFYDPLSDYVILPTLYEIEKHREKHGDVTSVAEDWEIISPNDGKTMRPGELPPMVSTLTTSREGKEGALEEAQATVVVHPEKKGRQHVQVRAVGVSHGG

SEQ ID NO: 64450 - protein, 483 aa, Zea mays
  Clone ID: LIB3959-016-B7_FLI.pep
SFLRPLFFPLVSGGQPWFCRTHSVASAEKCSMASGATLSWVKTPFDTRRFHDLSNLSFRCRNPFGSIQPWWLQTDQDSSLIKVRVAADYSDSMPDSKYTRDRGYHPLEEVKERPKKKDLLLTDIETARTVVEANSKGLLVFPARVHNEPHGHVSWSEFQYVVDEYGDIFFEVPDSENILEDDTANNPVTVLIGMDGPIIGESSVAISDFSDYMDGENFMDVPDEHHTKIDTEITDILIEWGMPATMRAIHPIYFAKCLTKAIHNNNGEKMDSPSNGLSIVGYLRPAFIEEESYLRSMFHGDNGGYSSDWKVNETDEYNRETRPVSGTNRLIDDDKSRFDFNHAETRTDSMIYKLEIMTIELFSMYGKQFKIDPQDFQDSEPDILANSASSIIERIKENSDQCAAALRSLCRRKKGLTVEEASLIGVDSLGIDVRAFSGLEVKTVRFSFNAQSLSERSAEKKIRRMLFPRYQRKNVKASTEDES

SEQ ID NO: 64451 - protein, 343 aa, Zea mays
  Clone ID: LIB3959-022-B2_FLI.pep
LMTEDMHEERLHAAEAFGNAIGLSGQLERDILCSDMSAFKAANPDAVFEDFIRWHSPGEWLSEDKTDGNAGWPPKGKLSHRMSQHGNVWRKIWNDALPLPVSEQKSLLDPVREGEKVLHYLETLRPQQLLEQMVCTAFKSSADILNKTMYGGFKEMKTKMDRLYVTMASTLKSFLGNSDVNDLVGGLKRLCQVFEHIEKLLILAASINRKLIDAPRLAQAIFYDYYNFYLPKMGTSLESICYEKEFTTKEKVGMYERDAVSNLFPPPTANQSWRKVLSMGNLLNGHEPMQREIIFSVQERISNGHYSSPTPLCTNNEKIQTHRMYISGTSNDLWVALSVTSWD

SEQ ID NO: 64452 - protein, 204 aa, Zea mays
  Clone ID: LIB3960-002-F7_FLI.pep
SARRYHYRLLAGPESTSVFEKNSVWHISEDLDIQSMKKACSILVGHHDFSSFRAAGCQANSPVRTLDELSVTEVFPFMFFPSSVERSELELSNVSLVYSRKPDMESSGKGSDGSCTSSVKSDFENGKDFGKRSRHRCFVVTARARSFLYHQVRLMVGLLKSVGTGDLTTADVERILDAKTVTAAPSMAPSCGLYLANVKYDLNT

SEQ ID NO: 64453 - protein, 257 aa, Zea mays
  Clone ID: LIB3960-003-H4_FLI.pep
PSRLQPKPSTTKTQNLRMAQFLRGKAAAAATGAAALRASSPAPWRRTASASYHHTIQAVPRETAGPRAAARERRHGRVPAVLLTLAGAAPGNGIAHRHLLTADRRQLAEMLKQSPYFLSTPVRLQVRAGERSNAILHAGTVLPIKVHRDENSGNILNLVMVKADEGTMLKVDLPVEFKGEDACPGLKKGGFLQKIRTSLVYLCPAEHIPPKIEVDLTNLDVGDRVLMHDIPVHPSLKLLSKNETMPVCKILASKPDE

SEQ ID NO: 64454 - protein, 455 aa, Zea mays
  Clone ID: LIB3960-004-C6_FLI.pep
ESNGNGGSWSAVTVTRAMDPEPFVRLSVGQLGLKLPGGNASKAAGRLCDCEIRLGGFPVQTAPVPLVHSPAFNLDPFTNAAVFSLEESDLKALAAPGCFRAPRSSCLEVAVYYLARFGASRCGVLACGRKRLVGVFRVELASSEWRDGKPVLLHHGWAGIGKGAARPELHLRVKLEADPRYIFQFDDEIALNPQVVQLHGSIRQPVFSCKFIRDRRPSQSDPLGGGQYWSSSSSEEQDMEMVRRERKAWKVVIHDLSGSAVAAAFMATPFVPAPGGDTVARSNPGAWLIVRADTTGSSDSWQPWGRLEAWREAAAAAASSGKDTVRLRLHLLPDRHDDCVLVSEAPLSSDKGGEFFIDMDRQAPSATAAEHCAASLGAACAGGGFVMSCRVEGEARSSRPFVQLAMRHVTCMEDAAMFVALAAAVDLSVKACRPFRRKPNKKAASPSPDHLELDT

SEQ ID NO: 64455 - protein, 575 aa, Zea mays
  Clone ID: LIB3960-006-G4_FLI.pep
VGRYCFHPPALTSLLRPIPSPPPARLPAVHRSPPPAAIQPPVQGSSSRSQPCPLPSRREARRLGSWSEDKETRERMQQLQPKQMHWVRADSSDFGGDRPAPRSGHTAVIIGKSKVVVFGGFADKRFLADVSVYDVENKLWYTPECTGNGSDGQAGPSPRAFHIAVVIDCNMFIFGGRSGGKRLGDFWMLDTDLWQWSEMTGFGDLPSPREFAAASAIGNRKIVMYGGWDGKKWLSDVYIMDTMSLEWTELAVTGSVPPPRCGHSATMIEKRLLIFGGRGGAGPIMGDLWALKGITEEDNEAPGWTQLKLPGQSPSPRCGHSVTSGGPYLLLFGGHGTGGWLSRYDVYYNECIILDRVSVQWKRLPTSNEPPPPRAYHSITSIGSRFLLFGGFDGKNTFGDLWWLVPEDDPIAKRDLVPSIDSNSKPSTVTDDNQLLNLKESQALENPITELAKRLGIALSEEVSASFVDEANDKELVELSSRLAGQSLPASDQVASIQVLRDHWKSSPASSLQLQELGPLLRDYQRLILRHYTGNSLPAFREMEALRFFHLKSASQLRMDDIPVLLSEYGRLLST

SEQ ID NO: 64456 - protein, 416 aa, Zea mays
  Clone ID: LIB3960-010-F8_FLI.pep
LAVDNATTTPTRASPLRSTPCSPPRPAPMATPTAPSRLPLATASASTSFSDRFLRTPCALRPRSWPRLRAGSVKEWREFEDDAGAVKEWREFEDAVRRKDLPRALQFLQSVEPAAVQVAVPVPPGRDWEVLDACVDADDMRLVGRAYQFLVDRGVLASFGKCKNIVLEGPREVTPTVLKEMTGLEAEKLAPKKWGLSGSSPYVLIGFLGGVSFLLTQGVDLRPKLSAVLGLAAADAMLLGGTCLAQISCFWPPYKRRILVHEAGHLLTAYLMGCPIRGVILDPFVALRMGIQGQAGTQFWDEKMEKELAEGHLSSTAFDRYCMIMFAGIAAEALVYGEAEGGENDENLFRSLCILLNPPPAVAQMANRARWSVMQSYNLLKWHKKAHRAAVKALEDGHSLSVVIRRIEEAIASDSK

SEQ ID NO: 64457 - protein, 416 aa, Zea mays
  Clone ID: LIB3960-010-H9_FLI.pep
GLAYLRAQLRVAARGMAGYGEENQNAMNGYEEEEEEEEVEEVEEVYEEEEEGDGEGEGDEGAAAEAAAMAAETRSVDGGRGLAEAVGNVDAGGEDERDADSSGGDASGKVFVGGVAWETTEETFTKHFQKYGAITDSVIMKDKHTRMPRGFGFVTFSDPSVLDRVLEDEHVIDGRTVEVKRTVPKELSSKDGPKTKKIFVGGIPPSLTEDKLKEHFSSYGKVVEHQIMLDHSTGRSRGFGFVTFESEDAVERVMSEGRMHDLGGKQVEIKKAEPKKPGAGDSSSNGRHSRGGGHRDSYRGSGVSVNSGGGYGYGGGYRSAAAAYYGSTAYGAYGRGYGYGATSGYGSGYGSAYGGSMYGGPYGAYGSYGGAYGGGAYGAPGGYGGGGYGSYGGAGGMGGGGSAGGRGSSRYHPYGK

SEQ ID NO: 64458 - protein, 364 aa, Zea mays
  Clone ID: LIB3960-011-D2_FLI.pep
LPVPFRFRDGAARGPQQPPPRRGGAPDDHRRTVAVAVLVQALHGVAGGVVVRVQHRRAAAQQVPALRVRLPLPAAADRVPHVRLRRPLHARPARLAPPPQQLLPALPPPARSRRAPRRRLLRVRRRRERLAPPPPRLLQPGRRRHHAFLHRAPRLRRRRPPRGLRHLRRARPRRRRRRHRHRGRAELPPLRIRHVRGRHGGARAQDRAAGHPAIVRGGEDGLHGPPPLHGAGGRAAAGTGDAGHGAGRVRRGGGPRAGGPQLPLAPALQLLPRLLRQPHQLPRHQAHQPAHSPGPRERQRRRRRRRLHPHLQEPRHGRGHAGLRGHGRWRRLVRRGQEEEQVKRRTGSCTCTFAVRHWNAMPAR

SEQ ID NO: 64459 - protein, 393 aa, Zea mays
  Clone ID: LIB3960-011-G8_FLI.pep
RNGIRASGKAALISRPRLRALLPTSQLQKSSLDAASRAHTHRELLGLSFSVPPSRAQGFTMEAEAAAKRAREGGEDATAPVAGAEAVVAGAGEQAGISAVIPGWFSEISPMWPGEAHSLKVEKVLFQGKSDYQNVMVFQSSTYGKVLVLDGVIQVTERDECAYQEMITHLPLCSIKDPKKVLVIGGGDGGVLREVSRHISVEQIDICEIDKMVVDVSKQFFPHLAVGFEDPRVSLHIGDGVAFLKNAPEGTYDAVIVDSSDPIGPAQELFEKPFFHSVARALRPGGVVCTQAESIWLHMHIIEDIFVNCRQVFKGSVNYAWTTVPTYPSGVIGFMLCSTEGPAVDFQHPVFNIEEDEHSTKSKGPLKFYNSEIHTASFCLPSFAKRVIESKAS

SEQ ID NO: 64460 - protein, 331 aa, Zea mays
  Clone ID: LIB3960-013-C10_FLI.pep
STSCPPSSPSSRVSAWTKDDGRPCWSPRRLHAPPAPRLAPAPRVRLRPLRAPLQGRILLHLLAHPRRRLLRVRHRGRLLQRRAPRRRRPRAVPRRRRLRRLLPGAVQGQEAVRRGGRQGGGHGPRQDQRHRPRAQQHRVRGHGAPRHGPAPRRPPRRRHRVQEGAVRVQAQEPVGEGAGEEALPGGPWRPRHQVSLPGRPDRHRRRRRRAGGLVQLEVHDAPQRRAGVEHEAGAGGAAPAQGGGDGRLRRQVGVGGARGAAAAAARRRGLRHGRPDHRRRPGGMRPLRHARVGVSDACGRTTPVTAEAEAEAEAQALKLQLNLKSLPVELL

SEQ ID NO: 64461 - protein, 282 aa, Zea mays
  Clone ID: LIB3960-014-D8_FLI.pep
GILGSVRPRKRRHHHSSTNPWEEIGVGPANGSESESFLCFSCSAGAAAMGFPSTPNLKLEPRPRTRRLLRCALSSEPVPPMTVSITGATGFIGRRLVHKLLSDDHKVCILTRSASKAASVFPASTYPGLTIAQQGDWEACVRGSTAVVNLAGMPISTRWSPEIKQEIKQSRVNVTSKVCREWEATACQVNQEDVRLVLLRIGVVLGKDGGALGCCVSFNSFSPLLSFYFPSSREGPFQSTLLIHLVHLSICSKDDTPFYDVCWWSSGDGTPMVASLSCATDL

SEQ ID NO: 64462 - protein, 458 aa, Zea mays
  Clone ID: LIB3960-014-H2_FLI.pep
GSLVLCSHLLLAGVPSLSPMASAAAATQVGTYFLRNYYNLLQQTPDVVHQFYSEASTMVRVDDLTGTTAAANNMMDIHSLIMSLNFTQIEIKTANFVNSWGDGVLVMVSGLVQTKEYSHQRKFIQMFFLAPQEKGYFVLNDYFHFVDQEHVQPAPVIAQEDYESNLAPNTVVETAPEYVHEEEAQQIAPEVHDVVENYTYSEPQQQVVSDNWGEEPLPEEPPSFSNEMAVAPEEPVQAPPVPLPHVDEPVCEPVKKTYASILKTAKAPPAFPVAQQVPVSKTSHPTTESNQTQHSVMASSMGTEKPRSDVFGEGASHDDEESKSVYVGNVPSSVSEADLENEFKKFGRLIPDGVAIRSRKETGGYYAFVEFEELSGVHNALKASPIEINGRQIYVEERKPNSGIRGGRRGGRGRFSGGGRGYSRGGGDEYNSNRGRSNGYGRAPHQERGILGSHTPRN

SEQ ID NO: 64463 - protein, 345 aa, Zea mays; identical to SEQ ID NO: 60831
  Clone ID: LIB3960-019-G2_FLI.pep

SEQ ID NO: 64464 - protein, 367 aa, Zea mays
  Clone ID: LIB3960-020-C4_FLI.pep
NDEAAMIGDAIAAQTTYDRENPKIVVGSTFVDKDAFMLLIKQYAIINEFETFVVHSDRSRYRAKCADTSCDWKIHAKKLLGCPTFMVKSISEHHTCASTSKVLGKEATKGWIANKASEILKSNPTIGAKKLQVQLEQQYPINMSYSKVWEGMQCAKKELHGTWDNSFKMLWSFKAQLEETCPGSIVEIDCKKIKGRMHFNRMFVAIRACVNGFLVGCRPYLGVDSTHLTGKYSGQLAAATAIDGHNWMYPVAYGIFDKENDSNWIWFMMQLKIAIGTPHGLTIHTDACKGLANAVLRVFQGAAEHRECFRHLMKNFRKKYQGDVLKYMWPCAWACTPRRHQVLWEKIRESSPEAIVYLETNHKQIWS

SEQ ID NO: 64465 - protein, 344 aa, Zea mays; identical to SEQ ID NO: 59183
  Clone ID: LIB3960-021-C12_FLI.pep

SEQ ID NO: 64466 - protein, 445 aa, Zea mays
  Clone ID: LIB3960-021-C2_FLI.pep
KKLLHLRSSMVRMRFPKRYLIVLLTFICTNVCYIERVGFSIAYTVAADAIGVNQANKGMILSMFYYGYVLSQIPGGWAAQRIGGRRVLLLSFVLWSMICGLIPLDPNRVTILVLSRLFVGVAQGFIFPAIHTVLAQWVPPQERSRSVSLTTSGMYLGAAGGMLFFPSLVKHTGPQSVFFVEAVLGVAWSVIWLKFSSDPPRTDLPKVSMPKVASRDMIKAQAGGVVAPRTVKIPWRRIIFSLPVWAIVVNNFTFHYALYVLMNWLPTYFELGLKLSLQDMGSSKMLPYFNMFIFSNIGGVIADHLITRRILSVTKTRKLLNTIGFIISAFALMALPLFSTPSGTVTCSAISLGFLALGRAGFAVNHMDVAPKFAGIVMGVSNTAGTLAGIVGVGLTGNILEAAKASNKDLTDSETWKTVFFVPAYLCIFSSVIFLIFSTGEKIFE

SEQ ID NO: 64467 - protein, 169 aa, Zea mays
  Clone ID: LIB3960-021-E12_FLI.pep
LAQRKIGYGTKHRGIDGLFHQLTAMISPAHLAFAAAFLLVVRSSAPGAAAARPIFDGKPSPSEATATARWLAAQNTWGVLSTISSDLSGAPFGNVVSYSDGVPGEGRGIPYFYLTTLDPSARDALEDERTSFTLSEFPLGTCGEIDPENPTCAKLTLNGKVLKITSMIR

SEQ ID NO: 64468 - protein, 236 aa, Zea mays
  Clone ID: LIB3960-023-B8_FLI.pep
NTVASLPLAPRLLIKPSLACFSRKDVGRYGGIKVYAVLREDGAEFARNNNLEALFQVDDPGPRAPVKKFLDVNEALEVVRFDIQYCDWRARQDLLTIMLLHSKVVEVLNPLAREFKSIGTLRKELAELQQELEKAHNQVHLSEARVSSALDKLAHMETLVSASSTAEPPTSSSLAATASSTARVRAKNKQPRRRLDVSGPVKPYNPSLKNFWYPVAFSAASFRIYGPRRDSDGATS

SEQ ID NO: 64469 - protein, 242 aa, Zea mays
  Clone ID: LIB3969-002-G7_FLI.pep
VAVDAHPVEGQLGLVRVRVQDLAAHVAVDLPDHDLEGRPHVGGVQGRRLHEEEALGLGQRLAFLHGHLADVAQVTLVAHQHLGHRRVRMCVELLEPAADVVEGGAAGNVIDEERAEGAAVVGGGDGAEALLAGGVPDLGLDLLAFDGHALRLELHPDGGLGVGVELVARVAGQQVALPHRAVADDHHLEEVLLRLPVRLVPHRAAHFPPVAGATPQLASCRHRLARGPCRRIVRGECAARDL

SEQ ID NO: 64470 - protein, 263 aa, Zea mays
  Clone ID: LIB3969-003-G4_FLI.pep
MDPHQFAPSQQSALTMESAESTAAAAARASNGAARAVVEDDDEDDDVPEVAACISTMLDRGGSVESHRLFLARRTALEMLRDRGYAVPEEELARTLPEFRAWWEYRPELERLAFSTTLTSDPSSKVKVVFCPPGPVKIAAIRLIYTEVKDENLSRLILILQGKIMSTTRESIKEIFRFKVDTFQITELLVNITKHVLKPKHEVLTAEGKAKLLKEYNVVDSQLPRMLENDAVARYYGLGKGTVVKVIYDSELTGNHVTYRCIT

SEQ ID NO: 64471 - protein, 159 aa, Zea mays
  Clone ID: LIB3969-003-G6_FLI.pep
AQSTVSRLGTHAVYPFPTKTRRHRVHPLLRHQGSQLFSCYSRIQSRLSTEGADGRIHVKPLLPLELRLELLALQPRGDRHDILDLAGRRLVAGRRGGSKCAGTRPPAPWTRARRGRRPGTTMRRRGGARGLGFGGGATWRAWWCSRVAPRGGGAGGVGV

SEQ ID NO: 64472 - protein, 275 aa, Zea mays
  Clone ID: LIB3969-005-B7_FLI.pep
RQGRQRRGAVNERVDERVVLPRGGRAHEAPQGPQALAHLRAEVVGGHLVRAQEVGVDHDESPDPSAVGQPLRGSAHRHVVRDVGARALAAQEEAGEVGVARDPRVPAAVAVASGAEVGDDPGERFPGVSVGGGDGVLRGEAVLDGDDEDVGEGHEAVEVVVEDGVEGGADAEAAAVVVDEDGELGVPVVQAREVEARGDVGGDDDVPGGNAGGVVRRGGDELGSEVALHAVLVDADAGHGLVDDLVVRGGRRRGGGCGGHRRSGLSRGGHDVRLL

SEQ ID NO: 64473 - protein, 229 aa, Zea mays
  Clone ID: LIB3969-006-F8_FLI.pep
KTIDTCIFTHGYARDASRNGALCNRAQYPARRQHARARVTVSLAGGIGGGGWLVAVLLLLVLILLLLLLLLRLLVLVSEGGGGERVADPDVGLEVDLVALLPVEAHLDDGHPEHDLLAAHPGHALHPAVLHVRGDLGVVAHPRARAAEVVLVGGLLPHPHEPGLAHPAALLQPPQRHHAAREAQRLEHLLGVREAGLRARDDLRALALLVAAGRRGLRGHGEGSHRAAS

SEQ ID NO: 64474 - protein, 293 aa, Zea mays
  Clone ID: LIB3969-009-E3_FLI.pep
MKANMGTKARPPSADAEKGEIGEIDTRAPIQSVKAAVSLFGEVRFSSDKSAERKPKAPQTERVLAKETELHMAQKELNKYKEQLSNAETTRVQALSELEKAKKTVEELTAKLDLINKSKQLAIQATEDAKTQIKQLEGGSTSEGLGTDGALKQELESAREQYAVALADLDAAKQELRKLKKDFETSLDMRLSAAQQEEESLHTTEANIEKANQLRSEIAEIQESLMHVKAATVQAHEEEAQILAEKDVARTTYKQALEETQKKLLSLRNDFDPAAYDSLKQKLEQTNSEIASM

SEQ ID NO: 64475 - protein, 334 aa, Zea mays
  Clone ID: LIB3969-010-E2_FLI.pep
FSPAQPSQGEGMSAAPAAGGQGGGGIDAALLDDIIRRLLEVRTARPGKQVQLSESEIRQLCTVSRAIFLSQPNLLELEAPIKICGDIHGQYSDLLRLFEYGGFPPEANYLFLGDYVDRGKQSLETICLLLAYKIKYPENFFLLRGNHECASINRIYGFYDECKRRFNVRLWKVFTECFNTLPVAALIDDKILCMHGGLSPDLAHLDEIKNLQRPTDVPDQGLLCDLLWSDPGKDVQGWGMNDRGVSYTFGADKVSEFLQRHDLDLICRAHQVVEDGYEFFADRQLVTIFSAPNYCGEFDNAGAMMSVDETLMCSFQILKPAERKQIYGAKQNVR

SEQ ID NO: 64476 - protein, 253 aa, Zea mays; identical to SEQ ID NO: 37793
  Clone ID: LIB3969-011-D1_FLI.pep

SEQ ID NO: 64477 - protein, 218 aa, Zea mays
  Clone ID: LIB4071-008-C4_FLI.pep
PLSHSTPTFTCSCREQAMAPDLSELAAAAPARGAYLAGVGVAVLLAASFLPVAESSCVRDNSLVRDISQMPQSSYGIEGLSHITVAGALNHGMKEVEVWLQTISPGQRTPIHRHSCEEVFTVLKGKGTLLMGSSSLKYPGQPQEIPFFQNTTFSIPVNDPHQVWNSDEHEDLQVLVIISRPPAKIFLYDDWSMPHTAAVLKFPFVWDEDCFEAAKDEL

SEQ ID NO: 64478 - protein, 209 aa, Zea mays
  Clone ID: LIB4073-016-F12_FLI.pep
MWNSVSQFLTTQLHADHHHQHPSLALPDKPSHVYQHHPAITTTNLRRGELGDSLGALGDGVLGELAGEDEAHRGLDLAGGDGGLLVVARQLGGLGRKLLEDVVDEGVHDGHGLGRDADVRVHLLEHLEDVDLVGLHGLLRLLLPLLALAALLAGGLARGEPLLGLGLLPRRGLLRLLGRGLLLRGLLRRRLLLRLGCHRWCGFGTVRLW

SEQ ID NO: 64479 - protein, 240 aa, Zea mays
  Clone ID: LIB4073-018-D6_FLI.pep
STPSILSQSLLSKHLINTTDRSMASSWVSRLPLAVLLLVACSSSRAAATSYTVGDGSGWTTGVDYTSWAASKNFKVGDNLVFNYAKGLHTVVEVSAAEYMACTAANPLGSDSSGATTVALKTPGTHYFVCSITGHCGAGMKLAVTVGGSNSPATTPTPTTPRTSPTTPYTTPTTPTTTTPYTTPTTPYTTPTCSGGGGGTTATPGMTPFMSYPSAAGLGSAALAGFGLVWCVIVQVALLY

SEQ ID NO: 64480 - protein, 314 aa, Zea mays
  Clone ID: LIB4073-018-E1_FLI.pep
ILCMDRCMRKCNALLGKLGSNPTEPRAALGLLDSLFGGVGGVGLPAFGDDVFVGGLGASLGGDLDGDGKLDWLVAVLPPDSAPGVLEGLVRVATLLLDVHPHNVTVAVDVLDQQSQVVGVAPLLHVEGDLFTVLALDPAELHVDDARLAQLLLLALLGHGAERRAGQVEVVGGDLLVVHVRDVHHHGLAGALGRLVTLDLKAGAAAEAVLEDGEVAARAHAVEGGLVHILVTTCAAVVVGAGACWLTVPCCLRFQPVAAVGGRDVLARGNLGRTAPCAAHQKRQRHHQRHLHRPRHHVRSHLPLIVWWMVCNVT

SEQ ID NO: 64481 - protein, 235 aa, Zea mays
  Clone ID: LIB4073-019-B1_FLI.pep
VVYLSPVDFGIDKSIFIKPKTFHLTVLMLKLWNKDRIAKAADVLQSVSTKVNEALENRPISIQLRGLTCMKGSPAKARVVYAPVLEVGGEGRLARACKVITDAFVKSGLVFERDARELKLHATVMNVRHRKRKYGNEDWGEYPIHEVHLSQRFKFDKSGYYYCCPCLQRCTQSEICSCDHVLGLLHNNNNNNNKTAVHEAFNFVISGMPLGQVLLCINCFESPMSRCIYCLESPI

SEQ ID NO: 64482 - protein, 540 aa, Zea mays
  Clone ID: LIB4073-022-C9_FLI.pep
LHPETQIWSIELALCFVGCVLLLHRKELHFLLSALDAGQMKSSRFLFLCAMFCLMARLGAANVVLMGNNLTLSFDDIEASFSPGVKGSGVSGVVYASEPLNACSPLTIKTVNGPPSPFALIIRGGCTFDEKVKNAQDAGFKAAIVYDNKNSGVLVSMAGSSSGIHIYAVFVSKASGEVLKKFSGNMDVEVWILPTFENSAWSIMAISFVSLLAMCAVLGTCFFVRRHRIRREHPRIAEDREFHGMSSQLVKAIPSLIFTKVQEDNCTSSMCAICLADYNVGEKLRVLPCRHKFHAACVDLWLTSWRTFCPICKRDARSGASEVVATEATPLLSSAARLPSFRSSVAASPPRPISRHPSSHSVSRAYSVSSTPNSPNPFISSHISSPGIRASRSITDLGNISSLHPRISHLSSTHSLVGSHLSPPISIRYWSSHVAHSGYGSPSPHVSSSYISNSGYGSSSYCYLGLGGSSHSQHGTYLRRCGESGPSLCTMVPQQLQWETNVAAGASSAKSLRQSSYLRHCGDSDASLSDMTSAQSLPRC

SEQ ID NO: 64483 - protein, 157 aa, Zea mays
  Clone ID: LIB4074-003-D10_FLI.pep
VRSSQCSEITLLSSASFYKSNRITPSRSNEHRTIQQRKNQAGSSPIRIPGQPQPQSNPLQVAGWLRVSTTSPRRRRRRTPQASSSSSAPRASNSSSTRRPPWSPTPYATCSHRQAVSPRRARARFASRRSPPISSRRSASTSIGRSIIPVARKQQSF

SEQ ID NO: 64484 - protein, 207 aa, Zea mays
  Clone ID: LIB4074-009-F1_FLI.pep
VRGQMALCGACVHVPRTSACKAGALTGAVTGAVAGRASDSGGVLRGAGLGAVAGAILSIEVLEASRAYWCSSDRLGSHGGASSMADFIEQLLRARFVQEQFTASGYASYRWQLSISYFGQDDLYDIFGDISSEGLSQESLKKLPHHVVSDQTRDLLGEILCCPICLQDIVAGETARRLPGCSHAFHQPCVDRWLVGHGSCPVCRQRV

SEQ ID NO: 64485 - protein, 381 aa, Zea mays; identical to SEQ ID NO: 51808
  Clone ID: LIB3060-101-H9_FLI.pep

SEQ ID NO: 64486 - protein, 524 aa, Zea mays
  Clone ID: LIB3060-104-F8_FLI.pep
AAEAGTAMACSGCSCEAAVGAMASEAYLEGAPVREARELVAELCRHFYAQGWVTGTGGSITVKVNDPTVPLADRLIVMSPSGVQKERMVAEDMYVMAADGKVLSAPVAKPWPNKPPKCTDCAPLFMKAYLMRGAGAVIHSHGIETCIATMLIPGAKEFRVTHMEMIKGIKGHGYHDELVIPIIENTPYEYELTDSLSEAIAAYPKATAVLVRNHGIYVWGESWINAKTQAECYHYLLDACIKLYQLGIDWTTPEHGSINNPRRPHSILSPEICNGCHAADSSKCVVLDIEGTTTPISFVTDVMFPYARDNVRKHLTSTFDFEETKEDIKLLRIQIEDDLQNGVAGAVPVPPDEGGKEEVINSLVANVESMIKADRKITSLKQLQGHIWRIGFQKKELQGVVFEDVPVALKNWHASGIKVYIYSSGSREAQRLLFGNTTYGDLRKFLCGYFDTTTGNKRETRSYFEISQSLGVDSPSQILFITDVFQEAIAAKNAGFEVIISIRPGNAPLPDNHGFRTIKSFSEI

SEQ ID NO: 64487 - protein, 565 aa, Zea mays
  Clone ID: LIB3060-105-A9_FLI.pep
AQSRRSAPFQPPTPAAKHISSAAKNSQRESQNLFTSLHVDTCGENMRATIPALSLLVTPRLPSLAVPLAGGRLRVGGRPRTRLRVAAPTSVPGEAAEQAEPSTSAPESGEKFSWRDHWYPVSLVEDLDPSRPTPFQLLNRDLVIWKEPKSGEWVALDDRCPHRLAPLSEGRIDETGCLQCSYHGWSFDGSGACTKIPQAMPEGPEARAVRSPKACAIKFPTLVSQGLLFVWPDENGWEKAAATKPPMLPKEFEDPAFSTVTIQRDLFYGYDTLMENVSDPSHIEFAHHKVTGRRDRARPLTFRMESSGAWGYSGANSGNPRITATFEAPCYALNKIEIDTKLPIFGDQKWVIWICSFNIPMAPGKTRSIVCSARNFFQFTMPGKAWWQLVPRWYEHWTSNLVYDGDMIVLQGQEKIFLAATKESSTDINQQYTKITFTPTQADRFVLAFRTWLRKFGNSQPEWFGNPTQEALPSTVLSKREMLDRYEQHTLKCSSCKGAYNAFQNLQKVFMGATVVCCAAAGIPPDVQLRLLIGAAALVSAAVAYAFHELQKNFVFVDYVHADID

SEQ ID NO: 64488 - protein, 929 aa, Zea mays
  Clone ID: LIB3060-105-D3_FLI.pep
LECLPASMLSSMVVPMSNPLPMLTLTIICATLWLTGGAGGTGTDTGGGGCIPSERDALLSFKKGITSDNTSRLGSWHGQDCCRWRGVTCSNRTGNVLMLNLAYPSYPYDDSYYTDVCGDYRTLVGEISPSLLLLRQLEHIDLSWNCLLGPNGRMPSFLGSMKNLRYLNLSGVPFKGSVPPQLGNLSRLQYLDLGNSYVGYGIYSKDITWLTNLPLLQYLGMRSVNLSGIAGDWPHILNMLPSLRVISLSFCWLGSANQSLAFFNLTKLEKLDLSFNNFDHTYISSWFWRATSLKHLVLKDTGLFGELPDALGNLTSLVVLDLSSNGNMTITQGLKNLCGLEILDLTYSSINIDIAELMDTLPLCTRENLQLQELHLGYNSFTGILPSSIGYFRSLRILDLTDNNLRGSVPTEIGTLTNLTSLDLSNNNLGGVITEEHFVGLMNLKEIELSFTNLSVVVDADWIQPFRLESAGFASIHLGPLFPVWLHQQLLQITYLDISSTGLVGNIPDWFWSFSKAAFLDMSYNQLNGNLPADMSDMAFLMLNLCSNKLTGQVPPFPRNITMLDISNNLFSGIMPQNLSDFETLYFLILSNNSLSGTFPAFLQNCRNMIFLDLAWNNLSGRLPSWIWELKGLHVLRLSHNSFSGNIPSEITSLSYLQYLDLSGNYFSGVIPPHLSNLTDMTMNAVDHSFNIEFEKYTIHGGVDQFNDIWLVVTKGRQLTYSQGAIYFVNIDLSGNCLTGEIPFDITALDALMKLNLSSNQLGGKIPNKIGAMRSLESLDLSNNKLFGEIPWSLSNLTFLSYMNLSYNNLSGRIPSGRQLDTLNSDNPSLMYIGNSGLCGPPLQNNCSGNGSFMPGYHRSNRQKFEPASFYFSLVLGLVVGLWMVFCALLFINTWRVAYLGLLDKVYDKIYVFVAVKWASMTMSAAAAE

SEQ ID NO: 64489 - protein, 495 aa, Zea mays
  Clone ID: LIB3060-105-F7_FLI.pep
RRFRLSVRPCPFPPLAARRRNRFHPFLRVAGRNEEGGRMASDGHPPEPGKKEDVATTAAGPGANDLDDPQFMCCVCLDLLYKPVVISCGHMSCFWCVHKAMHIFRESHCAVCRQPYIHFPSICQLLHHLLLKLETNDYKRREKEVLEEEKRMQTYSPQIIEFLNYKTNVGSYKENRNEDSKARPPQEVPLNDSVPDEHLKKIKLEDVSCPLCMEMLYQPAVLNCGHVYCVSCLSSLNEETLKCHVCGSLHPGDFPNVCLDLDHFLEEYFPAEYELRGQKVQFKKDQCNRETSSSGTSGRKGSTRALHAEDPSNIHIGVGCDSCGVYPIRGKRYKCQDCTELIGFDLCEACYNSSSKLPGRFNQRHTPNHRMEVDNSALVHRILRHHGIPEEGPEGLMMEVVGPDAMVQILIDNQGMEEGNDEGPGEAAIEEPVGSLGSMSRLSHLFMYNPEMEDGNDEDSGEEAAIEEPVGSLGAMAPLFMYDQEMEDNEEDQAH

SEQ ID NO: 64490 - protein, 234 aa, Zea mays
  Clone ID: LIB3060-105-H5_FLI.pep
KKNSGGRMAAAEKPAAVRRAEELVEREMGGRDASHDAAHALRVRDLALSLAAEEGLSAPDRLLTVELAALLHDVGDYKYTKNNVEDMSVVEMFLQEVGLDEGQKDEIVAIIKGMGFKNEVSNKSIVEPTLEFAIVQDADRLDAIGAIGIARCFTYGGSKNSALHDPRILPRDSLSKEKYMSKEEKQTSINHFHEKLFKLKDMMKTEAGKRRAEKRHRFMEEFVAEFYEEWSGRA

SEQ ID NO: 64491 - protein, 407 aa, Zea mays
  Clone ID: LIB3060-108-G2_FLI.pep
IIPVSLLKKKSPGTNHNHKRRRREASVGMARRGAAAKGTWRPRRKPSRAQADVDGDGDAVHRGAEGGRPPPKGHTNATGSGGFFCCYLLRSLCPRSKGRTYIGFTVNPRRRIRQHNGEIVSGAWRTRRGRPWEMVLCIYGFPSNVAALQFEWAWQHPTESLAVRKAAAEFKSLGGIGNKVKLAYTMLNLPSWESLNLTVNFFSSKNTKFTTGCPSLPSQMKAVVCAMEDLQCQPDGPSSEEDDNDIRDESQDNGEEPPDSPIRDGFSYSDYCFQQPSSDQAQSMDEQTISAGSGVEDDFVDEFASSMERSEILGTRRGPNGPRTSPLCSLGACSNDDGLEEEAGLMSPLLMPNASSDAGDGRHSINGNHVVDLVTPTPLGRLRRRDCISSICPKIIDLTSSPIVIQL

SEQ ID NO: 64492 - protein, 401 aa, Zea mays
  Clone ID: LIB3060-109-B8_FLI.pep
RRASERNGAREVKRAAMPELPEVEAARRALQAHCVGRRIARCAVADDAKVVVAAAGRAAFERAMVGRTIVAARRRGKNLWLQLDAPPFPSFQFGMAGAIYIKGIPVTNYKRSVVNSEEEWPSKYSKFFAELDDGLEFSFTDKRRFARVRLFEDPETVPPISELGPDALFEPMSVDSFLDSLGRKKIGIKALLLDQSFISGIGNWIADEVLYQSRIHPLQIASNLPRESCEALHQSIEEVVKYAVEVDADMDRFPKEWLFHHRWGKKPGKVDGKKIEFITAGGRTTAYVPQLQKLVGTQSSKTISVAENGDAKDPGTEGEDADVLKPRKRAATSSAARGQRNKDTAGSRKARVNGADAEAAEPTTGIVGSNGEQAFGQPNSDAVDKSDRATRRSSRKVKARK

SEQ ID NO: 64493 - protein, 498 aa, Zea mays
  Clone ID: LIB3060-110-H8_FLI.pep
YYPNSLPEYSAMSTAPHFVLVPLLAQGHMIPTMDLARLIASQGARVTVVLTPVNAARHRAVLEHDTRAGLAIDFAELAFPGPAVGLPEGCESFDMLADISLFATFYEALWMLPEPLEAYLRSLPRLPDCLLCDSCSSWTATVARRLGVLRIVVHFPSAFYILAAHSLAKHGAYDRAADDFEPLEVPAEFPVRAVVNRATSLGLLQWTGFERFRRDTLDAEATADGILFNTCAALEGAFVERFAAELGKRIWAVGPVCLVDSNAARATAERGDRAAVDAEQVVTWLDARPAASVLYVSFGSIARLLPPQVAELAVALEASRWPFVWSAKETAGLDAGFEERVKGRGLVVRGWAPQMAILSHPAVGGFLTHAGWNSILESLCYGVPMLTWPHFVDQFLNEALVVDVLGVGVRSGAKVPATHEMHVTIEVQVGRVDIERTVSELMDQGSSSAMRARAKELAAEVRAAMAKGGSSDADVKDIVRHVIEVAKNKREHARGHHS

SEQ ID NO: 64494 - protein, 625 aa, Zea mays
  Clone ID: LIB3060-111-G1_FLI.pep
FRPNRSSLRLPLRLRAAGRGKKTTWIHLLLGQLQGDLISVTMKRMHRMQTRKSHSWWWDSHISPKNSKWLAENLEEMDKQVKEMLKLIEDEGDSFAKKAEMYFQRRPLLVNHVENFYRMYRALAERYDNVTGELRKGLALQSQGSGISETDSETQSTSSCPEPNMEQNTAKPKRNVLLGSGGSSDISKKESDGSSSSSSDSDSEVDEASEENGNGISYISDERIAELEDELQEARQQIEALEVKNMHCQCEKLEESLKQVSNEKEDLVAAILASKNEVEDLKGDMVSAAKHFEAQLVHRDHEIEKCKQEAEQVSEKYFHEKSTLESEIERLQEVVRSFEENLTKVAGEKFQLEAQVKELEQTSNDLDDSSAEIIKLQEIIKDLQGRLENDSNDKSVLEERAMELEQVRRQLEDSRAEASMKLQTTIKNLNQVLEEKAELENRMKDAEQATSDLNSLVGSLDGKLKATEAQLEQLHAEKAEAILESEKQISELNQAIARLKTRLELLSSEKAAVDTKASALLTDVAVRDEKLKETDRHLQQLHLEHVELIGAADAARKDASGLRSRVRELEVEVERQRLMVADSAEGKREAIRQLCFSLDHYRHGYQQLRLLLQGHRRPRPMVMTA

SEQ ID NO: 64495 - protein, 514 aa, Zea mays
  Clone ID: LIB3060-112-D12_FLI.pep
VSSTIATMTSNFTPNVWAWIASLPPFTQWRTSTMSLCICATPSASSSQPQPQPSINLSATKTTSIAQPPYVIFSVFASYSMPVSLWKSQPFHLKTKAQQSLDEQDIIHIFVNIVDSVLRYCPDKNSSFRFPGAQQPRGNFSDVFNIAFLSLAFLLCIFEVPRDLRPGCLGSLGAQLTGSRCRDAAKSLVRMLGANLEDQWMQTMNLAVTNWIVELRSSSRSSGPPSPLFSYAVSASGLWKVQLYCPVIAMGMEEAAETPQDERLLFSLIYQQVECVIQLAYRTTRRDNWIDVEVKVDNVRCDVDSLVSETLMAERGYGSEEKHFPSRVMLQITPTQQSDVLSVSVGKSNDNPTHEFGIEKGFEGSFEPPNAFGLKASVTESLTLAMKPWKFEQSVHGNTATLNWFLHDGVNGREVYSSKPSKISLLQPKAWFRDRYSNAYRPFTKQGGVIFARDEYGDSVWWKVCGATLGQTMNWQIRGWIWLTYWPNKQRTFHNETRWLEFRECLQLPLTKFP

SEQ ID NO: 64496 - protein, 302 aa, Zea mays
  Clone ID: LIB3060-114-G5_FLI.pep
LFRRVFSRFPLPTRSITPDLCKLPLTSSSSSMESKDGTHDPATTAAPPAGAPQPAMPSAETARWGTRQMGPPAAPGAHPENQEAARWTAARGDQELPPYVIIGEPVAAPPPQHRGKGDSPMEHILDFFNTWSRKAEELASSIWFNLKAAPSMSDAAMGKLSLGAKALSEGGFEKLYKQTFSSSPDEHLKKTFACYLSTATGPVAGTLYLTNLNVAFCSDRPLSFAAPSGQTAWSYYKVMIPLGKIATVEPVTMKESPPEKYVHVVTVDSHDFWFMGFVSYDKAVHNLVEAVSQHGVATAGGK

SEQ ID NO: 64497 - protein, 260 aa, Zea mays
  Clone ID: LIB3061-076-D1_FLI.pep
EHHLRSPSPTAPLSLSLSHEPRRRRHHARGRQRPQPQPPAGGIGMVAPGGGAGGGPSRWPAAEELDTVRKKVVEISGRDEQEVMVAACPYRICPLGAHIDHQGGVVTAMTINYGVLLGFVPSNGSEVLLHSGQFEGAIRFRVDDLQKPIDKPENINWGSYAKGAVSALQNSGYDLRKGIIGYISGVKGLDSSGLSSSAAVGIAYLLALEHVNDLVISPVDNIQLDKYIENKYLGLENGILDPSAILLSRLLHLPTSASRS

SEQ ID NO: 64498 - protein, 411 aa, Zea mays
  Clone ID: LIB3061-077-F3_FLI.pep
KQVVGMAEAEAHGIVIVGGGICGLATALALHRKGIPSLVLEKSRSLRADGAGIGVHANGWRALEQLGVAAELRETAQLITVYHDVWQQGDKTSREKVPVRMELRCLNRKDLIEALAKDIPAGAIRFGCRVAAVAADPGGGHGAVLTMADGTAMKAKVLIGCEGTYSAVARYLGLSPVRTIPRPVLRGFTWYPHGHSFDTEFLRLRVGGFFIGRLTITDNLVHFFVTMPKQPTADVIKDLKRVRDLALKDLQDVECPAEIIEIVRGSDPESLNLVTDFWYRPPWEVVLGSFQRGAVTVAGDAMHAMGPFIGQGGSAGLEDAVVLARSLARAAAVDDADDDDNAREKKVVGEAIAEYVRERRPRLALLSLESFVMGALLVRSPSPVTKLVCVAVLILLGSKSLRHANYDCGRL

SEQ ID NO: 64499 - protein, 126 aa, Zea mays
  Clone ID: LIB3061-088-B5_FLI.pep
FAFDPHRGTDETTEMKDGTSSGGGAFAAGSDPRQPSTAKPYAPPKLSPQDLPIDYAGFLAVVFGVLGVMLRYKVCSWIAIIFCAQSLANMKNFENDLKQLSMAFMFAVMGLVTNYFGPARPGSTKR

SEQ ID NO: 64500 - protein, 262 aa, Zea mays
  Clone ID: LIB3061-107-E1_FLI.pep
AVAVGTVFLLALLLLLLAAGCRELRSIESTAVVRAAGGGGARQWAETTTDRSEGMSSAQIVPADHVCYVHCNFCNTVLAVSVPGNSMLSMVTVRCGHCTNLLSVNLRALMHSIPEQDQLQQQENIRVHGTLREHHQCGGGHHLELGSSSSSRFRLPMMMSYAPQNEHLLQEQTLNNARPAPEKRQRVPSAYNRFIKEEIRRIKANNPDISHREAFSTAAKNWAHYPNIHFGLNSGREGGKNKLVDEAVAAVAVAPKKIQGFY

SEQ ID NO: 64501 - protein, 356 aa, Zea mays
  Clone ID: LIB3061-109-F3_FLI.pep
IIMGSLRDGKTNSSSGRRWCAVTGGRGFMARHLVAALLRSGEWLVRVTDLAPDVVLGLGDTEDVLDDALRDGRAVYASADVCNLDQLIQAFEGVEVVFHTAAADPSKNDQQLHYKVNVEGTKNVVDACMICKVKRLIHTSSIAVVFDGVNGLLDANESLPYPDKFPDAYGQTKAEAEKIVMKANGISGLLTCCIRPGSIFGPGDIVILPTLDQCGKTHFVFGDGKNCDDFVYVENVVHGHICAEKTLSTMEGAKTSGGKAYFITNTEPMNMWDFLYLLQEELGYKRLFKIRIPLIVIQAVSYLVEWGYKVLHHYGMCQPQVLTPARIKYLTVHRTFSCNKAAEELGYKPIVTLMVS

SEQ ID NO: 64502 - protein, 357 aa, Zea mays
  Clone ID: LIB3061-113-F12_FLI.pep
DEAVRQSLGCDAYPAGTVSTSNGTEVYGTGLKNAAGEYNCFLNVIIQSLWHIRRFRDEFLKTSLLHKHVEDPCAVCALYGIFIDLSKASKGQREAVAPTSLRIALSKSYPNSKFFQEGQMNDASEVLGVIFECLHKSYTSRTVYHGVSHEKNSIGSWDCANISCITHNLFGMDVYERMNCHNCKMESRQLKYTSFFHNINASSLRTAKMMCPDSSFDELLKVVIMNDQLACDQDVGGCGTPNHIDHILSNSPHVFTVVLGWQNNKERVDDISATLAGISTEIDISIFYRGLDQGGKHTLGSVVCYYGQHYHCFAFKDGRWVMYDDQTVKVIGSWGDVLVMCEKGHLQPQVLFFEAAN

SEQ ID NO: 64503 - protein, 148 aa, Zea mays
  Clone ID: LIB3062-011-F11_FLI.pep
SLWVSRLLLFRSRIVVDARRGHAPHMHARSSCPALAAFTYSPELHDVVEVTRAGYDACSSANNISAFRTGNDAVPLTAVGTRYFLCGLTGHCGNGMKIRVDVVAAAASPSAPGPAAAAAAPPTTSSPCIVGVVAASLLLLLLHAVVSY

SEQ ID NO: 64504 - protein, 419 aa, Zea mays
  Clone ID: LIB3062-055-F3_FLI.pep
KFRPLMATAAKARAPPAVTASKAAAAAVELEEHVHYKHTDACHQLRWTAKESYEYMYARPWSRVVDFYAELVRAGAGAAGLAKLFGNDEKDYTLYTAGENYLTPSEKPTTTTFSKGRGGRWERVTFKVVISYHGGSFDGWQKQPGLNTVQGLVEKHLGQFVDERKAKQLEARSLPIEGCAIVAGRTDKGVTALQQVCSFYTWRKDVKSGDIKGAINEAAPDKLKPLHVSEVSREFHPNFAAKWRRYMYIFPLDEDADLILGEAQSSKTLENSEHNIKPQSFDVSKVDEILKPLAGKTLSYKMFARDTQASRSVGPPTECFMFHSRAAVAKLHSANEDHKGGMVVMCVELVANRFLRKMVRVLVATAIREAAAGAGADALLNLMEATDRRATAPPAPPEGLCLVDVGYEDFDKQRCFIVD

SEQ ID NO: 64505 - protein, 133 aa, Zea mays
  Clone ID: LIB3066-004-A7_FLI.pep
CDTCRAGFETNATTPIAGAKVRLECRHYMSASGAVERSAEGTTDAAGKYRIELVDNRGAEEVCSVALVSSPVPGCAEKEVGRDRAQVSLFTDAGAGLATTVRRANPLGFLKDKPLANCGQILSSYALGSAPSY

SEQ ID NO: 64506 - protein, 332 aa, Zea mays
  Clone ID: LIB3066-009-E9_FLI.pep
AGSCEAVQVSCFAEDFSHPPAEGRALPSFCGEWATFLGPESICLLLAVGEGKDSNQHNMAAATAAASTMSLLPISQLRQQHGAGAMRRRPWVARRRRYVVPTARLFGPAIFEASKLKVLFLGVDDEAGSKQHGPLPRTYTLTHSDVTARLTLAVSHTINRAQLQGWYNRLQRDEVVAEWKKVRGRMSLHVHCHISGGHFLLDLIAGLRYVIFRKELPVVLKAFVHGDGDLFSRHPELEEATVWVYFHSNLARFNRVECWGPLRDAAAPAEDDSTAPPDASNSKEAGQMMAMCEWPHRCPQQCDCCFPPHSLIPWPNEHDMAAADASGSAQQQ

SEQ ID NO: 64507 - protein, 447 aa, Zea mays
  Clone ID: LIB3066-012-E8_FLI.pep
LLGQHLQQVNDVDLDAVDAGGLEVGVQTIVELVRALGVDEADTVVDDLVDGEVLHGALQAGGELGRHHLGGRQAGRAGAEAAPVPAQRVPHVHLLHGGERRLHLPHERAHPALLVLPELVVLLELDEAAGHLLAGGGAVHALLAAVRVVLVVADGLPAVVDEHQPRRAAALRQAAHALPDALRVHLEVEGVPRAPPELVHDRRRRLLLHGPERAQVRADHPDGVRDELERVVARVQVQRAPERGAAHRRRPALHAQVHVVFHLPGLEAGPERALDDGEQQHVGSAAADGLAGGAVEHHHLRLVLHVPAAVPHPVRRPPHLETEDAHEPNVTELSDGHHVPALGRRRVEAEEAAAARCGDVRGGHERRRRGETDVGRHVQQDRVPVHGQVLALKGEPRRLESLHRGHLVAEEASRRLLAEVGSHGEGTGCGLGLWLWRASGELEPTVL

SEQ ID NO: 64508 - protein, 566 aa, Zea mays
  Clone ID: LIB3066-012-H9_FLI.pep
PVRPCVRPTIRPSAAMVGGMSPPRRTLSMGSGGAMGRRAASAGVMGDSPKRGLSRSMTMGGERTVKRLRLSRALTVPESTTVLEVCRRMAARRADAALLTDSNALLCGILTDKDIATRVIARELKIDETPVWKVMTRHPIFVLSDTLAVEALQKMVQGKFRHLPVVDNGEVVAMLDIAKCLYDAISRMERASEKGKAAIANVAAGDDKYSIVEALKEQMFRPCLSAIIGEDSTVVMVSPGDSVLAATKRMVEAHATSAVVAVGSKPQGILTSRDILMRLVAKNLSADATPVEKVMTPDPEFATVDMPILDALRTMQERKFLHLPVMDRDGSIISIIDVIDIAHAAISIVESSGGGGDGSAGSDEAASSMFQRFWDSAMALGPLDDETDTQSQMSEASRSQMMMSDVHHHHHHHDSAGGGSEAGFSLSSFSFKLQDRRGRMHRFSCEVQSLTPLVTCILRRLGADIDPDRLPQILYEDEDRDKVVLASDDDLAAAVEHARLAGWKGLKLFLDYSGTTGRRKAVATPRGAMAVGMSSRDAWAAAYSGVAAGAALVTGIGVMAYLRRSA

SEQ ID NO: 64509 - protein, 410 aa, Zea mays
  Clone ID: LIB3066-014-H6_FLI.pep
EGRREGHVHTIKQDVQTRVRGGSRSGEVTKLADGTTTMARSGGGMEGSGGLKKGPWTQAEDKLLRDHVRRHGEGNWNAVRRETRLQRCGKSCRLRWANHLRPNLRKCPFSPEEERQILLLHGLIGNKWARISKHLSGRTDNEIKNYWNTRFKRRQRAGLPPYPPDVERQIKLLRAQNVNPFALLSSIPSLSQTASHSHSPLINQNYPLLNQMQVFHHLGGSQQPSFHQDGSAAAFGDIVSSRLPPLPTARTQAELHSNQFDTSISGGLVDQSMLIGDEHLLRPNPSMVKVSSMPALSYREPDGSRMLPAHGAGSDGDVSSLGQCPPGQDLHRGATWDFTFAAVKPAKRRTASEVGFSDMFAVAPPGDWFGGGSTAPSPGPSSAVTDEEFNLEMQQFMSMLPLSDEHGWNA

SEQ ID NO: 64510 - protein, 415 aa, Zea mays
  Clone ID: LIB3066-016-E6_FLI.pep
IDHDKMACTNNAMRALFLLVLFCIVHGEKEESKGIDAKASRPGGSFDITKLGASGNGKTDSTKAVQEAWASACGGTGKQTILIPKGDFLVGQLNFTGPCKGDVTIQVDGNLLATTDLSQYKDHGNWIEILRVDNLVITGKGNLDGQGPAVWSKNSCTKKYDCKILPNSLVMDFVNNGEVSGVTLLNSKFFHMNMYRCKDMLIKDVTVTAPGDSPNTDGIHMGDSSGITITNTVIGVGDDCISIGPGTSKVNITGVTCGPGHGISIGSLGRYKDEKDVTDINVKDCTLKKTMFGVRIKAYEDAASVLTVSKIHYENIKMEDSANPIFIDMKYCPNKLCTANGASKVTVKDVTFKNITGTSSTPEAVSLLCTAKVPCTGVTMDDVNVEYSGTNNKTMAICTNAKGSTKGCLKELACF

SEQ ID NO: 64511 - protein, 262 aa, Zea mays
  Clone ID: LIB3066-023-B3_FLI.pep
IGRQREARLMGMAAKEHFVLVHGEGHGAWCWFKLRWLLEGAGYHVTCIDLAGGGVDPTDPNTIRSFQQYDKPLIDLISTLPEGEKVILIGHGAGGLSVIHAMHEFVDRISQAFFVAATMLPFGFQADEDKKDGLPTLPENEIELTLGAGADDPPTTISLRPEFQRDRLSQQSPEEESVLASMLMRPWPATAISTASFEGDDERLNRIKRIFIKMQRDHMLDPQQQDSMIKKWPPSEVLAIDTDHSPFFSAPEQLFNLIVKSL

SEQ ID NO: 64512 - protein, 368 aa, Zea mays
  Clone ID: LIB3066-029-A3_FLI.pep
VRPLLNLNPHPALPTTLLNSAFRPVDLIDPRIESGGSGAGETTPKSRRVASRARAEEVRAGEPSRLMEPTAAPAACEIARLPDDLLSAALGRTGPLDACRAAAVSPAFRAAADADAVWSSFLPPDLPPLADGELPADATATKKQLFMRLSDPARPVLLADGLTSMWLDRVTVAKCYMLSARKLTIIWSDTPQYWHWIPLTDSRFSECAELQHVCWLEIRGKIPCDMLSRNTTYAAYMVFKMSDESYGLDYPLQEAEVSIGATRSTRQVCLGYVDDDEDGEEVPQNYRSFGAVGNVFRPRIGRRNRRQPPGVHVLHPQTRPGGWMEMEMGEFRNEEAEDGEVSVSLMETRGGNWKRGLTVQGIEIRVKK

SEQ ID NO: 64513 - protein, 336 aa, Zea mays
  Clone ID: LIB3066-032-B8_FLI.pep
TVCWNGLGVASFGLVHPRMCFCRKIFVGGVAWETTEETFTKHFQKYGAITDSVIMKDKHTRMPRGFGFVTFSDPSVLDRVLEDEHVIDGRTVEVKRTVPKEEMSSKDGPKTKKIFVGGIPPSLTEDKLKEHFSSYGKVVEHQIMLDHSTGRSRGFGFVTFESEDAVERVMSEGRMHDLGGKQVEIKKAEPKKPGVGDSSSNGRHSRGGGHRDSYRGSGGSGVSGNSSGGGYGYSGGYRSTAAAHYGSTAYGAYGRGYGYGGTAGYGLGYGSAYGGSMYGGPYGAYVAYGGAYGGGAYGAPGGYGAGGYGSYGGAGGMGGGGSAGGRGSSRYHPYGK

SEQ ID NO: 64514 - protein, 556 aa, Zea mays
  Clone ID: LIB3066-032-G9_FLI.pep
RTILASRDRPRQDPLIDGAASSAHVAPPCARPGLPGLDGRRAAPAVSVLPPGLRLPQAQRRPQAVHGDGRQRDPAQRAAGAHRLPLPPPRHRPLRHRRGDLRPAQHPGGPRGLAHPAGRGGRDGRLLRRGHRRALRPDRPRAPRRGRARLQRLHALPGAVAVVQDRAPLRPARGRGGVQPHGHGVQRGADRAGPGPERAPDASPCAGAGGVVRVHRAQLVLRHRQDYDAGQLPVPQRRLRGAGDQRPGAARAGQDGAQLPGARQHRRQRRRARVRAAARGRRGPRRDQPEQSAPQGRRARLRRQPAPPRAARAPRGRARAVRHASPRPEALHVPAPASAAPIGRQAEGRRGGGPKDQLQGRGGPLLPPPRRHGRHRGGEEEPGPGGRGRGAGADDAAPVGEHVGEQPVVRAVVHGGQRATQGRGQGAHGHVRVGVQVQQLRVGGDRRHGRQGGVGRLHRRLPTGEARQPVLGQVRLDQRCRRRYPDALTVRYTIEDRSPPAEMTTTAEAVKSRLAVVQNDRPVMLACSLRRCIYALGFTGPVVLNNIALFIYHPII

SEQ ID NO: 64515 - protein, 328 aa, Zea mays
  Clone ID: LIB3066-048-F10_FLI.pep
GTNTNDRILIYHKQSYAILKIPKYFLVLDLEGDGAVGRVVELDGPAVERLRGARVAPGQRRLKQLQLVLADLAHLAEDAPDDVLGAWRHGEGARVAEVAAGALLQRAQVDEAGLHPRLLLLGEVAPVLGHLAQLPLQLVVEGVRGAQLVEDPDDRQRAVGAPVDQVQLQREPLAVDGVVGGRVPVQLLEAVRLAVHRHRPNLALQRQRDVVAIVDERGVGGAVGAIEGVEAGGGDGLLGDDVDRGLLLPLPAQLVRGAQLPPVLRPVGAPRRVPVHRRRHPAAIRERDGEGGRGDEEADERTGGGHHCRRARMSTRTGRLFVPLVRRT

SEQ ID NO: 64516 - protein, 290 aa, Zea mays
  Clone ID: LIB3067-005-G11_FLI.pep
EMADHQYSAWTTSAARHRVFSCALMALVSFVAAGRPIVLADAIVFHVANRCPFPVWPASAPNTGHPVLAGGGFYVPQGKSRRVVAPANWNGRFWARTGCNFTANGMGVAGCLTGDCEGRLACNGSVGAPPATLVEVSLHEDAAKGSSYDVSLVDGYNLPVAVSAKPATGGADPNKCAIAGCAKNVNAVCPPELQVTATGSGGGGKTVVACKSACLAFGLDAFCCRGAYATPATCRGTVYSRLFKDACPAYYSYAYDTAAATASGCYAQEYIMTFCPSRWGDEPGDRAAQI

SEQ ID NO: 64517 - protein, 401 aa, Zea mays
  Clone ID: LIB3067-009-C1_FLI.pep
LTFTSATFHAKATTTMVARSPNAKPDRQKAAALAAAAALNPALLRETLKKVDRCMARLQELQYTVAGGAKVVSGVSLSPRSTRGYLRTSLRCKQETVRMRGGASAQKRSPSGKFGGGVGGEGAQWRRMSLPAMLLGETVLEIVQASQFARDIVTAAGATNREPPRTPKPAPRTRKPAAGEPTPLRARRAREKESHRGGAATRGADAATPPSRSRVRSRIQFKPVSPVAVGRPSVSANRVSPKNRPWAKKAVMFPNPTFHASTSAATDPCATPSPSKKQKRLYKTRSPVAARQTPHKFLVKSPPSALGSKLRMHGKALPARPAAVSPPPPVKAQASPAKTRRCSFSPSRLATRLMSPIKARLSLGRSRDSGVGVGGGPMSGLKQRPGVSLTVRTVSSKISSR

SEQ ID NO: 64518 - protein, 449 aa, Zea mays
  Clone ID: LIB3067-010-A6_FLI.pep
SLPGRRGTRGRWGRKPQPLLAGAHPAPSTSPRLAMEVSRWTPAAGLLLLLLLPLAATPSRAATMARSPSSSTAVFQLQGDVYPTGHYYVTMNIGNPAKPYFLDVDTGSDLTWLQCDAPCRSCNKVPHPLYRPTANRLVPCANALCTALHSGQGSNNKCPSPKQCDYQIKYTDSASSQGVLINDSFSLPMRSSNIRPGLTFGCGYDQQVGKNGAVQAAIDGMLGLGRGSVSLVSQLKQQGITKNVVGHCLSTNGGGFLFFGDDVVPSSRVTWVPMAQRTSGNYYSPGSGTLYFDRRSLGVKPMEVVFDSGSTYTYFTAQPYQAVVSALKGGLSKSLKQVSDPTLPLCWKGQKAFKSVFDVKNEFKSMFLSFASAKNAAMEIPPENYLIVTKNGNVCLGILDGTAAKLSFNVIGDITMQDQMVIYDNEKSQLGWARGACTRSAKSILSSFP

SEQ ID NO: 64519 - protein, 503 aa, Zea mays
  Clone ID: LIB3067-048-D1_FLI.pep
LSSSLAKSPRPVPNPHPARPPAMTDHRDVMLPLSLQYIATRALLLLVIASAVSCSSLPPEDGIRVVSAEKRIDLTGPIVKVFLTLKVENAPTASEASRVLLAFTPTEFQHLSIVKATRAEGKRKKKAFVPLSVQASELATTAPDAPRLYSVLLSTPLKPGDATTLEVLYMLTHSLEPFPAEISQSESQLVYYRDSAVLLSPYHVLEQVTYIKMPSNRIESFTRVDPTTRAGSEVKYGTYSNQMPNSYLPVLVHYENNRPFAVVEELVRKVEISHWGNIQITEQYKLKHGGARHKGVFSRLEYQSRPSISGASSFKNLLARLPPRVHSVYYRDEIGNISSSHLRTDSHKSDLEIEPRYPLFGGWHCTFTIGYGLPLQDFVFESVDGRRYINLTFGCPLLDTVVDDLTVKVVLPEGSKNPEHVVPFVTEKHLETSYSYLDVVGRTTVVLKKKNVVGEHNVPFQVYYEFNPIFMLAEPLMLISAVLLFFVAFIAYLHMDLSIRKSS

SEQ ID NO: 64520 - protein, 337 aa, Zea mays
  Clone ID: LIB3068-008-A8_FLI.pep
ASIALKRGVPHWVVRELLVLPYYMMEGDLPTPANARVVAVVTGGNKGIGLEVCRQLACSGVTVVLTARDDARGAAAVENLRGLGLSDVLFHRLDVTDAPSIARLAGFLETRFGKLDILVNNAAIGGVEYVHDQDCGSVTSEEKAKLSGMDMDQRLGWLWENCRETYDDAKTGLRTNYYGTKQVIETLLPLLQASSDGRIVNVSSHFGQLRLFRNEELKRELNDIDNLTPERLDGLLDMFLNDLEAGEVESSNGWPMYFSAYKVAKAAMNAYSRILARRHPELRVNCVHPGYVRTDMTIHSGLLTPEEGGSRVAMVALLPGGGPTGAFFEDFQQSSFV

SEQ ID NO: 64521 - protein, 521 aa, Zea mays
  Clone ID: LIB3068-010-G12_FLI.pep
LITTLYAVSLATVIVLLLWFHKPAVVGKATAVPGDEKPRRRLPPGPWTLPVIGSIHHVVRGLGHRTMMELSRRHGPLMFLRLGEVPTLVVSSAEAAELVMKTHDLAFCSRPTTSVTIDIVGCKGKGLGFAPYGDRWRQMKKITVVELLSATQVKRIESIRAHEVGRLLQSVAAAAARGAVNVSAEVKALAPDLVARAMFGGNCAEKADFICRYNEVSQLVSGFFLVDLFPSSRLVRWLSIGERRLLRSYGGIQRIIASIIESRKAASTSDDGDNCSLHDHPAEDLLGVLLRLQKEGSLAFPLTSEIIGAVMFDIFGGATTTLGSTMEWAMSELIKKSETMRKTQEDIRRVLGGSRRGVITNTDLVGLTYLPMVIKEVLRLHPPNPLLVPRESREDCQVMGYHIPKGTKVLVNAFAISRDSRYWNNPEDFSPERFQNNNVDYKGTDFEFTPFGAGRRRCPAIMFATSTLEIALANLLYHFDWALPDGVSPKMVEMSEQYGMGVTKKLDLHLRAIPYVYSTMA

SEQ ID NO: 64522 - protein, 212 aa, Zea mays
  Clone ID: LIB3068-047-B6_FLI.pep
PVPVSHQPTFPSTLLTHPLTDSSTEQRGGHPSERASAEGSEFRRLGMEASGEKAAVVRRLMEAKEVSGKTFSGIAAETGLTNVYVAQLLRRQAQLKADTVPALRAALPTLTDDLIELMMQPPFRSYHPNIVHEPAIYRLNEAVMHFGESIKEIINEEFGDGIMSAIDFYCSVDKVEGADGKDRVVVTFDGKYLPYTEQKSEHMMSRPTRKTS

SEQ ID NO: 64523 - protein, 365 aa, Zea mays
  Clone ID: LIB3069-005-H11_FLI.pep
ATASDQVPSCAAPAMSSSSPVSAVSSATAPHVVDDCLGIVQLLSDGTVTRSADYSDIPLLGEVPSNLPVQWKDVVYDPAHALRLRMYRPTDTDGGRTTNNKLPVLVYFHGGGFCICSFEMPHFHSGGLRLAAELPALVLYADYRLGPEHRLPAAHRDAEAVLSWLRAQAEADPWLVESADMGRVFVCGDSAGGNIAHHIAVQYGTGHLALGPVVRLAGYIMLWPYFAAEERTASETAGLDVDHQFVSTALLDQMWRLALPVGATRDHPAANPFGPDSVPLEDVAFQPLLVVDPDQDVLHDRTQDYAARLTAMGKLVELVVFRGQGHGFFVFDPCGEASDQLIHVIRRFVLLHKHPCNLVDLSTTM

SEQ ID NO: 64524 - protein, 430 aa, Zea mays
  Clone ID: LIB3069-017-H9_FLI.pep
PLPLSPRLHSHHRRAAQTLAAAAAAAAMVAVNRPLVSVKALEGDMVTDAPGIALPPVFGAPIRPDVVRFTHKLLSCNKRQPYAVSRRAGHQTSAESWGTGRAVSRIPRVPGGGTHRAGQGAFGNMCRGGRMFAPTKIWRKWHRRVNINLRRVAVASALAATAVPALVQARGHRIETVPEMPLVISDSAESIEKTSQALKILKQIGAHADAEKAKDSVGIRPGKGKMRNRRYINRKGPLIVYGTEGSKVVKAFRNLPGVDVANVERLNLLDLAPGGHLGRFVIWTQSAFNKLEEVYGSYDAPSQKKKGFVLPRPKMSNADLGRIINSDEVQSVVKPLNKEVKRREKRKNPLKNMAAVLKLNPYLGTARKMATLAEAARVKARKAKLDSKRTKLTPETAKVKAAGKAWYKTMVSDSDYTEFENFSKWLGVTQ

SEQ ID NO: 64525 - protein, 288 aa, Zea mays
  Clone ID: LIB3069-022-H12_FLI.pep
EACDPLHSLDPPLHSLLPEVTHQTPPPKKARTYSVPPLPSPPLPLEAPGPSPRLLIRRCSPSLGSENRREARAAMASSASRFIKCVTVGDGAVGKTCMLICYTSNKFPTDYIPTVFDNFSANVVVDGTTVNLGLWDTAGQEDYNRLRPLSYRGADVFVLAFSLVSRASYENIMKKWIPELQHYAPGVPVVLAGTKLDLREDKHYLMDHPGLVPVTTAQGEELRRQIGAMYYIECSSKTQQNVKAVFDAAIKVVIQPPTKIREKKKKKSRKGCSMMNIFGGRKMLCFKS

SEQ ID NO: 64526 - protein, 306 aa, Zea mays
  Clone ID: LIB3069-025-C8_FLI.pep
RRRRVPSSTMPFSRPAVGFLVRLVGVRPSCCPPSRAFAAVRAQKIQLPKKKRRLDEVCLERFQQYSRTYIQSWILQGKVIVDGRVVNKAGTQVSDKSVIEIKAEIPKYVCRAGHKLEAAIKGFDIDCDGKIALDSGLSTGGFTDCLLQHGASHVYGVDVGYGQVAEKIRTHERVSVIERTNLRYLSQLPEPVDLVTLDLSFISILLVMPAVIKVMKTDSTLITLIKPQFEARRSQVGGGGIVRDPLVHQEVLDRIISGVEEFGFCNKGWIESPIKGAEGNKEFLACFNRIPISESQPEAEAKEPVT

SEQ ID NO: 64527 - protein, 441 aa, Zea mays
  Clone ID: LIB3075-014-G8_FLI.pep
SETFLRTQKEPHPTYREPAMATVAMDISKPTPAASGDEAAAAAKGRSGGGGEGLRQYYLQHIHDLQLQIRQKTHNLNRLEAQRNDLNSRVRMLREELQLLQEPGSYVGEVVKVMGKSKVLVKVHPEGKHVVDIDKSIDITKITPSTRVALRNDSYMLHLILPSKVDPLVNLMKVEKVPDSTYDMIGGLDQQIKEIKEVIELPIKHPELFESLGIAQPKGVLLYGPPGTGKTLLARAVAHHTDCTFIRVSGSELVQKYIGEGSRMVRELFVMAREHAPSIIFMDEIDSIGSARMESGTGNGDSEVQRTMLELLNQLDGFEASNKIKVLMATNRIDILDQALLRPGRIDRKIEFPNPNEDSRFDILKIHSRKMNLMRGIDLKKIAEKMNGASGAELKAVCTEAGMFALRERRVHVTQEDFEMAVAKVMKKDTEKNMSLRKLWK

SEQ ID NO: 64528 - protein, 369 aa, Zea mays
  Clone ID: LIB3075-018-C4_FLI.pep
LSTFHLGFEVLDNISKRSCIQSLSQFTISIKLFQLLSKVLEVLFRPAFLMDGLKDHEQMRLKELGAVPLEVTVREGGIAAEGALHGPHGADGDAVAVHVAPEQALVAALLALEQLVHAGGVVVLDAADGDLGAAAVVGAGDGAEAALRLVVLEALLVLVLLGAVEPGLEVDVLEQELGDGLPALQRPELGGLHLLHEVVDLVVAAVGEQPAGDVADDVALGAGEVVHEDGHGLEGVVGHLGPGRVLVRLRLDQRVRDEAVAPLRDVVHHLLAEVHGHRGRAAERVPRGAVHADGGEAREEDLRQLVHRLRVAVRALDQRAFASLRSRVRHGRDVHRALCSGTVVLNFSDEHVRLLGAGRGKERRRTGRQ

SEQ ID NO: 64529 - protein, 213 aa, Zea mays
  Clone ID: LIB3075-018-H10_FLI.pep
DAVKAKEESDPLLHAEPGKAAAASRMASTSSSSPQPPPAAAAASPGAASSPEDRRAGGGRGGPPPVPPYVKAAAGSLGGVMEACCLQPIDVVKTRLQLDRTGAYRGIAHCGATVARAEGVRALWKGLTPFATHLTLKYALRLGSNAVLQSAFKDPTTGKVSAHGRLASGFGAGVIEALLIVTPFEARLNISLFLSRSLTILPWLRCCASYSLH

SEQ ID NO: 64530 - protein, 532 aa, Zea mays
  Clone ID: LIB3075-018-H12_FLI.pep
NLLISGPLFLTSPPSTMAAATAAAATASASCLLRRSISSAFLARRAVPSIPRTTLCYSSSASARLKPTPSLSPPDTSANDGGGGMRWESARKKRVVLRIGYVGTDYRGLQKQQELGVDSTIESVLESAIFKSGGIIESNYGKLQKIGWERSSRTDKGVHSLATMISLKMEIPDRAWEDDPDGIALASFINSNLPDNVRVFSILPAQRSFDVRRECLYREYFYLLPAEIIGIKDGYSSEEMQEHLSEFNKILKGFEGNHPFHNYTARAKYRKVLAGRHRRDKGASTALKSMSSDTGMAESSSEESTSPDHDEDLNISSIFDSGIPEDTRVNGILKLSEDRVQIQARWLHEPDERDRLNASHFRDIITCSCGELQTSSGIQFVELTVCGVSFMLHQIRKMVGTAVAVKRGLLPRDIIELSLAKFSRIVLPIAPSEVLVLKDNSFCTKSKGGRIVRPGIQSMNKSEATRKGVEEFYRAALLPEVAKFLDPSLPPWKEWLENLDRFSGIPGSQLDEVREAYRAWRDDYDRAKMARN

SEQ ID NO: 64531 - protein, 414 aa, Zea mays
  Clone ID: LIB3075-053-B3_FLI.pep
DHDKMACTDNAMRALFLLVLFCIVHGEKEESKGIDAKASGPGGSFDITKLGASGNGKTDSTKAVQEAWASACGGTGKQTILIPKGDFLVGQLNFTGPCKGDVTIQVDGNLLATTDLSQYKEHGNWIEILRVDNLVITGKGNLDGQGPAVWSKNSCTKKYDCKILPNSLVMDFVNNGEVSGVTLLNSKFFHMNMYQCKNMLIKDVTVTAPGDSPNTDGIHMGDSSGITITNTVIGVGDDCISIGPGTSKVNITGVTCGPGHGISIGSLGRYKDEKDVTDINVKDCTLKKTMFGVRIKAYEDAASVLTVSKIHYENIKMEDSANPIFIDMKYCPNKLCTANGASKVTVKDVTFKNITGTSSTPEAISLLCTAKVPCTGVTMDDVNVEYSGTNNKTMAICTNAKGSTKGCLKELACF

SEQ ID NO: 64532 - protein, 346 aa, Zea mays
  Clone ID: LIB3076-059-H12_FLI.pep
LEMDLILPYKVGDLAESKSLVSGYRGAWFRCKIHNMRVRLGYLECYLEYIDYPGEKKEWVRLFRKNSARSNQNSSDSIHTMIRPSFPKWYFVHEVPEQFPNSDVTAIVDETWQIGDRVDWLKEGCYWSGTITKIINEDLVEIELPAPPIGEGKCYKAKCSDLRPTLEWSLARGWMVPLSQANGKGWHAARLLQHYKSESDDDNDDNDSWDARQTVCRASNTHEEAPGPMVPAPPSATNNAPSHTYQKDAAVASTEDLLKPSSTSKSPDPRHDAQASTQPAGTGVSMKPEPVIGVSTIKKEDSSLTEGEVDGGTEECLEKLGAIKARLKYLMQGTRLEHERSATFRG

SEQ ID NO: 64533 - protein, 244 aa, Zea mays
  Clone ID: LIB3076-060-C3_FLI.pep
STTSTTCSRGRSSSSSPRTTEAASSATCSPRWRRTPPSPATATSPPSRSSAPTASSGSPLSSCPPRRPPWTRSSALSTCHSTSADPTALPSTSTPLPSGTRSRTSRPSTMPMGRTRSTCASCSGSHSPRSTTTTTITAPVGAAPTTHQLRRLVLLPSLLVHPIRRLSLDVGLVSTERNHQANCTHLSSHWVYNIVVVASGLSVVERRKTCAVSICVLGRWLESSDRISENGNQICFVLDTRVAL

SEQ ID NO: 64534 - protein, 413 aa, Zea mays
  Clone ID: LIB3079-008-F9_FLI.pep
WEELVSRALKAMAAVRRCCLLAAVLLWSALASAATAAPAPVVAGPVSRVEDATMFRIYYGQSFKVIKNSGDGKSYLLMQNTSKMASKTKYCTGRIKSFVIPLASFSVDTTTSPVSFFELLGVLESLKGITSNQVASQCVLQSYTSGNAQLVNRTDVQTLSQFTAHFISDTDEDRGCNFAAYVPLEEGTPLQMAEWIKYLGTFTNSENRANAVYDAVKTNYLCLSKVAANLGTRFKPVVAWIEFTQGMWTFVKESYILQYVTDAGAEIVDATITDKRFNSSDPEDMDNFHAILCTVDVVIDQTYALEPAEYKLSTFLENINVSHDSCYSFVSNRSIWRFDKRIGASGTLDWSDGAISQPQLVLGDLIEIFFPTGNYITIYFRNLAKDEGVTEIGPEMCTRSISTPMDPIILSCE

SEQ ID NO: 64535 - protein, 248 aa, Zea mays
  Clone ID: LIB3079-040-A6_FLI.pep
HNTAEEAASSKVDMSSPPPVKLIGFFGSPYAFRAEAALCLKGVPYELILEDLFGSKSELLLHHNPVHKKVPVLLHGDGRAISESLVIAEYVDEAFDGPPLLPADPYARAAARFWADFIETRLTKPFFMAIWVEEREARLRFEEEAKELVALLEAQLEGKRFFAGDRPGYLDVAASALGPWRSVIEELNGVALLSEDDHPNLCRWTRDYCAFEALKPCMPDREKLLAYFTKNFDRYKAAVNATLSQSQQ

SEQ ID NO: 64536 - protein, 291 aa, Zea mays
  Clone ID: LIB3079-045-F3_FLI.pep
STMYQTGEAPSCMGYSRTGETRNPSLEGDGHLGHEEVDDVQVEGDGCHHVLVVGVALQQLVGVIDDEAREHHGGQDAVDGHGYPSQREADLDDDVHQQHDEAGEQEGEREGEVVAPLDAPEGEEGEPQDSSSCEDGSLQDHCAEGGGGGDGDAETAAESEYGEQDEVPGVLLPVLEHGEHDDERGQEDRDVRGPDGGGGAGGEEARDRADEARGGRDGRGERELEGENGVHLPHEGPAQARILLLRHFLRRGCLLLRRRRRCSPGARGHGRLEVARRRARLHCALSPVAGR

SEQ ID NO: 64537 - protein, 203 aa, Zea mays
  Clone ID: LIB3116-011-H9_FLI.pep
RRRHVPTKKKQKRRRRQTARGMAATSSACAAVALASFPSAASTSAPSRVSASSHRGQRHSRAATVRCSSTSPNVSQGAPAPAPPKPQIELEFVGPKPGADGSFPVDRAEAASGEKLLRDVMNENKIELYAAYGKVMNCGGGGSCGTCIVEIIDGKELLNERTNTENRYLKKKPDSWRLACQTIVGNKENSGKVVVQRLPQWKR

SEQ ID NO: 64538 - protein, 422 aa, Zea mays
  Clone ID: LIB3150-040-F12_FLI.pep
DILSKLKSSVELDHRQAAVWNILGLVLLRGGQIQSAISVLSSLTAVAPDYLDSLANLGVAYIQSGDLELSAKCFQELLLKDQNHPAALVNYAVLLLCRYGSLSAGAGGNVSTGPYVHQKEALVVAKECLLAAVKADPRAASVWVNLANAYYMDGEHKNSKRCLEQAAKLEPNHMPARYAIAVHRIRDAVRSQCSDDQLLWAANEMATVLKEGDPSAVDTPIAWAGLAMAHRAQHEIAAVYDTENINLNDAEERAQYTLKQAIQEDPDDAVQWHQLGLYNICMTRFSRSVNFLKAALARSPDCSYAWSNLGIALQLSDDPSSETVYKRALVLSSTQQLHAIFSNLGILYRQHRNYEFARKMLLRSLELCPGFAPASNNLGLVFVAEGRWEDAKSCFEKALQSDPLLDAAKSNLLKVLTLSTKQ

SEQ ID NO: 64539 - protein, 129 aa, Zea mays
  Clone ID: LIB3150-041-A8_FLI.pep
TAMGAAGDEKAAMAASAAAAGAGAAEGEGAVDSKDLQQQSKALDKLTDHVEDRQLDSSRVQSAMAALASSKEADWNAMRLREKELAAVKINPADVEIIATELELDKKIAERTLREHKGDAVAAVRFLLR

SEQ ID NO: 64540 - protein, 318 aa, Zea mays
  Clone ID: LIB3150-077-H6_FLI.pep
NGKDGERRGGGRRRRRSEATGMSRKEAEPAGQDGSSSSATDGGGGSGSGRELADALARRRLYREVTLALHSGLRDAKADFSFLRARGLRSLLGFLRSTASAADDALLLLFRHSQSIPDLQVIPVLFQNSLHQPKQDPVVTLDHIFGTEPMKITSPPTDSEIALALRVLEGCCLLYSRCTALAHKYKAVKVLLNILASRGPTEQGVCLDTLISLMLDSPSNQMDFEEYSGLEKVAELLKDVQVEKHIRLKCGEFLLLLIGHVFVKENSPIHEQMKNLFGEQCASLIWAASRFGSTLDAEQRQTTLQIQAMRVVESLEPY

SEQ ID NO: 64541 - protein, 376 aa, Zea mays
  Clone ID: LIB3151-039-G2_FLI.pep
FTTPVGRQLDSPSPPPPPPSDDGASVGGRAAAASSSRRRRGRRGAAVLLLLLLLPGRVGDGGGVVRRQLRDHGRRGPREDLRRRADLVPIPRQQDRRRVPDEAALPVRLVQHEAEAGGQRLRGRRHRLLHVLRPGRGAPARRAGLRVPGQPQRGALHHPDQRVPQRRRRPGDAPLALVRPHRRLPHLRHPLEPQADRVLRGQGGDPGVPERRVQTAGRRRRRRRLLPDRQAHVHLFQHLERGRLGDARRAGEDGLGQGALRVVLPRLRRRRLRLAAAGRGGRPVPADARVRRGHGGQLVGPAPRVGAGRRPAPGQRLGGKEPPRLRLLRRPQALPDAARGVQAPARRDRIVIILYCWIGSCMMMRWFFFWGLFLGA

SEQ ID NO: 64542 - protein, 350 aa, Zea mays
  Clone ID: LIB3152-005-F12_FLI.pep
CQSGGANIYSNYNTTSSSPQRPPIHHLFILLSPLSKKEAPRSSSSTPFTLSSLSLPFSTPPPPLVRLYLALAPAPPAQPPGEREREEEAFAAAVAVGRDARMFGYQKGLDVEAGTSGAAATGGARQLYPGMQESPELRWALIRKIYVILSLQLLLTAVVAAVVVKVRAIPHFFTTTSAGLGLYIFLIILPFIVLCPLYFYHEKHPVNLILLGLFTVAISFAVGMTCAFTSGKVILESAILTTVVVLSLTAYTFWAVNRGKDFSFLGPFLFAALIVLLVFALIQILFPLGKLSQMIYGGLASLIFSGYIVYDTNNIIRRYTYDQYVWAAVSLYLDVINLFLSLMTLFRAAD

SEQ ID NO: 64543 - protein, 477 aa, Zea mays; identical to SEQ ID NO: 62608
  Clone ID: LIB3152-039-H5_FLI.pep

SEQ ID NO: 64544 - protein, 329 aa, Zea mays
  Clone ID: LIB3180-003-B11_FLI.pep
KFHADPPPPLLHRAPPLPNPDPSPSSRRRHPREAMDVSRKKKWVAWAVAAAIFVVLMLVTPAIPQDEAYHDFADQRTLFLGIPNTLNVISNIPFFFVGVTGLILCHFNNYFRLSSQGELWSWTLFFAGVTAVGFGSSYYHLNPNDATLVWDRLPMTIAFTSVMAIFIIERVDDRAGAKSLAPLVIAGALSIMYWRHFDDLRPYAVVQFVPCIALPVMAIVIPPMYTHSSYWLWAAGFYLLAKVEEAADKTIYNWTHQIVSGHTLKHLCAAMVPVFLALMLAKRTTEPERISLLQKWKTSWVAVRERRFKDSSTVDVDCGYAVVSSISEQ

SEQ ID NO: 64545 - protein, 412 aa, Zea mays
  Clone ID: LIB3180-012-A11_FLI.pep
ERETTKTRNEYTNLSFSPLASAANFLVPCRPPCLPCATAPTNACREDKRSWLSLKMSCLACCGGEDTQRTPDNGGPYPGGYPPRDDAYRTADPTPRGAQPLKMQPITVPTIPVEEIREVTVAFGDEALIGEGSFGRVYFGVLKNGRSAAIKKLDSSKQPEQEFLAQVSMVSRLKHGNVVELLGYCVDGNTRILAYEFATMGSLHDMLHGRKGVKGAQPGPVLSWTQRVKIAVGAAKGLEYLHEKAQPHIIHRDIKSSNVLLFDDDVSKIADFDLSNQAPDMAARLHSTRVLGTFGYHAPEYAMTGQLSSKSDVYSFGVVLLELLTGRKPVDHTLPRGQQSLVTWATPRLCEDKVRQCVDSRLGVEYPPKSVAKFAAVAALCVQYEADFRPNMSIVVKALQPLLNARASNNPG

SEQ ID NO: 64546 - protein, 240 aa, Zea mays
  Clone ID: LIB3180-015-B7_FLI.pep
NFITCQPEYSQHGKLCCFQRGSINSANSNSLRREVPSSAQASASTRTKTALSPSLSRPFSSANSMTQAHSTTFAPTRSISLTAAQSVPPVAIRSSTTRARSLACTAPTCISILSVPYSREYSSEITSPGNFFGFLKGTNLAPMARAIGGPKMNPLASTPATTVIPWSLYRSTKRSMVSRNALGSSSSVVMSWNMIPGLGKSGMTRMEEAIPAKRASADAIATTACPRLPPVTRTPSGAAT

SEQ ID NO: 64547 - protein, 654 aa, Zea mays
  Clone ID: LIB3180-021-F12_FLI.pep
VQFSTRLCCLVAFLPSCRLLPPPAAAGTLALCSLSIHSSFPVIHQFTTQNPKPIYLNATAAAAMQSMAPTSPSLPVAGPVPRRRLQRVRAAAVSDEPKLNKYSARITEPKSQGASQAVLYGVGLTDADLRKPQVGVSSVWYEGNTCNMHLLRLAEAVRDGVREAGMVGFRFNTVGVSDAISMGTRGMCYSLQSRDLIADSIETVMGAQHYDANISIPGCDKNMPGTIMAMGRLNRPSIMIYGGTIKPGHFQGNSYDIVSAFQCYGEYVSGSITDEQRKNVLRNSCPGAGACGGMYTANTMASAIETLGMSLPYSSSTPAEDPLKLEECRLAGKYLLELLKMDLKPKDIITEKSLRNAMVIVMALGGSTNAVLHLIAIARSVGLHLTLDDFQKVSDQVPFLADLKPSGKYVMEDLHKIGGTPAVIHYLLEQGLLDGDCMTVTAKTLAENAKIFPPLSEGQQIIRPLDNPIKPTGHIQILYGNLAPEGSVAKITGKEGLYFSGPALVFEGEESMITAISENPANFKGKVVVIRGEGPKGGPGMPEMLTPTSAIMGAGLGKECALLTDGRFSGGSHGFVVGHICPEAQEGGPIGLVQSGDIITIDVSKRVIDVDLTEQQLEERRRKWTPPPYKSTSGALWKYIKLVAPASRGCVTDE

SEQ ID NO: 64548 - protein, 213 aa, Zea mays
  Clone ID: LIB3180-036-B4_FLI.pep
HYSSSRFTRTARRPSSHAFASFPALALSAAEPLVSVTAAKAMSSLRPSLLLVVSLLAAALLAAAPSSASRDLRPLQASFVVRGRVWCDNCRAGFETPASTYIAGAKVRVDCKSKTTGANTCSFEGHTDRTGTYNILVIDEHEHELCESVLVSSPDKGCANVVAGRERAPVFLTSNNGVASNVRLANALGFQKDVALPRCAQILKMYQDEDDRV

SEQ ID NO: 64549 - protein, 803 aa, Zea mays
  Clone ID: LIB3180-038-A3_FLI.pep
SARLPQPPFSRPAFFLQQPRSFFRPRVPSPKPQAAMEINEEAMAAHKRAFLDFLDQDVGKGVYMQAVRDMVQNKRHRLIIGMDDLRNHNLDLARRVIRTPGEYMQPASDAVSEVARNLDPKFLKEGERVMVGFSGPFGFHRVTPRDLMSSFIGTMVCVEGIVTKCSLVRPKVVKSVHFCPVTGDFLSREYRDITSFVGLPTGSVYPTRDDNGNLLVTEYGMCEYKDHQTLSMQEVPENSAPGQLPRTVDVIVEDDLVDCCKPGDRVSIVGVYKALPGKSKGSVSGVFRTVLIANNVSLLNKEANAPVYTREDLKRMKEISRRNDTFDLLGNSLAPSIYGHLWIKKAVVLLMLGGVEKNLKNGTHLRGDINMMMVGDPSVAKSQLLRAVMNIAPLAISTTGRGSSGVGLTAAVTSDQETGERRLEAGAMVLADRGVVCIDEFDKMNDQDRVAIHEVMEQQTVTIAKAGIHASLNARCSVIAAANPIYGTYDRSLTPTKNIGLPDSLLSRFDLLFIVLDQMDPEIDRQISEHVARMHRYCTDDGGARSLDKEGYAEEDDGDANAAIFVKYDRMLHGQDRRRGKKSKQDRLTVKFLKKYIHYAKNLIQPRLTDEASDHIATSYAELRDGSANAKSGGGTLPITARTLETIIRLSTAHAKMKLRHEVLKSDVEAALQVLNFAIYHKELTEMEEREQKEMEMKQQADHDAGATGGTVDGHGSSGNDPMDVDVGSNDQNVSAERIEAFEALLGQHVLANHIDQMSIDEIEQMVNRESTAPYTRSQVEFILERMQDANRVMIRDGVVRII

SEQ ID NO: 64550 - protein, 366 aa, Zea mays
  Clone ID: LIB3180-062-G8_FLI.pep
ESDQRASDGDEREERTVVSPSSLTSHNSHARRRRGRSRAYPRRRVHPHMVGRMERQTASSPASCSSSSSSSSSSSVCGGKKRPDILNMIRNAACLNSSSTDTGKGRSKLSTNKVTHGFHLVEGKSGHGMEDYHVAEYKYVKNHELGLFAIFDGHLGDKVPSYLKANLFSNIMKEPLFWSSPEEAIKNAYCSTNKYILENGKQLGPGGSTAVTAIVVDGKDMLIANVGDSRAVVCEMGSANQLTVDHEPDTTEERQRIEKHGGFVTTFPGDVPRVNGQLAVARAFGDQSLKAHLSSKPDTRHVPIDSSIEFVILASDGLWKVMKNQEAVDLVKSIKDPKAAAKRLTTEALARKSKDDISCIVIRFRC

SEQ ID NO: 64551 - protein, 385 aa, Zea mays
  Clone ID: LIB3181-008-F4_FLI.pep
TSSPRPSSLPTPAERMAAAPTADAMDVDAPARTLTTSPATKLRSPHDLLAETRASIEKVAARILAIKKDGAPKSELRELVTQMSLHLVTLRQVNREILMEEDKVKAETEAAKAPVDSTTLQLHNLLYEKNHYVKAIRACLDFQTKYPGIELVPEEEFQRSAPADILEKTLAADASHDLMLKRLNFELVQRKELCKLHEKLGQQRGSLLETIANQKKFLSSLPSHLKSLKKASLPVQQQLGMQHTKKLKQHHAAELLPTPLYIAYTQLLGQKEAFGENIEVEIAGSTKDAQIFAQQQAKKENSTLSSGDNRMDDDVIDDEEDAQRRRSRSKKNVVKEANNPAVAYQLHPLKIILHVYDTEDSGSKRRKLITLRFEYLAKLNVVCRN

SEQ ID NO: 64552 - protein, 410 aa, Zea mays
  Clone ID: LIB3181-014-E1_FLI.pep
ESSQIQGGEGKTLTSLTPPPPGEREEDPSSTRRTNKAPMANLGGGAEAHARFKQYEYRANSSLVLTTDSRPRDTHEPTGEPETLWGRIDPRSFGDRAVQNRPPELEEKLSKSRTKKSKRDAAAALDSADLPRRDAKRRRRAASAQEVSVLSLTDDAVYKPQTKETRAAYEALLSLIQQQLGGQPLDVLAGAADEVLATLKNDKVKNPDKKKDIEQLLNPISSQLFDQLVSIGKLITDFHDAAAGDASGAPSADAVDTTLDDDVGVAVEFEEDEDEESDFDQVQDELDEDEEDDMAELNGPGGMQMGGELDDDDMQNANQGLTVNVQDIDAYWLQRKISQAYGDGDIDAQQSQKLAEDILKIIAEGDDRDVENRLVMLLDYEKFDLIKLLLRNRLKIVWCTRLARAEDQEQ

SEQ ID NO: 64553 - protein, 299 aa, Zea mays
  Clone ID: LIB4074-018-B1_FLI.pep
APAPETAAAQTVWYDPMTSPQAPAPQQQPAIEAAMRGASPSVSSNARPLRVYADGIYDLFHFGHARALEQAKKSFPNTYLLVGCCSDEITHMYKGKTVMTEDERYESLRHCKWVDEVIPDAPWVINQEFIDKHDIDYVAHDALPYADTSGAANDVYEFVKAIGKFKETKRTEGISTSDIIMRILKDYNQYIMRNLTRGYSRKDLGVSYVKEKQLRVNMGISKLREKVKEHQEKFHSAAKIAGTNPVEWMENADRWIVGFLEKFEEGCHMMETAIKGRIQEGLKRQGRSESNLSGEESDS

SEQ ID NO: 64554 - protein, 159 aa, Zea mays
  Clone ID: LIB4074-020-F12_FLI.pep
QRSEVKHSIDRGLAAGKLRPRLLAGGDTGLGALGGALAVRRERAALAADHLLLVALLLGEAALALLLALLLAVLTAAATAARRALVVALRGHAAARPRRRRLVGSPGGRGGRHPCTLCDQRARGHGLLVQPCRRGGAGCRGDSEKHRHGDAAGARHRCR

SEQ ID NO: 64555 - protein, 195 aa, Zea mays
  Clone ID: LIB4148-017-G4_FLI.pep
TRTRTTRLLVLEGGAAAGQLATDMAAAGGETMMTREQLLHLFSRFSFVTSLPEVKQRIADAVRDKQEAVAVTTEIQEEILREMGVDPSFGIGCLGKVNVVYKNDKDLMIKFYQFVAKEEMAIDEAELEPRELAEKLHAQQIMQEKQLNMLVEMRKYSRESQSVILGTLHKELEEANFDINASILSPEQMQEIVQK

SEQ ID NO: 64556 - protein, 175 aa, Zea mays
  Clone ID: LIB4148-020-A9_FLI.pep
GRKRSRDRMHSFGHRANAVATFAVTILAAMCFAASFSENFNTLTPTASVKILNINWFQKEANGNDEVSMTLNISADLSSLFTWNTKQVFVFVAAEYETRQNALNQVSLWDGIIPAKEHAKFLIHTTNKYRFIDQGSNLKGKEFNLTMHWHIMPKTGKMFADKIVMTGYQLPEQYR

SEQ ID NO: 64557 - protein, 459 aa, Zea mays
  Clone ID: LIB4171-005-C4_FLI.pep
GFAPKPSLPRISHAMDVEGEVPAAAAAAVANGLGGAGAEEASPAPVSAEQLDVEAYAAQYSGRTRLVRLLFVADRCGVEAMQLEALRMAYDEIKRGEDVQLHRDVVTKIGGRLGPRYGLDQAWVFSVSRRADQRKEKLESELNGYRTNLIKESIRMGYNDIGDFFYAHGQLSDAFKSYIRTRDYCTTSKHIVQMCMNVILVSIELGQYAHVSNYVSKAEQTPDSLDPTIVAKLKAAAGLANLETKKYKFAARKFVETGIELGNNFSEVIAPQDVAVYGALCALASFDRSDLKSKVIDNINFRNFLELVPEVRELVNDFYASRYGSCLGHLEKLKPNLLLDIHLHQHVETLYMEIRHKAIIQYTLPFISVDLNTMAAAFKTSVSMLQKELAALITEDKIQARIDSHNKILYARHADQRNATFQRVLQTGNDFERDVKSMLLRANLLKHDYIQKTSGPRKM

SEQ ID NO: 64558 - protein, 197 aa, Zea mays
  Clone ID: LIB4171-005-C5_FLI.pep
DILQAQTVYGALHALETFSQLCSFDFNANLIELHSAPWTILDAPRFPYRGLLIDTSRHYLPVPVIKGVIDSMTFSKLNVLHWHIVDEQSFPLEISSYPKLWNGAYSYSERYTVDDALDIVQYAEKRGVNVLAEIDVPGHALSWGVGYPSLWPSATCKEPLDVSNEFTFQLINGILSDFSKIFKFKFVHLGGDEVNTS

SEQ ID NO: 64559 - protein, 453 aa, Zea mays
  Clone ID: LIB4171-007-B1_FLI.pep
RAAKRMAFSSSTATRLAIGVGTDMGPTTGNKHDLLPWREWYNEASFSIPDNPRPTPPTQSNPIQSTACNHPRPAAATWRGARDRRSHDVVVLGAAAVAARRAPVAPVLLHPVGAKHAAGEEPRAGPALRQRDGVPPPVVAVGVGGVGAPERRHGRALLRGHGERARAQAQAQARAARRHGVVGGGVDGAALDGEVGELGHERRVLVVDAVPAAQRGPRGAVPDRGVQGHGLGRERRAHGRRPHHLPDRGLVDVENDAVAGPEDGVVVEVVGGVEWEVVALLPAGVGAAVAVHVGLHPPLAAPHVAQELEVQLVVRLLVHVAVRQVERDDDARRVVGGQLDGGAEETVEEDVLRREPGSGGLVEREADAPTVAEEREVGAAEDLGVPLVEGERAHAVERRWRPGLAAAGAQREQDHGERERWQRQGRRGAGRHLSPTHSRSLRSGPALCCPCAS

SEQ ID NO: 64560 - protein, 489 aa, Zea mays
  Clone ID: LIB4171-007-H12_FLI.pep
SRLPPTPVSRPGESRIGSLPLPMPRHWSSSPMAMRHQFGASVLLHLLVLAGAGAMVTADQESDRIRELPGQPPNVGFSQYSGYVTVNPARGRALFYWLVEAVPAAGPIAPLVLWLNGGPGCSSVGYGASEEVGPFRIRPDGQTLYLNPNSWNKAANLLFLESPAGVGFSYSNSSLDLYTAGDAKTALDAYAFLVNWLERFPQYKYREFYIAGESYAGHYVPQLAQLIYEKNKGIQNPTINFKGFMVGNAVTDDYHDYLGTFEFWWTHGLISDKTYHNLKATCLLESSQHPSPDCVKNLNLASAEEGNIDPYSLNTKPCNDTASLKLGLGGRYPWLSRAYDPCTERYASIYYNRPEVQMALHANTTGIHYPWQTCSDIVGSYWADSPRSMLPIYQELIAAGIKIWVFSGDTDAVVPVTATRYSIDALKLPTLVNWYPWYDHGKVGGWSQVYKGLTLITIAGAGHEVPLHRPRQALIMFRHFLQNKPMPAQ

SEQ ID NO: 64561 - protein, 282 aa, Zea mays
  Clone ID: LIB4171-009-B10_FLI.pep
RSMAWTTAATVCWRLLHLPSARCPLSSRARCSAAQSPDAVDKEYADLNLRPLYPNRGHHMRIRQHVNPLSSSFSEPTGPPEWKEVFDDPLLPLMVDIGCGSGRFLIWHAKNSGKSQNYLGLEIRQKLVERAQFWVNELELMNVYFMFANATVSFEKIISSYPGPLSLVSILCPDPHFKKRHHKRRVLQQPLVDSIINNLCLGGQVFIQSDVLEVAVDMRERFDGYSGILAHVNYVDQDLQCDNEGWLLDNPMGIRTEREIHAELEGATIYRRVYQKVRDASF

SEQ ID NO: 64562 - protein, 647 aa, Zea mays
  Clone ID: LIB4171-009-G1_FLI.pep
PKSPMASSPPQPLTRTVLAATLLLLLHNAAARADGASPAVNPFTAKAAFIRYWNRKVPNNRPHPAFFVAKLSPLPAADSASFPSALPDIRASLPALCTKAALLCPGPATTDAASLTSGRRGGGPFKGYNNANFSNYGTGGVAGTDSFQKYSPDLNIAADSFRRYGRDSSGRADSFTSYEADGNVVTANFTSYAGGATGGSGSFAAYAAETNVPDSTFTNYDAAANGRGRSFASYSQEANHGENGFSGYGKNGNGVRETFKSYGNESNVLASGFANYGQSANGATDTFTGYGVEGNVPENRFRSYGAGGNAGVDTFKNYRDDGNVGDDRFTSYAKGANGGAAEFQSYGNSANPGSTIFKGYGEGTNPNHHIGFKEYAGENNTFKGYAKSGVDFKGYHNTTVSSSTAAVLTVSAEAAASMHHEHLKWSPEPGKFFRERELVAGNRMPMPDIRDKMPPRAFLPRAIAARIPFEPNAVSEAFGLPLDTALGKAVASTVAECERAPSKGETKRCATSAEDVVDFAVEVLGDDIVVRSTASTAGGGGRVQLGAVAGVDGGRVTRSVSCHQSLFPYLVYYCHSVPKVRVYEADILAADGSGSGEKINRGVAICHLDTSDWSPAHGAFVALGGKPGEVEVCHWIFEGDMTWTVAD

SEQ ID NO: 64563 - protein, 746 aa, Zea mays
  Clone ID: LIB4171-010-B8_FLI.pep
KLGHTLSRIVTSKPRFAFSQPRPRPRPRPAQPGLPSSQPVSIPPQPPELPPFVPTAMPHHGSHRPPAPPPGGPVFPRATSTVVPDPSRFFAPPLLAAPLPTNSFFQNFVLKNGDQPEYVHPYSVRSPGGAALDICYPSRNHSPSFVIQTFVPDLTVSDAAGSAQRHCVSAFDDLSVTLDVSPSLRAHLVRGCPYVTVTTTAGAVDISVASVHAFLDVASCDDSGTKWRLGMNSGQTFLLYASAPIRLAQTTTTQLSAPGFAGAIRVAYLPDASMEPVLDRYSRCFPTAGHAALNRPFCVDYAWRKDGPGELLMLAHPLHLRLLAEDCPVRVLDDFRYRSIDGDMVGVVGDAWVLRTDPVSPTWHSTRGVSEDGVAEVVAALRVDVAGLASTAITTTSSYFYGKAIARAARLALIAEEVGCPDVIPAVQQFLKAAVTPWLDGSFQGNGFFYDAKWGGLVTLQGLKDSGADFGFGIYNDHHYHLGYFLYAIAVLSKIDPCWGRKYMPQAYSMVADFMTLSRNKAGASFTRLRMFDLWKLHSWAGGLTEFADGRNQESTSEAVNAYYSAALVGLSYGDAHLVSVGSTLTALEMLAAQTWWHVREGEGIYEDDFSGNNRVVGVLWANKRDSGLWFAPPEWKECRLGIQLLPVLPISEALFPDVAFVKDLVAWTLPALARDGVGEGWKGFVYALEGIYDREAALTKTRALKGHDDGNSLTNLLWWLHSRGSVVCDGDAGFGRCCWYRQYCH

SEQ ID NO: 64564 - protein, 228 aa, Zea mays
  Clone ID: LIB4171-011-G6_FLI.pep
RSVAFPFPTSPAPGSRLPAPAADTTKNPSSSTTAAAMDDPRMFPSGSDDRSDAERRLYNPYQDLNMPYSYRTLYDLPTSPEFLFQEEALAQRRSWGENLTFYTGVGYLSGAVGGAVLGLRDAARGAEPGETAKIRANRVLNACGSSGRRVGNTLGVIGLMYAGIESAMVAARDRDDWMNSVAAGLGTGTLFRAANGPRSAAVAGALGGILAAAAAGGKQLAKRYVNVI

SEQ ID NO: 64565 - protein, 370 aa, Zea mays
  Clone ID: LIB4171-013-D9_FLI.pep
AAEMLRALAARCCGHWPPGAAAADGMLWQAELRPHAAGEFSMAAAQANLAMEDQAQVLASPAATLVGVYDGHGGADASRFLRSRLFPHVQRVVQEQGGMSAEAIRSAFGAAEEEFHRQVRQEWRSRPRLAAVGSCCLLGAISGDTLYVANAGDSRAVLGRRVPGGGAAVAERLSAEHNAACEEVRRELAALNPDDAQIVVHARGAWRVKGIIQVSRSIGDFYLKKPEYSLDPLFRQVGAPIALKRPALSAEPSVQVRKLKPNDLFLIFASDGLWEHLSDDAAVQIVFKNPRTGIASRLVKAALKEATRKREVRYRDLRTIERGVRRHFHDDISVVVVYLDGHRERRHTRVVDSSSNCTSAPVDIHSSNSR

SEQ ID NO: 64566 - protein, 501 aa, Zea mays
  Clone ID: LIB4171-013-G7_FLI.pep
TLHQLFHVNLPLAATCRQGAGRDDHHKTSQLHKTSAGLRRRLAHKVPVGGNLPLPGTRIVYGQHHLAGFPSCEGIVHGLLGGGRDHPRLLHAERVAVLGRRHVLGAVLEVPAPDDQIPRYRCTGLDTVDLQEDLLATLDGELGRRLRWSVLEVTGAAQPAVLHRHQLRPDELVECLGDVALARDDELALGALREEGRDHGEEHGEVPRHVNEHLPRYHLRVVVLEEGEDLVAGGSELPLWHVLEVGDLYDGVDAPGPQGERAHATLHDLDAPAEEAREAVAVAEDALVHVPVFEDAVGVVADGVAVAVPAVHVGDDALQVLEAQLLVQHGVSAELGAPGGAAEQHGVGVSDAEVPRAEELEEHHVGALVDRDGGWGRGGVVRRGGRRARVQRDAPDGDGVRVGGEQRLEVGERAELGRRERGRDVRVLLERGGAEQRSGVHERGHEAALGALGGRGCHGRGRRGGGRRHDGGVGLADVRRGGEGKLGRGQGVCGNGGSCGE

SEQ ID NO: 64567 - protein, 385 aa, Zea mays
  Clone ID: LIB4171-015-E4_FLI.pep
ARAGPGHAHNEVAAVAQRGRRSAGSGGVVVVRGGAGAGAGAGAAEPELLRVDVPRRGDAGPRRRHPEAAGDLQRGAGHAPPLLPRLLRQGLRRVRAAVGPRRRAQRGRRHHAVPGRARPGHPRQGRRGRRPALRQQGVLRRHPRPRRPRRRLPDGRAVLPGGAGAAGRQGRHACRGEAQPPGRRLRPGPAQQALRRQRAHADRHDRALRWAHDRGDALRQVRAAAVPVQGRRRRPADEPLLPAADAADVPAELQPVGVRDAGRRDAPRVRQRLLPDAAADEGPAGLRPGALRRPPLPRHRQPLRRQPDRLLGRLRQRHGQARPRRRQDRRRGRRGPPGMHQGQLAQLQMQCEPRPRAHEVKLASASLALASSLLLGAGSVGKECS

SEQ ID NO: 64568 - protein, 284 aa, Zea mays
  Clone ID: LIB4171-022-C12_FLI.pep
FCAQDFSRRDSFSAVQPGNNVPHQSTEFNDHPSTQLPYSPPPPSQSQHPSPSQSYSSPSYQATTDYPSSDFHKPSPNYSTPGYTSTDFPTNEVHKPPSNYSPPPYTRTDRPSNDGYNPHSNGKPDVSAYPQAYQPSPYTFDPQHNSQNYYSTEAPAVPYNYPNFQSYPSFQDNTSASVLTHQSSFYPESDDPAATSHTPASNSSVPTHYHPTADCSPQVTPPAAPPASQYRYDSSYQPEVEKIAEAHKAARFAVGALAFDDVSVAVDHLKRALDLLTNPSAEPH

SEQ ID NO: 64569 - protein, 575 aa, Zea mays
  Clone ID: LIB4171-025-A9_FLI.pep
SDTPHLQLNKMASNGNGNLKSDIQQVESTASDNVQGATGVNTLATQGVSRHEKPWSGFRDFWNRLGTGPKLKKLGPSTSFKFQQIALQRDEFSRSIHSDNHVSHEHFQFIRKINWEQLWVMARNWIKEPMNMALFVWIACVAVSGAILFLVMTGMLNRVLPSKSKRDTWFEVNNQILNALFTLMCLYQHPQRIYNFVLLCRWEQQDILRLRKIYCKNGTYKPNEWMHMMVVVILLNLNCFAQYALCGLNVGYRRSERPAIGVGLTISVAIGAAAFAGLYNIISPLGKDYDTEHADTDQEAQIHATSTESGRPTSRLQSFERRYSFIQSDERRFVERRPQWVGGLMDFWDQISIAYLSLFCSCCVFGWNMQRLGFGNMYVHIATFLLFCLAPFFIFVLAAGNVDNGSVQVALVLTGLFLCFFGLLYGGFWRIQMRKRFNLPENSFCCHNPDASDCFHWLFCCSCSLAQEVRTADYYDITEDRSHTGQVVGESHRIMSPLQREDGLPLFKSSPSSPYRSGNASPSIFILESPSPSAPRRSSGSSPQGGGSPTMGHRAMKAPVPSVLQRESGPDHAQG

SEQ ID NO: 64570 - protein, 660 aa, Zea mays
  Clone ID: LIB4171-027-G9_FLI.pep
SFACYTDRFSEQRHPAPLLLNLLPRRPHSCAALAMGEVVAASSLALVLLFFCSCGPASGLLSPKGVNYEVQALMMIKNYLKDPHGVLKNWDQDSVDPCSWTMVTCSPENLVTGLEAPSQNLSGILSPSIGNLTNLETVLLQNNNINGLIPAEIGKLRKLKTLDLSSNHFSGEIPSSVGHLESLQYLRLNNNTLSGAFPSSSTNLSHLIFLDLSYNNLSGPIPGSLTRTFNIVGNPLICAATMEQDCYGSLPMPMSYGLNNTQGTVIPAKAKSHKVAIAFGATTACISLLFLAVGSLFWWRCRRNRKTLFNVDDHQHIENGNLGNMKRFQFRELQAATENFSSKNILGKGGFGIVYRGQLPDGSLVAVKRLKDGNAAGGEAQFQTEVEMISLAVHRNLLRLYGFCMTASERLLVYPYMSNGSVALRLKGKPPLDWITRKRIALGAARGLLYLHEQCDPKIIHRDVKAANILLDDCCEAIVGDFGLAKLLDHRESHVTTAVRGTVGHIAPEYLSTGQSSEKTDVFGFGILLLELITGQTALEFGKSSNQKGAMLDWVKKMHQEKQLDILVDKGLGSKYDRIELEEMVQVALLCTQFLPGHRPKMSEVVRMLEGDGLAERWEALQHTESHKFKVPEFSFSRCHSDLTDDSSLLVQAVELSGPR

SEQ ID NO: 64571 - protein, 667 aa, Zea mays
  Clone ID: LIB4171-027-H10_FLI.pep
LLTSRRLGPASPPSARRPLPQESLPPPSFPARRGRLMAGRGRPRPGSHQALVVAAVILLLAAASGAGAGSPDRPAPGPPLFLPLTRSYPNASRLAASLRRGLGDGVHPNARMRLHDDLLTNGYYTTRLYIGTPPQEFALIVDSGSTVTYVPCSSCEQCGNHQDPRFQPDLSSSYSPVKCNVDCTCDSDKKQCTYERQYAEMSSSSGVLGEDIVSFGRESELKPQHAIFGCENSETGDLFSQHADGIMGLGRGQLSIMDQLVEKGVISDSFSLCYGGMDIGGGAMVLGGMLAPPDMIFSNSDPLRSPYYNIELKEIHVAGKALRVESRIFNSKHGTVLDSGTTYAYLPEQAFVAFKEAVTSKVHSLKKIRGPDPSYKDICFAGAGRNVSKLHEVFPDVDMVFGNGQKLSLTPENYLFRHSKVDGAYCLGVFQNGKDPTTLLGGIIVRNTLVTYDRHNEKIGFWKTNCSELWERLHIGDTPSPAPSSDTSSEHDMSPAPAPSNLPEFDVGLITVDMSINVTYPNLKPHLHELAELIAKELEIDSRQVRVMNITSQGNSTLIRWGIFPAESDNAMSNATAMGIIYRLTQHHVQLPENLGSYQLLEWNVQPLPRRSWFQEHVVSMLLGILLVILVTLSAFLVVLVWRKKFSGQAAYRPVDSVVPEQELQPL

SEQ ID NO: 64572 - protein, 399 aa, Zea mays
  Clone ID: LIB4171-029-H6_FLI.pep
HFTFTRAVPVSCRARTRRGLAAKAGCSAQAGLQRLLQLLADVVRRGRSLPRGAPGSVVRLRHVVRLRLRLHLWRGRRHPAQATPRSRSSGRRGPAVAAADLRAEVLHGAPEQHVVHAQRLQLPPHQRERRVAVRRRVRGGQGGCRCSAAGLGARDGARGLLDADLAHDQQRHLADGRASALAVGGEQLRRHAQAPVEPQARPAPQREHAPGREPHAGQQRADPAAGPRRRHVGREPAPGERERRHVVQRLHLPPAVGARLPGLPWRWRRRRGAQRVGEREVAEPRLEAEEEGGRRGGVVGDEVELGGEREGRACRGPQRAEPRAHGEREGERRVVGAVREPERRARCERRGHVEAELPQVPSRREPRLERQPQHDDRHLGAHQRPLVVAELDRRLHRSG

SEQ ID NO: 64573 - protein, 533 aa, Zea mays
  Clone ID: LIB4171-034-A3_FLI.pep
LPHLRLRCQALRGPTMAALLYLHPYLAVLPLLISPICSGASPWRTMTTGSHMRGEDHDKVTLLSPDSTFSCGFHEVGTNALTFSIWYTPSASASATERTVVWTANPYSAERGQHSPVNKYGSRLSLNRDGNLVLTDTNGSTVWETKTSSGRHTTAALLDSGNLVIRDSSSGNNKVVWQSFRSPTDTLLPGQELTKDTRLVSGYHHLYFDNDNVLRMLYDGPEITSIYWPSPDYNALKNGRNRFNSTRVAVLDDLGTFVSSDGFRIEASDSGPGVKRRITIGYDGNFRMYSLNASTGAWRVTGQAVIQMCYVHGLCGRNGLCDYLGGLRCRCPPDYEMVDPTNWNRGCKPMFLTTDDGNQSHEEEFTFVEQPHADYYGFDLSSNESVPFEACRDMCLNSSACLSFTYKGGDGWCYTKGLLYNGQVFPYFPGDSYMKVPKSFNSSAAYSSISNQKEALTCGPAGSAELMLGPASMYGTKKDNINWTYLYVFAAVLGALEMLVIATGWYLFFNKHSIPKSMEDGYKLVTNPWMNTF

SEQ ID NO: 64574 - protein, 476 aa, Zea mays
  Clone ID: LIB4171-034-C11_FLI.pep
RRTQSRKHTTRPHNSHPSASSTPHREPQAEPMTTTTKQLRRVRTLGRGASGAVVWLGSDEASGELVAVKSARAAGAAAQLQREGRVLRGLSSPHIVPCLGSRAAAGGEYQLLLEFAPGGSLADEAARSGGGRLAERAIGAYAGDVARGLAYLHGRSLVHGDVKARNVVIGGDGRARLTDFGCARPAGGSTRPVGGTPAFMAPEVARGQEQGPAADVWALGCMVVELATGRAPWSDVDEDDLLAALHRIGYTDDVPEVPAWLSAEAKDFLAGCFERRAAARPTAAQLAAHPFVVASAAACAAIRGPAKQEVVPSPKSTLHDAFWDSDAEDEADEMSTGAAAERIGALACAASALPDWDTEEGWIDLQDDHSAGTADAPPAPVADDFISWAEPSDAELEPFVAVAAAAGLPHVAGVALAGATAVNLQGSYYPPMHLGVRGNEIPRPLLDHHGDALEKGQGSHRTCNRETEKVTMKRIS

SEQ ID NO: 64575 - protein, 362 aa, Zea mays
  Clone ID: LIB4171-035-A6_FLI.pep
AASTCMASSQLVVVCLFVASAVTVTMNGGAQAQPIVPAIISFGDSTVDVGNNNYLPGAVFKADYAPYGQGFARHKATGRFSDGKIVTDITAETLGFESYAPPYLSPQASGKNLLTGANFASAASSYYDDTAAMYDAITLTQQLKYYKEYQSKLAAVAGRARARAILGDALYVVSTGTGDFLQNYYHNASLSRRYDVDQYTDLLVGIFSGFANELYRLGARRIGVTSMPPLGCLPASIRLYGDGKGACVPRLNRDAETFNAKLNATVRALKRRHADLKLAILDIYTPLRKLAQDPAAYGFADARGTCCRTGTAKTRVYLCNPTTAGTCRNASSYVFFDAVHPSEAANVFIAESTVDAGIELVT

SEQ ID NO: 64576 - protein, 395 aa, Zea mays
  Clone ID: LIB4171-036-B4_FLI.pep
SPSPSLFLSRTRTPMASSSKAPSSRRSVFDAVHIRSEFSAAGISAHFIPLIWKYVLQNPRCSDLDGVPSLPAAAYALLRQKFRPTTSTLTAAADSKDRTTTKLLICLQNGESVEAVVMRYDTRLGKYDGKPRPGGVRSTLCVSSQVGCKMGCRFCATGTMGFKSNLSSGEIVEQLVHASRYSQIRNVVFMGMGEPMNNYNALVEAIGVFTGSPFQLSPKRITVSTVGIIHGINKFNGDLPKVNLAVSLHAPDQDIRCQIMPAARAFPLGKLMNALQSYQNESKQTIFIEYIMLDGVNDQEEHAHQLGKLLETFKAVVNLIPFNPIGSSSNFKTSSDQNVKNFQKVLKGIYRIRTTIRQQMGQDIAGACGQLVVSLPDERSAGGATLLSDIEDLRI

SEQ ID NO: 64577 - protein, 344 aa, Zea mays
  Clone ID: LIB4171-036-F4_FLI.pep
RWKPTKMVELTSLSPGPPRPSRLTPRRRPPPPTPHVHTSSRRRGRILGAATATPGADDYHSTIRSLNSRGRHVPRKSLGQNYTLNSKVNEELVAAAGVEEGDVVLEIGPGTGSLTSALLQAGATVFAVEKDKHMATLVKDRFGSTEQLKVIEEDITKFHIRSHFLPFMKEKYGATKKLAKVASNLPFNVSTEVVKLLLPMGDVFSVVVLMLQDETAVRLADASIQSPEYRSINVFVDFYSEPEYKFRVDRENFFPRPKVDGAVISFKLKNAEEYPPVSSPKSFFSMVNSAFMGKRKMLRKSLQHICSSSEIEAALDNIGLPVTARPSDLILDDFVRLHNHLAKV

SEQ ID NO: 64578 - protein, 493 aa, Zea mays
  Clone ID: LIB4171-037-H4_FLI.pep
FKTKPSKLSVMAPPATNSPGEVDSGGRPHVMFIPSAGMGHLIPFFRFIAALAGQSVDISVVTVLPTVSAAEEDYFTSLFAALPRVRRVDLHLLPFDASKLPSNDRDPFVLRWEALRRSAHLLGPLIAGAAPRVSAVITDVTLTSHVIPIAKELGVQCHVLFPSSATMLSLLAYTPVHIDKKAEQGSDIGDVDIPGVCRIPQSCLPQVLLHLDKLFTKQFIANGREIINADGFLVNTFDALEPVALAALRDGKVVPGFPPVYAIGPLMSQQHSVDEGGKEEGSGSPVAWLDEQPARSVVYVAFGNRCAVSHDQIREIAAGLEASNCRFLWVLKTTTVDRDDSAVLTELLGEGFLERVQGRGLVTKAWVDQEALLKHPAMGLFLSHSGWNSVTEAAAASVPLLAWPRGGDHRVNAKVAVSGGVGVWMEHWSWDGEDWLVTGEEIAKKVKEVMSDEAVRARTTRTAEEAAKAVAEGGTSYRSMEEFISSVKATVAS

SEQ ID NO: 64579 - protein, 367 aa, Zea mays
  Clone ID: LIB4171-038-B4_FLI.pep
PRSMELHKYWGVGGRRCGSCEGAPAAVHCRTCVGGSFLCTTCDARPAHARLGHERVWMCEVCELAPAAVTCKADAAVLCAACDSDIHDANPLARRHARVPVAPIGSEAAAAAVEAMLFGTGEAAASEADEQHAAAEHAHAHAHALNLNVEAKDMKLDYLFSELDPYLSVEIPRFQHADSVVPNGAGAAVELDFTCGIGVKHSSYSSYTATSLAHSGSSSEVGVVPEAFGGSGSGGGSFELDFTRPKPQAYMPYTGTPQSHSVPSADVEVVPERGDLAAVRPVPLMGESREARLMRYREKRKNRRFEKTIRYASRKAYAETRPRIKGRFAKRADHDGDADADDAEAEAEAAVPMSYVLDFGYGVVPSF

SEQ ID NO: 64580 - protein, 715 aa, Zea mays
  Clone ID: LIB4171-038-C7_FLI.pep
WSDSELLSVPSFSAPIASAHRFSPLHCAGCMAPPFACAMHGRALLAAAAAALLASAVTLTLLPSAAAQPWVGPWPTCDDTTGNYSAGSAYAKNIKQLILSLQANASNTPALFATGSAGAGADAVYGLILCRGDLSPTDCFDCGTNAGQDVYRVCNGTRDAALVYNQCYVRLAPTDFLATTNNTGMRDLINGNSVPAGVNVTAYDGAITRLLNATARYAVDSSAPSLSPRKYFATGQMAGVDPRFPTGIWSMAQCAGDISPVQCRSCLDDLLAQWWQKFDSKEIGARLDGSRCNLRFETGNFYTGSPMVKLQMNGEEAAPAPVPSTDVLPGTTGGKKNSVGKLLGIILPIVFVAAIAAIALCIWIVRKKRTYQGTNLPQTDTTYMAEDIESIKSILLSLPSLQAATNNFDESNKLGEGGFGTVYKGNLSGQEVAVKRLPKGLDQGLEELKNELGLMAKLHHRNLVRLEGFCLEEGERLLVYEYMPNKSLDNILFDHEKKRQLDWRKRFNIIEGVARGLQYLHEDSQNKIVHRDLKASNILLDSNMNPKIGDFGLARLFLQDQTRGITNHIVGTFGYMSPEYVMRGQYSIKSDVFSFGILVIEIVTGQKNNGHYFDEQNEDVVSIVWKHWSEGTLAEIIDDSLGRNYSETEVLKCVNIGLWCLQQNPMDRPTMSDVMVMLNDDDTSSLPAAAKPTFFLDASSGYSYTSGTISHPSAR

SEQ ID NO: 64581 - protein, 640 aa, Zea mays
  Clone ID: LIB4171-038-E1_FLI.pep
YAAAPPPATFFPAPAMSGAIGGAEVHGFRGAAAQLPRSRVLGRPIRVAPPAAARPGGASAGSIRAVSAPAKKDASEVKRSKVEIIKEKSNFLRYPLNEELVSEAPNINESAVQLIKFHGSYQQTDRDVRGQKNYSFMLRTKNPCGKVPNQLYLAMDTLADEFGIGTLRLTTRQTFQLHGVLKKNLKTVLSTVIKNMGSTLGACGDLNRNVLAPAAPYVKKDILFAQQTAENIAALLTPQSGAYYDLWVDGEKIMSAEEPPEVTKARNDNSHGTNFPDSPEPIYGTQYLPRKFKVAVTAAGDNSVDILTNDIGVVVVSDDAGEPIGFNIYVGGGMGRTHRVETTFPRLADPLGYVPKEDILYAIKAIVVTQRENGRRDDRKYSRMKYMIDRWGIDRFRAEVEKYYGKKFESFRPLPEWQFNSYLGWQEQGDGKLFYGVHVDNGRVGGQAKKTLREIIEKYNLDVSITPNQNLILCGIDQAWREPITTALAQAGLLEPKDVDPLNLTAMACPALPLCPLAQTEAERGILPILKRIRAVFNKVGIKDSESVVVRITGCPNGCARPYMAELGFVGDGPKSYQIWLGGTPNQSTLAESFMDKVKLDDIEKVLEPLYLLEWHTPGRRIFWKLHKPNRIRQIERGSE

SEQ ID NO: 64582 - protein, 535 aa, Zea mays
  Clone ID: LIB4171-038-F6_FLI.pep
QTSPHISPTISLFFHELILDRTQAPAIAMEATADSLPWAAQCAGAALFAAALCVTALGVVLVFLRRWPWCSCHVCRAYLTGSWARDFTNLGDWYAHLLRESPTGTIHVHVLGCTVTANPANVEYMLRTNFDNFPKGKAFAALLGDLLGGGIFNVDGHAWRHQRKMASLELGSVAVRSYAFGIVAQEVESRLVPVLAAAADAGAVVDLQDVFRRFAFDTICKISFGLDPGCLEREMPVSRLADAFDVATRLCAMRGAAASPLVWRAKRLLNVGSERELREAIALVDELAAAVIRERRKLGVVGSHDLLSRFMASAGAGDGDDKYLRDIVVSFLLAGRDTVSSALTTLFMLLSKNPGVAAAMRAEAGDGESAAPLTYEHLKGLHYTHAVLYENMRLFPPVQFDSKFCAGPDVLPDGTYVAGGTRVTYHPYAMGRMPRIWGADHGAFRPDRWLTGAGASFVPESLYRYPVFQAGLRVCLGKELAVTEMKVVAVAVVRAFDVEVVGDSGATACAPKFVSGLTASISGGLPVRVRRRVVR

SEQ ID NO: 64583 - protein, 771 aa, Zea mays
  Clone ID: LIB4171-039-A6_FLI.pep
LQFPSLSSAVARQASHQVRASEASTNAGGSGAMRLLVPDGARRQRLLQCEAPPSPSPPSPSPYPSSSPSRTVVVGIRRDAASRELLTWALVKVANAGDRVVALHVATAAAADGLLVRLDERSRAADSLASVLAVYDGFCNLKQINLELKVCGGSSIRKTLVKEAAACGAAHLILGVTNNSRSFGSSLTSVAKYCSKRVPASCSVLAVNNGKVVYHKDAGHGLQHELYQSNTTIPETPRRSYRKLLSTMIGDKLWDENGKDRRCVSRAVTMPMRSPARPKEFSLALVPVKGCQHESPAVATGWPLLRKKFLPDRKASAPDKSKMSVVQWAMRLPSRYSAVSPVHSEYRTTKPDSTSASHILRDRVIVPSRSNSGKSCVVIEELEKETPEELTLLKEKFSSIYSSFSYSELAKITSDFSPECVVGQGGTSQVYRGCLANGKELAVKILKYSDEVLKEFVSEIEIVSSLSHKNVISLVGFCFKNDDLLLVYEYLQRGSLEEILHGKKECKSIFGWTERFSVAMGVARALDYLHSDNNSRPVIHRDVKSSNILISKCFEPKLSDFGLAVWAADVTSQMTCNDVAGTFGYLAPEYFMHGKVGNKIDVYAFGVVLLELISGRKPLCTGCPKGQESLVMWANSIIQGGKLRQLVDPNLPTEGHVDEVERMTLAASLCIRQTPQNRPEIDAVLKLLHGDNDTLKWARSQVGLSFESSDIDEFVMTPPAPRSNTNIQSYINLAFDVDDDSASVSSNDFIAANTSLEEYLKGRWSRSSSFD

SEQ ID NO: 64584 - protein, 505 aa, Zea mays
  Clone ID: LIB4171-040-D4_FLI.pep
QTLAMGLRSPLVLLLLLLFLAATFRPSAAALAPPTGSIVKQLSSVVRWPRAAPSTHGPKQPGHPQYADGHVGVALQFESGYFVETLVEGDKLGVTPHTIRVSPVEGGELLAVDSAHSNIVRITPPLSEYSRGRLVAGSFQGHSGHIDGKPSDARFKRPTGVAVDDMGNVYVADTANLAIRKIGESGVTTIAGGKSNIPGYRDGPSEDAKFSTDFDVVYVKKMCSLLVIDRGNAALRKISLPQEDCTYQDSALLSSDLILVIGAVVAGYIFSGFQHGFGFSGSEKVEAPENEQHESSTIGKPPLVVESLKEEPGAGWPSLGTLIADLLKLAIEGVGKLLLSVVPQRMQHGKRKTDLTPLRDRLVMPEDREETPAAAQKLSSTPMRPETAHAPNPVTETAAPKAPKSTKPSKLRDSSTLSSKHRSSKRQEYADFYGTSEPAPVGAAAKVPKDRLRHRHHHREKSGEVAYGAAHHDLKPAEAKPADYSDPSYDPYLRSKYAAESGYRY

SEQ ID NO: 64585 - protein, 496 aa, Zea mays
  Clone ID: LIB4171-040-E7_FLI.pep
LSATPSIGLDWTGGMAIPLLAPARSNGSRPLALALVLVAAAALCRPGACDDGAAAAADRIRRLPGEPEVSFAQYSGYVAVDSGGGGGKRALFYYFVEADVVDPASKPLVLWLNGGPGCSSLGVGAFSENGPFRPSGQVLVKNEYSWNKEANVIYLETPAGVGYSYSADAAYYQGVDDKMTAMDNMVFLQRWLQKFPQYKGRDLYIAGESYAGHYIPQLAEAMVEFNKKDRIFNLRGVALGNPVLEFATDFNARAEYFWSHGLISDATYRVFTSACNYSRYVTEYYGGSLSPLCARVMNQVTRETSRFVDKYDVTLDVCLSSVLSQSKILSPHEQVGQRIDVCVEDETVRYLNRRDVQAALHARLVGVDKWAVCSSVLEYELLNLQIPTISVVGSLVKSGIRVLVYSGDQDSVIPLTGSRTLVQNLARDMGLKTTTPYRVWFEGQQVGGWTQVYGGGALSFATIRGASHEAPFSQPGRSLVLFRAFLQGQPLPETFS

SEQ ID NO: 64586 - protein, 321 aa, Zea mays
  Clone ID: LIB4171-042-A8_FLI.pep
RPRSPTSLAMSSSSNSGKKPAPAGGRGGPTIRTLADINRGPAGFPGAGGGSSDDDEPQEYYTGGEKSGMLVQDPTRRNDVDAIFEQARQAGAIHGMPPFLGGESSSSRSFTGTGRLLTGETVPSAAPQEPVPVRIRHNIHLWNNGFTVDDGPLRYYDDPENEEFLESLKMSKCPKELVPTDGEHVDVSVIKRMEDYREPVRPQSAFQGVGRTLGGGPSPDESATPAPAPTAPAASRSAGIVVDDSQPFTSIQLRLADGTRMVARFNMHHTVGDIRSFIDASRPGTARPYQLQTGFPPKQLADPTQTVVQAGLANSVIMQKM

SEQ ID NO: 64587 - protein, 525 aa, Zea mays
  Clone ID: LIB4171-042-E4_FLI.pep
SGEGPPLPKAMQPDPQGPGRGKAGGANAHPRLPPPVTAGSAGRPASVLPHKTDNVRDHYRIGKKLGQGQFGTTYQCVGKADGGEYACKSIPKRKLLCREDYEDVWREIQIMHHLSEHPNVVRIRGAYEDALFVHLVMELCAGGELFDRIVAKGHYTERAAAQLIKTIVGVVQGCHSLGVMHRDLKPENFLFASTPEDAPLKATDFGLSVFYKPGDKFSDVVGSPYYVAPEVLQKCYGPESDVWSAGVILYILLCGVPPFWAESEAGIFRQILRGKLDLESEPWPSISDSAKDLVRKMLIRDPTKRFTAHEVLCHPWIVDDAVAPDKPIDSAVLSRLKNFSAMNKLKKMALRVIAESLSEEEIGGLKELFKMIDTDNSGTITYDELKDGLKRVGSDLMEPEIQALMDAADIDNSGTIDYGEFLAATLHMNKLEREESLVSAFAFFDKDGSGFITIDELSQACEQFGLSDVHLEDMIKDVDQNNDGQIDYSEFAAMMRKGNAGGAGRRTMRNSLHVNLGELLKPTET

SEQ ID NO: 64588 - protein, 461 aa, Zea mays
  Clone ID: LIB4171-046-B3_FLI.pep
EAEFVSSIDFFLPKSSIHIQVLCCYKRTHSFLFFPYCMHFQRIKKNRNWKRVTDKCWFHCCITDSSEDQKGMMWLVLESYPATQLLPFTLKIFSSSDVICRTAGEQPLCMSSSSLVSPLSHAAAAATARRSRYRWHTAHSTDTAASAPAIPPFIILDTTAGTADPADSHTAARPSAHPTAASSTRSAWLGEPASASRMRTAAGTAPRRTISARARRVAAMAARHDRPAATACLSRPPLSSAGPTRRMSSPSSSSESATVARAPGAALRSSDSTSLAASTRASSEVALRSTRARAAAVDGASATSAAATRLLLSSSMQSDAAMAASTRTAASAASLPARRSTDATVSAAPPARASAFLSNSSTSSSERKAASFRSGGQGSAAGSATRRRSSAAAAAGVGPTADAAAGDEEEEEEEGAAVDAQSAMRRRRVRLGTRSVEGSESMVAGHVVLPESSQRWMEARS

SEQ ID NO: 64589 - protein, 355 aa, Zea mays
  Clone ID: LIB4171-046-F9_FLI.pep
QLHRFIHRYLSLFQLQGKPSSKWQPSMDIMALNARDEEQYGNNHLGLGLSLSLGLGVATAAPVEVEPPPPPAAAAAAAAASYQRRAHHLPPRAEWWKWNGPGLFFGTTMDPSLERNQQQQQPAAARHGHEMPFLRGVDVNRAPAGETRRGSCSEDDEEPGGASSSPNSTLSSSLSGKRAAPARSGGEVADHTPRAGGGSDDEDSGGGSRKKLRLSKDQAAVLEESFKEHNTLNPKQKAALAKQLNLKPRQVEVWFQNRRARTKLKQTEVDCEFLKRCCETLTEENRRLQREVAELRVLKLVAPHHYARMPPPTTLTMCPSCERLASASASADQAGRAGPCWGPLPVFVDGPARRP

SEQ ID NO: 64590 - protein, 629 aa, Zea mays
  Clone ID: LIB4171-047-F1_FLI.pep
SARCRYGVRTARAEKPQQRLQSRAPTWAGQEYRTLPLPFPAAPPPPRPQYSTNTHQRAAGRGRTCGAPRTAAMAEVAARRAVGVPAGGGGDQANLAAVAAAMRGRGEVDTSSPFQSVRQAVDLFGGGAAAVSQWRHPQAPPRVHLRPEEEELMKVEEQTVKLEMELFVKEKETFKVLKELQETKQVIDGLKIQIEKVTWEDTNAAKGHADTGMVHPLPAVEQNTEPPVQSAKGTQSPLTTLIKLNQAKAFLNTDTVNMLKSQIQKEKGSLEKTRERLQFNLGKASSLEADLTKTVARLQAAKAPQPVLEPSEIWLQMKHLNADKARHKKASEDLRNEICELTAAIEHTRSKTKTLQFRILMAEKLKEASQRGESVALAEMEKLSNGRDPNGSTSDAVTLSVEEHSTLVLKAQEADGAARKKVDAAMQGLDQANRCKLELLERVEEAMAAVETSRKALEEAQRREESETKAKLVAEETLRKLRSDQIIQNWRPTNSSSVKFKNTALLAPRRAAAGAGIYDVNGLSLVAAGPNSVKTVSIGQILSMKLDRELEMTRTTTTSARKKKVSLGQILSQKYEMFSPLRIDHDCASHRQFQQPRRKRMGFVVYALLLARQRHRRRKAASCTRGGLS

SEQ ID NO: 64591 - protein, 398 aa, Zea mays
  Clone ID: LIB4171-049-C2_FLI.pep
ARRLLDRLRFLRVGRRGKYTINKARAEVQLGCCVLCLFSFLSFCAAPTPECPWSCPPLPADLGAEQAAARREGSMAGRSRYDNPFEEGGADEVNPFADQAKRGGSTAQSGYSGGAFYTTQSQRPAPPSTRLSPLPPEPADFYNDFATPVDIPMDTNKDMKTREKELLAKEAELNRREKEIKRREDAAARAGIVLEEKNWPPFFPIIHNDIGNEIPVHLQRTLYVAFASLLGLVLCLFWNIICVTAAWAKGSERTCAVLFLGAGPKIWFLAIIYFILGCPGAYYLWYRPLYRAMRNESALKFGWFFLFYLVHIAFCAYAAVSPSILFVGKSLTGILPAISLIGDSVIVGIFYFIGFALFCLEALLSVWVIQRVYLYFRGSGKEAEMRREAARGAARAAF

SEQ ID NO: 64592 - protein, 556 aa, Zea mays
  Clone ID: LIB4171-050-A8_FLI.pep
GDSVRLRPIRVSPPASRARDLRGAMAGRGGAGRRPRAVFMAFGTQGDVFPIAALAAAFACDQQEYAVVFITHSAHRSLSAHLAASSVRYMPVSSPPVLAAEQLENISSDSIQSNHERESFSMRKKAIQAEHRKECLSFVEEVFGNDPSISGDFIVINFFALEGWHLAELFQVKCVIAAPYFVPYSAPTSFKRQFKQTFPLLYKYFQEAPANTVCWTDIIHWMWALFMESWGSWRNDCLNLSPIPFTDPVTNLPLWHVREESPLLLYGFSKEIVECPGYWPFNAHACGFWFLPMDWQFSCDKCMELSGNINSSFGGMLCANHSSLEHFLTRNAYSSRPIFVGLSSIGRMGFLRNPKAFLMVLKAAIESTDYMFILFSSGYKPLDSAIQSIASSVNESRGVDSPSLGGDSALLFNGRLFCFLGSIPYSWLFPRCAAAIHHAGSGSTAAALLAGIPQVTCPFMMDQFYWSERLQWLGVAPEPLQRQNLVPDNDDALSIHNAADVLVGAIRSALSPETKAQAARIADRLSSEDGIGEALRILKARVLTQNKIISSFIASK

SEQ ID NO: 64593 - protein, 510 aa, Zea mays
  Clone ID: LIB4171-052-B9_FLI.pep
GRRRAPRERGASPGETGRVAEPEMAAAREEDEAARPLLLLPRTAQEDQKWWRRWAREAGWVGYLALPMVVVNLSQYAVQVSSNMMVGHLPGVLPLSSAAIATSLANVSGFSLLIGMASALETLCGQAYGAKQYHKLGLDTYRAVVTLLVVCVPLSLLWVFMDKILVLIGQDPLISQGAGRYMVWLIPGLFANAVIQPLTKFLQTQSLIYPLLLSSAATAAVHVPLCYVMVFKTGLGYTGAALTISISYWLNVAMLVGYIAFSSSCKETRARPTVEVFRGVDAFLRLALPSALMMCLEWWSFELLTLMSGLLPNPELQTSVLSICLTSVTLLFTIPFGLGAAGSTRVANELGAGNPDGARSAVRVVLSMAGIDAVVVSGSLLAARRLVGIAYSSEEEVISAVAAMVPLVCITAITDCLQGILSGVARGCGWQHLGAYVNLGSFYLLGIPMAILLGFVLRMGSRGLWMGIVCGSLSQTTLMSAITFFTDWNKMAEKARERVFSDKQPQEPGP

SEQ ID NO: 64594 - protein, 397 aa, Zea mays
  Clone ID: LIB4172-007-A12_FLI.pep
ADHRRSFQDGEAGCRRFHACAGIASRSIRSHSYRSPIHRRVLRRERRQPAPGERRGAAVPVQRHQPDAHLLPGRQRAERAERHQHRAHHGRAQHGPRLAGLRPERGGRLGAEQRAGVPVGQLPLHRRGQRGLRRGHRQHPSRHEEPQRGAGQRRPGRQHQGVHGGAERRHPGLPAVAGHLLAGLHGAHRAVPAEHRRPAAVQRLPLLLLHRQPGPDRPQLRALHLAGHRRAGRQQRVPEPLRRARRHLRLRAPERRRRQRPSRRVRERLAVRRGRRRHRGQRADLQPEPHQPRRPGHAQAPWPHRDLHLRHVQRGPEDGSRVGEALRPLQPGQIAGVPHQFLLIPKQDAEVHSKTFIRQYTHIDIYIHIHTGESRINKLPAVECKVYSCKATASIIS

SEQ ID NO: 64595 - protein, 895 aa, Zea mays
  Clone ID: LIB4172-009-B1_FLI.pep
QAPQLSSSSPSPHQFPFPIRPPQIRRPHSRPPRRSGIRHRRIPRCPRRPGTRVILPTTVKLAPQRRSQRLSGGGAGSAAAQPPGASGAQAAMGDSGDAVMARWLQSAGLQHLATSSAAGAGGADYRGGMPGLGGAGAGSMLSSLLMQGYGPESVEEKHRLYTLLRGLNFNGESAPTSMSEPYTPTAQSFGGGNPVEGFYSPELRGELGAGLLDLHAIDDTELLSEDVASEPFEPSPFMPKDIDDDDEDVISGSQQAPLDNYGLVTSEKESTTRENNVAKIKVVVRKRPLNRKELSRKEEDIITVHDSSCLTVYEPKLKVDLTAYVEKHEFCFDAVLDEHVSNDEVYRETVEPIIPIIFQRTKATCFAYGQTGSGKTYTMQPLPLRAAQDMVRLLHQPVYRNQNFKLWLSYFEIYGGKLFDLLSDRRQLLMREDGKKQVCIVGLQEFEVSDVQIVKEYIERGNAARSTGSTGANEESSRSHAILQLAVKKHIIVKDTRRQRDRDANEAKNTKAVGKISFIDLAGSERGADTTDNDRQTRIEGAEINKSLLALKECIRALDNDQIHIPFRGSKLTEVLRDSFVGNSRTVMISCISPNAGSCEHTLNTLRYADRVKSLSKGGNTRKEQPTGPTTTSSRESSSAPSYSLPAEAEEIPNQIQEKRPVDTYRKGTENFTSNPSAEPDRNSFSMVPNYSNKGREDNGAASGNDRERYDLKSTQTAYTSKAQLVQNSTNTQEEKVTKVSPPRRKAYKEDKSDRQGNYVKKDNGPETGRTGYKIQQAKQLQQQQRPTSASASSRQSEKESSCDDVEIDAILEEEEALIAAHRKEIENTMEIVREEMNLLAEVDQPGSLIDNYVTQLSFLLSRKAAGLVSLQARLARFQHRLKEQEILSRKKPPR

SEQ ID NO: 64596 - protein, 337 aa, Zea mays
  Clone ID: LIB4172-018-F1_FLI.pep
PRPLATRGRAHRATPSRRFFPCRASLSPDGSLAMLGAPSPRTAPPMRKPYMREHSCLIFPPPRGRRPLAVIKFLGGAFIGAVPEVTYGYLLELLALEGFVVVCVPYNVTFDHEAAAREVFQRFHACYDALLASGLPEAGLSALDIAELPLYSVGHSNGALLQLLVGSYFSERIPEANAIVSFNNRPASEAVPYFEQIGPLFRQLMPMMEASPVYSVARNASGDAWKALFDLAGGLLREYDQEATVSLSKFIDQLPSVMNQVTEGVSEFKPTPPENREFCKNSYSVPNTLLVKFTVDAIDDTDIVEDVLRPRVDSIGGQIKKVILSGTHLTPCIQDVK

SEQ ID NO: 64597 - protein, 974 aa, Zea mays
  Clone ID: LIB4172-018-F12_FLI.pep
LSLCSTPQPNPPTSPTGGRGAMEAAGNDRREAALGALSVLPDEVLCAVVDILSPADIGRLACVSSVMYILCNEEPLWMSKCLSIGGPLEYKVSWKKTALCRLGLCSENKEIWQKPRQFDGFNSLYLYRRWYRCFTTLNSFSFDDGHVERKDDFLLDQFRSQYDGKCPVLVTKLAETWPARTKWTLQQLTKDFGEVPFRISQRSPQKITMKLKDYVSYMELQHDEDPLYIFDDKFGESAPTLLEDYSVPHLFQEDFFDILDYDQRPAFRWLIIGPERSGASWHVDPGLTSAWNTLLCGRKRWALYPPGRVPGGVTVHVNDEDGDVDIETPTSLQWWLDIYPHLPEHEKPLECTQLPGETIFVPSGWWHCVLNLETTIAVTQNFVNQSNFQHVCLDMAPGHRHKGVCRAGLLAVPGKFVKDNKNHQSVTMSGWNHPDMSRKEKRLKGSEALRISNSINHCSAFEFSGVQESLENQDFSYDIDFLSQFIEKERDHYSSLWSPTNSIGQREAREWLRRLWVLKPDLRELIWKGACLAINVDKWYSCLEEICACHSLPPPTEDEKLPVGTGSNPVFIVSGNVIKIYAEGGLVYSVHGLGTELEFYDLLQKSGSPLINHIPEIIASGFLEYKDDIYSTVPWNGKGIPEILVKYYSLEVSCANSCFPLGLWSKQRFGMCSSADVSDRPIWPYMVTRKCKGDIFARIRDMLSKTDILHLASSLGVQMRNIHLLPLPPVEHVPESGNNDVKEVVGTCDDTTVLPEWQQLVSTLNRRKQNVKKHLANWGDSVPQVLVEKAEEYLPPNMGFLIKFVKDDGELLYPCPSWIHSDIMDDNILIEGIIKLSSSGERERVYDSDRDKINAIHIIDFSDLSIGDPICDIIPLHLDIFRGDSDLLKEFLRSYQLPLLRGESTTDVYRSVRNSKFSRASYRAMCYCILHEDNVLGAIFSLWKEMRAATSWEDVENLVWGELNRYQDSAVRSA

SEQ ID NO: 64598 - protein, 453 aa, Zea mays
  Clone ID: LIB4172-021-C8_FLI.pep
PTHPAIFSPFPPNSRRPGSSCSLPEGLRGRGGHGMWGRHYWGGGRRPSWAPGGNGAGTGGVVVMFAWLSSQERHVRAYVELYAAHGWACLVCHSDFLTLFFPEKAAMLADRVIGELVKVLKITPVPVVFASFSGGPKGCTYKVLQLIERRCEGQLSMDEYQLVRDCLCGQMYDSSPVDFVSDLGTRFLLDPSVLKMSEPPRVLSWMTKGIASGLDVLFINKFEEQRKDYWETLYSSVHFGPILILCSEDDQLATYSVVQNFGQHLLELGGDVSLIKWHSSPHVGHYKHHPEEYRAAVTELLKKASTLYASRRQLNGHAVGTSEHTDAPASTSKSNPHRDAASSVGRSRLIQAPADPAGQFPSIPSSMEYHESSSQGPPQPELFSMPGVESSGLRCAVLGQALYGVCVPKDVEDGWDLAPPSASSDALWGAAAAAAPPRRGSFRPMRCVRRSRL

SEQ ID NO: 64599 - protein, 444 aa, Zea mays
  Clone ID: LIB4172-023-G3_FLI.pep
SKPQPQAAGCFRFAGEELSAMAAAQEEAAAAPPSTESDATETEEAPPGGAESDATAMEAAAEYSWLQLRFDRPPRRLYHFARQFRSATSSGSNSSGENFLKGVKWSPDGSSFLTSSDDNSLRLFYLPEEAYIAAEPVAEAAVESEDSYGAFIQANEGEPVYDFCWYPCMSLSDPATCVFASTSRDHPIHLWDATSGELRCTYRAYDAMDEITAALSISFNSSGSKLFAGYNKAIRVFDVHRPGRDFDQYSLLKGGEGPTGIISSISFSPQNGMLAVGSYSQTTAVYAENNMEPLYVLHGQLGGVTQVLFSKDGNYLYTGGRKDPYILCWDIRNTVDIVYKLYRSADTTNQRIHFDIEPCGRHLATGGQDGMVHVYDLQGGQWVTGYQAAADTVNGFSFHPYLPFAVTSSGHRRFGMQDEFEDELNLAGDENSCSVWMFSSSQEA

SEQ ID NO: 64600 - protein, 881 aa, Zea mays
  Clone ID: LIB4172-029-A8_FLI.pep
QYTVRVGAAATRVLLLRTPRAAATRPQLVAAPDRGGGGAGGGSCGGCGGGSGSAMRGGGRGGGGRQPSYAAPDGADAAAIPVASRKMVQSLKGILADRSEGEIYATLCDCGMDPDIAVERLISQDTFHEVRRKRDRKKETKVNHETRPRPFQKYTYRGYKAVSDRSGRDPTGGFKGPVKKEPELQAPLNSSALDVKTSDTTEIFSATINVAQTDAKNTTSQPLSKVQHGWGGIPGRPSMAEIVKMGRPQAKVGSRSVASSTALPTVGDSVISNTPNLVPEEYNRTVFASEAGHVAADKLPNGAVEVHSLPKDASAFDMLPSAEGTDVEAPSMSASAQGSSMPDANEDDIEKYANLEEGNTESLISPGQVSASGKDIQSEYTEVVSHVDEGSIEKTDDFQLNGLPFEHNQNLNGDVSTATTQFDHLTLHEGPKLSDDNPAVIIPDHLQVSNADCAHLTFGSFVSGTLDSSLTTKPLESHGDAATVPDDDSIDQSDGRIHDDEGKVTLATDVNEYVTSAANSNEENLDITSVQQSEVTRADFLDVTSNTEYNLTSTPDYATSSAPLQDSASQSLQENRQFQNISPFSSFMQMQNGLLPPAIPPLREFDPAFSLLLTHPPMMHGTMSSSMSNTTVSTQPQENANPVGLPNPQLTQSQQSTSIASGPPLPQHLLHPYAQPTLPLGYASMIGYPSLPPSYAYLPPAAFQQPYMNSGLFHQAAAAVPTSSVKYPLPQYKSNIALASLPQPGSLLSSYVGGFGTASNMPGNFPLNQSTTAATTTLGFDGTVPSHFKDGNQFISLQQNENPAMWMHGASSRGMPPLAASTMYGYQGQSHQAGLRQGQLPSQFGSALGQSQPGLGPEHRNPSDSNLSGAAQANQMWPNTY

SEQ ID NO: 64601 - protein, 478 aa, Zea mays
  Clone ID: LIB4569-007-F3_FLI.pep
REVVVSSDSRTTASSPHQGSNPESAAMGTIVRGGRSGMMKQLNVGGKLFSLEASSLSLMSIGSPSPTPTFVDRDPALLFAVLAAIRSPSTAAPDFPARVLLDEANFYGLQAQLLAALSPPPLRGFSASLASTLCPSSEPFPTALAPHHDGSLCLAHGAGLVTYYSPALDHRATIRTHLHRITSLLQLPSSLAVLGSDSAPGLHVYDFLDGKHVASVQWSDPTDTRTSKVKVVAIAARPPADAADKNSPILATFECPHRENCIMAVDPVTLKPTQEIGRQSGSAAKSSAPGRVVHLQALGLVFASFVSSGAFGYSGYMRLWDIRSGNVVWETSEPGGAGRSSRFGDPFADADVDVKQQAIYKVCSKSGDLAVADLRCLGDDPWVYMSSGPRGSAGGYGSVLCCHRSQVFVSRKDGLEVWSRLEEHRHNTGELTEQSGVKERPKNEGIDGRFYGSCYVDTEKDARRGMIQMIEGGGTACL

SEQ ID NO: 64602 - protein, 658 aa, Zea mays
  Clone ID: LIB4569-008-D3_FLI.pep
CSGGGGSVESPALPIRSGPAGFLTLVFFFASSLIRCNLAVAVRSNRTLPRSPRTLESRCRCRGSTMAFWWPLLVLAAAYALCRLLLFLIPPTVPSIDVDASDVLAKEDSFIYIPRRGKSTQTDKVQCYEPATMKYLGYFPVVTPDEVKEHVAQSRKAQRIWAKSSFKQRRQFLRIVLKYILEHQDLICEVSSRDTGKTMVDASLGEIMTTCEKITWLLDEGEKWLKPEYRSTGRSMLHNRAKVEFYPLGVIGAIVSWNYPFHNVFNPVLAAVFSGNAAVIKVSEHATWSGCFYFRIIQAALSAVGAPENLVHIITGFAETGQALVSSVDKIIFVGSPGVGKMIMKRASETLIPVTLELGGKDSFIVCEDVDLPSVVQVATRAALQSSGQNCAGAERFYVHDDIYSAFVSQIVKTVKSISVGPPLSGRYDMGAICMIEHSEKLQNLVNDALDRGAEIAVRGSFGNLGEDAVDQFFPPTVLVNVDHTMKIMQEETFGPIIPIMKFSSDEEAIKLANDSKYGLGCAVFSGNQKRAIRIASQLHCGVAAINDFASSYMCQSLPFGGVKDSGFGRFAGVEGLRACCLVKSVVEDRLWPYIRTVIPKPIQYPVSEHGFEFQRLLVETLYGYSVWDRLRSLVNLIKMVTEQNSAPASNATTKKRR

SEQ ID NO: 64603 - protein, 536 aa, Zea mays
  Clone ID: LIB4569-009-E12_FLI.pep
LRPGGALDTNMMGRKALGCAPLLLLLAAAVAPAELSVGAAAASGAVTRADFPAGFVFGVGSSAYQVEGAVAEDGRKPSIWDTFTHEGYSLDNATGDVTADQYHKYKDDVKLLHEMGVDAYRMSIAWPRLIPDGRGAVNPKGLEYYNNLIDELLSYGIQPHVTIYHFDFPQALQDEYSGLISPRFIEDFTAYADVCFSNFGDRVKYWSTVNEPNVETIGGYDQGILPPRRCSFPFGFGCEEGNSTTEPYVAAHHLLLAHASAVSLYRDRYQAAQGGRIGLTLLGWWYEPGTQTPDDVAAAARMNDFHIGWFMHPMVFGDYPPVMRRNVGSRLPTFTDEEAARVRGSFDFVGFNHYIVVYVKADLGRLDDQVRDYMGDAAVKYDMPFLKSRNQFPFGALTSDFMTSTPWALKKMLRHLRVTYKNPAVMIHENGAAGQPDPSGVNSYDDEFRSQFLQDYIEATLQSIRNGSNVQGYFVWSFLDVFEYLFGYRLRFGVYGVEFNSTARTRYQRHSAKWYASFLRGGELRPVALPDGAYSQ

SEQ ID NO: 64604 - protein, 368 aa, Zea mays
  Clone ID: LIB4569-009-E5_FLI.pep
PLSSSEVEIWAVVSRTLAASAVMGRSALAVRLASLLAFGLVLVSVEASLGDVDPRYRTCVRECQATGIVGENVISHCQSKENYTSVGVSWYNREQIYIQWKELNCRTDCRYFCMMQREGERQSLGLSPVKYHGKWPFLRVSVFQEPLSTALSAVNLLMHFTGWLSFFLLVNYKLPLRPQTKRTYYEYTSLWHIYAILSMNAWFWSSIFHTRDIELTEKLDYSSAVALLGYSLILSLLRAFNVKDEASRVMFAAPILAFVTTHILYLNFYELDYGWNMKVCVVMAAVQLLTWAVWAGVSRHPSRLKLWTVVFGGALVMLLELYDFPPYMGFADAHSLWHASTIPLTYLWWSFIKDDAKFRTSTLSKKAK

SEQ ID NO: 64605 - protein, 737 aa, Zea mays
  Clone ID: LIB4569-009-H11_FLI.pep
LAFQSLGVVFGDLGTSPLYVFSNIFPHEIEDTEQIIGALSLVIYSLTLIPLVKYVFIVLRANDNGQGGTFALYSLLCRHAKINTIPNQHRTDEELTTYSRHTYDEKSLAAKIKRWLEGHQFRKNVILILVLFGTCMAVGDGILTPAISVLSATGGIQVEEKKMKNDAVVIVSVVILIGLFSMQHFGTDKVSWLFAPIVFVWFILIGVLGAVNISKYDQSVLKAFNPIYVYRYFKRGKTSWASLGGIMLSITGTEALFADLSYFPVQAIQIAFTVVVFPCLLLQYTGQAAYIAQNKDHVSHAFYFSLPDSVLWPSFIVATAAAIVASQATISMTYSIIKQALALGCFPRVRIIHTSKKYLGQIYSPDINWILLVFCIAVTAGFKNQSQIANAYGTAVIMVMLVTTFLMIPIMLLVWRSHWTLVILFTVLSLFVEIPYFTAVVRKIDQGGWVPLVFAVAFLIIMYVWHYGTLKRYEFEMHSKVSMAWILGLGPSLGLVRVPGVGLVYTELASGVPHIFSHFITNLPAIHSTLVFVCVKYLPVYTVPLDERFLVKRIGPKNFHMFRCVARYGYKDIHKKDDDFEQMLFDSLMLFVRLESMMEEYTDSDEYSTRETNLSGSANPRINGISAGSNMDLSYTSHDSIIQVQSPNYTGNSQAVSPGQLYHTVGDEIAFLNACRDAGVVHILGNTVIRARRDSGFIKKIAINYLYAFLRKICRENSAIFNVPHESLLNVGQVFYV

SEQ ID NO: 64606 - protein, 320 aa, Zea mays
  Clone ID: LIB4569-011-B8_FLI.pep
TVRSRPREMTATSAFESSPEMERFLCERLLNTEQPIAERFRALFSLRNLRGDAPRRALLQAARDPSNLLAHEAAFALGQMQDAEAIPALMAVLKDLSLHPIVRHEAAEALGAIGLEKSIPVLEESLTTDPAVEVQETCELALRRIEENKKVNGAESTTTSPFLSVDPALPSKHGLSVDQLRGLLLNEQESMYQRYAALFALRNDGGDAAVSAIVAALSVKSALLRHEVAYVLGQLQNKAASDALSTVLKDVCEHPMVRHEAAEALGSIADQESIALLEEFAKDPEPIVSQSCEVALSMLEYERSGKSFGFLFLQTPHVQS

SEQ ID NO: 64607 - protein, 356 aa, Zea mays
  Clone ID: LIB4569-011-F11_FLI.pep
LEAGREAAGCHSALPPSIAQSLVRSMLTHPNGVVRPSTKEPLFSFGVIADVQYADIPDGRSFLGVPRYYRHSIAVLRRAVERWNGERSVRFCINFGDIVDGFCPKDRSLAAVQAVVREFDGFRGGPTYHMLGNHCLYNLPRSELVSVLRMPSASPGRAYYDFSPWPGYRFVVLDAYDFSAVGWPRGHPVSAAARRFLEKRNPNHDKNSPSGLEGTDRRFVMFNGGVGEAQLRWLDGVLRRAERRGEKAVVCSHLPMHPGAASPTGLMWNYEEVMDVVRRHGGCVVACLAGHVHKGGYAVDDSGVHHRTLEAALECPPGTDAFGHVEVHPDRLRLVGSDRMASTEMLLSPSNELASA

SEQ ID NO: 64608 - protein, 392 aa, Zea mays
  Clone ID: LIB4569-011-G7_FLI.pep
HNCSLVLGFGLTDRHRQRQAAALAGWSCVIVSWLPSMEVVNRYVATRHHIEGAPTEADFEVKEEMARWAPDSGEVLVRNLYLSIDPYQLNRMKRSSVTHLAVEGILPGQAASTLLSPSPSVKRITTYAAGEVVASACEEYKAGDKVAGVLGWEDYTLFKPSPAVVMSKVADDAAGFPLSHHINVLGTSGMTAYGGFFEVCKPVKGEKVFVSAASGSVGSLVGQFAKLAGCYVVGCAGTAAKVDLLKGKLGFDDAFNYKEEPDLKSALKRYFPDGIDIYFENVGGEMLEAALANMNPYGRVALSGVISEYTGGARRAVPDLLEVIYKRITIRGFFAYDFLSKFAEFNAVIGGWVRDGKVQVLEDVSDGLESVPSAFAALFRGQNVGKKLVKLA

SEQ ID NO: 64609 - protein, 289 aa, Zea mays
  Clone ID: LIB4569-012-C10_FLI.pep
LSSRRAVPRDTSPRTMPCLSFLLAPPPRPCLADSVSRSPLPNKYRFFLPQTRRRPSPRLGDGVRMAEMTRVWSCGEPLEVGVSMESDPIVGGEAPSRSRWEASRWAPVEAALNRMSKWLVAGCFAFAAIWKRDAEIMWVLLGAVGNSLLSLVLKKMLNHERPAPALRSDPGMPSSHAQSIFYAATVLALSLYYWLGTNYLTMILGPATLSLAAYLSWLRVSRGLHTLNQVMVGAVVGSAVGALWFALWHWLVQEAFASSVLVRVAVILGSSAFCVSFVVYMIRHWLKDE

SEQ ID NO: 64610 - protein, 397 aa, Zea mays
  Clone ID: LIB4569-012-H2_FLI.pep
QGRPQYRASPLPARWPWSGGKRGDYKELFVMALPKDGCLDGAKITEVGGVGYKELLVMALPKDDSIDGAKVAEAIGVKLPDVGGAIRTILNSREAREFASGALAGAMSKAILAPLETIRTRMIVGVGPRHIFGSLVDIIQQNGWQGLWAGNTINMLRIIPTQAVELGTFECVKRSMAEAQEKWKEDGCPKIQLGNMKIELPLHLLSPVAIAGAAAGIVATLACHPLEVIKDRLTINREVYPSIGLAFRRIYKTDGIGGFYAGLCPTLIGMIPYTTCYFFMYDTIKTSYCRLHKKSSLSRPELLLIGALSGLTASTISFPLEVARKRLMAGALQGKCPPNMIAALSEVIQEEGVMGLYRGWGASCLKVMPNSGITWVLYEAWKDVLLADRNKPRSLAN

SEQ ID NO: 64611 - protein, 365 aa, Zea mays
  Clone ID: LIB4570-001-E9_FLI.pep
SWRGTTCLLSFLPSIPPCLRPLLTPVGRGAAADCWDCPTPSAQVIFGPFAGDEHHQVCQVDRAMDSLWHLGDELRGQPKVVEDRQWSLMTSKLAEITRSKGERMNTVPDAKQWDKTSYQLHDDSRIGHIGLMNLDLKMNEAAAMKLPFRGMPYSMNQMYLKGSNANSNVNAFKMNVGVNKYSNSPNGKDANGKNNGGSGGNNNNGSANGTSVADKRFKTLPTSEMLPRNEVLGGYIFVCNNDTMQEDLKRQLFGLPARYRDSVRAITPGLPLFLYNYTTHQLHGVFEAASFGGSNIDPTAWEDKKCKGESRFPAQVRICIRKLCKPLEEDSFRPVLHHYDGPKFRLELSIAETLSLLDLCGKEGI

SEQ ID NO: 64612 - protein, 360 aa, Zea mays
  Clone ID: LIB4570-003-A9_FLI.pep
SRPAGDSADKCLPLFAQPALGRTHSPVRPSVRGAPTRHRHQHHRPPGARHAREEEEEEGTGRQRAMAAVVCVTGAGGFIGSWIVKILLARGYAVRGTSRREAADPKNAHLWALDGAAERLTMLQVDLLDRASLRAAFRGCDGVIHTASPMHDNPEEIIEPIIAGTRNVVEAAADAGVRRLVLSSTIGTMYMDPRRDPDAPLGDSSWSDLEYCKSTENWYCYAKTVAEQGAWEAARARGLDLAVVIPVVVLGELLQPSMNTSTLHRGELCRILAGLFPEYPIPTRCKDQVNPLKKGYKFTNQPLKDLGVKFTPVHGYLYEAVKSLQDKGFLPKTSGAKVPERRSCLPQTTSQPPPEIVSKL

SEQ ID NO: 64613 - protein, 268 aa, Zea mays
  Clone ID: LIB4570-003-F6_FLI.pep
RRRRPPPGGQAIVGSYSSAPSPVMSTQNKRLKDVEVSFPIVYGTISFWLGKKASEYNSHKWTVYVRSANNEDLSVIVKRAVFQLHPSFQNPTRVVEQPPFELSESGWGEFEIAITLYFHSDVCDKRLDLFHQLKLYPEEEAGPQSTKKPVVVETYDEIVFPEPTEAFFLRVQNHPAANVPRLPPGITLPPPGPMEIVPYEKKRGDTKDHPLSQWFSNFSEADELLKLAAARQQVQVHIAKLRRQLTMIEGMPQQSKAFSVPGQQFRHI

SEQ ID NO: 64614 - protein, 687 aa, Zea mays
  Clone ID: LIB4570-004-B11_FLI.pep
KSEQCAAQPEMAPHTTADDDGEGNALSVERAFADQAVPSWREQLTVRAFVVSFFLAIMFSVIVMKLNLTTGIIPSLNVSAGLLGFFFVRLWTAAIERVGLLRQPFTRQENTVIQTCVVAAYDIAFSGGFGTYLFGMSETIAKQATEADNPQNVKNPHIGWMIGFLFLVSFIGLFALVPLRKVMIVDYKLTYPSGTATAYLINGFHTPEGAKLAKKQVKTLGKFFLMSFLWGFFQWFYTGGDNCGFQNFPTLGLQAYKNKFYFDFSPTYVGVGMICPHIVNVSVLLGGILSWGIMWPLIGNQKGSWYDASLPESSLHGLQGYRVFISIAIILGDGLYNFVKVLIRTTAGFISMMKKNSTLPVSNNGSPITEGVSFDDERRRDLFLKDQIPRSVAYGGYVAVAAISIGTLPQVFPQLKWYYILVAYIFAPVLAFCNAYGTGLTDWSLASTYGKLAIFIFGAWAGASNGGVLVGLAACGVMMSIVSTAADLMQDLKTGYLTLASPRSMFISQVIGTAMGCVIAPCVFWLFYKAFADIGLSGSEYPAPYAIVYRNMAILGVDGFSSLPKNCLTLCYIFFAAAIVVNLVRDLVPKNVARFIPLPMAMAIPFYLGSFFAIDMFIGTVILFAWETINKAKANAFAPAVASGLICGDGIWTLPQSILALAKVKPPICMKFLSRSVNAQVDGFLGS

SEQ ID NO: 64615 - protein, 258 aa, Zea mays
  Clone ID: LIB4570-005-E8_FLI.pep
LEAGRENSVSNSRVLLLSDPELRRPQHQARPPSRVTEMALPNQGTVDYPSFKLVIVGDGGTGKTTFVKRHLTGEFEKKYEPTIGVEVHPLDFTTNCGKIRFYCWDTAGQEKFGGLRDGYYIHGQCVIIMFDVTSRLTYKNVPTWHRDLCRVCENIPIVLCGNKVDVKNRQVKAKQVTFHRKKNLQYYEISAKSNYNFEKPFLYLARKLAGDPNLHFVEAVALKPPEVTIDMAMQQQHEAELAAAAAQPLPDDDDDLIE

SEQ ID NO: 64616 - protein, 284 aa, Zea mays
  Clone ID: LIB4570-005-G12_FLI.pep
SRPAGARPLLLKVEKRRLPPFQPQVYSLHRIHPPSPPPPPPTTTMASLLRRSAVPARLLLLLPRHFAAAGSAPALSRSFSRFNPRDDSSMFDPPEPPVNWGVSIVPEKKAYVVERFGKYLKTLGSGFHLLIPAVDRIAYVHSLKEETIPIPHQNAITKDNVTIQIDSVIYVKIMDPYLASYGVENPIYAVLQLAQTTMRSELGKITLDKTFEERDALNEKIVSAINEAATDWGLKCIRYGIRDINPPAGIRQAMEMQAEAERKKRAQILESEGMKQAQILESEG

SEQ ID NO: 64617 - protein, 471 aa, Zea mays
  Clone ID: LIB4570-007-A9_FLI.pep
WCGKRRLLHRSNKKKGRDRTRQATSSFQREGKPRGRELEMGEGRAGDGLIKLFGKTIPVPETAAVGEAAKDIQQSGGSGSGTTDPKGQENNVQDSTGSPPQQEVADTEDSSADKQQGEAGNPKEKLKKPDKILPCPRCNSMDTKFCYYNNYNINQPRHFCKNCQRYWTAGGAMRNVPVGAGRRKSKSASATSHFLQRVRAGLPVDPLVCAAAKTNGTVLSFGSAMSSLDLTEQMKQLKEKLVPIAGDERSVGSRNQGPSAKAEDPDRKENVTADKSARVVQHPCTTNGVAMWPFSCAPPVPASACYGPGSIAIPFYPAAAAAAAYWGCMVPGAWSGAWPPHSGQSETGSSITSASPAASTKSNICFTPGKHPRDRDEEGGAKGNGKVWVPKTIRIDDVDEVARSSILSLIGIGGDKAGKDGGRGCKLARVFEQNEEAARTATPHSAAISGLPFLQGNPAALSRSLTFQEGS

SEQ ID NO: 64618 - protein, 206 aa, Zea mays
  Clone ID: LIB189-028-C10_FLI.pep
HTKAHVHLSPFSVTQRPQRHHTLAIHLLVPVDEVGVADHGIEHLRDEEAAAGDDGHDEQRRDGVLEQLHYGLQHRVRHPCAHRHNVQRVPPHVVPELLHQGALWPQRQGGAWPRGQGQRHGHAHRDAADERPRRQRARPRPAAAGLVIIARCSELLTQVALLLPSCCDAFVRRYGKEAFCVLLRGWWFTGGEPSSDDGGGGGGEAM

SEQ ID NO: 64619 - protein, 95 aa, Zea mays
  Clone ID: LIB3088-003-D9_FLI.pep
SQLRTHFPTTTFILLSVSQRLGHCRRARSPRQLLLLTRVQDAQQTSQSSCRQGDEVPDGDNFPLHNRILQQHMDPLKRRVTMPPKSSNKQAQSLR

SEQ ID NO: 64620 - protein, 66 aa, Zea mays; identical to SEQ ID NO: 62633
  Clone ID: LIB3079-029-D2_FLI.pep

SEQ ID NO: 64621 - protein, 52 aa, Zea mays
  Clone ID: LIB3079-030-E7_FLI.pep
LDIPNSVLRLPASLVLPADRYMFLCSSPRPRFSFHLRFGDVEGRTGLFSTIS

SEQ ID NO: 64622 - protein, 133 aa, Zea mays
  Clone ID: LIB3115-022-H1_FLI.pep
SLDAGHAHAQLCSLRRLPTARSRPSAERLAPPATPPWPSWRHYFLLRRDIVELGCLASKSSRRCRSGFPVLARGLVVVSTSDSEASTSASPVSSSFQQPCHTLRSRRKTKGKHQCHARQVLVICASRTTSSIS

SEQ ID NO: 64623 - protein, 87 aa, Zea mays
  Clone ID: LIB3115-009-D11_FLI.pep
RKSKSQLHFYNCHLGVISSYRIILYELIPSMTTATDQTKLTSNAGEPRASSKGKYVCIREGSQLVKRTHNYTFLLYMIEACYLIVLA

SEQ ID NO: 64624 - protein, 152 aa, Zea mays
  Clone ID: UC-ZMFLB73376G05_FLI.pep
LETHLVPSSTAPESKVFYLKMKGDYYRYLAEFKTGAERKDAAENTMVAYKAAQDIALAELAPTHPIRLGLALNFSVFYYEILNSPDRACSLAKQAFDEAISELDTLSEESYKDSTLIMQLLRDNLTLWTSDISEDPAEEIREAPKRDSSEGQ

SEQ ID NO: 64625 - protein, 686 aa, Glycine max
  Clone ID: 700752109_FLI.pep
ATKLNMLLKLLPLLVFLLIPVSSQPNQLFYAGFKGLGSNNMTLDGVAEIEPNGVLKLTNDSSKVMGHAFYPTPFRFKNSSGGKAFSFSSSFALAIVPEFPKLGGHGLAFTIAPSKDLKAHPSQYLGILDSSNIGNFSNHLFAVEFDTAKDFEFGDIDDNHVGIDINSLASNASASAGYYTGDDDSSKQNLTLQSRVPILAWVDYDAAKSVVHVTISASSTKPKRPLLSYHVDLSPILKESMYVGFSASTGLLASSHYILGWSFKINGPAPPLDLSSLPQLPGPKKKHTSLIIGVSVSVVVLALCAVLFGIYMYRRYKNADVIEAWELEIGPHRYSYQELKKATKGFKDKELLGQGGFGSVYKGTLPNSNTQVAVKRISHDSNQGLREFVSEIASIGRLRHRNLVQLLGWCRRLGDLLLVYDFMENGSLDKYLFNEPETILSWEQRFKVIKDVASALLYLHEGYEQVVIHRDVKASNVLLDGELNGRLGDFGLARLYEHGTNPSTTRVVGTLGYLAPEVPRTGKATPSSDVFAFGALLLEVACGLRPLEPKAMPEDMVLVDCVWNKFKQGRILNMVDPKLNGVFNEREMLMVLKLGLLCSNGSPTARPSMRQVVRFLEGEVGVPDELRKPGEGGYQEGFDEFLHSLESSSFDQMNTGSYGRNRDMDSSFPSLTGTSLFSPHGKGQTM

SEQ ID NO: 64626 - protein, 299 aa, Glycine max
  Clone ID: 700664385_FLI.pep
SLGRVYKADFPNGKVMAIKKIDNSALSLQEEDNFLEAVSNMSRLRHPSIVTLAGYCAEHGQRLLVYEYIANGNLHDMLHFAEDSSKALSWNARVRIALGTARALEYLHEVCLPSIVHRNFKSANILLDEELNPHLSDCGLAALTPNTERQVSTQMVGSFGYSAPEFALSGVYTVKSDVYSFGVVMLELLTGRKPLDSLRVRSEQSLVRWATPQLHDIDALAKMVDPTLNGMYPAKSLSRFADIIALCVQPEPEFRPPMSEVVQALVRLVQRASVVKRRPSEESGFGHKTPDHEAMDMPF

SEQ ID NO: 64627 - protein, 84 aa, Zea mays
  Clone ID: UC-ZMFLMO17003C01_FLI.pep
PGLIGITIGRIQATRGDMRITMREMVDSLIGSLRIMKGTMIGLMADMVAGMTIGRLIGPSQESCVRTGFCFLHSFPCMCSSKLA

SEQ ID NO: 64628 - protein, 123 aa, Zea mays
  Clone ID: UC-ZMFLMO17009H10_FLI.pep
MLVSYLLLSSSSCPVCVPPLGLALWPWIANAPLRVQSTSVLSCFPVFKNAVGRSKQASSNHMEVESALRCHATQLHVHQVQESGGYLPIRDQPLPERQGTMAACLMSTRHEQQQPPAGQRPGF

SEQ ID NO: 64629 - protein, 67 aa, Zea mays
  Clone ID: UC-ZMFLMO17010H03_FLI.pep
DDVYNFMRSQKRRRVLSSDVTQDFDAMRKQLVSDSATIFRSKVPESLMENLIKRLRSYFEGKHSPHE

SEQ ID NO: 64630 - protein, 50 aa, Zea mays
  Clone ID: UC-ZMFLB73074E12_FLI.pep
SLAASSMNLKCSLFLFVSVRTSRPADPNRKCYRYTDSYTVQRRIFSIKST

SEQ ID NO: 64631 - protein, 288 aa, Zea mays
  Clone ID: UC-ZMFLB73083D02_FLI.pep
GLEEEDGEEAAPASPWAEADAQAGGAEAQTEVLGAGEPDLESKIVAIRDFLEDPNQPENELVSLLQNLADMDVTYNALQETDIGRQVNGLRKHPSAEVRRLVKQLIRKWKEIVDDWVRLDNSGGDGSASVMTDGDSPHKIQGRSHQSPRVSGFQYSPSPQRFNGSTSEMANNGFESTMDAKRRASPVPAHHNSRQMNNNHHSTTITTSTSSAPAFSVQKVTREQKQSLVDLDRLDSARKRLQENYQEAQNAKKQRTIQVMDINDIPKPKSRNAFIRKSGSGGLPARHR

SEQ ID NO: 64632 - protein, 186 aa, Zea mays
  Clone ID: UC-ZMFLB73186C06_FLI.pep
LILSSEARNSSLLANSRGGLHQRAISTVAARPAHHGAQERPHHLFRRVSPKQTHDVLHDGGVTGHRDPAVATGEPELLPRHAEEHAEDGGVEVRQRDLEPPAVRRVHHAVALAGYSYTRGAARRRRSLGGSFCRRRQCDPPPCRGGHPLPLLGHLHKSLGADHGRSRRPPARFPGKKLRELELACF

SEQ ID NO: 64633 - protein, 549 aa, Zea mays
  Clone ID: UC-ZMFLMO17211C03_FLI.pep
LFVASHWCSSPHRSAAPMASLFGARRRRSPEDDSEDDRSGRGRTKRFRLSPEEDAASPAEAGPGAATETGWLSGFVYGAKRVISSVLLFSSPEETGSGEDEEEEKDDDDDEEGIHLNEHEATHDTHGAIVPYSEPKLTIEQMVMKETFSRDECDRMVELIKSRVRDSTFPEAHEYVKPEEIPSRNAGITHDFTGTWRSLSRDRNVPESVPLSSMRTRPGSFSQGSPLQASPELSTAAVTEAKKWLEEKRQGLGFKPEDNGPCTLNTDILSSVTTKEDYLSSFWTKLEESRRARIGSSGGSADAPKFWNYGSNSRLFENDTSIFSLGTDEKVGDPTKIYNGSGKFAATEPVGGCCLPITPTEDRTDGITEPVDLARNNGNAPQENQVASEILPDKVPEGNDVSSTGITKDTTGHSGDVKAPTSEPHLGETRINSASESIPNDAGPPTQNKKNGPTIKKTLVNGLVDQPNANSGLESSGNDNPSYTNSSSAVPVPPASTQPVESAAAAVDVDSVEKGPGTTPEQPAKRRAPNVRRGQRRVLRSATREGRAT

SEQ ID NO: 64634 - protein, 218 aa, Zea mays
  Clone ID: UC-ZMFLMO17001G04_FLI.pep
GSAGSGSPEMDWSAVTAEDLVDALREVDWSTPPRTVSEFFSRFTVPRSYSKWTSRLKCNLYYYRTNYFILIMFILGMGFLWKPVAILAAFMTGLSIAFLNDSFAVTFNEKVTRTIRQFSPHLAAKMRPPITPVLRGRPNSKRSIHICGRPRRVFVIFFSAVSCILWLTSCSLLTVLWALLIALFATMLHASFRTPNLKARLNTFRQEFRAVWRNYSEL

SEQ ID NO: 64635 - protein, 182 aa, Zea mays
  Clone ID: UC-ZMFLMO17012B02_FLI.pep
CRQRHERLPRLRSVSPHREPPPVASRYVPPAENRYRARFVRIFCIASKEASPSPPGSYCAGCAAMEKYNSKTQLAPLRDTPFALRGALGSSSSYLEQARGYTSSPLAALRPKMSSTTGNRLLHSSCPLSSPVANRPLSPHLPLKKPQFSATFSISHRIFGVALGVAIVSVPLATKFSLMFGV

SEQ ID NO: 64636 - protein, 240 aa, Zea mays
  Clone ID: UC-ZMFLMO17013C02_FLI.pep
SLKRKISSTACTLPRSHMEEKIFFSLSLVPSMLAHGSHTRPPRCYLRARAAAFAHLVSSGSSIYFSPSRNRNSKPLAPAGETMEREPSRSTDMWARYALRRRRDAARGWWTPVAAPTGTEPSVCGRSTRRRGPAAPHAYRTCALQGAIPANSAEPLTTSHSTTSSSTPGTAAAADAAAETVPTATSSPAPTTYILRLPPATSPTSPATTCGRRTSGGTPLPATIRHSSRASSYRFSRHSP

SEQ ID NO: 64637 - protein, 291 aa, Zea mays
  Clone ID: UC-ZMFLB73185F07_FLI.pep
KMTTLRKLLLTGNPMRTLRSSLVSGPTTTLLKYLRSRLSSDEEASGSRSTPTKDDQIAAARRLSLSSKELDLSGLGVTSVPAAAWETSDVVKLDLSKNSIEDLPNELSLCSSLQSLVLSNNKIKRWPHTVVSSLPCLSSLKLDNNPLVEISSTDLVPLSKLEVLDLSGNASALPEPSAVSALPQLQELYLRRMKLHEFPNGLLGLKLLRILDLSQNHLTTVPEGIKNFTALIELDLSDNNITALPAELGLLEANLQVLKLDGNPLRSIRRTLLERGTKAVLKYLKEKLPSE

SEQ ID NO: 64638 - protein, 324 aa, Zea mays
  Clone ID: UC-ZMFLB73159D10_FLI.pep
YFGHVDCLRAILAAARTTPVADSWGFARFVNVRDDRGATPLHLAARQGRSACVQVLLENGAIVSALTGSYGFPGSTSLHLAARSGNLDCIRKLLAWGADRLQRDSAGRIPYAVALKRNHAACAALLNPSAAEPMVWPSPLKFISELDPEAKALLEAALMDANREREEKILKGITKYSQPSPTSPCEHDAIDEASLEASDGELCCICFEQACSIEVQDCGHQMCAACTLALCCHSKPNPATLTPPSPACPFCRGSISRLLVARASPDADDDDKAAAASSPQLVRRRSHNLRWAAATAWTSPSTTCDRHLMLCVAEQTAEHDHFKS

SEQ ID NO: 64639 - protein, 256 aa, Zea mays
  Clone ID: UC-ZMFLB73183C08_FLI.pep
WIGAWSVNSSRGGDAVGVWAEAVTADLADVPLGSPELAHLDHGGPELVEEPPVVVGEALDEPARARVAHQPLVRRQHHPLVLPQRQLHEVEVVEHGGRQEVQVPQRVAAPGGRARRRHAPRHVVGGRARHVAKRAAPRLPHRVRARQRHQVRRVRQVLAPERRQQLVHRRRRRRQREHVVAGRRRRAVQPPQRHREGRPAGQAHGVAGGQHRDVGARHDGPARRVHLPADVLHQLHGLLLQPHVGREAALAVVQED

SEQ ID NO: 64640 - protein, 288 aa, Zea mays
  Clone ID: UC-ZMFLMO17093B08_FLI.pep
LVTMFVLCQMTLSRDQELSEKCPSQECATGSKDSEVSANTNKSNEDEEDDWEAIADSGALDDTLVRSLEQGARVSSCSSPEKSSTPSSGPKRRGRGSFLYNKSVLYSDQCGSERELDNKQSKPQVGSKDHVNEPENNAVTAATQFGTRHVLVFYDFPPSTRTTDLERIFEKFGDHGVAIRWINDTSALAVFRTPSAANEAQACIPPRYKVRSLKPDDDLLTKIDGRDLDPPKPRPKTSARTAQRLIAHGMGLKQFTNFGSDELKKQEGERKDRIAARQAMRDEAWGSD

SEQ ID NO: 64641 - protein, 298 aa, Zea mays
  Clone ID: UC-ZMFLB73152E03_FLI.pep
EGAGGVAVGENAGGDDGACGHAGVQHGGQGWEEDRAAGRGGDHGRVVGVGPGGGQGAGGDRQVARGDGLPRLPQGGQGGQGRRHGGRQLHHHAPGPGLPRQRAAVRGQLPARRHAARLARLQRRHLPAHGKDADVHGGRIRDERRRQPPGPLPPGAPAPGRHAEVRLPVPPPHHPRLHHRQHQHAGREHPAQGRAGRPPRPRGGAARPERLCHDRRLRELRRRQGVQGLGVVREPAVAGGQRSGEGQEALGDQREARGACLSSPARRRRHDDSVEQRSFRFVVLCVPLASILFVSRSW

SEQ ID NO: 64642 - protein, 249 aa, Zea mays
  Clone ID: UC-ZMFLMO17267G05_FLI.pep
RFLLPRFHRQPPLFPSFFPCSPARPPRTRPSRFFASSSFALRSQPSAREGERILRALYARSGAGRDRAAPPYPAPDMCVEGLDDAAGRLGFGDQDTDRRAGDAMERVCENTVAVDFKQTKLNNFVPFIRSGEWSDIGGRDYMEDAHVCISDLAKNFGYDSVDDEVISFYGVFDGHNGKDAAHYVRDNLPRVIVEDADFPLELEKVVKRSFVQTDSKFAEKFSHHRGLSSGTTALTAMIFWKVPSGCQCR

SEQ ID NO: 64643 - protein, 239 aa, Zea mays
  Clone ID: UC-ZMFLB73143H07_FLI.pep
IFLAWWLTRKAQIHCLAVQMLLLRCLLMDLDRQNTGKATVLGDAARVLRDLITQVESLRQEQSALVSERQYVSSEKNELQEENSSLKSQISELQTELCARMRSSSLSQTSIGMSDPATHQQMQMWSSIPHLSSVAMAARPASAASPLHGQEGYSADAGQAGYAPQPQPRELQLFPGSSASSSPERERSSRLGSGQATRPSLTDSLPGQLCLSLLQPSQEASGGGGGGVMSRSREERRDG

SEQ ID NO: 64644 - protein, 144 aa, Zea mays
  Clone ID: UC-ZMFLMO17171A03_FLI.pep
RGFPSTARAQRPVQASALSLNRRLLLRRDSDTPACVSPGAGRGHWRWEAVAGVRGLWLCAAFLSADEQARLLNAIQREGWFINADNQAMRFGDLPSWVVELSALIREAICVGDAGVGLGAEATNEDEDACPLPSDLLWREPFFD

SEQ ID NO: 64645 - protein, 301 aa, Zea mays subsp. mexicana
  Clone ID: UC-ZMROTEOSINTE119B10_FLI.pep
LTRSEFVEAQEALAQMKNWFTRFPTILQGCESIIENLRGQYAHSVGCFDEAAFHFLEAKKLTESKSMQSMCETYAAVSYICKGDAESSSQALELVGPAYRTMDSFVGVREKTCIIFVYGLLLMRQHNPQEARNRLASGLKIAHQQLGNIQLVSQYLTILGTLALQLHDAAQAKEILKSSLTLAKTLFDIPTQIWILSVFTELYRELEEKENEMENSEYEGKKEDDLQRRLSEAYSHSFHHELVEKSRIQPLHMSSKQPEMAVPSANGDLDIPESVGLSAPQPFLKRLVEAEPMRRSTRRRR

SEQ ID NO: 64646 - protein, 164 aa, Zea mays subsp. mexicana
  Clone ID: UC-ZMROTEOSINTE120C10_FLI.pep
DSLKDLYKSFVYEYPIESIEDPFDQDDWSTYAKLTDEIGQKVQIVGDDLLVTNPTRVAKAINEKTCNALLLKVNQIGSVTESIEAVRMSKRAGWGVMASHRSGETEDTFIADLSVGLSTGQIKTGAPCRSERLAKYNQLLRIEEELGDAAVYAGAKFRAPVEPY

SEQ ID NO: 64647 - protein, 280 aa, Zea mays subsp. mexicana
  Clone ID: UC-ZMROTEOSINTE013D06_FLI.pep
QEPKEEEPEEAPVPKEEEPEELEGVEEEGEDEEEEEEEEEECEDENSSGARKKQRGNDGKKRGGGFTKLCSLSPALQEFVGASELARTEVVKKLWAYIRENNLQDQNNRRKILPDERLKKIFNVNSIDMFQMNKALTKHIWPLNSEGPVSPDRSTPKEKPQKRDRSEGKKQKGGSSGAGSGFLVPLQLSDDLVKFIGTGESMLSRSDVVKKMWDYIKGNNLQALLFQSPSRNRLYAYPLWSIARVLNCSSNQPITVSNLKNSRALLTCYVGLLENRRERK

SEQ ID NO: 64648 - protein, 329 aa, Zea mays subsp. mexicana
  Clone ID: UC-ZMROTEOSINTE019A08_FLI.pep
GYDSCSSWMSSLEMVKKLPMERQHKLLICLQSCSALCALCNDAPEDPVVTLCGHVFCNQCILEQLTGDDSVCPVSNCRVRLNTSSLFSRGTLECSLSKLASDFKSDDTCMEMIHAEKRPGMDSSYASSKVRAALDILLSLPKIDPTIDSKCSIGIESEKFDGKGISEQTDTKLTEKAIVFSQWTRMLDLLEVHLKASHVTYRRLDGTMSVAARDKAVKDFNMVPEVTVMIMSLKAASLGLNMVAACHVLMLDLWWNPTTEDQVVDRAHRIGQKRPVTVSRLTIKDTVEDRILALQEKKREMVASAFGEDKSGSRQTRLTVEDLNYLFMV

SEQ ID NO: 64649 - protein, 461 aa, Zea mays subsp. mexicana
  Clone ID: UC-ZMROTEOSINTE023A02_FLI.pep
PRPLPALVTYRPKWEGGEYEGDDESRFEALLLAMELGAEYVDVELKVADKFMKLISGRKPDNCKLIVSSHNYETTPSSEELANLVAQIQATGADIVKIATTATEIVDVAKMFQILVHCQEKQVPIIGLVMNDRGFISRVLCPKYGGFLTFGSLKKGKESAPAQPTAADLINLYNIRQIGPDTKVFGIIGKPVGHSKSPILHNEAFRSVGFNAVYVPFLVDDLAKFLDTYSSPDFAGFSCTIPHKEAAVRCCDEVDPIARDIGAVNTIVRRPDGKLVGYNTDYVGAISAIEDGIKASESEPTDPDKSPLAGRLFVVIGAGGAGKALAYGAKEKGARVVIANRTFARAQELANLIGGPALTLADLENYHPEEGMILANTTAIGMHPNVNETPLSKQALRSYAVVFDAVYTPKETRLLREAAECGATVVSGLEMFIRQAMGQFEHFTGMPAPDSLMRDIVLTKT

SEQ ID NO: 64650 - protein, 264 aa, Zea mays subsp. mexicana
  Clone ID: UC-ZMROTEOSINTE026E04_FLI.pep
KILHQQKRPAHDELLMKPRVAPFNETGSLGTIYPTRKDTFGGFSVHVPYVSRMRRGRPRKDFISFADKGPSVEPKGIQPSVEMILVKDGDKGNHLRKVPEVPLKVSSENGHVEAVDSKGVRNLQAKVCSAVSKPKIKHGLTRKHHRAWTLSEVVKLVDGVARYGAGKWSEIRKLSFASYSYRTSVDLKDKWRNLIRATQTQLPAQKDGACPRKTNPSIIPIPPSILLRVKELHELQSQGGGFTAPVKFSGQDGKVLQGKGSGFL

SEQ ID NO: 64651 - protein, 492 aa, Zea mays subsp. mexicana
  Clone ID: UC-ZMROTEOSINTE027E12_FLI.pep
FAMTELGHGSNVRGIETIATYDSETREFIINTPCESAQKYWIGGAANHATHTIVFCQLHINGRNEGVHAFVAQIRDEDGTVLPNIHIADCGHKIGLNGVDNGRIWFQNIRVPRENLLNLVADVLPDGRYVSMIDNPDQRFAAFLSPLTLGRVNIAVNSVYISKVSLAIAVRYSLSRRAFSIAPDAPEMLLLDYPSHQRRLLPLLAKVCLMSSAGNFMKNMYVKRTPEMSKDIHIYSSALKATLTWQNMITIQECREACGGQGLKTENRIGIFKSEFDVQSTFEGDNNVLMQQVSKALYAEFLGAQKKQQPFKGLGLEHLNGSSPVIPDKLTSSILRSSKFQMDLFCLRERDLLKQFVEEVSLHLAQGESREKALMLSYQVAEDLARAFTERTILQIFLEDEMNVPSGSLKEVLGLLRSLYVMVNIDESTSFLRYGHLSRDNVALVRKEVLKLCSELRPHALAVVSSFGIPDAFLSPLAFDWIEANALSTGSH

SEQ ID NO: 64652 - protein, 282 aa, Zea mays
  Clone ID: LIB4570-009-D4_FLI.pep
EAGRLSLSLPPTHWQQQQQPQPRGPSSGGTRKRADEEEKGRTRRGAMGLGLGVRAAPFTYAAHALAVAAAAMVLVWSIQFRGGLAIESTNKNLIFNVHPVLMLIGYVIIGGEAIMVYRVLPTSNHDTTKLIHLILHGIALVLGAVGIYFAFKNHNESGIANLYSLHSWIGIGTITLYGIQWIIGFVTFFFPGAAPNVKKGVLPWHVLFGLFVYILAPANAELGFLEKLTFLESSGLDKYGTEAFLVNFTALVVVLFGASVVVAAIAPVRLEEPQGYDPIPEN

SEQ ID NO: 64653 - protein, 172 aa, Zea mays; identical to SEQ ID NO: 36903
  Clone ID: LIB4570-009-E8_FLI.pep

SEQ ID NO: 64654 - protein, 313 aa, Zea mays
  Clone ID: LIB4571-001-G11_FLI.pep
GHVVGFCLLRPAVKLSAARAGDRRSAARPVMEIGQYPASGCSKEHQKIYQEWFALADADGDGRITGPDAIKFFGMSKLSRPDLKQVWAIADTRRQGYLGFSEFVTAMQLVSLAQAGNEITQDSLKRDDLSSLNPPVMEGLDALLAKSKHLVKRVDPEMDGYPQEQSPLTNKWFSSKSSKKIPLTAVTSVIDGLKKLYIEKLKPLEVTYKFNDFVSPLLTSSDFDAKPMVMLLGQYSTGKTTFIKHLLRTSYPGAHIGPEPTTDRFVVVMSGSDERTIPGNTIAVQADMPFSGLKHLGLHFYPSLSALRCDIHC

SEQ ID NO: 64655 - protein, 317 aa, Zea mays
  Clone ID: LIB4571-001-H4_FLI.pep
AGRHTHTAISPSVPAQLSNPSLYLQAGELIDGGQGGGRSPGRQPLLGAPANRHGGAGHGGEGLQGASAGAAVRGGGADVVVLLPGRDRRVRGHLPVPVHQHPDCDGREQVVQQVRHRGHPGHRVVLRRHDVRAGVLHGGHLRRPHQPGRHLRPLPGAEAVAHARALLHGHAVPGRHLRRRRRQGLPGGPLHGRRRRRQRRQPRVHQGRRARGGDRRHLRARLHRLLRHRRQAQRPRLPRAHPRAAPHRLRRLPRAPGDHPHHRHRHQPRAQPRRRHRLQQVPRMERPLDLLGWPLHRCCSCRHLPRGHHQGPPLQEP

SEQ ID NO: 64656 - protein, 530 aa, Zea mays
  Clone ID: LIB4571-002-C11_FLI.pep
PLLPSTRAVASPIRSATSSRLARSFPTPQRSLSAARSRSRFFSMGLVKEGIDMEEGTLEIGMEYRTVSGVAGPLVILDKVKGPKYQEIVNIRLGDGTNRRGQVLEVDGEKAVVQVFEGTSGIDNKYTTVQFTGEVLKTPVSLDMLGRIFNGSGKPIDNGPPILPEAYLDISGSSINPSERTYPEEMIQTGISTIDVMNSIARGQKIPLFSAAGLPHNEIAAQICRQAGLVKTLEKGKHAEGGEDDNFAIVFAAMGVNMETAQFFKCDFEENGSMERVTLFLNLANDPTIERIITPRIALTTAEYLAYECGKHVLVILTDMSSYADALREVSAAREEVPGRRGYPGYMYTDLATIYERAGRIEGRTGSITQIPILTMPNDDITHPTPDLTGYITEGQIYIDRQLHNRQIYPPINVLPSLSRLMKSAIGEGMTRRDHSDVSNQLYANYAIGKDVQAMKAVVGEEALSSEDLLYLEFLDKFERKFVTQGAYDTRNIFQSLDLAWTLLRIFPRELLHRIPAKTLDQYYSRDASH

SEQ ID NO: 64657 - protein, 174 aa, Zea mays
  Clone ID: LIB4571-002-H12_FLI.pep
PCFFAMASSASQASLLLQKQLKDLAKNPVDGFSAGLVDDSNIFEWQVTIIGPPDTLYDGGYFNAIMTFPQNYPNSPPSVRFTSEMWHPNVYPDGRVCISILHPPGEDPNGYELASERWTPVHTVESIVLSIISMLSSPNDESPANIEAAKDWREKRDEFKKKVRQCVRKSQEML

SEQ ID NO: 64658 - protein, 371 aa, Zea mays
  Clone ID: LIB4571-003-C5_FLI.pep
ELFSLVLRRLHSKPPPSAISTHHVKRNQMISTTVAAHPATVTALRRRYPLRPRQPLCAPIFTAATRQCMATAKPSVTNALANLSVESAPAALPKLSFPILVNSCTGKMGKAVAEAAVSAGLQLVPVSFSAIEVPDRKIEICDREIFIHDPSESEKILPTIVKEYPNVIVVDYTVPDAVNANAELYCKFGLPFVMGTTGGNRQLLHKTVHDANIYAVISPQMGKQVVAFLAAMEIMSEQFPGAFSGYKLEVMESHQATKLDISGTAKAVISCFQKLGVSFDMNEVKQVRDPEEQVTLVGVPEEHLGGHAFHMYHLTSPDGTVSFEFQHNVCGRSIYAEGTVDAAMFLYTKIQSGASKKLYDMIDVLREGNMR

SEQ ID NO: 64659 - protein, 320 aa, Zea mays; identical to SEQ ID NO: 43310
  Clone ID: LIB4571-003-D11_FLI.pep

SEQ ID NO: 64660 - protein, 650 aa, Zea mays
  Clone ID: LIB4571-003-E11_FLI.pep
TRRSSEEMAALQPSFSPAMTLKSSCSALKFPKTALLSGFGGIPRLQDAQDRNTSVAYLIPKAASVTDQSIAEPPKTKQNRHTVDPTAPEFLPLPSFEECFPRSTKESSEIIHEESGHVLKVPFRRVHLTGDQKHFDTYDTSGPQNISPRIGLPKIRKEWIDRREKLGSPRYTQMYYAKQGIVTEEMLYCASRENLSPEFVRTEVARGRAIIPSNKRHLELEPMIVGRNFLVKVNANIGNSAVVSSIEEEVHKLQWATMWGADTVMDLSTGRHIHETREWIIRNSPVPIGTVPIYQALEKVNGIAENLSWEIFRDTLIEQAEQGVDYFTIHAGVLLRYIPLTAKRMTGIVSRGGSIHAKWCLTYHKENFAYEHWDDILDICNQYDVALSIGDGLRPGSIYDANDSAQFAELLTQGELTRRAWAKDVQVMNEGPGHIPMHKIPENMEKQLEWCNEAPFYTLGPLTTDIAPGYDHITSAIGAANIGALGTALLCYVTPKEHLGLPNRDDVKTGVISYKISAHAADLAKGHPYAQAWDDALSKARFEFRWLDQFALSLDPVTAMAFHDETLPSEGAKVAHFCSMCGPKFCSMKITEDIRKYADENSYGTVEEAVIQGMNAMSAEFLAARKTISGEQHGEAGGEIYVPESYAAQK

SEQ ID NO: 64661 - protein, 378 aa, Zea mays
  Clone ID: LIB4571-003-F12_FLI.pep
SRPAGNIPSPKARSPETFRIFLPPLHLLCAKLVLFLVLLFDFGRIKMASAARLLAPISRRGVVSVALAGVERRRPEAASLLGAPVLATVEACASIKVIPLSNQLARYSTTAFQRFGFSTSAPQQDDKETNKHTDDGVNRSVGASTGASSEANNVPGTEKAQEAGSLDSISKSNRKRTAKRTAFSDSDSEDLDLSKEDLVKLLLEKDESLKSKDEEFKDMKDKVLRSYAEMENVLARTKRESENTKKYAIQSFSKSLLDVADNLSRASSVVKASFSKIDSSNDSDEAVTLLKTLLEGVEMTEKQLGEVFKKFGVEKFDPLNEKFDPNRHYAIFQIPDPSKPSGTVAAVVKVGYMLHDRVLRPAEVGVTEGGPTEEEPEE

SEQ ID NO: 64662 - protein, 472 aa, Zea mays
  Clone ID: LIB4571-003-G5_FLI.pep
FKVQSSISQHQAKRKQIKGSRASRGCQLRVLMSLWKQPSKLAMVVVLLLLLCHAVDKVHCSTHHNNSQDFHSLLEFKKGITSDPHGALSNWNPSIHFCHWHGVNCSSTRPYRVTELNLTGQNLAGQISSSVGNLTFLHTLDLSNNSFIGPLPLLNKLRNLDLLFLGSNHLEDVILDWLTNCSNLVYLDLSKNHLTGHIPPNIAFLKKLEGINLYGNYLSGVIPPTLRNLSTLLLVDLSNNQLNGSIPNEVWQIPNIQMVNLAINNLSGGIPDTFTNLSSLMILGLDHNMLGGTLPSNIGDVLPHLQGLYLGSNLFFGTIPTSLGNASNLEVVDLPNNLFSGTIPSSFGNLSKLQILNLEVNMLEARHSEGWQFFDALAKCRYLVILSVSHNHLHGPIPNSIANLSTSLQQLFMGWNNLSGIVPPTIGKLSGLTKLSLENNNLIGTIKEWVRKMTNLQVLTLQSNNFIGKIPP

SEQ ID NO: 64663 - protein, 335 aa, Zea mays
  Clone ID: LIB4571-004-D7_FLI.pep
KMCYPIPLVVGRRTARTGEAMAIVAVLVAPTASYVGPRRRWRATAASSSAASGVDLKTLQAAIDKKSSDDVRQALDQLRESGWAKRWGSQPYVSRRTTSLRELTTLGIKNAENLAIPSVRNDAAFLFTVVGITGFLAVLAGQLPGDWGFFVPYLIGSISLIVLAVGSVAPGLLQAAIGAFSTVFPDYQERIARHEAAHFLVAYLIGLPILGYSLDIGKEHVNLIDEQLQKLIYSGQLDGKELDRLAVVSMAGLAAEGLEYDKVVGQSADLFTLQRFINRTKPQLSKDQQQNLTRWAVLFAASLLKNNKAAHEALMSAMSQKASVLGCIEAIENAS

SEQ ID NO: 64664 - protein, 473 aa, Zea mays
  Clone ID: LIB4571-004-H10_FLI.pep
ANILPPMAREPSPEIDDELYNEVYGKAYSGPVASATNSVTPKGNAEKRPLTRDKSDDEDGAPDPNAVPTDFTSREAKVWEAKAKATERNWKKRKEEEMICKICGDPGHFTQGCPSTLGANKRNADFFERVPARDKQVRDLFNERVISQIEKDVGCKIRMDEKFLFVSGKDRLILSKGVSAVHKIIQEGKGKHSPSSPKHDRSRSPVRNTTEFRSKHSDSHRSPSPRNFDSQWSHSPRNASLSQSKGYYNERHRDGRLHNNMPKFSKGSPQAHANFGAKGRPAQSKSPCHTSYLDELPRTHGENNQFAASRVPNDWGIERHGADASSSLRFDMPSHQQTLEELEMEFKKEATQLARARDQEEDEENYRHRESLRVIRENYMERVITLRNVHAKKWEEFLDTFKSQQQAQPSYIQTGYLGFEQRTAHISATHQPMDSKSTYPYASDSYSAPKAHAAYGEFQHERHDDLGRAYRRY

SEQ ID NO: 64665 - protein, 308 aa, Zea mays
  Clone ID: LIB4571-004-F4_FLI.pep
FFASDERIKAVRQMIMAPTLELRQQALDRLLPYQRSDFEGIFRAMDGLPVTIRLLDPPLHEFLPEGNIEDIVSELCAETGANQEDALARIEKLSEVNPMLGFRGCRLGISYPELTEMQARAIFEAAIAMTNQGVQVFPEIMVPLVGTPQELGHQVTLIRQVAEKVFANVGKTIGYKVGTMIEIPRAALVADEIAEQAEFFSFGTNDLTQMTFGYSRDDVGKFIPVYLAQGILQHDPFEVLDQRGVGELVKFATERGRKARPNLKVGICGEHGGEPSSVAFFAKAGLDYVSCSPFRVPIARLAAAQVLV

SEQ ID NO: 64666 - protein, 422 aa, Zea mays
  Clone ID: LIB4571-005-A8_FLI.pep
LRRGSRISYCVIHWMLAMGSEEWELYPSSDIGSQVIEYRPVSEDSDDDQNGDVAVSLDVVLPDDLLEKVLSFLPVASIIRSGSVCKRWHEIVHARRHAWSKIVPQKPWYFMFTCSEDAVSGFAYDPSLRKWYGFDFPCIEKSNWSTSSSAGLVCLMDSETRRRIVVCNPITKDWKRLLDAPGGKTAGYSALAFSVDIRSHHYTVAVARSNQVPSEYYHWELTIHLYESVSGSWMTPFTGVLVGWRGGDECVICDGVLYYLLYFTGILVNNNEYRHCLVMYDLTARPNHTSLISMAIPVPCVLTCGRLMNLSKKLVLVGGIGKQDRPGIIKGIGIWELHNKEWREVARMPHKFFQGFGEFDDVFASCGADDLIYIQSYGSPALLTFEVNHKSWKWSVKSPVSKRFPLQLFTGFSFEPRLDVAL

SEQ ID NO: 64667 - protein, 192 aa, Zea mays
  Clone ID: LIB4571-006-B9_FLI.pep
PAGALSVQYSSRVTFHVDKVSSAHVYLRLKKGETIHTISEALLEDCAQLVKAHSIQGNKMNNVEVIYTPWANLKKSPSMDVGQVGFHNPRMVHVLIVEKRVNEIINRLNKTRVERRAPDLKAEKEASNAAEKAERKMQLKEKKRKEEMERLEKEKWAEIRSYKGLMVAEKMTSNRQIASAGKSMQEMEDEFV

SEQ ID NO: 64668 - protein, 458 aa, Zea mays
  Clone ID: LIB4571-006-D12_FLI.pep
LQLMVNMRDNDSSSDAQLDEPLGRVSILSYGSGHMLNDITSSCWFTYLLVFLTDLGLSPGDAAIVMLSGQLADGFTTIFVGELMDRFGHFKLWHAGGSILVAISFSSVFGSCVPCKLMGINTSTLETVGYSTFAAIFNVGWAVTQVAHMSMVNCITSNPTSRVSLVSCRNAFTMVANLSLYGVALVIFTLSQSVNVLVQYRWIAYVSISLGSCFVVIFLIGTKEPGSIRHCLDKSPSRISWDYWFKRVLYYQVALVYTLTRLVTNVSQAFLAFYVINDLEMNQSSKALVPAIIYICSLIVSVILQETRWSSWRLKLYFPAGAVLWILSGLGIVLLPSRMHNLMYAISIVIGAANALMTVTSISMEGVLVGEDLNGCAFVYGSLSFVDKVSCGIALYVLESYQGSTKIRSNLGTAFGYSVTRLGLGLVPAACSLLSAIAAYTMELPDTQKGPLVEPLLA

SEQ ID NO: 64669 - protein, 196 aa, Zea mays
  Clone ID: LIB4571-007-F3_FLI.pep
PPLVPAEERRSYALLVKTSLINLMAIAESCVDAVVMEMVAVYCGGLYAAKPELAARRIEAIGFQVGHQLSERYTMERPRFSDHLEAIKFICKDFWSELFKKQIDNLKTNHRGTFVLQDNRFRWLTRVSLDPYTENRDSTENDSAALGDTAAQTTTMLLYFPCGLIRGALTNLGIPCSVSADMSNLPACSFVVRIKT

SEQ ID NO: 64670 - protein, 370 aa, Zea mays
  Clone ID: LIB4571-008-F12_FLI.pep
AIAMGAVKHTLKMLSWLLLFAQLAAATTSKCTNATNGTETDSLGAMKLKLIAIASILTAGAAGVLVPVLGRSMAALHPDGDIFFAVKAFAAGVILATGMVHILPAAFDGLTSPCLYKGGSGGNIFPFAGLIAMSAAMATMVIDSLAAGYYRRSHFKKARPIDILEIHEQPGDEERSGHAQHVHVHTHATHGHSHGEVDVISSPEEASIADTIRHRVVSQVLELGILVHSVIIGVSLGASVRSSTIRPLVGALSFHQFFEGIGLGGCIVQANFKLRATVMMAIFFSLTAPIGIALGIGISSSYNGHSITAFIVEGVFNSASAVILIYMSLVDLLATDFNKPKLQTNTKLQLMTYLALFLGAGMMSMLAIWA

SEQ ID NO: 64671 - protein, 234 aa, Zea mays
  Clone ID: LIB4571-011-A2_FLI.pep
QMARIKPKQLLIQSKTKKAPSRISYSTIITWNLIVILVVLSLYATYSHWHQRSTQDFEMELHEAELAVRPEDPKMISRPRYAVMNTAKGPITIEIYKDASADVVDRFINLCKSNHFKGMPFRHIIKNFVIQGGDFDFDGASQEWITKAKASGKNDLSPKHEAFMIGTAKNPNNKGFDLFITTAPIPDLNDKLVVFGRVIKGEDVVQEIEEVDTDEHYQPKAAIGIIDIVLKQEP

SEQ ID NO: 64672 - protein, 619 aa, Zea mays
  Clone ID: LIB4571-011-F1_FLI.pep
AGRAMRQSHSLSPSSSPPRPLDLISSILACSPLPVSPPPATPMSQSSPLFSVARAHAGAGGRAVAAALLLRRRPIAQLPHSIHGLRCLSPARATPSKTLLSLPRATLSSFADPDGDGGSSAKASDGGAKAGAGGEEQVGECEMSEMARAFHISPRVATSISVTIAFAALTVPLAMRSLVCHGTFRMNALAYFTLLSGFYMAWNIGANDVANAMGTSVGSGALTLRQAVLTAAVLEFSGAFLMGTHVTSTMQKGILVASAFQGKDSLLFAGLISSLAAAGTWLQVASSYGWPVSTTHCIVGAMVGFGLVYGGVDAVFWSSLARVSSSWVISPLMGAAVSFLVYKCIRRFVYSAPNPGQAAAAAAPIAVFTGVTAISFAAFPLSKVFSIAILQAVSSGAIGAIIVSRVIQKQLGDLLSSEAEKIASAEKSSAQQAGFLSDIAGPTGAQLQIVYGVFGYMQVLSACFMSFAHGGNDVSNAIGPLAAALSILQGVASSAEIVIPTEVLAWGGFGIVAGLTMWGYRVIATIGKKITELTPTRGFAAEFAAASVVLFASKLGLPISATHTLVGAVMGVGFARGLNRVRAETVREIVASWLVTIPVGAVLSIFYTLILTKILAYFM

SEQ ID NO: 64673 - protein, 275 aa, Zea mays
  Clone ID: LIB4571-011-F3_FLI.pep
RGRPGQQQATAAIKPSASTGGSPNSVSNSRVLLLSDPELRRPQHQARPPSRVTEMALPNQGTVDYPSFKLVIVGDGGTGKTTFVKRHLTGEFEKKYEPTIGVEVHPLDFTTNCGKIRFYCWDTAGQEKFGGLRDGYYIHGQCAIIMFDVTSRLTYKNVPTWHRDLCRVCENIPIVLCGNKVDVKNRQVKAKQVTFHRKKNLQYYEISAKSNYNFEKPFLYLARKLAGDPNLHFVEAVALKPPEVTIDMAMQQQHEAELAAAAAQPLPDDDDDLIE

SEQ ID NO: 64674 - protein, 525 aa, Zea mays
  Clone ID: LIB4571-012-F1_FLI.pep
MERVLKDDAVEEKGERARMASFVGAMAISDLVKTTLGPKGMDKILQSTGRGRNVTVTNDGATILKSLHIDNPAAKVLVDISKVQDDEVGDGTTSVVVLAGELLKEAEKLINMKIHPMTIIAGYRMALECARDSLLKKTMDNKENTDKFRSDLMNIAMTTLSSKILSQDKEYFAELAVDAVLRLKGSTNLESIQILKKPGGSLKDSFLDEGFILDKKIGIGQPKRIENAKILVANTAMDTDKVKIYGARVRVDSMSKVADIEAAEKQKMREKVQKIIAHGINCFVNRQLIYNFPEELFADAGILAIEHADFEGIERLALVTGGEIASTFDNPESVKLGQCKVIEEIMIGEDRLIHFSGVAMGQACTIVLRGASEHVLDEAERSLHDALCVLSQTVNDTRVLFGGGWPEMVMAKEVVELARKTPGKKSHAIDAFSHALQAIPTIIADNAGLDSADLISQLRAEHHKENSTAGIDVITGTVGDMQKLGIQESFKVKQAILLSATEAAEMILRVDEIITCAPRRREDRM

SEQ ID NO: 64675 - protein, 320 aa, Zea mays
  Clone ID: LIB4572-002-B3_FLI.pep
LEAGRGPCTGLRTRVSMALLRLQEQCSLLRISSSHHPNPIDIPRNPRKNQLLVPNAAKIANASEIPVPRVPTSTSKAAILARKAALWRDALVPVAAAFASCPLPSLAAEGDGKVSLESIVVAIDDFNNRNPFFVAGVVFVWLVVIPLLQEYVFKKYKPVSAIDAFRKLRDVPEVQLLDIRRGKSVRFMAPPKLKLIDKSTVQVEFDEEDERGFVKEVLARFPDPANTVVCVLDNFDGNSSKVAELLVENGFKEAYAIKGGLRGPEGWQAVQENYLPPSVHVFPKKKRGAKLAHTDASNDGTYVQQEGSEESSAPPSSTLT

SEQ ID NO: 64676 - protein, 230 aa, Zea mays
  Clone ID: LIB4572-002-G4_FLI.pep
SRDQTNSLNIMGLELSVSERALSHGKPNENSGLIRSRTILRLHERITGCHNSLPIQSPGKFPTAARQHQRSDRGRNGRATAEREFHRQIQDFEHRHRRNSMAEGSKPDVPLFQLLSDLLQQVESMSNQEEVELRAKIEALGLEVTKVPEQPANHLSELEIAAELDKLSSRLDNVDKMISSAMASDPEVKSLLSSTSDIWMPVITASANERRGFVGTSSEGSQKEQENSKK

SEQ ID NO: 64677 - protein, 442 aa, Zea mays
  Clone ID: LIB4572-007-E1_FLI.pep
ILANVLIRLQLSRRLRHQKTELAPSCLPSSAGPLLSASNPPVRRRRRRRRAEMKVSVKTLKGSSFQIEVEPTDKVVAVKKVIENMQEQASYPADQQVLIHQGKVLSDDTTLEENQVTENNFLVIMLRQNKGSSSAAPAKTTANQAPPTQTVPVVPPQTSAAPAAPAPIVPVSALAATATASAAPAVAVSTEADSYGQAASNLVAGSNLEGTIQSILEMGGGIWDRDTVLRALRVAYNNPERAVEYLYSGIPEQMDVPTSPPSIQPANPVQAAQAAQTAAPSGPNANPLDLFPQSLPNASANAGTGNLDVLRNNVQFQNLLGLVQANPQILQPLLQELGKQNPQVMQLIQENQAEFMRMINEPLEGDEENEMMLDQMADAAETIAVTPEENEAILRLEGMGFDRALVLEVFFACNKNEQLTANYLLDHMHEFDNDDGLGGPPL

SEQ ID NO: 64678 - protein, 201 aa, Zea mays
  Clone ID: LIB4572-008-A6_FLI.pep
WDGATKLLAPGLENLTTVSPQCSRNKFSMEGPMDMTSSARPLLVILTQPFNAEPQGTDSHCRGPANSGHRCAGRGSYAALLAYCSTTRLQTSQVNGHHGKQQGSTPQAVGTHWLLLIICEVATHPEIQNAEAFSKSKVTNKPSGESMQDSASRQQNELEQPLNPAPDRRLQPVMLSVQMIEQLLKTPEIPWSEMPMQEPRF

SEQ ID NO: 64679 - protein, 427 aa, Zea mays
  Clone ID: LIB4572-008-C9_FLI.pep
RQVPRPSSVYLPAMNIHQGWLQQFGHSVGISGSKMVLHMTHNVFSFRCFAANGRGFSADSTNKRKIKSKKRRKDVALESSEVISGNPRNRDQWVPELRTESENKSGKKVMDKKFLEKVEAVRRSALEKKKAEENKDYQAIDYDAPIESDKSTIGFGTRVGIGVAVVIFGLVFAFGDFLPYGSVSPSKESAVVKQKLSQEEEEKFKNALQGFQATLSKSPNDPTALEGAAVSLSELGEYEKASTFLEKLIKVIPDKAEAYRLLGEVKFELKDYEGSSSSYRSALSSSDNIDFEVLRGLTNSLLAAKKPDEAVDIILLCRRKLNEKSQTGLADLEATNDNGRQKPQDIDPIQVDLLLGKAYSDWGHISDAISVYDKLITDHPEDFRGYLAKGIILKENGKAGDAERMFIQAKFFASEAAKALVDRYAQR

SEQ ID NO: 64680 - protein, 386 aa, Zea mays
  Clone ID: LIB4572-009-D5_FLI.pep
ACRGTHAMAMAAPPPTALCARRFRPHHFAYSSPATLRLPTASSSSQLRRRRRLAVSPRADAATGTGDVEALRAGVSVYKPRSYDVLVTDAARSLACAIDDGKTRLEIEFPPLPSSISSYKGSSDEFIDANIQFALVVARKLKELKGTRSCIVFPDQPEKRRASELFKTAIDTIEGVTISSLDDVPTDPVNSFFKSIRNTLDFDFSDDNEGRWKSDEPPSLYIFINSSTRDLASIEKYVEKFATSVPALLFNLELDTLRSDLGLLGFPPKDLHYRFLSQFTPVFYIRQRDYSKTIAVAPYIVNYSGAVFRQYPAPWQVMLKQADGSYACVAESEARFTLGQAKEELLRVIGLQEEEGSSLEFLRRGYKNATWWEENVDQETSSAWRT

SEQ ID NO: 64681 - protein, 552 aa, Zea mays
  Clone ID: LIB4572-009-E7_FLI.pep
CHSYHNSLLSSSPASGSSSGSPFHSMAFPAVPLLAALLLVAATRLWDYVFVRLVWRPYAITKGFREQGIHGPSYRFFKGCNEEIRSMKEKTDGLVLDVGDHKYLPRIAPHYLEWRAQYGEPFLYWYGAQARICIFDYELARQILSSKSGHFVKNDAHPTLLALVGKGLGFMEGSDWVRHRRVINPAFTIDKLKIVTETMLDFADSMAGELEAEASQNENGETQVDIYKHFSDLTVDNIAYAIFGSSYKLGKQVFEAQTELLGITMATFLDVPIPGSKYLPTQANRRKWMLETKLKSLLTRIIQPRLASGEHGNDLLGVMLDSCTETKQGGKQQQVDRLRLSLSMEEIIHECKLFFFAGHENTALLLTWSVYLLSIYPEWQERLRKEVLREFGRDAPNPNALNRLKEMTMVLFETLRLYSPALFMQRKTLADMTVGPIKLPKGTAIVIPIPIMHRDKQAWGDDADEFSPMRFANGITGAAKVPHGLLAFSMGPRSCIGQNLSMLEAKSTLALMLRKFSFALSPDYVHAPVDLFTLKPKFGLPVILRPLDNVLI

SEQ ID NO: 64682 - protein, 304 aa, Zea mays
  Clone ID: LIB4572-011-D4_FLI.pep
LEAGREAYGLAVLRSSSSLILFCSLHYQSTTTTATIGSPNPSQGTRWPAMDGDREGAAAVHHHARSPEDVFRDFRARRAGIVKALTTDVEKFYQQCDPEKENLCLYGLPNETWEVTLPAEEVPPELPEPALGINFARDGMVEKDWLSLVAVHSDAWLLSVAFYFGARFGFDKNARRRLFTMINNLPTVYEVVTGVAKKQSKAPNGSSKSSKSNSKPSKQINSNSKPVKPAHPNEEEDSGREDAEEDQAYLCGSCGESYANGEFWICCDICEKWFHGKCVRITPAKAEHIKQYKCPSCSTKRSRE

SEQ ID NO: 64683 - protein, 459 aa, Zea mays
  Clone ID: LIB4573-001-G6_FLI.pep
IGFHVIVPAVGADEGYGPTWDSDDEYDNFIRKMNPPRIVIDNESSAEATIVRVDSANEYGILLEVIQVMIDLNLVIGKAYITSDGGWFMDVFNVTDKEGKKIKDEATLTQIEDYIRKSLGADSRYIPSRRRSVDVAAAADHNIIELTGTDRPGLLSEVSAVLTSLKCNVVSAEIWTHNTRAAAVMRVTDEDTGLAVTDAERLERIREKLSYLFRGGNLSRGATVSSRTATTHTERRLHQMMLDDGDYEQLQRQAPGQSQRPNVTVRNWNDKDYSVVTIRCKDRSKLLFDTVCTLTDLQYVVFHANIDAKDNQAYQEFYVRHVNGSPMNTETERLRVIQCLEAAIERRVSEGVKLELCTNDKVGLLSEVTRIFRENSLTVTRAEVTTRGRMAVNTFYVRGSAGEAVDQKAIDSIREAIGHSLQVKGQAEPPEPQKKESPTWFLFANLFRPRSLYSFGFMR

SEQ ID NO: 64684 - protein, 169 aa, Zea mays
  Clone ID: LIB4573-002-D11_FLI.pep
SDSCFHTPLACTCSMDHCMHTDTVPLILYTHMFASSGSSIVRPICSIDLLDLQLFQPVGGPVAGGVAVGGEGHLAGLDVADVLLQQLVVAPDVVRGLPAADGAGDVVPAVGRVLVVHRQRLLEQLVLPRRPLRAGRCARRHRERRHSCLLLLLLLDRSTSLINYKGSLD

SEQ ID NO: 64685 - protein, 278 aa, Zea mays
  Clone ID: LIB4573-002-E10_FLI.pep
AVVAAHNHTSDTITASHLPVPSIAKGHIGRPRARGKKDQVTDEQEGGIMAGAGAGGWKKRVGRYEVGRTIGRGTFAKVKFAVDADTGAAFAIKVLDKETIFTHRMLHQIKREISIMKIVRHPNIVRLNEVLAGKTKIYIVLELVTGGELFDRIVRHGKLRENEARKYFQQLIDAIDYCHNKGVYHRDLKPQNLLLDSRGNLKLSDFGLSTLSQNGVGLVHTTCGTPNYVAPEVLSSNGYDGSAADIWSCGVILYVLMAGYLPFEENDLPHLYEKITAA

SEQ ID NO: 64686 - protein, 188 aa, Zea mays
  Clone ID: LIB4573-005-B3_FLI.pep
HLIARHFPICCRRQLAIYPSDMPIYLVSAMIKNLMHEGKLVPSDIIVRLLLTAMLQSGNDRFLVDGFPRNEENRRAYESIIGIEPELVLFIDCPREELERRILHRDQGRDDDNVDTIRKRFQVFHDSTLPVVLYYDRMGKVRRVDGAKSADAVFEDVKAIFTQLLTTQASQGGNASSRRSNPPLCSVL

SEQ ID NO: 64687 - protein, 318 aa, Zea mays
  Clone ID: LIB4573-005-B5_FLI.pep
IRLRSERPSPRPPQSNPIQTARSPCPCQASRAQPPRASCSVLHAMAQKETNGSNGDHISTRPPPTPSPLRFSKFFQANLRILVTGGAGFIGSHLVDKLMENEKHEVIVADNFFTGSKDNLKKWIGHPRFELIRHDVTEPLLVEVDQIYHLACPASPIFYKHNPVKTIKTNVIGTLNMLGLAKRVGARILLTSTSEVYGDPLEHPQTEAYWGNVNPIGVRSCYDEGKRVAETLMFDYHRQHGIEIRIARIFNTYGPRMNIDDGRVVSNFIAQAVRGEPLTVQRPGTQTRSFCYVADMVDGPIKLMNGNKTGPINLGEPR

SEQ ID NO: 64688 - protein, 225 aa, Zea mays
  Clone ID: LIB4573-005-H4_FLI.pep
SDEKKTRIHTLFHFKKTIPEDGVQFDRTLLFSIVVQSSPETTCSRKNRPKKVSREQHVLLCPSNLFLERLDVVGELFPAFLEEKVAVDEPSGVAEADKLHDLGEQRHGVDGADDDGRQPESDDSAAGVGEDSALVLDGVPLGFQVGDELVPARGRGVVGGGLHPEQRQPRRILEPERERRQFITPREEEGRGRCGGSGSGEARPAGERGGVRRGGHVSVPYRSRW

SEQ ID NO: 64689 - protein, 365 aa, Zea mays
  Clone ID: LIB4573-005-B1_FLI.pep
GFTSSFHFNYGPTAVRVNPVAGRLRSLAWLLQFLGEVHVVDEDQFPAIRVQDGCDLGVDPWQGPRLPHHLASGQLRRLRGPVDIVGANGDLGICIPLGILGDTIVVGQLQHRVLVFRAETHDCHCVLVLRAISLPEQFHAAGLLIEAYGTVKVADAEHHLAQGFRSSRPLDDLKLVAVGVLHEGDDGLAALHRTGFPDDLSSLCSYELYRLGHVLDCDAEMAEPFAYVIFVNPVIVSELDDEMRFLGPVPEERVAVLLLWNVPLPEQLHPQALGVELDRLVEVADPVDDVEEAAVVFLRPRDGLVGQGPGLCHGAGLAPGQPQRPRSSHLLRLQRRTCGSGGEEQRPPGDGRGRAGDGPAAGGHR

SEQ ID NO: 64690 - protein, 353 aa, Zea mays
  Clone ID: LIB4573-006-B12_FLI.pep
THHSPAGGHAHAPIKVLAPPPPTPVPSPSLLPRRRRHPPGQLQRTTSQQSRATEISPREGEQQAAADMSSGRYMAYSPSPSTTPHSPRIHGLRTPSAAVAEQEKYLSELLAERHKLTPFIPVIPHSVRLLNQEIFRVSTLLENASLLNQSGLEHGSPLTTGGLYSNGAATDMNGWPSAFQSESSPAYSWLGGSQGSSSGLIVKKTMKVDIPVDKYPTYNFVGRILGPRGNSLKRVEANTDCRVLIRGRGSIKDPAREEMMRGKPGYEHLNEPLHILVEAELPVDIIDARLMQAREILQDLLKPVDESQDFFKKQQLRELAMLNGTLREEGMQRFGSASPFHNGLGMKRAKTRG

SEQ ID NO: 64691 - protein, 483 aa, Zea mays
  Clone ID: LIB4573-006-E5_FLI.pep
SFLRPLFFPLVSGGQPWFCRTHSVASAEKCSMASGATLSWVKTPFDTRRFHDLSNLSFRCRNPFGSIQPWWLQTDQDSSLIKVRVAADYSDSMPDSKYTRDRGYHPLEEVKERPKKKDLLLTDIETARTVVEANSKGLLVFPARVHNEPHGHVSWSEFQYVVDEYGDIFFEVPDSENILEDDTANNPVTVLIGMDGPIIGESSVAISDFSDYMDGENFMDVPDEHHTKIDTEITDILIEWGMPATMRAIHPIYFAKCLTKAIHNNNGEKMDSPSNGLSIVGYLRPAFIEEESYLRSMFHGDNGGYSSDWKVNETDEYNRETRPVSGTNRLIDDDKSRFDFNHAETRTDSMIYKLEIMTIELFSMYGKQFKIDPQDFQDSEPDILANSASSIIERIKENSDQCAAALRSLCRRKKGLTVEEASLIGVDSLGIDVRAFSGLEVKTVRFSFNAQALSERSAEKKIRRMLFPRYQRKNVKASTEDES

SEQ ID NO: 64692 - protein, 411 aa, Zea mays
  Clone ID: LIB4573-006-G2_FLI.pep
EPVFNSKGLVETDPEGALAGFDQVVSMEPEKAEWGFKALKQTVKLYYKLGKYKEMMDAYREMLTYIKSAVTRNYSEKCINNIMDFVSGSASQNFTLLQEFYQTTLKALEEAKNERLWFKTNLKLCKIWFDIGEYGRMSKILKELHKSCQREDGSDDQKKGTQLLEVYAIEIQMYTETKNNKKLKELYQRALSIKSAIPHPRIMGIIRECGGKMHMAERQWAEAATDFFEAFKNYDEAGNPRRIQCLKYLVLANMLMESEVNPFDGQEAKPYKNDPEILAMTNLIAAYQKNDIMEFEKILKSNRRTIMDDPFIRNYIEDLLKNIRTQVLLKLIKPYTRIRIPFISQELNFPEKDVEQLLVSLILDNRIQGHIDQVNKLLERGERSKGMRKYNAIDKWNTQLKSIYQTLSNRV

SEQ ID NO: 64693 - protein, 322 aa, Zea mays
  Clone ID: LIB4573-007-A12_FLI.pep
PPPPAPRDSLLSSRCSPSPTRNPSDCHCPRAARPMNGGGSGLAPNAAHTADEVFRDYKGRRAGMIKALTTDVERFFKLCDPGECARSLWFLAPGCGVIAEEASVVFLLGLRCFEKENLCLYGYPDETWEVTLPAEEVPPEIPEPALGINFARDGMNEKDWLALVAVHSDSWLLSVAFYFGARFGFDRETRRRLFSLINNMPTIFEVVTGAAKKQAKEKTPNSSSKSNRPSSKVQSRAESRSKAKVPQDEEESGDDDEDEEADEHNNTLCGTCGTNDSKDQFWICCDNCEKWYHGKCVKITPARAEHIKQYKCPDCTNKRARA

SEQ ID NO: 64694 - protein, 400 aa, Zea mays
  Clone ID: LIB4573-007-C1_FLI.pep
TPARPTHSLRMAGLRPRAAVASNCLRPAIRRGARHASGAAFGYYTCWQLQGNILNWRSISATKKLWSTVASAKPDDSKFESVDAPLEPQTCEGSFLCGLLKNLPHIFLAAAEKQLQELSYQREESLKRWEHSIGSKEDCLHRRIAELKEHECQRAIEDIMYMLIVYKFFKIEVPMVPNLSKLISNRRLQLWPPRETDLESIHGPEVLELIREHLTSIIRWVHRNGPKINRSTLRIKRLQFVRIYSASIMYGYFLKSVSIRHRLELTLTRSEGVPPIQFLNAQLTNKQEQEGAIGGSSEASSSLRPSSVVNPHDLRGYIMGFDPKTLQLCAKLRSSEASNLIERHSWALFGGDMELSQENDEAVILDPSSLKRLLLEAIAFGSFLWDVEDYVDEIFKLSDS

SEQ ID NO: 64695 - protein, 202 aa, Zea mays
  Clone ID: LIB4573-007-D2_FLI.pep
TRWSSQAGRLRCIKYSALKQELKRRSSLHSGQCPAGRMDSQKLGLPPPRSFRSKLRLTTKQINKKISTVCRKLQSIARLPSQRARSASPAQRAHPMAPAKNATPTNRDKRSESPVPSTAPPLTRSASLSKKASLLKTSSVRAQAVSQPQPKKLAPLRTQVDRSDDSKDGERTPKKSKKFLKSILSRRKSRKDEPLPSYFDDY

SEQ ID NO: 64696 - protein, 365 aa, Zea mays
  Clone ID: LIB4573-007-E11_FLI.pep
PSMKDSQDIQSTTELQSPVQGTNEVQSQQPNSMAADAPAGNSGSLSVASNDNKKVSREDIELVQNLIERCLQLYMNKGEVVRTLSTRARIEPGFTTLVWQKLEEENSEFFRAYYIRLKLKRQIILFNHLLQRQYNLMKYPAPPYIPLAPIQDGIHHMPVSNLPMGYPVLQQPIMPAPGQPHMDPMACGLSSGHVVNGIPAPGSYHPMRMNSGNDMVLDNGAPEAPHAGATGSAMSSEMAVSPSSAASSNHAPFTPSDIPGMTMDVSALDSAFGCDVGNPESLQLGPDGSSRDSIRSLGQLWNFSLSDLTADLTSLGADLDVLENYTGTPFLPSDSDILLDSPDQDDIVEYFADAINGSPSDEEKP

SEQ ID NO: 64697 - protein, 368 aa, Zea mays
  Clone ID: LIB4573-010-B8_FLI.pep
QRRRRQLVAATETRRVTCPAAVGVYVLPPPEFQETRIEEAPIRSGDIVEPLVSRRTETMADQLGSYTIRSHGMILARLHMYDWIILLLLAVIDGLLNIIEPFHRFVGKDMMTDLRYPMKGNTVPFWAVPLIGIILPWAIFVGIYFKKKNFYDLHHGILGILYSVLITAVITDAIKDGVGRPRPDFFWRCFPNGNDVYDNITTGVICNGVKSVIKEGHKSFPSGHSSWSFAGLGFLAWYLAGKLTAFDRKGHIAKLCIVFLPLLTAALVAVSRVDDYWHHWQDVFAGGLIGLTVASFCYLQFFPYPFDGDALWPHAYAVRLAEEGNSRNANSYSVRPTEIETVDIPGHGGIITLRDTLNDVESGSARRL

SEQ ID NO: 64698 - protein, 429 aa, Zea mays
  Clone ID: LIB4573-010-D7_FLI.pep
NPPRPQRPPPHFLSLSHGGGEMKVTVMTGDEQIVTLDVDRDESVENLKALLEVETRVPLRQQQIHFNGKEMQNTEKLSAAGVQDGDLVMMFSTSERPSQDGLRVNPDGTAVNPQAFQQHARGDSQLMAQLLQNDPQLAQAILGDDTTELQNILRSRHQQRTELKRKQEEELALLYADPFDVEAQKKIEAAIRQKGIDENWEAALEHNPEAFARVVMLYVDMEVNGVPLKAFVDSGAQSTIISKSCAERCGLLRLLDQRFRGIAVGVGQSEILGRIHVAPIKIGNIFYPCSFTVLDAPNMEFLFGLDMLRKHQCMIDLKDNVLRVGGGEVSVPFLQEKDIPAHIRNEEKLSKLGSLSQATGESSRTREGTPNALQQTPPGAPAANPPQGGDFEAKVTKLVELGFDRASVTQALKLFNGNEEQAAAFLFGG

SEQ ID NO: 64699 - protein, 299 aa, Zea mays
  Clone ID: LIB4573-010-E3_FLI.pep
GADSNNILYLREIDDADKLVAAIQAKKGGKAVVVGGGYIGLELSAALKINDFDVTMVFPEPWCMPRLFTADIAAFYEAYYTNKGVKILKGTLAVGFDADANGDVTAVKLKDGTVLEADIVVVGVGGRPLTTLFKGQVAEEKGGIKTDASFETSVPGVYAIGDVATFPLKMYNELRRVEHVDHSRKSAEQAVKAIKGKESGEPVPEYDYLPYFYSRSFDLAWQFYGDNVGETILFGDSDPTSSKPKFGSYWIKDGKVLGAFLEGGSPDENKAIAKVAKTQPPVANLEELKKDGLQFASKI

SEQ ID NO: 64700 - protein, 360 aa, Zea mays
  Clone ID: LIB4573-011-C3_FLI.pep
RGRPGWHVCLHPSATTTAVAFAASDRSEVIAMVASTASRLSPPRFSTPSPSLHPPNRRSRFSPVRAAKLEAVLSIGAHLIPHPRKAASGGEDAFFANSDAGGVFAIADGVSGWAEKNVNPALFSRELMRNSSNFLNDEAVSHDPQILLMKAHAATSSIGSATVIIAMLEKTGTLKVASVGDCGLKVIRKGQVMFSISPQEHYFDCPYQISSEAEGQTYKDALVCSVNLMEGDIIVSGSDGLFDNIFDQEIVSIISESPSVDEAAKALAELARKHSVDIRFDSPYSMEARSRGFDVPWWKKLLGGKLIGGKMDDITVVVAQVKTVVVPEDEVQGGDTEEQKGNEQGAAAVVAYKMNDEEVA

SEQ ID NO: 64701 - protein, 328 aa, Zea mays
  Clone ID: LIB4573-011-F5_FLI.pep
GRPGHRAHHLLHFLPGLWATYYPSVSVTSPPPPPPPVPLPHPRLRPSLAMSGLYSQGFSPARNLSPQIRSNPDADSQYLAELLAEHHKLGPFMQVLPVCNKLLSQEIMRVSSIVHNHGFGDFDRHRFRSPSPMSSPNPRANLPSNGFSPWSGLQERLGFPQGTSMDWQGAPPSPSSHVVKKILRLEVPVDSYPNFNFVGRILGPRGNSLKRVEASTGCRVFIRGKGSIKDSGKEDKLRGKPGYEHLSDPLHILIEAEFPASIIDARLRQAQEIIEELLKPVDESQDLYKRQQLRELAMLNSTLREDSPHPGSVSPFSNGGMKRAKTGQ

SEQ ID NO: 64702 - protein, 241 aa, Zea mays
  Clone ID: LIB4574-001-G12_FLI.pep
KTRISNSPSNPRSALSFPPISVSDSARIRCAGAPEVACVIRMAEPGLEGSQPVDLSKHPSGIVPTLQNIVSTVNLDCKLDLKAIALQARNAEYNPKRFAAVIMRIREPKTTALIFASGKMVCTGAKSEQQSKLAARKYARIIQKLGFPAKFKDFKIQNIVGSCDVKFPIRLEGLAYSHGAFSSYEPELFPGLIYRMKQPKIVLLIFVSGKIVLTGAKVREETYTAFENIYPVLSEFRKIQQ

SEQ ID NO: 64703 - protein, 471 aa, Zea mays
  Clone ID: LIB4574-004-C9_FLI.pep
HNQGAASMASPRCWSVVCPKPRQVASESVHGAQLALQRLSRRCETCDGEASTPCSCRKEAVARDTEEDSSGPNSSFAHSVINMVGMLIGLGQLSTPYALENGGWASVFLLIGLGVMCAYTAHIIGRCLDEDSAGSKTYQDIGKRAFGVKGRVIASTFTYLEIFLALVSYTISLSDNLPLVFAGVHLHLPWLHLSATQLLTIIAVLLALPSLWLRDLSSISFLSFAGIIMSLLIFGSVVCAAAFGRVSLGKHIPVLQLEKIPAVSGLYMFSYAGHIVFPNIYAAMKDTSSFTKVSVTSFAVVTALYVALAFVGSSLFGAAVNSQITLSMPPHLVVTKVALWATVLTPVTKYALEFAPFAIQLQHHLPEGMGPRARMFVRGGVGSAALLVILALALCVPYFQYVLSLTGSLVSVAISVIFPCAFYLKIYWGRVPMSTVTINVVLILTGVVLAVVGTISSAMSLVQSIQRGHAA

SEQ ID NO: 64704 - protein, 376 aa, Zea mays
  Clone ID: LIB4574-004-E7_FLI.pep
PPPMATMSAALAISLPSLTRVAVASTPSASSRIKRATQFRCCADSSSQEQEISGAPPAPPLDKSARSPPSSLLGISTSTWSAGVAGLGFLETGYLTYLKLTGSEAFCPITGAGCGDVLDSDYSVVFGIPLPIVGLVAYGLVTALSLQKNGKDLLQGSDDLDVRLILLLVATSMATASVYFLYILSTKFIGVSCSYCLFSAFLSFTLLFIRVKDIGFERIQKFAGIQLAVAVIIALALTNSYSSATTQLKGTDDFVLEPYETEISTESSPFAIALAKHLHSIGAKMYGAFWCSHCNEQKQMFGHEATKILDYVECFPNGAGKGKKMTAECAAAGLEGFPTWFINGKILSGDQELEVLAEASGFVGEGTEQPKGISQN

SEQ ID NO: 64705 - protein, 240 aa, Zea mays
  Clone ID: LIB4574-007-C12_FLI.pep
FQRRRQRLPLPSLPSRLAPSPPVLRTPAGDPASTMTGVSTGLLTGLRRVMEQQRISTAFCRQSRVSSSTVSFSDLDEKGDMEYDDNSPNSKRELRPQGVDPNKGWEFRGVHRAIICGKVGQVPVQKILRNGHTVTVFTVGTGGMFDQRVIGPKDLPKPAQWHRIAVHNDYLSAYAVQKLVKNSAVYVEGDIETRVYNDSVNDQVKNIPEICVRRDGKIQLVKSGDSAANISLDELREGLF

SEQ ID NO: 64706 - protein, 283 aa, Zea mays
  Clone ID: LIB4574-008-F8_FLI.pep
LLRMEAILERPKYECLLFDLDDTLYPFSAGINLACRKNIQDYMRHHLHIEESQVADMCLDLYKEYGTTMAGLKALGYEFDNDEFHATVHGTLPYHNLRPDPVLRTLLLSIPQRKIVFTNSDKAHAEEALCRLGLQGCFDGVICFETLNPCCGPSAFRDGNGMLFPDETSPDLADLNESDGLRPISPILCKPSIEAMEAVTRIANVDPKKTIFFDDSTRNIASGKAAGFHTVIVGRPTLVPGADHALESIHNMKEALPEIWDGQDRSESDALLSPTAVETPVAA

SEQ ID NO: 64707 - protein, 186 aa, Zea mays
  Clone ID: LIB4574-009-E1_FLI.pep
GSRRIDTGIAPHREGRARRKMAPRGRVELRRIEDKASRQVRFSKRRAGLFKKAFELALLCDAEVALLVFSPGGKLYEYSSSSIEDTYDRYHQFAGAGRKVNGHNNDNRDVAASDLQSRLKEIATWSKQNNAEESDANELEKLEELLTNALRNTKAKKMLAKENNGGAGASTSSQMLLYSAERATDK

SEQ ID NO: 64708 - protein, 186 aa, Zea mays
  Clone ID: LIB4574-009-H7_FLI.pep
KLALGGADALVAGAGAGAAVIAGAGGVALGGRVVHGAREGGGEVGVEADDAADVVVELADEADVAGEVVGRAGLVVLVDLADEHPVLVQQALHLHEAPVERVDQLPVHHLPAAAAAAAAAVGHGAAGEAVAFHGPPPLLPLPLPLPLALSISSPHRLSWGTGTGTGCRINQARRMHYSPGLVGISR

SEQ ID NO: 64709 - protein, 382 aa, Zea mays
  Clone ID: LIB4574-010-A3_FLI.pep
NKGGLLLIFHRMESLWKLTYLLEPASLALIATAISVAYASASRALDYGKEMERNLDFSEASITLDRSQALMIPLASSCSLLLMFYLFSSVSHLVTAFTAVASAMALFFCLSPYVTYLKMQFNLMDPFVSRCCSKPFTRLQGLLMLFCIATVLAWLVSGHWLLNNLLGISICIAFVSHVRLPNIKICALLLACLFVYDIFWVFFSERFFGANVMVSVATQKASNPVHTVANKLSLPGLQLITKKLELPVKLVFPRNLLGGIVPGSNPGDYMMLGLGDMAIPGMLLALVLFFDNRKFKDVNFPPDVSPPKRRNYVWYAVTGYGIGLVAALAAGILSQSPQPALLYLVPSTLGPVMYLSWLRNELWELWEGSGTILNEKAHLLEV

SEQ ID NO: 64710 - protein, 586 aa, Zea mays
  Clone ID: LIB4574-012-B2_FLI.pep
NRTSQSNQMRSWRLLYDLLRRLLKPTDTPGQIRPASHLSTKSGQAAAQSAAADPTRAVSLLAERDWFARINSEFAAPLRQLGPRFVVRALQHAAGEPLLCVRLYVWASRFGQHFARDRSVRRALGDALLRRGPVVLSAALVADVRSCGCEVSEELLCALVESWGRLGLAHYAHEVFVQVPRLGLRPSTAIYNAVIAASVRAGAVDAAYLRFQQMPADGCRPDCFTYNTLVHGVCRRGIVDEALRLVKQMERAGIRPNVVTYTMLVDGFCNASRVEEAVCVLERMKEKGVSATEATYRSLVHGAFRCLEKERAYRMLSEWIESDPTLHSIAYHTLLYCLSKNDMDKEAVELAKKMSKRGYLLGSTTFSIVIPCAVKVLESSDLCELVDDFIKKGGNLGFDMYIMIIKSFLRCKDISKANKYFSQMVSDGLLSSVESYNIVIDCFAKAGEVERALETIKVMQESGFSPNLVTFNTLINGYLKLGNVHDAKAFLKMVMEHGLMPDVITFTSLIDGLCHTHQLDDAFNCFSEMSEWGVRPNVQTYNVLIHGLCSAGHVSKAIELLNKMKMDGITPDAYSFNAPILSFCRM

SEQ ID NO: 64711 - protein, 421 aa, Zea mays
  Clone ID: LIB4602-001-G8_FLI.pep
EASAERAALGGGERPSVAAGQACRAKKGEDFALLKPACERRPGAPSTSFSAFALFDGHNGSAAAVYAEEHLLANVLGCVPADLSRDDWLAALPRALVAGFVKTDKDFQTKAHSSGTTVTLAIIDGSVVTVASVGDSRCVLDAAGSIYYLSADHRFDANEEEVGRVTECGGEVGRLNVVGGAEIGPLRCWPGGLCLSRSIGDQDVGEFIIPVPYVKQIKLSNAGGRLIISSDGVWDALTAEMAFRCARGLPPEAAAEQIVKEAVESKGLRDDTTCIVIDIIPPEKQKCTIESPKTPGKGLVLLKNFFLRKTASGSLSLADKDNYPEPDFVEEVFEDGCPSLSRRLNSEYPVRDMFKLFACAICQIDLESGQGISIHEGSSKTGKLRPWDGPFLCHSCQEKKEAMEGKRHSRDSSSRNSGSSE

SEQ ID NO: 64712 - protein, 457 aa, Zea mays
  Clone ID: LIB4602-006-D7_FLI.pep
SSHAPPLLVTAKPPPPRVYLLHLLQAARDDELEKSRRKPGGGGKAAAVRCHPVLAEERKASIRGVVGDLLAMAGGGRRSLISLGVGDASSHACFRRGGEFAAEAVAHAALSGAFDCYAPSFGFPDARRAVAAHLSTGAVHRTHEADVFMTAGGTGAITAIATVLGGAPGANVLLPRPGFAPYEAACEVAGAEPRFYDLLPRRGWEADLAGVRALADAATAALVVINPNNPCGAVYSAHHLRQLAETARELGIPIVADEVYAHMVFGGSRFVPMASLAHIAPVVSIGALSKRFMLPGWRLGWLAFCDPNGALKHVRAATEMLLNVTSGPASIVQAAVPKILSAEHHEFHRNVVHLLESAADALYRRVNQIEALRCYSKPEGSMFMMVEINTSILHGVANDMDFARELIKEECVLVLPGSVIGLKNWVRIFFGAPVSLILEACDRIEMFCRRRTLKQNN

SEQ ID NO: 64713 - protein, 389 aa, Zea mays
  Clone ID: LIB4602-006-H10_FLI.pep
FTVASADTGCQEPPNTLVDWALEILSTADPDEKARLGDLAASRWLRGDIPLPYDPSRPARPPPDRPARSAEVRLLPPSRMPKLGKGGSAQSRLAMLHSLAHTESWAVDLSWDIVARFGAAMRMPRDFFDDFARVAQDEGRHYTVLSARLRELGSHYGALPAHDGLWDSAMRTSHSLLARLAVEHCVHEARGLDVLPTTISRFRAGGDEQTARLLEDIIYPEEVTHCSAGVRWFRYLCLRSHGNHPTSYPVPGLEPRSSGLPGDGTADGKTAREAEGEPTPKLAKDVRGDDKMVQQVEDELPSRIAQDANGRSKVTEHVEDGLSKCKLDDSIEKYEELVIRTFHRVVREYFRGPLKPPFNTEARKAAGFEPAWYEPLAVKEACTEGETIE

SEQ ID NO: 64714 - protein, 430 aa, Zea mays
  Clone ID: LIB4602-008-F9_FLI.pep
MGISARWLKSLVGLRKVEQQPRKESADVGRMFHFQNQRSQDDSSIAAQEEIPEVPYGNDPPEDDSNAPSCLEPTYSSADVPLFQTEEELKEIWAATIIQTTFRAFLARRAHRALKGLVRLQALVRGHIVRKQADTTLRCMQALVRVQARVRARRVRMALENQTDQQNTSPEHTTVARVREIEDGWCDSIGSVEDIQAKLLKRQEAAAKRERAMAYALAHQWQASSRQITAFEPDKNSWGWNWLERWMAVRPWESRFLGTYTADGIFVVNETKQPDRSATKTPYRKPVKKHDSTLQSNMLNQKGFPSNSEGVGSSTNRPSGLVSTKSRLKVLPREGSEEAPSRPSPLVRSASNPKERTSGINSKERTGDLDCQAHKRFSLPGIGSEAGRHLTKKGTVNRSLKATKDSHMLGSRHHLASCIDPVPTRVELET

SEQ ID NO: 64715 - protein, 313 aa, Zea mays
  Clone ID: LIB4602-009-F12_FLI.pep
KKSLAPAAVPSRHPLPQQRSRRPKPARVTSGWPPPRQTSPMGDNKSPLSLSPMGGRDRDRELLIPVSGGGSAPGVDDEGADRASSASAALSSSGREAFHKVVRSWASKKFMTGCVILFPIAITFYITWWFIHFVDGFFSPIYAQLGINIFGLGFITSVTFIFLIGVFMSSWVGASVLSLGEWIIKRMPLVRHIYNASKQISAAISPDQNKQAFKEAVIIRHPRVGEYAFGFITSSVSLQSYSGQEDLYCVYVPTNHLYIGDIFMVNSKDVIRPNLSVREGIEIVVSGGMSMPQILSTLDPEMILGDRTGPSRS

SEQ ID NO: 64716 - protein, 474 aa, Zea mays
  Clone ID: LIB4603-003-C1_FLI.pep
KNNLDIYDRTYISISTDTHPALSMLEVSTLRGPTSSGSKAEQHCGGFVGDHHVVFPTSGDCFAMVDDNLLDYIDFSCDVPFFDADGDILPDLEVDTTELLAEFSSTPPPDDLLAVAVFGGDEQPAAAVAQEKPSSSLEQTCGDDKGGGVAVASRRKLQTTTTEEDSSPAGSGAKSSASAEGHSSKKKSAGKNSNGGKRKVDWTPELHRRFVQAVEQLGIDKAVPSRILEIMGTDCLTRHNIASHLQKYRSHRKHLMAREAEAATWAQKRHMYAPPAPRTTTTTDAARPPWVVPTTIGFPPPRFCRPLHVWGHPPPHAAAAEAAAATPMLPVWPRHLAPPRHLAPWAHPTPVDPAFWHQQYSAARKWGPQAAAVTQGTPCVPLPRFPVPHPIYSRPAMVPPPPSTTKLAQLHLELQAHPSKESIDAAIGDVLVKPWLPLPLGLKPPSLDSVMSELHKQGVPKIPPAAATTTGATG

SEQ ID NO: 64717 - protein, 657 aa, Zea mays
  Clone ID: LIB4603-011-G11_FLI.pep
QHLSLSHGCFQVPPRREGIGDAELHRRRRRRRVARPRTPRCLVFQDKMDLAPQGLITQQQKANERRPVGSSQIWTRYGVLLPSQQTRKLKEWILTDEQQQLVNASGLGHLALTTGFTIDRSLLTSFCERWNNETNTAHFMGFEIAPSLRDVSYILGIPVTGHVVTAEPIGDEAVKRMCLHYLGESPGNGEQLCGLIRLTWLYRNFHQLPEHPTINKIAYSTRAYLLYLVGSTLFPDTMRGFVSPRYLPLLADFGKIREYAWGAAALAHLYRGLSVAVTPNATTQFLGSATLLMAWIYEYLPITQPQQKNQSTLLPRACRWNFGGATRGQRKKVMDWRKVFEQLQFSEVNWNPYKDMNPAIVPEYCIAADNICYSRTWLISFNIKEAYVPDRFARQFGREQGRLHGVPMWTRRTWSKWKDWRTEYAREIEEFHQLVGCHFTPPAETNINSFPLHESSAGQNDAGCSLNISHNFSAMVEDLKNDLPVIGRYLEGNLLPSDVASFLERVSTMIKSYTPPQGSRRKDRVSHGPADPVRSKNPRKRGRHSLFQDSFPHRYLGTPVNIVFDGTIPLLNGGEALKEQVAMDPWRVSQSHLTMTTSSSSLDSSSPESMKRRREGGDEIPITRDTDCLQSGRLCVQLKMFKHRDGVNAEAANPIFR

SEQ ID NO: 64718 - protein, 270 aa, Zea mays
  Clone ID: LIB4605-001-E6_FLI.pep
AMRKRERENPCGICGHYHKYEEGEVCGVCGHRWKPSDGEGAPSRHESAFPTEVLKDFLFLGSYDNASRSEVLRTLSISHILNTVPDCHNLYKNSFTCHSLQRDRPLDFDEANQYLEKCERDKSRVLVHCMTGKNRSAAIVAAFLMKSRGWRLAQSFQWAKDRRPQVQLTDASQKELLEYELKLFGPSTQTLVPTESFASLGFGYTKPAGDMQTPVFNQTTMPSIFERFNPNDRPANFTFGVERKAEANPRDNNSDGRVNPTSMENLMDSS

SEQ ID NO: 64719 - protein, 296 aa, Zea mays
  Clone ID: LIB4605-001-A9_FLI.pep
RRRGCGCDGLCCADKLGGGGGGGGLGLGMGLLSNRVERSEIRPGDHIYTWRAVYAYSHHGIYVGGSKVVHFTRKKETETSDSSDSTSSLVSEISSECQTFPDCGFQLSNSGVVLTCLDCFLRNGSLYCFEYGVPSAVFLAKFRGGTCTIAESDPPEVVVHRAMYLLQNGFGNYDMFEKNCEDFALYCKTGLLPVEEPGIGTSGQASSAIGVPLAALLSTPFKLLAAGPLGMATVTAGMYCAGRYITDIGVRKDVAKVEVEKLSSHPSFHLVEDEESVNMRSEKPKTLLPMKRKRER

SEQ ID NO: 64720 - protein, 494 aa, Zea mays
  Clone ID: LIB4605-004-E12_FLI.pep
LPPSPGNDPRYLPARKDLFSVRIGFLISASRGAKNPSSLFADSSLTLCKILSTPVMAATYQTGLVAEPQLLNTEIITRRATNCVADTNTKDKCVGYLDVFVHQARDIHNVCIYHKQDVYAKLSLTSSPDVSCSTKVINSAGRNPVFEESLRLDVQTVDASLKCEIWMLSRVRNYLEDQLLGFALVPLVDIVIGNGKLVQEFSLTSTDLFHTPAGFVHLSLSYAGCSPDVVLISSPNNSPSTVDDSGNDHVVPAQLEKIVFPDLSVEKEDEIMVSKYLEMTSDSETPIKVENGMSLHSANDDDVPSKLEKIKFIDSESRAKAENGKMLLFGVAVPSTAICADKVEEYHDESPLSCVSATGSSTTLSATTQSVSEPSETSVEASPRQCHREKSQDVTGGEANSSETPPKDEVIKPVISVNLQPEQSVVQQDIVDMYMKSMQQFTESLAKMKLPLDVENSSPSNEDSYSSTVEKTSPSPSSSAAKGSRVFYGSRAFF

SEQ ID NO: 64721 - protein, 229 aa, Zea mays
  Clone ID: LIB4605-005-B1_FLI.pep
EETPPLLAAAGSPVTASKSMASRQALHIFTPSRRAMHILTSSRGIASTPHLSSFGWFDKIKSTITGKKPEEASEASSFTLIQFADTMEKARKLGTFKNFVAGRASEATVVNVFEKHSAVLRYLGAIDPTGENLRNTDKINATKHCNCTIADVEHILAKYTWAKEAQKKIAKLKEEGKPLPKSFNEVQNLMGSTPVDVGRSNLAKSGQISRNAFCPCGSKKRYKRCCGAS

SEQ ID NO: 64722 - protein, 355 aa, Zea mays
  Clone ID: LIB4605-005-H10_FLI.pep
SLSQGGMSAKVPRCLEVCSSGMADWASIQTDILGIIIKKLPIPDYIRFRAVCTSWNNVCKDVSYCPRVDPWLMLPPNQNPLGAQFFCIPERKNQSIRLPNTASLFESVWAPVGSSNGWLIYFSHTYGTMQLVNPVSGKHIQLPPIGRRTFSKAKLLEISERNFIVAVLYGDEKGYKITRKGSSNWSSVESKFILDDIIKHGGRLYTCDMYGTVEMWAEPPRAWPDEEVTHRWRFRCLIETPAGDLVRVKRLCQNKFAVWILDKASSSWVGTENIGDLALFVSHYNSFCFPASGQPNLKANCIYFIDIYNNLCAFNLEHGTKELVQTLTIGRGQGRNDYHRWPERDQVLWFIPSLK

SEQ ID NO: 64723 - protein, 383 aa, Zea mays
  Clone ID: LIB4605-006-C2_FLI.pep
GFRWSPRRRRAPTRMNSKRRRSHSPVEYKEGRDKDYGTSGKKDKSRDLDDTCDARRGHETDRHSDKHSFGTSRESKKHDDYRRYHDKYGDDYGRSHPRASRSDRESRADTYYDRSKHDNTSGRSRGDQRDVGSRYGEKSVNRDQRSINEGKQESPRGYQKNDGGEYNKHMDARKQEYKGYGDDRDHYRVVRKNKETIKEEEDSKRRNGKEIEKEALVETRDKKRSLFSSTGPNVDNPGDVKLSSATNEALDNAAETVDGVNAAKVAAMKAAELVNRNIAAFGAGTGRLSTDQKKKLLWGNKTSNPSEETSKRWDLFSDRERQEKFNKLMGVKSSAPVQENTVENKVGSSAEEAKKLEELDTNLEKHYIAGLRRRDGRTVGLGL

SEQ ID NO: 64724 - protein, 218 aa, Zea mays
  Clone ID: LIB4605-006-E6_FLI.pep
AGGALRKVEDCIPCGPSALAVKEAAWGLARYAAIAQDNGLVPIVEPEILLDGDHGIEGALEVAEKVWSEVFFYLAENNVLFEGILLKPSMVTPGAEHKEKASPEAIAKYTLTMLRRRVPPAVPGIMFLSGGQSEVEATLNLNAMNQSLNPWHVSFSYARALQNSVLKTWQGRPENVEAAQKALLVRAKANSLAQLGRYTGEGESDDAKKGMFQKGYTY

SEQ ID NO: 64725 - protein, 342 aa, Zea mays
  Clone ID: LIB4605-009-A12_FLI.pep
VEAGDGMLVFNLISAVMTALVKKALQQGLNALVLITLRQLVATLFLAPIAYFKERNTRPKLTLEIFVYHFFSAALGASLSQYSFFYGLKLTTATFAITFANMAPVLTFLIAIALRVESLNMKSKSGSAKMVGTLMSLGGVLLLSLYKGMAVTHHSSGTPPPSQVQLGNDGDRKVWMLGTVALLANCLVFSLWLLLQSRLTNKYPALYSSTAFMFFISTLQTGSLTVTVEWHHASVWIVTKKLEMVTILYSGIMASAAGFLIMTWCVHKRGPVFTAAFIPIVQIMVAIIDFFFLHEQLYLGRRRMQWRHALQVRPNMTKRPASTSSEIISSQHHRVVANTDMY

SEQ ID NO: 64726 - protein, 336 aa, Zea mays
  Clone ID: LIB4605-011-A6_FLI.pep
SRPAGQSSTRKPLPAISAPALTGSPLSTPHPPAAGEPLLLHDPCFPGGNSMNYIDSIPPLNGGNYELWREKLELALALLDIDLAITDPCPIAPVDPVQEENESDDDFNARVRNHAPIKMKYDLYKVKWDQSNRKCLMVIKSSIMDTIRGAFPACTTATEYLSKVESHLTISSKAYACTIIERLLTDKYTGGGVREHILKMASMASKLKPMEMALPDEFLVYLIFASLPKEFEAFEINYNSQPDNWGIEKLIAMCVQEEERIKASRGDSINYVGVYKAHGKAPQNDHHLKNKEVDKNDCCWCEKSGHHQKDCPSFLKHLINKGIPYEEDPSKRRKMH

SEQ ID NO: 64727 - protein, 361 aa, Zea mays
  Clone ID: LIB4605-011-H2_FLI.pep
RGRPGFIVWSPSLPHHLRAFYMQACACHFSPVLAPPRSRISASHSPGMATLKVPATVPPVADDCDQLRKAFQGWGTNEALIISILGHRDAAQRRAIRRAYAEAYGEELLRSITDEISGDFERAVILWTLDPAERDAVLANEAARKWKPGNRVLVEIACTRTSAQIFATRQAYHERFKRSLEEDIAAHVTGDFRKLLVPLVSTYRYDGPEVNTRLAHSEAKLLHEKIHHKAYSDDEIIRILTTRSKPQLIATFNHYNDAFGHRINKDLKADPQDEYLRTLRAIIRCFSCPDRYFEKVARQAIAGLGTDENSLTRVITTRAEVDLKLIKEAYQKRNSVPLERAVAGDTSGDYESMLLALLGQE

SEQ ID NO: 64728 - protein, 466 aa, Zea mays
  Clone ID: LIB4605-012-D12_FLI.pep
LTTPLGDKLMASASAAPAPDREEIVFLDVETSTPPCVLLEFGAVAVCSRRLVEVSSFATLVRPANLDALPDPTARSNGITRGTLADAPPFGDVADMVYDVLHGRVWAGHNIVHFDSMIIMDAFAEIGRPPPQPKAMIDTLPLLTQCFGPRAGDMKLASLANYFGLGKQRHRSLDDVKMNIDVFKNCATVLFLEESLRGVRVPTVQNMSSGGATIRTQGITSDPAPNRDNPNESLLVGSSTVHVEEMMLDTTVTVQTDTRSSGAFSGFVELDDVSTESIKISAPLFLRPFGPRAIVQHKGSPLQLICPGLEVLWVNTKGFPNSPHRPKVGIKVDIPENLSKVLGFCDDLAQSSSSSPGPGAICSNSRWKSLIERDADRRPTVWLKIPTFGSGDTAACRTHVYEKECDGVVPRLVSERVDPSELASMLQGNKVVDAFVSVETFDHYQSAGIRLVANRLDVHFKRQQQA

SEQ ID NO: 64729 - protein, 255 aa, Zea mays
  Clone ID: LIB4606-001-A8_FLI.pep
TPPKNLEYSTQGTRRRRGEEIFFPSKDGERKRDKGKARERRRRLICCRGAKRKRKRSAGVVKMFLVDWFYGVLASLGLWQKEAKILFLGLDNAGKTTLLHMLKDERLVQHQPTQYPTSEELSIGRIKFKAFDLGGRQTARRVWKDYYAKVDAVVYLVDAVDKERFAESKKELDALLADDSLANVPFLILGNKIDIPYAASEEELRYYLGLSNFTTGKGNVNLADSNVRPLEIFMCSVVRKMGYGEGFKWMSQYIK

SEQ ID NO: 64730 - protein, 491 aa, Zea mays
  Clone ID: LIB4606-002-G11_FLI.pep
SMAPPPPWLAALLFLLLPALLPAVGSVSGAAAAGIFRVRRKLPAGVGGDTGANISALRAHDGRRHGRLLAAADLPLGGLGLPTDTGLYFTEIKLGTPPKRYYVQVDTGSDILWVNCISCSKCPRKSGLGLDLTFYDPKASSSGSTVSCDQGFCAATYGGKLPGCTANVPCEYSVMYGDGSSTTGFFITDALQFDQVTGDGQTQPGNATITFGCGAQQGGDLGNSNQALDGILGFGQANTSMLSQLAAAGKAKKIFAHCLDTIKGGGIFAIGNVVQPKVKTTPLVADMPHYNVNLKSIDVGGTTLQLPAHVFETGEKKGTIIDSGTTLTYLPELVFKQVMDVVFSKHRDIAFHNLQDFLCFQYSGSVDDGFPTITFHFEDDLALHVYPHEYFFPNGNDIYCVGFQNGALQSKDGKDIVLMGDLVLSNKLVVYDLENQVIGWTDYNCSSSIKIKDDKTGTTYTVESHDISSGWKFHWHKSLVLLLVTMVWSYL

SEQ ID NO: 64731 - protein, 349 aa, Zea mays
  Clone ID: LIB4606-004-H7_FLI.pep
STRPPVDAPLPPMPQVESATASEAPPPQDAWLVELGSRLPQWESLRDSSKVIIPISISRVNQFDAARLDVEMSAMLKEQLVKVFSLMKPGLLFQYEPELDAFLEFLIWRFSIWADKPTPGNALMNLRYRDERAAPITGKEVRTGLEGPGLSVSQKIFYCISFVGGQYVWSRLQSFSAFRRWGDSEQRPLARRAWALMRNAEVFYRAASFFNLLLFLYGGRYKTVVERILKARLVYGSPNMNRAVSFEYMNRQLVWNEFSEMLLLLLPLLNSSSVKKFLLPFSKDKSGGSSGDEADCPICRSSPSIPFITLPCQHRYCYYCLRTRCSATTSYRCTRCDGAVVAIQRLGSG

SEQ ID NO: 64732 - protein, 362 aa, Zea mays
  Clone ID: LIB4606-006-H8_FLI.pep
SRPAGASWIQSQSNPISSPLRSSLTLSPNPSPPRRHSRARLPDRDPGDMPRYDDRHGNTRLYVGRLAPRTRSRDLEYLFSKYGRIREVELKRDYAFIEFSDPRDADDAQYNLDGREVDGSRIIVEFAKGVPRGSGGSREYMGRGPPPGTGRCFNCGMDGHWARDCKAGDWKNKCYRCGESGHIERNCQNSPRNLRRDKSYSRSPSPRGGRGRSRSYSRSRSYSRSRSPSGSPRGGRRERDERRSRSLSYSRSASPRRSVSPAKEKERSRTPNGSRSPRSPSPRAEVSPPLKDNGARNGSDHEGSPGGGENSKRSRSPSDGYRSPVANGRSPSPRDDRSPSPKGNNEDDERRGSPRGSQSPLN

SEQ ID NO: 64733 - protein, 348 aa, Zea mays
  Clone ID: LIB4606-007-D2_FLI.pep
IDVPITHRAVVVERQDLKISREALSLSTSSASPSSKQRKGRGQGAAAGPPTATSATRHGATKQQVSDETKMVQEELPQAWWFDSHNLARPSPWLNSTLSELDDKTKQMLKLIDQDADSFAQRAEMYYKKRPVLVDMLGDLYRTHRSLAEQYDLLKHGSGTRHTVFGLSSCTQSRSSTNGRTTPRSSCSASMYDSESEVDDPGQEEYEAEQLARAGMAKTDSPPPPPEQQQQQEQREQAEQQMRAEIERLKAQNAALQKAAEESAAALRAELAGKDEEKREVIRQLASSMDVMRQENLTLREHISRGSSKRSSAPRAGAAFDLRKVARGLFSTRLFTAHCRPTDPIVAL

SEQ ID NO: 64734 - protein, 252 aa, Zea mays
  Clone ID: LIB4606-007-D6_FLI.pep
VRPQTPCPSAFSASFGLSGADRVCGGSESDMKRAAPSQEPLDVSSGDSSGSDSDQLGGKDKGGSASKAAAGAEDVKRVVLHKESQDVSSDDDLSSDSDDDAGKGNAWNAFGLPNSSKAASTAEGALIRRAEMYQQYMKHIPVPAYCDSVIPFTSWLGLAGSLKQLYEQPLHYLTNVLLKKWDQQRIGSDDEHRRLDAIIHPARAETLVWATEEVHRLTTSGQHLASLWASDPMYHAYVDPVFASVKLEYQPL

SEQ ID NO: 64735 - protein, 205 aa, Zea mays
  Clone ID: LIB4606-007-E2_FLI.pep
SRPAGPSRIPSFIRRRRLLSAAVAMGRRPARCYRQIKNKPYPKSRYCRGVPDPKIRIYDVGMKRKGVDEFPYCVHLVSWEKENVSSEALEAARIACNKYMTKSAGKDAFHLRVRVHPFHVLRINKMLSCAGADRLQTGMRGAFGKPQGTCARVDIGQVLLSVRCKDNNAAHASEALRRAKFKFPGRQKIIESRKWASPSSAVPTT

SEQ ID NO: 64736 - protein, 281 aa, Zea mays
  Clone ID: LIB4606-008-D10_FLI.pep
RPRSRRRRGTRRDARMHAERRKHDASLERAGVLPLHLHDLPPGVAGGDLVVPPGHVLPGGEELPAPVGGVDDVVGVWQVGEVGQCEVVAGEVLVLGEDVVVDAQHAMQLLLVLGDAGLVGAHVLEVRRERQLERQLRARRVEALRLRLQPLLYGRPLQRPRAVQLLVPVVRELRAQVPADSPGINDCLVTVLESHLPGRIPQLDELGELVRLLEGVGADELELEVLLEEAGQHPGDVGGSRLSEHLQPRGHCSIRPVCVWTGCAAAIESNALDDRDETCCR

SEQ ID NO: 64737 - protein, 698 aa, Zea mays
  Clone ID: LIB4606-012-F3_FLI.pep
STRGAAPPGNRMDAADPLCAITSPARLLPRTLGPTPSKVRGALLEAIALARSRKGSEELVKQAAMVLKEHGDIQTLYHDDAMKAMPPTNVSKGQQGRRAALDRKRARFTMKDTGSKAVPVVDRSKLLNISDPVAFFMALDRLEEAEDEIKRLNGEAEKRILIFDPLDEPIRQPGLRGRKSFRSFKVTEDATTQDPIEVLASQTATMTGSQFSQDVMHAVADKNEQSVPSRSGEAISDVSGKEDSLAEKDGRDDLAYLLTSIQDLDESEEEAFIRKTLGLKEIRKGRVSLCNSIPGVRSLRSDTEQKGSMKVRPPESHLPQTRQDRISELEKHLFPGGAANAKCTDDESEGSPDIVMGEPSLVHDSSEVLMTNENSTGSEIDRRTPNLCARAADHALDPEPNLPDHAYERQTRGSSLGLCKNTEVANEHEEDDVHIEYPTTGGSTYQTEVSSHDLEGSLTEELVSEPGRHAAPDDIYRTSHAAEDSIQHLEVVKQGGVLQDKSSQSLEMPLEDIDPLYRPQMHGGSTKKSTPVLCNALSPIEQKQQAAQEGKRKQQAKRVKKVSDESSHALEISQANFEPENEPHNVDVNMEQPTVMSSAKGQKGAQRRNKTKKLNQRKILGDVDLARQSGVRRSSRIRSRPLEYWLGERLLYGPIQDTLPAVIGIKAYSPGQDGKKTLKVKSFVSEQYSDLVAQFAKY

SEQ ID NO: 64738 - protein, 257 aa, Zea mays
  Clone ID: LIB4666-005-C11_FLI.pep
RGRPGNSVSNSRVLLLSDPELRRPQHQARPPSRVTEMALPNQGTVDYPSFKLVIVGDGGTGKTTFVKRHLTGEFEKKYEPTIGVEVHPLDFTTNCGKIRFYCWDTAGQEKFGGLRDGYYIHGQCAIIMFDVTSRLTYKNVPTWHRDLCRVCENIPIVLCGNKVDVKNRQVKAKQVTFHRKKNLQYYEISAKSNYNFEKPFLYLARKLAGDPNLHLVEAVALKPPEVTIDMAMQQQHEAELAAAAAQPLPDDDDDLIE

SEQ ID NO: 64739 - protein, 327 aa, Zea mays
  Clone ID: LIB4666-007-G4_FLI.pep
PVSSHLLTAVPLRSGGICICISIPRSVFSQGGRSVTMEAPPVALFDTLKAAKPFFLLAGPNVIESEEHVLKMAKHIKAITTKLGIPLVFKSSFDKANRTSSKSFRGPGLEEGLKILQKVKATYDLPIVTDVHESHQCEAVGRVADIIQIPAFLCRQTDLLVAAAKTGKIINIKKGQFCAPSVMVNSTEKVRLAGNPNVMVCERGTMFGYNDLFVDPRNLEWLRESNCPVVADVTHALQQPAGRKLDGGGVASGGLRELIPCIARTSVAVGVDGIFMEVHDDPLNAPCDGPTQWPLRNLEELLEELIAIARVTKGKKPFKIDLTPFQE

SEQ ID NO: 64740 - protein, 359 aa, Zea mays
  Clone ID: LIB4666-008-F5_FLI.pep
SGGLTTGTFCRRRRVRAAAAMFWKDSGSRSSSGSGRDQNGVGPFGQVRVLIVGDSGVGKSSLVHLILKSSAIARPSQTVGCTVGIKHVTYGSAGGSSNNISDAERNFFVELWDVSGHERYKACRSIFYTQINDVIFVYDLSQRKTKTNLNKWAVEVAETGTFSAPLGSGGPGGLPVPYLVIANKVDIVPRDGARASRGNLVDLARQWAEKQGLLRCSEELPLTESFPGNSGLVSAAKQARYDKEAVIKFFRLLIRRRYFSNEPPAPSPWSLAPREDTILPMETLGDGADSFQRKSLSGEGFLYNGLVPLPAQRNLTPPPTLNPQQPVSPLDNYRYHRFSSSSLPDVSSSRTSREDIINL

SEQ ID NO: 64741 - protein, 462 aa, Zea mays
  Clone ID: LIB4666-020-E10_FLI.pep
RGRPGSPAKPLNPSSPPPASPRLPAIGGEAAAMAILLRRASLRRVIAFAAASSSSSSLHSEIYKQGVCGSMFHCREFASKAKKKKSSGTDSDEESMSKKDLALHQAIDQITSAFGKGAIMWLGRSQGLRDVPVVSTGSFALDMALGTGGLPKGRVIEVYGPEASGKTTLALHVIAEAQKNGGYCAFVDAEHALDPALAESIGVDTNNLLVSQPDCAEQALSLVDTLIRSGSVDVVVVDSVAALVPKTELDGEMGDAHVALQARLMSQALRKLSHSLSLSQTVLLFINQIRAKVATFGFGGPTEVTSGGNALKFYASVRLNIRRIGFLKEGEETIGSQVAVKIVKNKHAPPFKTAQFELEFGKGICRSSELFELGLKHKLIQKTGGAYYRFNDMSFKGKNNLKSYLTENKSVANDLETKLRRLMGTEAPKEQEAEDSSPSDLPEEVVTPEASSEEDMGVVIEA

SEQ ID NO: 64742 - protein, 315 aa, Zea mays
  Clone ID: LIB4666-020-G2_FLI.pep
QCIPFSALRLLTFHTTLLCLTLLSCPNPRAGMELGATTALYPLHRCKTIYLVRHAQGIHNVAGEKDFGAYMSHELFDAQLTPLGWNQVDGLREHVKKSGLAEKIELVISSPLLRTMQTAVSVFGGEKYTDGVNAPPLMVENARHSGRPAVSSLNCPPFIAVETCREHLGVHPCDKRRSITEYRPLFPAIDFSLIENDEDVLWEPDVREPNEAVALRGMKFMDWLWTREEKEIAIVSHSGFLFHTLSMYSKECHPTIRDEVSKHFANCELRSMVLVDRSMLGSYSSRFNYAGKNPTGLDVPSDIADKKQVDEAQKN

SEQ ID NO: 64743 - protein, 419 aa, Zea mays
  Clone ID: LIB4666-024-H1_FLI.pep
LEAGRAKRSAPGLYRRLSVSRIPDPISSNRNCSAPTPIGFGGTVASMRPRHRRSNCINLRSNTSSSPATSSGKRDRHLEGAEIQDSKLFCQLREVEAKMFYGGYAYHGNSFEQTYRCYPASFFDKPHLEGGDKVIMPPSALDRLASLHIEYPMLFELHNDATQRISHCGVLEFVAEEGMIIMPYWMMQNMLLQEGDTVHVKNATLPKGTYVKLQPHTTDFLDISNPKAILEKTLRNFSCLTTGDSIMVAYNNKQYYIDIVETKPASAVSIIETDCEVDFAPPLDYKEPEKLRQPTVLASKAPAEDGNTAAEDEPKFKPFTGFGKRLDGKASKLQASEVPSTALSAPSDSNKRANQQISAPAASGASSYSRQKTGKLVFGSSASNNKEPQKAPAKEEQPAKKDDEPRFQAFSGKSYSLKR

SEQ ID NO: 64744 - protein, 307 aa, Zea mays
  Clone ID: LIB4666-027-A6_FLI.pep
PTSNDNPASDSVAAMAYLLKSRSEPVQQLRVPASSEEQQRRVNEVRELLGDLPTEMPNFLSDATIRRFLRARNWSTMKATKSLKEATSWRRQYKPEKIRWESIADSENEARRAYIPDYLDKKGRMVFVTLPTIKSKSSEKDHLKYLVYNLENLLIDCADAEEDNVVWISDFKGWSISSTPFSLTRQSLHIIQQYYPGLIAVGILTNAPKIFESFWKIMKHFLEPKMDEKVKFVYNDSSESQKILGDMFDLDELEHIFGGRNTADFDINVYAERMKRRDRIRGASTEDNGEATSSRCWTKTTRNSSSV

SEQ ID NO: 64745 - protein, 337 aa, Zea mays
  Clone ID: LIB4667-001-E9_FLI.pep
SAATRRDQVDEPQQASLRFAPLCGSLRRAAMAFSPPLIDWEAESYPAYPDFAAIPLFVVFFLVVRFFLDRSVFEWLARKLIFKEEDEKKLGPTTYAGKRKIRKFKESAWKCMYFLSGELLALSVTYNEPWFTTTRNFWVGPGDQIWPDQKIKLKLKTVYMYVAGFYTYSIFALLFWEIRRSDFGISMTHHVATVCLIALSYIFRFARVGSVVLAIHDATDVFLELGKISKYSGHELFADVSFLVFVSSWVLLRLIYYPFWILWSTSYEVVLTLDKEKHKVDGPIYYYVFNSLLFSLLVLHIYWWVLMYRMLVKQIQSRGHVGDDIRSDSEGEEEHED

SEQ ID NO: 64746 - protein, 333 aa, Zea mays
  Clone ID: LIB4667-002-G6_FLI.pep
SRPAGIADEVVVALLREPSPPPPTGAPVCSSSLKAMDHDRLNSPSTSAISLEVMGHQLHISQDPNSKHHGTTVWDASMVFVKFLEKNSRKGRFCPSKLKGKRVIELGAGCGLSGFGMALLGGDVTTTDQAEVLPLLMRNVERNRSWISQSNSDSDSVGSITVAELDWGNKEHIKAVEPPFDYIVGTDVVYSEHLLQPLMETITALSGPKTKILLGYEIRSTTVHEKMMEMWKSNFIVKTVSRSKMDVKYQHPSIHLYMMDLKAPLIPEIEAADNGNYEEEVEVAANQEEDEDPGVKSESCSGSSPEAKSGSLDGWEIRRCGAMAARLLKDVKL

SEQ ID NO: 64747 - protein, 266 aa, Zea mays; identical to SEQ ID NO: 60141
  Clone ID: LIB4667-004-F4_FLI.pep

SEQ ID NO: 64748 - protein, 327 aa, Zea mays
  Clone ID: LIB4667-007-D4_FLI.pep
TPGFNFTVNTLTLREVITEGVSKQGAKTHLPSLMGFAGWVSMLLFLLVAGAVANDQIFTTSGVPFGRSSREPSYRVEFHPVDSPFHPENGQESVPMASHDGKRYKCFLPVEETKTMKSMLPQNATNVIIESERRIKPKEPDELLEVLKDQCFYRHEGWWSYEFCYHGKIRQVHVDDDKVIQEFVLGEFDDDATAAYHENITSELVDDDHHVKDISQRYHVHLYTNGTVCDLTDIPRETEVRFVCSEPTVLISSVKEISSCRYVVTIQSPMLCKNPLFQEEKRTLSIHCNELPARAESSAEDDSLPKEAQISIIPDQDELHDFPAYAT

SEQ ID NO: 64749 - protein, 194 aa, Zea mays
  Clone ID: LIB4667-008-C9_FLI.pep
PVRSKSNLISSFGVAEGRKREERGMDQVLNKVGSYWFSKRASKEIDSIGDDISSISSSIGGSAKWMVNKIKGKMQKALPDLLKEYDMPAGLFPRDTTNYEFNEETKKLTVYIPSACDVGYKDSSVLRFFTCVTGYLEKGKFSDIEGMKTKVLVWTKVTAIKTEGPKVHFTAGVKKTRSRDAYEVVRDGITIDKF

SEQ ID NO: 64750 - protein, 406 aa, Zea mays
  Clone ID: LIB4667-009-F12_FLI.pep
SRPAGIFFLQPKQSEGGEMNGGGEDGKQQPHLVLAHKLFLLSHSDVDDLAKVDLRADVFAAVKSDDMAALYESLAADGVLETDAALLAEMRARIDEEIRKLDEKIADAEENLGESEVREAHLAKSLYFIRVGEKEKALEQLKVTEGKTVAVGQKMDLVFYTLQIGLFYMDFDLISKSIDKAKNLFEEGGDWERKNRLKVYEGLYCMATRNFKKAASLFLDSISTFTTYELFTYDTFIFYTVLTSVISLDRVSLKQKVVDAPEILAVIGKVPHLSEFLNSLYNCQYKSFFIAFSGLTEPIKLERYLQPHFRYYMREVRTVVYSQFLESYKSVTMEAMAAAFGVTVDFIDQELSRFIAAGKLHCKIDKVAGVLETNRPDARNAFYQATIKQGDFLLNRIQKLSRVIDL

SEQ ID NO: 64751 - protein, 293 aa, Zea mays
  Clone ID: LIB4667-012-C7_FLI.pep
SRPAGREREGMATVRLLRCASSTFLFSTCTNPLRSCSPLVRRQHPRAAMTTDSSAASFQKIQIQREDTTFDAYVVGKENAPGIVVLQEWWGVDYEIKNHAIHISQLGGGYKALIPDLYRGKVALDVAEAQHLMEGLDWQGAVKDIQASVKWLKSNGSPKVGVTGYCMGGALSIASGVLVPEVDAVVAFYGTPSSELADPSKAKAPIQAHFGEHDNFVGFSDVTAAKSLEEKLKSSGISYEVHIYPGCSHAFMNTSPEALKRKKGMGLTDENQEAVDLAWSRFSSWMGRFLGSA

SEQ ID NO: 64752 - protein, 421 aa, Zea mays
  Clone ID: LIB4667-016-A9_FLI.pep
APKPKGNPHHASRNFSFLHPQPYSPFIRTNEAARARSRRSFPTSKPTPLPAAAMATVMQKIKGIEDEMARTQKNKATAHHLGLLKAKLAKLRRELLTPTSKGGGGAGEGFDVTKSGDARVGLVGFPSVGKSTLLNKLTGTFSEVASCEFTTLTCIPGVIMYKGAKIQLLDLPGIIEGAKDGKGRGRQVISTARTCNVILIVLDAIKPITHKRLIEKELEGFGIRLNKTPPNLTFRRKDKGGINFTSTVTNTHLDLDTVKAICSEYRIHNADVSLRYDATADDLIDVIEGSRIYTPCVYVVNKIDQITLEELEILDKLPHYCPVSAHLEWNLDGLLEKVWEYLDLVRIYTKPKGLNPDYEDPVIVSSKKKTVEDFCDRIHKDMVKQFKYALVWGSSVKHKPQRVGKEHELDDEDVVQIIKKI

SEQ ID NO: 64753 - protein, 281 aa, Zea mays
  Clone ID: LIB4667-018-A12_FLI.pep
EYARLLVARKMEVATATEASAPAASGGAAGQSHPFPWLDAAISEPYYFLHLLAFFSYFAARSAALSADDGGELHDRLLRREIQAVLVFLVLFVVKIVKEETWEAVIADSLLYAKGLLLAVTLVIDCWLAFAYFLGFLVIYAVAQQPPYDGLGHSNHLTPLQLESLLTEEPTSRFWLVEFRTSFSAKCVQASSILPELSIVYSNKNISFGTIDLGHFPNAAAKFGISMWDHLPTYILFDKVTEVSRFPEITSESKVFVPKVTKKLLCQHFDLDRRLIGYLST

SEQ ID NO: 64754 - protein, 225 aa, Zea mays
  Clone ID: LIB4667-020-C6_FLI.pep
SNPQTLSTFFPCSIRAAASPATAAMARRRKTDAPPRLDEADRTLYSTFCGAANSLSQLYAQAMAQQKLNFHAGERHALEKLYQWILRKHDEEARLTVAEIMSHIQHEIDYVGTDAHVSPRVPQHPQIANPFANSVVPPGTGLYGQSAAGFAPRPSVTDQSKNTIFSNALSSPVRRSLQNSHTTQGAGNGGRNAEANLAGANREANSTSSNDTSMDMVSDTNEFYQ

SEQ ID NO: 64755 - protein, 317 aa, Zea mays
  Clone ID: LIB4667-020-E4_FLI.pep
LEAGRASTTERTPAHRSSAQPPSLSFPYLASSPLLEISRVRAHSRFWPPPPPSGKMAGLGKAMYAVGFWIRETGQALDRLGCRLQGKYFFHEQISRHRTIMNIFDKTPHVHKDAFVAPSASLIGDVQVGSGASIWYGCVLRGDANIIQIGSGTNIQDNSLIHAAKSNLSGKVFPTTIGNNVTVGHSAVLQGCTVEDEAFVGIGATLLDGVVVEKHGMVAAGALVRQNTRIPCGEVWGGNPAKFLRKLTDDEISFIAESAANYSNLSKVHAAENAKPLEKIEFEKVLGKKFAHQDEYDSSIGVTEGAPPELTSPNPAQ

SEQ ID NO: 64756 - protein, 155 aa, Zea mays
  Clone ID: LIB4667-020-H5_FLI.pep
GTPSKVKMLWRAVRSMDVIMHSSSFLLPKLYQPVNKPVKNYALVVLNQHLPRFMPRLWDHANLRICADGGANHIFDEMYQITNDEDKKSTRNKYVPEIIEGDMDSIRPEVKLFYSSQGSKISDKSHNQETTDLHKCISRTHHCTPDDEKPNVNQR

SEQ ID NO: 64757 - protein, 197 aa, Zea mays
  Clone ID: LIB4667-022-C7_FLI.pep
LGFYIIASLCLIDLIPYIRGRRFFRISRICWSPVRVCCTGFGITETMVKAVAVLAGTDVKGTIFFSQEGDGPTTVTGSISGLKPGLHGFHVHALGDATNGCMSTGPHFNPVGKEHGAPEDEDRHAGDLGNVTAGEDGVVNVNITDSQIPLAGPHSIIGRAVVVHADPDDLGKGGHELSKSTGNAGGRVACGIIGLQG

SEQ ID NO: 64758 - protein, 358 aa, Zea mays
  Clone ID: LIB4667-022-C9_FLI.pep
THRVGRGKGVGADPAVALSRIEYDLTHLRPSFLAPKMSGHGDTATSAKMAKLKELLQKSENHICADCGASDPKWASANIGVFICVKCSGVHRSLGTHISKVLSVTLDKWSDSEVDSMIEVGGNSQANAVYEAFIPEGYQKPHSDSTQEEREKFIRSKYELQEFLKPSLRIVSHQPSDSGKHAGNASHSDGSKSQVGMIEFIGILNVKVIGGTNLAIRDMSSSDPYVVLTLGQQKAQTSVINGNLNPVWNEELKLSVPQQYGPLKLQVFDHDMVSKDDLMGEAEIDLQTMINAAAAFGDPELLGDIQIGRWLKSEDNALVRDSAVVVSGGKVKQGMALKLQHTESGELELEMEWMPLNV

SEQ ID NO: 64759 - protein, 401 aa, Zea mays
  Clone ID: LIB4667-022-F12_FLI.pep
LEAGRENPVESGCSWQHHPPPMAPQLAAAGPTLYAPRFGTALPCRARTRKPVSRRRAALPKDEDYYLIDADESIGDGFSFSGGKYGDGPSKSDEWFAQGKMVNAYPVYGDKGKAKDPFFGLTMGSGSQSSYDIFRWFCVEAGSSSSPKVLLIHGLPSQAYSYRNVMPVLADKYHAIAFDWLGFGFSDKPQPKYGFDYTLDEYTSSLEFLVNAVAPDKLSIVVQGYFAPVAVKYASEHQDKLNHLVLVNPPITDKHLNLPSTLASFSNFLLGEIFSQDPLRASDKVLTSCGPYMMKEEDAMVYRRPYLVSGSSGFALNAISKAMKKDLKAYIESMRSILRSSSWKTKTTVCWGMRDRWLSYDGVEEFFGGLNQKIVELPMAGHHVQEDRGEELGNIIKSILR

SEQ ID NO: 64760 - protein, 252 aa, Zea mays
  Clone ID: LIB4667-029-D4_FLI.pep
PTSDPSTREDVFARRVLQTLPPISKAYGTLCFFTTVLVQLQILHPLFLYLDYPLVFKKFEIWRLLTSFFFLAPFSMKFGIRLLMIARYGVMLEKGAFDKRTADFLWMMIFGAISLLVLSIIPLFNSFFLGIPMVSMLLYVWSRENPNAQINIYGLVQLRSFYLPWAMLLLDVIFGSSLMPGLLGIMVGHLYYFFAVLHPLATGKSYLKTPKWVHKIVARFRIGMQANSPVRPPANGNSGSGVFRGRSYRLNQ

SEQ ID NO: 64761 - protein, 364 aa, Zea mays
  Clone ID: LIB4667-030-C12_FLI.pep
APARQKQLSRCFRTPPMASLSSPSLLSSFLGDRLALSTRPLLLRSAVPGSRRLAYQATRTLCNLVDILFNRRNQDDAPENNPRRLRPGKVSPRLSVPNHIQRPPYVNSRQQRPGMNNGPEIHDENGIECMRASGKLAAQVLKFAGTLVKPGITTDEIDKAVHQMIIDNGAHPSPLGYCGYPKSVCTSVNECICHGIPDSRPLEDGDIINIDVTVYLNGYHGDTSATFLCGDVDDEAKKLVKVTRECLDKAISICPPGVEIKQIGRTIQDHADKFKFGVVRQFVGHGVGKVFHAEPVVLHFRNNEWGRMMLNQTFTIEPMLTIGSINPVMWSDDWTAVTEDGSLSAQFEHTILITEDGPEILTQC

SEQ ID NO: 64762 - protein, 207 aa, Zea mays
  Clone ID: LIB4668-004-C12_FLI.pep
RGRPGLLSSDLSKLATQRPYTHQPFCSPRERSLSLSTGDDSATAAALRETPRSSPTTSIRVREEEIATETMAADSGARRQPSFTKVDQLRPGTHGHNLILKVVDSKMVVQRGREGGPQGRQMRIAECLVGDETGIIVFTARNDQVDVIRPGTTVELRNAKIDMFKGSMRLAVDKWGIVKAAESSAEWTVKEDNNLSLIEFELVTVTE

SEQ ID NO: 64763 - protein, 185 aa, Zea mays
  Clone ID: LIB4668-004-G5_FLI.pep
LQFIDNGDGSSLGHHDLDELLVVDLAVAVNIGLTDHLVDLLVSQLLAEVGHDMAELSSRDETILVLVEDAKGLLKLLLGVGVLHLPCHQIQELREVNGPIAISINLVDHVLQLCFSGVLAKGAHHSSKLLGSDAAVAILIEEAEGLLELRDLLVRELVRHGRWLRRGHAMGKKGKRWMLVLASLC

SEQ ID NO: 64764 - protein, 239 aa, Zea mays
  Clone ID: LIB4668-007-E12_FLI.pep
CLLMTMESPTTAAGGELESYFSLGLTVSHSQKDNAEFPKVLLLLSAYLDKTVQQNEELLDSSKIKESTTIFHGQRVPELSIKLYAERIFKYAKCSPSCFVLALIYMERYLQQPNIYMTSFSVHRLLITSVVVAAKFIDDAFFNNAYYGRVGGISTREMNMLELDLLFGLDFRLKVDIETFESYCLQLEEALVLVLERPIQVQEANVTKHLICNSSADETCKHELGLERYSSQAVQGCSW

SEQ ID NO: 64765 - protein, 220 aa, Zea mays
  Clone ID: LIB4668-010-D2_FLI.pep
SRPAGIPTVKFCEFGGTAPPTSTISATPQEKKRAKRGHQLTAERKRRRATNPSPRPPPSPRTMSMAASSRLLWASRAAAYLKISTFPRAFSTVLKDLKYADTHEWVKVEGDSATVGITDHAQDHLGDVVFVELPEVGISVSQGKNFGAVESVKATSDINSPVSGEVVEVNEKLSEEPGLVNASPYEKGWIIKVKLSNSGDLNSLMDDDKYSKFCEEEDNH

SEQ ID NO: 64766 - protein, 245 aa, Zea mays
  Clone ID: LIB4669-004-G5_FLI.pep
RSEGRKRTKGGLSLAVAVAGSRPPNPAAPAHLSSASAFAFLYRFRSFAGGNYGMGGGSGSFLKVLVNNMDVLAGPLVSLAYPLYASVRAIETKSAVDDQQWLTYWVLYSFITLFELTFAPVLEWLPFWSYAKLFFNCWLVLPQFNGAAHVYEHFVRPMIVNQQVVNIWYIPKKDESSRPDDVISAAQRYIEQNGSKAFENLVNKFKSSNPRRSILEEVEVERRARIQLESEAREVNPFFNPEYQY

SEQ ID NO: 64767 - protein, 235 aa, Zea mays
  Clone ID: LIB4669-011-C3_FLI.pep
DANGCLCGWFGCIRAGISRDSMHKRRATGGKQKAWRKKRKYELGRQPANTKLSSNKTVRRVRVRGGNVKWRALRLDTGNYSWGSEAVTRKTRILDVVYNASNNELVRTQTLVKSAIVQVDAAPFKQWYLTHYGVDIGRKKKTPAAKKDNAEGQEVEAAAEETKKSNHVTRKLEKRKEGRTLDPHIEEQFGSGRLLACISSRPGQCGRADGYILEGKELEFYMKKLQRKKGKSAVA

SEQ ID NO: 64768 - protein, 375 aa, Zea mays
  Clone ID: LIB4698-002-C7_FLI.pep
LSCQVLDLIISVLLIRMGVYLSTPKTDKLSENGENDRLKFGLSSMQGWRATMEDAHSALLDLDSETAFFGVFDGHGGRVVAKFCAKYLHGQVLKSEAYSTGDLGTAVHRAFFRMDEMMQGQRGWRELSALGDKINKFSGMIEGLIWSPRGSDSNNQQDDWASEEGPHSDFAGPTCGSTACVALIRNTQLVVANAGDSRCVISRGGKAYNLSRDHKPELAAERERIMKAGGFIHMGRVNGSLNLSRAIGDVELKQNKFLPPEKQIVTANPDINVVELCDDDDFVVVACDGIWDCMSSQQLVDFIHERINTESSLSAVCERVLDRCLAPSTIAGDGCDNMTMILVQFKKPVDRNKKAEAAGQSASNVDEAKSRVAEE

SEQ ID NO: 64769 - protein, 262 aa, Zea mays
  Clone ID: LIB4698-004-D7_FLI.pep
GRPIYFLTLIPPGTCPGRREPLSPRPRAPEWPSPSLGLLAHAARLPRPHPPPPPRARRRALCCLLCTQDLRPQELSPIPRRCSRPARGGSTLPHLQLHAVSTAWNPGPPTPPHLHRLESRTVGAAVPCLLPRLNCVRVLANSDKGSALPYCGAMAAKIRVVMKSFMSQSNQVAGLLPFTKKVGLPESRALYTVLRSPHIDKKSREQFSMHVKKQFVELTAKPHELHKKFFWLKRLRIPGAQYEVQISFKTRLDMASLRSQAP

SEQ ID NO: 64770 - protein, 336 aa, Zea mays
  Clone ID: LIB4698-004-H8_FLI.pep
MAAAGTIPGAAAAIGASVSQRQRRVGAPSFVAAYVSEGTRLVCRRQLRPAPVLASSFISLSHPARRRFLCDAAAGASSGPAGEAKPQGFAERYPALVTGFFFFLWYFLNVIFNILNKKIFDYFPYPYFVSVSHLFIGVLYCLIGWSFGIPKRAPINSTLLKQLVPVAVCHAIGHVTSTVSFAAVAVSFAHTIKALEPFFNAAASQFILGQPVPLTLWLSLVPVVIGVSVASLTELSFNWTGFINAMVSNISFTYRSIYSKKAMTDMDSTNLYAYISIIALFVCIPPAIIIEGPQLVQHGFKDAIAKVGLTKLISNFLWWAYSITFITRLLQTHWSG

SEQ ID NO: 64771 - protein, 315 aa, Zea mays
  Clone ID: LIB4698-005-A8_FLI.pep
KSRSGFKPFDPKSALHASPPATPPAVVALPALLLTSNPAGAQHLPTMPRNFRKRGIEQDTDDRSDDEDTRRIALEEIKYMQKLRERKLGIPADLAAASTNGSSARGLLGTGAAVAGEAEKEDLVLQDTFAQETAVTIEDPNMLRYVETELAKKRGKMVDVGHKEEMDHVDELYTVPDHLKVKKKNSEESSTQWTTGIAEVQLPIEYKLRNIEETEAAKKLLQEKRLARKPKPDANIPSSYSADYFHRGKEYDEKLRRENPGLYKDNDSRPSGNPGGKATDTKNPDGVGAGRREAASDELMLQRFRKREKFRALRR

SEQ ID NO: 64772 - protein, 515 aa, Zea mays
  Clone ID: LIB4698-005-F8_FLI.pep
TYQSRSNDELACIITSLATSLTHPVSCRTRNVDPAMAATPTIVLVPVWGIGHFVPMLEVGKRLLARSALPLTVTVLVMPLPAEAKRASEITEHIRQQEASGLAIRFHHLPAVEPPTDHSGIEEYISRYVQLYSPHVKAAVAGLTCPVAGVVVDIFCTALFDAAHQLGVPAYVYLITSAAMCALLLRSPTLDEEVAVEVEFEQMEGGVDVPGLPPVPASCLPTGLENRKIPTYRWFLYNGRRYMEAAGIIVNTIAEAEPRVLAAIADGRCTRGVPAPPVYSIGPVIPSTPPAEQQAQECVRWLDSQPPSSVVFLCFGSGGCFTAPQAHEIAHGLDRSGHRFLWVLRGTPEPGTKLPSDGNLAELLPADFLARTKDRGLVWPTKAPQKEILAHAAVGGFVTHCGWNSVLESLWHGVPMVPWPLGAEQHYNAFTLVADMGVAVALNVERKRKNFVEATELERAVKALMCDGETARKVRDKVMEIKAACRKAMEEGGSSNMSLQRLCDALVEGAVHPGK

SEQ ID NO: 64773 - protein, 442 aa, Zea mays
  Clone ID: LIB4698-005-G9_FLI.pep
RGRPGSGSSKHHGEGHDSSPSLPHHAFPFLGPLAEPRREHLAADHQRAQRGLPRLLVAAQGPEAHHAGAAQLPGLRVRRGQALRLVLRGGGAAPAAVARGLGRRILRPRRLRGPVPLPRQRRPPLLAPVPAHLPGRERHLLDQHRLLPPLHPQLRQQPQPRRREPRRQLPRPQRQGLHQPGGLHTRPPGHLQGQDLPPPQCRRAHARHRRGGAVAQGGGPHGHGRGPGGGQHGRGIPRHVRHHARHGGLRRGWQHRLHVRRRAVVEGARGQPRRAAGHPRAHPAGAQGPGEPPQDTGDQAGEQDLRPRHRRRRRRRRGGHRREQGRRRRRHGETAGGDRRPPAAEEARLLALLLQLHVQWHPGPGVLEQPGTDRRVAAARADFHARLAVVFVWILRPPAPVLLGLLLREVSTKLINIYEDSIGSRFSFKFLDRPPMRVVVFN

SEQ ID NO: 64774 - protein, 308 aa, Zea mays
  Clone ID: LIB4699-002-D1_FLI.pep
FLENRCLFLAARRQAVAESGTGHHVPSRRFLLPALPFPRSESIKPADLASGASTASGQASGGASSHEMVCIGSLLRALVLRAASSAGRRRGPRILCGRATDVRVTPRHGHGWRGFRAVTGRMMLDSSESASSAAAAAAEAGAGAVAGQAQPQRRAVGAVPQAHDGGYASGGWEREDGKLSCGYSSFRGKRATMEDFYDVKLTEIDGQAISLFGVFDGHGGSRAAEYLREHLFENLLKHPDFLTDTKLAISETYQKTDTDFLESEASAFRDDGSTASTAILVGDRLYVANVGDSRAVISKAGKGIAYWK

SEQ ID NO: 64775 - protein, 259 aa, Zea mays
  Clone ID: LIB4699-003-F9_FLI.pep
DVIEPAEPVAGARRMGTEADAAAVDSLRSQIPFQTDGELILPPRDVGLVLVDLCNGFCTVGAGNLAPVAPNKQISKMVEEAARLSKLFCDRNLPIFAFLDTHYPDKPEPPYPPHCIIGTGEENFVPDLEWLEKEPNVTIKRKSCIDGYISCIEEDGSSVFVDWVGKYQIKTVLVLGICTDICVLDFASSTLAARNIDRVPPLRDVVIYSEGCATYDLPVEIAMNIKGALAHPQDLMHHIGLYMAKGRGAKVVDRVVIEP

SEQ ID NO: 64776 - protein, 470 aa, Zea mays
  Clone ID: LIB4699-004-F4_FLI.pep
RPPSLRRAAARAAMEVFYYVVFGALAAIVAGLELGKSGKDRVATTSAFNSFKNNYVLVYSLMMSGDWLQGPYVYYLYSQYGFDKGDIGRLFIAGFGSSMLFGTIVGSLADKQGRKRACITYCISYILSCITKHSPEYRVLMIGRILGGIATSLLFSAFESWLVAEHNKRGFDPQWLSITFSKAIFLGNGLIAIVSGLFANLLAENLGFGPVAPFDAAACFLAIGVAVIMSSWSENYGDPSDSKDLMAQFKVAAKAIASDEKIALLGAIQSLFEGSMYTFVFLWTPALSPNEEDIPHGFIFATFMLSSMLGSSVASRLLARKLKVEGYMQIVFSISAVTLVLPVVTNILVPTSSVKGGSISIGGSLQLLGFCTFEACVGIFWPSIMKMRSQYIPEEARSTIMNFFRIPLNLFVCVVLYNVNAFPITVMFGMCSIFLFMAAILQRRLMVVSDLHKSSTKAQEMIGEDEPLNP

SEQ ID NO: 64777 - protein, 286 aa, Zea mays; identical to SEQ ID NO: 39209
  Clone ID: LIB4700-001-C5_FLI.pep

SEQ ID NO: 64778 - protein, 251 aa, Zea mays
  Clone ID: LIB4700-002-F8_FLI.pep
LEAGRDLPPRRPSLSLSSAAQSPNRGGSLALQGAAAAPGFVHRLVCLPPAPPRRPMALLAPAISGEVGLRLLLAPLSSNIVMRTASCAVGIGLPVYSTFRAIEKKDEQEKERMLLYWAAYGSFSIAEVFADKLLSSVPLYYHVKFAILVWLQFPSNSGSKHVYKRYLRPFFLKHQAKIDRFLNILSKGLTKFVSSHEDEIRFIENMAIRGATTANHIVNGLDQPEETQAVNTIEGPNTTVTEEAGVSGTET

SEQ ID NO: 64779 - protein, 478 aa, Zea mays
  Clone ID: LIB4700-003-E11_FLI.pep
VRPVPLPSPVPAAKPTTNVSDPIQAAMDFFKSILAEPDPDPASPPPEQEPEPEPEPAGSASSSSGGGWGFGGLLKTLTSQSETVLEAYRRDLAEFGTGLRRETEVLREAAARAARDLPSSAHALDGLADIVAQGKEALSQAAAAAGGGPQASDGGDSDPSSASGTHVRYSRFEAQLRALQADPATFTSDPEDAEDFAAWSKGFILDEREEEIEALCYDSDALEAMADRLVPDAVPREVFWPRYFYRVHKLKQQEDARAKLVQRVIAQEEDEDLSWEVDDDEEEEEEQQKDSTEELAEQRQEPIKEEVRQDMAEKENVERIVEESGVETVEEAPGLVKEEKNAAEPQPIVLGSSLVVVDKEEEREKAVLGSSFGVVGEGENAEPSKSNVEESGAKKEGAKHETSDSSKDSDYSIVSRQRTAEEEDLEWDEIEDLGEHEEKKGGIQTSSPALKEELRKRLSIAEDDEDLSWDIEDDDDNA

SEQ ID NO: 64780 - protein, 357 aa, Zea mays
  Clone ID: LIB4700-005-A6_FLI.pep
SLALFLSHPRDPVSPLLASPPQPMGSGEEPSQMRRALVDSLAGAISGGISRTVTSPLDVIKIRFQVQLEPTTSWGILRRDIYGPSKYTGLLQATKDILREEGLPGFWRGNVPALLMYMPYTAIQFTVLHKLKTFASGSSKTEDHLHLSPYLSYVSGALAGCAATIGSYPFDLLRTILASQSEPKIYPNMRSAFVDIIKTRGVQGLYSGLSPTLVEIIPYAGLQFGSYDTFKRSMMTWNRYKYSHLNFGSEDDSVSSFQLFLCGFAAGTFSKAACHPLDVVKKRFQIEGLKRHPRYGARIESSTYKGMYHALKEIVAKEGFGGLYKGLFPSLVKSAPAGAVTFVAYEYISDWLESILM

SEQ ID NO: 64781 - protein, 444 aa, Zea mays
  Clone ID: LIB4700-005-B2_FLI.pep
FYTSATCSLASASSRSPPRRRRVSLTGQSPSTPLTRHSRNQSSSRWPHPDLGLDMGFMLVRKPRPGDEKPDLANWMRCFLSQRLSQPAAAAEETANAEGKAAGRREEEEGGGDDADHLVVMVNGLYGSSADWKFAAEQFVKRLPGKVYVHRSQSNYSKLTYDGVDLMGERLAEEVRQVVQRRINLRKISFVAHSLGGLVTRYAIGKLYEPAMDETSSCDIDKPSDEQNVRDVGKIAGLEPINFITSATPHLGSRLNKQLPFLFGVPLLEKTAAGTAHFIVGRTGKHLFLTDNDNGKPPLLLRMVEDCDDGKFMSALRCFKRRVAYANVTYDHIVGWRTSSLRRQHELPKLKLTANDEKYPHVINVDKGNLEDHGQEGSVEDSLADSYEEVMIRGLTQVAWERVDVCFHKSWLRYNAHNNIQVRIHPINSDGEDVIYHMIDNFVV

SEQ ID NO: 64782 - protein, 392 aa, Zea mays
  Clone ID: LIB4701-001-C9_FLI.pep
TPERRGEEWRAEESSSQPAAAAESPTPTPQAKMLSSSTSTLRLHQLTRPHRRHPPAPALGVATHLASPRRWRGHAPGAGAPLRARPQRIRAVDAAQPFDYESRAAGLLEERQRLKIAIVGFGNFGQFLARTFARQGHTLLAHSRTDHTALATTLGATFFADPHDLCECHPDVVLLATSILSAEAVLRSLPVHRLRRNTLFVDVLSVKEFPKNLLLSSLPPDFDVICTHPMFGPESARDGWDGLPFVFDRVRVGDCPARRARADAFLNIFEREGCRMVEMSCAEHDAHAAETQFLTHTVGRMLAMLELRSTPINTKGYETLLRLVDNTCSDSFDLYNGLFMYNKNSTELLNRLEWAMDSVKKRLFDGLHDVLRKQLFEGSPHAPDVSSSNVRK

SEQ ID NO: 64783 - protein, 352 aa, Zea mays
  Clone ID: LIB4701-002-G7_FLI.pep
SVSSPDAQRSRAGNGTVRERERERRRAKEAEQSNSSRSRKRRREGPGDSTAARKSKSKMLRGGTGMLGVVNFITFLISIPILGGGIWLASRANSTDCIRFLQWPIIVVGLVLMVVSLMGFAGACYRQTWLLRLYLFAMFFVVLALLFFVVFAFAVTDRGAGQVVMSRRFPEYQLSDYGGWLRDRVADPQYWATISACLRDGHACAGMRRLARDPNTGMLVPETPAMFYGRNLSPIQSGCCKPPTSCAFTYMNETYWEQNPGVPTVTNDPDCSRWSNDQQMLCFQCDSCKAGVLAGIKKSWRKVAVLNIVVLIILVIVYVAGCAAFRNAKRIDNDEPVGMARMTKSHPSRFQF

SEQ ID NO: 64784 - protein, 414 aa, Zea mays
  Clone ID: LIB4701-004-F4_FLI.pep
VRRHHRIPPQKLLSSHRPAPSFSSPHPHAPPHQTMAPAATSTASAPSSFHSTGRHRARVGARPSLVSLRVRAANPNVTADPAPAFQSVTAFAPATVANLGPGFDFLGCAVADASLSLGDTVTATLDPSLPPATVSIASVTSPSRPNLAERLSRDPLRNCAGVAAIAALRALGVRSHAVSIHLTKGLPLGSGLGSSAASAAAAAKAVDALFGSRLGRDDLVLAGLESEKAVSGFHADNIAPAILGGFVLVRSYDPFHLVPLSFPPALRLHFVLVTPDFEAPTSKMRAALPRQVDVQQHVRNSSQAAALVAAVLQGDAGLIGSAMSSDGIVEPTRAPLIPGMAAVKAAALQAGALGCTISGAGPTAVAVIQGEERGEEVARRMVDAFWSAGKLKATATVAQLDTLGARVIATSSLN

SEQ ID NO: 64785 - protein, 479 aa, Zea mays
  Clone ID: LIB4701-005-G5_FLI.pep
SLSLLKKELYLWGLGRTQSYFLFHSSAEVMAHLLGLAICGGRGRRVQLIPGLDPGDHGVTELDKVGVNRAQLLLHLSREVDVALLDGVAVLGDGHVLEEGDDVLLPEDALVFLLQVNEGVASLAVPDVWQASLDSQAQVVADDLHTPSCPHVVVATDGLAITHETKVHSRANEIPVEGKVHATHGEQGSLGDCHDSINIPLIPLLGLDQLCGSIIVRDVQPQAVGDGGVSTLPEAEGVSTHKVSTLTVGVVQGVEEERGGWAEEVLDVLLKSIDILARWVLGNEAVVVDGVDVLLLGDHVAEAAAGGVLEGDAGGLGPEDAVDVVAVVELVVEALGHLDGLGRVAVLHDDEVVGLEEGPPHLQEVEVADRRDHDVELVLEQRRGGGRRPRDRHRARHCRSRWWWRSHSRPPDLDLSAPPLSAAGPGGGGEQRRLGGVGGSGGRRWSLYRRPRMDPPPLLIFSTLWSSLCLCFFILIVFV

SEQ ID NO: 64786 - protein, 514 aa, Zea mays
  Clone ID: LIB4701-006-A8_FLI.pep
SRPAGVPKPHRLNCFAFDCGRRRRTKNQKMTPCALTVDSLNPKVLALADHLGDNAIARRAQCIQNEIEAEPGSHPFREIIDCSLSNPQSMGQRPNKFFREVLALCDYPHLLEQSGTNSLFSSGAIARAREILDLFPGRATGGYSHSQGTEGLRDIIAAGIAARDNFPCNADDIFLTDGAAPPVHMMMHLLIRDQKDGILCPVPSHSLYTSAMLLQGATLVPYFLDESRGWEVSMSDLKKQLDSARSMGVFVRGLVVINPGNPTGHVLVEANQREIVDFCRNEDLVLLADEVYQENIYADEKGFHSFKKIARSMGYGEGDISLVSFHSVSNGYYGECGRRGGYVEVTGFNSDVKKQVYKVVSLSSCSNISGQILMSLVMNPPQVGDESYASYHAERHGVLSSFARCAEAMVRSFNGLEGVTCSEAEGAVFVFPSVRLPKKAVAAAEASNTQPDAFYALRLLETTGIVVVPGSVFGQMHGTWHFRCTVLPHEEKKMTVIISSFVAFHRAFMEEFRD

SEQ ID NO: 64787 - protein, 180 aa, Zea mays
  Clone ID: LIB4701-006-D5_FLI.pep
VVLEVEGTQCANIVEHFGFTHLSAGDLLRAEIKSGSENGTMIENMIKEGKIVPSEVTIKLLQEAMIKNENDKFLIDGFPRNEENRAAFENVTKISPAFVLFFDCSEKEMEKRLLGRNQGRVDDNIETIKKRFKTFVESSLPVIEHYNSRDKVKKIDAAKPIPEVFEDVKTIFAPYAPKAE

SEQ ID NO: 64788 - protein, 547 aa, Zea mays
  Clone ID: LIB4702-001-E9_FLI.pep
EDSPRSERGRQVSETDHQTPPAQPRDPTSPRSMAASTAAARRLLLALAVLAACLGSAPHGAVALRSLGVGGAKAADGDAAVDLDASNFTAFLQTSPESFAVVEFFAHWCPACRNYKLHYERVAKLFNGPDAAHPGTVVMARVDCASKVNVDLCNKFSVDHYPYLVWGPPTKFNLVQWKPKQENSELELIDDGRTADRLLKWINKKMGSSFNLDDKKYENESMHPKNTSDPEQIVRAIYDVEEATSHALQIILEHKMIKPDTRDSLISFLQILVAHHPSKRCRRGSAELLIDFDDHWHTNLSLSLEDSTTLLKGAGEKVCGNGVPRGYWIFCRGSKKETRGFSCGLWVLLHSLTVRIGDGESQTTFTSICDFIHNFFICEECRTHFYEMCSSVSVPFKSARDLALWLWTAHNKVNERLMKEEKELDNADPSFPKIIWPPKQLCPLCYRSSSRTADGAMQVEWNEDEVFNFLVNYYGKMLVSSYRETSMQSFQVGSISDDSSASSAATVPIGAALGIALASCTFGALACFWRTQQKNRKYYHLRSLKKI

SEQ ID NO: 64789 - protein, 514 aa, Zea mays
  Clone ID: LIB4702-004-C4_FLI.pep
GELLHLLCDTLYIYPRQWAVASSVEGGEGGGQRKQGQRKQSSRAKASVSMMGPLPLRRRVGVLLFLALVLLGGGGADAGTTSSYRRKLEATVEMPLDADVFRVPPGYNAPQQVHITLGDQEGTAMIVSWVTANEPGNSTVAYGEDPARMERRADGAHTRYDYFNYTSGFIHHCTLRNLKHATKYYYAMGFGHTVRTFWFTTPPKPGPDVPFKFGLIGDLGQTFDSNITLSHYESNGGDAVLYVGDLSYADNHPLHDNNRWDTWARFVERSVAYQPWVWTAGNHELDFAPELGETTPFKPFAHRYPTPYRAAGSTEPFWYSVKVASAHVVVLASYSAYGKYTPQWAWLQAELARVDRKTTPWLVVLTHSPWYNSNNYHYMEGETMRVQFERWLVDAKVDLVLAGHVHSYERSHRVSNVAYDIVNGKSTPVRNADAPVYVTIGDGGNIEGIADNFTRPQPGYSAFREASFGHATLDIKNRTHAYYSWHRNHDGAKVVADGVWFTNRYWMPTDDDTN

SEQ ID NO: 64790 - protein, 496 aa, Zea mays
  Clone ID: LIB4702-004-E1_FLI.pep
AHHQVETMGRTEAADGAESGGLGVGETVRELREAYEGGRTRSLAWRQAQLRGLLRLLEEKEVEAFQALHKDLGKHHAEAYRDEVGVLIKSANGALQQLGKWMAPEKVRVPLIAWPATAQVVPEPLGVVLVFSCWNVPLGLSLEPLIGAIAAGNAVALKPSELSPCTARFLGDNIGRYMDSSAVKVVQGGPDVGVQLMEHRWDKVLFTGSPRIARAVMAAASRHLTPVALELGGKCPCIFDAMGSARDLQISVNRMIAGKWSSCAGQACIAIDYVLVEERFAPILIKVLKSTLKRFFPEADHMARIVNERHFERLSNLLKDRSVAPSVLHGGSMDSKNLYIEPTILLNPPLDSAIMTEEIFGPLLPIITVKNIEDSIAFVKAMPKPLAIYAFTRDAALRRRIVDETSSGSVTFNDAVVQYAIDGLPFGGVGQSGFGQYHGKYSFEMFSHKKAVMKRGYLVELTLRYPPWDESKVTLMRYLYRFNYFAFVLSFLGLRR

SEQ ID NO: 64791 - protein, 326 aa, Zea mays
  Clone ID: LIB4702-004-H9_FLI.pep
RPPSSMARRLPLWTALLLPFLLTGVGTAVAASPPHDECPVPTIVESVLSTRDACSTLDLGNPVGVMEGDEFTLATAVNLLHANKDDYIAVLFYASWCPFSQECKPNFETLASLFPTIRHFAFEESAIRPSIISRYGIHGFPTLFLLNSTMRVRYHGPRTVKPLAAFYTDVSGINASVNVKSTAGETMVHPLHDIERKKDAEQENCPFWWARSPEKILQQDTYLALAITFVILRLLYRLFPKIDSFARWAWRRHNLFANLMGAHEYFLTYLEQGRQKFHRLYPSSSKRGNLQEGAMNATAWASKSLASVSIGEPSAIGRTNSTSELR

SEQ ID NO: 64792 - protein, 411 aa, Zea mays
  Clone ID: LIB4702-005-C3_FLI.pep
SRPAGTDSSKSPPQNPTTSQRWHLTGRTSSMLAAAWRLSQRAVTSPLLGIGRSQIRNPFSTMASLSPAAASPKRLRVYSSAAADGDGAGSGKRVGTHNGSFHCDEALGCFLIRLTSQFAGADVVRTRDSQILDTLDAVLDVGGVYDPSRHRYDHHQKGFSEVFGHGFNTKLSSAGLVYKHFGKEIIAKELGVNEDHEDVHCLYLAIYKSFVEALDAIDNGINQYDTDQPPKYVNNTHLSSRVGRFNLDWTDPDQSLEKENAAFEQAMVLAGSEFMESVRFHVKSWLPARSIVLECLLSKGNIDPSGEIMVLDRFCPWKLHLFELEEELKTDPLTKYVLYQDERSKSWRVQAVAVAPDRFESRKALPEKWRGMRDDELSAETGIPGCVFVHMSGFIGATRPTREHWKWRELL

SEQ ID NO: 64793 - protein, 595 aa, Zea mays
  Clone ID: LIB4702-006-F9_FLI.pep
LLAAGRQIRQSSSPAGRNPSDMALLPGAARRLLCSLFLCLWLSTLARAATRRYEWEVSYQFKSPDCVRKLSATINGQTPGPTIRATQGDTVEVKVRNSLLTENLAIHWHGIRQIGTPWADGTEGVTQCPILPGDTLTYAFVVDRPGTYMYHAHYGMQRSAGLYGVVVVVVAAAPGAKADDAEPFAYDDEHHVLLNDWWHNSTYELAVGLASVPMVWVGEPHSLLINGRGRFNCSAAAVPGTCNATSPECDTPVFAVVPGQTYRFRIASVASLSALNFEIEGHEMTVVEADGHYVKPFVVKNINIYSGETYSVLIKADQDPNRNYWLASNVVSRQPATPTGTAILSYSGDRAPPSTTPPTGPAWNDTMYRFQQSVATVAHPAYVEPPPPRADRTILLLNTQNKIDAHTKWALNGVSFTLPHTPYLVAMKRGLLDTFDQRPPPETYAYQGYDVYAPPQNPNATTSDGLYRLRFGSVVDVVLQNANMLAPNKSETHPWHLHGHDFWVLGYGIGRFDPAVHPASYNLKDPVLKNTVAVHPYGWTALRFKADNPGVWAFHCHIEAHFFMGMGIVFEEGIQRVASLPPEIMGCGETNGGHR

SEQ ID NO: 64794 - protein, 553 aa, Zea mays
  Clone ID: LIB4703-002-G6_FLI.pep
SAPIATPHRAPVLRYTHCQLISKYTYNHRSMGMVVNSSAVPFSIALLAVVIAAVVITKAALGRRRRRRTAAANNPAPPPRNDVDTGRRRPPAAITGVTSAVRLVHALATKGFEATLYEQYAKLGSVFTVSLFGMKTTTFLAGPDVSAHFYQGPDSEISHGDLLEFTVPMFGEGVAFAVDAATRAEQHRFYLDALKPARLRCHVAPMLQEVEEFFARWGQQGTVDLKQELEQVLMLITARCLLGKEVRERMLHEVFSAYRDLTENSLHLTSLLFPYAPTPAARRRDRARATLSGIFSEIVRSRRRSGRRAGDDDGDVLQSLVDARYRDGRGTTEAEVTGLVIAILFAGKHTSSATSTWTGARLLRHAECLDAAVDEQRRVVAERGSGVDYDALAEMGFLHCCIKEALRMHPTAPLFLRRAHRGFTVRTREGAEYDVPSGQTVASPLLINHYIPYVYRDPHVYDPRRFGPGREEDRVGGRFCYNAFSGGRHACPGEAYAYMQVKVIWSHLLRNFELKLVSPFPRTDWMKLSPEARGKVVVSYKRRMVPVGSVLEN

SEQ ID NO: 64795 - protein, 555 aa, Zea mays
  Clone ID: LIB4703-003-B3_FLI.pep
TNKSSGSISSLYIRHSPSSPLVSITDSDSDSSHPDRRSAADISPPPYRHHLRRDRSNQINQLAGREERGKGNGRDGGGGPAGGGVGGARETRPSAVQLAAGAGVPAGPHLLLLPRHVQRAVGPRRRRPGRPHHRRQRQHRALRLLRGVRRAGRRRAQPAGPARDAAGRRAHVPALRRLLPLLQPPPGLAGVPRHGGRPARRRRGLPLGGAGRRHDVVPAAQSPGHLHLPLLVPLQPGRRPRRPPPFRPQLQPRGQERERQRRHVHRLHGIHARRRRAHRARAAARQDRPRRRHQGHQGHLLLPGHRGRRDPQALRQLEDAARAAGRLGQQLLLHLPVQQRQQRPLHAPHQGPQQRLLLGRADDRLRRHRLLPRLRLRQPPKEGAVRGRRRRRRRNGHLGRRSGQPAQLQCRAGARPHRFQGRPPLRRALPALLQLRTARCHVPEPYLLDYRRTRQRLPNPQQVRRVLQGGAECGSGGGMAGGQAPHAPHVPADRQLGAHDHQLPLACAAGVPGREGRELLGFVGGGRPGEGQQAVRADQLPLMKKKKDRPRCTSL

SEQ ID NO: 64796 - protein, 445 aa, Zea mays
  Clone ID: LIB4704-001-A10_FLI.pep
SPPLRSTPHCRIAPSTSTLLPEASSLLCFRWYGGMMSRAAVLLCLLCCLAAVGEAASVVGEGEAAELAVSVDPSWRFPSQRLRDAYVALQTWKQQAIFSDPRGFTADWVGPGVCNYTGVFCAPLPRGVPGAGELAVAGLDLNHGDIAGYLPPELGLLADLSLLHLNSNRFCGLVPATLRRLQLLVELDLSNNRLVGAFPAVVLELPALKFLDLRFNDFEGAIPPELFDRPLDAIFLNHNRLRSPLPDNFGNSPASVIVLADNSFGGCLPASLGNMSGTLNEILLINNGLDSCVPPEVGLLREVTVFDVSFNSLVGPLPQQVAGMRKVEQLDVAHNRLSGAVPEAICALPRLKNLTISYNFFTGEPPSCARVVPSDGDRRNCLPNRPTQRTPQQCAAFYSQPPVDCAAFQCKPFVPVPPPPPSYPGPLPPVYPMPYASPPPPAQYR

SEQ ID NO: 64797 - protein, 440 aa, Zea mays
  Clone ID: LIB4704-001-E9_FLI.pep
SGRARNRTGRGSQCVGAVPPLPPRPAFLAASTGRGRSPRATMARSWLITCRGIAKKIRYTNPGANHHISELVAEARRECPNCSYIIDNSDVAMQWPGLPAGVKFDPSELELLEHLEQKVGLGDSRPHVLIDEFIPTIDNDEGICYSHPENLPGMKTDGSNAHFFHRVSKAYGCGQRKRRRTINCSDHTVSDEHVRWHKTGRSKAIYENGVIKGWKKIMVLYKISQRGRKPDRANWVMHQYHLGEEEDEKDGELVVSKIFCQLPNKSMEISETETAYEEPGAPASVIGPKTPKTVTPQPRHPKNSPCETEQSIFILQDQLLLDGEDEPTMPIVSLADDAMNPAWCAVAEEEQVVGEASRAQSNSDEPLLCREDPNSLNDEALLPWDYPILSQCRSEIFDRNLNGYGLPDLHNVDLGTPPDLQLADFQFGSQESLGSWLDRI

SEQ ID NO: 64798 - protein, 516 aa, Zea mays
  Clone ID: LIB4704-002-E7_FLI.pep
GSTMPCSSSSSSNPFHSLASAFPFLSSTSQPPSPPASPAPAAPHLAVPLLLPVSSASESRRGAQPLPGTRMVGAGATGGGNMASGGGGPAFVGQVFTMLDPSGNGLMAVTTRFELPRFLTNRTPMWFKRMLSPSKKTENSPVFRFFMDLNDAVSYVKRLNVPSGMVGACRLDVAYEHFKEKPHMFQFVPNEKQVHAANKLLKSLPQRGRRKKLDGVPVFSAQNLNIAVATNDGIRWYTPYFFDKNLLDNILEASMDQHFHSIMQNRHTRRRRDIVDDSLTSEIIEESAESLLEPPEVQELMNEIGPAGIPLNVVTKAAEIQFLDVVDKVLLGNKWLRKASGIQPKFPYVVDSFEERTAVSIANIATTSSLTASNDDSSCQNNQETQASEPSGDNSSYRNHNNEDHNHFPFSNLLPNIWPGHDRKFKSQESDNKFSRYDADMKSKLQANPLLPKITMVGISMGDGAQMSKANLKKTMEDLTKELEQTSEENMFGDEKDPLFVANVGDYSRITKISSA

SEQ ID NO: 64799 - protein, 448 aa, Zea mays
  Clone ID: LIB4704-002-F2_FLI.pep
SGWCSAAGSPTAMIDRERAEEMQVNNEAPLGCLKPNISQYNSPEQIGGVEGFPENNEKRNDIVAAEKIWEATPNQGLSRPIYRQEFYAWPYIYSDYQIVRQPLPYGFDNQFYQINRDHGFPIENRVQYLPFKMLPQGHPHDAQLQEFQYFVVIDFEATCDKVNNPFPQEIIEFPSVLVNSATGKLEECFQTYVRPTYHQFLTDFCKELTGIQQIQVDRGVPLGEALLMHDKWLEDKGIKNTNFAIVTWSNWDCRIMLESECRFKRIRKPPYFNRWINLRVPFQEVYGDVRCNLKEAVQLAGLTWEGRAHCGLDDARNTARLLALLMHRGFKFSITNSLVWQPAAAPQSTAATCHFSPDRSPDPVVVQLQHQQQQHKPKEALGSPASQVNPSYATPAGGKDRAMYCYCGVLSRWSVVRKPGPMQGRYFFGCGNWTATRRAICPYFAWAS

SEQ ID NO: 64800 - protein, 412 aa, Zea mays
  Clone ID: LIB4704-003-B7_FLI.pep
DYIIQHAYLMVCCRVVHFIYYSIGSSPFIVGTDDDLPPAQNRGLRGRSFSGNVVASAGAFPYMRANNDLESEIHRVEQDAYTGILRAFKVQSDAISWEKESLITELRKELRVSDEEHRELLNKVNEDGTIRRMRELRQAGGSPSGLHHGNMVLYGAEPGSTTKRQRASHSIPLQSAGLQSPMMPSHSVSSAKWGPLQARGTKARTPIPLALPSVDPSSLINHKVYTRWPEDNNFYEATITRYNPVTGEHGLVYDMGTQAESWESVRLCDMAPEDIRWGFDGHLSNRDVWSPSGPMLMRHMTNNGAMAGSIKGRGRLSINETIKDYAPPENGTNRNFDHVDIPNTGSVVMEVKRVLFNPNMPEIEKARKLLKDQEQSLLDAIARLDEASDSDNEDMAMEGRMGSAGERNGITT

SEQ ID NO: 64801 - protein, 537 aa, Zea mays
  Clone ID: LIB4704-003-F10_FLI.pep
PPPPSEAAPPPPRLLPRSPRPPPPIDIPPAHRSMAVGGDDDSMERDFAARLRLAHSPSPATPAAAASSSPTAAGGIAFRAPQEQFTADDFVLGKIYGVGSYSKVVRAKKKDTGRVYALKIMDKKFITKENKISYVKMERIVLDQLDHPGVIRLFFTFQDTYSLYMALESCEGGELFDQIVRKGRLSEDDARFYAAEIVDILEYLHGLGLIHRDVKPENLLLTSDGHIKIADFGSVKPTRDTPIKVLPNSTTERACTFVGTAAYVPPEVLNSAPATFGNDLWALGCTLYQMLSGSSPFKDASEWLIFQRIIARDLKFPEYFSAEARDLVDKLLDVDPGKRPGAGPDGYSSLKEHPFFRGIDWKNLRKTRPPKLAIDANANEDEDSQDSNWLAHMGSVAVNQQSNTVGNNGAPSSSEVRSHISKLASIDSFDSKWQEFLDPGESVVLISKLKKINKLANKKIQLILTDKPQLICVDPSKMVAKGNIIWSDDPSELSVQVSDSSHFRICTPKKVSTFEDAKQRAWQWKKAIEDLQRCQRN

SEQ ID NO: 64802 - protein, 618 aa, Zea mays
  Clone ID: LIB4704-004-B1_FLI.pep
QASQPLPTGAMATMARSGAVRLCCCTSALLMLCCFLLPGALAEERFYEFVVQGTPVKRLCKTQEIITVNGQFPGPTIEVYSGDTLAVRAVNLARYNVTLHWHGLRQLRNGWADGPEFVTQCPIRPGGSYTYRFTVQGQEGTLWWHAHSSWLRATVHGALIIHPRRGVPYPFPKPHTEAPVILAEWWRRDPIAVLRQSMITGAPPNVSDALLINGQPGDLLPCSSQETSIIPVVAGETSLLRINNAAMNTELFVSLAGHRMTVVAADAMYTKPFETDVVLLGPGQTTDVLVTAHAAPGRYYLAARAYASAQGVPFDNTTATAIFQYKNAPGCPTTSGAGAGAGAGGGSTFSGPVGRSSRSSGYLGRAGPQPMLPFLPAFNDTNTATAFSNRLRSPVPVKVPGPVTQEVFTTVGFGLFNCRPGPFCQGPNNTRFGASMNNVSFQLPDTVSLLQAHYHHIPGVFTDDFPALPPVFFDFTSQNVPRALWQPVKGTRLYRVRYGAVVQIVFQDTGIFAAEEHPMHIHGYHFYVLATGFGNYDPRRDAARFNLVDPPSRNTIGVPVGGWAVVRFVADNPGVWLVHCHIDAHLTGGLAMALLVEDGESELEATMAPPLDLPICVL

SEQ ID NO: 64803 - protein, 664 aa, Zea mays
  Clone ID: LIB4704-004-D9_FLI.pep
LGCLTAPPRRGASVVGRDGMDDLKQILARPIQLAEQVIKWSDEAYTFRQECMELKAKVERLAGLLRQAARADLYERPARRIFDDTEKALDKALALVDKCRAHGLVRRVFTIIPAGSFKKMTNQLDNSVGDLSWLLRVSSSAGDDDDDLDAHIGLPPIAQNEPILFLIWEQIAVLYTGNLDARADAAASLVSLARDNDRYCKLIIEEDGVPPLLKLVKEPHLEGQENCALAIGLLGRDPECVEQMVQAGVCLAFAKVLKEGPMKVQAMLAWAVSELAANHPKCQDAFAQHNVIRLLVGHLAFETVQEHSKYAVTSKMSIHSVLMDRKNNAASAVQPDLLDAGEHAGMRYPTGHVPQGKNEIHSLVQSTMAAKPNGGSGKHSNISSTSNAGVAATKQHNASLSGTSTRGREFEDPETKAYMKANAAKALWQLAKGNAAICKNITESRALLCFAVLLEKGEGDVQYNSAMALMEICCVAEQNSDLRRSAFKPTSPAARAVVDQFLRVVEKAEYDDLLIPCIISLGCLSRTFRATETRIIGPLVKLLDEREADVSREAAIALTKFACTDNYLHVDHTKAIISAGGAKHLVQLVYFSEQVVQIASLTLACYVAHNVPDSEELAQAEILTVLEWASKQAYMVQDPVIDNLLPEAKIRLELYQSRGAKGYY

SEQ ID NO: 64804 - protein, 351 aa, Zea mays
  Clone ID: LIB4704-005-D11_FLI.pep
KNNHHTRLPPSPPTLHHPRPAARPAAASYFASAASDPDRAPAMALAFDEFGRPFIILREQEKKTRLRGLDAQKANIGAGKAVARILRTSLGPKGADKMLQSPDGDVIITNDGATILEQMDVDNQIAKLMVELSRSQDYEIGDGTTGVVVMAGALLEQAEKLLERGIHPIRVAEGYEMASKVAFDHLERISEKFEFSADNIEPLVQTCMTTLSSKIVNRCKRALAEIAVKAVLAVADLERKDVNLDLIKVEGKVGGKLEDTELVYGIIVDKDMSHPQMPKRIEDAKIAILTCPFEPPKPKTKHKVDIDTVEKFQTLREQEQKYFDEMVQKCKDAGATLVICQWGFDGEANLC

SEQ ID NO: 64805 - protein, 615 aa, Zea mays
  Clone ID: LIB4704-005-H9_FLI.pep
RGRPGILNRNNRGRGRPAERNTDPTELNSFSTRNPKSLAENPSLPMATAATAMVVPEQPRRRKPAPGRGGVALPAGLSEEEARVRAIAEIVSAMGELSRRGEDVDLNALKSAACRRYGLARAPKLVEMIAAVPEADRAALLPRLRAKPVRTASGIAVVAVMSKPHRCPHIATTGNICVYCPGGPDSDFEYSTQSYTGYEPTSMRAIRARYNPYVQARSRIDQLKRLGHSVDKVEFILMGGTFMSLPADYRDYFIRNLHDALSGHTSANVEEAICYSEHSAVKCIGMTIETRPDYCLGPHLRQMLSYGCTRLEIGVQSTYEDVARDTNRGHTVAAVADCFCLAKDAGFKVVAHMMPDLPNVGVERDLESFREFFESPAFRADGLKIYPTLVIRGTGLYELWKTGRYRNYPPELLVDIVARILSMVPPWTRVYRVQRDIPMPLVTSGVEKGNLRELALARMDDLGLKCRDVRTREAGIQDIHHKIRPDEVELVRRDYAANEGWETFLSYEDTRQDILIGLLRLRKCGCNVTCPELVGRCSIVRELHVYGTAVPVHGRDVDKLQHQGYGTLLMEEAERIAQKEHRSKKLAVISGVGTRHYYRKLGYELEGPYMVKCLA

SEQ ID NO: 64806 - protein, 634 aa, Zea mays
  Clone ID: LIB4704-006-A5_FLI.pep
RKREKSVCWLQPSRMLSLPRTAAAVTVYALVALIAGAGAVAAAAGGGEQPLSRIAIHRATVAPQPGAFVDASPALLGREGGDREWVTVTYSNPRPSKDDWIGVFSPANFNDSTCPPENEWVEPPLLCTAPIKFQFANYTNRDYGNTGKGSLRLQLINQREGFSFALFSGGLSNPKLIAHSKSVTFINPKTPVYPRLAQGKSWNEMIVTWTSGYGTNEATPFVRWGIEGQIQTLSPAGTLTFSRDTMCGPPARTVGWRDPGFIHTSFLKDLWPNLLYTYQVGHRIFNGSIVWGHQYSFKAPPYPGEDSLQRVVILGDMGKAEVDGSNEFNDFEPGSLNTTNQLIKDLKNIDVVFHIGDITYANGYLSQWDQFTAQVEPIASTVPYMVGSGNHERDWPGSGSFYANLDSGGECGVPAQNMFYVPAENREQFWYSTDYGMFRFCVANTELDWRPGTEQYRFIEHCLSSVDRQKQPWLIFLAHRVLGYSSATFYADEGTTEEPMGRESLQPLWQKYKVDIAMYGHVHGYERTCPVYENACVAKGSDLYAGAFTATTHVVVGGGGASLADYTAARARWSHVRDRDFGFVKLTAFNHTRLLLEYKKSRDGSVHDHFTISRDYRDVLACGVDNCPSTTLAS

SEQ ID NO: 64807 - protein, 470 aa, Zea mays
  Clone ID: LIB4704-006-A7_FLI.pep
HSCTPLPTPGAHTHIPFPPQESAATIPSAPHCGIEPNTSTLLPETSSLPCFRWYGAMMTREAVLLSLLFCLAAAGEAVSLVSQGEAAELAVSVDPSWRFPSQRLRDAYLALQTWKQQAIFSDPRGFTADWVGPGVCNYTGVFCAPLPRGVPGAGELSVAGVDLNHGDIAGYLPTELGLLADLSLLHLNSNRFCGLVPATLRRLRLLVELDLSNNRLVGPFPAVVLDLPALKFLDLRFNEFEGAIPPELFDRPLDAIFLNHNRLRSPLPDNLGDSPASVIVLADNSFGGCLPASIGNMSGTLNEILLINDGLDSCVPPEVGLLREVTVFDVSFNSLVGPLPQQVAGMRKVEQLDVAHNRLSGSVPEAICDLPRLKNLTIAYNFFTGEPPSCARVVPRGGDTKNCLPSRPAQRTPQQCAAFYSQPPVDCASFQCKPFVPVPPLPPPPPSYPGPLPPVYPMPYASPPPPAHYR

SEQ ID NO: 64808 - protein, 403 aa, Zea mays
  Clone ID: LIB4705-002-B11_FLI.pep
GRAPKTLASSPTHVTIAMTDRNPAAASSKRHCDLSLDDPTPSAKLQRCSEPSEPTPAGKPNGGAATGEESEMMAGARNPRAQRYLVAVEYIGTRFSGSQKQPNQRTVTGVLEEAFHRFIGQPVSIIFSSRTDAGVHALSNVCHVDVERISKRKPGEVLTPHEPGVVKRAVNHFLLKSEGDIMVTDVCCVAPDFHARYKSLERTYHYRLLAGPESTSVFEKNSVRHISEDLDIQSMKKACSILVGHHDFSSFRAAGCQANSPVRTLDELSVTEVFPFMFFPSSVERSELELSNVSLVYSRKPDMESSGKGSDGSCTSSVKSDFENGKDFGKRSRHRCFVVTARARSFLYHQVRLMVGLLKSVGTGDLTTADVERILDAKTVTAAPSMAPSCGLYLANVKYDLNT

SEQ ID NO: 64809 - protein, 365 aa, Zea mays
  Clone ID: LIB4705-002-C12_FLI.pep
PHRTQNRLPPSKMESGSTFYGGEGLSIDPKWFIDPKLLFVGPRIGEGAHAKVYEGKYKNQNVAIKIVHKGDTPEEMTKREGRFLREVTMLSRVQHKNLVKFIGACLEPVMVVVTELLVGGSLRKYLVSLRPRSLEPRVAVGFALDIARAMECLHAHGIIHRDLKPENLLLTADQRTVKLVDLGLAREETLTEMMTAETGTYRWMAPELYGTVTLRHGEKKHYNHKVDVYSFAIVLWELLHNKLPFEGMSNLQAAYAAAFKNIRPSADNLPEELSEILTSCWKEDPNDRPNFTQIIQMLLHYLSTLSPQETLAGPRRTFSSENTILPPESPGTSSLMASRGDLGDTPKGKKEDKPRGFFFCFSECY

SEQ ID NO: 64810 - protein, 278 aa, Zea mays
  Clone ID: LIB4705-003-F6_FLI.pep
SPQCSSRTDFALWCSGVHCRRRHDLHPYWMMQNLLLQEGDMVFIKNANLPKGTYVKLQPHTTDFLDISNPKAILEKTLRNFSCLTTGDSIMVAYNNKKYYIDIVETKPSNAISIIETDCEVDFAPPLDYKEPEPVKPAVPASTEPGTGKTIVLCDYCSPYGFFMHIIFMIIFSDVPAEEEPKFIPFTGSGRRLDGKPSKDKDVLASSPAKRQANATNGVQPSTATTSQGSSSRKATGKLVFGSGGSRAEKAPEKEAEEPKKEDPKFAAFTGKKYSLKG

SEQ ID NO: 64811 - protein, 356 aa, Zea mays
  Clone ID: LIB4705-003-H9_FLI.pep
MEMTGSLPVPSVQAMVAAGRHAPVPPRYLRPDLAADVVVADDATTIPIIDFQRLLLVDPEESARLHAACQDWGFFQLINHGVPDDVMEAMKASTQSFFALPAEAKQQYRQQAGQLEGYGQLFVVSEDQKLDWADVLYLNTQPPEHRNLSFWPAGESFRQTLDTYSAAVKHVADRLLGAMYMNLGLLSSMDMDPERGAGIQSVRMNYYPPCAEAADKVLGFSPHSDSDLLTLVLQVNQLQGLQIKRPPDGGGAWAWLPVTPLQGAFVVNVGDVLEIFTNGRYRSVEHRALVNAHTERLSIAAFHSPSIHATIGPLPELLGDQEVPKYKTLDHQSFITLFFSAKLQGKSFLERMKKLS

SEQ ID NO: 64812 - protein, 185 aa, Zea mays; identical to SEQ ID NO: 43224
  Clone ID: LIB4705-004-G9_FLI.pep

SEQ ID NO: 64813 - protein, 274 aa, Zea mays
  Clone ID: LIB4705-005-G2_FLI.pep
VDIAAGVQVLSQRRGAGMPLPLQEGGQRALRAGNAGGGRPARARTMGASSFRDRKYATGPRTNRATKTGYWKATGKDREVRDPAARAVVVGMRKTLVFYQGRAPSGVKSCWVMHEFRLDSPRTTTTPPKEDWVLCRVFQKRKVDGSEQDNGVSPSPPVFASASQSQGVVLPPDQPCVVDAYVVVDQPGSSSVGLAPPQENLGSGLDALLTNGAMWQYTSSVFGHLLPQEATNSPPVMDLGSRGGGGGGDYGCSFFYDSSFEDMANIGFRQGWMG

SEQ ID NO: 64814 - protein, 257 aa, Zea mays
  Clone ID: LIB4705-006-A4_FLI.pep
SRPAGKKKKKNFHFSHAHEHPPRGAPPCAPLRSSHLPLVVRRRGSVAGLRHGRPRAERRRGLLRPPGTAPRERRRRRAHHGPQGPAPVPALRRAGDGPAPQGLPRALRAAAAGPGWQRPRRARLLRRRRPLRRRDDVRADHRVARLRRRRRRRAAVGPSARPHRPGPVLEPERTGEGVPRREAQPRVQAGLVRGLQRVDVVPGPGRVQGRWGPPRVARHHRDPPGSCRRVPEGYDHACLMRCFVCSTRLWFANSSPK

SEQ ID NO: 64815 - protein, 458 aa, Zea mays
  Clone ID: LIB4717-002-C2_FLI.pep
VDLDSVPACEGEEGMDEFELEDNLEFILQSIQELMEDPGDNNAFGDANQNELFASIVNYDQENMLPDVSAADVAAGKDIQGIPWEKMLFGRDKYREMKMKNYRNYQNLSYAREDALQECKQVKKDSPYYDFHYNTRRARPSIVHFQLRNLVWATTKHDVYTMHDQSVTHWSSLEQTSTELINADDCIVPKQRGHGSQSVAMVQVTTMAVDSNLLVVGGFQGEIICKRLDDEGVVYSTRVTDDENAITNSLEMYQDPSGSRRLVAANNDCSIRIFDTEYFDLLKHYVFPWSVNSVSVSPNGKLFAVLGDHEDGCVVDPKCGKAIGSLRGHLDYSFASAWHPDGNIVATGSQDTTCRLWDIRNLSQSVAVLGGRMGSIRCVKFSPDGRFLATAEPVDFVHMYDAYADYSRSHEIDLFGEIGGLAFSPDTEAFYVGLADQTYGGMIEFSKRHQHHYFNSLW

SEQ ID NO: 64816 - protein, 264 aa, Zea mays
  Clone ID: LIB4717-003-H11_FLI.pep
SRPAGPHLLITTRAAVALEARRSHAGAQGMAALRHLAAGPTCHHHHHHGVAAATASLRLHRLPLPFRPLRSRSGSFTRVYAISSNDIRVGTNVEVDGAPWKVLEFLHVKPGKGAAFVRTKLRNYVTGNTVEKTFRAGSTLQEPSLSKETKQFTYKDGSQFVFMDLTTFEESRLNEADVGDKQKWLKEGMDCNLLYWNGKIIDFDLPITVRLTVTDTDPGASDSAQGGTKPATLETGAVVTVPSFVNVGDDILVDSRTGQYMNRA

SEQ ID NO: 64817 - protein, 304 aa, Zea mays
  Clone ID: LIB4719-003-H5_FLI.pep
FSLPFVDSSSARLRLRLGPRPTVHQRSSSLPPSSACCLSHSMAWIWMVLAAGAVLLWAISLGRVLSCAAPSCVPPSPQFMPPLSGDRRSRNVLLVVAHPDDESMFFAPTILFLKSKGHSIHILCMSRGNADGLGDTRKEELYHACVSLKIPHEQVKVLDHPKLQDGFHEKWDHGLVAELTMEHVQLWAIDTIVTFDSYGVSGHPNHKDVHHGICKFLHTNKQGNVEAWELASLSILRKYSGPIDIWLSSLTSFARSKQPIYTLVNSSPSKSYEAMAAHRSQWVWFRRLFVMFSSYTYINMLRRI

SEQ ID NO: 64818 - protein, 243 aa, Zea mays
  Clone ID: LIB4719-004-F1_FLI.pep
SRPAGKLNHKRRPLDADSALRTQEHSRSRRKFEDEEQLHCGRTSGMEGQFQFGKEEVIQAWYMDDSEEDQRLPHHREPKEFIPLDKLSELGILSWRLNADDWENDENLKKIREARGYSYMDICDVCPEKLPNYEAKIKNFFEEHLHTDEEIRYCLEGSGYFDVRDQDDQWIRVAVKKGGMIVLPAGMYHRFTLDSDNYIKAMRLFVGEPVWTPYNRPHDHLPARKEYVEKIINRGGNQAVEAR

SEQ ID NO: 64819 - protein, 198 aa, Zea mays
  Clone ID: LIB4719-010-D1_FLI.pep
SSIETLQSNRCDRLTNQSFVARAAVVVDDLGVGDGAGVLDDGAPDGVDPLLLLLLGVSNEVHGLARRGELEGVGSVEDVLGALDGEAGGDRDDTAGHGSARDGRFLEPEEPPLLEHEPPPPPCLDILALLGQPTHALRGAPELNAAARGVGGVRGRRAGAHHRPPQTRRHGVVENFGIRSGRRPPFFSSFREGVRPAS

SEQ ID NO: 64820 - protein, 442 aa, Zea mays
  Clone ID: LIB4719-010-G4_FLI.pep
SPLDTVPQMLRAAASSCARGAVRRLSSSAVMEASPVAVGSRCQSLLDEGDWSYHREWWGKEDGPGEGVQTVFRRHSECGNGVVSVSAYPASLPASEHWPAMERWLQESNSRLYPESASSDQFKVLGYQWRVMRFNDHTRQSTAKVMTCYRTSGQRSLFLMQQPHVLAVPYVKSMVSAGLTALSCSSYDLPQAASGQNTMKILCIGHGGGSLPLFLASKFRGATIHIVEIDPVVVSASVESMGFPTSPVNKGLSPESMLPSDADDLLWGGIHDRIFLHTADAEDFIGSDGNEYDIVFIDAYDGDDVFPRKLWDVDGAFMKNLEKRVHPVHGTVVVNLHSDSDSGAEGNADFQSALPMGRHVSQVCRAYMQHFGVAFTAAVPWLCNITLVACRAGGMAGGARRGLSRRDLVLGKLLSTSDTVERALGLPFPCLPYIKNGFTMVH

SEQ ID NO: 64821 - protein, 214 aa, Zea mays
  Clone ID: LIB4719-011-A1_FLI.pep
VPPERIPCFFYRNRCFRRTRAARRRRPCRGPSTKPTRAGAPPSDVAETASMASSSAAESSSRLSDRARRSALGLRFMVLLMHVLFVGAVFILDPTLDWRIHGEPWYIGLYGVLVLLTLVQYFYTAGSCPGYVIDVMRAGSMMHATFVNTAALSKQSNSRNGNINSPTSRAQLQKLSTMTPTSSWAQMVMDLYPPGSSSRDWTCTYCRIVQVVHI

SEQ ID NO: 64822 - protein, 486 aa, Zea mays
  Clone ID: LIB4719-011-D3_FLI.pep
LITTMGKRKRSPCQRDNHNDSLASKIMRTRIPDLPEDIWSHVHSLMPMRDAGRAACLSRAFLRSWRHHPNLIFNKDTIGMKKNSYGENFHHKISRILRNHCGISLKTFKLDYSGMCGFDGTSYLDSWLQAALNPGIEEVTLWLFHTRRIYEFPCSLLSDGVRNSLRYLKLRCCALRPTVELAPMRSLTSLHLSFVSIKWNGLKRLLSNSLALEELELVCCDKIVCLKIPSALQRLNSLNIFGCSALKVLESKAPNLSSLSLSDFGGGLVFSLVKTLQMKKLITESTVYDARTRLPSIMPNLETLVINSYQQVVDAPMLPTKFLCLKHLTVRLSSGTTITQAFDYFSLVSFLDASPSLETFILNVSGKGMIHESISAHPQLRHTPEHHHGHLRSVKICGFSSEKSLFELTRYILENAVSLKFLTLDTFYGDRCGQGKCTSCLPTPDVFMDVSKAISGIKTYIENKVPSTVKLTVLEPCSRCHVRRVI

SEQ ID NO: 64823 - protein, 446 aa, Zea mays
  Clone ID: LIB4719-012-H4_FLI.pep
QQSSSSTAPSPVLSKSRRIPSTAKPSHLPQVRVCARACCTAGGVGGGWRSCRRGSVMDYGPSDSSGTDDDLPQLPHRSIRGSGRVSGNGRTIVPAGSYARAPTDMEAQIQQLEQEAYCSVLRAFKAQSDAITWEKEGLMTELRKELRVSDKAHRELLNKVNNDNIICSIREWRSTGGLQASMSNNPQPIHDPVPSPTTSGRKRQKTSQSVPALPAPPAMHSQQLATPTQPSSSTARKAVPPVPKGKKTKPGQKVPGGSAAKPMPSSAGPSGRGPHMNRNFPGGSAPEAQAQNVDPLVGRKVMSRWPEDNSFYEAVISDYNAETGLYVLVYDINTANETWEWVDLKEMGPEDIRWKEDDSGIDPVVYLRSRGAPSSGVRKPTGRGGPMPGSGRGRGLPKNMSRKDFPPPQNGVGKRSSDDIGILHTESLIKEVEKVFSVSNPDPQEV

SEQ ID NO: 64824 - protein, 194 aa, Zea mays
  Clone ID: LIB4719-013-B10_FLI.pep
LGHGSLVLELAAVGDDDMPHSPATDGPGLFDSTQSVHAIHDAAERDVAAVQPRRVGEGDEELRSVGVGPGVGHGHHAGAIVPDGSERLVGEVPGVTDRGLAARAVARRDVAALAHEPGHHAVERRALVVQALAGPLSHAALSGAQQPEVLRRLGHLVGEQLDDDAANRHAADVEDQEHPGVLVVLGPRHDRVNN

SEQ ID NO: 64825 - protein, 254 aa, Zea mays
  Clone ID: LIB4719-013-H10_FLI.pep
EAGRGGRQRLASPSAAAAAPPFHGFRRALRLHPQRRRRRQGEEMKLKQLEGLLGGLTQFSDPKLELEQYATGPHIASRMLYMAENSFNDITGKVVADFGCGCGTLAVASALLDAEHVLGIDIDPQSLELAQENAADLELDIDLVWSDIKNLNLKGVHVDTVVMNPPFGTRRNGADMEFLSMALQVASQAVYSLHKTSTREHIKKAALRGFNAISAEVLCELRYNLPRTYKLHKKKEIDIAVDLWRFVPNAQRRS

SEQ ID NO: 64826 - protein, 321 aa, Zea mays; identical to SEQ ID NO: 60609
  Clone ID: LIB4719-014-A6_FLI.pep

SEQ ID NO: 64827 - protein, 352 aa, Zea mays
  Clone ID: LIB4719-018-E3_FLI.pep
ARNQNSRSPARWCASVVFATMNSIEPFNRLVKLAARAFYDDVSMKGDNQPKTSRGDNRGMAVVVLDALTRRPWVREEDLAKALKLHSKQLRRILRFFEEEKLVTRDHRKESAKNAKAHNAAAANDGQTVAKEGEEKVKMHTHSYCCLDYAQICDVVRYRIHRMKKKLKDELDSRNTIQHYICPSCNKRYSAFDALQLVSYTDEYFHCETCNGELVAEDDKLASEEMGDGDDNVRKRRREKLKDMQQRIEEQLKPLVAQLDRVKNLPAPEFGSLQTWERAHIGAFAIGDPAAADSSRNSQGQYGTPMPYLGQTKVEVDILSDGEKEGAESGKDGSELKVIPPWMIKDGMNLTK

SEQ ID NO: 64828 - protein, 275 aa, Zea mays
  Clone ID: LIB4719-021-D9_FLI.pep
SRPAGIAFRVSVQLVSIEQPRAEVCIPPPVYDLASPGITVLDLDLDLLSDEQAKMAPVRVFGTADFVNAARVMACLEEVGVEYEVVEVDYAAMEHKGAQHLARNPFGQIPAFQDGDTMLFESRAIAKYVLRKYSKSAQVDLLREGNPEEAAMVDVWTEVEAHTYLPAIAPIFYEYVVYPAEHGTTPNQEVVDESVERLRKVLDVYEAHLYKTKQLYLAGDYFSLADLNHVPYTFHLMRTPHASLFEAYPHVKAWWERVIARPSLQKLAPDMVIKA

SEQ ID NO: 64829 - protein, 276 aa, Zea mays
  Clone ID: LIB4720-002-G8_FLI.pep
RGRPGAATFAKVPALNGIFRQAVRALHAQVRIELNAPVKLGKKDAGQTGEGKEEALVVLATQLARAVQALCRLSVARARLCAERFADAELRDKLTAGISVDDLRGMLDKVLIDSDAVSVLKGVYNHLLKFRDFLSWEAAMAMAVIETDSSVEKPQSAVDNEAAGSSEKAQAGGDKAKGDKKSKKKKTLGKGTSAVLMLLRDHVTNGSTVASVNSVLVAEWAASLSLLFDPKCPGLVSLVEKVKEIVESNEVRRLPKIPKVIIILFADGAVLFIWSN

SEQ ID NO: 64830 - protein, 241 aa, Zea mays
  Clone ID: LIB4720-003-A9_FLI.pep
GRPGLRTQRRAPRQRFVPRRPCVARKFLDLDALLSHAYDTCKAGLKTKHLGFHKALCVLMGWNWHVAPDTSKSHHSIPSEEVNAMRGDLMLWPPVVVIHNSSTGHEAKDTDAKIVSIEEIEGVLADIGVAHEKARVSHGRSANQSVFLVKFQPTISGFQEAMRVHTHFSTRNHGKEEFQLMKGSKGKKATSTDSLEELLYAHIGVVEDLGLLDEGTKKRCKVMRKKEIEANAEATLNLEVY

SEQ ID NO: 64831 - protein, 211 aa, Zea mays
  Clone ID: LIB4720-003-G10_FLI.pep
GRPGLFLSPRLAGASINRSGFERPVSPDLRLAVAAISLVPRSLARFSPFAPTHRLGGMKNVVGSPGTWSGMALRLSQCVSAGASMGAMATAYGFSNYTAFCYLIASMGLQLLWSFGLACLDVYSLETKRDLHNPVLVSLFVVGDWVTAILSFAAASASAGVTILFERDVHFCRMYPQLSCGRYALSVVLAFITWSFIATSAVSMFWLLPSL

SEQ ID NO: 64832 - protein, 196 aa, Zea mays
  Clone ID: LIB4720-003-G12_FLI.pep
REERSGEFLWFPKMSSPSKRREMDLMKLMMSDYKVDMVNDGMQEFFVEFRGPNESIYQGGIWRVRVELPDAYPYKSPSIGFINKIYHPNVDEMSGSVCLDVINQTWSPMFDLVNVFEVFLPQLLLYPNPSDPLNGDAAALMMRDRPAYEQKVKEYCEKYAKPEDAGVSPEDESSDEELSEEENDSGDEEIMGKPDT

SEQ ID NO: 64833 - protein, 248 aa, Zea mays
  Clone ID: LIB4720-006-A7_FLI.pep
SRPAGSFLPCASQPRSLWRCGPDMQAWFSSGSGPSSSSAASSSQPSLLAEWNSYAAARSAEDAGDGFGIDIEAAVRSANDRVAGTFGVVSKGVKGFPGSFKSTTSSVPSGRSLMYFGLFLGSGVFLVFIAFTIFLPVMVIMPQKFAICFTVGCAFIIGSFFALKGPKNQLYHMISKERLPFTMGFVGSMVATIYVSMVLHSYILSVFFSVLQVLALAYYAISYFPGGSAGMKFISSAVVSSVLRCFGR

SEQ ID NO: 64834 - protein, 434 aa, Zea mays
  Clone ID: LIB4720-007-A6_FLI.pep
GRGRRRTLARDRRRQNRISSPPPLLPRSGQSAPRENQDINLGIWTRCLKVLSEMDKKKATDGTEPGPAPSRAVDRFGFIKPEQGNSPDGIPKGKSIHEREREERRIRKWRKMIGVGGNDWKHYVRRNPHVVKRRIRKGIPDCLRGLVWQLISGSRDLLLMNPGVYETLVIYETSASELEIIRDISRTFPSHIFFQQRHGPGQRSLYNILKAYSVYDRDVGYVQGMGFLAGLLLLYMSEEDAFWLLVALLKGAVHAPMEGLYQAGLPLVQQYLSQFEKLVIELMPKLGQHFVEEMINPSMYASQWFITVFSYSFPFHLTLRVWDVFLYEGIKVVFQVGLALLRLCHDDLVKLPFEKLLYALRNFPEEATDPDVLLPLAFSFKVSSRLEELQKEYQKRQEGTSETSSGERLQPLASKTMSRVGSRVVSNLTTADRK

SEQ ID NO: 64835 - protein, 309 aa, Zea mays
  Clone ID: LIB4720-008-E9_FLI.pep
GRDATPDRPRLLARGMKGGAVIRAAGGGAGGAGLLRTRLRLPVVLLSCSLFFLAGFFGSLLFTQDPEEADMPVPRERLLEAAWPEMPYGESGEAAPSLIPYQILSWQPRALYFPQFATSEQCENIVKTAKERLKPSTLALRKGETAESTKGIRTSSGTFLSANEDPTETLAEIEKKIARATMLPRNHGEPFNVLRYNIGQRYASHYDAFDPAHYGPQKNQRVASFLLYLTDVEEGGETMFPYENSENMDIGYDYEKCIGLKVKPRKGDGLLFYSLMVNGTIDRTSLHGSCPVIKGEKWVATKWIRDNIV

SEQ ID NO: 64836 - protein, 446 aa, Zea mays
  Clone ID: LIB4720-012-D11_FLI.pep
EAGRDPMDPSAVGSSRRKAEQWLSVAEKLMVARDIEGCKQFASQALAADPHTPGADDLHAAAISLLAAQQRRLPNGQPDPYGVLGLDPANPASRRPDAIHSQYHRLSFLLNRSHQDRPCSLAFAEAARLVADAWAFLSDPVLKSSLDVDLDAAAAARAYHSPPNLPQPHSQPHLPARLTPPVAAPSPRSTPPLVSPLPRATSPPAASPPRQTQRPAVPQTRSTPPPAASAPRSTPPPPVSPQTLSTPLPAAPAPAPRSTPPPVVPQTPSSTLRPTTPQTPVAATVPAAKSGAAPSSTFWTVCSACCHIHQFDCQYGTCKLLCPSCRQPFVAKAMAEPPPIVPGTDMYYCTWGFFPVGFPGCPGFERMVNAQPSGVDQLNAPWLGSAGGVHGNAQNGVPPVSAPVVEVPVKDPIEVPAVTPPAKPMRVKVGAKKRGRPKGSKNKKKL

SEQ ID NO: 64837 - protein, 300 aa, Zea mays
  Clone ID: LIB4720-013-G5_FLI.pep
RGRPGQQYPTRKPVPRPDLRDRSVVRPANCTARNGHHGDRGDQDDCTGAGVAGQRQRQRQRRAEDAPLRGRPQEPAQERRPLPVHPGHERVPAGAGEHEGAARDHRQAPMEPDDHLRRRGPVPQHAHQAHRRQEDHGDRRLHRLLAPRHRARTPGGRHDLGHGHQPRELRARPSLYQQGRHGPQDRLPRGPRAPRPGRPRGGQGAARVVRLRLRGRRQGQLPQLPRAAPEAGEARRPHRLRQHAVERLRRAPRRRAHAQVHPLLPRLRARPQQRARRRRPRRDLPAPRRRRRHALPPRQA

SEQ ID NO: 64838 - protein, 388 aa, Zea mays
  Clone ID: LIB4720-015-C10_FLI.pep
STITTTEFLLQSRASYIYYHVLCVDKSAGLPDLAAGRVGDVAHLHHGVGELLEEGLGVGPVLVDCVGGGVARDAGPHRLVGVEQALALDEGLEVGVVEHVGGVAVHGADVVVAAVPRAHLLQLAQVGLGRRVVLGRHLEVAVDSVPEILAPGESDRVGSDEGHHVSGIKALLPELGNEREEALLGRRDVAVCLVQARLLGVQSSYWDIPVRPTNQHNRIPSCNRQQVCAGDGSRALGFQLLLDLVNQIEPFQRVDVLLRLLLSDHGCRVVEQHRPVAALHEAVMEMEAEHERGVARVGAHRALHLRPDDVLHVGARLGVVLQAQLRRVLRRHRRGHAGRQEEACRSHAEGERPDEAQHTCCDFFFFSGEQETIHVHRSWIRPDPPHRH

SEQ ID NO: 64839 - protein, 311 aa, Zea mays
  Clone ID: LIB4720-019-C7_FLI.pep
EQGPIILNSDLERSRRGAIAGVLIAAGGRGMVGVLSNRVDRDDLKAGDHIYTWRAAYIYAHHGIYAGDGMVIHFTRAAGHEIGTGTFLDWFLYSSSPAATEGPPCQKCGHLVKSDGVITSCLDCFLDGGSLYLFDYAVSPAFFLAKARGGTCTLAASDPSDVVIHRARYLLDNGFGMYSLFKNNCEDFAIYRKTGLLVETAFSVGRSGQLASLTAAFSAVASSPLRFLTTSASGLAIVTSGMYCVGRYVSDIGVRRDVVKVPVERLVEQNVTWIPQCVATETDIAAGAPQQQLEVPCAVAEEASVIQPAAP

SEQ ID NO: 64840 - protein, 261 aa, Zea mays
  Clone ID: LIB4720-022-A11_FLI.pep
EAGRGSRKQFSSRDGSPFPQLPQAAAKRDPALNHRFSAAAPFGPPSLLSSGGRRGRGTKKPPSLLSSVGRRGRGANKPPSLLPSGGCRGRGANPPFLLPSGGRRGPGSKMFYGAMVWDPWLIVSQIVCLQCLYYLSLGVAMALLVGTRVPRLTLLYFFDFATLTPRTPTGWCAIASFILAAVAGAGFMLYVIERAKKCLDFAATLYIIHLFICIVYGGWPASITWWVVNITGLAIMALLGEYLCIRRELKEIPISRLRASV

SEQ ID NO: 64841 - protein, 422 aa, Zea mays
  Clone ID: LIB4720-022-F10_FLI.pep
KKKKKKSPIPSVSLIHPQGAGGGSLAGHIVADFTDPSSGLLAMESPRTLEALTNDLVVEIFLRIGSPADLVRASAACVAFCRLIANPSFLRRYRSVHPPLLLGLLDPYGDIEPTETPHPSAALAGAVARAADLRFGEYFPSSKLSGYCVSDVRDGHVLLTITPYLEDDEDEKLVPDLAVCDPLARVCLRLPPIPDDLLASVQVQQQDLVHYSCDTFLVPSGDEEDVTSFRVIVMMRSTQMLVAFIFSSTTGDWSAGSPFSLGSLRIPYDNIPSYAYGCFYWKVESENRLLTLNMSSMEFSVVDLPPGPDRSFVIMVEAGESRLGMFSLINHGTTLCYAIRQIGSEKSNQLEMDSVIPLPEGYIYFRIHGSYEGHILIFGYAFSEDACFALEIKTMKIERVCRKWRGFCPYFVFLPSMSQRRI

SEQ ID NO: 64842 - protein, 367 aa, Zea mays
  Clone ID: LIB4721-003-E1_FLI.pep
ARAAAAMILRIRSRDGTDRITVPDSASVTVADLQRLIESHLTVPVPLQRLSLDPALLLPNPSAAVPLLTDSAAPLASLRLANGAFVYLAYPPDARSARPPPPKALSAAGSFGKKMTMDDLIARQIRVTRQENALCAAASFDRDAANAFQLYVAEFLGFGVKRAGFLYGRVDAETKDVFVDFIYEPPQQGSEDVVHLLRDPDEEARVDTIAEGLGMRRVGLVFTQAVGRKASETGEYTMSNREVVQAAQLQAEGGIPEWVTAIVKLEVGDDGTGDVHFEAFQMSEICVKLFKDGVLETEVQDADDPRLSKMRKEVVAGGKDTMEVDNDFFLVPVKISDHQGPLSVGFPIENRGNPVSISALRSHLERM

SEQ ID NO: 64843 - protein, 274 aa, Zea mays
  Clone ID: LIB4721-004-C6_FLI.pep
REKLELATPMAIGHKNTTKVALLVLLLSLMLSLTASVARNLQWRLSVATAVEVCVKAAVGAPDKLGDCPFSQRVLLTLEEKKVPYRMRLIDLSNKPGWFLKISPEGKVPVYNSGDGKWIANSDVITRVIEEKYPAPSLATPPEYASVGSKIFPSFVKFLMSKDASDDGSEEALVRELQALEEHLKAHGRPYISGERVTAADLSLAPKLFHLVVALEHFKGWKVPESMSSVHAYTQAMFSRESFIETKPTKEHLIAGWAAKVPKPPNLVVPCWLI

SEQ ID NO: 64844 - protein, 498 aa, Zea mays
  Clone ID: LIB4721-004-F12_FLI.pep
RQKYSIPRLTPSRVVVCGACLPHSQSRTPCAAVLLSVVAPLHLSSPPVPSARPSSPCLRPNSLQSPRVGSRPGRAESMAVDPRQVVAGFLTLSMFVMLGNMIKHDHFSPVTEGMGLKATGARSNTMKLDNNAEMNSVDMAGVEDLMDTIEEVKPCWTKPSPKNQPSNGFVTFSLTMGPEYHISQITDAVVVARYLGATFVLPDIRGNELGNKRKFQDMYNVDKFVRSLDGVVEVIDEIPDEVSAKKPAVIRVPNRVTESFIMDTIQPIFKKNKYLRLAVIFSSVSLRPKETSNKDLDATACLAMFSGLELKHEYSEVARKMLDRLQELSKKSDGKVLAIDLRTDLLEKKSCKTTSGARRKGCYNPDEVLAFLRSVGFSANTTIYLTETWWHKGLNDLKEEFPNTYTKDDIMPAENKGEFLKSSNADLASALDLEICSQSDAFIPAVAGLFYGHVTGKRIASGRTQIIVPSQSSTSTHASDFTSTYISNKNHLAYTCCC

SEQ ID NO: 64845 - protein, 259 aa, Zea mays
  Clone ID: LIB4721-007-G3_FLI.pep
SEAGRDFFFSPHFPFLPREGRLQFITLVLFLRTQAIIRREGEPARTAKKMLKRLLTKTKSKKKKEAASSAIPTLDRLHETLEMLEKKERFLQKKCSAEIEKAKDYTKAKNKNAAIQCLKKKKLYETQIEQLSNFQLRVHDQIIMLESAKATTDTVDALRSGSSAVKAMQQSVNVDDIEKAIEEANEQTESMREMQQALATPIGASADFDEDELEAGWKSWRRRRRRRRGRSRTSCLSRRRGGPWNHRRKRRRLLDRAVM

SEQ ID NO: 64846 - protein, 262 aa, Zea mays
  Clone ID: LIB4721-009-C1_FLI.pep
GTTRYEAAAAEAFPEYNKARLVSLELPDRSGDIIITTYGEIDKNNYLDPRTAQVATIDHMKQTCTKLRPAEDEELPSAYIEEFRCALDVELSKYVAEAYPKGTCAVYCTSGKDIEGPGADFSFAAVISATKRSPQNFCNGSWRSIWTMEFNYELQFVDIKGNIQVDAHYFEEGNVQLDTNIDRKDSTIMQSPDDCAVSITSIIRHHESEYLSSLEESYLNLSDATFKDLRRKLPVTRTLFPWHNTLAVSLTRDLAKQLALGK

SEQ ID NO: 64847 - protein, 201 aa, Zea mays
  Clone ID: LIB4721-011-D3_FLI.pep
RVDFGAPMGQAFRKLFDAFLGTSEMRVVMLGLDAAGKTTILYKLQIGEVLSTVPTIGFNVEKVQYKNVMFTVWDVGGQEKLRPLWRHYFNNTDGLIYVVDSLDRERIGKAKAEFQAIINDPFMLNSVILVFANKQDMKGAMTPMEVCEGLGLYDLKNRTWHIQGSCALKGDGLYEGLDWMASTLKELQASGRLPSGGTSLL

SEQ ID NO: 64848 - protein, 519 aa, Zea mays
  Clone ID: LIB4721-012-G8_FLI.pep
LEAGREPKHASPFPSFPFLSLVSSRLRSPFLLRTPSSPHRVKPQHKSTARRLRSPPVPNQPLRCPIRPIPPPIRRRGGASGPTPMYSNFKEQAIEYVKQAVQEDNAGNYVKAFPLYMNALEYFKTHLKYEKNPKIKEAITAKFTEYLRRAEEIRAVLDEGGAGPGANGGDAAVATRPKTKGKDGDGGNGGDDSEQSKLRAGLNSAIITEKPNVKWNDVAGLESAKQALQEAVILPVKFPQFFTGKRRPWRAFLLYGPPGTGKSYLAKAVATEADSTFFSISSSDLVSKWMGESEKLAANLFQMARENAPSIIFIDEIDSLCGQRGEGNESEASRRIKTELLVQMQGVGHNDDKVLVLAATNTPYALDQAVRRRFDKRIYIPLPDTKARQHMFKVHLGDTLHSLTESDFESLARRTDGFSGSDVAVCVKDVLFEPVRKTQDAMFFFKADGDMWMPCGPKQPGSVQTTMQELASKGLAAKILPPPISRTDFEKVLSRQRPTVSKKDLEVHERFTKEFGEEG

SEQ ID NO: 64849 - protein, 270 aa, Zea mays
  Clone ID: LIB4721-016-D6_FLI.pep
SPSTSQYRLLQTDQVRDIPCGTKGGVMISFDKIEVVNRLRKEFVHETLLNYGVHYDKTWIYDKIHHEINQFCSAHSLQQVYIDMFDQIDETMKEAIQRDCTRYAPGIEIISVRVTKPNIPGSIRRNFELMEEERTKALIAMEKQKVAEKEAETQKKIALSEAEKNAQVSKILMEQKLMEKDSSKRQEQIDNDMYLAREKAVADANYYRILKEAEANRLKLTPEYLELRFIESIANNSKIFFGEKIPNMIMDQRLLKNYLDAAPRKDHYEM

SEQ ID NO: 64850 - protein, 509 aa, Zea mays
  Clone ID: LIB4721-021-A4_FLI.pep
AKSSSATHPFLVLLLRPLHLATTPLERHCQAMAGGGAAYQSSSASPDWLNKGDNAWQMTSATLVGLQSMPGLVILYGSIVKKKWAINSAFMALYAFAAVWLCWVVWAYNMSFGDRLLPFWGKARPALGQRFLVAQSQLTATAVRYRDGSLEAEMLHPFYPAATMVYFQCVFASITVIILAGSLLGRMDIKAWMAFVPLWITFSYTVSAFSLWGGGFLFQWGVIDYSGGYVIHLSSGIAGLTAAYWVGPRSASDRERFPPNNILLVLAGAGLLWLGWTGFNGGDPYSANIDSSMAVLNTHICASTSLLMWTLLDVFFFGKPSVIGAVQGMITGLVCITPGAGLVQGWAAIVMGILSGSIPWYTMMVLHKKWSFMQRIDDTLGVFHTHAVAGLLGGATTGLFAEPVLCNLFLAIPDSRGAFYGGDGGSQFGKQIAGALFVIGWNIVITSIICVLIGLVLPLRIPDAQLLIGDDAVHGEEAYAIWAEGELNDVTRQDESRHGSVAVGVSQNV

SEQ ID NO: 64851 - protein, 199 aa, Zea mays
  Clone ID: LIB4721-021-E4_FLI.pep
LEAGRVRDPPPARLQLSARAPPLLRDPPPARRSRLRDERLRPTPSAPPSRDLLPPARRSRQPSESRRECRPPPSDSERGASPDKNAPSPMLPGPHRPSRRANPHCASGGAASRPPCSLPPLWFGPGGVFKVALFADLHYGEDAWTDWGSAQDAASDRVMAAVLDVENPDLVVYLGDLVTANNLPVPNASLYWDRAVSAV

SEQ ID NO: 64852 - protein, 533 aa, Zea mays
  Clone ID: LIB4721-021-E5_FLI.pep
WWVRLALSLLLALACVLLLAVLLGSPDPGASPSTSAASSGSETTSSPLLRQRTYLEGITDALNMTDEMLSARSFSRQLMDQIYLAKTYVVVAKEANNLQFVAELSAQVRRAQSILAHAAAYGGTVMEQEAEKAIRDMSVLLFQAQQLRYDSSITIMKLKGQIQSLEEKSKVEVEKSTKYGQIAAEELPKGLYCLGVRLTMEWFKSPELQRKFSDRSPAVQSNLRDNSLYHFCVFSDNILAVSVVVNSTAINSRHPDKVVFHLVTDELNYAPMKAWFGMNDYRGVTVEIQKVEDFTWLNASYVPVLKQLQNAATQKFYFSGSGSRGTPIKFRNPKYLSMLNHLRFYIPEIYPELQKVVFLDDDIVVQRDLSELFTINLNGNVMGAVETCMETFHRFHKYLNHSHPLIRAHFDPDACGWAFGMNVLDLVEWRNKNVTGIYHYWQERNADHTLWKLGSLPPGLLAFYGLVEALDPKWHVLGLGYTNVDFATIKEGAVLHYNGNMKPWLKIGMEKYKSFWDNYVDYSHPLIQQCFMR

SEQ ID NO: 64853 - protein, 122 aa, Zea mays
  Clone ID: LIB4721-021-F2_FLI.pep
SRVFRYRKQLGISNMQVSLNLHDTAVESGKKKHAPPRSGRWTRRERERERRILGGVFGCPAPPGLALCSGFPFFRPRRWWSQGREGTGESAGRRGFCPFAWPAHGPRPHRMNPAMGLSRPAS

SEQ ID NO: 64854 - protein, 531 aa, Zea mays
  Clone ID: LIB4722-001-F5_FLI.pep
ESPLVSRYSQHRESMEPAYVVTLSFLFLFLLHHLLGRHRRRTNGKNKRTQLPPSPPAIPVLGHLHLLRKPIHAALARLAERYGPVFFLRLGSRQAVVVSSAACATECFTENDVCFANRPRFPTLLLVSFGGATLPMCRYGSYWRNLRRVATVQLLSAHRVSCMLPVISAEVRAMARRMYQSAAAAPAGAARVELKRRLFELSHSALMETIARTKTSRAVADDDTDMSPEAQEFMKALDVFLPLLSGANAWDYLPVLRWLDVFGVRNKILRAVSARDAFLRRLIDAERRRLEEGGENNDKKSMIGVLLSLQKSEPEVYTDTMIMALCSSMFAGGSETTATTAEWAMSLLLSHPDVLKKAQAEIDASVGHSRLLGADDLPRLGYLHCIISETLRLYPVVPTLVPHESTADCTVGGHRVPSGTMLLVNVYAIHRDPAIWADPAAFRPERFEDGRADGLFVMPFGMGRRKCPGEALALRTLGLVLGTLIQCFDWDTVGGAEVDMAEGGGITLPRAVPLEAICKPRHAMLGVLKGL

SEQ ID NO: 64855 - protein, 550 aa, Zea mays
  Clone ID: LIB4722-002-E4_FLI.pep
KRVTTWGASQQNYHHDRKLLRHLLFPSRRSSSCNDSSPKSALPLSPPSSPTSGDLSRQIWAVLALGHLRPTMGSESEPAKGLLPYLQRADELQKHEPLVAYYCRLYAMEKGLRIPQKERTKTTNSILISLMNQLEKDKKSLTLGPDDNLHLEGFALNVFAKADKQDRAGRADINTAKTFYAASIFFEILNQFGELHPDIEQKQKYAIWKAAEIRKALKEGRQPEAGPPGGGKDEAPVNTTTISQDMARSHSFSSANQGSEASPRPVNMDFSRRGSFSAVQPGNNLPPQSTEFNDHPSTQSPYSSPPPSQSQHPSPSQSYSSPSYQATDYPSSDIHKPSPNYSSSPYTSTDYPTNELHKPPSNYSPPPYTRTDHPSNDGYNPHSNDKPDVSAYPQAYQPPPYTIDPQHISQNYYSTKAPAAPYNYPNFQSYPSFQDSTSPSVPTEPTYQSSFYPATDGPAATSYTPASNSSAPTHYHSTADYSPQVTPPAAPPASQYKYDSSYQPEVEKIAEAHKAARFAVGALAFDDVSVAVDHLKRALDLLTNPSAEPR

SEQ ID NO: 64856 - protein, 196 aa, Zea mays
  Clone ID: LIB4725-003-F3_FLI.pep
FSLRNNGYLKHEKSTHLTLLNSSVNTLNGCGVCMTFSLSLYGSSGCIGNLSRSQSLPDSKPKRSLRKKYQDSSTGNRRRWQSGLEAMEKNVSISVSLEGNISSIPNSIANDSKTSMENRVDTSFINHAAEAWAEMRRQWVGRQAEVLRKTPREPVISWSTTYDDLLSTSERFPQRIPLSEMVDFLVDIWHEEGLYD

SEQ ID NO: 64857 - protein, 603 aa, Zea mays
  Clone ID: LIB4725-004-B1_FLI.pep
SKQGCAHFTTQPDPEDRVRRDSSRVMATPPPPLPPMPPRHVSCGSLLQELQELWGEIGQDEMKRDRMILQLEEDCLNVYKQKVNQTRKQKADLLQELSLGEADIDKILSALGERETFPRSEKLGGTLMEQLAKIEPVLEDLRRRRDERVNEFKAIQPKIVCLQAEISGAIDHGDPAAPVVDENDLSLKRSGELKEHLNDLQTEKNGRLQKIDIQTNSIHEMCNIMSIDLKMALKDVHPSYAELGRSKPMSISNSSLDRLSEKVHALNHEKKQRLRKLQDLGSTLIELWNLMDTPTDEQRFFDHVTSLIKVSPTTAMPQGCLAHEIIEKVETEVKRLTKLKASKMKELVFKKLTDLEEIYRSVHMDIDSDSERQTLNDLIDSGRADLSELLARMDIRIAEAKEHALSRKDILEKVEKWTLASEEETWLDEYERDQNRYNAVRGAHINLKRAEKARMLVSKLPSLLENLTAKIKAWEKEMGIPFIFNKVRLLDCLDEYTCTRQQKEEEKRRSRELKKLQEQFATEQGAKFGTEPSPIRPLSSRKPLGQSSNANIIGGTPTSRRVSTPMSRKGRPSSGRVQEAVKTAVAPANYVALPKDCSDISTL

SEQ ID NO: 64858 - protein, 281 aa, Zea mays
  Clone ID: LIB4725-004-B6_FLI.pep
LEAGRGLGAFLYRPDPSFIRVVTVRPRSPRRSPKSQPRFLWSARASMASPSPAVSSLETEAPQATVTRERRLNPDLQEHLPKPYLARAMVAVDPDHPTGTEGRDPRGMSVLQQHVAFFDRNGDGVVYPWETFKGMRAIGCGFFTSLVLSFLINLVMSYPTQPGWLPSLLLSVHVKNIHKAKHGSDSETYDTEGRFDPSKFDAIFSKYGRTHPDALTKDEMNSMLKANRNIYDFLGWIAAIGEWHLLYSVAKDKDGLLQRETVRGLFDASLFERLQDSKKSS

SEQ ID NO: 64859 - protein, 282 aa, Zea mays
  Clone ID: LIB4725-011-C11_FLI.pep
EIPKTMPYAKGMQIEVSKLEDNSVVAWSPAVVAKIIWKNNLLVDYTLSKCYGTTLSEEIVDVKHVRPRPPQASEISFCINDEVEAFQGDCWWLGVITNVLPEFKYTFKSTHLGTEVEVNQKFLRLRYDWVGDQWEQESKNVPKAKFTQGVKVEVCSDDEGFRGAWFEATVVKAVGSKFLVEYATLKADDGTKPLKESVEARHIRPCPPDIPATDGFKLLDEVDAFCNDAWWVGVVSKVLGEKRCTVYFRPWKEEMEFEHAQLRLHCDWMGGRWMRASPALEM

SEQ ID NO: 64860 - protein, 146 aa, Zea mays
  Clone ID: LIB4725-013-C1_FLI.pep
TPGPGAVRRLRSHHLRGSIQLAGRNVMAKTSSFKLEHPLEKRQSEANRIREKYPDRIPVIVEKAERSDIPDIDKKKYLVPADLTVGQFVYVVRKRIKLSAEKAIFIFVKNTLPPTAALMSSIYEENKDEDGFLYMTYSGENTFGLL

SEQ ID NO: 64861 - protein, 321 aa, Zea mays
  Clone ID: LIB4725-017-A9_FLI.pep
LEAGRKPKTRPTQAGTTPLNAPGGTQIPNPSTRTMAAQQKIRWGELEEDDGGDLDFLLPPRVVVGPDENGLKKVIEYRFDDDGNKVRVTTTTRVRKLARARLSRSAIERRQWPKFGDALKEDAGSRLTMVSTEEILLERPRAPGSKAEESAASGDPLAMASKGGAVLMVCRTCGKRGDHWTSKCPYKDLAPPTETFTDRPPTSDGPPAPGGPAKGAYVPPTMRGGADRTGDSMRRRNDENSVRVTNLSEDTREPDLLELFRAFGPVSRVYVAVDQKTGSSRGFGFVNFVHREDAEKAINKLNGYGYDNLILRVEWATPRPN

SEQ ID NO: 64862 - protein, 443 aa, Zea mays
  Clone ID: LIB4725-019-E7_FLI.pep
GSTALFMDAGTTKEISKDETWVTLSTLERNKSQYAISCLPLEFRDITVSAMDRIDTMILNLMSETAKSYDISQPLQEINESVRLAFLSSFLDFAGYLERFGGELTENRPNKENNYVSNGYINGTRETFANTDGDLHKKLLVVLSNIGYCKAELSEELYSKYRHIWSPVRNNEERSSDMRDLRTSFSALEEKVLDQYTFAKSNLIRSAAQSYLLDSGIYWGAAPMVKGIRDATLDLLHILVAVHAEVYSGARPLLEKTMKILVEGLVDIFLSVFHENKTKDIRLLDANGFCQLMLELEYFETVLHTYFSPEAQQAMKSLQENLLEKACESVAEAMENPGHQRRPTRGSEDTASDDRQPSVSPDDLLVIAQQCSSDLLQGELERTRLNIACFMESTLQPTAAPAGPKPAAHSSYQAQHAPVQTSSPSFRRQQTGTSSPVVSRRRR

SEQ ID NO: 64863 - protein, 372 aa, Zea mays
  Clone ID: LIB4725-021-F4_FLI.pep
RPPRRAGPAAEAVKLYIFSLTVRLEWSACDPYLCFLRHVHGKRVLVVTNTTVAPLYLDKVTWALTHNNLNVSVESVILPDGEKYKNMDTLMKVFDKAVESRFDRRCTFVALGGGVIGDMCGFAAAAFLRGVNFIQIPTTLMAQVDSSVGGKTGINHPLGKNLIGAFYQPQCVLIDTNTLNTLPDRELASGIAEVVKYGLIRDAPFFEWQEKNMPKLLAREPNALAYAIKRSCENKAEVVAQDEKESGLRATLNLGHTFGHAIETGTGYGAWLHGEAVAAGTVMATDMSHRLGWIDDSIRKRVVDILKQAKLPIAPPETMTVEKFKNIMAVDKKVADGLLRLILLKGPLGCCVFTGDYDGNALDETLHAFCDN

SEQ ID NO: 64864 - protein, 296 aa, Zea mays
  Clone ID: LIB4725-024-H8_FLI.pep
SRPAVTTPTSPSQLPSSCNCCGDSAQIKSPKPSAAAAMLRRLAAVAQRTFSSSSPHAPPLAASGYTPRREYGLVPMVIEHTSRGERAYDIFSRLLKERIVCIHGPITDDTASLVVAQLLFLESENPAKPVHLYINSPGGVVTAGLAIYDTMQYIRSPVTTLCIGQAASMASLLLAAGASGERRALPNARVMIHQPSGGASGQASDIAIHAKEILKVRDRLNKIYAKHTGQAIDRIEQCMERDMFMDPDEAHDWGLIDEVIEHRPVSLVSDAVGSDSQNLGGGGAGVNKGADEPSSA

SEQ ID NO: 64865 - protein, 167 aa, Zea mays
  Clone ID: LIB4726-002-F11_FLI.pep
SRPAGSTQQARASRPKHRKAKPDLRSPAPGRMASSAAYPDADENLEAIITRIEQKSRKIETLLKQSKPVEALKTALEGSPLKTRDERCKSADWIVVHRALMAIRDVDGMFNSLDPEYYDILMKYLYRGLSTGDRPTCDQCLKIHEKLTEKAGLGCILRSLADTVNTV

SEQ ID NO: 64866 - protein, 301 aa, Zea mays
  Clone ID: LIB4726-003-F6_FLI.pep
LMCHSFGATELQVDSQEIENKSAQELPPGWIEVKDPTTGAPYFYNQSTGVSQWDRPDSVVNIMQHQVSPSLPENWEEAIDKSTGHKYYYNTKTQTTQWEPPTSVNTSVRPPASTNTAVEPVAQAADIWNSQMQRCLGCGGWGVGLVQPWGYCNHCTRVQNRPFQQYPSYTNNTMHASGNNAPKAQGNVSAKNRSSSKPPLGKPNRKDHRKRNRPEDDELDPMDPSSYSDAPRGGWVVGLKGVQPRAADTTAAGPLFQQRPYPSPGAVLRKNAEVATHGKKRGGMAPITKRGDGSDGLGEAD

SEQ ID NO: 64867 - protein, 282 aa, Zea mays
  Clone ID: LIB4726-005-A8_FLI.pep
LRPRGQRGFWDGRREIWRRQRRAGDQTMRPVFCGNFDHDTRQYDLERLFSKYGPISRIDMKLGYAFIYFEDERDAEDAIRRLDNVSFGYNRRRLSVEWSRQVEPVPKSRDRPTGDVKPTRTLFVINFDPIRTKVQDIEKHFEPYGKIANIRIRRNFAFVQYETQEEASAAVKNTDKSTILDRVATVEYAFRDDDGDRDDRYDIPKQGAYDRRGGSPYMRSPSPRYRRDYVPDYGRRGRYPGYGRRDGAMYERRSPVYDRYGGGRSPAYDRYDRRRSPGYDQY

SEQ ID NO: 64868 - protein, 251 aa, Zea mays
  Clone ID: LIB4726-012-A1_FLI.pep
RVRGDEMWRRRVGALLLRSPRTSSSASSACQSRRHHLLPSEEPLALNRLARLFTSQAGSDGGDTQKPFIAFVLGGPGSGKGTQCTKIASDFGFAHLSAGDILRHEIASGSEKGELILEIIKEGRIVPSEITVELIRKAMEMNNAKRVLIDGFPRCEENRIAFERIVGTEPDIVIFFDCPEDEMVKRLLGRNQGRVDDNIETIKKRLKVFESLNIPVVDYYSSRGKVHKINATGTADEIFEAVRRLFSSLRL

SEQ ID NO: 64869 - protein, 298 aa, Zea mays
  Clone ID: LIB4726-012-E7_FLI.pep
PNYRFHFRPYQLHSRRLSEAVEDQQQGPLQPSPPLSLLLLPVDQMACRAKVVGQVERVDGESLSYAEFVRRFVAPNRPVVLTGLTSSWRAHKDWTLSGSGDLRRPNLGFFTQNFPSSLVQVDDCSSSDFTDQKRLEMSMQEFIDHWVGGPHCGSSDGDRDGSLLYLKDWHFVKEYPDYIAYTTPTFFVDDWLNMYLDSHPIHRDSDIANHKNEINCSDYRFVYMGAKGTWTPLHADVFRSYSWSANVCGQKQWLFLPPSQSHCIFDRNMRSSVYNLHDVSEKQFPEFNRMARMHSRAE

SEQ ID NO: 64870 - protein, 248 aa, Zea mays
  Clone ID: LIB4726-013-B4_FLI.pep
SRPAWIPSLDRPPLPNCIASPGLAPGPETAIMGASEVWSSVPAWLAIAVGLAAVVSSSEAHVFYAGGRDGWVLDPTESYNHWAGRSRFQVNDTIVFTHEEGVDSVLLVTEQDFDTCNTRNPVRRLQAVGSSGSSERSVFKLDRSGPFFFISSDEERCQKGQKLYVIVMAVRRSTTPAAPAPAPDAAFPPAPSPVPDSAFPPAPSPVWASAPDNAHAPPPTAGASRLDDGAIIGSVLGVIGALVLCTVY

SEQ ID NO: 64871 - protein, 497 aa, Zea mays
  Clone ID: LIB4726-016-D6_FLI.pep
PPTPNTLNPSLAAPATASALDLQQRIGLANTLSSGSMSEPAQPSGGEGDVNTLRILVATDCHLGYMEKDEIRRFDSFQAFEEICALADKNKVDFILLGGDLFHENKPSRSTLVKTIEILRRYCLNDQPVKFQVVSDQTVNFPNRFGKVNYEDPNFNVGLPVFTIHGNHDDPAGVDNLSAIDILSACNLVNYFGKMDLGGSGVGQIAVYPVLVKKGMTSVALYGLGNIRDERLNRMFQTPHSVQWMRPGTQDGESASDWFNILVLHQNRIKTNPKSAINEHFLPRFLDFIVWGHEHECLIDPQEVPGMGFHITQPGSSVATSLIDGEAKPKHVLLLEIKGNQYRPTKIPLRSVRPFEYAEVVLKDEADVNSNDQDSVLEHLDKIVRNLIEKSSQPTASRSEPKLPLVRIKVDYSGFSTINPQRFGQKYVGKVANPQDILIFSKSAKKRQTTGDHIDDSEKLRPEELNQQTIEALVAESNLVPFELHILCPFVPCLRME

SEQ ID NO: 64872 - protein, 164 aa, Zea mays
  Clone ID: LIB4726-016-E7_FLI.pep
SRPAGKTKENRKAAEVVKNSDDPTYPSIDRLPFPSESKWPREFQRTRRGTREPGIAKRARGDELLRFMDGASKEPLRKDYYKVLEVDYDASDDTIKLSYRRLALMWHPDKHKGNSNATTKFQEINDAYKVLSDPTKRLEYDVSGCYEIDQYTLRVRFSCPVARQ

SEQ ID NO: 64873 - protein, 405 aa, Zea mays
  Clone ID: LIB4726-017-A7_FLI.pep
VPRGRPGRNFNAGVYLLAWSQKREDVVGLKAPKKEKRVKKENRTQPPVEAPYVAPKTKISIKPVPDKTVEIFDGMTLLDLSKRTGAYISTLQGILADLGEKVESEFDSISIDLAELVTMELGVNSRRMHTGEGKNEPRPAVVTVMGHVDHGKTSLLDALRQTSVAAKEAGGITQHIGAFVVEMSSGASITFLDTPGHAAFSAMRARGAAVTDIVVLVVAADDGIMPQTLEAMSHAKAANVPIVVAINKCDKSGADPERVRIQLGSEGLLLEDMGGDVQVVEISAVTKSGLDKLEEALLLQAEMMDLKARIDGPAQAFVVEARVDRGRGPLATAIVKYGTLVSGQHIVVGAEWGRIRSLRDTAGNITQSAKPAMPIEIEGLKGLPMAGDDVVVVDSEERARMLSHG

SEQ ID NO: 64874 - protein, 258 aa, Zea mays
  Clone ID: LIB4726-019-D8_FLI.pep
YQLATYIVKYTSNILAPMAAKIFAILALLALSASVATATIIPQCSQQYLSPVTAARFEYPTIQSYRLQEAIAASILRSLALTVQQPYALLQQPSLMNLYLQRIAAQQLQQQLLPTINQVVAANLAAYLQQQQFLPFNQLAGVNPAAYLQAQQLLPFNQLVRSPAAFLLQQQLLPFHLQVVANIAAFLQQQQQLLPFYPQVVGNINAFLQQQQLLPFYPQDVANNVAFLQQQQLLPFNQLALTNPTTLLQQPTIGGAIF

SEQ ID NO: 64875 - protein, 421 aa, Zea mays
  Clone ID: LIB4726-020-A3_FLI.pep
GSDLRASRALALALALPHQPKTRSVARCSGSTTDPLHASSLVPASRSRPSKRLLQRKPPLMALVTSGSGADQVIAEVAMNGGADPSATTVRATVVQASTIFHDTPATLDKAERLIAEAAGYGSQLVVFPEAFIGGYPRGSTFGFGISISIINPKDKGKEAFRRYHASAIDVPGPEVTRLAAVATKYKVFLVMGVIEREGYTLYCSVLFFDPLGRYLGKHRKLMPTALERIIWGFGDGSTIPVYDTPLGKIGALICWENKMPLLRTALYGKGIEIYCAPTADSRPVWQASMTHIALEGGCFVLSANQFCRRKDYPPPPEYEFAGLGEEPSADTVVCPGGSVIISPSGEVLAGPNYEGEALITADLDLGEIVRAKFDFDVVGHYSRPEVLRLVVNDQPQLPVSFTSAAERTPAAKSDIDTKSY

SEQ ID NO: 64876 - protein, 216 aa, Zea mays
  Clone ID: LIB4726-020-F6_FLI.pep
KGKNALPLQMEGVRSDLAICRALLLDDEGEAAPAADVPVGVRRHEHAWAALRVRALHAQPLHLPRGLIDPVPPKHGVETGVLVLVRALLGSGERLSIALLTAASEEAAAQGQHRLLGDVVVSQRVAVAQLLPREDEALLGRRDALGLVHLGLHVRHRVRRLNLQRDRPCRRQRLHEDLHLGHDPCLLSAFRGSQSLSRSRRAAAGCACELYPAGLE

SEQ ID NO: 64877 - protein, 158 aa, Zea mays
  Clone ID: LIB4726-022-B2_FLI.pep
PRACGVRRLPSMAGEAKKLFFASEVTLHASREDCWVVIGGKVYDVTKFLEDHPGGEDVLLHASASGDATEAFEEVGHSTSAVSMMDSYLIGSIKDYVRPSASKATDPWSADVLPNSRTMQGNKVTPNPNTFLDFLLPLFVLGLAFAAWYYLTFISKNH

SEQ ID NO: 64878 - protein, 206 aa, Zea mays
  Clone ID: LIB4727-002-B7_FLI.pep
QGVEKQSTRQQIQHCVHTCSNSDVAPDLHLAEERVPPLGDHLPRGGVGDDDVRAGVGALVAERPGGDAEGVPGRGGVEVNEVDGHVDGDLEMVAVGHGGGGADLVHQGHHGAGGYVIAAGGEACGDREGAEDVAWADALHADPVEREPLEEAGGGGRNSSSTVERVHQRTILIAHPYLQQRLQVMVIRSGHGGWGEGLVGLPAGLE

SEQ ID NO: 64879 - protein, 381 aa, Zea mays
  Clone ID: LIB4727-003-E6_FLI.pep
PRGRPGTKRHKPVVGKGQGKLQDSMAKNYRERRLKRAMKIDEGEDDFEADYQAFSKKYDEKDECHYKFMALLPFKNGLPNVSPPTKEKVGLHFAMKDVVISQKPTTTNEGIIVRPKCKRKTPYRGIRRRPWGKWAAEIRDPTKGVRVWLGTYKTPKDAARAYDAEARKIRGNKAKVNFPNEPPNMVSNAPKLIVTAMTTMAIPADKLNANELMCHKNYSNEDFFSMVNFSGNNGNFISTAAFGLQCIKKPRVPYDIPRMGECSNQNRMTYGLSNGLGNEASRNLNGCSFLPQAGMPIFIQPTFDGPSRMIGRNDGVIVPTLTNATPMAGVDAAKKMNQQPIFQEMESEDIPSILQGDVSEDVAAEISMWEFYDNLLDNKEN

SEQ ID NO: 64880 - protein, 243 aa, Zea mays
  Clone ID: LIB4727-006-G7_FLI.pep
GREAMAEMEPSIGNHMAEDQPTPAASTVEEAAMDADTSGERRSAAALVGLLRGFLAVQQRRAEAYSTLRRGFSEYMAYGGELAYQQLCSNITAEFNDCSKQVLEIISLLSMPEFSRSDLADLLKGVQAHEKEKLHLTAKIQVLKKAGRPSERLVNHADCRSRSMAQHVCVHVKEITEAAGTEDAEADAEYDAALKEAIQGVQVAVSSINEHMEEVRYEIDGLEAETSVASGAKSRKRSLVPCL

SEQ ID NO: 64881 - protein, 292 aa, Zea mays
  Clone ID: LIB4727-006-H2_FLI.pep
GASIASCDCVADSPAGMCSPRPPLGRILRLAVAVAACACFPSPVSGIRKGIGFIQPIVCRSTVQGRHLISDDNGYVCSALSINPWSHCCPTTGDRFSCQGCELDLQCCNSYEYCVSCCLNPSKIKKEDVLKLKVAKPVTAGTYTNVFDFCMGRCRHSSASVVHENAYASDFHYCFSVQQNSSGSTESSSVSKLLGINVVVGRPRESCSLVCKVRGQSCVPSRLSVLNKCEILQKYMRCKSGCFPSLGPDQPAEVVDEAPTSLNPGACLYMQMDERLTCDGSHHHTRRLCPCA

SEQ ID NO: 64882 - protein, 308 aa, Zea mays
  Clone ID: LIB4727-024-H1_FLI.pep
STCNLLLAHLHLQIHPMNSHKFLLAVLLLLLLNYASYAATSKEDDDFLKSCPSHRCHKHGPEIRFPFRLPSLPPSCGAPGMQLSCSGHDTILDHPVLGSCRVTAIYYRHSVMNVIPPEDSSSHCQLQKLVKRNQSTDVYTPVVNPVSVLVGCSREATNQDGIVGPSSCLSLINNASQLWYLVDPSTDMSTLPMGCEVVAKGIPVPYTYDKNGPNYNTFSGRSLFNEKANRTINFGETSFNWNLNNITGSCQRCEQEGKHCGFSSNRRQAFCLHHDEKATQDPEVQLVETAEQDLVEGEEQVVEEEPPN

SEQ ID NO: 64883 - protein, 137 aa, Zea mays
  Clone ID: LIB4728-002-D10_FLI.pep
KAEVAEVKIMVILEVRSAKVKETIAPAQGLNKKGPLMIIRTQTRRMVSGMMKLKDFFIQGRSEDVGLLVPGWTSLVHTLILCPIIRTMDLARTYVWKKNGNAEYKAQRSLHFGDASLSMVIGAWAHWMEGHQALNHR

SEQ ID NO: 64884 - protein, 157 aa, Zea mays
  Clone ID: LIB4728-004-B11_FLI.pep
ARKAERSPPGLPFLPALPEGQKLPEASPSHERRQHRRRGPRACRDRAGAARAGGSDRLHRLDRRRVPQPGLVPQHRQRAQAEFERRRGAVPRQRFGRAAADLHPLHAGSQTAFRAIQRSRGRGPQNSKTLSPTKSIWVSAMSMTIHQVTPSSYHPII

SEQ ID NO: 64885 - protein, 307 aa, Zea mays
  Clone ID: LIB4728-005-B7_FLI.pep
VKSDLHCWSLVDFVIDSKARNSTQHHEQAASVHSIPLHLLLPPEFLLLPHLRSRLHRPVPQMLGLEGDHGAEHTEHGLLDHGALPLRLQQPQRPRHGLHGADAPLARLLPHHEVGLEHAVPVGAAVDWEGDGDRAQRREHGQAGRVHLPGLPPGAVEEEEGGGGTRGPRRGPAPGDEVGGGGRRVEQEDGARGGSGGRGEEAAARDEAEVGEAAREEGQCRERVPPEGVRVVEDDDGRGGRERGGREVRAQADAGRAATAGVADGAAGRGGGGGDAAIAVIVGGDWIEVVHRAQWSVTRWLAPGRPR

SEQ ID NO: 64886 - protein, 369 aa, Zea mays
  Clone ID: LIB4728-008-H11_FLI.pep
ASYPYRARPMDVTSTAAASASGGGRWYTGMSADNIKGLVLALSSSLFIGASFIIKKKGLKKAASSGVRAGVGGYSYLYEPLWWVGMITMIVGEVANFAAYAFAPAILVTPLGALSIIISAVLAHVMLREKLHIFGILGCALCVVGSTTIVLHAPPEREIEPVTEVWDLATEPAFMCYAAVVIAIAAILVYRFVPLYGQTHVMVYIGVCSLVGSISVMSVKALGIALKLTFSGTNQLIYPQTWAFSLVVISCIITQMNYLNKALDTFNTAVVSPIYYTMFTSLTILASVIMFKDWDRQNPTQIVTEMCGFVTILSGTFLLHKTKDMADGGLSMSSSFRLPTSSSVRFSKQTDEDGEGIPLRSSESFRSPH

SEQ ID NO: 64887 - protein, 130 aa, Zea mays
  Clone ID: LIB4728-011-D4_FLI.pep
SVMAAPPARARADYDYLIKLLLIGDSGVGKSCLLLRFSDGSFTTSFITTIGIDFKIRTVELDGKRIKLQIWDTAGQERFRTITTAYYRGAMGILLVYDVTDESSFNNIRNWIRNIEQHASDNVNKILVGN

SEQ ID NO: 64888 - protein, 339 aa, Zea mays
  Clone ID: LIB4728-012-A10_FLI.pep
KTKREGENWTAAAAETTMQWYLVAALLTILTSSQGILTTLSQSNGKYNYDYATIPFLAELFKLSVSGFFLWKECHSSSPPRMTKEWRSVRLYVVPSVIYLIHNNVQFATLTYVDPSTYQIMGNLKIVTTGILFRLVLKRKLSNIQWMAIVLLAVGTTTSQVKGCGDSPCDSLFSAPLEGYLLGILSACLSALAGVYTEYLMKKNDDSLYWQNVQLYTFGVIFNMGWLIYGDFKAGFELGPWWQRLFNGYSITTWMVVFNLGSTGLLVSWLMKYSDNIVKVYSTSMAMLLTMVLSIYLFSVKATIQLFLGIIICIISLQMYFMPVHMLIELPQTLPVTSK

SEQ ID NO: 64889 - protein, 306 aa, Zea mays
  Clone ID: LIB4728-013-G4_FLI.pep
REHSFWSCSALIPTAEPAKPAAAFRIMAAAAAAGGAASAAVASQEPMKALGTGILRRSAPHWSTAAASFFSPPFRPRRCRRAPAPAAAARTPRSRASAKARAKLLAEVEARDPWLASLSLLPTDDIPSADATTNGWVIGVDPDIGGAIAVLSPDGSSQVFDNPFVHIVVSEVIRKRLDTKSIIQLLRGLDAPPGTTAYIEKPSPFPTDGKQGWWSTGFSYGLWIASLVASGFSVVPIASQTWKAYFGLMRSETPKDDSRQAASILFPDKDQSLKLKKHHGRAEALLLAAYGKGLVLPSGKFSKTSV

SEQ ID NO: 64890 - protein, 249 aa, Zea mays
  Clone ID: LIB4728-015-H1_FLI.pep
MPPNRKRRAAAMDPAAGGAGQQRQNKASAGKKVKKGGGSGGRWPAVKPKKDLQINRLKGTHLLTIPDFFTSAEAKAFIDIAESMGFTHQGSLGPLKGEAYRDNDRISVTDPLLAQAIWESGINRIFTDISVSGKVATGLNPNIRFYRYTEGQRFGRHIDESVSLADGSKTYYTLLIYLSGKGSAKDSSGQALVGGETVFYDQRGGVVAEVAPVQGMALLHLHGAKCMLHEARVVKKNAKYVLRSDVVFS

SEQ ID NO: 64891 - protein, 274 aa, Zea mays
  Clone ID: LIB4728-021-A2_FLI.pep
SPRPHYSTSARRCGAEAMEVLSSSRFARAILPNLLDPAIRILSKPPCRRRRAVQTLASNAHAPTAAPSPSPSLALLLATALRGGRTGGELPDLATAATGGAGIGTLLMSTTAAAVTKARESPYLLALAANPTFVSGLVAWAVAQAAKALLTSVVERRWDLRMLFSSGGMPSSHTALCTALTASVALCHGVSDALFPVCLGFSLIVMYDATGVRRHAGMQAEVLNKIVEDLFEGHPISERKLKELLGHTPSQVFAGAILGILVAWYCCQGCIVPM

SEQ ID NO: 64892 - protein, 321 aa, Zea mays
  Clone ID: LIB4729-002-B3_FLI.pep
LRPPFPQNPTAMDGGGGGVGGGGVGAGVMVGGGVGPGGGVGVGVGGDVELVSKTLQFEHKLFYFDLKENPRGRYLKISEKTSATRSTIIVPVDGVAWFLDLFDYYIRTDERDAFSKELRLQTKVFYFDIGENKRGRFLKVSEASVNRNRSTIIVPAGSSGEEGWEAFRSVLLEINNEATRLYVLPNHPNQQHMEPPERLPGLSDDVGAGFIAGHGSQSASGPEVDVERLVDLPPQEEISGMGMSKVIRADQKRFFFDLGSNNRGHYLRISEVAGADRSSIILPLSGLKQFHEMVGHFVGIMKDRLEGMTGANVRTVEPSQR

SEQ ID NO: 64893 - protein, 198 aa, Zea mays
  Clone ID: LIB4729-003-F5_FLI.pep
LEAGRGNPSRTTSERGTRGGRRERRRLSPLGVPVPQPLVCCLPACKKEFVMASKRILKELKDLQKDPPTSCSAGPAGEDMFHWQATIMGPPDSPYAGGVFLVNIHFPPDYPFKPPKVSFKTKVFHPNINSNGSICLDILKEQWSPALTISKVLLSICSLLTDPNPDDPLVPEIAHMYKTDRPKYESTARSWTQKYAMG

SEQ ID NO: 64894 - protein, 306 aa, Zea mays
  Clone ID: LIB4729-005-G3_FLI.pep
GRPGQTSPHLYYPVPLVFLPPQAAKSNLEAPLSPFSLFAVRSSAPQSNRHLTEMGRKFFVGGNWKCNGTTDQVEKIVKTLNEGQVPPSDVVEVVVSPPYVFLPVVKSQLRQEFHVAAQNCWVKKGGAFTGEVSAEMLVNLGVPWVILGHSERRALLGESNEFVGDKVAYALSQGLKVIACVGETLEQREAGSTMDVVAAQTKAIAEKIKDWSNVVVAYEPVWAIGTGKVATPAQAQEVHASLRDWLKTNASPEVAESTRIIYGGSVTAANCKELAAQPDVDGFLVGGASLKPEFIDIINAATVKSA

SEQ ID NO: 64895 - protein, 592 aa, Zea mays
  Clone ID: LIB4729-006-D2_FLI.pep
PRLAMNSLLRPPLPGPTPSLSARRMVSPPPAPVRVSSAALAGSGRRCRLGLAVAASAAPSWMEEAGVAVLEEGGRRNPSVSDSYRPAGLPRPNATVLEAQARVCTGPAQTRPLGEEQAMRVLDTILRSAMGELKEEPVSSAQLGAFFAGMTIRSNSFPEATQWSEGERRAMSIFWPRLVQILPPEVKFIADPEGTIMGANGLTGPRYVGQGTGEMRLVGALREVLAGGHLGYEEVQCVLKDILPIGPSSDLTVTSEALLAAFLIGQRMNRETDRELKAYCLAFDDELGPPLVADVKSLTHYGEPYDGNTRFFRSTLFVAAVRACYSESCLLHGVQWMPPKGGITEGQMLKFMGANIHLSPTQAKILLEDETAGFAYLNLQEACPPLYSIIGLREHIKKRPPLATSEKVQQSVRARGRESMVAGFYHEGYEDPLLMLMRRRTVHAGLVVKGEEGALSLTTKERSAHASKGLPVNHCSGFRTPSGINFSETDGIPRESFRVIVNAQELGFESTETPRTDRSILRNLELGLAALGGEKGAAYDRIVLNAAMADHLLGCSGAEDIDAALDRAREAIGSGEALRRLMSYIKISHKVS

SEQ ID NO: 64896 - protein, 421 aa, Zea mays
  Clone ID: LIB4729-008-B10_FLI.pep
SLLRKADRGRRSLGHPRDGRGAKPQRRVRAMRSSEASSRLVQELVLYAASAALSCLVLFAGLRHLDPNRAASQKAQQQKKEIAKRLGRPLVSTTPYEDVIACDVINPDSIDVEFDSIGGLDQIKQALYELVILPLRRPELFTFGKLLSPQKGVLLYGPPGTGKTMLAKAIARESGAVFINVRISNLMSKWFGDAQKLVAAVFSLAHKLQPAIIFIDEVDSFLGQRRTTDHEAMTNMKTEFMSLWDGFTTDQNARVMVLAATNRPSELDEAILRRFTQIFEIGIPVESERSKILQVVLKGENVEHNIDYDHIASLCEGFTGSDILELCKQAAFYPIRELLDDEKKGRKLDKPRPLRQSDLERALSMSRKGKKAASSALQSPLWVRPTNSEDDQVQNAIFEISKLMSRIVQNSESEPQEPSSP

SEQ ID NO: 64897 - protein, 408 aa, Zea mays
  Clone ID: LIB4729-012-C5_FLI.pep
RDTRTYRTERTRRHSPSSQQGGTQAGGHMAAGGAGAAVAAVLTTAVAAVLVAVLTTTVSGQDDPAPAAAACARRPVVFAFGDSNTDTGGVAAGLGHYYPLPEGRVFFRRSTGRLCDGRLVIDYLCESLNMSYLSPYLEAVGSDFTGGANFAISGSSTLPRNVPFALHVQVQQFLHLKQRSLDLAAHGGTAPVDADGFRNALYLIDIGQNDLSAAFGSGAPYDDVVHQRIPAIVSEIKDAIMTLYYNGAKNFWVHGTGPLGCLPQKLAAPRPDDSDLDYNGCLKTLNDGAYEFNGQLCAACDGLRSQLRGATIVYTDVLLVKYDLIANHTAYGFEEPLMACCGYGGPPYNYNANVSCLGPGFRVCEDGTKFVSWDGVHYTDAANALVAAKIFSGQFSTPQMPFDYFCQA

SEQ ID NO: 64898 - protein, 191 aa, Zea mays
  Clone ID: LIB4729-012-E2_FLI.pep
ISHSLVHSPLHSRRWIPCPTASPEAGTMKPVSVAEHNNHQHRLHSPTPASATKISIPISSSEAALFGKGRYKVWALAAIALLALWSMFAASVTLRLSSVDLATTFGDASDPLIDELDPLEMEQREKLVRRMWDVYTRTDNHVRLPRFWQEAFEAAYEELAGDDTLTTDAAISEIARMSIHRPEVEQSSNKD

SEQ ID NO: 64899 - protein, 578 aa, Zea mays
  Clone ID: LIB4729-013-C8_FLI.pep
SEPPPNPNYLKPPSRCPMAAASPPPSPPHAKRPKMSSSSDPEADAEPTSASAAVEGADPAQRRPRYKRRKVAILLGYCGAGYQGMQKNPGARTIKGDLEEALYQAGAVPEADRSAPRRYDWARAARTDKGVSAAAQVVSGRFYVDPPGFIDRLNAQLAPQIRAYGYVRVTNSFNAKKFCDRRRYLYLLPVFALDPSAHPDREAVMASMGSGSELTKCLECSERGRKIPGVMGRDGKLPSPGQNGVDAPVEGSSHDESGTLGDAKCDHTSSDGGNPFAHGEVGSNSKEKPDLPVPGDGTEVANAEMGSNGDSDVVSSDIYMGNEEKKLPAATENKAQGMESEKSNGEEKLPTKTTFSYTDEVKERFNRILKYYVGTHNFHNFTTRTKAEDPAAKRFIISFAADRVVSLDGIDFVRCEVVGQSFMLHQIRKMIGLAVAVMRNCAPESIYDVAFRKDVNLNVPTAPEVGLYLDECMFTSYNKKWKDPHEAVFMEPYSEEAEEFKVKYIFTHIAAMEHKEGAVALWLHSLNHRNYPDFRYMETAEHNAGAEVESIAAGAEPKVGAEVENTEEVQMPSDNLSE

SEQ ID NO: 64900 - protein, 305 aa, Zea mays
  Clone ID: LIB4729-013-D5_FLI.pep
LEAGRETRQIQAKATPAGDDFPFQHPPPPSLPPRTLIPRHPSMATNSAVIVLLLVAAAVLACAGGARGFYLPGVAPAGFLKKDPLAVKVNQLSSIKTQLPYSYYSLPFCRPGTIVDSAENLGEVLRGDRIENSLYVFEMMEPRLCQIVCKIAPTQDEAKDLKEKIEDEYRINMILDNLPLVVPIKRLDQEAPTVYQQGVHIGIKGQYSGSKEEKHFIHNHFTFLVKYHKDDTGLARIVAFEVKPYSIKHEFDGDWKGNATLLKTCDPHSRRLVVDSDSPQEVDANKEIIFTYDINFEVSFNYFSS

SEQ ID NO: 64901 - protein, 502 aa, Zea mays
  Clone ID: LIB4729-014-B4_FLI.pep
QRKMSSQELFSPVRAAQSATTHTPPTNTMDAAAKEALILDLHAVEAVKLGTFVLKSGITSPIYLDLRVPVSHPRLLASVASLLGALPATRPYDLLCGVPYTALPLAAALSVAASVPMLLSRYDTKRVEGAFRAAQTVLIVEDLVTSGASVLETVAPLRAEGLVVADAVVVIDREQGGRENLAASGVALHSLMTLTEMLAVLARHGKVGEEKIAEVRRFLQANRKVAVPGVPAGPPKPSATARRKSFAERAGLATNPMGRRLFEVMEAKQSNLCVAADVGTAKELLELADKVGPEICMLKTHVDILSDFTPDFGANLRTIAGKHNFLIFEDRKFADIGNTVTMQSEGGIFRILDWADIINAHIVPGPGIVDGLKLKGLPKGRGLLLLAEMSSAGNLAYGDYTAAAVKIAEQHPDFVIGFISVNPASWSPAPSSPAFIHATPGVQIAAGGDALGQQYNTPFSVINDRGSDIIIVGRGIIKASNPVETARQYRMEGWQAYQSGFS

SEQ ID NO: 64902 - protein, 190 aa, Zea mays
  Clone ID: LIB4729-015-B8_FLI.pep
SMLSFHNALFKQRTHKKKHSHKHLAMRHTSNNVFSQGQDLEVLLLPQLVGDGAKDAGADQLALLVHEDHRVVVELDLAAIAASFLHGGTDDHAVDYVSFLDLATRLGLLYGSDDHVPEPCSFLPPQGLDAHHPLGPGVIDHLQVSPHLDECSDLLTDSIAMRRPCYCPNRRVGSPKQTISKASHQSTSNW

SEQ ID NO: 64903 - protein, 251 aa, Zea mays
  Clone ID: LIB4729-016-G2_FLI.pep
SRPAGSAIVHGSYRSLLCPLQSPRRSRSRQPSLAAAPQQPPPLQGSPIETTRPATMAFASSLLPVPPYRVCATPASEVAAFSPAKKSVSFAAARQRRGSRHGVRAEVNESGSVLAVDALSQVKHVLLPVLDRNPYLSEGTRQAAATTASLAKKYGADITVVVIDDKPKESVPEHDTQMSSIRWHLSEGGFSEFRLMERLGEGQKPTAIIGEVADEWDLDLVVLSMEAIHSKHVDGNLLAEFIPCPVLLLPL

SEQ ID NO: 64904 - protein, 155 aa, Zea mays
  Clone ID: LIB4729-017-C12_FLI.pep
NPFVGYKSVPAKPETWRPQPAAACFLVRRGHALVKLGEPHADPHGVLQELLRAPADARLLLLVQVLAPERVHAVREAPLHQRIVHSPAVADLELVDHGGHPHLVLLGEAVQVAEHALVHGRRRRYGSSTWLATTIRTRQGRGTGLGRRRLARTEG

SEQ ID NO: 64905 - protein, 390 aa, Zea mays
  Clone ID: LIB4729-017-F1_FLI.pep
PGLPSLSITFFVSSSDSPPAGLLCSHPMEPDAAQNPSPSPVPPPISAYYQTRAEHHAVVTGDWLAHAAAAAAAFPGADTADAAPPPSPGGGGVIEEFNFWRRKPEAAEAVAAIMALAAVIRSSRATTMMELEIELKKASDKLKSWDATSISLSAACDLFMRFVTRTSHLEHEKFDAAKSRLIERGEKFGEISLKARKTIAMLSQDFIYDGCTILVHGYSRVVLEVLKLAASNRKLFRVLCTEGRPDRTGLRMSNELAALGIPVKVLIDSAVAYSIDEVDMVFVGADGVVESGGIINMMGTYQIALVAHTMDKPVYVAAESYKFARLYPLDQKDMTPAHRPIDFGVPIPIGVEVETSARDYTPPQYLTLLLTDLGVLTPSVVSDELIQLYL

SEQ ID NO: 64906 - protein, 514 aa, Zea mays
  Clone ID: LIB4729-018-A12_FLI.pep
SRPFRAPARLLRLSSSAMFSHGADSAHDAGTVGVSSGVGATVPARFVWPYGGKRVFVSGSFTRWSEHLPMSPVEGCPTVFQAICSLSPGIHEYKFYVDGEWRHDERQPTISGEFGIVNTLYLTREFNQINALLNPSTPGSRMNMDVDNENFQHTVTLSDGTIPEGTVRVSEAAIQISRCRVSEYLNLHTCYDLLPDSGKVIALDINLPVKQSFHILHEQGIPVAPLWDSFRGQFVGLLSPLDFILILRELETHGSNLTEDQLETHTISAWKEAKRQTCGRNDGQWRAHQHLVHATPYESLRDIAVKLLLNDISTVPVIYSSSSDGSFPQLLHLASLSGILKCIFRYFKNSTGNLPILNQPVCSIPLGSWVPKIGDPNSRPLAMLRPNASLSSALNMLVQAGVSSIPIVDENDSLLDTYSRSDITALAKDKVYTHVRLDEMTIHQALQLGQDANTPFGFFNGQRCQMCLRSDPLLKVMERLANPGVRRVFVVEAGSKRVEGIISLSDIFKFLLSL

SEQ ID NO: 64907 - protein, 379 aa, Zea mays
  Clone ID: LIB4729-019-H4_FLI.pep
LVGSRSRAAMTSTAAGASSSAAKSESYLRADKIDLESLDIQLEKQLAKTWEKHKGSYNQGPREDWEIDLAKLEIRYVIAQGTYGTVYRGTYDGQDVAVKLLDWGEDGFASETETATLRASFKQEVAVWHELNHPNVTKFVGASMGTTDLKIPANSSNSGGRTELPPRACCVVVEYLAGGSLKQYLIKNRRRKLAYKVVVQIALDLARGLNYLHSRKIVHRDVKTENMLLDTQRNLKIADFGVARVEAQNPKDMTGATGTLGYMAPEVLEGKPYNRKCDVYSFGICLWEIYCCDMPYPDLSFADVSSAVVHQNLRPDIPRCCPSPMANIMRKCWDANPDKRPDMDDVVRFLEALDTSKGGGMIPEGQAGGCLCFFRARGP

SEQ ID NO: 64908 - protein, 293 aa, Zea mays
  Clone ID: LIB4729-020-C7_FLI.pep
HDSDSAMATPPALLFPSPSSASSPPSSAQVEAVVLFNVCDSYVRRPDQADRVIGTLLGSLLPDGTVHVRNSYVVPHSESADQVAIDIDYHHNMYASHQKVNPKEVIVGWFSTGFGVSGGSTLIHEFYSREVQSPIHLTVDTGFTRGEASIKAYVSSNLSLGDRQLAAQFQEIPLDLRMIGAEKAGFEILKSTMVEKLPNDLEGMESSMEKLYILIDEIYKYVDDVVEGRVAPDNRIGRLVSESVASMPKLSPAAFDKLFNDKIQDNLALVYLSSITRTQISIAEKLNTAAQAL

SEQ ID NO: 64909 - protein, 355 aa, Zea mays
  Clone ID: LIB4729-021-A6_FLI.pep
NLQTPAMAGSPSFRRYPLASSVDLVRWLPSSSISPSGRLLAAAVHDPTSGSFASSIRLLPLSDPVSRLASVPLPSRATALRCSHAALAAATSSGSLHFVPSSFDSDAAVSVPGGAGFHVGPVRGLDCGGEEWVTAGEDGRVHVVGGVADGRVVTRRVWDGKGMSGYEAARWASPVEFATGGAGCGVQWWDRRKGDAIVARCNGIWGRGVVTGMVHSIDIHPSRKHICVVGGSSGTVFAWDLRQPQEPIPISVLGLNETAEPVCESEVWEVLFDTYTKSSDIISSASARILPLMMCSEDGILAVVEQDKRPLELLAESCAINSFDIDPQNPSDVVCALEWESVGVLTRGRDAMSEE

SEQ ID NO: 64910 - protein, 264 aa, Zea mays
  Clone ID: LIB4729-021-F1_FLI.pep
GKKKKKKPVPSPKSKLQSPNSKPNAPAPPHAYGIRIPHLPLLAFPPRRRLSFPNSDSRLPGVSVSASGSSADPREASSTPTRPGAATGSSHSQKNMGHDEAVVTQNSVKAPSPPKDQPAIYPCFDWSTVQAYYGPGVLPPAFFNPGIAPGHAPPPYVWGPQTMPPAAFGKSYAAIYPHAGGFLHPLMPLVVNPLSAEPAKSGNSKDNSLNKKLKEIDGSAVSSGNSEKTRWLHDISNIFFPTNLEVYCSGMLFEPDLSRRTVRP

SEQ ID NO: 64911 - protein, 556 aa, Zea mays
  Clone ID: LIB4729-022-E2_FLI.pep
SRPAELTSPSITDSRSRSRRKKRYRARGESLGGWEEEEPSRLDSSPIASPPRSSWWPMAGEGEDEAAAIERQLEQQLQEQRSSLAAVDEALAADPSNADLLEVHEELLAAIKDAEEGLLHLKRSRLLKQVDEIFPDKESISQSPEVAIESLDPDDVEPEPLESHDFSVGSKCRFRHNNGRWYNGCIIGFEGSGDARISFLTPTSENMSICKFFLQQRCRFGSNCRMSHGIVMPSKALKRFTPTRWEQSLVGSSILATSGYNSGLWRRAELESWDDNLKIGQVVFQDDGSSASLPSDSLSVSEYADMSDEDEGSLSDEESEFSDDADQEDGSVHQGLGLLEFTNFSGIQTDTMIFAKWEHHTRGVASKMMAKMGYREGMGLGVSGQGMLDPIPVKVLPPKQSLDHALASSEADGGSGKKRSRGGKRKREKKFAEQARAAKAEEAERSVFNFINSHLVSQEGSTTKVRKGSSVETNGLAKKEDRRSLVAYGEEVKELRIRVEKLEEMKNRNCKDKAFFEAASRKLEETRKALADAEATHASATSAVTRKEKEKKWLKF

SEQ ID NO: 64912 - protein, 225 aa, Zea mays; identical to SEQ ID NO: 43694
  Clone ID: LIB4729-023-A10_FLI.pep

SEQ ID NO: 64913 - protein, 603 aa, Zea mays
  Clone ID: LIB4729-024-H5_FLI.pep
TAAGGILVGGWRRRLLTLLQSRAAMRLPLPLLALVCCALMARQHCAAAGKARHLRWEISNMFWSPDCEEKVVIGINGQFPGPTIRARAGDTVHVQLRNALHTEGVVIHWHGIRQIGTPWADGTAAISQCAINPEETFTYRFVVDKPGTYFYHGHYGMQRAAGLYGSLVVDVAEGEEEPFQYDGELNLLLSDWYHESIHTQMVALSSRPFRWIGEPQSLLINGRGQFNCSLAAAHMLGATNQCAATAANTQCAPVVLPVQPNKTYRLRVASTTSLASLNLAIGNHKLTVVEADGNYVDPFVVDDIDLYSGDSYSVLLTTDQDTSSNYWLSVGVRGRLPKTAPALAVLNYRPNRASDLPALAPPVTPAWDDYGHSKAFTYRIRARAGTPPPPPTAARRIELLNTQNRMDGRIRWSINNVSMVLPATPYLGSLKMGLKSTLAAARPAETFSREYGVTLPPPNPNTTVGDNVYVLAHNTTVDVLLQNANALSRNVSEVHPWHLHGHDFWVLGYGDGAYRGDAADEARLNLRDPPLRNTAVIFPYGWTMLRFVADNPGVWAFHCHIEPHLHMGMGVIFAEAVDLVAKVPNEAVSCGATATALMAGGHL

SEQ ID NO: 64914 - protein, 276 aa, Zea mays
  Clone ID: LIB4730-001-G2_FLI.pep
ASPRHTDNTGTGSEQSGAMAPRLLLFLLLLLPLLAAGHQHPSSYGSSALSEWRPAKASYYAADPEDAIGGACGFGDLGKHGYGMATVGLSTALFERGAACGGCYEVKCVEDLKYCLPGTSIVVTATNFCAPNYGLPADAGGHCNPPNHHFLLPIQSFEKIALWKAGIMPIQYRRVKCLREGGVRFSVNGRHFFFTVLISNVGGAGDVRSVKIKGTELGWLPMGRNWGQVWHINCDMRGQPLSFELSSSDGKTLTSFNVVPKDWEYGKTYTGKQFLL

SEQ ID NO: 64915 - protein, 407 aa, Zea mays
  Clone ID: LIB4730-001-G9_FLI.pep
IGVTMDGGSSTPASPPPTVSASAENMEEYRNWKKNAAVLYDLVISHPLEWPSLTVQWLPSESSARSHRLVVGTHTSDEAPNNLMVLDAVLPLPPRLAAAVAASGGAVPFPSVSVSRVAPHRGEVNRARCMPQRPYTVATKTCVDEVHVYHLGDDDGSGKSGAEVVLKGHEAEGYGLSWSPMKEGWLLSGSYDKKICLWDISSGSGAPVLDAQQVFVAHEDLVEDVAWHLKDEHIFGSVGDDCKLMMWDLRTNKPEQSILAHRKEVNSLSFNPFNEWILATASGDTTINLFDMRKLSRSLHTFDSHEAEVFQVEWNPNLATVLASSAADKRVMIWDINRIGDEQSEEDADDGPPELLFVHGGHTDKISELSWNPSEKWAIASVSEDNILQIWEMAESIYCDDLSMQVN

SEQ ID NO: 64916 - protein, 487 aa, Zea mays
  Clone ID: LIB4730-002-F3_FLI.pep
KQLSPPRLPTSCLPQFHLSISPRKKKEKKTQKGLERNGSGAEGSSPSAAMAGWCEEAVALLQRPAAAEMAVDVLLCAVPIWAAVMIGLVVGWSWRPRWTGLLFLGLRTRLRIIWLPPGLGARRLWFACTALSACSVAPRLLSSAFRRCRGKQQDKASPEDTAAVARDGGGCADGRTNFEGEHDTVTEKDLELLLQLLDNKESGDTAWQNLMERTTSNMTYKAWRREPEEGPIMYCSRTIFEDATPELVRDFFWDGDFRLKWDPMLAYSKSLDEFPQNGATIVHWIKKFPFFCSDREYIFGGRIWESGKTYYCVTKGVPYPSLPKKEKPRRVELYFSSWRIRAVQSPKHVGQQSACEVTLVHYEDMGIPKDVARVAIRHGMWGAVKKLQSGFRAYQQMRDTENTLSHSAIMARMTTRVSIKASNGGLDHDLSIADKISGENDSSHAVQHGFDWKWVVFGGAVAAVCVLNTGLVGKVLLLGAARRQAKK

SEQ ID NO: 64917 - protein, 533 aa, Zea mays
  Clone ID: LIB4730-004-A4_FLI.pep
PPKSQLDLSRFGRTVCLPLVPAAMAVAAPGQLNLDEAPSWGSRSVDCFEKLEQIGEGTYGQVYMAKETGTNEIVALKKIRMDNEREGFPITAIREIKILKKLHHQNVIKLKEIVTSPGPERDEQGKPIDGNKYKGSIYMVFEYMDHDLTGLADRPGMRFTVPQIKCYMRQLLTGLHYCHVNQVLHRDIKGSNLLIDNEGNLKLADFGLARSFSSDHNGNLTNRVITLWYRPPELLLGSTKYGPAVDMWSVGCIFAELLNGKPILPGKNEPEQLTKIFELCGTPDDTIWPGVTKMPWYNNFKPPRPLKRRVKDFFKHFDRHALDLLEKMLTLDPSQRISAKDALDAEYFWTDPLPCDPKSLPKYEASHEFQTKKKRQQQRQAEEAAKRQKLNHPPPHSRLPPLQQPGQAHPQMRPGQGMHNVPPVAAGPGHHYAKPRGPGGPNRYPQGGNQGGGYNPNRGGQGGGYGSGPYPQQGRGPPYPGAAGPRGSGGSGYGAGGPNYQQGGPYGTSGPGRGPNYSQGSGSRNQQQYGNWQ

SEQ ID NO: 64918 - protein, 173 aa, Zea mays
  Clone ID: LIB4730-004-C11_FLI.pep
AMDRELSPRGNAPGRGSGGASSSKHKNGGGGKKPIKVLYIANPMRVQTSAEGFRALVQELTGQHADPSKYSPGDLDSGAAAQGLSPRARVADVSSETIVASHSPGSKAAPHGGDYYDVEEDEDDVFRSPHMLLENNYTVFSPPTLLYDHHPHSKATSESEAGFAAEHDNFWSK

SEQ ID NO: 64919 - protein, 517 aa, Zea mays
  Clone ID: LIB4730-005-B3_FLI.pep
PAIVPPALASRDLHCNRTAMMKPPAPAVPSPEPPRLAGGGRGPRGLRSLPALSYNTHRALVLGLTFLAYALYHASRKPPSIVKRELARSWPPFADPALLGATDVAFLTSYSLGMFVAGHLGDCLDLRRFLAFGMVTSGAAVALFGAGYFLGQHSLAFYVVAQVIAGLLQSTGWPSVVAIVGNWFSGRRRGLIMGIWNAHTSVGNITGSLVAAAMLGYGWGWSFVVPGGLIALGGVLVLFFLAPYPQYVGFGPSPIEEPVTDESTDGEDISAADGAGKDRRDAVGIFKALAIPGVVIFALCLFFAKLVAYTFLYWLPFYLSQTAIGDEHMSAASAGYLSVLFDVGGIVGGVLAGFISDQLNARATTAAVFMYLAIPSLFLFHAYGSTSKATNIGLMMISGLFVNGPYALITTAVSADLGTHKSLKGDSRALATVTAIIDGTGSLGAALGPFITGLISRKGWDLVFTMLALCALVAAVLLSSHVKTEIPQIIQKWRDRSTNTQNGNADPGVQPLLVDES

SEQ ID NO: 64920 - protein, 374 aa, Zea mays
  Clone ID: LIB4730-005-D8_FLI.pep
LQCRFDDDDSRPFYLHRDNQGRKAMVLFELDPDIIRWGLHHLLPAPAGYSPHSRTQTTPTTPCTAFARPPHQPNGDMGTSSSVEIKVEHVDGVDNDAIIAQALQEELSNVAFAEASGPTSAADNQQNSAVLTQQWLRPRAVHVEPASQEAGTREEPFSTCSSPGDDNNVQDSQQCLIELMDNFSVIDGEVGKRLNNMVPVPHVPKTNGEIPSVDEAISDHQRLLDRLVVYGLVDLKVKGDGNCQFRALSDQFYRTPEHHRFVRQQVVKQLESHPEIYAGYVPMDYREYLKKMSKSGEWGDHVTLQAAADSYGVKIFILTSFRDTCYIEILPVVEKSRRVICLSFWAEVHYNSIYPEGELPVLEFDNKRKRWWPF

SEQ ID NO: 64921 - protein, 356 aa, Zea mays
  Clone ID: LIB4730-006-C8_FLI.pep
SRPAGTFSIVVFRKMWFGGGPIDAAGALRGFVREAGGCAVVDGGLGTELEAHGADLHDALWSAKCLASAPHLIRKVHLDYLEAGADVIISASYQATIEGFQSRGFSRDESEELLRRSVHVAQEARRVFAAEGDRSSRRGRPPALVAASVGSYGAYRADGSEYSGDYGKSMTKEDLKNFHRRRLQVLAGAGPDLIAFETIPNKLEAQVYAELLEENGIRIPAWFSFTSKDGVNAASGDPINECAAVADSCPGVAAVGVNCTAPRFIHGLILSIKKVTSKPIVVYPNSGETYVAETNEWVDSDGATGTDGFVSRVGEWRRAGAALIGGCCRTSPATVRAIARAVREAEYDDIPAVAVL

SEQ ID NO: 64922 - protein, 193 aa, Zea mays
  Clone ID: LIB4730-008-E2_FLI.pep
AVSEWRDSGCAGQEQATKKMSTLDTRTLKDELTSMDRKCLVDLGHPLLNRVADSFIRAAGVGAARAVSREAYVVTVEGLSGDSSGLDADGGKRSHFSSIRGDDGQRSLDAVVKTAGKEAFQWGLAAGVYSGLTYALREARGCHDWKNSAIAGAIAGAAVALTGDAGGHSDKLVNFAITGAALSSAGSLLPGIF

SEQ ID NO: 64923 - protein, 367 aa, Zea mays
  Clone ID: LIB4730-009-C8_FLI.pep
RGRPGSLILTRVVASLLFSSAAWCKTKREEEATMAGSVSNGSGKSLARWLRENGFDDDAVARMSRRCRNLHSLDAGEAPGVWDYLLTGVKMERRKLRHVVAKCPKLLTLSVDGKLAPTVQCLATLQARPGEVAQAIAKFPQILFHSVEEKLCPLLAFFQTLGVSERQLAKLLMVNPRLISYSIEAKFSQTVGFLAGLGVDREGMIGKILTKEPYIMGYSVDKRLRPTAEFLKSEVGLQGPDLQRVVMTFPDILSRDVDKILRPNLAFLQSRGFSRDQVTALVAGYPPVLIKSIKHCLEPRIKFLVEEMGRDMGEVVGYPQFFRHGLKRSLEYRHKVLKQMNSSCSLSEMLDCNHKKFAMKFGLVAAV

SEQ ID NO: 64924 - protein, 512 aa, Zea mays
  Clone ID: LIB4730-009-H10_FLI.pep
LEAGRGRTFSFSGHCTLLTAADQATGGLPLLPPRQSSLLSPHSSVLTHRSSVQAIRAKSVRSRSHHCSPGMAPCCLLQIGWCLERPRGFRLAAALCAAVVALALAPALDATSASLLGINYGRVGNNLPPPQSVMPLLEGLGIGRVRMYDADPTVLRAFARTGVELIVGVPDECLAAVADPGGAAQWLKENVAPFLPDTKISVLAVGNEVLTGANSSTLSRTLLPAMQSLHGAVAALGLDKQITVTSAHNLGVLGTSYPPSAGAFRKDLLPYLCPILDYHARTGSPFLVNAYPYFAYSSDPRGVQLDYALLDPGFAGVQDPNSRLHYPNLLVAQVDAVYHAIAAANTAASRVVEVRVSETGWPSAGAANETAATPQNAARYNSNAMRLVAEDKGTPLKPGAPLRAYVFALFNENLKPGLASERYYGLFKPDGTPAYELSFKLPRDNSTFGHGDTGKGGGGIGGNGNGNGSSWNNSGGGNSGYYDISASARDTTGHWRMWAQAAMAGAVAVLTL

SEQ ID NO: 64925 - protein, 265 aa, Zea mays
  Clone ID: LIB4730-010-F2_FLI.pep
AKPKRLDSHSNCRLDLSNGLEESLPRSTLLKSSMVTEQLCVDTIRNNSTLTLVLQVVGTAELGEAPLSALNNLLAARELELGATQSFTGMCSIVVLASNRKEDLTNVHPSTGALRLAKGTPHSSLEPISPSTRKHLVDTKDMEGVNPDPKVEGILSCRLGHVLVAGNTGSLKSLTGDILLLPRDKVHTVGELINTLSLHANIVDPDLGVRDTTAVPGLGVWLVLDLAIASRRPSPHGDGSREQAAAANERRDAARAWSGVREHFI

SEQ ID NO: 64926 - protein, 451 aa, Zea mays
  Clone ID: LIB4730-010-H1_FLI.pep
PGYCTDHSWPLRRKEEVGEAGLVACTDLQRLMAAPLLPSSVSVLLSLHIALLLVLCSSQVGDSCSSVRDCGTGLYCGNCPAAGRTKLSCIRDLAIQPTSIVKGLPFNRYSWLVTHNSFSILGEPSRTGVERVTFYNQEDSVTNQLRNGVRGLMLDMYDFNDDVWLCHSLQGQCYNFTAFVPAVDTLKEVEAFLSENPTEIITIFIEDYVHSPMGLSKVFTAADLMKYWYPISEMPTSGKDWPSVTDMVAKNRRLLVFTSDASKEASEGVAYQWSYLLENEPGDPGIVPGSCPNRKESQPLNSRPASLFLQNYFPTIPVQNEACKENSGLPQMAQACYAAAGNRIPNFIAVNFYMRSDGGGVFDVQDRINGRTLCGCDTIAACQAGAPMGACKDTGAPNQTTSPSVNGNVYSGTIEFKTHSTSAASNNNIRSRSVFLLRLQLTLLLFFSFRL

SEQ ID NO: 64927 - protein, 262 aa, Zea mays
  Clone ID: LIB4730-010-H2_FLI.pep
SRPAGFVFLLPYSLFLFLELLVSPELQRPRLLAHSQTLVLYHLLQESVLEMARTEKLTSDGCSGGEVQVEVELGMGVDGKGIIECRICQEEGEEAAMDSPCACAGTLKFAHRKCIQRWCNKKGNITCEICNQVYSPNYVIPPPKCCSDEMDMNLRQNWVGRIDPHDSHFLAIAIAEQQLLQAEFDDCVSANSSGATCCRSIALVVMFLLLVRHVIVIVRDVSMLQDATVLFSATLQFAGFFLPCYVIARSCYALQHRRRRQV

SEQ ID NO: 64928 - protein, 292 aa, Zea mays
  Clone ID: LIB4730-010-H6_FLI.pep
GRTLVLRPGPVRPKHAFFLLPTTEETSCLDIHPSNRSSLVRQATTRFLPPFLLLVSFIGDSDLLCRRRRRQEIDPTPSARPDPPIQPPTAGARGRFRFGPSPVREKARMGAWMSRVWFLMFPAREYKLVVVGLDNAGKTTTLYKLHLGEAVTAAPTIGSNVEEVVFKNLRFEVWDLGGQESLRTSWATYYRGTHAVIVVIDSTDRARINTIKDELFRLLQHADLEGAVVLVFANKQDLKDAMAPAEITDALSLHSIKDHDWHIQASCAITGDGLYDGLGWIAQKVAGKATAS

SEQ ID NO: 64929 - protein, 390 aa, Zea mays
  Clone ID: LIB4730-011-D6_FLI.pep
LEAGRDSNSKHSPVPVAPHPTPTLCASVPPPVRATRDTMRRSLPLLLARQVARRRRLSNVPESTVYGGPRPQESSAARRVTVTTLRGKHRRGEPITVVTAYNYPSAVHVDSAGIDVCLVGDSAAMVVHGHDTTLPITLDIMLEHCRAVARGAPRPLLVGDLPFGCYESSAAQAVDSAVRVLKEGGMDAIKLEGGAPSRITAAKAIVEAGIAVMGHVGLTPQAISVLGGFRPQGKTVDSAIKVVETALALQEAGCFSVVLECVPAPVAAAATSALKIPTIGIGAGPFCSGQVLVYHDLLGMLQHPHHAKVTPKFCKQFGNVGDVINKALSEYKQEVEAQAFPGPSHTPYKITPTDVDGFADALQKMGLSEAADAAAAAAENREKGGEPKGE

SEQ ID NO: 64930 - protein, 330 aa, Zea mays
  Clone ID: LIB4730-012-A2_FLI.pep
PYPMSSPPPASPMAAENEACDWAEMPSDALAAVFAKLDVAEILSGAGLVCRAWHRLAASDPTLWRRVDMCYQGDQLQTEEVEAMARAAVDRSAGTMEAFCAETFVNDDLLRYISQRAPSLKSLHLCLCHYVTNQGFAEAVNCFPQLKELDITFCSLYGIVCETAGRACPQLKCFRLNERWSILQSEFAPYEGMDDDTEALGIASTMPGLQELQLIGNNLTNDGLVAILDRCPRLESLDIRQCYNIQMDDALRSKCARIRDLKLPHDSISDFKYRAYIVSSIANSGSDFEVDMYDDLLDVVTEDDDADFDDMDDFDDTVSDGGMYDDDLDI

SEQ ID NO: 64931 - protein, 220 aa, Zea mays
  Clone ID: LIB4730-014-B1_FLI.pep
GTKSMAGKEMTPNSKAAAPPATIRLVNFISEDQLDEVKRTRGERVEDGTAQRDKPLFQILQENKEKKDAEFNERFKHRPPKALDEDETEFLDKLALSRKEYEQQVANEEAEQLRGFHEAVAARSTVVHELETPTVSRPEESRPKPPTKRSQPALLKNIIISVKPHAKKPKVETEAKPAPEERRPSDRHGSDQKQPDDTKATLGSLVAYDDDDDESGEDVD

SEQ ID NO: 64932 - protein, 480 aa, Zea mays
  Clone ID: LIB4730-014-F9_FLI.pep
PEKSSTREMWYLCVFYHRLLDYRRPEVESLAELFAGAGARESVEWRMPENHHVDSPFHLVRLPGDERLAAQVANRSLLVKGVYELWGYGTTYEELEKSVREYPDERKLPFLVPESSFKIVIDSFGKVISSQEQNEIIQSLTYIPFKGRVNLKKPDHRFFVMETDDYGSNNGLPPVVKRSIFFGREVGAADRHLLPTYQLKSRKYIGPTAMDAEMAFLMANQGLASPGKLVYDPFVGTGSILVAAAHFGAMTMGADIDIRVVRDGRGPDCNVWSNFEQYKLPEPLCLLRADNNLPPWRPGLKEMFDAIICDPPYGVRAGGRKSGGRKLIKGVKGPYTVPDEKRDNHIPSTAPYSLAECVHDLLHLAARMVVMGGRLVFFYPVLRGEDGTANPQFPEHPCFKLITSSEQILSFRYSRVLLTMVKVAPYTEEIEKLAAERHRELRENHQKWMEEGNLHSAVFEPAQDGKPDRDSKPKYRGKYV

SEQ ID NO: 64933 - protein, 273 aa, Zea mays
  Clone ID: LIB4730-015-C4_FLI.pep
SNERLANSARSFFPLPLLSVREEMALNGGKTLVQDEEKQQLLLEKHTEKHFTAGEVVRDIIIGVSDGLTVPFALAAGLSGANASSALVLTAGLAEVAAGAISMGLGGYLAAKSEADHYNRELQREQDEIDTVPDVEAAEIADILSQYGLGPEEYGPVVTSLRNNPKAWLEFMMKFELGLERPEPRRALVSAATIALSYVAGGLVPLLPYMFVPEAARAMAVSVAVTLAALLFFGFVKGRFTGDRPFFSAVQTTVVGALASAAAFAMARAVQSI

SEQ ID NO: 64934 - protein, 242 aa, Zea mays
  Clone ID: LIB4730-015-H5_FLI.pep
SIFPCGRFHCHSSTGLGFAGMRVHGEVSDDEAAVAVVGETVPSSPPPASVVQPLVVGYALTKKKVKSFLQPKLLALARKKGIHFVSIDETCPLSEQGPFDIILHKLTSKEWQQVLEDYREEHPEVTVLDPPNAIQHLHNRQSMLQEVADLNLSNGYGEVCAPRQLVIMKDPSSIPDAVAKAGLTLPLVAKPLVADGTSKSHELSLAYVEASLPLLDPPLVLQELSIMVGSYLRYILLVKQYR

SEQ ID NO: 64935 - protein, 288 aa, Zea mays
  Clone ID: LIB4730-016-A3_FLI.pep
RNETNSITTNTVSPAGKHGARAYSSSYSRIAWSWILRTYVHARTHDVHAWLKALEARGDALAAEVEDEAEVDGDVEVEPQHVGLDGRAEAHGGFELHEPVQQRAARLVHRHADLGLDQIQHVGAHAELQRVCRAMAVPAARAIVATATATAPTSTATATDGAVPTTAATSYGSDPPAAASDGSDPTAAATITDRTVPSSAAAATTTTDRTVPSAAAAPTWPAAATGTAGATAAMPTAAMVPAATVAIVARAVRAGVGRREEQEVEDEEQWHLAGRHWSRACAGAARLA

SEQ ID NO: 64936 - protein, 309 aa, Zea mays
  Clone ID: LIB4730-016-F2_FLI.pep
RGRPGDLPHFSSTPPPPHFPCSSCSGMAEQTQPQGEGGASPKHESLMEKLADKLHVGGGKADSSSSSDSDSDERPRPSAPPADELKQSSFSDAAATAAAEAKAKVFRLFGREQPIHKALGGGKPADVFLWRNKNISAGILGGATAIWILFELLGYHLLTFVCHGLIFTLGVLFLWSNASSFIHKAPPKIPEVIIPEDLVVNIALSTRYEINRAFANLRQIALGRDLKKFLMVIAGFWLLSVLGSCCNFLTLVYIVFVVLHTVPVLYEKYEDQIDSYGEKGWVEIKKQYAVFDEKVLSKVPRGPAKDKKH

SEQ ID NO: 64937 - protein, 227 aa, Zea mays
  Clone ID: LIB4730-018-B2_FLI.pep
HLRISCHFSDYSRDSTSTYTGFPFNLYKSLNFGSPMTHAHSTTSAPARSRSLIAAQSVPPVATRSSMTSTRSPDRSMAPTRISRQSVPYSRTYFSEITSPGSFLGFRRGMNLAPIASAIAGPNTKPLASIPATASMPIPRYRSTNRSTASLNTLGRSSSVVMSLNMMPCLGKCGTTRMASEMPCSRGSAAAAGAAAGSRPTSLPTGLALVPASVRLTASQLASSPIN

SEQ ID NO: 64938 - protein, 311 aa, Zea mays
  Clone ID: LIB4730-020-G2_FLI.pep
LAVSFRLLRNFLGSTPYYTTGGFPFGCHSVLSQPAAGAMLYIVGLGLGDERDITVRGLDAVRSCSKIYMEAYTSLLSLGLDPAALANLEKLYGKEITVADREMVEERVDQVLSEAADTDVAFLVVGDPFGATTHTDLVVRAKRMGVEVKVIHNASVMNAIGVCGLQLYRYGETISIPFFTDEWRPDSFYEKIQNNRQLGLHTLCLLDIRVKEPTWESLARGKKVYEPPRFMTVNTAISQLFEVEEARGGYAYRRETLCIGVARLGSDDQKIVAGPMEKLLDVDFGPPLHCLIIVGETHPLEEEMLEFYMIK

SEQ ID NO: 64939 - protein, 292 aa, Zea mays
  Clone ID: LIB4730-022-A8_FLI.pep
ATRTIFMLLTHVSQQRRPAGSSREGRVALHLGRDDVYREPLAVQPPVVGVRVDPLRLVHLHPRRLEPPCRAVDPVPLVTAAHQLAAHAAGLGGLRRHHERRRAEGQRVAAVRLPGAPELAVRLREARHLRALQRLRHADVGPQPGLHLVRVRVPQPLLVRGQALEDGVGDDVLHADEAGRGLVEVVDGALEDVLVEPGDEVVDLHLAVQVVGVQREAARVLLHLPHRLQRLRQLRAHVEDTRGHRRWPARRRGLGGARRRGCGSWVLIARGYFFVAPADSDGARNCVPAGLE

SEQ ID NO: 64940 - protein, 197 aa, Zea mays
  Clone ID: LIB4730-022-F9_FLI.pep
LQHKGNINTREAYKERACSLGGGELGDGLGALRDGVLGELAGEHEAHGGLDLAGRDGGLLVVARELGGLAGQLLEDVVDEGVHDGHGLGGDADVRVHLLQHLEDVDLVRLHALLALLLATLALAALLAGGLARGDPLLRLGLLPGGRLLRRGLLLRRLLRRGLLLGLGRHRSWVGRGIGNRLQGKCEEICWLLLFFP

SEQ ID NO: 64941 - protein, 601 aa, Zea mays
  Clone ID: LIB4730-023-A3_FLI.pep
AHRRRRRRSGSGSQLQEMAGQAGNPVNHPISPHVISGAFVQQYYHILHEQPDQVHKFYQDSSILGRPDSNGIMAYVTTMRDINEKIMSMDFRNCLTEIETADAQLSHKDGVLIVVTGSLTSDEGVFRRFTQSFFLAPQESGGYFVLTDVFRFISERKPAEINQVATQENEISQNVRPASETCSALPEPIPADGSVISDHVTADSNVTEKQISDLSANGTAIESNDNTQPPVQVPKEDPKKALLVAPPPPTQMDVTKKSYASIVKVMKEGPPTPVVKTTSSVSKQKPAPKPVSTAVEGLEKPSEKPTQAIGTGDGIVAQNNSSRNEQGYSIFIKNLPFHANIEMVEEEFKKFGTIKPGGVQVRHNKVDRFGFGFVEYESQQSMQAAIEASPIRMADKEVGIEAKRANSRGGRFQSGRGVYHGDNFRGRGSGYVDNTNYRSSGSFNRQNEGEMYNRRNEGEMYNRRNEGDFYNHRNEGEFYNRRNDGGENYNRRNDGGENYNRRNDGGKNFSRRNDSGTENFNRRNDGGGENFSRRNDGVGENFNVRNDGVGENFNRRNNFRNQNDFPGRGRGSPTPGNSYYQNGNGRFSRVNNGAKQAPVAA

SEQ ID NO: 64942 - protein, 245 aa, Zea mays
  Clone ID: LIB4730-024-B9_FLI.pep
GSAGRFLVVAMEFWGEEVKPGATVSCKVGDGLVIHLSQAALGEPKKASENAIVSVKIDDKKLVLGTLSVEKHPQISCDLNNEIKISTAKVPVKVGIQNADEDETSSGDDDDFTDSDSEMSEEDESSDEDEVSSDTDTSDDSGSEEQTPTPKKTEVVVGKKRAIEAETPSGKKAKSEQSAQKTGDKVSTSHPAKQSSKTPADKSTKTPTADKKSPKSGSHACKSCSKSFGSASALESHQKAKKHEA

SEQ ID NO: 64943 - protein, 376 aa, Zea mays
  Clone ID: LIB4731-001-E12_FLI.pep
NSPTRVASSVCVPVLRPKPPAPNPQPRQPMAGSAADAEQEQKRAAAAAYDYEGDARWAEYWSNVLVPPNLASRPDVVDHLKRKFYQRYIDHDLVVEPRSFTSSTQASRPDVRSSSSSSTENVRERNSGSTARSAPPPPPPTHTDSAVNPLRFDARTIHFSINAWILVVAGLGMLPILPKHLADRACKLSLLGTILSSGYSLYSTYGKPRAWNMPAIQAWLQSILATKDFIHLMFSSMLFTSQLHLKIAALPVFCWALDHVARFLRRNFARSSFYRRYLEEPCLWVETNNTTLSLLSSNAEIALGFLLIISLFSWRRSIVQTFMYWQVLKLMYHAPVTSSYHQSTWAKIGRIVNPYIHRYAPFLQTPISAIQRWWFR

SEQ ID NO: 64944 - protein, 178 aa, Zea mays
  Clone ID: LIB4731-002-D10_FLI.pep
TKTHQLFGEVMSALEKMTRGVAWGDLDILVVDMPPGTGDAQLSMSQRLRLSGALIVSTPQDIALIDARRGANMFRKVQVPILGLVENMSCFKCSKCGEKSYIFGEAGAQRTAEEMDMKLLGDVPLEISIRTGSDEGNPIVVSSPNSASAQAYVNVAEKVTQRLKELAEERRMGPEILL

SEQ ID NO: 64945 - protein, 160 aa, Zea mays
  Clone ID: LIB4731-002-F2_FLI.pep
AAHQVTFRPDVESPVLPQSPAATTPPSSSSRHYAGRRVASCLDARRPAGAPSWAAGLLHIIGARGAGGGLHSIPSLGCVAPNPIAWSSLLLPEVDGRLIVLVAAASAPEPQLERSPATSRRPARSLRRHAPPRLGARRRRYYHNIKGDAFTPESIASRTC

SEQ ID NO: 64946 - protein, 348 aa, Zea mays
  Clone ID: LIB4731-003-A9_FLI.pep
AAMRQPRSGPGKRRGRGPRIPAATLQKQKTALANVDQITGAKIPKSFVFSRGKLPSTLRHLQQDLRKVMLPYTALNLKEKKRNNLKDFVNVAGPMGVTHFLILSNPQSLPHLRFAKSPQGPTFTFQIEEYSLAADIANSQKRPRCPPGIFKNSPLVVLGGLTGLGNPFRSLVEYFQHMFPSVDPTTVKLATCQRILLLKHDKEKDVIEFRHYSIKLQPVGVSRRIRKLMQNNQVPDLGEFEDVSEFVKKAGYGSESEADDEAAMVSLPSDIDKLNRASRKSAVRLQEIGPRMTMRLVKVEAGLCSGDVLYPWPVEKEVVGKKGTETGEVEGQEDDSEATDESEDEMEV

SEQ ID NO: 64947 - protein, 276 aa, Zea mays
  Clone ID: LIB4731-004-E7_FLI.pep
YFEHSKTHKGKCTSNFLTTMATKILALLALLSLSVSATTAFITPQCSLAPNAIIPQFLPSVTSMGIEHPIVQAYRLQQALAQLQQQSLAHLTIQTIATQQQQQFVPALSQLAAVNPASYLQQQLLASNPLALANTAAYQQQLQLQQFLPALSQLAMVNPATYLQQQQLLSSSPLAVGNVATYLQQQLLQQIVPALSQLAVVNPAAYLQQLLPFNQLDAANSAAYLQQRQQLLNPLAATNPLVAAFLQQQQFLPYNQISLMNPALSRQQPIVGGAIF

SEQ ID NO: 64948 - protein, 318 aa, Zea mays
  Clone ID: LIB4731-004-G4_FLI.pep
HRLPLLTCEQGSSMVQFGNMSSKKIELDHKDMVHDSAIDYYGKRLATASSDSTVKIINIGAANAPSQVLATLSGHYGPVWRVAWAHPKYGAILASCSYDGRVIIWKEDARGNWSQVHVFSDNKSSVNSIAWAPYEVGLCLACASSGGRISILTMRADGGWDTATIERAHPVGATAISWAPATDSIAGTGVFVYKLVSGGFDSVVKVWGFNNGSWKLESALISDMHTDCVRDVAWAPVLGLAKSTIASASQDRKVVIWTRGKDGDKWERKLMRDFGSPVWRVSWSLTGNILSIAAGGNNITLWKEGSDGQWEEVMKVET

SEQ ID NO: 64949 - protein, 257 aa, Zea mays
  Clone ID: LIB4731-007-B12_FLI.pep
YQLATYIVKYTSNILAPMAAKIFALLALLALSASVATATIIPQCSQHYLSPVTAASFEYPTIQSYRLREAIAASILRSLALTVQQPYALLQQPSLVNLYLQRIAAQHLQQQLPPTINQVVAANLAAYLQQQQFLPFNQLAGVNPAAYLQAQRLLPFNQLVGSPAAFLLQQQLLSFHLQVVANIAAFLQQQQLLPFYPQVVGNINAFLQPQQLLPFYPQDVANNVAFLQQQQLLPFSQLALTHPTTFLQQPTIGGAIF

SEQ ID NO: 64950 - protein, 289 aa, Zea mays; identical to SEQ ID NO: 53469
  Clone ID: LIB4731-008-G2_FLI.pep

SEQ ID NO: 64951 - protein, 426 aa, Zea mays
  Clone ID: LIB4731-010-E12_FLI.pep
RSAEAPRMEPEIQSLCPSTTAVLLLLAACLAAAVAALDAADYARPPLPAGGGGRRVLFANGLGLTPQMGWNSWNHFQCDINEAVVRSTADALVATGLAKAGYTYVNLDDCWADSERTKEGYMVANPKTFPSGIKALADYVHSKGLKLGIYSSAGTRTCSNRMPGSLGYEERDAKMFASWGVDYLKYDNCYRDGTPETVRFGRMSRALVNSGRPIFYSLCEWGFMEVPKWGGMYGNSWRTTGDINDTWSGMLDNIDLNDAYARYAKPGGWNADPDMLEVGNGGMAYNEYVVHFSLWAIAKAPLVIGCDVTRVSNETLGILSNAEVIAISQDRLGVQGQKVSKYGNDLEVWAGQLSGHRKAVLLLNRGATRSASITAAWPDVGIRRGVAVQARDVWKHETLPGWFTGSLTAVVGPHSCKLFVLTPVPS

SEQ ID NO: 64952 - protein, 322 aa, Zea mays
  Clone ID: LIB4731-012-F10_FLI.pep
RIFVDADSNSVVYPHREPPQESLTMAPPAAAVAAVRHHSPHLLLRRGGGGLLSSPSGPATLPFASRGAASAPARLRLPPPQFSLSPVPKSLSATSSSHVIVRSLFTGIVEEVGRVRRLGPPLAPSGGGGGEALGLDLEVETKDLLAGTQLGDSVAVDGACLTVAAIDPAASTLTFGVAPETLRRTSLGERAPGDGVNLERALTPSSRMGGHFVQGHADGTGEIVAFRPDGDSLWVTVRAPPEILRLLVPKGFVAVDGTSLTVVSVDDEGGWFDFMLVRYTQDNIVLPTKKVGDKVNLEADILGKYVEKLLAGRVEAMAKVDS

SEQ ID NO: 64953 - protein, 281 aa, Zea mays
  Clone ID: LIB4731-013-C2_FLI.pep
LVPDRRPVPRADPRMAPPLLPARFVAASVALLAVAFSSSLTRPSGAYDPLDPNGNITIKWDVIQWTADGYVAVVSLYNYQQYRHIQAPGWRLGWVWAKKEVIWAMTGGQATEQGDCSRFKASVLPHCCRRDPEVVDLLPGTPYNTQTANCCRGGVLASWAQDPSNAVASFQVSVGQAGSTNRTVKVPRNFTLLAPGPGYTCGAAKLVKPTKFMSLDGRRSTQAHMTWNVTCTYSQFLAQRSPTCCVSLSSFYNDTIVSCPACSCGCRQNNSSTAAPGSCVE

SEQ ID NO: 64954 - protein, 265 aa, Zea mays
  Clone ID: LIB4731-014-H2_FLI.pep
LIHHPYYLYQLPTYIVKYTSNILAPMAAKIFALLALLALSASVATATIIPQCSQQYLSPVIAARFEYPSIQSYRLQEAITASILRSLALTVQQPYALLQQPSLVNLYLQKIAAQQLQQRLLPTINQVVAANLAAYLQQQQFLPFNQLAGVNPADYLQAQQLLPFNQLVGSPAAFLLQQQLLPFRLQVVANIAAFLQQQQLLPFYPQVVGNINAFLQQQQLLPFYPQDVANIVAFLQQQQLLPFSQLALTNPTTLLHQPTIGGAIF

SEQ ID NO: 64955 - protein, 225 aa, Zea mays
  Clone ID: LIB4731-015-C5_FLI.pep
SRPAGFEESDGCRIQTLFPKNQNNRHRSPHRTEAAAMAAEKPAPVRVLYCGVCGLPAEYCEFGPDFERCKPWLRAHAPGVYPGDKDVDRVGERLQGVGISDGSTSAAGDASASKPQEAKRLPGGKLKKKEKQEVVIEKIVRNKRKCVTVVKGLELFGVKLSDASKKLGKKFATGASVVKGPTEEEQIDVQGDISYDIVEFITDTWPDVPESAIFFIEDGRKVPAA

SEQ ID NO: 64956 - protein, 429 aa, Zea mays
  Clone ID: LIB4731-023-C5_FLI.pep
HSESQGRRRSKRSAMAASNGEGHGRFDVIVVGAGIMGSCAAYAASSRGARVLLLERFDLLHHRGSSHGESRTIRATYPQAHYPPMVRLSRRLWDEAQADAGYTVLTPTPHLDLGPRDDSALVASMRNGGATEVVAGDESSSWPWAGVFRVPDGWTAARSELGGVMKATKAVAMFQALAVKRGAVLRDRTEVVDITSSKRGEGEGSIISVRTSSGEEFHGTKCIVTVGAWTSKLIKSVTGLELPVQPVHTLICYWKVRPGREQELTPEAGFPTFASYGDPYIYSTPSMEFPGLIKIAMHGGPPCDPDGRDWSTGAGDLVEPVARWIDAVMPGHVDTAGGPVVRQCCMYSVTPDDDYVVDFLGGEFGKDVVIGAGFSGHGFKMGPAVGRILAEMALDGEASTAAEAGVDLRPLTIGRFAGNPKGNLSASQG

SEQ ID NO: 64957 - protein, 285 aa, Zea mays
  Clone ID: LIB4731-024-E2_FLI.pep
YFEHSKTHKGKCTSNFLTTMATKILALLALLSLSVSATTAFIIPQCSLAPNAIIPQFLPSVTSMGIEHPIVQAYRLQQALAASVLQQPFAQLQQQSLAHLTVQTIATQQQQQFVPALSQLAAVNPASYLQQQLLASNLLALANTAAYQQQLQLQQFLPALSQLAMVNPATYLQQQQLLSSSPLAVGNAATYLQQQLLQQIVPALSQLAVANPTAYLQQLLPFNQLDVANSAAYLQQRQQLLNPLAAANPLVAAFLQQQQFLPYNQISLMNPALSRQQPIVGGAIF

SEQ ID NO: 64958 - protein, 195 aa, Zea mays
  Clone ID: LIB4732-002-E5_FLI.pep
YALMHAWAHGKLHACSSGAEDDLVVAIAVARTGLRVIGLVVRVGAAGVPAPQGGASAAREVHGQVVAVDHRDIVVVVVAAAADGELRQRRRGLPGQAAGVGASAVARRAAAPAAAEGAAGAAPDPASAGPGLHVDSPRRARVQLRAAADRDACWPHREPAVVSYRERGGAGACGEASEQEEEDGGRRHPDHVYIR

SEQ ID NO: 64959 - protein, 318 aa, Zea mays
  Clone ID: LIB4732-003-D4_FLI.pep
SRPAGTPARPSPESSPLPHRSPPPAFPRHSSRTYPALGDLLSQPEIPPHRDPAPPWCRDGGGGGVMEREPKSPDDRPEPAAAAAQPQPLEWRFAQVFGERAAGEDVQDVDIISAIEFDKSGNHLATGDRGGRVVLFERTDIADNACRRELERQEYLVSRHPEFRYKTEFQSHEPEFDYLKSLEIEEKINKIKWCQTTNNALFLLSTNDKTIKYWKVQEKKVKRVSVMNLDTSQSSDNGSTSSPGTSSCRALLPNGGCTGKMYSPNNNMPFPPGGCTSLRLPVVVTGQEFTHVARSRRVYAHAHDYHINSISNNSVHGF

SEQ ID NO: 64960 - protein, 291 aa, Zea mays
  Clone ID: LIB4732-003-E5_FLI.pep
LEAGRGDTAAAAAAAPPNARCRGLRRRRAPTGTRSRKTAMFSSARLALRRAASLGAGLCRAAEDPFSRRFLHGQLLPRSFASDASGHNRGFPPSGSGVVADTDPRQNFNRSGFVSQDIRAKTQVNFNNTDNGAAMSGTPRGQNPFSSREGFTVNLRTFAMDHEQYSKKRAFVHVLLKRKKTFVTVTDSSGNKKTGASAGCLEDRKGRSRLSRYASEAVAEQVGRSARKMGLSSIVMKVKGASFFKKKKKVILSFREGFRGERVRDQSPIMYIHDVTQLPHNGCRLPKQRRV

SEQ ID NO: 64961 - protein, 256 aa, Zea mays
  Clone ID: LIB4732-003-G1_FLI.pep
DRLRIKQHSTSPRRSVRAAKQPAGDLERDEGVDAGILDLIVAEAGRVPAAHGDPLRLHEVDAHDDLHERAQPRLAEVRAVHPLRGAAPQVLRVGHHQTVVVAEPLRVRLHADADEADPAVAEELRQRAGDVVGVEELEDEAAVSDAELQCGHRVLVRAEAWAPLNVEPDDDAVAVAAGAVQREDLRDPALHSLAGGCDGGVNHVVAEGHFDHVRVRLGHWIPRRRPSVCGAPFPLRKRQGELGKRGVVWPFSRPAS

SEQ ID NO: 64962 - protein, 210 aa, Zea mays
  Clone ID: LIB4732-004-F5_FLI.pep
ADHSSTSPLSGCPLLRVGACASACPHQPAARSHQTHTRTMASASKEEVIGKLNIRVVRGNNLAIADPLTHTSDPYVVLQYGAQKVKTSVQKKNSNPVWNEVLQLSVTHPTKPVHLEVFDEDKFTADDSMGVAEINITDIYDAAKLDLKHASDGTRIKTIYPVGVNYLGGESHVQWKDGKVVQDLILKLRKVESGLIVVQLEWVHVPGVKL

SEQ ID NO: 64963 - protein, 420 aa, Zea mays
  Clone ID: LIB4732-005-H4_FLI.pep
LEAGRGIAIARLMQAHKGEFPSPRLHTSSPPLHSHTRTLRPPAAYPRRPPPIAMPPSAAATAAAFLFPAVAIPCRVFPQRRARSLAVRAVASPPAFAVKPAPLPSKTGKWEWKFENKPVNIYYEEHEQEVAENMKNILMIPTISDVSTVEEWRVVAKDIVGRKGELGYRVTIVDWPGLGYSDRPSLNYNADVMESFLVELMNSPNSPVANADDELIIVGGGHAATIAVRAAGKDLIKPSAVAAVAPTWAGPLPIVFGRGSDMETRYGLLRGTLRAPALGWMMYNVLVSNEKSIQSQYKSHVYANPDNVTPDIIESRYELTKRKGARFVPAAFLTGLLDPVQSREEFLQLFAKLDGDVPVLVVSTVNAPKRSKAEMEALRGSKGVTKFVEVAGALLPQEEYPLAVAEELYSFLQESFAARR

SEQ ID NO: 64964 - protein, 231 aa, Zea mays
  Clone ID: LIB4732-006-E8_FLI.pep
GVMAVSFANLNSEAGLKKLDEYLLTRSYITGYQASKDDLAVYTSFSAAPSSKYINVARWFNHIDALVRLSGITAEGQGVKVESSAVPSAPTPDVAEAQAPAAEEEDDDDVDLFGEETEDEKKAAEERAAAAKASGKKKESGKSSVLLDVKPWDDETDMAKLEEAVRSVQMEGLLWGASKLVPVGYGIKKLQVMMTIVDDLVSVDTLIEDYLCAEPVNEYVQSCDIVAFNKI

SEQ ID NO: 64965 - protein, 356 aa, Zea mays
  Clone ID: LIB4732-006-G4_FLI.pep
GFSSNTLPPAGAEDWNKDSLSSCAATPVHAAAACYTCRARAMDSSSRVIAFDCSSFKLYMDGQVERAAQRMETVPAGFDADTGVASKDVDIDAATGTAVRLYLPPVQGATTKLPVVVFFHGGYFIVGSAREPMYHRYVNSLVARARVVAVSVDYRLAPEHPLPAAYDDSWAALKWAVSGADQWLSDHGDLGRVFLVGISAGGNIAHNMAVSVGVSGLPAAEPPRIEGVILLHPSFSGEQKMDVEEEEFWRSNNSRWAVIFPGATGGADDPRINPMADGAPSLEKLVGERLLVCTASLDPRATRGTGYCEAVRDSGWRGMVEWFETEGEDHGFFVLNPGSHKAVEVMDRVVAFLADQ

SEQ ID NO: 64966 - protein, 280 aa, Zea mays
  Clone ID: LIB4732-009-A1_FLI.pep
SRPAGGGSTYSASFSVHSLVSTAPEPRAAIPYSQCRSGSDRSEMAAAGLGVKATPFTYAAHALAAVAAALVLVWCVHFRGGLALEAQNKNLIFNVHPVLMLIGYIILGSEAIMIYKVFPNLNHDTAKLTHLILHAIATVLGALGIYCAFKYHNDSGIANLYSLHSWLGIGTIALYAIQWVFGFVTFFLPGAAPGVRRGALPWHALFGLFVYVLALATAELGLLEKLTFLESGGLDKYGAEAFLVNFTALVVVLLGAFVVVSAVTPAHAEEPRGYAPIPIS

SEQ ID NO: 64967 - protein, 244 aa, Zea mays
  Clone ID: LIB4732-009-C1_FLI.pep
EPAITMETRLFIALQCVQCATMQVKQQKRSSNKWVCVVCNQRQSVLHVHARGYRAADLRRFVQDTNLARGRREFAPLAEPDVDRDLAAVEEGDVFPIEKSQTEWSEYLDDPGETGKGCGGLGADASDGESDEGIEVITELPQKRPKVRPRKAQSDVVGKRTKLSTHPTLCNKRQQIKQGSSPHCATTTAEAQGSKWTKYLDTSRFGGRKCSDTSGLHWTEHDESATTEATTDVVVDDEVHPDFI

SEQ ID NO: 64968 - protein, 263 aa, Zea mays
  Clone ID: LIB4732-009-E9_FLI.pep
TSWDQDPKVDCVGYLPVGHCDSVMSCTSPDPPDYCSAESPELKLYQAFIFSVPVFFTFVLLLFFYLFYLRRRRANWQSLRMRTNNLIRGDNARLECGLKKEMREMLPVVIFKESFLIRETQCSVCLAEYEPDERLQKIPPCGHTFHINCIDHWLSTNTTCPLCRVSLLPAPKATSTGLDLEAQTVVEEESPNAHHRQEEGLVDANTPQEGEAAGGDGASSVQIEEPHRDAAEPLVVTVVAVAAPQADAEGSPSTACQTVKGKK

SEQ ID NO: 64969 - protein, 165 aa, Zea mays
  Clone ID: LIB4732-013-C9_FLI.pep
PPPAAMSGRIARGRLAEERKAWRKNHPHGFVARPESLTDGSVNLMVWNCTIPGKHGTDWEGGYYPLTLHFSEDYPSKPPKCKFPQGFFHPNVYPSGTVCLSILNEDSDWRPAITVKQILVGIQDLLDQPNPADPAQTDGYHLFIQDPAEYKRRVRLQAKQYPALV

SEQ ID NO: 64970 - protein, 369 aa, Zea mays
  Clone ID: LIB4732-013-H7_FLI.pep
SLADNGRRIDTMAAARRGRGDGANGVVRPRPRDRGGSMAGRVAVLAFCVAGIWFAYIYQGVLQETLSTKRFGPDARRFEHLAFLNFAQNVICFVWSFIMIKLWSGGSSSNGSAPIWKYWGVSVTNTIGPTMGIEALKYISYPAQVLAKSSKMIPVMLMGTLLYGVKYTLPEYLCTFLVAGGVSSFALLKTSSKTIKKLANPNAPLGYTLCFLNLAFDGYTNSTQDLIKSRYPKTNPWDIMLGMNLWGTIYNAVIMFVAPLLFSNWPYANGFEALRFCQENPEVAWDIFLFCLCGAVGQNFIFLTISRFGSLTNTTITTTRKFMSIVVSSVISGNPLSLKQWGSVVMVFLGLSIQIYLKWKRKKGREHKE

SEQ ID NO: 64971 - protein, 271 aa, Zea mays
  Clone ID: LIB4732-014-B3_FLI.pep
SRPAGIEGRPGKYRKENESKLVVAAALLRRRLRDSLVPTQIGARRKAEQAMAAATSMGHPYAPAELDLPGFVPLKLSQVEILVSYLGASVFVFLAVWLVSGRCVRLSKTDRLLMCWWAFTGLTHIMIEGPFVFTPDFFKKENPNFFDEVWKEYSKGDSRYVARDTATVTVEGITAVLEGPASLLVVYAIASRKSFSHILQFAVCLGQLYGCLVYFITAYLDGFNFWVGPFYFWAYFIGANSFWIWIPMLIAVRSWKKTCAAFQAEKVKKTK

SEQ ID NO: 64972 - protein, 244 aa, Zea mays
  Clone ID: LIB4732-014-B5_FLI.pep
GPPESHGIQGRPLLGSQPPVLHGGQRLRQLPDPNAPGRATAAASCCYPTPFVQRQVPAERAQVRRVRRCARPRQRRGWQGACRAMLYPHQRPCGLRGRRLPLHGHQGQRARRRHRCPHQAQRPRQLLWQVRAQGLLVRVSSFRRSHARSCSRTRLHMHAPCMARMHALCLLIYLSCLSCIVHLSVLQNLEPFQPNTCQFNSHVLSLVEFPFFFVFGHFLVRVRHLLQGKRAVLRVIVVYVKPNT

SEQ ID NO: 64973 - protein, 294 aa, Zea mays
  Clone ID: LIB4732-014-B6_FLI.pep
SRPAGSHNTSHNHYSCSTASGRPTLQAASAMPSSAQVLLCLAAVLAAAAATTADAHSQCLDNPPDRSIHGRQLAEAGEVVHDLPGGLRAYVSGAASSSRAVVLASDVFGYEAPLLRQIADKVAKAGYFVVVPDFLKGDYLDDKKNFTEWLEAHSPVKAAEDAKPLFAALKKEGKSVAVGGYCWGGKLSVEVGKTSDVKAVCLSHPYSVTADDMKEVKWPIEILGAQNDTTTLPKEVYRFVHVLRERHEVPYYAKIFQGVEHGFACRYNTTDPFAVKTAETALAYMVNWFNKHLN

SEQ ID NO: 64974 - protein, 222 aa, Zea mays
  Clone ID: LIB4732-015-D9_FLI.pep
RGRPGSPQHTKTAQSRSHTGSSPPLRNALSPTSPASAPWLSSRWRSSSCWPWRRPRRPAAGATWISTWASSPLGTAGGSAAGRWPSASPRSRMRRALTWPDPTAARSTAAGTSATARCGGTTCPAPAAAPATTTAAPAARPTPTTAAAPASPAAAAEAAPDPPDCRGKVWLVKVPVLSPTIISFALFVQALPPPPLLFTIAPDLRIELLYGFVWPNLCSVVK

SEQ ID NO: 64975 - protein, 351 aa, Zea mays
  Clone ID: LIB4732-016-B7_FLI.pep
RDRQIGIGSIHQSRRRRRHVAVVRAEDPVEEHGQPHPALRDPPRHDRQPRVKVVVGQCLPFADAAVRPFARQAYALGRVLGWARREVLAVCPSRYIVGPGTLGEVVLELLAEGVHVLAVEVGESRLYDLPVPHVVEVGFVPEPPQLYGVAALVAGEPHVHWLMNISHEVRQEQKGFSQVVSPVGAAVPVVQQLGREVGDGAGDAHVLGAVGAVAVPRVVEAAGLVRGVDEVERARPHVPVPVPHLVRPHAQRRQVAAGVVREQVPHGVRGVRLQQTLRDLACEHVTLLAPRPSRRQRRREDNHPERRGSQERDGGHLRLARRRRSSRRQRLIDALERAGLGRDERDWRLNH

SEQ ID NO: 64976 - protein, 453 aa, Zea mays
  Clone ID: LIB4732-016-C10_FLI.pep
PAGATPVPLPSVVIYLLLTPRSTGEMGRGLGAAPVSPRLASLGAAALALLVAAALPSPAAGVNATAVLSAFPNFADFARLLASTPVASELAGRSSLTLLAVPNANLPQSPSAFVAGAAAGADIADVLRYHVLLEYLSPADLARLPPSGKLVTTLFQTTGRAPSDFGAVNLTVGPNSTVVVRSPAPSPGSSATVLGAVTAVPYNLSVLAVGGLIVPSGFDLAASESRPPPPVNITRVLTDARGFYVAASMLQASGVASEFEADERGAGITVFVPTDDAFAGLPTTDRLQSLPAERKAVVLRFHVLHSYYPLGSLESIVNPVQPTLATEHTEAGHFTLNITRVNGSIAIDTGIVQASITRTVFDQNPVAVFAVSKVLLPKEMFSRGDSGSTAMVPPSVAMAPGDAGTEQTPQTRLSSPPDLHGEDSESSAALATAKGTSWWCVGLMYLHLLLSLV

SEQ ID NO: 64977 - protein, 487 aa, Zea mays
  Clone ID: LIB4732-016-E2_FLI.pep
HKKKPYHFIRPNRQQSTMAKPEGPTIGVKLFVDKEKKKVLFAESDKEFVDVLFSFLTMPLGTIVRLLDKQSQMGCLDQLYKSVEDLNLEYFQTSACKAMLLKPLNAASGHCCRLKINVDGSFPRVVYVCKDTSCSALSDNAFSSFPGTVCKCGKVMEFVGRCPKYDGDTETAAAACSEDGVFVIGCLKFIVTDDLQVAPASTSLMMSFFEKFGVLDPAVLEQQVLQFSSEKIKCLLKRLLTSKQPLTDHYFEALVPQDDASLEALVQNLHPKQENEDQEMPGNQKIRVLQTKDNSALLYDEVGVDFVDSLFGLLSIPLGSAIKLYCQCSAKGCLGNAYRSIDGSVKEFVREECQSLLLDPKVPPFFGCCASKILQVDELAPRELTMEACFVCFKSLWFSGCNRSHEFAYSLRCNEVFCANKVKSIKLCEANPKRQNGGSGQTNFVVKEIKLKVMELQRAVLVLSRNILSSVLLHPKKTKKLHHYRRM

SEQ ID NO: 64978 - protein, 252 aa, Zea mays
  Clone ID: LIB4732-016-G4_FLI.pep
MNFRVVKNRLNQLLNELVIDLCGHRYTHCYLHQRHNIVHPHLFGFGEFDCCFSLFLDWGGRTITCIVITLPGTSPTGTRDSARVLLFSSILPTLMSFTSLTVFGAISLSCGHRARTNSLSAATVVLGSYLLGPMSVPSDSRNFTSIGSFTPAISTGRVTSAFHPHQPLLSSSHQATGATARAGEGIRTGIQGVGKGCQKSEQGGQAPMRIRRRIRSSARGFRIASWGAKRGGDGRIEAEPRRTGNCGRFNPG

SEQ ID NO: 64979 - protein, 197 aa, Zea mays
  Clone ID: LIB4732-016-H8_FLI.pep
SYPCLSPHPVQGTPTAACVVWSPEMDGDEENVGPFRRTSARTRRMATRMASALASSDNRDQAALARLEALESDNGGVEVVDLNDDEYGSTDEEDPVLMQKKQSKIMKRKTRQGKALEKRAARSLMDVLQEANLESVPPHVPTYSRAAVGPPSTSSRRHYCSVCGSSATYTCVRCGTRFCSCRCQVIHNDTRCLKFVA

SEQ ID NO: 64980 - protein, 259 aa, Zea mays
  Clone ID: LIB4732-016-H9_FLI.pep
RGRPGWQQARHFPPRHGRPPHGARRPLTGRRPRHAPGHLRRRLQIPQGPTAAERIPVQEAGERDGLRLLLRRAGERRQHGQRAGVRGDGGERGHASGAEHAGRVAVAHRLRAVGREPAARPPARHRGHLRPPGLPRRRLRRRRQQPPVRAHRQRRRCLRLPPRPRPLPEEQGRRPRRRPLRLRQSAARHAARRRGPLRLVAARAHRRARQELPRRRRTRGGHQVQVPAQVEVDLATAMLMQCKRHVRTCTYYIYVRWYQ

SEQ ID NO: 64981 - protein, 153 aa, Zea mays
  Clone ID: LIB4732-017-C3_FLI.pep
SRPAGLIFCSLHRRRGVRVDNGMARSVSYVSAAKLVSMARGNPRLAIIDVRDEERSYQAHIAGSHHFASGSFEARMPELVRAASGKDTLVFHCALSQVRGPTCARMFSDYLSETKEDSGIKNIMVLERGFNGWEVSGQPVCSCTDAHCKGTCS

SEQ ID NO: 64982 - protein, 222 aa, Zea mays
  Clone ID: LIB4732-017-H11_FLI.pep
LEAGRGFRIYPRPFWQAWMPWLPAQCRTESKHSMAMAQARVVALALCALLLVSGVARRAEAVSYNVGNSAGWDLSADLPSWPDGKTFNVGDVLVFQYSSYHTLDEVDEAGFNNCSAASALLSRSDGNTTVPLTAPGDRYFICGSQLHCLGGMKLHVLVSQPAGGAPAEATPQSTPQTGSGAALGPSTDDAGIPWLVLGGSHRATVGSMLLTWLFVAATLLLV

SEQ ID NO: 64983 - protein, 195 aa, Zea mays
  Clone ID: LIB4732-018-A6_FLI.pep
SCSLARMPGYYDIDDILMEDEPISVVFQVSANGVGLLDPGAESNCVEKGAKVDLPFWLAHGLLSLEQAVSINPPPCFTQKTWKEIQADAACVDLRVRCPYFYELGCKIVPLVSDKSIGLFLRYAFTSRYKEVLSKSHSSSMMTVPKFVPHLTKEETRVFESARESMTGFKKWRAGGMRLQKASILGRKRKTKLPE

SEQ ID NO: 64984 - protein, 232 aa, Zea mays
  Clone ID: LIB4732-018-G3_FLI.pep
RRTMEAAAENKEAEQEEQQLPHAQKDNAPAAAEEDEADSEETERRNRDLKSGLHPLRHKLVLWYTRRTPGARSQSYEDNIKKIIDFSTVESFWVCYCHLARPSSLPSPTDLHLFKDGIRPLCEDPANQNGGKWIIRFKKAVSGRFWEDLVLVVVGDQLEYSDDVCGVVLSVRFNEDILSVWNRNASDHQAVMALRDSIKRHLKLPHSYLMEYKPHDASRRDNSSYRNTWLRG

SEQ ID NO: 64985 - protein, 265 aa, Zea mays
  Clone ID: LIB4732-019-D4_FLI.pep
RSSDLLLQSPHNTTEQKAARALVAMGEALRAAAADAVVTFLWVLCVSTLGASTTAVTSYLRLQGVHFALLVTVSLLSVLLFVFNILCDALGGASFNPTGVAAFYAAGVTSPSLFSIALRLPAQAAGAVGGALAISELMPAQYRHMLGGPSLKVDPHTGAGAELVLTFVITLAVLLIIVKGPRNPIIKTWMISICTLCLVLSGAAYTGPSMNPANAFGWAYVNNRHNTWEQFYVYWICPFIGAILAAWIFRAMFLTPPPKPKAKKA

SEQ ID NO: 64986 - protein, 525 aa, Zea mays
  Clone ID: LIB4732-020-F1_FLI.pep
TCFFRPSFRLFHLRNCDGDKYVFQMTTAAWPRPRFLVLPQPGFLRSVCHGLCSRCLFCFLLLLAFACSSSSGRVVVTSLPGFDGDLPFHLETGYVEVEEDAGVELFYYFVQAESGAAAAADDTPFLFWLTGGDRCSVFSGLAYEIGPIRFVLEPYNGTLPRLRYNHNSWSKVSHILFVDSPVGAGFSFSRDPKGYDVGDISASLQLQEFLIKWFSDHPEYLANPFYIGGDSYVGKIVPFLGQMISEGIELGRRPFPNLKGYLVGNPITGESIDFTSRVPYAHGVGIISDQLYETILGHCQGEDYTSPANALCAQALDTFNNLINEVQNAQILLDTCVYASPAPNVLSRPVDGGRRILRAAGMGGGATLNHPPARPRFGCITYGYYLSYFWANDERTRTALGIKKGTVDEWVRCHDADLPYTIDLKSAIKYHRNLTSRGYRALVYSGDHDLLVPHLGTQAWVRSLNFPVVDDWRAWHLGGQAAGFTINYSNNMTFATIKGGGHTAPEYEPERCFAMFSRWILDRPL

SEQ ID NO: 64987 - protein, 746 aa, Zea mays
  Clone ID: LIB4732-020-H11_FLI.pep
KPRGFFLLRSAPPRTRTARPFVRRRLRRSLPASRAGRNEPSLALLITERPNPANPAVSLRRSQEGRMCGIFAYLNYNVSRERRYILEVLFNGLRRLEYRGYDSAGIALDADRQVPSPAPASSSDARPYAGAPPLVFRQEGKIENLVRSVYSEVDEKDVNLDAAFSVHAGIAHTRWATHGVPAPRNSHPQSSGAGDEFLVVHNGIITNYEVLKETLTRHGFTFESDTDTEVIPKLAKFVFDKSHDEQGDVTFSQVVMEVMRQLEGAYALIFKSPHYPNELIACKRGSQLILGVNELSGQQNGKSFHDVKTLTTNGKPKELFFSSDLCAIVEHTKNYLALEDNEIVHIKDGSVSILKFDPHKEKPASVQRALSVLEMEVEQIKKGSYDHFMQKEIHEQPHSLKTTMRGRLKDGGVVLGGLKEYLKTIRRCRRVVFIGCGTSYNAALAARPFVEELTGIPVTMEVASDLLDRQGPIYREDTAVFVSQSGETADTLLALDYALENGALCVGITNTVGSTLSRKTHCGVHINAGCEIGVASTKAYTSQIVAMAMMALAIGSDQISTQARRDSIISGLNNLSSNVSEVLKLDAGMKELASSLIDSESLLVFGRGYNYATALEGALKVKEVALMHSEGMLAGEMKHGPLALVDENLPIIVIATRDACFSKQQSVIQQLLSRRGRLIVMCSRGDASAVCPSGGSCRVIEVPQVADCLQPVINIIPLQLLAYHLTVLRGFDVDQPRNLAKSVTTQ

SEQ ID NO: 64988 - protein, 423 aa, Zea mays
  Clone ID: LIB4732-021-D12_FLI.pep
DAGVLSQSDLVAGMAEAATSSSSSGSFAPSRLHDAGVVRESLPYSVLAAPPPPPLPPVQVQVAGSGGGGGGKISPAVLFIIVILALVFFISGLLHLLVRVLLKKQHRRGGRRGTASAAAPRTGVEAGGVDVALQRQLQQLFHLHDSGLDQAFIDALPVFAYRDIVVGGGGDGDKEPFDCAVCLCEFDGEDRLRLLPLCGHAFHLNCIDTWLLSNSTCPLCRGVLFVPGLMGDGNPMFDFEERLEEGRLSEDCDVGFGLPGLKASGLAQTPVVEKKVFPVRLGKFKNVGTQGAVEGGNANASVLSRDEGESSSSSLDGRRCFSMGTYQYVLGTSELRVALQPGRIRNGTGGAMMGRPPGLSSINADIMEGKKICTRNKGESFSVSKIWQWSHIKGKLPAGSDECSDAGSLPWMKRGGAADTSNL

SEQ ID NO: 64989 - protein, 296 aa, Zea mays
  Clone ID: LIB4732-022-A6_FLI.pep
TGASCLLVSPSSKSRTVGAGLSPSRASPSSLPFSPSRRALHMLSLRSVSGSNSSRGIAAVVGVGPRLGSAVARKFASEGYTIAILSRDLEKLSQLAEEIAQAAKAQVFALRVDCADARSVREAFEGVLSLGPVEVLVYNACEPPGANEDARPAPFLAVTPDAFHRALAVSAGGAFHCAQQVIPGMVERGRGTIIFTGSSASVTGFAGYSDLSSGKFALRGLSQSLAREFQPAGVHIAHVIIDGVIGERRSLTRSSRAGGDTAGADPDAVAQSYWHVHAQDKSAWTHEMDIRSPSFM

SEQ ID NO: 64990 - protein, 195 aa, Zea mays
  Clone ID: LIB4737-002-C3_FLI.pep
KFPARAPRTLVPSPTGDASPAAGEMHIKEVTLEGFKSYAGRTVVPGFDPLFNAITGLNGSGKSNILDSICFVLGITDLRQVRAASLQELVYKQGQAGVTKATVSIVFDNSDRSRSPLGYEDSPEITVTRQIVVGGRNKYLINGHLAQPSRVQTLFHSVQLNVNNPHFLIMQGRITKVLNMKPPEILSMLEEAAGT

SEQ ID NO: 64991 - protein, 293 aa, Zea mays
  Clone ID: LIB4738-002-A12_FLI.pep
HIPFPSSHLISRATRERGREQAISSSRTQDAGSKGRRRLPRRRPGACGTDPWHPRRRGRGLPGARPPRLPPRDAPGLPRLAERRRRAGLRVGARRGGRQRGPRVPDAVREPVGRRRAQGRRRRARQHPGVRRGGVQRDDGRVAAGARRAPRGAGVRAVRGGGDPRGRAGRLGPAHLRARGGRARAGRRHGTVAPRRAHAVGALLLRLRRGRRQDLRGGRPRQAQERAQDRRGVRRRGRRLGPAARHVGGARRVRRHGHRRRRPLPGRQRLPHGAPGRLRARRRVVRPGGARVA

SEQ ID NO: 64992 - protein, 746 aa, Zea mays
  Clone ID: LIB4738-002-A2_FLI.pep
GGGREWPLIWVAGEMRLLRVATCNLNQWAMDFDTNLRNVKESIKRAKAAGAVIRVGPELELTGYGCEDHFLEQDTTAHAWECLKDILTGDYTDNILCSIGMPVIFNSVRYNCQVFCLNRKIIMIRPKMSLANDGNYREFRWFSAWTFKGEIVDFQLPVEVSEAISQDTVPFGYGYMRFIDVSLAAETCEELFTANAPRIDLALNGVEVFMNASGSHHQLRKLNLRIDSIRSATQTCGGVYMYANQQGCDGGRLYYDGCCCIAVNGDLVGQGSQFSLKDVEVLDALVDLDAVSSYRASVSSFREQASHKTNVPFVKVPYKLCQPFRSGMVPTSPVEIMYHCPEEEIAFGPSCWLWDYLRRSQASGFLLPLSGGADSSSVAAIVGCMCQLVIKDIEKGDEQVKADALRIGQYKDGAIPMDSRELAKRLFYTVYMGTENSSEDTRSRAKRLAEEIGSFHLNVPIDSIVSAFLSLFETLTGKRPRYKVDGGSNTENLGLQNIQARIRMVLAFMMASLMPWVHNKSGFYLVLGSSNVDEGLRGYLTKYDCSSADVNPIGSVSKQDLRAFLRWAAIHLKYSSLAEVEAAPPTAELEPIRANYNQLDEIDMGMTYEELSIYGRLRKIFRCGPVSMFQNLCHSWCGRLSPSEVADKVKHFFKYYAINRHKMTVLTPSYHAESYSPEDNRFDLRQFLYNSRWPYQFRKINELVQEMDKDGKWGTSAEGKLGAQTGAQGTGMGVVAAGSANPSAGF

SEQ ID NO: 64993 - protein, 272 aa, Zea mays
  Clone ID: LIB4738-002-H4_FLI.pep
PIAPGSCRAVPLPETRNHLSMESNTTPFAAVGTAAEEASTRRVANRIIRALQHQLRLLHRAGAEFFVLGVTGNVYTVTLSTTPACTCPDPAVPCKHILFVLLRVLGLSLDEACVWRQTLHPCQVARLVGTPTYPDVLAGARARERFHQLWSARPANNVADDRQEASSHRPLDGAACPVCLEEMAPAQPSQGSGATAQAILTCRTCRNAVHAECFTRWKRSRSRRAATCVVCRSRWKKPNREHEHEQYMNLAAYMNDDGDVTMLSADGWLCAG

SEQ ID NO: 64994 - protein, 359 aa, Zea mays
  Clone ID: LIB4738-003-B4_FLI.pep
HKMQGGRGGRQGLFGFGDPFVGFGGFGQPGNIMSGFFGGANPFDDPFFTNPFGGMMQPSFSTPFSGMMQPSFMNPFGSMMQPSLLGSSMFAAHGNLNGGTFGSQTHLNQGMSNASGFIQQASESSRPKGPIIKELSSDDEDKAEDDKEDDKKNGNFRKHPRESREPCVEDPDEEEEEEDNKRPKHRQFGRELSRSGTSRLQPQTFMFQSSTVTYGGPNGACYTSSTTRKTGANGITLEESKEADTTTGKATHRISRGIGIKGHSLTRNLNSDGRVNTLQTLHNLNEDELGGFEESWQRNARENMPGWDPRMNMLGNGNLHTGFRDANQRPALPAPGRSRGANSSWNFQNGSSTGRAPRT

SEQ ID NO: 64995 - protein, 365 aa, Zea mays
  Clone ID: LIB4738-005-B2_FLI.pep
NPRPRARSQEPAQSYSSKNPTPPPQHIEISSWRATNGLFHCIFSGDAAGVRADVPGLRRGEEEAHRARAGAGHHHEVPQGRAPVGPHRRQLHLVRRLHGATAGGDHRLRLVAVRGPAGGGAVAAGAVRVHVVQDGAQVLRHLQGAFPGAAPRLPRRRPELLPRQAAHGAGPPQARRQGGTEPRHQPGAHGRRRGRGRVLRIPVRHARRVPTVPRRPVRVRVGGQPGVAVPRTVRVAVPPARLRPAGAAAHAPQRRRRGRRHGDLAGVHDRRHRHQPVRQRVLPGGLGRRAARGRHGVRRRVRQGRVPRLRGGAAGGPGQRRQLQRQRGPREKVPGPGARGSGHVVVCHLGVDFADRKLVFAMWRW

SEQ ID NO: 64996 - protein, 188 aa, Zea mays
  Clone ID: LIB4738-005-F3_FLI.pep
RPGSLPKEPRAREVTSLPEESPAPEVLLPAGGFFFRSSPSPLPGGIMIVCVAVVGHQNNPLYLQSFTEADDALKLHHIVHCSLDVIDERVSNPKRSAPTLNETFLGLLYPTENYKVYGYLTNTKVKFIMVTTDLDVKDADARNFFRKFHAAYVDAVSNPFHVPGKKIASRSFGARVSTIVKSFGSGSS

SEQ ID NO: 64997 - protein, 292 aa, Zea mays
  Clone ID: LIB4738-005-H3_FLI.pep
LEAGRAFFLSSEFPGRQVGEEGRKTEDRAVRGLGTGTGQDPKISDPSCPPARARRRVVLAGRAPPPPSPPPGCAMVLWVFGYGSLTWNPGFDFDDKILGFIKGYKRTFNLACIDHRGTPEHPARTCTLETDDEATCWGIAYCVKGGPEKELKAIQYLERRECEYDQKISIDFYKEGDPLKPAVTGVLVFVSTPDPIGNKYYLGPAPLQDMARQIATANGPTGYNRDYLFSMEKALASISHEDDSIIELANEVRKVLNRTKETKITGANASMKSHAPLVHLSALPEGTVVDSR

SEQ ID NO: 64998 - protein, 393 aa, Zea mays
  Clone ID: LIB4738-007-F3_FLI.pep
GDTSVQYNTSMYVCMCPRGHTYAPDRTLSVSLQTHDDEPDTQQYHTIHTLQAALDQAACRPNASSSDVAVAGALGRHGGAVAVAIGAVVVDGVAAPDVGQAAVLRGVEVPELRLVPPARALGGAEARLRGGLAAVDVEAAVGGDEGRVGPVRLLAPAAGRPVVGVPQAGVELHRLAERVPHAQVGARVLEHPDRHVVHEERDHVEVPEDGVGVVLLGGVEPEVDPLLAVALAAGEHVGLQDVGLPRPVAQELEVDLVVLRVLRRQVEGRDGARGVAADELHVHAEVAEEVGAPRLEARAGGLVQVQLHLPPAVDVVDVVLRPRRHVVLLERHVHGLPRRRRRRPLRQQRHRHGGNLQPPRRRHLRLHWIASASAGPRVVWCGSAGCFAWPEPG

SEQ ID NO: 64999 - protein, 264 aa, Zea mays
  Clone ID: LIB4738-008-A6_FLI.pep
LEAGRAPAACHESSGANARRHTPTRGFIWRPRAQVHLVTRHRLCRARAWHDDGSSWGGFAAAAGRGRRLLRAPGGGSAPLRARQDTHRRGVAEGRTSPARRRGHDNRDMAPQRVGVQRRVQGAGGDPLLRAGEPGGPRVAQGQRRLEQGQGVPVQDRPACIRRRPGDAPVQGRPRRPHRVLPRARLRAGRVRGAGGLRPDRARLLLPRRGRLGRPRVPPGRRRRALRVLHRRARLLCRRREEEEGRVGRKRHTRYIPGRRHRAS

SEQ ID NO: 65000 - protein, 368 aa, Zea mays
  Clone ID: LIB4738-008-B11_FLI.pep
TPAAMAAQLAVAFLALLSSSAFLAVSGQKFNAIFSFGDSMSDTGNLCVNGPPAGLTLTQPPYGETFFGRATCRCSDGRLVVDFLAEKFGLPLLKPSKQGGSDFKQGANMAIIGATTMDSGFFQSLGIADKIWNNGPLNTQIQWFQQLMPSICGSTQACKSYLSKSLFVLGEFGGNDYNAQIFGGYTPEQASGQSATIVDAIGKGVEQLISLGAMYVVVPGVLPVGCFPIYLTLYQTSSAGDYDQYGCLKRFNALSAQHNSLLQAKVSSLQSKYPGARVMYADFYSHVYDMVKSPGSYGFSTNLRACCGAGGGKYNYQNGARCGMPGAYACSDPASSLSWDGIHLTEAAYRKIADGWVSGAYCHPAISA

SEQ ID NO: 65001 - protein, 202 aa, Zea mays
  Clone ID: LIB4738-008-H8_FLI.pep
AAGPSTSPCSPTPRATAKKMFTCYVTSLLEPEWLILRALIFMLFSYPTRKKSVSWYFLMCIWKSRRSKEVLDFVWDLDSDLPFPSPFIQYVSEAIQPLSFGNSRYARLFRVVHAPVFLQSFASDRSHMKDPEGNWIQLPPKYEPIVAEDGTTNNLNEYIMMSVGDVADRERMANDVYCNKLGVVLNETIFPEFFAQLPAPHT

SEQ ID NO: 65002 - protein, 269 aa, Zea mays
  Clone ID: LIB4738-009-A7_FLI.pep
RAQSSGCRTARPRSYSYKNHLSLSLSPLTHSLPPFLPFFSSTSSGTLKPSPQEGRGQSSRTKTSRPHKAKLISMVVYTQEHVYRHPWDRVTAAAWRKFTDPASCTALSHVADVHTLHRRLDSDTGRLQAARSITVRSPPLPFVLRRLLPSAAASPNGAALCHCVETSLVDAQRRAMDVVVRNVSLRGLIEVEERASYRPHPDRPDDWTQFRQETTIRCRPLAALAAVAEKVETRCAEGFLQNSAKGREVVERICRYLEAESAGAAPSVT

SEQ ID NO: 65003 - protein, 477 aa, Zea mays
  Clone ID: LIB4738-009-D2_FLI.pep
RPPGARLKAMATERRRASVVVLGDIGRSPRMQYHSLSLANQASMEVDIVANGGSDPHLSLRENPSIHIHEMKTVQLTGISKISGALSLLLKAAVQFILLVWFLCFKIPRPDVFFVQNPPSVPTLAAVKLASWLRGAKFIVDWHNFGYTLLGLSHGRSHIIVKIYFWFEKYFGQMADGAFCVTKAMQHELAQNWGIRATVLYDQSPDFFHPASLMEKHGLFSRLGNSMCSAMGNADCISVEEVGEDMNTTAFTSKIDGQAFLKPNRPALVVSSTSWTPDEDFSILLEAALMYDRRVAAALGEDDSMDEGQLWIDIKNGKQFVYPRLLFIITGKGPDRKKYEDQIKRLKLRRVALRTMWLASEDYPLLLGSADLGVSLHTSSSGLDLPMKVVDMFGCGLPVCAASFSCIEELVKVNKNGLLFSTSSELADELMMLFKGFPEECNALKSLKEGAMKSASSSKWSTEWETNALPLVDQVIG

SEQ ID NO: 65004 - protein, 364 aa, Zea mays
  Clone ID: LIB4738-009-F7_FLI.pep
SRPAGAALPRTLPSSSAHEFPARPSYTARPGHAPASAKNFAFSGADPAHSCAAGRPRMRNLLTDSFELGKRGQSSGNVDIELGLQGDLTSSAQPGFEGFYEQVKEAESLLNTLTKLLKDLQNSNEESKVVTKASAMKEVKKRMEKDVNEVTKIARLAKSKVEQLNKDNAVNRGKPGFGKGSGVDRSRTTTTVALTKKLRERILEFQTLREEIQQEYRDVVERRVFTVTGERADEETIDKLIETGDGEQIFQRAIQEQGRGRVLDTLQEIQERHDTVKEIERKLLDLQQIFLDLAVLVEAQGEMLDNIETQVTGAAEHIQTGTNLLQKAKKLQKNTRKWTCIGIIILLIIILIIILSLKPWSWGK

SEQ ID NO: 65005 - protein, 284 aa, Zea mays
  Clone ID: LIB4738-009-H1_FLI.pep
GDRVGDIEITRACFVGFIFAPVEHTGNIHSLGRLFLVLGRRAHASSAASRAEDDLVVGSGGAGEGAGGVILGVAVRVGALPLEVPGVVGRVAVVGRRADAAVLVLLEHGARVVAHAVLPQLGRAARVHVHGAARAAAAPGPAVGEEAHGHVEAVDEGDVEEVEVVELLQRVLRQRVGRAPVPSALQHAAAVPRAAAPAPARVELAPRARPDARGRRARGGRDPPALAAVQLPPAAHRHGRGPHGERALVHHREHSRLAGHGEEGDEDAHDCHGTCHLMQVFEEC

SEQ ID NO: 65006 - protein, 506 aa, Zea mays
  Clone ID: LIB4738-010-C5_FLI.pep
LEAGRGDCEHETPPPATGHRREKNRQPSMKAGPPHVAMLATPGMGHLIPLAELAKRLAARRGATATLITFASAASATQRAFLASLPPSVAARALPPVDLSDLPRDAAIETLMTAECARSLPAIAAVLAELGETARLVAFVVDQFGMESFNAAGVRAARCLFMPMNLHALSLVLHLPELAASVPGEFRDLADPVRLPGCVPIPGPDIISPLQDRSNPSYAVMVNLAVRCREAAAAILVNSFDAVEPEAAEALRHPAEPGWPPVYPVGPLILQSEPESGGTGADVDGTPPRAACLDWLDRQPARSVVYVSFGSGGALPKEQMHELALGLERSGQRFLWVVRSPSDDEGTLNGNYYDAESKKDPFAYLPEGFVERTKEVGLLVPSWAPQTQVLAHGATGGFLTHCGWNSTLESLVHGVPMVAWPLFAEQRLNAVMLSEGAGAAIRLPETKDKESIAEVVRELVEGEGKGAMVRAKVAQLQKAAAEGLREGGAATMALDEVIDKWEAEAN

SEQ ID NO: 65007 - protein, 291 aa, Zea mays
  Clone ID: LIB4738-011-G10_FLI.pep
TEGEEGQRQALEKPPRHPRRHQAEGDRRQARIQVPGHQFHRDAVPLRRRGGRVARPGVVGPRDPRRRTRPDQVVVRQEVPAPGPGGGVRLRLPLGRGHRGGQLRPAPVPAGREGGAAGDLAAGARPAVADPPPAHGARRAERGRPPAVLQDERARPVLRQQHGTAVRGVGGDDGAVFSRAAWRCAWHMIQNDLIYAWGMDYKLGYCAQGDRSRNVGVVDSQYVLHRGIPTLGDGGKATATAAASALGTADRLAVRQRSYTELQLFNRRWKKAVAEDGCWTDPYPNPATTTG

SEQ ID NO: 65008 - protein, 427 aa, Zea mays
  Clone ID: LIB4738-011-G12_FLI.pep
RGRPGSRPRHPNSSSSTRSQFDSSSSIQRLPPVRIEERRKNRHRTSSPVQIMALLKAARVADVPTLDVVVAPGLVAVAKARSAAAVGGRFSVIGHRGKGMNALASEDPRLRDVRENTVRSFNDAGRFPVDYVEFDVQVTKDGCPIIFHDNFIFTQDDGKISQKRVADIQLEDFLQYGLQNEQGKVGKPLLRRLKDGRMVNWDVQSEDALCTLEEAFDKVNPRLGFNVELKFDDSLEYTEEELTRILQAILKVVFEYAKDRPILFSSFQPDAAQLMRKLQGTYPVYFLTNGGTELYADVRRNSLEEAVKLCLAGGLQGIVSEARGIFRHPAAVPKIKEANLSLLTYGTLNNVPEAVYMQHLMGVNGVIVDLVPEITEAVSELIALPLPEPDLEVGSLSNQAAARGATTPNFSQREISFLLRLIPELVQ

SEQ ID NO: 65009 - protein, 241 aa, Zea mays
  Clone ID: LIB4738-013-C1_FLI.pep
SRPAGPPARTSPLRSPALALLAAMHHRFAGLVPTARPALPPIHGGVVGRSYPPVHRSLALRLAPFASASVRRACRPLAVSAQSTSLRPEKFFEVEMKVRDYEIDQYGVVNNAVYASYCQHGRHELLESVGISADAVARSGESLALSELNLKYFAPLRSGDKFVVKVRLAGIKGVRMIFDHIITKLPNHELILEAKATAVCLNKDYYPTRIPRELLSKMQLFLPVDSRGSNEDVNNRNNSCN

SEQ ID NO: 65010 - protein, 398 aa, Zea mays
  Clone ID: LIB4738-013-C5_FLI.pep
PGSSPVSTPTPRTRLLLACCFCGSRPSDPAPPMPPQPNGGKVTPNLAMDAEATRLLNLTVLQRLDPAVEDILITAAHVTLYDFNIDLNQWSRKDVEGSLFVVKRNSQPRFQFIVMNRRNTDNLVEDLLSDFEYELQPPYLLYRNASQEVNGIWFYNQQDCEAVASLFGRILNAYAKVPPKPKVPSTKSEFEELEAVPTSAAIDGPLEPPPASAAVVLDTPDELLISYFSGAASIGSVSNAQPSGRVHPSTESIPSSHVPLIVPSAASTHQLPPSVASTASPLPVHGTNAHTSRPTNLVTPDFFAPPPSSSAPLAPPGASVVPTAPPLHPTSAASIQRSQYGTPLLQPFPPPTPPPSLNPSHSDRLTVTRDRVKDALQRLVQSDEFVDLVCRELQRSLV

SEQ ID NO: 65011 - protein, 371 aa, Zea mays
  Clone ID: LIB4738-013-D9_FLI.pep
QSVIKKKRKSFHQRWITNQGWSLVEAEVVGHGEQVAEAGRLHVIDGIEVLLELPTAGAAVTEAVQGHIGTGWPIHLHGPLAHAHHLMLIAVAVARAGRGHARSAEQTRCCWCCRRQGTAHVVHVHVQPVREHDLGRHGRVGPAGVRVRQAARVVGRRRLARLRRAGVRRAVGSRRRVAVVPALLDAVRVVVRIGRRRRGRAGPLVLGLDPLLEVRVPVVLDLVVGPARQVPCDPGPLVAERGVEAHHRLLLLRGEHAVLQPRPKVVDPPQPAALAVPLEPGFRGERAPAAVAVEENVVAELLVLLRRPQALAVVGLGLIARLAPHCRRMPPPPSYEQGRRSGSAEERGSEGDQLYRRAGASSLWGLPGRPR

SEQ ID NO: 65012 - protein, 235 aa, Zea mays
  Clone ID: LIB4738-015-E1_FLI.pep
SRPAGEEKKSHAICTSLLSVALSPTPPMEAAAIAPTSRSLPLPFSSTQLQRRRRATFIPIAASKRHEDDKETAKGSGSEPRREPTSLAPYGISISPLSKDAAMGLVVSAATGSGWTTGSGMEGPPTASKAGGAGRPEVSTLPWSLFTKSPRRRMRVAFTCNVCGQRTTRAINPHAYTDGTVFVQCCGCNVFHKLVDNLNLFHEMKCYVGPDFRYQGDAPFNYLDPNEDNDTTFPL

SEQ ID NO: 65013 - protein, 531 aa, Zea mays
  Clone ID: LIB4738-016-E11_FLI.pep
RPAGEQKQPTQANPNPRPNCPLPPRRRRSPEMSWLARSLATSLNMPDNSGADDDPDASHTPSPSARIPPSPPLPTHPPHSGAAEGVKEDLTELSKTLTRQFWGVANFLAPPPGETLPSPSHSPQSAGGQSADARTPPEIAGIRNDFAEIGGRFRSGISRISGHKAVSGFSKMASSFFAPDDGEEDEWEEERRRQIRHEMGEEAVWHEEAEGDEEWHQWEERVRLRVEDGDTRHELEMERARDEEDDELEEQRARHGDGGESGEQTTRPGEDGELEELRIRHEEEVEEEWDVIGITEEVLAFATNIARHPETWLDFPLLPDDDESDGPFSYFDMSDAQQEHSLAIEHLAPRLAALRIELCPIHMSQECFWKIYFVLLHPRLNKHDAELLSTPQIVEARAMLMQRLQYQSKLETEHLGHHKDDLGVQLRGDTLKDATEAFPFTRWEAASVMPITEIEIEKHPIQVTEVAVVDKSVIEEELPKGHAETSNVLQEAFDDDIDDWFEEADLAGHPTIHIGDEEDVSFSDLEEDDVK

SEQ ID NO: 65014 - protein, 319 aa, Zea mays
  Clone ID: LIB4738-018-G5_FLI.pep
LKRASHPLFASVPVLSSVPLRCFCSPAQNRLIDHAPFQAPVSMGLLSNRIGRESLKAGDHIYSWRAAWVYARHGIYVGDDKVIHFTRGRGQEVGTGTVVDIILVSSTPKRSNTPCPVCTDETSDSSTETNGVVSSCLSCFLAGGALYRFEYAVNPALFLAKARGGTCTLAPSDPDDTVARRARYLLSNGFRCYNLFKSNCEDFAIYCKTGLLVAEQGVVGQSGQAISIIGGPLAAVVSTPFRLVTTNIYGMAVMAVGVYCASRYAADIGNRRDVVKMEVEDLTAGLASGRICAVENIAQLVAPEAEGPADATATATLAA

SEQ ID NO: 65015 - protein, 379 aa, Zea mays
  Clone ID: LIB4738-019-A6_FLI.pep
ATKPRLVFSPLPPPLLVLQKPEGTKRLSAPGRRYPSPATTTRCRRLLGGKQASCFFFFWSSSSSGLRTGQDMGAEAAERDRIRGPWSPEEDEALRRLVERHGARNWTAIGRGVPGRSGKSCRLRWCNQLSPRVARRPFTADEDAAIARAHARLGNRWAAIARLLPGRTDNAVKNHWNCSLKRKLGAAAAASGSAVSADDSAAAAETEARRGKMMMMSISPPDSPSGSGSGSDRSDLSSHGAGSGSGSGSGQIYRPVAARSGGFEPADCAMSRPQEEDPLTALSLSLPGTDQRFHHHSAAADSHFQELPPSPSSPAPSAYPFSPEFAAAMQQLIRTEVQRYMASAGLRAGCGAVGATDLCMPQLVDGVMRAAAEQVGRMQ

SEQ ID NO: 65016 - protein, 264 aa, Zea mays
  Clone ID: LIB4738-021-C3_FLI.pep
RGRPGPSPLRQVSSPAPLFHYEQLRRRRKAISPIRRRRHRCWWDGPCVRSSEEEQRVGGAAGEVGPRGIEMVLWELTAITAYFLGLRRTYRLALRIQRRLIPPNHPRIRDFVYRRTRDVFNVAVSVHKNIQQRDIEVGRNLGNAILRWLDRMKPSAEIRPRLPGPPNGSTAEQFRHVSSASRGAGAQKTSSSSKASPHDSSGKMLFSRLNIGPKHFPVLPTLAQPNRISASSQCRRISYSYAPFPSVTARRKGVFREDIAQLMV

SEQ ID NO: 65017 - protein, 350 aa, Zea mays
  Clone ID: LIB4738-024-D5_FLI.pep
FRAPEDYMEVREMAMAAAAAAAASGGGGVKLPPPNPNLPYREDCWSDGETAALVSAWGSRYVELNRGNLRQKQWQEVADAVNSRRGASARRRPPRTDIQCKNRVDTLKKKYKAELARNAPSAWSYFPELDRLVGPTLSASASKRPLASLPPQFALPMHPPAVRRPPSPSPSSSSPPQPPMALPLPNYRRGSPLPAAALIQKEAAAAAAAASDSEDSDDAAGGNNHKLPRSPSRSVSSLSASNKKRCRDEAGSSADKGFRELARAIEAFAEMYERVESAKQKHVVEMERQRIEFLKQLEVKRMENFVDAHVKLARAKRTKKTTGGAADGAGGMELVATVAALPFVSTSTFL

SEQ ID NO: 65018 - protein, 536 aa, Zea mays
  Clone ID: LIB4739-001-A10_FLI.pep
STLSAPLIPPLCRTMAGEEHQQNTSHRGHHFLVVAYGMQGHVNPARALAHRLAKLSDVVGGCPILATLSVHVAAHRRMFPAPLDPDTAGEEDEEEASDGVISYVPHSDGFDDGSLPRTPEDWARRRRVSRESLSAMLARFAGGGRPVTCVVCTLLVPAAVDAATRHGVPFAVYWIQPATVLAAAYHYFHGYGEAVAAADPAHEVSLPGLRRPLRVRDFPSYLVDTTGSPLARSVVGMFRELFESVDRWRPKVLVNTFDELEAGVLSETKRHLDVFAVGPMVAGAGGGSGSSVASNDEGRIHLYRHDDADRKRYMEWLGAQPESSVVYVSFGSIATHTEQQMEEVVQGLLQAGRPYLLAARSWHGLEDDGARHVLDKAAQSSGGRGTVVDWCDQPEVLAHPAVGCFVSHCGWNSTLEAVAAGVPLVGVPSLFDQPTNTYLVVEEWGVGVRGERDGEGVLAATELARCVELVMGQGTKATAIRERVKALREMAQQAARAGGPAERNLEDFVNSVGDSFRPVGISVAEKTDESRTCSSE

SEQ ID NO: 65019 - protein, 520 aa, Zea mays
  Clone ID: LIB4739-001-A9_FLI.pep
PLTPVSHSLALNRLLSLSDAPAPPSRSMMAAAAWLCGLLSLLALAGAASAADGAEGEWEPLIRMPTAKGSDAASAPAAEDDEVGTRWAVLVAGSFGYGNYRHQADVCHAYQILQKGGVKKENIVVFMYDDIAHNILNPRPGVIINHPKGANVYDGVPKDYTGDQVTTENFFAVLLGNRSATTGGSKKVIDSKPNDHIFIYYSDHGGPGVLGMPNLPYLYAGDFIKVLKKKHASNSYSKMVIYVEACESGSIFEGLMPEDLNIYVTTASNPVENSWGTYCPGMEPSPPPEYITCLGDLYSVSWMEDSETHNLKKETIKDQYEVVKTRTSNSNKYKEGSHVMEYGDKTFKDEKLSFYQGFDPANANIANMLVWPGPKGAVNQRDADLLFMWKGYEQLNGGTEEKLRALIEIKETVQHRKHLDSSIDFVGRLVFGFEKGPSMLEAVRTSGQPLVDDWDCLKRMVRIFESQCGSLTQYGMKYMRAFANICNSGISEMKMRESSISACSSYNSARWSPMARGHSA

SEQ ID NO: 65020 - protein, 542 aa, Zea mays
  Clone ID: LIB4739-001-B6_FLI.pep
RGRPGRLLVHPVGLQRARPGRIREMGTVGGGELPVADPAAADADRARLQQLGYKQELKRGLSVVSNFAFSFAIISVLTGVTTTYNTGLRYGGPASMTLGWLVVATFNGCVALSMAEICSAYPTSGGLYYWSAKLAGNEWAPLASWVTGWFNIVGQWACTTSVDFSLAQLIQVIILLSTGGANGGGYLASKYVVLAIYTAILVVHGLINSLHIQWPSWFGQLGALWNVAGVFVLVILVPSVAKERASAEFVFTHLNTDNGMGIHSKAYILAVGLLMSQYSSIGYDTSAHMTEETKKADWSGPMGIVYSVALSSVFGWVYLLALTSVVTDIPYLLDTGNDAGGYAIAQALYDTFRRRYGTGAGGIACLVIIAVAVFLCGTACVTSNSRMGYAFSWDGAMPFSHLWYRVNKQEVPFNVVWLSVSVAFVMALTSLGSQVAFQAMVSIATLGLYIAYALPIFFRVTTARKSFVPGPFHLGRCGIAVGSVAVLWVALVTVLFCLPVAYPVAKDTFNYTPVAVGGVLVLSLVAWVLHARFWFRGPITNV

SEQ ID NO: 65021 - protein, 535 aa, Zea mays
  Clone ID: LIB4739-001-C8_FLI.pep
LEAGPSGTSSIEPACPALPCAPMTGGGFAVAEGGHARDDYGGGVTVFVVVTCLMAASCGLIFGYDIGVSGGVTQMESFLAKFFPEVSSGTKDAKHDAYCKYDDQRLTAFTSSLYIAAMLSSLVASRVTRTVGRQAVMLMGGVLFLLGSAINAGAVNVAMLILGRMLLGFGVGFTTQAAPLYLAETSPARWRGAFTAAYSIFQVLGALAATVTNYLTNRVPGWGWRVSLGLAAVPAAIVVLGALLVPDTPSSLVLRGDADGARASLQRLRGPGAETDAELKDIVRAVERARRDDEGAYGRLCAKGYGHYLVMVVAIPSFFDLTGVIVMAVFSPVLFRTVGFSSQKAIFGSVILSLVNLASSLLSSFVLDRAGRRFLFIVGGAAMMICQLAMSCILAGHFGKQNAVTMPRDYAVAVLVLMCLYTFSFGVSWGPLKWVVPSEIYPVEIRSAAQALTVSIALCLSFAQTQVFVSLLCAMKHAIFLFYAGWVLVMTAFIAAFLPETKGVPLEAMRAVWAGHWYWRRFVRDAKQEVQVNCM

SEQ ID NO: 65022 - protein, 765 aa, Zea mays
  Clone ID: LIB4739-001-E11_FLI.pep
MPKGYIQQKDRMKVVSIHLAAAVVAVLLLLAAKRTPAIAVPSPQCQWQCGGVDIAFPFGIGDNCSLSAGFNLSCQEVQSGVYRPFQGNIEVLNISLINGTVRELNPVSTYCYDSSSGSMEPSTWSFDASRTPYRFSDVQNKFTVIGCQTLAYITDNTDKSYQSGCVSTCQNVSDLTDGSCSGMGCCQTDIPKKMGFYNVSFDPASDTSQISRLGLGSCSYAVLMEAEEFSFSTTYITNTTAFNDTNSGRVPVVMDWAIRDDGAPSCELATRNETGTYACRSGNSKCVESPNGPGYLCNCSDGYEGNPYLSDGCHDVDECKKNNSPCPSVGGVCHNTVGAYRCSCRAGRKLNKQNNTCDPDTTLITGVTIGFLVLVIFSSFGYMILQKRKLNQVKQDHFRQHGGMILFERMRSENGLTFTVFSEAELVKATDSYDKSRIIGKGGHGTVYKGIVKGNVPIAIKRCALIDERQKKEFGQEMLILSQINHKNIVKLEGCCLEVEVPMLVYEFVPNGTLYELIHGKNQALQIPFSTLLRIAHEAAEGLSFLHSYASPPIIHGDVKSANILLDGNYMAKVSDFGASILAPSDKEQYVTMVQGTCGYLDPEYMQTCQLTEKSDVYSFGVILLEVLTGQEPLKLDGPETQRSLSSKFLSAMKENNLDAILPSHVNGGQESNELIRGLAQLAKQCLDMCGCNRPSMKEVADELGRLRKLSLHPWVQINAEMIESQSLLSGTTTASFEIEVGTTGYPTQEAENLPMNPRSSYYAR

SEQ ID NO: 65023 - protein, 590 aa, Zea mays
  Clone ID: LIB4739-002-A9_FLI.pep
DRAPARLRCVDPAMGCPPRLLCCLFLSLSLAAVVARAATRHQEWEISYQFKSPDCVRKLAVTINGETPGPTIRATQGDTVVVRVKNSLLTENVAIHWHGIRQRGTPWADGTEGVTQCPILPGDTFTYAFVVDRPGTYMYHAHYGMQRSAGLNGLIVVAAAPGGPDAEPFRYDGEHDVLLNDWWHKSTYEQAAGLASAPLVWVGEPQSLLINGRGRFVNCSAAGACDAAHPECATPVFAVVPGRTYRFRIASVTSLSALNFEIEGHEMTVVEADGHYVKPFVVKNLNIYSGETYSVLIKADQDPNRNYWLASNVVSREPGTPAGTAVLSYYGGRSSPRRSPPTAPPAGPAWNDTAYRFRQSVATVAHPAHVEPPPPRADRTILLLNTQNKIDAHIKWALNGVSFTLPHTPYLVAMKRGLLDTFDQSPPPETYAHRGYDVYAVPPNPNATTSDGLNRLRFGSVVDVVLQNANIAGAQQERDAPVAPARPRLLGAGLRHRPLRPGGAPGVLQPQGPHSQEHRRGAPLRLDRAAVQGRQPRRLGVPLPHRVPFLHGDGHRLRGRRRPRRSAPATDHGVRENQGWPLTDVVQKLN

SEQ ID NO: 65024 - protein, 329 aa, Zea mays
  Clone ID: LIB4739-002-B6_FLI.pep
VKHGGVAFPVRQRRRQGRRGPDQGPLEPRGGRGPAAPRAPPRRAQLVPHQPLRPGPVRQVVPPPVVQPAVAAGGAPPLHARRGRRHPPRARQVRQQVGHHRAPPLRTHGQRHQEPLELHAQARARARARVLRRCAPRPRRPALAQAHQQRRAPRKPVRVRPQRLQPPEPSHRDAVSRFYRRHLPAAATTRVLPPRAARGRRGPAPGGAAFSAGSSSNLLVVVPLPARAGPAARTIPAAAANTSSTSKLAVERGVPVDDAGDDPDRGPELHVRVGLRRTRRDGHGRDRLVSAAGVPRQRIADRSQIPLLISRAEAFVPCCCCAACWWYSV

SEQ ID NO: 65025 - protein, 595 aa, Zea mays
  Clone ID: LIB4739-002-E2_FLI.pep
RPSISTPRRVPSSLFLRSCEILRPSRESGGGDYPPHHQPPGIRANHRSSLAAGEHSRARAPPAAAAEPSSLPAPAMGNSLGCSASGERLVSAARDGDAIEARMLLELSPALARYSTFGGLNTPLHFAAAKGHLDIVTMLLEKGADVNARNYCGQTALMHACRHGHWEVVQMLLLFRCNVTRADYLSGRTALHFAAHDGFVRCIRLLVADFVPSVALEDIASSVVDGGDCQTNSGSSPNSSSGQKFNESARVRYINKPADGGVTALHMAALNGHLDCMQLLIDLGANVSAVSFPYGTTANLIGAGSTPLHYAAGGGKQECCELLISKGASRLTLNCNGWLPVDVARIFGRRSLEPLLSPNSHSNVPVFQPSSYLALPLMSILNIAREFGLQHTTPSIDDNDLCSVCLERSCSVVAEGCSHEFCIKCALYLCSTSNIRVEFTGPPGSIPCPLCRNGIMSFTKLPSTPTEGLKSGSALTFCNPCILNTRSMDSPATFSKAEIRRNRVAAVSSELVCPITCSPFPSSALPTCRCSDDDPCGDTDVQDGPEFQSPRPSHSASMELDKRGEGDLDRASCSGMFWSRRSCHREQQCDAEINA

SEQ ID NO: 65026 - protein, 455 aa, Zea mays
  Clone ID: LIB4739-002-E6_FLI.pep
PFYTGCAAQGQLRQASWLQQPSLVTLNCKEMGCGPSIPDKYTIGGKGRKRRSVIQEVAVFVPTIRIPVASDIAHPLRGIVSKDLVDRLSTLRAHVASLAEEIYHADVSAVQELQHALEEYLPVVLGLTTKESRLESSVQFRWKTLDDDQECCLASAWYEVLSVVHMMAMLALFEANLLLIPKNSQGGGERKVAEDAKKDVVDSLLRASGCLDYSVHRILVQIPAQVKKGFPSYLQEGMLEAISIQALAQCVEIQLGLASECEKATLSVKRRLACEQVSYFSQAHYCLSGCDTSDSYGKKLLLFLKWKWMEAKAVAYYYHGLVLDKGGEPANHTSAVCCLSAADDLLSDSKRACLSFCLANPVTRVPPPWGVMKNMHKKIPDVANKKFQAHGHLFEQNKNSALQSVPDLPEFALSLRPDGYELPITDSIWENVDGQPQIQSLKEHMIDDEDEVGTK

SEQ ID NO: 65027 - protein, 256 aa, Zea mays
  Clone ID: LIB4739-002-G1_FLI.pep
YSASRTAMSATPLPPPGPDGAVALLPPPGTDMTGICFRDQLWLDTYPLDRNLVFDYFALSPFYDITCNNESLRSRQIHPLDMSHLTKMTGMEYLLSEVMEPHLFVIRKQKRESPEKSSPMLAYYILDGSIYQAPQLCNVFASRISRAMHHISKAFTIACSKLEKIGNVETEPDAVASESKTQKEAIDLKELKRIDHILSSLKRKIGAAPPPPPYPEGYVPPSAEQEKASDDVAASEAPPQLDPIIDQGPSKRPRFQ

SEQ ID NO: 65028 - protein, 646 aa, Zea mays
  Clone ID: LIB4739-004-D8_FLI.pep
ARSAAMAAAAAAAAAAPESYIGSLISLMSKSEIRYEGVLYTINTEESSIGLKNVRSFGTEGRKKDGQQIPASDKIYEYILFRGSDIKDLQVKSSPPSQSATLHNDPAIIQSHYPHPASLSTSLPSAASTIGANPTSQNAPSLIQMPPPFQGNLPPYQSGTSLQSWNSAPMPSSANGTGLTMPPMYWPGYYTPPTGFSHLQPPLFLRPPHSLAVPQVLQLPVQYPGLGSLPAGFPNMPELPSFLQPGNSNSLNQTSGVPTSVSTPASLSTSQTESSRSQLPNKFSSDSASVFSVGFTPPSVTPSVSTVEPSIPVSAVLPSLVNSKPVALPDSTMPSLSTAKPVIVPDASVLTYLSSQPPSANDVSPVNAAEQVPLVTPGQLLSTTSSTIISSHALQTASAVDLSSKAAPSTVPSSQATLFEGSTTQVASSSILSQQVAMTNESKVAKQREWKAKQTVVDRPGNKEPLLPEPKSVFQKSVGVSSYVRYNSRGRGRGRGRGQSHPITKFTEDFDFMAMNEKFNKDEVWGHLGKRIGQLNDEPNGYEDDVIEDDEISPRKPEAKAVYVKDDFFDSLSCNQIDNGGRNGRVKFSEQRKIDTETFGDSARHRPMGIRGRGPRGGARGRGYYGIRGYGYTGRGRGYSYPNHQP

SEQ ID NO: 65029 - protein, 514 aa, Zea mays
  Clone ID: LIB4739-004-E9_FLI.pep
ELDRASMAVKVWVFAVALMMCAGVGLGADDDDGSRLISRCRLSSPNYRGALAKAILFFEGQRSGRLPANQRVRWRGDSALTDGQPENVNLTGGYYDAGDNVKFGFPMAFSVTLLSWSAVEYRDEVAAAGQLRHLRSAIQWGADFLLRAHTTPTTLYTQVGDGNADHQCWERPEDMDTPRTLYKITRSSPGSEAAGEAAAALAAAYLVFRDDRDKTLATQLLAASRSLFDFANDYRGSYQMSCPFYCSYSGYQDELQWASAWLYRATKDSKYLDFLQNNQGGSATEFSWDNKYPGAQLLATQEYLAGRTELEGYKRGLDSFVCAVMPNSGNTQIRTTPGGLLFTRDSVNLQYTTTATLLLSIYAKALLASAAGAVQCSAASFSPDQISSFATSQVDYILGDNPRSASYMVGFSSKFPRRIHHRGSSIPSIKVLPRKVTCSEGFSSWFPTANPNPNVHVGAIVGGPDGNDQFGDNREDSTHSEPATYINAAFVGACAAALGRSQPDDTASAHSDVM

SEQ ID NO: 65030 - protein, 375 aa, Zea mays
  Clone ID: LIB4739-004-H3_FLI.pep
QLLRTPLSCCCVSSSSSSPVSSSAMAFTVSFSPANVQMLQARSGHGHATFGSCSAVPRAGPRLRSTAVRVSSEQEAAAAVRAPSGRTIEECEADAVAGKFPAPPPLVRPKAPEGTPEIRPLDMAKRPRRNRKSPALRAAFQETSISPANFVLPLFIHEGEEDAPIGAMPGCYRLGWRHGLLDEVYKARDVGVNSFVLFPKVPDALKSPTGDEAYNDNGLVPRTIRLLKDKFPDIVIYTDVALDPYSSDGHDGIVREDGVIMNDETVYQLCKQAVSQARAGADVVSPSDMMDGRIGALRSALDAEGFHDVSIMSYTAKYASSFYGPFREALDSNPRFGDKKTYQMNPANYREALIETAADEAEGADILLVKPGLPY

SEQ ID NO: 65031 - protein, 406 aa, Zea mays
  Clone ID: LIB4739-005-A12_FLI.pep
GARGMDANGCGENDDARAPLLAGPGRRRNSVASMRGEFVSRLPKKVLDAVDPERPSHVDFSRSKGLLEGEREYYEKQFATLRSFEEVDSLEESNEINEDEELAEQIQSEFAMKISNYANIVLLALKVYATIKSGSIAIAASTLDSLLDLMAGGILWFTHLSMKSINVYKYPIGKLRVQPVGIIIFAAVMATLGFQVFIQAVEKLVVNEAPDKLNQVQLLWLYSIMIFATIVKLGLWLYCRTSGNKIVRAYAKDHYFDVVTNVVGLAAAVLGDRFYWWIDPIGAIVLAVYTISNWSGTVWENAVSLVGESAPPEMLQKLTYLAIRHHPQIKRVDTVRAYTFGVLYFVEVDIELPEDLPLKEAHAIGESLQIKIEELPEVERAFVHLDFECDHKPEHSILNKLPSSQP

SEQ ID NO: 65032 - protein, 444 aa, Zea mays
  Clone ID: LIB4739-005-D3_FLI.pep
PRGRPGKKKKETHCCSASVAGCTHKEGDNHKRLRSRPPRRDLCRGGDRRGIAMALRASPVSHGTAAAPLPPFARRRMARGVVVAMASTINRVKTVKEPYTPPREVHRQITHSLPPQKREIFDSLQPWAKDNLLNLLKPVGKSWQPQDFLPEPSSDGFYDEVKELRERANEIPDEYFVCLVGDMVTEEALPTYQTMLNTLDGVRDETGASPTTWAVWTRAWTAEENRHGDLLNKYMYLTGRVDMKQIEKTIQYLIGSGMDPGTENNPYLGFLYTSFQERATFVSHGNTARHAKEYGDLKLAQICGTIAADEKRHETAYTKIVEKLFEMDPDYTVLAFADMMRKKITMPAHLMYDGKDDNLFEHFSAVAQRLGVYTAKDYADILEFLVQRWKVAELTGLSGEGRSAQDFVCTLAPRIRRLDDRAQARAKQAPVIPFSWVYDRKVQL

SEQ ID NO: 65033 - protein, 369 aa, Zea mays
  Clone ID: LIB4739-005-H7_FLI.pep
THSFTWSTHTSLCQLQMTIQMGSARAVNRRYISDCVPARIRMQASAGFVSASALGMACGPALAGLLQWKFKIYMVTFNQSTLPGWVMAVAWLLYLIWLWVSFKEPNRATEVNEAPQNPASGQTVDIGQVENGLAQPLLMDSVDKQNEDEDEEVDESEEAADDSRKPATSIGSAYRLLTPSVKVQLLIYFMLKYAMEILLSESSVITNHYFSWNTSAVAIFLAILGLTVLPVNAVVGTYISNMFEDRQLLMVSQITLLVGIIFSFKVTSTYSVVQYVVSALVTFVSAEVLEGVNLSLLSSVMSSRLSRGTYNGGLLSTEAGTLARVVADCTITAAGYLGVGKLLNVTLLPSLVICVASIACTFLTYNSLF

SEQ ID NO: 65034 - protein, 577 aa, Zea mays
  Clone ID: LIB4739-006-B2_FLI.pep
RGRPENRGYSFWLPVLKTMMSPASERSLIIQSDDDDDARSGHDVEEPEPEQEQDSDSSSSSSSCATPRRGPSSPPYIQQWPQSYRQSIDILSSVQSPNLSFLGTPTLSRLSNSFLAITDSFRSKAPETISSFIKPLLGPTPSDDQQRQHEGTRKSSEYLVPSRRSSLQQIPEDQKPPVGGHGASHDQNCSYTQGVMNGINVLCGVGILSTPYAIKQGGWIGLAILCIFALLAWYTGVLLRHCLDSKEGLKTYPDIGHAAFGSTGRIVISIILYVELYACCIEYLILEGDNLSKLFPNAHLTIGSMTLNSHVFFAILTTIIVMPTTWLRDLSWLSYISAGGVIASILVVICLFLVGVVNDVGFENEGTALNAPGIPIAIGLYGYCYSGHGVFPNIYSSLKNRNQFPSILFTCIGLSTFLYAGAAVMGYKMFGEATESQFTLNLPDNSVISKIAVWTTVANPITKYALTIIPLAMSLEELLPPNQQKYSTIIMLRSSLVISTLLIALSVPFFGLVMALVGSLFAMLVTYILPCACFLAILKTKVRWHQIAACSFIIVVGVCCAYVGTYSSLSKIIQNYA

SEQ ID NO: 65035 - protein, 523 aa, Zea mays
  Clone ID: LIB4739-006-D9_FLI.pep
TRIASPFLTKMAALVPLLLAHLLLCVHGATVTSVATPPPLPVLPVPSYAQLRWQLSEMAPFLHFGPNTFTDSEWGTGHADPSVFAPSALDAGQWARIAAQGGFGRVVLTAKHHDGFCLWPSALTEYSVAASPWQGGAGDVVAELAAAARAEGLGLGLYLSPWDRHEPVYGDTIAYNEHYLGQMTELLTRYGDVEEVWLDGAKGDAKKMDYMFDAWFSLIHQLQERVVIFSDAGPDTRWVGDEAGVAGYTCWSPFNKSSVTIGHTTAEYSSSGDPFGQDWVPAECDVSIRPGWFWHASEKPKNVTTLLDIYYKSVGRNCLLILNVPPNSSGLIADEDIQVLQEFTEIRRAIFSQNFAANATVTANSVRGEQDNLQFAPSKVLEDGIYSYWAPQEGQTCWEMLFDLGQSTSFNLLQLQEPIQLGQRVIEFHVAILVDELWQTIVEGTTIGYKRLLLFPVTESRYLKLTIDSARADPLISFFGVFMDPFSSIHSLQNHVKPPRTNSNEVTMLRMAHASVNKSIDAM

SEQ ID NO: 65036 - protein, 405 aa, Zea mays
  Clone ID: LIB4739-007-A4_FLI.pep
PPLATPEAGGAMLFQVGGQGARPTFFEMSAAQQLPASLRAALTYSLGVFALRRPLLHTVLDYEDEFFALLMGVLESHSLRTTDGSFSESLYGLRRRPVKVAVKRKSPGTESNDKVYGSALRKRQKILSVVFLVVLPYFKSKLQSIYNKEREARLQATLWGQDDVRFDEVGFVLDQEQTSQAQTEPTTGEMSNLTRFKKNFASLIGVCYPWIHATNEGLSFAYQLLYLLDATAFYSPALHVLGIHVCRATGQELMDSSSRISRIRSRELERLRGPPWFKAVQRVFLSCVYTTLDYAQTGLIAAVFFFKMMEWWYQSAEERMSAPTVYPPPPPPPTPKVAKDGISLPPDRTLCPLCCQKRANPSVLSVSGFVFCYSCIFKSVSQHKRCPVTLMPAGVEQIRRLFHDL

SEQ ID NO: 65037 - protein, 740 aa, Zea mays
  Clone ID: LIB4739-008-C3_FLI.pep
GRPGKWGLCGHVWRLLFTLQSPLPCFPHRTPELTRGRCTSSSSIHKARQLSWLLHLSVHPSQLRDSSSMGSGGVRWKALPLCLALVALQACLPARGAAPKTYIVQMAASEMPSSFDFHHEWYASTVKSVSSVQLEGDADDHYAARIVYNYETAFHGFAAKLDEDEAERMAEADGVVAVLPETVLQLHTTRSPDFLGISPEISDSIWSAGLADHDVVVGVLDTGIWPESPSFSDKGLGPVPARWKGLCQTGRGFTVASCNRKIIGARIFYNGYEASSGPINETAELKSPRDQDGHGTHTAATAAGAPVPDASLFGYASGVARGMAPRARVAAYKVCWTGGCFSSDILAAVDRAVADGVDVLSISLGGGSSPYFRDSLAIASFGAMQMGVFVACSGGNGGPDPISLTNLSPWITTVGASTMDRDFPATVTLGNGANLTGVSLYKGRRGLSSKEQYPLVYMGGNSSIPDPRSLCLEGTLQPHEVAGKIVICDRGISPRVQKGQVVKNAGAAGMILANTPANGEELVADSHLLPAVAVRQSEGIAAKKYSKTAPKPTATLSFDGTKLGVRPSPVVAAFSSRGPNFLTLEILKPDVIAPGVNILAAWSGDASPSSLSSDRRRVGFNILSGTSMSCPHVAGVAALIKASHPDWSPAKIKSADDHRVRPRQHVPVAEGRGHRQGVHAVRSRSWAHTPAACPQPWPGLRHRPGRLPGVPLRGEPDAVAAQVLHQELEQDMQAHLQLAG

SEQ ID NO: 65038 - protein, 560 aa, Zea mays
  Clone ID: LIB4739-009-E6_FLI.pep
TAMANRSKQVVTTALPLAAAAASLAVVLLLCSTGSSEDDGYLGRVGAPWGRTLTVLPFSPADLLPLLPRGVAMAALRALRGVSDIFPVFVGAASAGGSGSVPGSGGTVRWKGACFYENEAWLVFHNETGSKYGGGTLHIKTSKAHSWTCIDLYVFATPYRVTWDYYFLGREHTLDIKEWESEAEYEYVKRNGVSIFLMPSGTIGTLRALWDVFPLFTNTAWGENANLAFLEKHMGATFEERPKPWVSELNPDDIHSGDFLVLSKIRGRWGGFETLEKWVTGAYAGHTAVCLRDSDGKLWVGESGNENEQGEDVIAILPWEEWWEFEVTKDDSNPQIALLPLHPDLRAKFNETAAWIYAKSMEGKPYGYHNMIFSWIDTISHNYPPPLDAHVVASVMTVWSKLQPEYAANMWKEALNKRLGTKGLDLSEIIVESEKRGITFDKLLSVPENDSWVYEDGQSASCVAFVLMMYKEAGLFDPITSSIEVTEFTIKDAYILNFFEDNSTRLPEWCNKDDDVKLPFCQIKGKYRMELPGYNTMKPYAHMNERCPSLPPDYNRTKGC

SEQ ID NO: 65039 - protein, 551 aa, Zea mays
  Clone ID: LIB4739-011-C12_FLI.pep
DAHNQNSRVCMETLRAYDELFPWALLVLVTTITILYLKQLLVTAFKRRATSSPSLPCPRGLPLIGNLHQLDTVPHDALAALAAKHAAPVMLLRLGSVRTLVVSTADALRAVFQPNDRAMSGRPALCAATRITYGLQDIVFSPPDGGFWRTARRASLSELLSAPRVRSFRDVREQEAAALVAAVTDMSRSGSPVNLSEELMATSNKILRRVAFGDGGGEEESIRASAVLEETQKLLGGFFVADYMPWLGWLDALRGLRRRLERNFHELDAFYEKVIDDHLSKRGDDDDASKSKGEDLVDVLLRLHGDPAYQSTFNSRDQIKGILTDMFIAGTDTAAATVEWTMTELVRHPDTLAKAQKEVRGAVVGRDDDIVRESDLPRLKYLKQVIREAMRVHPPVPLLVPRETIEPCTVYGCEIPARTRVLVNAKAIGQDPDAWGADAARFVPERHEEIADLSDHKPWHDSFSLVPFGVGRRSCPGVHFATSVVELLLANLLFCFDWRAPHGGVVDLEQETGLTVHRKHPLVLVARRVRVQAPSDDELDGRFSAMHSVPS

SEQ ID NO: 65040 - protein, 567 aa, Zea mays
  Clone ID: LIB4739-012-E2_FLI.pep
LINNCNLYRRVRDRINPARHARCSNLPTQPEPSERVTCTSNFSLSPFFFTFRRHSSRGCRRLRRGPLDEGCPERVLHDDGECEGLGGVRRALTGGRQPAELAHHVGEHELDVEHAERGGGADAAAGAEGHHAQRAGAGDVGVEALAAFQEALRPPRVRVRPRRRVLRHPRRVELHAGVRRHAVPAQLRVPRRRVRQHEVARRVPPERLLHHRLEVGHGLDVGFGDPGGLAHLGDDLVVEALLRGGVEDEVHHGPFQRCGAGVCAGAHDLGAERDELLLAEALPAAGRLQVEERVHVRFPRPAHHLHAVRRCRGAVAEEVPPRADERHEAVELAAAQGAGLGELLPEERCEEGQEVRELGHGHHHHVLEHLLDLPDELVGDLGAEADADEDAADGEAAAGHDPHGTVRRELGAEAAQVRVHGPLPDPGEALDAVRGHDLGDEVAAQSTPQGAVGRRVDGALADAEEEAGGAVLGPAREHGALLHQRLVDELRRGDHDEGALPHPHGEDGPVLLPEVAHHVHEGPSLQDHLEQVPHHRPTRRPRREAVDTAGLGAPTPPHGSQRRRQHH

SEQ ID NO: 65041 - protein, 663 aa, Zea mays
  Clone ID: LIB4739-013-F12_FLI.pep
RGRPHSSTSSSSCPARSHLLSQSQATPMATTAHPALPLLIVLACAGAASGFYLPGVAPADFRKNDLLAVKVNQLSSIKTQLPYSYYSLPFCRPDTIVNSAENLGQVLRGDRIENSPYVFEMMEPKLCQIACKVVLTEQGAKDIMEKIHDEYRVNMILDNLPMVVPIERLDRDAPPFYQQGVHVGVKGHYAGSNEFKYFIHNHYSFLVKYNKDAQTDLARIVAFEVKPFSLKHEFDGDWKGNATRLKTCNTQSEHLIVNSDGPEEVKANKEIIFTYDVNFEESSIQWSSRWDTYLRTPDDHWFSIVNSLTTVLFLSVMVAMIMLRTLYRDISKYNQLEDQEEAQEESGWKLLHGDVFRPPANADLLCVYVGTGVQFFGMLLVTLLIAILGLLSPSNRGGFMTAMILLWVFMGLLAGYSTARLHKMFGGLEWEKVAIKTVLVFPGVVFVIFFALNMLLWGVKSSGAVPFTTMLALVFLWLGISMPLVFVGSYLGFRKPAIQGPVRTNKIPRLIPQQPWYMNPAVSVLVGGILPFGAVFMELFFILTTIWMHQFYYIFGFLFLVFVILIVTCAEITIVLCYFQLCSEDYQWWWRSYLTPGSSALYLFLYAAFYFFTKLQITKAVSGVLYFGYMLIAAYAFFVLTGTIGFYACFWFTRLIYSSVKID

SEQ ID NO: 65042 - protein, 505 aa, Zea mays
  Clone ID: LIB4739-013-F6_FLI.pep
QSAHWTSPPHRTEPVEMEEAAPAGTNKVYYDGCPGCAMDRRKESRAGVPYKELLFVAAATFASALPITSLFPFLYFMIRDLRVAEREEDIGFYAGFLGAAYMIGRGVASVFWGVVADRVGRKPVIAFSVLSVVVFNTLFGLSAKYWMAVATRFLLGALNGFLAPAKAYSIEVCRPEQQALGISVVSTAWGMGVIIGPAIGGYLAQPAKQYPHLFHEKSVFGRFPYLLPCLCISFFAALVVISCAWLPETLHKHRGLERAAAEVAEGTTAAAAAAQESTPEPEQEPPKSSLLRNRPLMSSIVSYCVFSLHDTAYVEIFSLWTVSGRDHGGLSFASKDVGQVLTVAGASLLVYQIFAYRWVDKILGPVNSTRVSSQRMQALSIPIIAAYPFMTRLSGIRLGVPLYVAAMLKSVLAITRVTGTSLLQNNAVPQEQRGAANGIATTAMSLSKAFAPAVAGILFSWAQKRQHAAFFPGDQMVFLLLNLTEVIGLVLTFKPFLAVPQQYKQ

SEQ ID NO: 65043 - protein, 364 aa, Zea mays
  Clone ID: LIB4739-015-D5_FLI.pep
PPPVAVPHRRTGQPPRPSTVSVAAPPAPGPSMAASGAYPGTAFKILLSCPDGLPRSRVSVKFGRSFDRIPHPDAALEESISEVWDQSLQRNPYLYSGTKFRYGGNALHYKDDSDHDLEYCVSLHLGLTDYRTFVGTNLNPLWEFFLVPSEDDSVHCQHLSDALGNGAIVETSDKKIIVLQRSYNVADFPGYYVFPGGHSEPQEIGIMGHQTDEEDFASLNERVSQEMFEGLIREVVEETGVPASSLTDPVFIGVSRREVNARPTAFFFTKCNIDSSGVSELYSRAQDGYESTKLYTVSVEELQGMRQRMPGCHNGGIALYELMRNAAKKKVKTSLMNSSDGAITPETSVEVFVSRTNTREEHCM

SEQ ID NO: 65044 - protein, 528 aa, Zea mays
  Clone ID: LIB4739-015-E1_FLI.pep
RPGVSGLCRFHRESGAMQSSVKLAVLALLLAAAAHHGLLPLPTARCYWLNPEIYDAGGLSRRAFPDGFVFGTAASAYQVEGMAKHGGRGPSIWDAFIEVPGTIPNNATADVTVDEYHRYKEDVNIMKNMGFDAYRFSISWSRIFPDGTGKVNQEGVDYYNRLIDYMLQQGIAPYANLYHYDLPLALHEQYLGWLSPKIVEAFADYAEFCFHAFGDRVKNWFTFNEPRCVAALGYDNGLHAPGRCSGCPAGGNSTTEPYLVAHHLILSHAAAVRRYRDKYQLHQKGKIGILLDFVWYEPFSDSNADQAAAQRARDFHLGWFLDPIVHGRYPYSMQEIAKDRLPLFSDEEARMVKGSIDYVGINHYTSFYMKDPGTWNLTPVSYQDDWHVGFVYERNGVPIGAHANSYWLYIVPWGINKAVNYVKETYKNPTMILAENGMDQPGDVSITQGVHDTVRIRYYRDYITELKKAIDDGARVIGYFAWSLLDNFEWRLGYTSRFGLVYVDYKTLKRYPKDSAFWFKHMLSKKRS

SEQ ID NO: 65045 - protein, 305 aa, Zea mays
  Clone ID: LIB4739-017-F11_FLI.pep
RGTGGPGPSSAPAEGWEYGKRPASLRLISGGEAPHRGMGQDVVAHVYDAATAGSDTTVLHINRFFKDAIGLGGIFHTAIQVYGDEEWSFGYCERGTGVFSCPPCKNPMYTYRESIVLGKTNCCILKVNQILRELSWEWPGHSYELLSRNCNHFCNTFCEKLEVSKLPGWVNRFANAGDTALEVAETTAGKLKQAKKEIVTACKAASTFLTGTSSSASSNAEDTGGSTSTGNSLFEGAWIRSIIGMTMKPSKSLVCVDSSDSDSSGSESESDGDQPNSDDNAERQAKGVKQERGTKKKNNGPHCHS

SEQ ID NO: 65046 - protein, 749 aa, Zea mays
  Clone ID: LIB4739-018-B12_FLI.pep
ERMSESESSNTGFAAALELWQENQLRILVLISLATQCFLFVFAPLRQHRIPGPLRLSIWLAYLGSDAVAIYALATLFNSHRCDTGTGTGTARAGVELLWAPIMLVHLGGQDSIPAYNIEDNELWRRHVVTAVSQVAAAIYVFVKSWPKSMAATAAHLVVDQDTRNRINAFMAHKSEMAAYGRILGPALLLFFSGITKCVCKPWDLKRVSVNSLVDSSSSGSSEEKADAGESEMDSLQEYVGAAAQYFESVGHEEEEDDGGGGDDDDDDTCKAEEVWKPYNLCVDLAPPYSGRLSCLKHLARSPADEAHRLVKSSLSATFHQLYTKESLKLHDMSHIVLTDNRALNRLKLVTSARGLRTVAATTLLGAIAAFYGEGDVDQDPTDVTITYALLWSAFVMECVLPTVIHHTFGWIERLFTGHRTWPDQVAQYSLMGYVARGRSHSWLMKAVACLGCGDLVDQLWTMKPRMGASSREITGLVHAHVAGAWMEGHIAGADSFRAFNDYRGQWTLGNCREIGVGVSSMVVLMSSVSRPFDESVLVWHLATDFCFHLLQVQGDPSRATATATATARRCIEMSNYMAYLLFVKPEMLMPGARRKLFRDACRELVGLLEEDRPGAPRARGKRDLAHKVVQLLKRDGGDVLGSAGVGVGVGVVRRAWCVAEKLVDSHSGDEEKMWTVIQGVWVEMLCFSASRCKGYLHAKGLGTGGEYLSYVWLLLLYMGMETLAEKMQRTELYEGSTAAALSISGQNV

SEQ ID NO: 65047 - protein, 558 aa, Zea mays
  Clone ID: LIB4739-018-C2_FLI.pep
KAGKKINSNGRVATNHQAARAMAASPPRKRLPAARLIFALLLLMSSVLPRDAGAVELGLKLPFSPGDVLPVLPRQVAWPVMNTLHSAVDLLPSFVAAVAPGSPAPAAWKGACFSENEAAIELTPGDRNGTDVGGAVLRLKTASAHSWACMDLYVFATPYRITWDYYFAAREHTLEIKSWEEEAELKYVKEHGISIFLMPSGMLGTLLSLIDVLPLFSNTAWGQHSNLAFLEKHMGASFEKRTQPWVANIRKEDIQSGDFLALSKIRGRWGGFETLEKWVTGAFAGHTSVCLKDEKGDLWVAESGYENEKGEEIIAIVPWDEWWAMALKDESNPQIALLPLHPDVRARFNESAAWEYARSMVGNPYGYHNMIFSWIDTIGDNYPPPLDANLVMAVMSMWTRLQPVYAANMWNEALNKRLGTEDLDLQGIIMEIERRGMSFDQLLTIPEQDEWVYSDGKSTTCVAFILAMYKEAGIFTPFSESIQVTEFTIRDAYMLKIFEDNPARLPGWCNADTDKLPFCQILGEYRMELPEYNTIEPYAKMNENCPSLPPTYKRPARC

SEQ ID NO: 65048 - protein, 420 aa, Zea mays
  Clone ID: LIB4739-018-D10_FLI.pep
KRVQISDPQTDLTHPFLHLRPLPAMAPAPAAASAGRKSHVTVLLLYVVCGLILLLLLASYSPRLQPHAHGRSLHRRLKLHPKSSLPSDASSGGNGGQQKTQHQNHHAASFDPTIAELERRLDDKEWEREHYSLLHGGEPDDHMKEWEEFLKEEEDFINDDDRFNIADRIRALFPKIDVAPQDGFVSLDELTAWNLQQARADQHHRSAREMELYNKNGDEIVSFEAFNALRQESHGEGNMLGFEWWKEDHFNASDANADGFLDKTEFNDFLNPSDSDNPKIINLLCKQEIRQRDKDGDGKLNFEEYFTGLHDHIHGYDDENADISQIGNITVAKDRFFKLDKDNDGFISEHELEPVLDKLYLSERYYSRQQAIHAISEADKDHDGRLTLEEMVENPYAFYGSVYLSSSDNDDEDYFHDEFR

SEQ ID NO: 65049 - protein, 429 aa, Zea mays
  Clone ID: LIB4739-018-D9_FLI.pep
GVTMSSSMESSYLPATTESLAQAQEAKDASESISILYRVIQDPSSSADALRTKEVAITNLTNYLTKENRAEELRNLLTQLRPFFAVIPKAKTAKIVRGIIDAVAKIPGTSDLQISLCKEMVEWTWAEKRTFLRQRVEARLAALLLENQEYTEALTLLTSLIKEVRRLDDKLLLVDIDLLESKLHFSLRNLPKAKASLTAARTAANAIYVPPAQQGTIDLQSGILHAEEKDYKTAYSYFFEAFEAFSALEDPKAIFSLKYMLLCKIMVNQADDVAGIISSKAGLKYLGPDVDAMKAVADAYSKRSLKYFETALRDYKSQLEEDPIVHRHLSSLYDTLLEQNLCRLIEPYSRVEIAHIAEMIELPIDHVEKKLSQMILDKKFAGTLDQGAGCLIIFEDPKTEEIFPATLETISNVGKVVDSLYVRSAKIMA

SEQ ID NO: 65050 - protein, 478 aa, Zea mays
  Clone ID: LIB4739-018-F5_FLI.pep
SSRRIRQGAAMNEKASVSKELNAKHKKILEGLLRHPENRECADCKSKGPRWASVNLGIFICMTCSGIHRSLGVHISKVRSATLDTWLPEQVAFIQSMGNEKANSYWEAELPPNYDRVGIENFIRAKYEDKRWVPRNGTSKSSSSVRDEKSQESPASANRSGHGHRSSFEQNRASPALPSKVAHAASRISSQASPQPPKVETPVPKVVLPPQSQKSPAKVDATPPKVEKPSVTPPPKVDYATDLFNMLSMDGTTEKESASSSNDDNGWDGFQSAQPVPSSEKKDSAKPAESKTQSTSGMEDLFKDSPAVPLSSAPAVSQVNAKNDIMSLFEKSNMVSPFAAHQQQLALMSQQQALLMAALKAGNAPQMMIPGTANQLNANGTLPFQNWTNLYQNPGSTPAAAQNGATKVANNNQDFSSGTFGFGTPGVYNISPTVPANGATTAGAINNGTASTASSTLPSQSGKDYDFSSLTQGFFTKR

SEQ ID NO: 65051 - protein, 508 aa, Zea mays
  Clone ID: LIB4739-018-G6_FLI.pep
DSTRDVRRASDEMGGGGGGGGGKSEKARRSSARVRLWVARASTVLLWTCLVQLAAYRELWAPSVLSRWPGCLNQPHVARRPSERVADAGQTQAARALVVLPPKRIYRNNGYLMVSCNGGLNQMRAAICDMVTIARYLNVTLIVPELDKASFWADPSDFQDIFDVDYFIASLRDEVRILRQLPPRLKRRVEMGSLRSLPPVSWSDIGYYRRQILPLVKKYKVVHLNRTDARLANNGLPVEMQRLRCRVNYNALRFTPEIEDLGRRLVRALRRNGPFVVLHLRYEMDMLAFSGCTHGCSSMEAEELTKMRYAYPWWKEKVIDSDAKRKDGLCPLTPEETALVLQALGIDRGYQIYIAAGEIYGGQRRMAALTSAYPNVVRKETLLPWEVGLFQNHSSQMAALDYMVSLESDVFIPTYDGNMAKVVEGHRRYLGFRKTVLLDRRRIVELVDEYRNGTLSWTDFSSAVMASHTSRMGEPSRRQTVPDRPKEEDYFYANPHECLHQPEDVSAL

SEQ ID NO: 65052 - protein, 382 aa, Zea mays
  Clone ID: LIB4740-001-G10_FLI.pep
RGRPGKKKKQSMRRHMAPIKEQKHTTSAEQQVMLDAELQLWNHTFGYVKSMALKAAIDLGIPEAIHQHGGTATLPQIVTRVKLHPSKTPCLRRLMRVLTLTGVFGAQEPHDDDGGCDDELVYTLTPASRLLVGSPGQNVGPFLTLMLGPIFVSSFLDLRGWFQHETPDPSPFKMTHGRDIWELAPHDAAFGRLFDAGMVADSSFIMDVVVRECGGVFEGISSLVDVAGGLGGATQTIAKAFPNLECSVLDLPNVVASAPADTAVKYVPGDMFESVPAADAVFLKWIMHDWGDADCVKILKNCKKAIPAQGGKVIILDIVVGAGSSCDRKNVETQCLFDLFIMFINGAERDERQWKKIIFEAGFTSYKIIPVLGIRSIIEICL

SEQ ID NO: 65053 - protein, 249 aa, Zea mays
  Clone ID: LIB4740-002-B7_FLI.pep
ENQGNADVGSLLGREVGLDVVHLAAADAEGLGEDVGGHGRHGAEERHGDGLRALELAVEGGDDGGGAVPPVLLEVDEAAREDEDVALGDGLGEERVGGGDEADLERALEDEDDLGGARVRVRRVLAARRVVDARHGDAQRVHARELLHVGRRHHGARRVVGVAGVPQPVEEEVVRRKVRLAREPVQLHRGGVVSRADVLQHVGVAGKGGGGEREDDGAGRGDVEVDPRHERSVDGVCCFPDLCTLASDE

SEQ ID NO: 65054 - protein, 249 aa, Zea mays
  Clone ID: LIB4740-004-C3_FLI.pep
PHESALRPTGQALATPAHSWWAGREISREACRLRRAGGEEMGARNSAAATPVLLNVYDLTAANDYLYWLGFGVFHSGIEVHGTEYGFGAHDYPSSGVFEVESKSCPGFIYRRTVWLGTTDMSQEEFRSFIEKLAGDYHGDTYHLINKNCNHFTDDVCQNLTGKPIPSWVNRLARVGSVFDCLLPESVQVSPVGRVPTSRRISDDDLYSIHSPMADKDDNDEDEAKHLLPAPSNDQLSVDVPPKLAKDLL

SEQ ID NO: 65055 - protein, 305 aa, Zea mays
  Clone ID: LIB4740-005-G7_FLI.pep
ALCHAGAAAGPDGRASAIRRRLPELVVLRRLLVVVVRLLRRRPLRWRRVEERGQVDGGGDAGRRRQVRDGERAWHGHLRRGRQRGRGRQLERGEVCLQVGQLGLEIHHLLLEREDVGDAAVDGVAEPRLGLVADGDDGVEALVRRDLEQQLGHVAGAEHLVHGREVRRALLRVEVGREDAAADALAPEELARAARPAAAASSRASAAAAARAPAAKRAGAAAASASAHCPQLPCPVLKGATFYLSLSLRACLPPAALQLQWPGVGLGLVLVIGRDKQWQGQLGKGRESEREEEEEEEEEESRPAS

SEQ ID NO: 65056 - protein, 369 aa, Zea mays
  Clone ID: LIB4740-005-H9_FLI.pep
SRPAGSARFSAINKASSRQTINRAKQIKDALHVLFIFHCCFALLCLPATMASTRAAATLLLLLALAGTSSAQLSTGFYSYSCPGVYGAVKSVMQSAIAREKRMGASILRLFFHDCFVQGCDASLLLDDTPSFQGEKMANPNNGSVRGFEVIDAVKSAVEKLCPGVVSCADILAIAARDSVVILGGPTWDVKVGRRDSTTASFSGANNNIPPPTSGLANLTSLFAAQGLSQKDMVALSGAHTIGQARCTNFRAHIYNDTDIDAAFARTRQSGCPSTSGAGGDNNLAPLDLQTPTVFENNYYRNLLAKKGLLHSDQELFNGGATDALVQSYVGSQSAFFADFVAGMIKMGDITPLTGSNNGQIRKNCRRVN

SEQ ID NO: 65057 - protein, 298 aa, Zea mays
  Clone ID: LIB4740-006-A3_FLI.pep
ACSIGSWNKTMESEIMASYETKQNCEIRVFESSDEMATDLAEFISQASEISVKERGCFAIALSGGPLVRHMRKLCEAPYNKTLDWSKWYIFWAEERAVAKNHAESNYRLTKEEFLSKVPILNGHVYSINDNATVEEAASDYEFVMRQLVKVRTVGVSESNDCPRFDLVLLNIGPDGHVASLFPNHPALELKGDWVTYITDSPEPPPERITFTLPVINSASSVAIVATGEDRARAVSFSVSACQDQEEEGPADDDAGTTMIPPASMVQPTDGKLVWFLDEAAASSLEASNGACEHQEGY

SEQ ID NO: 65058 - protein, 222 aa, Zea mays
  Clone ID: LIB4740-006-B3_FLI.pep
PGPRSSLPKLARKKKLTVAPLSLSLSIWVPLLFLMAAAAASTPQGVAERRGIPAAAFVEDVEAYLRQVGLDVNSALAFLQERLQQYKIVEMKLLAQQRDLQAKIPDIEKCLDIVTTLQAKKDLGEALIADFELSEGIYSRAKIEDTDSVCLWLGANVMLEYSCDEANALLKKNLENAKASLEVLVADLHFLRDQQTITQVTIARVFNWDVHHRRSKQAVKET

SEQ ID NO: 65059 - protein, 182 aa, Zea mays
  Clone ID: LIB4740-006-D7_FLI.pep
KIKKETDIGPERYISSHFEKGEAAAMGAGAGSLGARGGTDDVRVTWVDDTEAAHPVVLAAGSAKINIVSVEMVHANFGQHGVVLNLRLPKWRAVVCDDDQLSLGVAQRLEDGLVAQGVLAALHHQLQLVVDALCALLRLLRGSHRIEQTLAAMGWGGGAKCCCAQATAGCGGANGRLPGRPR

SEQ ID NO: 65060 - protein, 190 aa, Zea mays
  Clone ID: LIB4740-007-C8_FLI.pep
WKATRRERGGPRGRGEAPHQDPCSPPPPLISARLSGFNMSTSTFATSCTLLGNVRTTQASQTAVKSPSSLSFFSQVTKVPSLKTSKKLDVSAMAVYKVKLVGPEGEEHEFDAPDDAYILDAAETAGVELPYSCRAGACSTCAGKIESGSVDQSDGSFLDDGQQEEGYVLTCVSYPKSDCVIHTHKEGDLY

SEQ ID NO: 65061 - protein, 202 aa, Zea mays
  Clone ID: LIB4740-008-E6_FLI.pep
SRPAGTDTTLRSLATVARGFRLWSRRGRIQSTMPPSASMPATHTAVYVAAVPLRAPKGPAQLLMSAGYSLGMWDLQHFMVLLRPDPALAQALVFDFQPRDPEDVLAALAVLSRREIPGVVRRRTLRRVPDRRCWLVGHCCDAVGAATRFSERWTTGLVVGEHDCRDYTDGLVEVLTGEKRVLESLRLRGNGSSTSTSGAAPP

SEQ ID NO: 65062 - protein, 605 aa, Zea mays
  Clone ID: LIB4740-008-H3_FLI.pep
TEARGETSAMAEDARGEKKDAYAAAPASKLPAKQRGGFRSMPFILANDFCDRLASVGFTTNLISYLTLQLHLPLVEASNIITNYNGTANLTPLIGGLIADSFAGRFWTITFGSIIYQLGMVCLTLSAALPSLHPPSCAKHAADCQRASSYQISVLYLSLLCTSIGTGGTRPCTMAFGADQLELNAHRHRGAKPKWSFFNLYFFAVELAKLAAVTAVVYIQDNVGWGWGIGVPTVAMVAAVIAFVSGYSLYIRMPPGGSPLVRLAQVATAAYKKRKAVVPDPSLLYEDKELDAGISTTGRLLHTDQLKCLDKAAIVTDGDVLPSGQPKLWRLSTVHRIEELKSIIRMLPICAAGIILVTSASHNHSFAIQQARTMDRDITPHFKIPPASMLIFTNFGMLLTLALYDRVLVRVLRRFTGRPNGITHLQRTGVGLTIAMLSNVVAAVVERRRKSVAAASGLLDAPKATLPMSVFWLVPQYAIHGIANAFMDVGRMEFLYDQAPESMRSTATALYWLTFSIGSYLGTLLVTIVHDKTKRTGQWLPDNLNRGKLDNYYWLVVALEVVNLVYFFICVKYYTFKPLEMVSGEELYHHGNGTDDAKKQGGSLE

SEQ ID NO: 65063 - protein, 365 aa, Zea mays; identical to SEQ ID NO: 63828
  Clone ID: LIB4740-009-D3_FLI.pep

SEQ ID NO: 65064 - protein, 250 aa, Zea mays
  Clone ID: LIB4740-010-E7_FLI.pep
GQQHLCVSSTRGNLPYSTADMVLSGGLVVPWLAAVAALAITAAPLGADAYKNYTVGDDKGWYDGLSLPGVDYQAWADGKNFSLGDFLIFNTDKNHSVVQTRNVTLYESCDYNDSGPDDTVEWAAAPPEFSKDAVTVAVPLLDEGRAYFFSGNYDGEQCESGQRFAVDVAHGQGLPPDLRPPVADAPAPSSAGPADGAAALDFSHPKNVTTPSATDDDDEQLGGGSASSSLRSALPVTATLLITLLFAFAV

SEQ ID NO: 65065 - protein, 297 aa, Zea mays
  Clone ID: LIB4740-010-F7_FLI.pep
ISTTETCSRVISSTKRTDFGHRPQRQRHRTRTTKLVGDMNPPAAAASTGAGGHAAAPAAAPEYAHYPRLSPEEVAPPPPPPYHAATAAPSAYGGNPYIYSPAGGAATSPKNTMDSVKDVLGKMGKRFGEAARKTETITGNFWQHLKTGPSITDAAMSRISQVTKVIAEGGYDKIFHQTFEVAPGEKLKKPYACYLSTSAGPVMGVLYLSNVKLAFCSDNPLAYQVGDKTEWSYYKVVIPLAQLRSINSSTSRTNAAEKYIQVVSVDNHEFWFMGFVYYDSAVKNLQEALQEAQNLRA

SEQ ID NO: 65066 - protein, 323 aa, Zea mays
  Clone ID: LIB4740-012-H8_FLI.pep
ARYACTLVPTKSSSTPIPSPAARKNGRARLRLLCACGSARRGDPSGGLDRFLLHLHLHLLLNFELKTMDLETENRLASLLIEEARRLQLEADREGVHAYLRKPNVRHRPNSRFLTATVRGVQQANRVVEVNEMWRARAKELELESKMKSRSSRSNNRDDFRGEKRKSDLRNHGSRFEQEGTTYSNSYSDREDGLSDDEIERFLHSRAKRGRGAVGSRMDEPGPYLDSLSRHQDNGPSPDIRVEEKWERQVQGPEKPSFLRPKSSDSHWHKDTSDGRASSSEPLNKKEKKKKSEKKDKREKRKEKDRKKYKHRHHRNHKSRRRE

SEQ ID NO: 65067 - protein, 361 aa, Zea mays
  Clone ID: LIB4740-014-D12_FLI.pep
LEAGRDQHVANPSAESLTASHPSFPSFRHNQHASGTRRLGFRRGDGESHGRDSMAAAPPGEMASDDDRSVAADSWSIKSDYGSTLDDDQRYSDTAEVLLASSSASSVAAPSTTVAVHPSSDFSFDKDVHDSSYVEPPLLGLQNFQDGAYAEDLANFHERSHADDWFGTDIMDIRVGWTKNLCSSRDLPSCSVLDIGTGSGRLLQQLAKQGFSDLTGIDYSESAIELARSLAIGDGFEHINFLVDDVLESKLERRFELVMDEGTLDAIGLHPDGPVKRMMYWQSVDSLVSRGGILVITSCSRTKDELVQEVENFNQRKLGAVGSGSEGLPASEAAVFSYLDHVQSYPSVDSSCITTVAFLHK

SEQ ID NO: 65068 - protein, 367 aa, Zea mays
  Clone ID: LIB4740-015-A1_FLI.pep
ESKLVSERERQRDHRSIDDHGGATTSCFHAACSCSARCNVCVHSYNRALHRRLLRHAGQQPAVQQRRGAALRVQGHQRHAHLLPRRQSPRRPAQLRHRAHPRHRQRRRRPGPARQERLVRGLVGAEQRAPLLPRRRHQVRRGGQRGAGRRHAQPPPGDAQPGRRPGARRLPGHQVLHVGALRRGRQLVPALQRLLRAGLHGGRRALPGRHRRAAARQRVPLLRVQGQPARHQPGLRHVPARHHRQGQRQRPQLQQPVRRHGGRRRRRAREGRRAQRQGRRVRERLALGRRLRGQRRQRAEIQPGTHRPRRPRHAQEDRPAGDLRLRHVQREPEGRRSHGEELRPLLRQQAARVPDPVQLIKSGGSEE

SEQ ID NO: 65069 - protein, 340 aa, Zea mays
  Clone ID: LIB4740-015-H1_FLI.pep
RGRPGPVPDPNLALPSLSCLQVRPSGRRREERMASTASPPVFERVAGIRAIAESGRFKAWLLDQFGVLHDGKKPYPGAILALEKLAENGAKMVIISNSSRRSSVTMKKLKSLGFDTSCFLATITSGELTHQHLQKRDDPWFAALGRKCIHITWDDRGAISLEGLGLQVVNNVDDAEFILAHGTEALGSPSGVPLPKSLEELEQVLMLGIEKRLPMVVANPDYVTVEARDLRVMPGTLAAKYESLGGEVKWMGKPDKVIYTSAMSLAGVDARECIMVGDSLHHDIKGANASGMASAFVTGGVHVDELGLGEFGETAGVDAVSSLCSKHGSYPSYVLPSFVW

SEQ ID NO: 65070 - protein, 188 aa, Zea mays
  Clone ID: LIB4740-016-G3_FLI.pep
GPSRSHHNHPSLAIFPFQVPALGFPTTSSELLLPCSVLAATAAAMSAANQLAALVSNMYATGLLDDQFQQLQLLQDPSAPDFVSEVVTLFCQDGERIIEELAKLLEKPNVDFDRVDAFVHQLKGSSANIGAQKVKNTCIQFREFCQQKSRDGCLKVLETMRINFYELRGKFQTMLQLERQVNGFPPNK

SEQ ID NO: 65071 - protein, 220 aa, Zea mays
  Clone ID: LIB4740-016-H1_FLI.pep
SLLHRSAHYTDRAPMDFAELEAVEGLRWPWHSWPPTTPAAASLVVPTSVLCSPLQHPTAPDLLPLLPYAPLRCASPGCGAALNPFLRVHHGSARWSCAFCGAAANPFPRLLAPDALPAELFPTHSSVEYLLPPDPAEPGGPGPPALVFVIDAATAAEELAVLKDEVRRLMQGLPEGIRVALVTFAASVWVHDLGFEGCARVVVLNGERELESDKVCEFVI

SEQ ID NO: 65072 - protein, 448 aa, Zea mays
  Clone ID: LIB4740-019-A12_FLI.pep
FLLAALKCIACFVPPPYRTKQIKSEMASRSSSAEGAGRTLPVNLKLITVLSIDGGGIRGIIPATILAFLEAKLQELDGPDARIADYFDVVAGTSTGGLLTAMLTAPDTNERPLFAAKDLARFYIQHSPKIFRQKNAMGSKLVGKLRMACGPKYDGKYLHAQLRRLLGNMRLDRTLTNVVIPTFDIAYMQPMIFSSFELKHRPSTNALLSDICMSTSAAPTYFPPHYFQTRDENGRRKAFNLVDGGIAANNPTLCAMGQVSKDIILADDDFFPVMPADYGKFMVISLGCGSNRNRRYCAKAAARWGVFSWLFKDGSAPIIDMFNSASADMVDIHLCVLFRALRSSENYLRIQYDQLTGSAGSIDDSSRKNMDRLVRIGNKLLDMNVSRVDLETGRNVEVPGAGTNAERLAKFARQLSDERRRRRQNELIMNSEQVFQIQHQAWYYGGDA

SEQ ID NO: 65073 - protein, 269 aa, Zea mays
  Clone ID: LIB4740-019-B10_FLI.pep
PGSRKGQATTPYLYLSFFSFIHESLLPPSSSGHPHRREEISSSARGGQQGRKMGGRVDHEYSYLFKMVLIGDSGVGKSNILSRFTRNHFSLDSKSTIGVEFATKSLQIDGKTIKAQIWDTAGQERYRAITSAYYRGAVAALLVYDITKRQSFDNVHRWLRELRDHADSSIVIMMVGNKSDLIHLRAISEDEGKALAEKEGLFFLETSAMEAINVEEAFQTIITEVYGIVNRKALAAKEAAATAAPLPSQGKTISIDSNAGNTKKACCST

SEQ ID NO: 65074 - protein, 318 aa, Zea mays
  Clone ID: LIB4740-019-B8_FLI.pep
RAGGFIFAQAQFAITDHGHFKHRAHSSVSDSPQLCCISRRITGYGSGDAAAQREPVGDGDLADVNAGIGGHGRVELPGGRSERAVPLGERLVGGRGHGAAPQRVVVGDEAPDPEQLQQPLVVVEEVHLVRVHEREVELALVPLLGHHLVQHGQREPDAEVDLVRHAGLLDHRRPNLVVALAGNVDGHNLAVVGEGEGGGEQRVPGEDANLDGVLGAKNLDQELQQLHLVRRRSHARHGVGGGGDADLPQAVRLAWEDGGFQYVLVQWLALEESLAVEAAPGSRLLAFSSAGGSHPPTEGFAIAVRCSCAKGEFVPAGG

SEQ ID NO: 65075 - protein, 267 aa, Zea mays
  Clone ID: LIB4740-019-B9_FLI.pep
GKKLAQDWTPSRTASHPAAAGRIFLACSALCACPSVDPIGFPFLFLDPLPPPIPSNSTSTPRASPPTPTPTPPAMSKYGTIPTSSSAGGGPVPLGGASPLDFISRAKARGASALATRRPWRELVDVHAVGLPPSLGDAYLRVRANLAHFAMNYAIVVLVVVFLSLLWHPVSLIVFLVCMLAWLVLYFLRDEPLVLFGRVVADGYVLAVLAVVTLVLLLLTDATANILSSLLIGLVLVLVHAALHKAEDNAADEADRWYAPVSQQPSH

SEQ ID NO: 65076 - protein, 260 aa, Zea mays
  Clone ID: LIB4740-020-B5_FLI.pep
RSYVAMGRGRVELKRIENKINRQVTFSKRRNGLLKKAYELSVLCDAEVALIIFSSRGKLYEFGSAGITKTLERYQHCCYNAQDSNGALSETQSWYQEMSKLRAKFEALQRTQRHLLGEELGPLSVKELQQLEKQLECALSQARQRKTQLMMEQVEELRRKERHLGEMNRQLKHKLEAEGCSNYRTLQHAAWPAPGSTMVEHDGATYHVHPTTAQSVAMDCEPTLQIGYPPHHQFLPSEAANNIPRSPPGGENNFMLGWVL

SEQ ID NO: 65077 - protein, 485 aa, Zea mays
  Clone ID: LIB4740-020-E5_FLI.pep
MAGSSAEQLLSRIAAGDGHGENSSYFDGWKAYDMNPFDLRHNRDGVIQMGLAENQLSLDLIEQWSVDHPEASICTAQGAPQFRRIANFQDYHGLPEFREAMAKFMGQVRGGKVTFDPDRVVMCGGATGAQDTLAFCLADPGDAYLVPTPYYPAFDRDCCWRSGVKLLPIECHSSNNFTLTREALVSAYDGARRQGVRVRGILITNPSNPLGTTMDRGTLAMLAAFATERRVHLICDEIYAGSVFARPGFVSIAEVIERDAPGCNTDLVHIAYSLSKDFGLPGFRVGIVYSYNDDVVACARKMSSFGLVSSQTQHFLAMMLADAEFMARFLAESARRLAARHDRFVAGLREVGIACLPGNAGLFSWMDLRGMLRERTHDAELELWRVIVHRVKLNVSPGTSFHCNEPGWFRVCYANMDDDTMEVALDRIRRFVRQHQHSKAKAERWAATRPLRLSLPRRGATTASHLAISSPLALLSPQSPMVHAS

SEQ ID NO: 65078 - protein, 184 aa, Zea mays
  Clone ID: LIB4740-021-A7_FLI.pep
SGEARTSRHRPPWFGGSLEAFLPTGSAAPDPHGQRPIRAPPAFLRVQQQVKNFNPRMAMSWTRGLKHGVVPRHAAQLVESRSLAIASKAKKGGKADAGKTPALSQELKSTTVFGANIFKEGSDPKIQPDSEYPDWLWHLLDKRPVLSELRRKDPKTLSYEDLKRFVKLDNRSRIKIRNDLNAKN

SEQ ID NO: 65079 - protein, 381 aa, Zea mays
  Clone ID: LIB4740-022-B11_FLI.pep
SRIQISRLLATKYQPRRTGRMPKLSCRVLFAALLIASLAALLVRFPIHRLLNPHAAMDPDSELEFEMPGVLRVYKTGRVERFDGTETVPPCPDGDPANGVASKDIVLDPAAGISARLYLPAGVDAGKKLPVVVFFHGGAFMVHTAASPLYHIYAASLAAAVPAVVVSVDYRLAPEHRIPAAYDDAFAALKAVIAACRADGAEAEAEPWLAAHGDASRIVLAGDSAGGNMAHNVAIRLRKEGGIEGYGDMVSGVVLLYPYFWGKEPPGAEPTDPGYRAMFDPTWEFICGGKFGLDHPYVNPMASPEEWRQLGSRRVLVTTADQCWFVERARAYAEGIKKCGWEGELEFYETKGEAHVFFLPKHGSEKAVKELALVAEFVRRC

SEQ ID NO: 65080 - protein, 462 aa, Zea mays
  Clone ID: LIB4740-023-A11_FLI.pep
SRPAGLFFSGHTILFLLLLDRGTRERRPPTSPLNPTSPIAQENPVPGSEPRAFPVPCHRTRGRRTHMSSSLSPAAAAAPLDLDGNSVAPLTICMIGAGGFIGSHLCEKLMAETRHVVLAVDVYCDKIRHLVDPAPPHLAGRISFHRLNIKNDSRLEGLIKMADLTINLAAICTPADYNTRPLDTIYSNFIDALPVVKYCSENSKRLIHFSTCEVYGKTIGSFLPKDHPLRKEPEFYVLKEDESPCIFGPIVKQRWSYACAKQLIERLIFAEGAENGLEFTIVRPFNWIGPRMDFIPGVDGPSEGVPRVLACFSNNLLRREPLKLVDGGQSQRTFVYIKDAIEAVVLMIENPARANGHIFNVGNPDNEVTVRELAQMMTEVYANVSGEAPLDEPMIDVSSSQFYGEGYDDSDKRIPDMTIINKQLGWNPKTPLKDLLETTLTYQHKTYKEAVKRQMSQASATS

SEQ ID NO: 65081 - protein, 378 aa, Zea mays
  Clone ID: LIB4740-024-B3_FLI.pep
HVWIYFFDQSSARGNLVGCREPHLDHPGGGRRRRRVDDAAVEADLIRGAGLDLDVAHLDHGGGELVLPERLVGGECAGERRERAVADELVVGEVQTQVERQQLVVVVVQHGGRADVDLRGVGGELARVGRAQRLQQRLVRGAYGPVGQPLPVGGQEGEAVGAADGVGAGQDHHVLDAQVLLPEAVDEDLRRAVRPQQVVVGLRLVGHAAVPPPRWHVVEEVARQGDAVAGREREDVGARHRAWAAPLHGGLGGVDHVEAAQARVVGRGLTLRFAAGGVHGQEHGGIAAPDEAVMEMEADEPGCDAGVVGESSRDDLTHERLGVGAGGVVEPHLQLGAARRRQEQAQGCDDARHLQAGSARPHPLSRPCQNGTARPAIC

SEQ ID NO: 65082 - protein, 480 aa, Zea mays
  Clone ID: LIB4741-001-H8_FLI.pep
RVGPSLPNLRAMEVEAAGPDKLAPPSPVEGPGENGAATKVQKVYRSYRTRRKLADSAVVVEELWWQALDYARLEHSTVSFFDEPKPETAASRWNRVSLNASKVGQGLSRDGKALKLAFQHWIEAIDPRHRYGHNLHFYYDEWCKSQAGQPFFYWLGIGEGKDLDLPECPRALLKQQCIRYLGPQEREHYEYIISEGKVIHKQSGEPLDTRRPKGTKWIFVMSTAKKLYAGKKQRGVFQHSSFLAGGATIAAGRFTAESGVIKSIWAYSGHYKPSAENLHNFMNFLEENGVDLKEVEVRSSTKEDYNEDPVPVPVLNDTRSSTSATMEEEADLPQAAVPVPALNTTEGDGGDSPPEDEGRGRARYQRTLSGGLQSPRATQVPQRAILERMKSKGELSKSYQLGHRLSLKWSTGAGPRIGCVKDYPMELRMQALEMVDLSPRGLSSTPSPSRRLPPPCFSPTKVASPTSPLAPVQASLPQPS

SEQ ID NO: 65083 - protein, 498 aa, Zea mays
  Clone ID: LIB4741-002-D1_FLI.pep
SRPAGALSLSPCVCGLPSASPPPPHVHLSRNWEFLLTASSLPGSLVRRSPPAMAATFALLLLLILSSSVRAAPDAVVSRIAFGSCANQSEPQPIWDAVAGFDPQVFVWLGDNVYGDNKRPFRVFGRERTVGPWKNVPRFYPSTEEELRRRYQLARAQPGYARLRERAQVLGTWDDHDYGLNDAGKELSGKVIAQRLMLDFLDEPEDSKRRKQAGVYASYMFGPEGKRVKVILLDTRYHRDPLLSDGTILGDPQWQWLERELHGPQLEITIIGSSIQVVSNLSATTGPLFYVESWARFPRERERLFRLIDSSKRPGVLFISGDVHFGEITRFDCGAEYPSYDVTSSGLTQSVENSVPEVFQPLMRLLAILTPTTMRVLSPNCQYKSCTIGQPNFGAIEIDWNAVPPRIKLELRDVEGHSVHSVEFPISELQPSEAHAIKRQTHTFQRHCTLETELPWLTRYRLALMLFVIIAVFAVVVVMLAIACLSNFTKSSKKSKKE

SEQ ID NO: 65084 - protein, 227 aa, Zea mays
  Clone ID: LIB4741-002-F12_FLI.pep
PRRRLPWEGEEEEEAEAAEMAPVSALAKYKLVFLGDQSVGKTSIITRFMYDKFDNTYQATIGIDFLSKTMYLEDRTVRLQLWDTAGRERFRSLIPSYIRDSSVAVIVFDVASRQSFLNTSKWIEEVRTERGSDVIIVLVGNKTDLVDKRQVSIEEGEGKAKDLGVMFIETSAKAGFNIKALFRKIAAALPGMETLSSAKQEDMVDVNLRSGNANSSQSQAQAGGCSC

SEQ ID NO: 65085 - protein, 537 aa, Zea mays
  Clone ID: LIB4741-005-D6_FLI.pep
NSQPPTCSDQVNQSLYYSMEQATWAAFLGIVLCAALFHRTFLARGRRRANNPPPGPKPWPIIGNLNLVGELPHRSMNELSKRYGPLMQLRFGSLPVVVGASVEMAKLFLKTNDAAFSDRPRFAVGKYIAYDFSDLLWAPSGPCLRQARRICATELFSATRLESFEHIRDEEVRVMLRQLRQAAGRTVRLRDYLQMLTLGVISRIVLGKKYVQEEAADGEGDSASAMTPAEFGEMVDEFLVLHGVFNIGDYIPWLDWLDLQGYVARMKRMKARFGRFLERLLDVHNERRLREGGNFVAKDMLDVLLQLADDTSLEVQLNRDNVKAITQDLIIGGTDTSAKALEWAVSELLKNPKVLAKATEELDHVIGPDRLVTESDLPRLPYIEAVLKETLRLHPAAPMLAPHVAREDTSVDGYDVLAGTVVFINVWAIGRDPALWDAPEEFRPERFFESKIGVRGQDFQLLPFGSGRRMCPGINLALKVMALSLANLLHGFKWRLPDGVTAEELSMEEAFQLTVPRKFPLEAVVEPRLPDRLYTGA

SEQ ID NO: 65086 - protein, 170 aa, Zea mays
  Clone ID: LIB4741-005-E5_FLI.pep
VLLYICRYHVFLAKLLMLGTTVDGSRALVLAVVGLHVGVAGADVLVAGGARRDAAAALAAGAARPQAHLGPSRLAAPVRAARAAVDGVSLSMGRSSGLHEEQQDDEREREEQPAARLGHAGRRLASCLLNSLHERGQRSTRAGGMVGCSTVACARERRVETGSGYSGRPR

SEQ ID NO: 65087 - protein, 389 aa, Zea mays
  Clone ID: LIB4741-008-H11_FLI.pep
SRAPSHPPLASNPSASPPHSRVSPPPAPAMEAVVVDAGSKLLKAGIAAPDQAPPLVMPSKMKLDVEDQELADGAVVEEVVHPVVRGFVKDWDAMEDLLSYVLYRDIGWEIGDEGQILFTEPLFTPKTLREQLVQLMFEKFNVSGFYASEQAVLSLYAVGRISGCTVDIGHGKIDIAPVCEGAVQHIASKRLEIGGVDLTNLFAQELKKSNPSVNLDVADVELLKEQYACCTEDYLTFEGIESSCQPEKHTLPDGQVITIEKEGYIVGEALFQPRILGLEDYGIVHQLVTSVSNVSSEYHRQLLENTMLCGGTSSMTGFEDRFQREANLSASAICPSLVKPPEYMPENLARYSAWLGGAILAKVVFPQNQHVTKGEYDETGPSIVHKKCF

SEQ ID NO: 65088 - protein, 682 aa, Zea mays
  Clone ID: LIB4741-009-D4_FLI.pep
PGVTSPPRPRPRSSDMAGSVAPHAVVLGLLLLAGLAAAQRATTPAAAAPAPDPGCNGIQLTYNFVDRTKIRPFVSDKNKQPYAFRANVTVLNSGTRPLKSWAALVTFGYGEILVGVDGAVLTGGGDLPYNTTEDAGNATSFSGYPHTDLLTPIATAGDLSQIQASVGIVGTLFAGPGPFVPLPTALSLDDPAYACPAATNVTARVLSTCCVLTPEAEANATAIDANTTDPTKDFLPRGTGDLVITYDVLQAYPSSYLALVTLENNAKLGRLDNWRLSWEWRRGEFIYSMKGAHPSEVDTSGCIYGAPGQYYQSLDFSQVLNCDRKPVILDLPLSRYNDTQIGKIDNCCRNGTILPKSMDEAQSKSAFQMQVFKMPPDLNRTKLFPPANFKIVGASSLNPDYACGQPVPVSPTAFPDPSGLDSTTLAVATWQVVCNITTTKGAKPKCCVTFSAYYNDSVIPCSTCACGCPANRRGPTCSTTAQSMLLPPEALLVPFDNRSQKALAWAELKHYNVPRPMPCGDFCGVSINWHVSTDYNKGWSARVTLFNWEDVDMANWFAAIVMDKAYDGFEKAYSFNGTAVGKNTIFMQGLEGLNYLVKQTNMSGSDYLVPGKQQSVLSFTKKLTPGLNVVAGDGFPTKVFFNGDECAMPQRIPISTGFSTRLSSGLALVPFLVASAFLLLQQ

SEQ ID NO: 65089 - protein, 176 aa, Zea mays
  Clone ID: LIB4741-014-G6_FLI.pep
LAEAGAAAVRERMGNANAKEGENGHMAASPEPAAPNGGGGSSSSAGGAAARPPPLSPPDDVMLERPPPVPYLFVPQVPETPLHRPTELSPLLNHSPVNDSTDQHSQEQGIPTLITWSQGGDEVFLEGSWDNWTSRRALERSGKDHAVLLVLPSGVYHYRIIVDGELRTTCPKASTA

SEQ ID NO: 65090 - protein, 591 aa, Zea mays; identical to SEQ ID NO: 41178
  Clone ID: LIB4741-015-D1_FLI.pep

SEQ ID NO: 65091 - protein, 416 aa, Zea mays
  Clone ID: LIB4741-015-D12_FLI.pep
NEHSSQDSEAAVGVSSSEMEGNLPPQTMVPGGGPFDLGQPFHFAVQPQALQVYQDVFAAPAASQMPELGNVVKASLSDEEEGGDGHLDRGKAAAAAQWHRVKWTSGMVKLLVSAVSYIDEDVDADHGTSSGRRKHAVLKRMGKWKLVSSAMTERGFAVSPQQCEDKFNDLNKRYKRLTEILGRGRACQIVEKPELLEQLSLSGKLREEAKKHLNSKHLHYEEMCSYHNRNRYCLLDDPVLQRSLRMALRAPAEQGKQCLFGYDDEDDQMLLSDDDDDYEDDELNDDLEAGAEDHGPHRVHATEKLKHDHEGHCGSHLSEVAAIDMNRMNFEGSGGPSSEKNLSYMRVQIERQRLKIKSQMLRIEQRHFKWLKFSKEKDRELQKMKLENERMALENERLELELKLKEIEIGIKPKRI

SEQ ID NO: 65092 - protein, 231 aa, Zea mays
  Clone ID: LIB4741-016-A2_FLI.pep
RGRPGPSHPIQRHSGSREPAGRHLCGDQREERGSERLHLKPHEGTNPLFLGSSFLLRVLPSLRSAARRGAMIQLLFTLLAAEGAVAAVLLFKTPLRRLAVLALDHLKRGRGPVMVRTIAATVLVVLASSLHSMAKIRGHAEGELDGSGVVGLTPTDQVLLARHLLEASLMGYSLFLALVIDRLHNYVKENRRLRKKLEEVLKQNKALEEATNGKLEESRPDQKDLSHAKDN

SEQ ID NO: 65093 - protein, 411 aa, Zea mays
  Clone ID: LIB4741-016-C6_FLI.pep
SAALCLQISDPKSMGKSGKKPRESHRQGRGRRASHFCDEDGYDLPSSAYDATPRQNEESSEDNDDTSEATAEDEPERDTEAGEQDQWQGSMPSKFHLYQLSVQSPKGDISYLQKFFLMYVGGRAPLHLQEDFCGTALLSTEWIRTDARRTAIGLDLDLESLEWCLENNLSKIGADGYSRMLLFHGNVLQPMESRLVKQKFTNLVHGLDLNSNNGTGSNSCKQMGLADSKCLANLTMSEADFPARDIICAFNYSCCCLHSRKDLVLYFRHVRSVLSERGGIFVMDVYGGISSERKLRLQRKFPSFTYFWEQDEFDIISRQTRISLHFQGGKKQMLRYAFTYHWRLWSIPEIKDCLEESGFKWVHVWMREMPNTQSGGNAKEYNANRDVKYEESQHFNQGDAWNAYVVGVANV

SEQ ID NO: 65094 - protein, 270 aa, Zea mays
  Clone ID: LIB4741-017-D2_FLI.pep
TLARRLSPSTALPRRFLLGAPTRPSPPPPLLRRCLPFHFYHMAQYWTQPSLDRNKAMVEYLKQYGAVRTDKVKEVMETIDRALFVPEGTPYIDSPMPIGFNATISAPHMHATCLELLKDHLQPGMHALDVGSGSGYLTACFAMMVGPEGRAVGIEHVPEIVASSVENVQRSAAAPLLRDGSLSFHVTDGRLGFPDAAPYDAIHVGAAAPEIPQPLLDQLKPGGRMVIPVGTYSQDLQVVDKNTDGSFSVRSDAAVRYVPLTSRAAQLQGP

SEQ ID NO: 65095 - protein, 306 aa, Zea mays
  Clone ID: LIB4742-001-E4_FLI.pep
PLHCWMKHGPLSRGAPSLVIIFILLTTLFIILVIDLRLGLVRLLFIFLLFLLGRSLLSCSALALVVGSDGLVVLELELVSLGYIGSLVRLAQGFPPVASSFPHRSDRLVLRVLLLELLAKFLHEHEESAGSPLRLVGVLAGLPFPALGGLLRPLALHRQPADAKAIESTTTTTETATAKQRRREKKRSKSTRGGGCHNNRNRMLRTPRNRSTGRTRKKRTGDSFFLLGIGLGGALGFGPLHGGFERRHGAQRSDPRLAEGIPVAGGRIGVESRAKLPLAARGEREGGKGKGRRRALQEGRAARPAS

SEQ ID NO: 65096 - protein, 497 aa, Zea mays
  Clone ID: LIB4742-002-E2_FLI.pep
QRPRILRRRTKPYSMYPGLRRALAGDENPSVPKMARRGLMEQDLSKLDVTKLHPLSPEVISRQATINMGTIGHVAHGKSTVVKAISGVQTVRFKNELERNITIKLGYANAKIYKCEDDRCPRPMCYKAYGSGKEDSPLCDVPGFENTRMKLLRHVSFVDCPGHDILMATMLNGAAIMDGALLLIAANESCPQPQTSEHLAAVEIMRLQHIIILQNKIDLIQESAAMNQHEAIQKFIQGTIAEGAPVVPISAQLKYNIDVICEYLVKKIPIPERNFTSPPNMIVIRSFDVNKPGSEVDEIRGGVAGGSILRGVLRVNQKIEVRPGIVMKDETGNIKCTPIYSRIVSLYAEQNELQFAVPGGLIGVGTTMDPTLTRADRLVGQVLGEVGSLPDVYVELEINFFLLRRLLGVRTKGTEKAGKVSKLTKGEILMLNIGSMSTGARVVAVKNDLAKLQLTAPVCTSRGEKVALSRRVEKHWRLIGWGQIQAGTTLEVPACPV

SEQ ID NO: 65097 - protein, 476 aa, Zea mays
  Clone ID: LIB4742-002-F4_FLI.pep
LEAGREHFDPDTPKSLSPLASAALKPSPSRRLQNPLTMAAATTAGAGAATPQPPRQYKLAPQSELRVEVLPDAPLRVRLVTGTAEIFGTELPPEGWVPVPPRSKIAIFTWHGATVELDGVSESEYTSDETPMVIYVNTHAILDARRARARTAAAQGGDKEASQGPRVIVVGPTDSGKSTLCKMLLSWAAKLGWKPTYVDLDIGQGSITIPGCISATPIEKPIDIIDGIPLEMPLVYFYGHPNPSINADVYKVLMKELAKTLEKQFSGNAESRAAGMVINTMGWVEGLGYELLLNAIETFKANVVLVLGQEKLWKMLKDAVQSKSNIDVVKLHKSEGVVLRNSKYRQRTRSFRIKEYFYGIANDLAPHSNIVNFSDVSVYKIGGGHQAPRSALPIGAEPVADPTRLVAVNISTDMIHTVLAISYAKEPEEIISSNVAGFIHVTDVDIQRKKLTYIAPCPGDLPSRLLIASSLTWYEA

SEQ ID NO: 65098 - protein, 392 aa, Zea mays
  Clone ID: LIB4742-002-F5_FLI.pep
RGRREPKPSNPIQTRQARNPPMAHRVLLLLSLASAAAVAAAVDAEDPLIRQVVPGGDDNDLELNAESHFLSFVQRFGKSYKDADEHAYRLSVFKANLRRARRHQLLDPSAEHGVTKFSDLTPAEFRRTYLGLRKSRRALLRELGESAHEAPVLPTDGLPDDFDWRDHGAVGPVKNQGSCGSCWSFSASGALEGAHYLATGKLEVLSEQQFVDCDHECDSSEPDSCDSGCNGGLMTTAFSYLQKAGGLESEKDYPYTGSDGKCKFDKSKIVASVQNFSVVSVDEAQISANLIKHGPLAIGINAAYMQTYIGGVSCPYICGRHLDHGVLLVGYGASGFAPIRLKDKPYWIIKNSWGENWGENGYYKICRGSNVRNKCGVDSMVSTVSAVHASKE

SEQ ID NO: 65099 - protein, 380 aa, Glycine max
  Clone ID: 700833616_FLI.pep
SPHAVILKRHPSASKTTAVWSSSSPRHALGILLFIIVITPYRDVDFVLFLGGEQMDQALLDDIINRLLEVRSRPGKQVQLSESEIRHLCAASREIFLQQPNLLELEAPIKICGDVHGQYSDLLRLFEYGGLPPEANYLFLGDYVDRGKQSLETICLLLAYKIKYPENFFLLRGNHECASINRIYGFYDECKRRFNVRLWKTFTECFNCLPVAALIDEKILCMHGGLSPDILNLDQIRNLQRPTDVPDTGLLCDLLWSDPSKEVQGWGMNDRGVSYTFGADKVSEFLQKHDLDLICRAHQVVEDGYEFFANRQLVTIFSAPNYCGEFDNAGAMMSVDETLMCSFQILKPADKKAKLNFGSTTTTKPGNSPAGIKSFLGTKV

SEQ ID NO: 65100 - protein, 338 aa, Zea mays
  Clone ID: 700346329_FLI.pep
AKKTAQEEALLSEERRIDELDLPRHEVVRRLRVLREPVTLFGEDDDARLARFKLVLKSGVIDDIDDIDMTEGQTNDFLRDMIEMRKRQKSGRDTYAKGKSKRVGGGDGGDGGAAGDSADDGDAKGSGDDADTDKDSKRMRTKFEELCNEDKILVFFKKLLNEWNQELDEMTELEKRTAKGKSMVATFKQCARYLSPLFEFCRKKVLPDDIRRALLVIVKCCMKRDYLAAMDQYIKLAIGNAPWPIGVTMVGIHERSAREKIYTNSVAHIMNDETTRKYLQSIKRLMTLCQRRYPALPSKSVEFNSLANGSDLQALLSEENGSGKASEERLRLMPASKE

SEQ ID NO: 65101 - protein, 480 aa, Zea mays
  Clone ID: UC-ZMFLB73145C07_FLI.pep
PHGAGAGAGGLLRVGLSRRGGGLDQRALAAAKAARQQEASRLGASGGGDVPLVDYLNTQYYGVVGIGTPPQNFTVIFDTGSSNLWVPSSRCYFSIACYLHHRYKSAKSSTYKADGETCKITYGSGSIAGFFSDDDVLVGDLTVKNQKFIETTRESSITFIIGKFDGILGLGYPEISVGKAPPIWQSMQEQELLAEDVFSFWLNRSPDAAAAGGELVFGGVDPAHFSGNHTYVPVSRKGYWQFDMGDLLIDGHSTGFCAKGCAAIVDSGTSLLAGPTAIIAQVNEAIGADGIISTECKEVVSQYGEMILDMLIAQTDPQRVCSQVGLCVFDGARSVSEGIESVVGKENLGSDVMCSACQMAVVWIENQLRENKTKELILQYANQLCERLPSPNGESTVSCQEISKMPSLAFTIANKTFTLTPQQYIVKLEQGGQTVCISGFMAYDVPPPRGPLWILGDVFMGAYHTVFDFGNDRIGFAESA

SEQ ID NO: 65102 - protein, 368 aa, Zea mays
  Clone ID: UC-ZMFLB73142G05_FLI.pep
PTTALVSKFTIICQNHSEEINSKRSFSTPLGLDGGRHYVHFGWRFIGCGAEHLNQSTARHTSAASHNPWVTQDLLGGEPAPDVPAEHAAQEVLGLGRDGGEGARREAQVPAEHGLEDLPRGGAGEGHGPGEHHVEHDPGAPDVHLLGVLPAGHHLGRDVVGRPDQPRHGPAVPEPGGGAEVPEPERAAGGGVEEEVVGLDVAVRDPAAVAAGERVGELRHQLRRLGLRERAPRGDEREQVPARAQVQHQVHGVGVHEGGVQRDHVAAGGRRQVVHLGLLLRQRQVQRVRPQRRLGRRLERERLPRGGGVAAADRPEPAAPDLLADHVLPPQRLLRGAAHARTWSAPVVWCLCVLGEIGLGLGWVGVGV

SEQ ID NO: 65103 - protein, 581 aa, Zea mays
  Clone ID: UC-ZMFLB73194F11_FLI.pep
PRSLPRCSLPTDTLLRCAAMDRDPSVSDEDDDLETLVPQNHAKPPSPSARSRSPPSSFSVAALRPTLPSSAASLRRVLWSRRYLVLFVSLPLLFLILFFSYGGASSLRLPASIRLPSAAPAADPAASRMREAELHALYLLRSQRSGLLSLFNRTAAPTNGSAPAPISLSDLQSALESQIKINREIQAALLSSHRSGSGNATEDGLDLDLPFSGCRKRELPASRRTIEWNPKKDRFLLVICISGQMSNHLICLEKHMFMAALLGRTLVVPSQKADYQYDRVLDINHINDCIGRKVVITYEEFVEKRKKVAIDQFICYAASPPCFLDEEHIKKLKGLGISLSKIEAAWPEDAKLKEPKKRSVGDIAPKFSTEAEVLAIGDMFYADMEDEWLNQPGGPLAHKCKALIQPSRLIVLTAQRFVQTFLGGNYIALHFRRHGFLKFCNVKKESCFFPIPQAAECILRIVEKANAPVIYLSTDAAESETNLLQSLVVFNDRQVPLVKRPEHHSSEKWDALLNRNRMGGDGQVDAMLDKTICALSNVFIGSSGSTFTEDIFRLRRGWGSASHCDEYLCQGELPNFIAELD

SEQ ID NO: 65104 - protein, 309 aa, Zea mays
  Clone ID: UC-ZMFLB73207E08_FLI.pep
AESKLRTGPPTTYADRVFSNEMNIAIKETEKSYNAFMFRDALKSGFYDLQLARDEYRLSCGAAGMNRDLLWRFMDVQTRLITPICPHYAEHVWQKIMKKEGFAIKAGWPAADTPDPTLRIANKYLQDSIVLMRKLLQKQESGSKKPKKGAAPAPPSEEKKMSIGLIYVNEHYSGWKEQCLKVLQSKFDSQSRSFSPDQEIAEALKECPIGQEMNLKQVQKLCMPFIKLKKDEAREVGPQALDLKLPFGEMDVLRENLELIKRQLGLEQVEVLSASDEAARAKAGEHASLLEKNPPSPGDPIAIFLSKQS

SEQ ID NO: 65105 - protein, 654 aa, Zea mays
  Clone ID: UC-ZMFLB73184B03_FLI.pep
AKSIKNRPEVNQKMMKSTLIKDLYGEIDRLKAEVYAAREKVGVYIPKDRYQQEENERKAMADQIEQMNASLEVNHKLISDLQQNYDSELQHSADLSKKLEVTEKCLDHTSNLLSTTKEDLKQAQYNLNEKDYIISEQKKAENALTHQTYVLRSDLEQYTRDNTSLYSKIARGDKLSATNRSVVNTFQTDLASKLDILSNTLNASIDQQNMHLKSVEDLCQSYVDSHDKATSELKKKILASKSLYMSHMEAFLNVVLVHKASANGTLEDISSLSAASCCSLDQLLVCVEGEAQNIFNDIHNLLTIHRSEMTHFTQELRESFQISLDRTKEMSTYIIGLFDKYVEETSKLHSHSNNTHEAQMKSIEDFQMVYEEQSKSVEQKLLAEISSLVSKHITRQRELVGVRLSSLGDAARGNKAFLDEHTSAMEFVTKDAKRKWETFAEQAENDCKAGSSFSAAKHSRMETMLQECACTVDSAVQQWKKSHAAVNDLSRKQVAEVEALVRTAIENNEQHELEVASSRAVAEEDASNNSKDIAQGVENLLEEARNSSSRVVSTVEAHFGELQMLQESHSSQAAGINMHADKALQTSYKDYEPSGETPVRSEPNVPSKGSIESLRAMPVETMMNEFRENHPYEHESSKESKLSQIPRLPLATIN

SEQ ID NO: 65106 - protein, 238 aa, Zea mays
  Clone ID: UC-ZMFLB73217G06_FLI.pep
NDVQFGTEGVHYYYSYFPDTEEPKLHERLNLIYFHLALLISTIPVIEELSATGKFEFMDLNVDEAEHSMEMHLPYLAKVFQGHNVKVVPILVGALSSQNEALYGQLLSKYVDDPKNFFSVSSDFCHWGSRFSYTYYEKKHGAIHKSIEALDRMGMEIIETGDPVAFKEYLQEYENTICGRHPISVFLHMLKHCSTKIKIGFVRYEQSSQCKNMRDSSVSYASAAAKVAGASGEEDKQD

SEQ ID NO: 65107 - protein, 338 aa, Zea mays
  Clone ID: UC-ZMFLB73242C06_FLI.pep
RVDEIKIGINGFGRIGRLVARVALQSEDVELVAVNDPFITTDYMTYMFKYDTVHGHWKHSDITLKDSKTLLFGDKPVTVFGIRNPEEIPWGEAGAEYVVESTGVFTDKDKAAAHLKGGAKKVVISAPSKDAPMFVVGVNEDKYTSDVNIVSNASCTTNCLAPLAKVIHDNFGIVEGLMTTVHAITATQKTVDGPSAKDWRGGRAASFNIIPSSTGAAKAVGKVLPDLNGKLTGMSFRVPTVDVSVVDLTVRIEKGASYEDIKKAIKAASEGPLKGIMGYAEEDLVSTDFLGDSRSSIFDAKAGIALNDHFVKLVSWYDNEWGYSNRVVDLIRHMFKTQ

SEQ ID NO: 65108 - protein, 939 aa, Zea mays
  Clone ID: UC-ZMFLB73259A08_FLI.pep
DKGSAAMANEIKADLEGSDGPAKADAMRRAISLLLNGETLPQLFITIVRYVLPSEDHTVQKLLLLYLEIIDRRDPAGRALPEMILICQNLRNNLQSPNEYIRGVTLRFLCRLSEPEVLEPLVPSVLANLEHRHHFIRRHAVSSVSAIYRLPHGDQLIPDAPELVERFLASEQDASARRNAFLMLCACAQDRAVAYLLSNADRVAEWPDLLQMAVVDLIRKVCRSQNRANKGRYITIITSLLSTPSTAVVYECAGALVSLSSAPTAVRAAANTYCQLLSSQSDNNVKLILLDRLNELHTLHRDVMVGVVMDVLRALASPNLDVKRKVLDLVLDLLTPRNVEEVVLYLKKEVVKTQAGDLEKGGEYRQMLVQAIHACAVEYSEVAGSVVHLLMDFLGDTNVAAAVDVVLFVREIIETNPKLRVSMIQRLIDTFYQIRASRVCSCALWILGEYSLSLSEVESAIATIKQCLGDLPFYTVSDEGEATDSAKPAKAVVNSVTVSSRRPVVLADGTYATQSAATETILTPSVAPGSLASTLNLRSLILSGDFFLAAVVACTLAKLVLRLEEVQPSKVESNKACTGALLIMTSILQLGQSSYLPHPIDNDSYDRIVLCVRLLCNTGDDVRKIWLQSCRQSFAKMLAEKQFRETEEMKAKAQISHAQPDDLIDFYHLKSRKGMSQLELEDEVHDDLKAATGGFTKDADDANKLNRILQLTGFSDPVYAEAFVTVHHYDIVLDVTVINRTKETLQNLCLELATMGDLKLVDRPQNYTLAPESSKQIRANIKVSSTETGVIFGNIVYETSNVMERSVVVLNDIHIDIMDYISPATCADVTFRNMWAEFEWENKVAVNTVIQDEKEFLNHIIKSTNMKCLTPPSALDGECGFLAANLYAKSVFGEDALVNISIEKQHDGKLSGYIRIRSKTQGIALSLGDKITLKQKGGS

SEQ ID NO: 65109 - protein, 841 aa, Zea mays; identical to SEQ ID NO: 53681
  Clone ID: UC-ZMFLB73256G03_FLI.pep

SEQ ID NO: 65110 - protein, 351 aa, Zea mays; identical to SEQ ID NO: 47350
  Clone ID: UC-ZMFLB73232H03_FLI.pep

SEQ ID NO: 65111 - protein, 118 aa, Zea mays
  Clone ID: UC-ZMFLB73262F04_FLI.pep
PQICLLTNKGRKNNYNFAIGISIIQHANGSTYVLITSSANWVVSIGRRPVISSRSMTPKENTSDFSVSLPDAAYSGAKYPKVPITLVETWVLLSVVNFASPKSATTCRILLIKHSTQH

SEQ ID NO: 65112 - protein, 773 aa, Zea mays
  Clone ID: UC-ZMFLB73272F05_FLI.pep
STLAVLPMQQPLVLLLLFFIGSAKYAVASRADAGAATYIVYLNPALKPSPYATHLHWHHAHLDALSLDPARHLLYSYTTAAPSAFAARLLPSHVAALTTHPAVASVHEDVLLPLHTTRSPSFLHLPPYSAPDADAGGPDVIIGVLDTGVWPESPSFGDAGQGPVPARWRGSCETNATDFPSSMCNRKLIGARAFFRGYSSGAGDGSRVGADLMSPRDHDGHGTHTASTAAGAVVAGASLLGYAPGTARGMAPGARVAAYKVCWRQGCFSSDILAGMEKAIDDGVDVLSLSLGGGAFPLSRDPIAVGALAATRRGIVVSCSAGNSGPSPSSLVNTAPWVITVGAGTLDRSFPAYAQLANGETHAGMSLYSGDGLGDGKIPLVYNKGIRAGSNSSKLCMEGTLNAAEVKGKVVLCDRGGNSRVEKGQIVKLAGGVGMVLANTAQSGEEVVADSHLLPAVAVGAKSGDAIRRYVESDANPEVALTFAGTALDVRPAPVVAAFSSRGPNRVVPQLLKPDVIGPGVNILAGWTGSIGPTGLAADERRSEFNILSGTSMSCPHISGLAAFVKAAHPDWSPSAIKSALMTTAYTTDNTGSPLLDAATNTTATPWAFGAGHVDPVSALSPGLVYDASVDDYVAFLCTVGVAPRQIQAITAEGPNVTCTRKLSSPGDLNYPSFSVVFDRRSSRSTVKYRRDLTNVGSAGDTYTVKVTGPSDISVRVKPARLEFRRAGDKLRYTVTFRSANARGPMDPAAFGWLTWSSGEHDVRSPISYTWGM

SEQ ID NO: 65113 - protein, 381 aa, Zea mays
  Clone ID: UC-ZMFLB73276D02_FLI.pep
RTTRQQVRELASERARSSPAVAARWNGTFLGNGDRERARACFGGWSAGLGTPRVRVLLGSSQHGARQVLAQVWVPQVVVQRVVVHAVPRLERSLRRLAVSPERAELVLPVLEQGARRFFLDTRLQRKGTAYGRDASFEPCGVLGSSVSVQWLASCARTHVVGEEEAVRVLVDGVHPSVAGEVDGGGLVVGAADAGRHAQQPQVHGEVGVVLHHHRAGRAQRLVPDQVHVELAVPAAHDGVQHRRLRLHPAPVGIGHGGADKLDGELEPLLAVGGEVLQQQLASDMHARRRCSQRRVGNGTGTGLSSRRGWGYMAEAEADARLQFSGGPRTGCCCAEGEHRPCRPQAAEARARLAVTELLHHGRGSTGEMSSSTSFCLASVG

SEQ ID NO: 65114 - protein, 599 aa, Zea mays
  Clone ID: UC-ZMFLB73266D01_FLI.pep
RAGVGVMAFWWPLLVLAAAYALCRLLLFLIPPTVPSIDVDASDVLAKEDSFIYIPRRGKSTQTDKVQCYEPATMKYLGYFPVVTPDEVKEHVAQSRKAQRIWAKSSFKQRRQFLRILLKYILEHQDLICEVSSRDTGKTMVDASLGEIMTTCEKITWLLDEGEKWLKPEYRSTGRSMLHKRAKVEFYPLGVIGAIVSWNYPFHNVFNPVLAAVFSGNAAVIKVSEHATWSGCFYFRIIQAALSAVGAPENLVHIITGFAETGQALVSSVDKIIFVGSPGVGKMIMKRASETLIPVTLELGGKDSFIVCEDVDLPSVVQVATRAALQSSGQNCAGAERFYVHDDIYSAFVSQIVKTVKSISVGPPLSGRYDMGAICMIEHSEKLQNLVNDALDKGAEIAVRGSFGNLGEDAVDQFFPPTVLVNVDHTMKIMQEETFGPIIPIMKFSSDEEAIKLANDSKYGLGCAVFSGNQKRAIRIASQLHCGVAAINDFASSYMCQSLPFGGVKDSGFGRFAGVEGLRACCLVKSVVEDRLWPYIRTVIPKPIQYPVSEHGFEFQQLLVETLYGYSVWDRLRSLVNLIKMVTEQNFAPTSNATTKKRR

SEQ ID NO: 65115 - protein, 482 aa, Zea mays
  Clone ID: UC-ZMFLB73292D07_FLI.pep
RDARLVSSRAAAMAALGRGLPLLLLLLLLAVSGAANAAAAPGGMSIITYNEEHGARGLERTEPEVRAMYDLWLAEHGRAYNALGEGEGERDRRFLVFWDNLRFVDAHNERAGARGFRLGMNQFADLTNDEFRAAYLGAMVPAARRGAVVGERYRHDGAAEELPESVDWREKGAVAPVKNQGQCGSCWAFSAVSSVESVNQIVTGEMVTLSEQELVECSTDGGNSGCNGGLMDAAFDFIIKNGGIDTEDDYPYRAVDGKCDMNRKNARVVSIDGFEDVPENDEKSLQKAVAHQPVSVAIEAGGREFQLYKSGVFSGSCTTNLDHGVVAVGYGAENGKDYWIVRNSWGPKWGEAGYIRMERNVNASTGKCGIAMMASYPTKKGANPPRPSPTPPTPPAAPDNVCDENFSCSAGSTCCCAFGFRNVCLVWGCCPVEGATCCKDHASCCPPGYPVCNVRAGTCSVSKNSPLSVKALKRTLAKLSTA

SEQ ID NO: 65116 - protein, 275 aa, Zea mays
  Clone ID: UC-ZMFLB73349G09_FLI.pep
LVFTMDFLCLQIASLRFVEGEDIDDDLYALACEPDLRVRIFSACLVDGVRYHTIDRERNRRTQNSGVMVEGTHNNEFIDFYGCLKEIIELQYNSDLMEHRTVVLFRCDWFDTHSKKVSMKYDGYFRSINHSSCWYKNDTFILAAQATKVFYLQDIKNSGSWKIVQKFTHRHLWCVAENDIDERPSSSGLSYQDDTCVGSEVQVNEGDMEITGHQDADESINVSASVVDEFRVQREEEVEEYETSDNEDETGWQYASDNEESITIVNDDDDFSDNE

SEQ ID NO: 65117 - protein, 622 aa, Zea mays
  Clone ID: UC-ZMFLB73318F10_FLI.pep
PLPQPLLGGASPAPARAASSFLHPLLHTRHRVSTAPAAASSFVPASHSSHANDAMLLRRAADVADRSAGLTSPHPNFGCVIARPQLNTDSADSWVVGEGFLYAQGTPCAELLASQEAGEHARGGTAYLNLEPGDCFGDNTAVGSLVQAGITRVVVGLRHPLKHLRGKAIQALRNEGIQVDVVGEDLQSKLFKEALKSCLTVNAPLLYRAAFHVPFSVLKYAMTADGKIAASSGHASWISGKASRGRVFELRGRSDAVIVGGNTVRFDDPRLTARHVKGHVPVRIVMSQSLNLPEEANLWNLNDAYTIVATQRGARRDFQRKLAMKGVEVVEFDMLNPRAVMSYCYDRGYLAVLWECGGTLAASAISASVIHKVYAFWAPKIIGGLNAPTPVGELGMSQMTQAINLIDVSYEQIDRDMLMSGFIEPIPDLSPVIPSVEEIPSIDPEVSPYETNIISFYKTWDIFGAFSNFSPHSIQMPDENGDYFTWPTVEHYYQAHKFVGVDNPQARDIVQEIKLAKSPEEAARIGRTRQKGFPELVRTDWESTKIDVMYRAIKCKFSTYPHLTNMLLSTAGSVLVEASPHDLFWGGGREGEGLNYLGRLLMQLRSEILGTVPASAEVGEAD

SEQ ID NO: 65118 - protein, 424 aa, Zea mays
  Clone ID: UC-ZMFLB73346H05_FLI.pep
PRRQVRHCSHRPLPRPLLGLGIHQLNVKNAFLHGTLTKTVYCSQLTGFVDEAHPDLVCRLNRSLYGLKQAPRAWYSRFASYLASIGFVEAKSDTSLFIYRRGDDTVFLLLYVDNIVLTASTADLLQRTIVALQREFVMKDLGPLHHFLGITAEHRSQGLFLHQRQYAIDILERAGMSDCKPCSTPVDTQAKLSEDDGPPVANATSYRSLTGALQYLTFSRPDIAYAVQQVCLHMHTPREPHLIALKRIMRYLRGSLDYGLLLRPSLTSELVVYTDADWAGCPDMRRSTSGYAMFLGVNLVSWAAERQPVVSRSSAEDEYRAVANGVAEASWLRQLLHELHSPLQRATLVYCDNVSAVYLSTNLVQHQRTKHVEIDLHFVRERVAAGDVRVLSVPTTLQFADIFTKGLPSSVFLDFRSSLNICTG

SEQ ID NO: 65119 - protein, 667 aa, Zea mays
  Clone ID: UC-ZMFLMO17021H10_FLI.pep
LSGRLSSSFAALQLSPVQVQYWRACEFALFRRRHHHRPRDPGVPVSAYASRRQQLRPALRQAMAKLSCFPALLPGKRKKKTRKITDAIKASGNECPKVKPVEVELIDPTLGAGVVQDVVPAELSVPVEDRNNKEAADQLVLVKESDLSDFDFSFHAAMKPVRSDSDVALDTSADAAVADTSPKLKRSCSNIETKRPGSRSAPEMPARSRSYGDLGNLVAGLALDATATPHGAPEASPASVKTSRTADRVMLKKRSSSQVLPSRSRKLWWRLFLWSHRNLHMPRSARTAHRSFSPGRHDGYTSDTFEEGPAADRKNKTVMVDESPPAASVPNQWVAFCAESSIHDRVSAWVSSIESEPPFDIAEEDDDNYDGEDDEENGECAASQPRHLELGEPSSGKGGNSKSKRCATTADEVVQANTVVQSLNAFSSVAHISGMGLKVVPMIAPFSTLRAVNLSSNLIVHISPGSLPKGLHSLDLSRNKIASVEGLRELTKLRVLNLSYNRISRIGHGLSNCTAIRELYLAGNKISDVEGLHRLLKLAVLDLSFNKITTAKALGQLVANYHSLLALNLVGNPVQANIGDDALRRAVTGLLPSLAYLNKQPVKPQRIAREVATDSIARAALSGSDSRSIRKRTSRRLTQSPRSSSLTRARGGGGGGSPTPRNTSRRR

SEQ ID NO: 65120 - protein, 1043 aa, Zea mays
  Clone ID: UC-ZMFLMO17023B01_FLI.pep
HFWVLGRLHGLGLGSVGGGGGARSGGLRYTPSGSLGALCGRRGAGEIYEGRCVVLAGPAEDMGFLSAKLLPSCESVCVCCPALRPSSRRPVKRYKKLLAEIFPKTPDGAPNERKIVKLCEYAAKNPLRIPKIAKFLEQRSHKELRSAHVNFVRIITEAYSKLLFICKEQMAYFAISLVNVLTELLESKQENVHILGCQTLANFINSQVDNTYARNIESLVHKVCALSRRQGEDHRLLRAASLQCLSAMIWFMKEHSYIFADFDEIVHSVLENYRTEESNGGGDDRHALQHNWVDEIARSEGRPGVGGGNDVNINTTTIRLRPARNSSALTRDERDSPEVWSHICVQKLAELARESTTMRRILDPMLSYFDMKKQWAPRHGLALLVLSDMAYLEKSSGNEQLILTTIIRHLDHKNVLHDPQTKSDIIQTATSLARQLRSRGFAVELVVAGDLCKHLRKTLEAVESGNVEDQNLNEPLQIVLEDCLMEVVRGINDVRPLYDMMAITLENLPSMPTVARATLGSLLIISHIISLTSVSSNNLMVFPEALLQQILKSMLHTDIDTRVGAHHMFSAIIVRGPSHLRSESEYLYETKKQSRNTSVFASATALLEKLRREKESLSSDKPRNIMHDDVKEMNMHEEDKRKNPAYFSKLVSSFIERCATRSSVEETNIAMLTEDQTNQLLSSFWIQANQTDNTPFNYEAIGHSYSLTVLSSRLKNSSNGNIIQFFQLPLSLRSVALTPSEVLPAYCQRSIFTLAMSMLAFAGKVCHVAELSDLLRCFSSSKIDPYLRIGEDLQLYVRLQSDLGSYGSESDQEIAKSMLSDCRTKVGINDHRVLDVIASALSNFIEMGKDVIVKELTELFTPEEMPLFGSNSALDWANFNAQAFSDESLSFDEECSRTSSVDCGLHESPITNTASSISKITLPQSVPHVLGVGQLLESALHVAGQVAGASVSTSPLPYGTMTSQCEALGLGTRKKLSSWLVNGHESTPDNPMPSLPTAHHSIIPKVNPATFRTSSESCSAVKLPPASPFDNFLKAAYRTQPEL

SEQ ID NO: 65121 - protein, 497 aa, Zea mays
  Clone ID: UC-ZMFLMO17025B09_FLI.pep
EKNRVQKKEQGGGGKAQGQRKERDARLVTSSTPAAMAALGLLLLAVVGATNAAAPGGRMSIISYNEEHAARGLERTEPEARTLYELWLAEHGRAYNALGERDRRFRVFWDNLRFVDAHNERAAEHGFRLGMNQFADLTNDEFRAAYLGARIPAARRRGTAVGERYRHGGGAEELPESVDWREKGAVAPVKNQGQCGSCWAFSAVSSVESVNQIVTGEMVTLSEQELVECSTDGGNSGCNGGLMDAAFDFIIKNGGIDTEGDYPYKAVDGKCDINRENAKVVSIDGFEDVPENDEKSLQKAVAHQPVSVAIEAGGREFQLYKAGVFSGTCTTNLDHGVVAVGYGTENGKDYWIVRNSWGAKWGEDGYIRMERNVNATTGKCGIAMMASYPTKKGANPPKPSPTPPTPPPPPVAPDNVCDENFSCAAGSTCCCAFGFRNVCLVWGCCPMEGATCCKDHASCCPPGYPVCNVRAGTCSVSKNSPLSVKALKRTLAKLNSA

SEQ ID NO: 65122 - protein, 243 aa, Zea mays
  Clone ID: UC-ZMFLMO17050G08_FLI.pep
AKLPNPPFCEPYNFFFYNKASAGEQLYLYTSSLICPCPATRTAPIRISSLRVIGTTELFNYCFILSTCSSIQLLKHYYGMAELATAAVLLVTGGVEDQGQDPVRDIEARPAAAAGRGPLRGAGHRPLRDGLRRHQRPRAMRPALRSAPIYVLTCAGACSPTTHCSVVICVRVCVCVCDPPDANWRRCAPVAIDAANLTRLRVCLLCYFRFSGEMVQAWCVDVDGWSRSSGEWQRTNETSTSAT

SEQ ID NO: 65123 - protein, 140 aa, Zea mays
  Clone ID: UC-ZMFLMO17060F03_FLI.pep
QHDEHFLQIRMQSSNTSLTQIRSCLDNYKRPKSSSQYLKQKRCAPASTIVSAAMCQGKPKTLEQNLRLDPTELQLCRPDRQNMLGAPSIFQHLGAAKRISGVIGIWGLVALWLLSWGSTIASSGIRRWWWRPAHVSGCRW

SEQ ID NO: 65124 - protein, 191 aa, Zea mays
  Clone ID: UC-ZMFLMO17045A07_FLI.pep
YLVFQVVLTPTHLAIVMEYAAGGELFERICSAGRFSEDEARFFFQQLISGVSYCHSMQVCHRDLKLENTLLDGSVAPRLKICDFGYSKSSVLHSQPKSTVGTPAYIAPEVLSRKEYDGKVADVWSCGVTLYVMLVGAYPFEDPDDPKNFRKTITRILSVQYSIPDYVRVTMECGHLLSRIFVGNPEQVHFF

SEQ ID NO: 65125 - protein, 275 aa, Zea mays
  Clone ID: UC-ZMFLMO17051B11_FLI.pep
PTPQKPRDLIARGSRRGEARRRGCLPPYRRRRRKRSPYPSAPLPAGPMDSEHWISRLAAAKRFYAAQLGHSDRAGMDELEMDEEVRPEFPCPYCYEDHDVGSLCAHLEEEHPFEPQAAACPVCSEMVTKDMVNHITTQHGYLFKNRRRLRRFIIPGSQALSLLSRDLREAHLQVLLGGGGQRSSDNSSSSATNISADPLLSSFGLGFPTSDAEQASKSTVSIPDDATTVKEAPAQARKLSIDSSLTSEERELKRKQARVRATFVQDLLLSTLFGD

SEQ ID NO: 65126 - protein, 745 aa, Zea mays
  Clone ID: UC-ZMFLMO17075F02_FLI.pep
GASRRARSLRPTEGAEVPRSCSISSAAKSANQIRPVCWCGAGAGVGRGHRTLGATMATFAKPENALKRAEELIHVGQKQAALQALHDLITSKRYRSWQKPLEKIMMKYVELCVDLRKGRFAKDGLIQYRIVCQQVNVSSLEDVIKHFMQLSNEKAEQAKSQVEALEDALDVEDLEADKRPEDLMLSFVSGEKGKDRSDKEVVTPWFKFLWETYRTVLEILRNNSKLEALYAMAAHRAFQFCKQYKRTTEFRRLCEIIRNHLANLNKYRDQRDRPDLTAPESLQLYLDTRVEQLKVATELCLWQEAFRSVEDIHGLMSMVKKMPKPSILVVYYAKLTEIFWVSDSHLYHAYAWLKLFNLQKNYNKNLSQKDLQLIASSVLLAALSVAPYDKKYGASHLETENEKERNMRMANLVNFSLDSKRENREMPSRASLLSELASKGVLSCASQEVRDLYNLLEHEFLPLDLASKVQPLLSKISKMGGKLSSASSVPEVKLSQYISALEKLTALRVLQQASCIFQSMKIDMLSRMIPFFDFFVVEKISVVAVRRNFVAIKVNHLSGAVHFGTVDIESDGLSDHLSVVADSLNKAKIHICPPVKKPSKLGESFISLAGIVENEHKRLLARKSIIEKRKEELERQILEKEKEEEKKRMSSQKKTADEERVRLLNEQRQREQDRIRREIEEKNKAEAKKLLEDLKKAGKKHVVVEGELTKEAIMELTRNEQLKERHEMEKKLQKFAKTMDYLERA

SEQ ID NO: 65127 - protein, 362 aa, Zea mays
  Clone ID: UC-ZMFLMO17076C06_FLI.pep
LFLFLPCFPFHSRRTTQQPACPALPHARTRGGAEGRNLNPNPSGPPAMGQCYGKAGGASSRRADHDDHAHAVAPPSPLPANGAPPPQPATPGRRKSGSATPVHHQAATTAWPSPYPAGGASPLPAGVSPSPARSTPRRFFKRPFPPPSPAKHIKATLAKRLGGGKPKEGTIPEEGGAGVAADSAEAERPLDKTFGFANNFGAKYDLGKEVGRGHFGHTCSALVKKGEYKGHAVAVKIISKAKMTTAISIEDVRREVKILKALSGHNNLVKFYDACEDALNVYIVMELCEGGELLDRILARYFFQHSIFIYSSRVAVPLVNAYQGCKLELLKRREIYRRRCQSYRCTDFECSVLLSSSGSSSS

SEQ ID NO: 65128 - protein, 972 aa, Zea mays
  Clone ID: UC-ZMFLMO17067E07_FLI.pep
RESDWGFTSFMPLGELYNHSRGYLVNDTCIVEAEVAVCKVVDYWSYDSKKETGYVGLKNQGATCYMNSLLQTLYHIPYFRKAVYHMPTTENDMPSGSIPLALQSLFYKLQYNDSSVSTKELTKSFGWDMHDSFMQHDVQELNRVLSEKLEDKMKGTVVEGTIQQLFEGHHMNYIECINVDFKSTRKESFYDLQLDVKGCQDVYASFDKYVEVEQLEGDNKYHADKHGLQDAKKGVLFIDFPPVLQLQLKRFEYDFMRDTMVKINDRYEFPLQLDLDRDDGKYLSPDADRNVRNLYTLHSVLVHSGGVHGGHYYAFIRPTLSDQWFKFDDERVTKEDAKRALEEQYGGEEELPQTNPGLNNTPFKFTKYSNAYMLVYIRESDKDKIICNVDEKDIAEHLRIRLEKDREEKERRKKEKAEAHLYTIIKVARDDDLKTQIGKDIYFDLVDHDKVPSFRIQKQMAFAQFKEEVAKEFGIPTQFQRFWLWAKRQNHTYRPNRPLCPQDEAHTVGQLKELVNKAHNAELKLFLEVELGLDLKPLPLPDKTREDIFLLFKLYEPEKEQLRYVGRLFVKASGRPQDILPKLKMLAGFSQDDDIELYEEIKFEPNVMCEYIDNRLLFRSCQLEDGDIICFQKSSKADSADRYRFPDVPSFLTYIRNRQVVHFRSLEKPKEDDFFLEMSKIFTYDQVVEKVAEKLGVDDPSKIRLTSHNCYSQQPKPQPIKYRGVERLLDMLIHYNQTSDILYYEVLDIPLPELQALKTLKVTYHHATKDEVSVHSIRLPKNSTVGDVLNDIKTKVELSHPNAELRLLEVFYHKIYKVFAPNEKIENINDQYWTLRAEEVPDEEKNLGPFDRLIHVYHFTKDTQNQTQVQNFGEPFFMVIREDETLSSIKERIQRKLKIPDEDFSKWKFAYISLGRPDYFEDSDTVALKFQRNMYGAWEQYLGLEHPDTAPRKAHTINQNRHSFERPVKIYN

SEQ ID NO: 65129 - protein, 535 aa, Zea mays
  Clone ID: UC-ZMFLMO17066B07_FLI.pep
GSNALLVKGAVETLLERSSHIQLKDGSVVPLDEKAKRTVLASLHEMSTNALRCLGFAYKEALAEFATYDGENHPAHKLLLDPANYAAIETDLIFAGLVGLRDPPREEVYDAIEDCRAAGIRVMVITGDNKETAEAICREIGVFSPDEDITFKSLTGKEFMALEDKKTLLRRKGGLLFSRAEPRHKQEIVRLLKEDGEVVAMTGDGVNDAPALKLADIGVAMGITGTEVAKEASDMVLADDNFSTIVSAVGEGRSIYNNMKAFIRYMISSNIGEVASIFLTSALGIPEGLIPVQLLWVNLVTDGPPATALGFNPPDKDIMKKPPRRSDDSLITPWILFRYLVIGLYVGMATVGIFVIWYTHGSFMGIDLTGDGHTLVTYSQLSNWGQCSSWDNFTASPFTAGARTFAFDDDPCDYFHAGKVKATTLSLSVLVAIEMFNSLNALSEDSSLLAMPPWVNPWLLVAMSVSFGLHFLILYVPLLATVFGIVPLSLNEWLLVLLVALPVVLIDEALKLAGRCTSPSSGPTRRSRKKKQKGE

SEQ ID NO: 65130 - protein, 126 aa, Zea mays
  Clone ID: UC-ZMFLMO17071C05_FLI.pep
RLRQGVPGRAGVQDGGAVKKVAHGSRQGMREFVAEVVSIGRLWHCNLVQLLGYCRRKGELLLVYDYMPNGSLDRCLYDWSRTALSWGQRFRIIKGVASGLCTSTRTGSRWWCTGTSRPATCCSTRR

SEQ ID NO: 65131 - protein, 553 aa, Zea mays
  Clone ID: UC-ZMFLMO17095B08_FLI.pep
RNAHTARSPISDPRSPRRSKMQIFVKTLTGKTITLEVESSDTIDNVKAKIQDKEGIPPDQQRLIFAGKQLEDGRTLADYNIQKESTLHLVLRLRGGMQIFVKTLTGKTITLEVESSDTIDNVKAKIQDKEGIPPDQQRLIFAGKQLEDGRTLADYNIQKESTLHLVLRLRGGMQIFVKTLTGKTITLEVESSDTIDNVKAKIQDKEGIPPDQQRLIFAGKQLEDGRTLADYNIQKESTLHLVLRLRGGMQIFVKTLTGKTITLEVESSDTIDNVKAKIQDKEGIPPDQQRLIFAGKQLEDGRTLADYNIQKESTLHLVLRLRGGMQIFVKTLTGKTITLEVESSDTIDNVKAKIQDKEGIPPDQQRLIFAGKQLEDGRTLADYNIQKESTLHLVLRLRGGMQIFVKTLTGKTITLEVESSDTIDNVKAKIQDKEGIPPDQQRLIFAGKQLEDGRTLADYNIQKESTLHLVLRLRGGMQIFVKTLTGKTITLEVESSDTIDNVKAKIQDKEGIPPDQQRLIFAGKQLEDGRTLADYNIQKESTLHLVLRLRGGQ

SEQ ID NO: 65132 - protein, 756 aa, Zea mays
  Clone ID: UC-ZMFLMO17113D05_FLI.pep
NQDQNMYCAESDKPARARTSNLNEELGQVHTILSDKTGTLTCNSMEFLKCSIAGVAYGSRPTEVETCYGEIVETNGSFGRKDTTEFKRSVKGFNFTDSHLMNGRWAKECSRDAIEMFFRVLAVCHTAIPVADGNSAGMPYEAESPDEAALVTAAREFGFEFYHRTQTTISVHEYDPVVGGKVDRTYKLLNILEFSSARKRMSVIVRTEEGRLFLFCKGADSVIFERLSKDNGTAHLTKTKCHIDEYSEAGLRTLALAYCELTEEQYVVWNQDYSSAKNSVHTDHVAAVEKVSEDIEKDLVLLGATAVEDRLQNGVPECIYKLAQAGIKIWILTGDKLETAVNIGYACNLLRKEMEEIFITLENSSTSASEGSSGEGNKIATFEEIDRKLKDARGKISQKGTSTSFALIIDGNALTHALTGSLKNSFLDLAVNCASILCCRVSPKQKALVTRLVKIRTSKTTLAIGDGANDVGMLQEADIGVGISGAEGMQAVMASDFAIAQFRFLERLLLVHGHWCYRRIAAMICYFFFKNITFGFTLFWFEAHAMFSAQPAYNDWFISFYNVAFTSLPVIALGVFDKDVSSHVCLEVPSLHQDGVNNVFFSWSRILSWMLNGMCCSIIIYFGSLNAILVQAVRQDGRVAGFDILGVTMYTCVVWTVNCQLALYISYFTWIQHFVIWGSILIWYTFLVIYGLFSPAISTTAYHVFVEACAPSPLYWLSTLMIVVTALIPFFVYKISRTLYYPQYHDQVQRANSKNW

SEQ ID NO: 65133 - protein, 553 aa, Zea mays
  Clone ID: UC-ZMFLMO17122A03_FLI.pep
LHHRASASALECHETDLSLVAAAAMPAPTAEPALPAAFLCVPSPLLSTPLPGAALSASPAPSSHHASFLPRPRGGPRALSVAISVPGPTFSVASRLHQMWGEFARFVRLHGNQIAPLGFASMGLGFGGGGGDNVGGGGGGGGGDVDGVGEVEEAAARAEAPKKVLILMSDTGGGHRASAEAIKAAFTQEFGDDYQVFVTDLWTDHTPWPFNQLPRSYSFLVKHGPLWKMTYYGTAPRVVHQPHFAATSTFIAREVAKGLMKYQPDVIISVHPLMQHVPLRILRSKGLLDKIPFATVITDLSTCHPTWFHKLVTRCYCPSTEVEKRALKAGLKPAQIKVYGLPVRPSFVKPVRPKDELRRELGMDEDLPAVLLMGGGEGMGPIEATAKALGDSLYDENLGEPTGQILVICGRNKKLVNRLQSINWKVPVQVKGFVTKMEECMGACDCIITKAGPGTIAEAMIRGLPIILNDYIAGQEAGNVPYVVENGCGKFSKSPKQIAKIVADWFGPRSDEFRVMSQNALKLARPDAVFKIVHDLHELVREKCFVPQYACAT

SEQ ID NO: 65134 - protein, 455 aa, Zea mays
  Clone ID: UC-ZMFLMO17097G03_FLI.pep
SSFIGEGNWNTSKCCSAHSEDVSAVTAVKFCAEHPYGKAVALLDTEAQLIMVNEDWLLLPWISISVLFMDGDGSMKLSGGAMVQKGTVFGSDTSMVLDTQTVGAGSVATNLAQCGTCSAVFGGDDKEMANCKVEHVSSGASRTVVASGENGHTETAGCGGGCGSNCGPMMAEDPKAGNAKSGGCGGGGCGGAGGCRTMANEGQSRSGGVGTLLSSNAMGGEGQQAHSAGCGSGCGGGCGSGMLIEGSKANNAMSGGCGSGCGGGCGSGMLIEVSKANNAMSGGCGSGCGGGCGSGMVNEGSKANNAMSGGCGSGCGGGCGALFNASTAAGEGLHNKSAGCGGGGCGSGCGGGGGCGSGMAIEGFKANHAKSGGCGSGCGGGCGTLFSSSAAAGQGQSRSGGCGSGCGGGCGSGSMVAEGSNGGHAKSGGCGGGCGGGGGCGGGGCGGGCSTVFNA

SEQ ID NO: 65135 - protein, 497 aa, Zea mays
  Clone ID: UC-ZMFLMO17103D03_FLI.pep
LEGAPVREARELVAELCRHFYAQGWVTGTGGSITVKVNDPAVPLADRLIVMSPSGVQKERMVAEDMYVMAADGKVLSAPVAKPWPNKPPKCTDCAPLFMKAYLMRGAGAVIHSHGIETCIATMLIPGAKEFRVTHMEMIKGIKGHGYHDELVIPIIENTPYEYELTDSLSEAIAAYPKATAVLVRNHGIYVWGESWINAKTQAECYHYLLDACIKLYQLGIDWTTPEHGSINNPRRPHSILSPEICNGCHAADSSKCVVLDIEGTTTPISFVTDVMFPYARDNVRKHLTSTFDFEETKEDIKLLRIQIEDDLRNGVAGAVPVPPDEGGKEEVINSLVANVESMIKADRKITSLKQLQGHIWRIGFQKKELQGVVFEDVPVALKNWHASGIKVYIYSSGSREAQRLLFGNTTYGDLRKFLCGYFDTTTGNKRETRSYFEISQSLGVDSPSQILFITDVFQEAIAAKNAGFEVIISIRPGNAPLPDNHGFRTIKSFSEI

SEQ ID NO: 65136 - protein, 584 aa, Zea mays
  Clone ID: UC-ZMFLMO17115A07_FLI.pep
GAAPSAVRCRSGLVEEARKRMMGALQLQSNGDGAAEGLLPDPGYVEVDPTGRYGRYNEILGKGSSKTVYRAFDEHRGMEVAWNQVQLHDFLRGPAELERLYGEIHLLKSLRHRAVMRLHASWADAAAPRLAVNFVTELFTSGTLRQYRLRHPRAGAAAVRHWCRQILDGLAYLHARGVIHRDLKCDNIFVNGSQGQVKIGDFGLATVARRRGSPHAARCVVGTPEFMAPEVYAEGYDERADVYSFGMCVLEMVTLEYPYSECVHPVHIYKKVTSGIKPAALYKVKDPAVRRFIDRCLAPASRRPSAAELLSDPFLQLEDGCGLGYGDDADYSAMYNYLHQPACLDHHHHAGSIGSTASNGVVSNGGGGGGRWDDDSEDEDDDGSMFQGIDQLFNEHEDDELHVAGVDITIKGKRMEDGRIFLRLRIADKDGTGRVRNIYFPFDADADTALSVATEMVAELDITDHEVTHIAEMIDGEVGALLPHWRPGPGMDDGGGGGGGAGPDTSGATDRCKNCRSSASSAGSLDDYMSAARRGCRCAELHGRFEEITFQADEEQVRFQGSGCSSDDGGGQAEQCAGDGGSKA

SEQ ID NO: 65137 - protein, 343 aa, Zea mays
  Clone ID: UC-ZMFLMO17008A11_FLI.pep
CFICSFWGRKKKRLNRVFDAIGFVYPDYGLPLRGQGKKRKVAASVIIAEPKGKKIKVLTHRSCYIEPTVIPEFGKGTSSAAEAKETVPIVQSTEEPTMVPMMPTVESAKAKDDKAEGPQIEEIMKISESLSPSIEAKLPKVQKASTVTPRRRRMANMLDVVLETTKALSPAPKKKIAEAAKVQAEVETGQVEVEATKTRAEAEATKTQAEAEAGPSAPASAKPTTPKEEMTEQIAPKKIETSAPEALIEDIDYIIRHASGKKLSEEEILEARHYARKLKYPKGTLVFNGSNEDDFLCCLPDNKEISVCREIGRSMGFTKLEDGLSILSKDDLADSLAYNSIKV

SEQ ID NO: 65138 - protein, 369 aa, Zea mays
  Clone ID: UC-ZMFLMO17013F07_FLI.pep
LFLRVVHQRNGEEQKGTGMGSTGALLWHPSPQVHSGGVLFRQSRRIVRQRNLPLLSLADAALELERRRGQRLRCAAGDGDGGPREAQKESPSGIGAALEDPSPGPPVENGAFRSPSQEEQSALYNFLYPSKDLLPDDKEMSIFDHLEELRERIFISVLAVGAAILGCFAFSKDLVLFLEAPVTVQGVRFLQLSPGEFFFTTLKVSGYCGLLLGSPIILYEIIAFVIPGLTRDERKFLGPIVLGSSVLFYLGIFFSYTVLSPAALNFFVNYADGAVESLWSIDQYFEFILVLMFSTGLSFQVPVIQLLLGQLGLVSSDQMLSIWRYVVVGAVVAAAVLTPSTDPLTQMLLAGPLLGLYLGGAWMVKLTGR

SEQ ID NO: 65139 - protein, 211 aa, Zea mays
  Clone ID: UC-ZMFLMO17017C03_FLI.pep
ADFETFHKQRPPVSKFYMEEQLSKVYTHNMFKKFQDEIEAIMYCHVSLISVDGPVSTFNVKECIFFEDGKRTMSKIFAVTYKADEKNISCICGGFQFSGILCRHSLSMLKFQLVREIPQHYILDRWKKDFRQLHVMRRPPSDLVPNNRMDRYDYLSIRCLQLVDSAVLSDKYRLALRLVRETEKFLLNSNTHDDTQPRIKSRVPKVNKPIL

SEQ ID NO: 65140 - protein, 937 aa, Zea mays
  Clone ID: UC-ZMFLMO17018D05_FLI.pep
NSEITEEMMQEMDYNADRAWYDCEEHTTMFDGDHSMYLGDDNSYKKREAEMPKKLTRRDGSLMTLAQSKKMSQMTADNAQWEDRQLLRSGAVKGTEVQTEFDDEEERKVILLVHDTKPPFLDGRVVFTKQAEPVMPLKDPTSDMAIIARKGSSLVREIREKQSMNKSRQRFWELAGSKLGNILGVEKTAEQVDADTAVVGDQGEINFKEEAKFSQHLKDKAEAVSDFAKSKSLSQQRQYLPIFTVRDDLLQVVRENQVVVVVGETGSGKTTQLTQYLHEDGYTTTGVVGCTQPRRVAAMSVAKRVSEEMETDLGDKVGYAIRFEDVTGPNTIIKYMTDGVLLRETLKDADLDKYRVVVMDEAHERSLNTDVLFGILKKVVARRRDFKLIVTSATLNADKFSKFFGGVPVFHIPGRTFPVNIMFSKTPCEDYVEAAVKQAMTIHITSGLGDILIFMTGQEEIEATCYALAERMEQLISSSTKTIPKLEILPIYSQLPADLQAKIFQKAEEGARKCIVATNIAETSLTVDGIFYVIDTGYGKMKVYNPRMGMDALQVFPVSRAAADQRAGRAGRTGPGTCYRLFTESAYQNEMLPNPVPEIQRTNLGNVVLLLKSLRVENLLDFDFMDPPPQENILNSMYQLWVLGALNNVGGLTEIGWKMVEFPLDPTLAKMLLMGEQLECLDEVLTIVSMLSVPSVFFRPKDRAEESDAAREKFFVPESDHLTLLNVYLQWKSNQYRGDWCNDHFLHVKGLRKAREVRSQLLDILKTLKIPLTSCHMEWDVVRKAICSAYFHNSARLKGIGEYVNCRNGMPCHLHPSSALYGLGYTPDYVVYHELVLTTKEYMQCVTAVDPQWLAEMGPMFFSVKETDTSLLDHKKRQKEEKTAMEEEMEKLRRQQAEAARMEKEKEREKRAKQQQQVAMPGLKKGATYLRPKRMGL

SEQ ID NO: 65141 - protein, 268 aa, Zea mays
  Clone ID: UC-ZMFLMO17001D10_FLI.pep
PGSLGHENDDAAIFASWGIDYLKYDNCYNLGIKPQKRYPPMRDALNSTGRQIFYSLCEWGQYDPALWAGKVGNSWRTTDDITDTWKSMTDIADKNNKWASYAGPGGWNDPDMLEVGNGGMTLAEYRSHFSIWALMKAPLLIGCDVRNMTSETMEILSNKEVIQVNQDPLGVQGRKILGQGKYGCREVWAGPLSGNRLVVALWNRCSDTANVTMKLPAVGLDGYAAYSVRDLWKHETISENVVGTFGAQVDVHDTNMYIFSPATIVASV

SEQ ID NO: 65142 - protein, 393 aa, Zea mays
  Clone ID: UC-ZMFLMO17008C02_FLI.pep
PSSKCYFSIACYLHHKYKSTKSKTYTKNGESCTITYGSGQIAGFFSEDNVLVGNLVVQNQKFIETTRETSPTFIIGKFDGILGLGFPEISVGGAPPIWQSMKQQKLVAKDVFSFWLNRDPDASAGGELVFGGVDPKHYKGDHTYVPVTRKGYWQFDMGDLIIGGHSTGFCAGGCAAIVDSGTSLLAGPTTIVAQVNHAIGAEGIISTECKEVVGEYGEMILELLISQTSPQKVCTQIGLCVFDGAHSVSNPIESVVEKQKRGSDLFCTACEMAVVWIQNQLRENKTKELILNYANQLCERLPSPNGESTVDCHQISKMPNLAFTIANKTFTLTPEQYIVKLEQAGQTICISGFMAFDVPPPRGPLWILGDVFMGAYHTVFDFGENRIGFAKSA

SEQ ID NO: 65143 - protein, 240 aa, Zea mays
  Clone ID: UC-ZMFLMO17013G12_FLI.pep
DYLKAVDKAKRKLRGLIAEKNCAPLMLRLAWHSAGTFDVATKTGGPFGTMKNPAEQAHGANAGLEIAIRLLEPIKEQFPILSYADFYQLAGVVAVEVTGGPDVPFHPGRQDKPEPPPEGRLPDATQGSDHLRQVFSTQMGLSDQDIVALSGGHTLGRCHKDRSGFEGAWTSNPLIFDNSYFKELLSGEKEGLLQLPSDKALLSDPSFRPLVDKYAADEDAFFADYAEAHLKLSELGFAEA

SEQ ID NO: 65144 - protein, 624 aa, Zea mays
  Clone ID: UC-ZMFLMO17017D05_FLI.pep
AGSGEMSMYGRDPWGGPLEICHDSATDDDRSRNLDIDRGALSRTLDETQQSWLLAGPGDQGRKKKKYVDIGCLVVSHKLFVWTLGVLLAAAVFAGVVAGIAKAIPRRHRPPPPPDDYTVALHKALMFFNAQRSGKLPKHNNIPWRGNSCMKDGLSDPAIRRSLVGGYYDAGDAVKFNFPAAFSMTLLSWSVIEYSAKYDAAGELGHVRDIIKWGSDYFLKTFNSTADSIDRVIAQVGSTATSPGSTQPNDRYCWMRPEDIDYPRPVVECHACSDLAAEMAAALAAASIVFKDNKAYSQKLVHGATTLFQFARERRGRYSAGGSDAAKFYNSTSYWDEFVWGSSWMYLATGNSSYLTLATHPKLAKHAGAFWGGPDYGVFSWDNKLTGAQVLLSRLRLFLSPGYPYEETLSTFHNQTSIIMCSYLPIFKSFNRTRGGLIQLNHGKPQPLQYVVNAAFLASVFSDYLEAADTPGWYCGPHFYSIEVLRSFARTQIEYILGKNPLKMSYVVGFGNHYPKHVHHRGASIPKNGVHYGCKGGWKWRDTKKPNPNIIVGAMVAGPDRHDGFKDVRKNYNYTEATLAGNAGLVAALVALSGEGHGVDKNTMFSAVPPMFPSPPPPPAPWKP

SEQ ID NO: 65145 - protein, 761 aa, Zea mays
  Clone ID: UC-ZMFLMO17010E08_FLI.pep
FRTSAGTGNAAPHRAEPLSERGNSLHGEERMGRGGIGGAAAMAMAMETADPARAFVKDVKRIIIKVGTAVVTGMNGRLAMGRLGSLCEQVKQLNFQGYEVILVTSGAVGVGRQRLQYRKLIHSSFADLQNPQMNFDGKACAAVGQSVLMAIYDTLFSQLDVTSSQLLVTDRDFKDPSFGDQLRETVFSLLDLKVVPLFNENDAISTRRQPYEDSSGIFWDNDSLAALLAAELNADLLIMLSDVEGLYSGPPSDPQSKIIHTYVNEKHGKLISFGEKSSVGRGGMQAKVSAAANAASKGVPVVIASGFATDSIITVLKGEKIGTLFHNEANLWACSKEATAREMAVAARDCSRRLQKLSSEERKQILLDIADALEANEDAIRSENDADVEAAQVAGYEKSLVARMTLKPGKITNLARSIRKTADMEDPISHTLKRTEVAKDLVFEKAYCPLGVLLIIFESRPDALVQIASLAIRSGNGLLLKGGKEVMRSNAILHKVITGVIPDTVGKKLIGLVTSKEEIADLLALDDVIDLVIPRGSKSLVSQIKATTKIPVLGHADGICHVYIDKSADMDMAKRIVLDAKIDYPAACNAMETLLVHKDLNKSEGLDDLLVELEKEGVVIYGGPVAHDKLKVPKVDSFRHEYSSMACTVEFVDDVQSAIDHINRYGSAHTDCIITTDRSAAEAFLQQVDSAAVFHNASTRFCDGTRFGLGAEVGISTERIHARGPVGVDGLLTTRCILRGSGQVVNGDKGVVYTHKDLPLQ

SEQ ID NO: 65146 - protein, 717 aa, Zea mays
  Clone ID: UC-ZMFLMO17014A05_FLI.pep
VLSSFSPPSAGVVKEFFVPAGGSGEFRVTFTPAAGSAAFVNAVELFPAPEELLWNASVTPVGAAVLDIAAWPRDALETMYRLNVGGPEVSEESDTLWRTWLPDDPFLFSPPGTSTLENTSAPIIYATYTREVAPDVVYRTQRAAANVSGMAVPTSVNVTWTFPAEPGSNYLVRLHFCDYEVVSAVDGVGIVFNVFVAQAIGTQDFTPKQFETQPNTALYRDYAASAPISRNLTVTVGMSDKSSPGEGGFLNGLEIMKLRPSGSSLAAGSRGSSRRVLIIALSAVLGASVLASAVLCLCFVARRKRRMARPAPLEKESSKPLPWCQESSGWVLEPSSRSGEGTTGAMHRVSTQLHIPLEELRSATDNFHERNLIGVGGFGNVYRGALRDGTRVAVKRATRASKQGLPEFQTEIVVLSRIRHRHLVSLIGYCNEQAEMILVYEYMEKGTLRSHLYGGADPGGGGEAVVLSWKQRLEVCIGAARGLHYLHTGYSENIIHRDVKSTNILLGDGFIAKVADFGLSRMGPSFGETHVSTAVKGSFGYLDPEYFKTQQLTDRSDVYSFGVVLFEVLCARPVIDQALEREQINLAEWAVEWQRRGQLERIADPRILGEVNENSLRKFAETAERCLADYGQERPSMADVLWNLEYCLQLQETHVRRDAFEDSGAVGAQFPEDVVVPRWVPSSTSFMTTADPDDSAVTGVGAVDSKVFSQLSGGEGR

SEQ ID NO: 65147 - protein, 135 aa, Zea mays
  Clone ID: UC-ZMFLMO17017D10_FLI.pep
VLGGYIFVCNNDTMQEDLKRQLFGLPARYRDSVRAITPGLPLFLYNYTTHQLHGVFEAASFGGSNIDPTAWEDKKCKGESRFPAQVRIRVRKLCKPLEEDSFRPVLHHYDGPKFRLELSIAETLSLLDLCEKEGI

SEQ ID NO: 65148 - protein, 369 aa, Zea mays; identical to SEQ ID NO: 62550
  Clone ID: UC-ZMFLB73397G07_FLI.pep

SEQ ID NO: 65149 - protein, 286 aa, Zea mays
  Clone ID: UC-ZMFLB73410G06_FLI.pep
TGYSDAPTDEQLLAYSELPIHGRDMAEVFAVRIPAIAGGDPPPRGIISFYGGHCCSDFIYSWNSLEEEEDTSKQTCDSQGNLVLTGPSMATSAESPIAFTFYLHDGSPQAGEAAEDDEDIGRIICDCIGDDFSNYNRAIVETVQTGYGLAEVIYAVLNNGVQGRVAVKLARLPVSKAGEEDATAILGRIVARSKLFDVGCVLFYKEGDNGVSVRPGGLIQLAREALAVPLHMPLTIELDLHRCSGDEIVGGVLEFNPAIDGQHTERLVGQNGAELEVAISWSEYPW

SEQ ID NO: 65150 - protein, 928 aa, Zea mays
  Clone ID: UC-ZMFLMO17010G10_FLI.pep
SANRLRLACPVSWLCAAPAVVRNPRMAGVSMAAAPEGVLHRRIEFHLARRPHGSVAVGGGGFRMETLNPDAAGKVGPGEAVGSSEGDARRPEKGDSGGIDPELSVARIYLGRIGAGLENLGNTCYLNSVLQCLTYTEPFAAYLQSGKHTSSCRTSGFCALCALQIHVKTALESTGKTVTPFRIVKNLRCISRTFRNSRQEDAHELMVNLLESMHKCCLPSGVSTESQSAYDKSLVHKIFGGRLRSQVKCTRCLHCSNKFDPFLDLSLEIAKATTLVRALENFTEDELLDEGQKEYECERCRQKVVAKKRLTIDKAPNVLTIHLKRFSPFNPREKIDKKVDFQSILDLKPFVSDSKGTDFKYSLYGVLVHTGWSTQSGHYYCYVRTSSGMWHNLDDKEVRQVREADVLKQKAYMLFYVRNSIGKSVVCKDNNAANLLKKKTSEKISSLNGIAQTNVRAQNLNGVSPFGDKTHGTIIGYSTISSKTKTIHCSKNEVKAEDAPASQNNALPSTQAPIARNDVGILPTKPMQFAVKNEEKTSSHQPAPFTNTCGEQTVVGRPLQEMEPKAGAGENTSVVSAVANDAATLSKADKLTSQPQTAPSSKPTANVKDTVTEFATLSLSKKDSVVSNGAVLSIGCLTSGEKAMNLSESVDQANEITKALPTSQNNTAPVIAQADCGVEISSGVIMHVAVSASCNGTTEKKVNSKSKKFVRYPVVNMWLGSRHLKPGKKANRKRSKMIRRVVACKDAANLSCLSEQLTSTSSTACSETVECTSSHQKRSHASARSKDDAQSSQNKQKVDGARVGAGTSAPSCSAGVPKSDPNSSTDAKVVATQPASIRATDLMEATVPRWDDVDVPNIKVAEPQSKRKSGGYILDEWDEEYDRGKTKKVRRSKQDFGGPNPFQEEADYVSQRRTKQKSYRGKSWNKRA

SEQ ID NO: 65151 - protein, 325 aa, Zea mays
  Clone ID: UC-ZMFLMO17018G08_FLI.pep
LAAGGGGGSGMTRRCSHCSHNGHNSRTCPNRGVKIFGVHLTDGSAIRKSASMGNLSLLSAGSTSGGASPADGPDLADGGGGYASDDFVQGSSSASRDRKKGVPWTEEEHRRFLLGLQKLGKGDWRGISRNFVVSRTPTQVASHAQKYFIRQSNMSRRKRRSSLFDMVPDESMDLPPLPGSQEPEISQLNQPPLPPPVEEEVESMESDTSAVAESSGASALMPESLQPTYPMIVPAYFSPFLQFSVPFWPNQEDGGDLPQETHEIVKPVAVHSQNPINVDELVGMSKLSIWEHGQETVSTSLSLNLLGGQNRQSAFHANPQTRAQA

SEQ ID NO: 65152 - protein, 533 aa, Zea mays
  Clone ID: UC-ZMFLB73411E10_FLI.pep
RAKVPMATYEDLQPYIRRIADGDRSPILSGHPVSEFLTSSGTSAGERKLMPTIEDELNRRQLLYSLQMPVMNLYVPGMDKGKALHFLFVKSETKTPGGLAARPVLTSYYKSNHFKNRPFDAYNNYTSPTAAILCADAFQSMYAQMLCGLCQRQDVLRVGAVFASGLLRAIRFLQLNWEQLAEDIEAGSLTPRVTDPSVREAVAGILRADPELAALVRSECSKGDWAGIITRIWPSTKYLDVIVTGAMAQYIPTLKYYSGGLPMACTMYASSECYFGLNLRPMCDPSEVSYTLMPNMCYFEFLPMDSAAASGGDASQLVDLARVEVGREYELVITTYAGLNRYRVGDVLQVTGFHNSAPQFRFVRRKNVLLSIESDKTDEAELQRAVERASALLRPHGAAVVEYTSQAYTKSIPGHYVIYWELLAKGPAAGAAVGEGTLERCCLEMEEALNTVYRQSRVADGSIGPLEIRVVRPGTFEELMDYAISRGASINQYKVPRCVTFPPIIELLDSRVVSSHFSPALPHWTPGQRSDSD

SEQ ID NO: 65153 - protein, 477 aa, Zea mays
  Clone ID: UC-ZMFLMO17003E05_FLI.pep
SPTLLLLAVVVFSRLPVPSRCLSHPPLPDSAARALATRNSTRSKECFPPLLASLLRSRDPPPLSPDLDSTSVRSLARSFALTPLALLVRSIGASRCVDSSARRPDLASLSCSCRESRLDSPALGSRRTSGDRGLSIRLGGEMDHVVGGKFKLGKKIGSGSFGELFLAVNVQTGEEVAVKLENVKTKHPQLHYESKLYMLLQGGTGIPHLKWFGVEGEYNVMVIDLLGPSLEDLFNYCSRKFSLKTVLMLADQMINRVEYMHQKGFLHRDIKPDNFLMGLGRKANQVYIIDYGLAKKYRDLQTHKHIPYRENKNLTGTARYASVNTHLGVEQSRRDDLESLGYVLMYFLRGSLPWQGLKAGTKKQKYDKISEKKMLTPVEVLCKSYPSEFISYFHYCRSLRFEDKPDYSYLKRLFRDLFIREGYQFDYVFDWTILKYPQIGSNPRMRVKGLVELLDPQWTRLRRPQEKQPVEGILVVL

SEQ ID NO: 65154 - protein, 318 aa, Zea mays
  Clone ID: UC-ZMFLMO17006A07_FLI.pep
WWLTTVIYIYRHTDPAVVQIAFQYSVIEPVKETSGNGSQPSASYKFCLKRRLRIRTLQYRPTNNISEIYDSVDPEVVLHILVHKVILESLDKGVREGRHQVHAWLSLLAARYNQALSSDVRPLSSIDIDFSQCPQLQTIPQLVFALLRSPLLRLHEEGVHPDYRIYLQCLFSALEPSSVAKAIYPVLISYSSPDKQAFPRHTLSHAALIMSESPIFLLDTFTNLIVYYSSTADPSVPFPPPHDCLLRKTINGLKQDRCITPKLTFIHGGKDDSTLFESYLIEEQDVDGSGLTTGSGFVAFRESVRNVAGEIIQEEIGS

SEQ ID NO: 65155 - protein, 391 aa, Zea mays
  Clone ID: UC-ZMFLMO17012A12_FLI.pep
GNPSLQPCGLSTLSSPLVNARALSEADNNPPADNTAPDDNGNGGGFSKIEIASITSASAIVAVLLALVILYIYTRKCASRPSRRSLRREVTVFVDIGAPLTYEAVLRASGSFNASNCIGSGGFGATYKAEVAPGKLVAIKRLAIGRFQGIQQFQAEVKTLGRCRHSNLVTLIGYHLSDSEMFLIYNFLPGGNLERFIQERTKRPIDWRMLHKIALDVARALAYLHDNCVPRILHRDVKPSNILLDNDYTAYLSDFGLARLLGNSETHATTGVAGTFGYVAPEYAMTCRVSDKADVYSYGVVLLELISDKKALDPSFSPYGNGFNIVAWACMLLQKGRAREFFIEGLWDVAPHDDLVEILHLGIKCTVDSLSSRPTMKQVVRRLKELRPPSY

SEQ ID NO: 65156 - protein, 453 aa, Zea mays
  Clone ID: UC-ZMFLMO17006D06_FLI.pep
EKKKKKIKEVSHEWSLVNKQKPIWMRKPEEITKEEYAAFYKSLTNDWEEHLAVKHFSVEGQLEFKAVLFVPKRAPFDLFDTKKKQNNIKLYVRRVFIMDNCEELIPEWLSFVKGIVDSEDLPLNISRETLQQNKILKVIRKNLVKKCVELFFEIAENKEDYNKFYEAFSKNLKLGIHEDSQNRTKIAELLRYHSTKSGDELTSLKDYVTRMKEGQNDIYYITGESKKAVENSPFLEKLKKRGYEVLYMVDAIDEYAVGQLKEFEGKKLVSATKEGLKLDETEDEKKRKEELKEKFEGLCKVIKEVLGDKVEKVVVSDRVVDSPCCLVTGEYGWTANMERIMKAQALRDSSMAGYMSSKKTMEINPENPIMDELRKRAEADKNDKSVKDLVMLLFETALLTSGFSLDDPNTFGNRIHRMLKLGLSIDEDEPVEAEAEMPQLEDDAGESKMEEVD

SEQ ID NO: 65157 - protein, 666 aa, Zea mays
  Clone ID: UC-ZMFLMO17012C02_FLI.pep
LCEIGLEDYSFVLLSRYINALEALGGSASLAEGLPTNTSLWDDALDALIIGINQVCFSGWKPNECSAIVNELLSWKQKGLSEFEGNEDGKYIWALRLKATLDRTGRLTEEYSEALLSIFPEKVKVLGKALGIPENSVRTYTEAEIRASVIFQVSKLCTVLLKATRAVLGSSVWDVLVPGVAHGALIQVERIAPGSLPSSMKEPVVLVVNKADGDEEVKAAGDNIVGVVLLQELPHLSHLGVRARQEKVVFVTCEDDDTIKNMRLLEGKHVRLGASSNNVDLSVVSNKDDCAAMSSEPSAGGDLFAQQFSLLTTDKKLELSEQKSYTSVANGMSGVLELSEASIESSGAKAAACGTLSVLSSMSNKVYNDQGTPAAFRVPAGAVIPFGSMEDALKKSGSIKSYTNLLERIETAQIENGELDSLSSKLQATVSLLSPSEEIIESLKKTFDQNVRLIVRSTANVEDLAGMSAAGLYESIPNVSLSDPRSFGAAVGQVWASLYTRRAILSRRAAGVPQRDAKMAVLVQEMLQPDLSFVLHTISPVDHDPKLVEAEVAPGLGETLASGTRGTPWRLSCHKLDGKVTTLAFANFSEELMVLNSGPTDGEMSRRTVDYSKKPLSVDATFREQFGQRLAAIGQYLEQKFGSAQDVEGCLVGPDIFIVQSRPQPQ

SEQ ID NO: 65158 - protein, 286 aa, Zea mays
  Clone ID: UC-ZMFLMO17019A08_FLI.pep
ICMFHYLLQDSGGELAEVKSGIQECLIQGLNTGTLDLQVNGWGHKAALEGEDKEIYSEKGVGKVQWKPAENGRAATWYKRYFDEPDGDDPVVLDMSSMDKGMIFVNGEGVGRYWVSYRTLAGTPSQALYHIPRPFLKSKDNLLVVFEEEMGKPDGILVQTVTRDDICLFISEHNPGQIKTWDTDGDKIKLIAEDHSRRGTLMCPPEKTIQEVVFASFGNPEGMCGNFTVGTCHTPNAKQIVEKECLGKPSCMLPVDHTVYGADINCQSTTATLGVQVRCGGGKKGA

SEQ ID NO: 65159 - protein, 553 aa, Zea mays
  Clone ID: UC-ZMFLMO17006G10_FLI.pep
VQAYHMDSTQDFQPRTFSIKLWPPSESTRLMLVERMTKTMSTESIFSRKYGLLGKQEAHENAKRIEELCFASADEHFKNEPDGDGSSAVQLYAKESSKMMLEVLRKGPRTTAELEAPVDDTSLVSADAPRVLADTVLDISGGERAFIEADEAKELLSPLTKPGNSYKRICFSNRSFGIGAANVAGPILESVKNQLTEVDISDFVAGRPEDEALDVMRIFSKALEGSVLRYLNISDNALGEKGVRAFSELLKSQESLEELYVMNDGISEEAAKALSELIPATEKLKVLHFHNNMTGDEGAMYIAEMVKRSPNVESFRCSATRIGSDGGVALSEALGTCTRLKKLDLRDNLFGVDAGLALSKTLPKLPDLVELYLSDLNLENKGTIAIAKALEQSAPQLEVLEIAGNEINAKAAPDLAKCLAAMQSLKKLTLAENELKDDGAVIIAKSLEDGHIDLKELDVSVNMLQRVGARCFARAVANKPAFELLNINGNFISGEGIDEVEEILKAGKKPLKVLGPLDENEPDGEPDDDDEEVEDNEDELNSKLQSVKVEQDD

SEQ ID NO: 65160 - protein, 195 aa, Zea mays
  Clone ID: UC-ZMFLMO17019C01_FLI.pep
PAGLVYLSVSHMLSSLPRRRRQTQTRKPRRRTRAARPRRRSLAAGVKVTAHLHLRRGGPPPRLAPVLARLRPVPLPRGCRGGALCGAARNMQLFLADWPFYMNGWNSYWLMDQAVEPRSRDRVSRMFRTDTEMGLTVCRSWAFNDGTYNALQVSPGHFDERVFKVKKGNCPPVNFSRKCRALWGGANCLTMECLY

SEQ ID NO: 65161 - protein, 858 aa, Glycine max
  Clone ID: JC-GMFL02220142B06_FLI.pep
RTTAGVVQQFPNNTCSVYITYSKEEEAIRCIQNVHGFVLEGRPLRACFGTTKYCHAWLRNMPCSNPDCLYLHEIGSQEDSFTKDEIISAYTRSHVQQITGAANNIQRQAGNVLPPPLDDCMDNSSGKPIVKNSSSTSVSIVRSSPPNGTSGRPIALSAVAWGTRATNCQPAADGLLCPNGLSRPKPDTISSSLPFSSAVACTIQASLNSDVTKRPLLSDGSRSMTPQIKNELLKPVEQNRSMDILDSAGERTLVSDVSLSAVKLNNQLSSLPLAGDSGRGSFTATNTTSSIDITRQPLSFGPEEAVISTCEEIENLSCEFSSVYIDRNAQNKHYSLSIPSSSPDNVLVKSMQSQELQYNTDKLKDLMIKNADSKAAALYNEVCNLKEQCDLSLDSQSQVVSANTEVEDDVTTFDNQRLKDPEVIGSYLPESASFLHVSNHSSPLLLQRGDPCNVVNAGFLDANDKVEDNSLLHAHNICNGYSDEISTSSYWFRHDASNEHHIGRLVSDAVNIGSDAVMDKGESSIISNILSMEFDAWDDSLASHESLTKLLGDNTDSQNGPLKKSSSRKVQSNNQSRFSFAWQEESKFQANVPPSSGATQPFPKNGSLIQDFVERDFSLNKLGFANGFPSNNLKESGNLGSGHFIASNNKLSAVSRAQISAPPGFSVPNRAPPPGFSSVERMGQAFDSLSGNSLLDPSFLLRNSYQTPSNGNIGGPGDVEFMDPAILAVSKGPEQFNYFENEARVQLLMQRSPSPQQDLRFSEIGNSFSQFGDSYGISSRLNQSQVSNLASFPQLSLQQSRNAVLSNGQLDGRNGNGLGVAELLRNERLGFNKFYRGYDDSKYRMPNSMDVFNRTFGI

SEQ ID NO: 65162 - protein, 859 aa, Zea mays
  Clone ID: UC-ZMFLB73059C06_FLI.pep
VPNFTAADALRLTGVGRNEFIDIMNKCRSKKLMWKLNKSIAKEMLPTQPVDFPVEPWWGVCLVNFTLEEFKKLSEEETTTIDKICKEEANSYVLFDPKVIDGLYKRGLVYFDVPVYPDDRFKVSRLENFVSNKDQSYEDPIEELLYAVFVVSSANATVAELAATLQADLYQLQAAASFACRLGWAAKVMDANSVLNEERLPAFPSSILSDDEEGSNTSIHSEKSGQQLNGMDSDGPRKISGTAHVGFVVDANVTSYLMMGSLSPGLKSHAVTLYEAGKLGASCIAELCSDLASLEGKKFEGVLEEFASHAFSLRCFLECLQSGGVSANEITDNTSEAKTPRSSVHDIDNAADHLSKVNIEGVADNNHNEFSEHNQCVGELDNSDGNIVSPAMVILESVESMVKNDDKNDSTVQLNVSTESRVLKNKRKYKVDILRCESLASLAPATLERLFLRDYDIIVSMVPLPSSSVLPGPSGPIHFGPPSYSSMTPWMKLVLYTAGHCGPVSAVFMKGLRFRLLPEPLAGCEKALLWSWDGSVVGGLGGKFEGNLLKGNLLLHCLNSMLKQSAVLVQPLSIHDLDTSGNLVTVDIPLPLKNDDQSIESVVAQTNLPKEQILDLTSVLKDLSSKFELSTLGYLRLLRLHRIDEPDKFDPENVSYKWVPLSLEFGVPLFSPKLCEKICERVVASHMLQKDDLIEHSDVMQNVRRQLRELCSEYQATGPVAKLFNKRGSSRDSPRALINSISGRWNLSNDPSTPSGGAPSEHERLKFVGRQRPRTEVVSFDGSTVRSYALDPEHNEEQSSIQDVKPDPEETDSKDVVLPGVNLIFDGAELHPFDIAACLQARQPLWLISEASTASSTLL

SEQ ID NO: 65163 - protein, 580 aa, Zea mays
  Clone ID: UC-ZMFLB73076E10_FLI.pep
ALAFLLPTPLHSNATASPRFIGRRPRHIATVSHRRGHPFSLVHRIAPAPSAIDPSVPRCASAMQFSSVLPLEGKACMSPVRRGSGGYGSERMRINCCSIRRNKALRRMCFSARGAVSSTQCVLTSDAGPDTLVVRTSFRRNYADPNEVAAVILGGGTGTQLFPLTSTRATPAVPIGGCYRLIDIPMSNCFNSGINKIFVMTQFNSASLNRHIHRTYLGGGINFTDGSVEVLAATQMPGEAAGWFQGTADAVRKFIWVLEDYYKHKAIEHILILSGDQLYRMDYMELVQKHVDDNADITLSCAPVGESRASDYGLVKFDSSGRVIQFSEKPKGAALEEMKVDTSFLNFAIDSPAEYPYIASMGVYVFKRDVLLDLLKSRYAELHDFGSEILPKALHEHNVQAYVFTDYWEDIGTIRSFFDANMALCEQPPKFEFYDPKTPFFTSPRYLPPTKSDKCRIKDAIISHGCFLRECAIEHSIVGVRSRLNSGCELKNTMMMGADLYETEDEISRLLAEGKVPIGVGENTKISNCIIDMNARVGRNVSITNKEGVQEADRPDEGYYIRSGIVVVLKNATIKDGTVI

SEQ ID NO: 65164 - protein, 151 aa, Zea mays
  Clone ID: UC-ZMFLB73178B09_FLI.pep
VHLGDGIKFIEDSVAANQSVNGSTRNAFKILILDVDSSDLSSGLSCPPENFVEDPFLLIAKEFLLEGGLFVINLVSRSTSVRETVVSRLKAVFEHLYSLQLEEDINEVLFASPSGRYLEINDISAGASKLQDLLKIPVDVESDIQKLQKLQ

SEQ ID NO: 65165 - protein, 287 aa, Zea mays
  Clone ID: UC-ZMFLMO17127G09_FLI.pep
EPAAMAAETRSVVGGRGLAKAVGNVDTGGEDGRDADSSGGDASGKIFVGGVAWETTEETFTKHFQKYGAITDSVIMKDKHTRMPRGFGFVTFSDPSVLDRVLEDEHVIDGRTVEVKRTVPKEEMSSKDGPKTKKIFVGGIPPSLTEDKLKEHFSRMGRWLSIRLCLTIALDAHVALDLSHLKARMLLKGLCQRGECMILEGNRLKLRKLNQKNLVWVIQAQMEDTVVVVVIVIHTVVVVAMAFLGTAVVVAMDTVVATDQLLQHIMAAQHMVPMAEGMDTVVLLAMA

SEQ ID NO: 65166 - protein, 501 aa, Zea mays
  Clone ID: UC-ZMFLMO17153A03_FLI.pep
DGYADNGNATEAMALFWRMVQEGMDVTDASVLAALQACGELGYLDEVRRVHELLVRVGLSSNVSVTNALITTYAKCKRADLAAQVFNELGNKKTRISWNAMILGFTQNECPEDAERLFARMQLENVRPDSFTLVSVIPAVADISDPLQARWIHGYSIRHQLDQDVYVLTALIDMYSKCGRVSIARRLFDSARDRHVITWNAMIHGYGSHGFGQAAVELFEEMKGTGSLPNETTFLSVLAACSHAGLVDEGRKYFASMKKDYGLEPGMEHYGTMVDLLGRAGKLDEAWSFIKNMPIEPGISVYGAMLGACKLHKNVELAEQSAQIIFELGPEEGVYHVLLANIYANASMWKDVARVRTAMEKKGLQKTPGWSIIQLKNEVHTFYSGSTNHQHAKDIYARLAKLIEEIKDMGYVPDTDSIHDVEDDVKAQLLNTHSEKLAIAYGLIRTAPGTTIQIKKNLRVCNDCHNATKLISLLTGREIIMRDIQRFHHFKDGKCSCGDYW

SEQ ID NO: 65167 - protein, 379 aa, Zea mays
  Clone ID: UC-ZMFLMO17137F05_FLI.pep
TLQFRSMEQSIEDRTMLPNHPATKLSTARLQTKVSQFDDFEKWDLSLHRSTLRLELAKEPLLLIGSLEATVPKFGRCVDELELDLLQRQPGSLLQEGLAEGHHPLLWTHTAALDHQVVTLHDTIMGEATHGSDVLLSPVKLCGGIVGLLSSLADLVNLLVHLSAVVVPILTSTGNRIGDPSRMPCTDTSNFAETPVGLAGKPGDTPTSDHTLITFPLGHTNDVNHLILLEDSINRDLFLKEFVAIVHLVSNGTTIDLNLHQVSLLLLQTLHLPNLGMSNDTDNRSIFLHLLKLQLNFLLASIIFIFESILCESLLLALAPVLVEPSPHFFAKMLGPNRVECAEATRSLHICHEPNNDKRRGFNDGNSLTSFLLMEFGSW

SEQ ID NO: 65168 - protein, 285 aa, Zea mays
  Clone ID: UC-ZMFLMO17180A08_FLI.pep
AQFNDGKVLAIKKLDSTVMPFQSSDDFAELVSNISKLHHPNLNELVGYCMEHGQHLLVYDFHRNGSLHDLLHLSDEYSKPLSWNSRIKIALGSARALEYLHEICSPSIIHKNFKSSNILLDSEFNPHLSDAGLASFIPDAEFQAAEQSAGYTAPEVDMTGQYTLKSDVYSFGVVMLELLTGRRPFDSSRPRSEQSLVRWATPQLHDIDALDRMVDPALKGLYPAKSLSRFADVLALCVQPEPEFRPPMSEVVQALVRLVQRANMTKRMLDGDTSRRPDDLDQDFI

SEQ ID NO: 65169 - protein, 1189 aa, Zea mays
  Clone ID: UC-ZMFLMO17273A12_FLI.pep
HTFPSPLPPSRTTTDWVVDSGASFHTTPTTNSLLHSHPPHPSHPTSIVVGNGSTLPVTSVGTSVLPGPFCLNDILVAPGLTHPLLSVRRFTSDNQCSMEFDPWGLTIRHLPTHAVLARCDSSGPLYSLHLPSTPHTRVASSPVLTTTTTSSAIWHRRLGHPGPDVMSQLSGHSDISYTRGSSERLCHACQLGRHSRLPFSTSTSRAVQAFDLVHCDLWTSPVLSLSGYKYYLVILDDYSHFLWTFPLRLKSDTFTTLTHFFAWVSTQFRRPVRALQCDNGREFDNNASRSFFLTHGIQLRLSCPYTSAQNGRAERMIRTTTNMIRCLLFQASLPATYWAEALHTATHLLNRLPSKAVSHPTPHFALYGTTPSYDHLRVFGCACYPNISATAPNKLSPRSTRCLFLGYSPDHKGYRCLDLTSHRIIISRHVVFDEDVFPLAGSTPPTDLDSLLESDSVSPLPLAPRLAPLPAPRAATTPQHAPISVPRAALSTPPAPRAATSIMPAPCAAPSILPAPRTAPSTSPAPRATPSILPAPRAAPSIPPAPRAAPSTPPAPRAAPSTPPAPRAAPSNPARFANPTLVYHRRGHATTSASPDSGPSTSATRFADPAVVYHRRELATPAALDVPAVHSEPSVYHPVAIHRDPGHVHPMVTRRAAGVLRPVDRLILAADTSSTPPDASPVPSSVRTALADPHWRRAMEEEYAALLANHTWDLVPCPPGTNVVTGKWLFRHKLTSDGSLDRYKARWVLRGFTQRPGVDYDETFSPVVKFATVRAVLSLALSRDWAIHQLDVKNAFLHGTLTETVYCSQPTGFVDADRPDLVCRLNRSLYGLKQAPRAWYSRFASYLASIGFVEAKSDTSLFIYRRGDDTVYLLLYVDDIVLTASTADLLHRTIVALQREFAMKDLGPLHHFLGITAERRPKGLFLHQRQYAIDILERAGMSDCKPCSTPVDTQAKLSEDDGPPVADTTSYRSLTGALQYLTFSRPDIAYAVQQVCLHMHTPREPHLTALKRILRYLRGSLDYGLLLRPSPTSELVVYTDADWAGCPDTRRSTSGYAVFLGANLVSWAAKRQPVVSRSSAEAEYRAVANGVAEASWLRQLLHELHSPLQRATLVYCDNVSAVYLSTNPVQHQRTKHVEIDLHFVRERVAAGDVRVLSVPTTLQFADIFTKGLPSSVFLDFRSSLNICTG

SEQ ID NO: 65170 - protein, 330 aa, Zea mays
  Clone ID: UC-ZMFLMO17294A01_FLI.pep
QPQPSMEALYLLASLAATVVTSAFHSLLLFLRLLLRYPRRAAPTDDGPAAAARLYEGRVRHARRRPAAHTFEYPARYALVDLDRLPLPGHLSADDARRVASTSGPVHLLTVPESVGYEQNPLSIYYCYDSAGQGQDGELRTCIAEVTNTPWAERVMFTFQPGSDLIAKPLHVSPFMDMLSNWSIRADAPGDRLYVGISVQHPTLGDYFTAVLDAKLVEQTSNSLRLATFFWLMPHKVAAWIYWEALKLWLKNVKFLDHPRYLNPRYRDEALARDLELRTSCCHLQRQEQNDRRSRTAEKTAEITDHVDGKGDADIAKRWCVWRDARWPWS

SEQ ID NO: 65171 - protein, 104 aa, Zea mays
  Clone ID: UC-ZMFLMO17300F05_FLI.pep
YTISAIWRSCTSIFSCQQMLVSPTPCCSYLPLFRLRANCKENLLPRAHRYPHVFEVTLPHLPQCSHIHLLSLKENNILLKTQRIQQSSNCKRGFSLQSCIEQCY

SEQ ID NO: 65172 - protein, 344 aa, Zea mays
  Clone ID: UC-ZMFLMO17300H05_FLI.pep
GHNTVWFRVYKPPTPYQLGEPLLQEVVKSTNTMREEHECAWKHYGCTLMSDGWSDRRGRHLINFLVNSPEGTYFLEFVDASSEVHDAYMLADFLEKKVDEIGRDKVVQVVTDNGANYKAAGKLLMERIPTLFWSPCAAHCLDLMLEDIGNLKEFKKPIARARRVTTFIYRHGRILAAMREKTSGADLVRPAATRFATSFLTLKSLYKHKDALKALFASTAWTDNRLSKTSAGLDVYNIVFSTQFWNSVEDCLRASGPLLIVLRVVDGDERPAMPEVQALMKCAREKINQSFAVQSKKTLLKKIITIIERRWEKQMDHPLYGAAMYLNSGKLHHLIRNDDDATVG

SEQ ID NO: 65173 - protein, 477 aa, Zea mays
  Clone ID: UC-ZMFLMO17320C05_FLI.pep
PEVAAVGTVAAKLEDETDQDENACFQEADQFKDAELEVSNLLDKDTPMLPCFLPSPSEAIGTDGSSTTCGAGGSVSNSIVPSTTTNTFAGLFASATTSTTSQSRSLRDLIGVDPTFLCLAIGAPSLFPQTSASNSGTFAPPPAPHMSATALLQKATEAGATQSSSSFLKEFGLASSSSSPRPKQQQPHGRVAEISTDPWQYRSSNQQMEMERHQSHQRREMESSSQPWQHPRSTQQMEMERHHQRSHQQREMESSLQPWQHPRSTQQMEMERQHQRNHRQRETESSSQQWHHHHHHPNDQMMGLESYRSNQQRQTESSSQRWPPHRSYQQMEMDPSSQQRWAQHQRSNQQQQQMEMMERHHLSNQQIRSTQQMERRAMVSGGGLGLGLAYESGNPGLPLPDLMTGPSPLLGPKPATLDFLGLGIGGGTMGGSTASRGLPALMVGRELDMGPSAQVPPAAAAAPWEDAKRKTNGRTIL

SEQ ID NO: 65174 - protein, 330 aa, Zea mays
  Clone ID: UC-ZMFLMO17320D06_FLI.pep
SDIGIPVSHNSTEVALTYYPIFELLAVHPGRLMPSSLSCSLTWPLSIHLQQHPVRSGVPLLLLVTEQCIGNVAREGAELRSTLLVPGALWPLARSMLSNRGFTTRTAVWALSNIAASSFEHKKLVFASEVTQNEAAPLAAKYRRQGFQTLKLKIGNNFNSDIEVLASIRLDHPDYSFILHANEEYTYGSLNFFGLDTNTQYDMVCPYCDSGFVAELDDANALMSHFDGMDPDFHRDPRFGIMEVISVVMQHDMARMNKEVDVTGRPNFFSDLEIEFVIKIRDSPPMSLEALLETISCLSVHNFLSWFGIPVELMPCIGLRASRFLRRGEC

SEQ ID NO: 65175 - protein, 229 aa, Zea mays
  Clone ID: UC-ZMFLMO17404G03_FLI.pep
ACKFGFYEFFKKYYSDIAGPEYAQKYKTLIYLAGSASAEVIADVALCPFEAVKVRVQTQPGFARGLSDGLPKFVRSEGVLGLYKGIVPLWGRQIPYTMMKFASFETIVELIYKHAVPVPKSECSKTTQLGISFAGGYVAGVFCAIVSHPADNLVSFLNNAKGATVGDAVKKLGLWGLFTRGLPLRIVMIGTLTGAQWGIYDAFKVMVGLPTTGGVTPAPAAEAELKASA

SEQ ID NO: 65176 - protein, 271 aa, Zea mays
  Clone ID: 700095941_FLI.pep
CRRPQRGSVHGSADLSHARAWKQISPRWRRATPPALGASGHGAGEAHGPPGGADAAPGHSDGDKTNLTNKVVGEAVQEAPGEVATVTAHAARGLTDGHQRPSKHGRHHHRRPGPISRLLVLCAALRTSNPSALRETVVEVPNVSWEDIGRLENVKRELQETVQYPVEHPEKFEKFGMSPSKGVLFYGHPGCSKTLLAKAIANECEANFISVKGSELLTMWFGDSEANVHEIFDKARQSAPCVLFFDELDPIASQRGSSLGDAGGATDRVLN

SEQ ID NO: 65177 - protein, 502 aa, Zea mays
  Clone ID: UC-ZMROB73014E05_FLI.pep
LRLPTTPGSTVARSRSLPSHAMVADRLRLALLLSACLCSAWARPRLEPTIRLPSERAAADDAVGTRWAVLIAGSNGYYNYRHQADICHAYQIMKKGGLKDENIVVFMYDDIAHSPENPRPGVIINHPQGGDVYAGVPKDYTGREVNVDNFFAVLLGNKTALRGGSGKVVDSGPNDHIFVFYSDHGGPGVLGMPTYPYLYGDDLVDVLKKKHAAGTYKSLVFYLEACESGSIFEGLLPNDINVYATTASNAEESSWGTYCPGEFPSPPPEYDTCLGDLYSVAWMEDSDFHNLRTESLKQQYNLVKDRTAVQDTFSYGSHVMQYGSLELNVKHLFSYIGTNPANDDNTFIEDNSLPSFSKAVNQRDADLVYFWQKYRKLADSSPEKNEARKELLEVMAHRSHVDSSVELIGSLLFGSEDGPRVLKAVRAAGEPLVDDWSCLKSTVRTFEAQCGSLAQYGMKHMRSFANICNAGILPEAVSKVAAQACTSIPSNPWSSIHKGFSA

SEQ ID NO: 65178 - protein, 237 aa, Zea mays
  Clone ID: UC-ZMROB73060B03_FLI.pep
LQPRRVRRAHGAARRRRAAGARFRARRPRQRGRRRPRGPRSPRRRGARERSWRRRHRRGAGRRHGERGSPLRLREPGRAGVHPCAQDCAARGGRGRVGRRRRGRGRRRGRARPSVRALLRAPGPGGGRRSGRDGHVGAAREDGGQGRCRRQGHVPTADGLKGSARIHGRAPGEGRGGARRVGRRAHGAAAAPRAVHGAQTALRWGGSGTMEVDLAGSSGTLDKSDALTISFSDLNIE

SEQ ID NO: 65179 - protein, 357 aa, Zea mays
  Clone ID: UC-ZMROB73077B03_FLI.pep
KCYSEALTIMLEVLSQEKQVPIIGLVMNDRGFISRVLCPKYGGFLTFGSLKKGKESAPAQPTAADLINLYNIRQIGPDTKVFGIIGKPVGHSKSPILHNEAFRSVGFNAVYVPFLVDDLAKFLDTYSSPDFAGFSCTIPHKEAAVRCCDEVDPVARDIGAVNTIVRRPDGKLVGYNTDYVGAISAIEDGIKESEPTDPDKSPLAGRLFVVIGAGGAGKALAYGAKEKGARVVIANRTFARAQELANLIGGPALTLADLENYHPEEGMILANTTAIGMHPNVNETPLSKQALRSYAVVFDAVYTPKETRLLREAAECGATVVSGLEMFIRQAMGQFEHFTGMPGTLIGLFIFHFIIKR

SEQ ID NO: 65180 - protein, 476 aa, Zea mays
  Clone ID: UC-ZMROB73049E11_FLI.pep
VLVSWLCFAAAGVGAIGANWGTQASHPLPPETVVRMLKDNGFQKVKLFDAEEGTMSALRKSGLEVMVGIPNDLLSTMATSMKAAEKWVDTNVSSYLNDGVSIRYVAVGNEPFLETYNGSFLQSTFPAIRNIQGALIKAGLGNQVKVTCPLNADVYSSTTSKPSDGDFRTDIHDLMLTIVKFLSDNGGAFTVNIYPFISLYIDPNFPVDYAFFEGASSPIVDGSFTYSNMFDANHDTLIWALKKNGFGNLPVIVGEIGWPTDGDRNANAQMAQRFNQGFMTHIASGRGTPMRPGPVDAYLFSLIDEDDKSIQPGNFERHWGIFTYDGLPKYQLNLGTSNAGGGLVRAKGVKYLERKWCVLKPSVNLNDPKLADNVGYACSMADCTSLGYKTSCGMLDIRGNVSYAFNNYFQKNDQDDVACGFQGLATTTGQDPSTGTCRFGVMIEVDSAFSWRLQGLGSNLLLFLLLGVLQLSLSFS

SEQ ID NO: 65181 - protein, 495 aa, Zea mays
  Clone ID: UC-ZMROB73075G02_FLI.pep
TAHCPPPRIGLAGLATMGQNLALNIAEKGFPISVYNRTAAKVDSTLSRARDEGSLPVLGHRDPRGFVLSLARPRAVVLLVQAGPAVDATIQALSPYLEPGDAIVDGGNEWYQNTERRIQEAAARGVLYLGMGVSGGEEGARNGPSLMPGGSADAYANIRDILQKAAAQTEDGACVTFVGPGGAGNFVKMVHNGIEYGDMQLIAEAYDVLRRLGGLSNSEIADVFAEWNRGELESFLVQITADIFTVADPLDGSGSGGGALVDRILDKTGMKGTGKWTVQQAAELAVAAPTIAASLDGRYLSGLKDERVAAAGVLEEEGMPAGLLETVNVDKKVLVDRVRQALYASKICSYAQGMNLLRAKSVEKGWNLNLAELARIWKGGCIIRARFLDRIKSAYDRNPELANLIVDREFAREMVQRQNAWRWVVARAVEAGISTPGMTASLSYFDTYRSSRLPANLIQAQRDLFGAHTYERIDCPGSFHTEWTKLARRSNGAAI

SEQ ID NO: 65182 - protein, 488 aa, Zea mays
  Clone ID: UC-ZMROB73050A04_FLI.pep
AAMAPRTLGLNAAPLLQILRSLCLLALAAAAAVSGRRHGASPARGSGQSMYLAPACRAHTASVADFGGVGDGTTSNTAAFRSAVDHLSQYSGEGGGGGMLYVPAGKWLTGPFNLTSHFTLYLHQDAVILGSQDVGEWPIVDPLPSYGRGRDKVGGRFASLIGGSNLTDVVITGSNGTIDGQGAMWWSKFHKNQLKYTRGYLIELMHSDTIYISNLTLLNSPAWNIHPVYSSNIVVQGITILAPTNSPNTDGINPDSCSHVRIEDCYIVSGDDCVAIKSGWDEYGISYGMPSQHIVIRRLTCVSPTSAVIALGSEMSGGIQDVRAEDITAINTESAVRIKTAVGRGAYVRDVFARRMTLTTMKRVFWMTGDYKSHPDDKYDPNAVPVVANISYQDVVATGVYKEAARLQGIQGAPFRGICVANVTADLSKSRKYPWNCADIEGVSANVSPAPCDPLQGAHDGACPFPTDTLPIDQVTVQQCAYDIPATN

SEQ ID NO: 65183 - protein, 181 aa, Zea mays
  Clone ID: UC-ZMROB73066E09_FLI.pep
GRFLIWHAKNSGKSQNYLGLEIRQKLVERAQFWVNELELMNVYFMFANATVSFEKIISSYPGPLSLVSILCPDPHFKKRHHKRRVLQQPLVDSIINNLCLGGQVFIQSDVLEVSVDMRERFDGYSGILAHVNYVDQDLQCDNEGWLLDNPMGIRTEREIHAELEGATIYRRVYQKVRDASF

SEQ ID NO: 65184 - protein, 142 aa, Zea mays
  Clone ID: UC-ZMROB73059G11_FLI.pep
MKWQHWINLQVQWLQLYNPIPQHRKLKKHCTKFSTTMLVHCLVSTNKGLFKAQACSIHMGITAANGCPVRFHLIGINSVEVEQLCYNDVGHIILNGASAPNNSLHRDRYIVTQTSQYNPVKPFLVRLCSVEGRLNPLLFNFD

SEQ ID NO: 65185 - protein, 204 aa, Zea mays subsp. mexicana
  Clone ID: UC-ZMROTEOSINTE003E08_FLI.pep
LPLLNGGSNYLFLSLLFKDRANEIYKKVEDLKSIRGRNQDAILAACLYIACRQEDRPRTVKEICSVANGATKKEIGRAKEFIVKQLEVEMGQSMEMGTIHAGNFLRRFCSTLGMNNQAVRAAQDAVKHSEELDIRRSPISIAAAVIYMITQLSEDKKPLKDISLATGVAEGTIRNSYKDLYPYASRLIPNTYAKEEDLKNLCTP

SEQ ID NO: 65186 - protein, 599 aa, Zea mays subsp. mexicana
  Clone ID: UC-ZMROTEOSINTE023A11_FLI.pep
DGGDVFRQRVEPYMHQVLMYEDSVGQEAAQKTVPICELEEKALVSLAKEGNFNPDEEKHAFLLQLLFWFKQSFRWVNAAPCDSCGRETSNVGMGTPLTSEIKFGASRVEMYRCNHCSNITRFPRYNDPRKLIQTRRGRCGEWANCFTFYCRAFGYDARLILDFTDHVWTECFSNLYGRWMHLDPCEGVYDNPLLYEKGWNKKLNYVIAISKDGVRDVTKRYTRKWHEVLSRRIITSEETVVSVLSSITGKYRTGLSPDALSVIENREKEESEELRKSAYLQVETALSLPGRLSGSVEWRKARSELGQADSLSCSSCPIRKCVDGHVSNIYDALSAFLSHFFDKKIPKERIIEAFEALKTLMLTLKSSNFKSRSATLDQKAHHLFEEIFPSIERLLSAISLKAELGTAGYQSVTVSGNPVHSSLALPVALDAVNEILSNYKNNTFFTEGNHFPRGNRVCSGSVLASREQLPIGIATAAFDGIHSSKWEEPDGAKGCWLIYTMQDGKSCELESYDLMSANDAPERDPMDWVLEGSADGGSTWNILDARNSEMFESRFLRKTFTVDKRYKANAFRFRFLRVRDSHSNPRFQIGSIDLYGKTI

SEQ ID NO: 65187 - protein, 205 aa, Zea mays subsp. mexicana
  Clone ID: UC-ZMROTEOSINTE059F08_FLI.pep
LVLIYFVVPHHGQTNIMVYIGVCSLLGSLTVMSVRALGIALKLTLSGTNQLFYPQTWAFALIVATCVSTQINYLNKALDTFNTAVVSPIYYVMFTSLTIIASVIMFKDWDHQNPTQIVTEMCGFMTILSGTFLLHKTKDMTDSPGQSLLTRRPKHASQNAFAIEVMPLKCQDYIDDETLTLSLPKVENGYLKEEYLLRYKDSSIV

SEQ ID NO: 65188 - protein, 533 aa, Zea mays
  Clone ID: UC-ZMFLB73318H05_FLI.pep
FAATFGITNRTLLECLVFCLLDDYSSEALEEACSHLPKISSKETHPKIAQVLLERQKYDMALLVLKCTGHGSFSATENFKKDDISSLSEAVTVVRVRIECRLLTEAFMYHRSYCSKVKEQHSADMTHAEDALKNSWVYHVEMMVTEFCAICIKRNLVDKMIDLPWDSEEEKHLHKSLFDSAHEMPMKPNGSLLVVYYLRRYRYLEAYEVDRSLQKFEQKILENTTEEIASKIRAIARWRESLVVKCLDMLPEVQRENVKAINSGEQSQFARTAQLSSPAHVGKSQSPVMDLSTTFTTSLQNKSSLLRKNNALTDSGGLIRSSRSEFGRKVPSVLDTRASPHGPPTSNMRSSAGDMFPTVGQRVESPFLRGAKDISSRKGEEGFKKGIKYGDHDPVPMYLNLSSGDTPMKDYRTSLLKTAVNKTTIFQGKDSVGKGELHFGSRAEKPFILNGTGVGQNGLAKVSGYAGFREDYKVPTKENILSSSKRSSIDGAEASKGVSRWRSDESSEDEEERTNRESGASLVTRRRPRFSRR

SEQ ID NO: 65189 - protein, 125 aa, Zea mays
  Clone ID: UC-ZMFLMO17377A07_FLI.pep
NTTDNLQPVVSTLPLPLSHVTYSASLFIIAHHTETYSEETLKDSCIKDEAGQNLSTLVSTQVNAATTWDKHVPCSSHKLLTLRHNVVSVFTRASTQTDHLDNSTSYHDKPTQSCQTAAHRNYKML

SEQ ID NO: 65190 - protein, 278 aa, Zea mays
  Clone ID: UC-ZMFLMO17335E03_FLI.pep
LMKNLKKLETAYFLTRSKLAKQVGNQINSCNRVVKRTTGSAVGTEASSIDDFSLERQYGRRQRGWVNSFLEGLCKYLSFSKLKVRAELKHCDSLNSSNLVCSVGFDRDREFFATAGVNKKIKVFEYNMIVNEHRDIHYPVVEMSNRSKLSCISWNSYMKSHIASSDFEGIVQVWDVTRSQVFVEMREHERRVWSVDFSIVDPTKLVSGSDDGSVKLWDMNQAILFLHLLLGVLALLKQGQMCVLCNFNLILLAPLPSALQTTKFTAMIYVTYELLIVH

SEQ ID NO: 65191 - protein, 327 aa, Zea mays
  Clone ID: LIB4742-002-H9_FLI.pep
IDRDMDGLWHLGDELRGQPKVVEDRQWSLMTSKLAEITRSRGERTNDLDYARMNAAPDAKRWGKAASYQHHDEGRMDHHVGLSLKMNDLKMNEAAAAAVMKLPFRGVPYNVNPMYPKGSNANANVNAFKMNVGVNKYSSSANGKDAGGKSSGGGSNNNSGGGGNGNGTANGSSAVDKRFKTLPTSEMLPKNEVLGGYIFVCNNDTMQEDLKRQLFGLPARYRDSVRAITPGLPLFLYNYTTHQLHGVFEAASFGGSNIDPTAWEDKKCKGESRFPAQVRIRVRKLCKPLEEDSFRPVLHHYDGPKFRLELSIAETLSLLDLCEKEGI

SEQ ID NO: 65192 - protein, 381 aa, Zea mays
  Clone ID: LIB4742-003-G8_FLI.pep
RGRPDPLPLGHSPCFPCATQPRRPADLVGCASAAAAPVPPGRRPLSSCDAMVIWSCSSCLHGFIPRAAWRRHYPLLSPRPPASPPPIHHFSSARRSTKKSAPKAPMGSSIPAAKALIDSSREPFYVIRKGDVIGVYKNLSDCQAQASKSVLHPSVTVYKGYSLRKETEEYLAARGFRNAVCSIGAADASDELFGDLVPCPFQQPDENTQSILKMSQGQEMETRSSEHPKVADLEPLPDSELSSILEFDGACKGNPGKSGAGVIIRRLDGSVIAVLREGLGIMTNNAAEYRALILGLNYASKKGFKYIRCQGDSKLVCNQVQGAWRARSDNMSILCDIAKELKETFLTFQINHVLREFNSDADVQANFGCQLAVDEVQELSV

SEQ ID NO: 65193 - protein, 177 aa, Zea mays
  Clone ID: LIB4742-008-C11_FLI.pep
PRDHAPTHGFTPMGGAVVKGAGLALDHLGVLRHVEAAKGGDLDKEGDAYKEWQQAPPSLLVARHNASSCRGSLSPAPARTSHQTRASGAPHGAGLHGRSRVPGRSKRREGAKDERQEGDEVRVAGRQISLEMAGGAWEETSAGWEEQRVRQPWKQGRETCVGQNESWEMRTATPAGL

SEQ ID NO: 65194 - protein, 374 aa, Zea mays
  Clone ID: LIB4742-008-D9_FLI.pep
RGRPGHARGSSVPFPLAPYRHRPRPMGGGADRSAPVRAEESVSGGVDVWSDAVSSHAPDHLLVMVHGILGSTADWQYGANEFVKQLPDHVIVHCSEKNASMLTLDGVDVMGERLANEVLDVISRRPEITKISFLAHSVGGLAARYAIARLYRHPDSVSDGNTKGTICGLEGINFITVATPHLGSRGNKQVPLLFGSVAMEKVACHIVHWIFRRTGRHLFLTDDDEGLPPLLQRMVEDHDDLYFISALRAFRRRVVYANADCDHIVGWRTSSIRRNNELPELPVSSSDKYPHIVHEEHSEETDDDKWQDCMAECDMDVLEEKMVTGLGKVSWEKVDVSFHSSMTSFAAHSIIQVKYAFMNEGADVIQHIIDHFQL

SEQ ID NO: 65195 - protein, 419 aa, Zea mays
  Clone ID: LIB4742-009-F6_FLI.pep
SKLFMEHASCDDVHEHAISVSHGETASTSTNHQDMYSDSDEPHQEDRPSTSTQTPSSESSPSTSPTAYSSRNLSFPRRDSIYGHGRNPWNSGLWISFEIVMYIAQVVAAIVILLFSRHEQPHAPLFAWIIGYTVGCIASLPLIYWRYVHRNRHLDQEPQQPPTTYPTLTPSQSSEGRNHRTSGIVLCLGCVTISCPRLSVLAYHFKTAVDCFFAVWFVVGNVWIFDGRSISSDAQAAPNMYRLCLAFLALSCVGYAIPFIMCAAICCCFPCLISILRLQEDLGQNRGATQELIDALPTCKFKPKRNKNWGIDHASSSEHLDEGGILGLGTKKERVVSAEDAVCCICLTKYGDDDELRELPCTHFFHVQCVDKWLKINAVCPLCKQEIGGVVRSFFGLPFGRRRVDRMAGRGVASSRFSV

SEQ ID NO: 65196 - protein, 302 aa, Zea mays
  Clone ID: LIB4742-010-A5_FLI.pep
LSRERDGSRRILLPPTPSGSRQAASSRPVVSPLPLSSARRQPPPAMEALRKAEAELTVYVHPSNAKRVRHAVSRQLSALLFTYVDRFDGVLLMHEVSFLIGKDKEGKPIYERSDRNDQIAEPVSYGKIMNGLVPYFSVQVHATLLLFSPQPDMILEGMVEMLGKESIHAIVLGVFSVAIMSEDIKFKFKWKSDGGKFVSLTDKKHVIERGTMIRFSVKRVDTEMNCHITGSLIPPHTGCMRWLSVHDPKYASELKSGESRSRDTSIKIEQNEQEHRILKNEDGMVKSERPYKSRKRGRHIEK

SEQ ID NO: 65197 - protein, 297 aa, Zea mays
  Clone ID: LIB4742-010-G11_FLI.pep
FQAATPLPFHSRRPRRRPVSSAPLSDPMAYAARLVAKVHLAATPQAEPRHLSSFRVGALSRSTTVQRQKFVAKSAISAVESGDTFVGVKQNTRPIIVIDNYDSFTYNLCQYMGEVGANFEVYRNDEITVEEIKKISPRGILISPGPGTPQDSGISLQTVTELGPSIPLFGVCMGLQCIGEAFGGKVVRSPYGVVHGKGSLVHYDEKLDGTLFYDISNPFQAGRYHSLVIEKDSFPHDTLEIVAWTDDGLIMAARHRIYKHIQGVQFHPESIITTEGRLMVNNFIKIIEGYEASNCSP

SEQ ID NO: 65198 - protein, 384 aa, Zea mays
  Clone ID: LIB4742-011-A6_FLI.pep
IVSPDHSNPATPALPEPERRRLPERRVGGAGGGSNRRAVNPREIRASEGNRSAQSMESPISRTNLNCISLADPNVQKSVALLKQACLDSGFFYVVDHGISQEFMDEVFAQSKKFFDLPHSEKMKLLRDEKNRGYTPMLDEILDPENQVNGDYKEGYYIGVEVPADDPEANRPFYGPNQWPSKEVLPKWREVMEQYHREALIVAKSVARIIALALDLDVDFFDRPEMLGESIATLRLLHYEGKVSDPAKGVYGAGAHSDYGLITLLATDDVVGLQICKDKNAQPQLWEYVAPLKGGFIVNLGDMLERWSNGVFRSTLHRVVLDGRERYSIAYFVEPSHDCVVECLPTCKSESNPPKFPPITCSAYLSQRYKDTHADLKSYDDSKA

SEQ ID NO: 65199 - protein, 297 aa, Zea mays
  Clone ID: LIB4742-011-C10_FLI.pep
SSSGAGGRWTDRVLAWPPTAAMDDGDLDFSNPDTYLCPALGTDPPSSCSMDSYFDEILKDTEHHACTHTHTCNPPVHDLSHTHTCVHVHTKIVAASPGDDTADSPSENNTNGSGGNGSNAASKKRPSGNRAAVRKYREKKKAHTASLEEEVVHLRALNQQLVKKLQSHAALEAEVARLRCLLVDIRGRIEGEIGAFPYQRPPPAAKNVDLVSGVDQGGFLAGAAAQVTSSCDFRCNDQMYCSPGMQGAVGGQVLGQGACDVSSIQCVGSTRSASTKLPVCGGMDAVPAACLPNVQNK

SEQ ID NO: 65200 - protein, 275 aa, Zea mays
  Clone ID: LIB4742-011-H10_FLI.pep
LSDSLPVGDNPLPPICLVGLAPPVMAAEAGPISKVLIVIAMQKEATPLVHKFNLVEAPAHQSTFPKGAPWVWYHGSYKGLHIDLVLPGMDAVLGVDSVGTVPVAVVTSFSIQTLKPDLIINAGTAGGFKAKGASITDVFLASDVAFHDRRIPIPIFDMYGTGARKTFAAPNILKELNLKVGKLSTGDSLDMCPQDKELILRNDATIKDMEGAAVAYVADMFSTPAIFVKAVTDIVDGVKPTYEEFLQNLIAVTTALELAVTKVVDFISGKRISDL

SEQ ID NO: 65201 - protein, 415 aa, Zea mays
  Clone ID: LIB4742-012-G8_FLI.pep
SHRLLFLLQFLEGPADNSPSFFSAMSEDEANAAAAPAEGKNWRRKGKHDKPKPWDEDPNIDRWKIDKFDPAWNEGGMLEVSSFSTLFPQYREKYLQEAWPVVKGALKEYGISCELNLVEGSMTVSTTRKTRDPFAIIKARELIKLLSRSVPAPQAIKILDDEMNCDIIKIGGLVRNKERFVKRRERLLGPNLSTLKAIEILTGCYILVQGNTVAAMGNYRGRGLKQVRRIVEDCMKNVKHPVYHIKELLIKRELAKNPALANENWDRFLPKFKKKNVKQKKPQTKEKKPYTPFPPPQQPSKIDLELENGEYFMSDKKKSAKKWQEKLDKQSGRAEENKRKREAAFVPPKENTAGPSKSDKNASDNSEIADIAKSLKRKAKEFRKNEAQESVIAESYIASNDELRQKKKKKSTKSK

SEQ ID NO: 65202 - protein, 324 aa, Zea mays
  Clone ID: LIB4742-013-A12_FLI.pep
SSMETAERGTTVCVTGAGGFVASWLVKLLLSTGRYTVRGTVRHLGDGKNAHLKTLEDAGERLQLVKADMLDYGSVASAVAGCQGVFHVASPVPSGKSSNPEEDVIAPAVTGTLNVLKACYEAKAKRVVVVSSVAAVFNNPDWPKGEAFTEDSWSDGEYCRKNEEWYFLSKTLAEHEAFAYAAKTGLDIVTICPSLVIGPLLQPAVNTSIKVFLSYIKGDQEIVKDGPKNLVDVRDVAGALLLAYENLQASGRYLCSSPAIRVSDIVNILKTEYPTYTYPQKFVEAEGSNTYNTEKLRKLGWTSRPMEETLRDSIECYRALGILN

SEQ ID NO: 65203 - protein, 325 aa, Zea mays
  Clone ID: LIB4742-013-A4_FLI.pep
RQRAARLLGHAIELQQRRLQGGAAGMEDLYSIHPGISRHGAAAASEASGVAGGPGSPPPPPPPAADLTELVKAQIAGHPRYPSLLSAYIDCRKVGAPSEVATLLEEIGRERCAAASAGGEVVGMDPELDEFMETYCRLLERYKEELSRPLDEAASFLSNVRTQLSSLCGGAASLSDENEMVESSENEPCSGDTDATTDPGQEHSSRLADRELKEMLLKKYSGCLSRLRSEFLKKRKKGKLPKDARSALMDWWNTHYRWPYPTEEDKVRLAAMTGLDPKQINNWFINQRKRHWKPSEDMRFALMEGGVAGSSSGTTLYFDTGTIGP

SEQ ID NO: 65204 - protein, 237 aa, Zea mays
  Clone ID: LIB4742-016-G7_FLI.pep
ACGGSMAAAADTSEASAAGIALAEANINWERLDKTRFHVIGAILFTAQQGALHPTAVVKTRMQVAEGGLAHMSGFAVFRRILRSDGIPGIFRGFGTAAVGALPGRVLALTSLEISKEMTFKYCEHFDLSEASRIAIANGIAGLMSSICSCSYFVPLDVICQRLMVQGLPGMATYRGPFDVINKVVRTEGIRGLYRGFGITMLTQSPASALWWSAYGGAQHAIWRSLGYGNDSQTKPS

SEQ ID NO: 65205 - protein, 345 aa, Zea mays
  Clone ID: LIB4742-018-E3_FLI.pep
PSRPPPLLTPPLADTRTYIFFFFSENKLETRSLNTTHPGKHFLATHNNPAKRMQWGAENRTAAAAVHQSGVVHQGAVRGSGVPAGGDDVVGDEHPAGVGGQPEREGRLQRLAGVGVVAPERAPVVHHRGPRAAPGLHELDGAEVAVAVLELDEHLQVERVGSLVHPEGDVHAAVLARHPLVLDLEDAGGAKPVGHAGLRHGAHGGAAHVEVSRLCEADTAGALVGDDHGGRLAGACRVAVAFNLVAGAAALASLEQRRAAGGDHRREGALPDGGLVPARTAVTAVAVWGAVVRRAGRQPAAGAVGGGHCGDTGVVAAGRDPGRRLVGRLGLVRLGELAGASNGAH

SEQ ID NO: 65206 - protein, 520 aa, Zea mays
  Clone ID: LIB4742-020-E5_FLI.pep
PRPTQLLLLLAALLQLSEARGFIDPRSFILDTSLRRRGSAVLHIASRAAQPHLLSFVRGVRFDAGGGMAASARDSTDAAERVVDDHDGWASDAEMDVEMDVVEGDADRRDGGADGDDEYLLLTRIRDTSAAEARAGKDIQGIPWERIHIARQDYRKARLEQYKNYENFPQSGELMDKLCKQVEKSSKYYEFQHNTRSVKPSILHFQLRNLLWATSKHDVYFMSNSTVSHWSSLSHKLSEVLDFSGHVAPAEKYPGSLLEGFSGVQVSTLAVNEGLVVAGGFQGELIGKDVEGCSVKFCMRTTLSDNAITNAIDIHRSISGSLHITVSNNDCGVREYDMERYQLVNHYRYNWPVNHTSVSPDKKLLAVVGDDRDALLVDSRNGKVTSTLVGHLDYSFATAWHPDSRTFATGNQDKTCRIWDTRNLSTSLAVLRGNIGAIRCIRYSSDGRFLVFSEPADFVHVYSVAADYKKRQEIDFFGEVSGITLSPDDESLFIGVCDRVYASLLQYRMIRGFDYLDSYV

SEQ ID NO: 65207 - protein, 350 aa, Zea mays
  Clone ID: LIB4742-023-A8_FLI.pep
TRHKGLSFAASKFRCPPLPLSTTFFLVLHGHQLKQKKNKEDEKLILAFSRLDNEPVAGGDGDGHRRRGRQGARPLDRARRVAVLALIRHHQHGRVVGGPLHVLPRRASPHSAALVVAPWVRGALDGLLAVLPPRVLVRRDVGDLRADRRHSDGPLHAVLPSLGAVATAAVGGGLGVGAGAGLPLVAGQRRLPGGHEAPALGDAALAGRDRREEGRGGDGRGGRHGQVRLREVQRQALRRLRHAHGRTGDDRRRRRRRRLDGPAAEAGVPRAVEDGDDLAELGDSLAGDLAERLISGPVRRGGLRGQGRHQQLQVAEPGRRRLLDGELVVGAARGVAAHQVHGHGSRCFAW

SEQ ID NO: 65208 - protein, 263 aa, Zea mays
  Clone ID: LIB4742-023-G5_FLI.pep
TLEAGREDSLHCLLHRRSRNRIRPKPLASLQCLHGPPAEMRFTASPVVELPVSGAVLTFEQDNDSFEVGTSVWPSSLVLVKFVERCIRDPALPFADVLRFPGTRAVELGSGCGPAGLGLSRLGLTDLVLTDIAAVLPALRRNLRRNRVHLARAPRLAQLHWNCPAHLATLATPRRFDLVVAADVVYVQESVPHLIAAMDALADAERGVVLLGYQIRSPEAHQVFWETVPAVFPVIEKVAREHLDPEYAYEESDVFILRRSPRQ

SEQ ID NO: 65209 - protein, 366 aa, Zea mays
  Clone ID: LIB4742-024-D6_FLI.pep
LEAGRVTASTEFNFPAVFNFGDSNSDTGGRVAAGFESIFPPYGSSFFGGPAGRFCDGRLVIDFLMEAMDMPLLNAYLDSLGTPSFRTGVNFAQAGCSITPAKPTSVSPFSFGLQIKQFFAFKNKVTKLLSEGDMHSRYIPQQDYFSEGLYTFDIGQNDLAGEFYSRTEDQVIASIPTILLEFENGLKKLYDQGARKFWIHNTGPLGCLPQNIALFGKDPSQLDELHCVAKHNRAAKPFNLQLHALCTKLRAEFDGASITYVDIHTIKYSLIANYSRYGFEHATQACCGYGGPPLNYDGNVPCGHTVSLDGKMVTAKGCSDTTEFVNWDGIHYTEAANFHIASQILTGKYSDPPFVDKMPFVIKPRF

SEQ ID NO: 65210 - protein, 540 aa, Zea mays
  Clone ID: LIB4743-002-A11_FLI.pep
RGEDSMATASVTFKSREDHRKQLELEEARKAGLAPAEVDEDGNEINPHIPQYMSSAPWYLNAEKPSLKHQRKWESDPNYTKSWYDRGAKLFQANKYRKGACENCGAMTHDKKSCMERPRNVGAKWTNVNIAPDEKVESFELDYDGKRDRWNGYDPSTYTRVIADYEAREEARKKYLKEQQLKKLEEKDTEKDDENAGSEDDEEDGLRIDEAKVDESAQMDFAKVEKRVRTTGGGSTGTVRNLRIREDTAKYLLNLDVNSAYYDPKTRSMREDPLPDADPNDKFYVGDNQNRLSGQALEFKQLNIHAWEAFEKGQDIHMQAAPSQAELLYKSFKIKKEMLKSEHKDKIMEKYGNAASEDAIPRELLLGQSEKEIEYDRTGRIIKGQDVSLPKSKYEEDVFINNHTSVWGSWWKDHQWGYKCCKQTIKNSYCTGLAGIEAAEASADLMKANMARKEAAEDEPVQHEEKRLATWGTDVPQDLVLNEKKLQESLKKETARRKEEKDERKRKYNVKFNDEVTAEDMEAYRMKRIHHDDPMKDFLN

SEQ ID NO: 65211 - protein, 611 aa, Zea mays
  Clone ID: LIB4743-003-H1_FLI.pep
GIKQAAFPAPPAMAAPPPAPFLLLLLAVAAASFAGADDPYRYFTWTVTYGPISPLGTTQQGILINGQFPGPRIDCVTNDNLVVNVVNSLDEPFLLTWNGVKQRKNSWQDGVAGTNCGIPPGANYTYRFQAKDQIGTFFYFPSLALHRAAGGFGALNVYQRPAIPVPYPPPAGDFTLLVGDWYAAASPHADLRRALDDGGGGALPPPAALLINGAAASGAAPFVGAQGGTYLFRVSNIGLRASVNVRVQGHALRLVEVEGTHPVQSAYDSLDVHAGQSLAFLVTLDQAPLDYAVVASTRFAAAELTAVATLHYAGATARAPGPLPPAPPPGYGWSLGQARSFRWNLTASAARPNPQGSFHYGAIPTSRTLVLASSASLDGAGRRRCAVNAVSFVVPDTPLKLADRYDIAGVIDWDGLPARLDGAAGAAAVLRAGTPVLRLGLHEFVEVVFQNTEEELQSWHLDGYDFWVVGYGDGQWNETQRQTYNLVDAQARHTVQVYPNGWSAILVSLDNQGDVEPAVGDVGPAVPRAAALPQGVDAGAEPLQRVRHPRQRHPLREGRRPPTLTRRRSAAILLPAPFDQPSQRRRGESIFVAARINVKKNTITATGIRIS

SEQ ID NO: 65212 - protein, 526 aa, Zea mays
  Clone ID: LIB4743-004-A7_FLI.pep
EAGRASHRPFRCVHRLSVTSSPSPLLRCSNHQHSLPVSVCSSPPHHQPTSAVLRRSTDLPRAPMATAAVLAATLALFLGAAAATAATAATEADRIGRLPGQPPVNFSMYSGYVTVDAAAGRALFYWFIEAAGVPAESAPLVLWLNGGPGCSSVGYGASEELGAFRINADGRTLYLNPYPWNKVANMLFLDSPAGVGYSYSNSTSDLYTAGDNKTAHDSYNFLVNWLERFPQYKHRDFYITGESYAGHYVPQLSQLVYRNNKGIEKPILNFKGFMVGNAVIDDYHDFIGTFEYLWTHGLISDETYEKLRLACQIDVSEHASKECNKVFDIAEAEEGNIDAYSIYTPTCKKTSLHKRRLIRGRTPWLPRGYDPCTEKYSTKYYNLPEVQRALHANVTGIPYPWVTCSDPVYDFWKDSPRSMLPIYRELIAAGIRIWVFSGDADSVVPLTATRYSIDALFLPTITNWYPWYDDEEVGGWCQVYEGLTLVTVRGAGHEVPLHRPRQGLKLFEHFLRGEPMPRPVDSVQSF

SEQ ID NO: 65213 - protein, 574 aa, Zea mays
  Clone ID: LIB4743-004-C12_FLI.pep
PASEQTKSKKKKHKSKDLPATDPPSLAEAEEKTDGYLIKPQSLVPSLDTSTWPLLLKNYDRLNVRTGHYTPLPSGHSPLKRPLAEHLRYGVINLDKPSNPSSHEVVAWIKRILRAEKTGHSGTLDPKVTGNLIVCVDRATRLVKSQQGAGKEYVCVARFHAAVPDTARVARALEALTGAVFQRPPLISAVKRQLRVRTIYESKLLEHDPERHLAVFWISCEAGTYVRTLCVHLGLLLGVGAHMQELRRVRSGILGEQDNMVTMHDVMDAMWSLDNYKDESYLRRVVMPLEVLLTSYKRLVVKDSAVNAICYGAKLMIPGLLRFENDIETGEEVVLMTTKGEAIAIGIAEMTTAVMATCDHGAVAKIKRVVMDRDTYPRKWGLGPVALKKKKMVAEGLLDKHGKPNEKTPAEWLRNVVLPTGGDVSIASIAAAPEPEKVKVEQDAVAGEKVKEKKKKRQKDENNGDDASVPAKKIKVEEDAEVVEVEGDKSEKKKKKKKEKVESESADAAEAKEVEKADDAAGETGSEKKKKKKSKEGSAAAADAESAEHVDGAGVEKSKKKREKKKESVETEQA

SEQ ID NO: 65214 - protein, 576 aa, Zea mays
  Clone ID: LIB4743-005-F3_FLI.pep
SLPQTGHPLRNLPKTQCENQREADDLDTLPLRLRDDGADVADADDEKRDRLEEEVDEEMVPPVRKIVPAAGEEEGCHPELRDVQPLPYPHELLPEPRFVSRFHLHGAAELRRHHPLVGPAGLQQADQRGLCSVQGHDVLEGDPEEKQVERPGSADRVEEGDGRGDVDAAPLGYADLGDEDGCRDDDAVEREGDDVRDDLAYQEEVVDDVDLLPDRHFLVRHNLHEHLPEQVRRAARPPVLLEPEGLEGTRQLAFHLDVTEVDELPALEAGPDGQIHVLHRGPVLPPPSLVHRGDAPHAGGAVESKEGADGGAHFLLHGEVVVQGHLLHPRHQALVRVHESPARLDEGDLRVVDEVGDGALEVVRVGLEVGVEDGHVLAVAHVRVPHPRPQRAGLVPLAVLPDLVRYVDPLPSPPLALHPHHLLNHFVRGVVEHLHHQPVRRPRQPAHGADGQLVHLALVEHGDLDEHDGERGGAQLRVVLGEGVAAVAAVGAEAEQAHPGDDDGHVHALKEQKHRHGEAHGHRQPQQRHDHRRAHLRPRLRQRVHRSLSLWLPLRRRRATRGGGGGLGRLPGLGSV

SEQ ID NO: 65215 - protein, 478 aa, Zea mays
  Clone ID: LIB4743-006-D7_FLI.pep
KWFTHPLLSPSPSRPPPPRHRHARERRCLLLARLHASNKHHMALVQFNGALVPQLGEKPRLLSSSPAIAKATYSDARFLTPKTGSRGRGKHLLSPSYSLHSQTSSEQLNHVPSSRFRQKRGSRFIVRAEADFYSVLGVSRNASKSEIKSAYRKLARSYHPDVNKDPGAEQKFKDISNAYEVLSDDEKRSIYDKYGEAGLKGAGMGTGDYSNPFDLFESLFEGFGGMGGMGGGRAARNRPMQGDDESYNLVLNFKEAVFGVEKEIEITRLEGCNTCDGSGAKPGTKATTCKTCGGQGQVVSSTRTPLGIFQQVSTCNTCGGTGEFSTPCNTCGGDGRVRRTKRISLKVPAGVDSGSRLRVRSEGNAGRRGGPPGDLYVFIDVLSDPVLKRDGTNILYTCKVSYIDAILGTTVKVPTVDGTVDLKIPSGTQPGTTLVMSKKGVPLLGKSNARGDQLVRVQVEIPKRLSSDEKKLIEELQT

SEQ ID NO: 65216 - protein, 638 aa, Zea mays
  Clone ID: LIB4743-006-F2_FLI.pep
HINLKILIGFTLVIRFRHNQAVVAPNGIYGRRRELPCLELGHLHRAAAIVEHEHVAVARLRVLRVHSSRDAHPPVSSEALHHRVINQGSQIDGLVLLNVDVHESSVWRLVHACPRGRPCQVSAHEKLVPAMVPERAEEDSGVLAQVAGGHHDEPERPDAAGHRGALLPAQLLRVQQPVGVQCLGPRQARDLERDLHVRLRARDADDLVHASGGQRRAAAQDDALPPQRFDLLHRPLPQLLPVLVQPQLPRERLNAGPALGDVVGLAVGLVGPRPQHAPAPARVEEGLGRVHVAVVQPPPAAHVVPALGLRRHERVRRVVVPPHHVVILERVHHAELQHVPHPGAARRRVEPLAVAIVTLLPHREQVRALHHTRGARGVQRRGGGGALPAEEVRAPVHERGRHAADLGGHRDAPQPVAAEPRRRRVPELVARDVGGERDDGVVAGLVPPAKERVRRVPGERHVLHLLPVGVDARVEDGRGAAGEDGGGARPAAVGVEGRRRVQRRVQSGPVDEVAGDGVAPGEVANAPERAVRVVLVEEMVHAVVVHRPIRIILPVLGRLEVVGGPACTAAGVARGRRKTRSGRGRRRKVEAQVEGGGDGAGGQREPRHGRERRRGVARLALPLVALFQLVPLLTGRPR

SEQ ID NO: 65217 - protein, 483 aa, Zea mays
  Clone ID: LIB4743-008-B5_FLI.pep
IGAERMASRRGSSSCALCEGSNLPSCCASCVNARLVEYHTRLRMMRSLRDSLHGRIAARPEAKRKTDEQRIWRTSEEQDIMELRNRLTELKRKTAVDKTEVEQASSDLKAKTVPLNLALATLKKRRADAVAMHTNAMKVAQMNLMATTSNCMKMQSKSVKQLCRLFPMRRVIKEGEKKDGYNGPYDSICGVRLPRGLDPHSISSEELSASLGHMLHFINIAVRILSAPALHVSGCRGSCSNIWQRSSYWSTRQSQSKVYPLFIPRKNVCTGGEETSLTESGSSNFGVDSVDSVKKPSFDPKRSNSFNFSGASSHSMERHQYLQRGISLLKTSVTAITTYYYNSLGLDVPSNLSTFEAFAKLLHMLSSSKALRTAFELDIASRSEKQAQQLNRSIWKASSAISSDSSFMDSMHTTIMPSTLDNLLMNSDESLYTGKLVKHGGVPDSIFDSWDMVEREVLPPPPSRVEDVAQWEWAMYAGSTKKK

SEQ ID NO: 65218 - protein, 670 aa, Zea mays
  Clone ID: LIB4743-008-G7_FLI.pep
FARPHRPSLLTADSSSSLRRGDKARSHRAMADGASSSGGAQNGGESVVIDYGRRRTTCGYCRSSGPTSISHGMWANSLKADDYQALLDRGWRRSGCFLYKPEMERTCCPSYTIRLKANDFICSKEQARVLKKIQRFLDGELDPQIGSPQCKASPTKRSLGEPLNSPTSKVSKVSAEEFQKGTSPNILKEDDIICCLANKINEATATCFRGGVFGSVQLPKAVVKTVKPQVKRKVGEAVQEKKVGEAVQALVYTCNISFQIVAAVRRALPKENGATQTEVPADLSPNSVAEKLSVAMERLGELAGFEVKACNGHLNFYLASNQAMQNHTSVVVPVQASDKSSGSKPSSVNQTNAKYPLKRKNLEIRLSTSHFDPEEFALYRRYQTKVHKEKAVTESSYKRFLVDTPILFVPPKTGDNTVPPCGFGSFHQQYRIDGKLVAVGVVDILPKCLSSKYLFWDPDLPFLSLGKYTAPKEIDWVKTTQEHCPSLQYYYLGYYIHSCNKMRYKAAYRPSELLCPLRYEWVRYDLAKPLLDASQYSVLSDYATMQGEVPQPQICGPSDDSSAKVDHHESPSDEDEDDDDEDFDNYESDMMVDEETIHSEKPDTAEGSSEINDINNITLDLKGSRVKFKGLQQVFGPIERRHLNALERQLSRYVKVVGKELSDRMVYCLS

SEQ ID NO: 65219 - protein, 554 aa, Zea mays
  Clone ID: LIB4743-008-H10_FLI.pep
VCQVREMGSLSSMAEKAPGAALPESSCAYLLQELKMIWDEVGQEQSERERILEELEQECQEVYRRKVNSANMSRIQLHQALAESEAEFTNLLLSLGERSFPARPEKMAGTLKEQLNSITPALQEMQMRKDARVKQFVEVQTETHRIASEIAGRLAGGAVAVNEEDLSLKKLEEFQSELRRLKREKSDRLCKVEEYKVLIHNFAKVMGMDPSEILASVHPRLLDGPNEQQTKNISDGILSKLNMTVHQLKEEKSNRREKLQNLVKALTNLWNTLDTHMEERQPYGQIKVLAMTSVNGMLGPGSLTLETIQQVETEVQRLNQLKASKMEELFVKKRAEVDEICKKSHMGMPYQTEMDKIMNLIMSGDVVHDDLLKTMDEYIYRAKEEATSRKDIMDKDDRRYSVSRGAHKHLKRAERARIIVSKIPGLVEQLMVKTQFWEQERNKIFYYDELPLLAMLKDYMFTLKEKEEEKYRQRENKKIQTLLVKRHENSIMLRPNTSFSRPSSRGFNTSPGSTSIWSSQVSAKVQLPDSENSPAEKDMRAKIIRNRGMQGIGK

SEQ ID NO: 65220 - protein, 620 aa, Zea mays
  Clone ID: LIB4743-011-G4_FLI.pep
HRGKGWCGRGEQELGDFCEGRLMEERRLDTPAMRRISEWILSLEFPSDITIQVGEATFNLHKLPLASRCGYIREQVSGINGSRVTHIDITGLPGGAAAFELVTKFCYGENFELTEDNVAMLRCAAEHLEMTDDDSRGGNLAGRTEAYLEAVALMSLAGAVTVLRRSEDLLPVSEEVDLVGRCVDAIAYFTCNDSQFSMSNGNGMDVSSSKVIIDDWLADELTSLRIDTFQRVVIAMKARGFKGIALGTLIMLYAQKSLRMLDTHGREKQKMEPRQEHEKRVVLETIVTLLPKERNSMSVSFLSMLLRAALCLDTTLACRLDLEKRMAAQLGQAVLDDLLIPSFLPDAGNTFDVDAVQRILVGYLEHEAEADRLDYNTDDDFTSTASPPNDVGMVGKLMESYLAEIASDVDLPVDKFTGLAEMIPERARFNDDGMYRSIDIYLKAHPYLSEAERKTVCRVMDCQKLSREACAHAAQNNRLPVQTVVQVLHHEQRRLREAPTSSFYGGESPTPAPSLQGRHGRSVPDEMSQLQRENEELKMELLRLKMNLRDPSAPPQPSGAPPSGRRPLPKKAAGGSGGFINNVSKKLGRLNPFLRPDAVGGGAKVRTKPSRTKDRRHSIG

SEQ ID NO: 65221 - protein, 527 aa, Zea mays
  Clone ID: LIB4743-011-G9_FLI.pep
MAMAMMAMRRAVALGARHIPAAAASSFRVVSLRHMSADAGAAMEKIRAAGLLRTQGLIAGQWVDAYDGKTIEVQNPATGEVLANVSCMGSRETSDAIASAHSTFYSWSKFTASERSKALRKWYDLIISHKEELALLMTLEQGKPMKEALGEVNYGASFIEYFAEEAKRIYGDIIPPTLSDRRLLVLKQPVGVVGAITPWNFPLAMITRKVGPALACGCTVVVKPSEFTPLTALAAADLALQAGIPAGALNVVMGNAAEIGDALLQSTQVRKITFTGSTAVGKKLMAGSANTVKKVSLELGGNAPCIVFDDADIDVAVKGSLAAKFRNSGQTCVCANRILVQEGIYEKFAKAFIQAVQSLKVGNGLEESTSQGPLINEAAVQKVEKFINDATSKGANVMLGGKRHSLGMSFYEPTVVGNVSNDMLLFREEVFGPVAPLIPFKTEEEAVHMANDTNAGLAAYIFTKSIPRSWRVSESLEYGLVGVNEGIISTEVAPFGGVKQSGLGREGSKYGIDEYLELKYICMGNLG

SEQ ID NO: 65222 - protein, 607 aa, Zea mays
  Clone ID: LIB4743-011-H7_FLI.pep
LSCCDQPAIYNNNRPLDLSSEIDLRAKGREMGAAPPSSWLIAFILFFSTLVALPQSSHAGGTTRHYTFNVTMKKVTRLCTTRAIPTVNGQFPGPKIVTREGDRVVVKVLNNVKDNVTIHWHGVRQLRTGWSDGPAYVTQCPIQTGQSFVYNFTITGQRGTLFWHAHVSWMRATLYGAIVILPKRGVPYPLPVKPYKDVPVIFGEWFNADPEAIVAQALQTGAGPNVSDAFTINGLPGPLYNCSSKDTFKLKVLPGKWYLLRLINAALNDELFFSIANHTLTVVDVDAAYVKPFHTDIVLITPGQTTNVLLRAKPDAGCPAATHLMLARPYGTGQPGTFDNTTVAAVLEYAPPGHIRSLPLFRPSLPALNDTAFAANYSARLRSLATPDYPANVPRAVDRSFFFAVGLGTNPCPVNQTCQGPNGTMFTASMNNVSFNMPTTALLQAHYGSVAGVYTPDFPVAPLDPFNYTGTPPNNTNVSHGTKVVVLDYNTSVEVVLQATSILGAESHPLHLHGFDFFVVGQGFGNYDSSKDPPKFNLVDPVQRNTVGVPAGGWVAIRFFADNPGVWFMHCHLEVHTSWGLKMAWVVNDGPLPEQKLMPPPADLPKC

SEQ ID NO: 65223 - protein, 169 aa, Zea mays
  Clone ID: LIB4743-012-G8_FLI.pep
SSRRSKKGAHASRQARREPIDRELARDGEVFQDDGGGSSAGLGPGRVDRRGEEHQDHDDGEEGRRGGAAADLPALRPPRRRRVPGVRRPPRRQHSWQQHSRVQHARQRQQPTRVQLARQRQHAPLRRRLPGLQRLRRHARVPHRRPRPRARQQALNANKRGSRVVLLLL

SEQ ID NO: 65224 - protein, 588 aa, Zea mays
  Clone ID: LIB4743-014-E2_FLI.pep
PIREEGKLVGDFVMAAAKSGVDVETRDGGGGSFSEERFVDKLNKLNNTTASIQTLSHWCIFHRKRARRIVDTWEKHFSTATNDKKISFLFLSNDILQNSKRKGGDYVHELWRVLPRLLKHFYENGGEEAKKLVARLIGIWDDRKVFGTRIESLKDGIFGDNPPIFDHSGNTNNSNPSSNPLNSKVGRKDSSTVLKKLAVDGMPEKIVTAYQSVLDQHFDEDTALNKCNSTVSVLEKLKKDIDDASSEGDPPASTMISDLQEQETILKHCIAQLGSVDAARISLINQLKEALTEQESKSEVLRSQLQVARAEAERAIQLKQRFGGAVVANGTGSSSSPLLMSSPRLQSLNPAPSLAPPIGAAGDEPKRTAAAMADKLASLSAPVQVLSSIFSSFVATHGASLSSMNSGSPPRDQLSGAPPGFQVEKRPRLERTVLASDMGAPPFSVQAPRLQQPVGAMPTQAAAQMNQAPGPFAPPPPPPPLPPLLPPLLQQFGQSAGGMMGMGPFGMMAGSMPPPPPMSSIMPAGFPAPSGPPPPPLPPAQTQPQQQQQQSPPQPPAPQQSAGFFQTSAGMGYFPAVQVQQFPSAQRQ

SEQ ID NO: 65225 - protein, 562 aa, Zea mays
  Clone ID: LIB4743-015-H8_FLI.pep
KAGWWSGSASLPFVPAQAIRPSPSTGLICLALLAQCLDSCTWCFPSPTSHHQPRSNPHEICDAPASRHEAFLGIATRRPGRKKLFLEPFCLASPSLLSRRHSRRCLRATTIMAAATSRGPSSVAICALAVLHAMAALCDSATAAAATCAGLAPAKHRPEVISIADFGGVGDGRTLNTWAFRKAVYRIQHQRRRGGTTLHVPAGTWLAGSFNLTSHMTLFLARGAVLKATQDTRRWPLVEPLPSYGRGRELPGPRYASFIHGDGLRDVVITGDRGVIDGQGEVWWNMWRRRTLEHTRPNLVEFMHSTGIHISNIVLKNSPFWNIHPVYCDNVVVTNMMILAPRDSPNTDGVDPDSSSNVCIEDSYISTGDDLVAIKSGWDEYGIAYGRPSAGVTVRRVRGSSPFSGIAIGSEASGGVRDVLVEDCAIFDSGYGIHIKTNVGRGGYIRNVTVDGVRLTGVRSGVRIAGDVGDHPDAHFSQLAVPTVDAVRISNVWGVNVQQPGSLEGIRASPFTRICLSNVKLFGWRSDAAWKCRDVRGAALGVQPSPCAELATSFASARSSCS

SEQ ID NO: 65226 - protein, 476 aa, Zea mays
  Clone ID: LIB4743-016-C6_FLI.pep
KNLIVVIITLAPRNAPLKPHLRAQTKPKRAHTHREPRTPRHTISWRRGCGRVAKPVRGAPLAVRHGCAAMWQTRSLLLLVAVVVAAALPDGAVAAAAGRCTTSTPVKTYDKCIALPTQGATLAWTYDARNATLDAAFTGSFISPSGWVAWGLNADAPAMTGARVLAAFADPSTGALLALPFLLSPDVKLQASPLVSRPLDIPLLASSASLVSPARTVRDGARVTVAATIRLSPNRTRVHFVWNRGLYVQGYSPTIHPTDASDLASHATVDILTTATEASPIASAALQWLHGSLNALSWGLLLPVGAAVARYLRPCASTGPAWFYAHAAMQATGYTLGAAGFALGLVMGSASPGVTYKLHRGLGIAAATAGSLQTLAMFFRPKTTNRYRKYWKSYHHLVGYGCVVVGVVNVFQGFEVMGLGASYWKLGYCLALATLMGACVALEVNAWVVFCRRQQEEKLMRREVEDVVVKDRAAAF

SEQ ID NO: 65227 - protein, 423 aa, Zea mays
  Clone ID: LIB4744-001-H5_FLI.pep
RGRPGKNILVRPGSRLQVCNPPSSREVSHHRAVPGGWRRGGLLLSTPPTRGLTRGSTRWPAGAMAEAEREQRPLPEVEQSVTSIPEDHEATCWGCGLRLVFASYSPIYKCGWCGAVTQSNNQTARKPDSIWFSHWRRLRDRLFVAVLVLFMLFVICGGVWAVYPVVFSVSKFCGVFHCTVAAVLAVCTVTSYCLASLKCAGAPTDIRWGSYPVVGKGDLENYTFCTYCSKPKPPRAHHCRSCKMCVVDMDHHCPFIGNCVGASNHQVFVVFLISVVISCSYVAGMTIYASYQIWPSIEFPDLASSSRHSMSSWKTVLEMITTVAGSAFFLSARGLVLVYLAFASSSVNAGIAVLLCQQLSYIYEGNTYLSRLSSPPNALQHGERGLQNIVRFFGCPYPVSRAVLRLRYSNAAKLQDDSGSKLL

SEQ ID NO: 65228 - protein, 212 aa, Zea mays
  Clone ID: LIB4744-002-E12_FLI.pep
DYCCDYCVRERETEEEKESMAATLARRAGRSAATTLWGAARGFASVGSDIVSAAPGVSLQKARSWDEGVATKFSTTPLKDIFYGKKVVIFGLPGAYTGVCSQAHVPSYKKNIDKLKAKGIDSVICVAVNDPYVLDGWAKKLDAKDTIEFYGDFDGSFHKSLDLEIDLSAALLGRRSHRWSAFVDDGKIKSFNVEEAPSDFKVSGAEVILDQI

SEQ ID NO: 65229 - protein, 358 aa, Zea mays
  Clone ID: LIB4744-005-H3_FLI.pep
IMAPLSPTPASAPVSSSPRSLVPDASAEPMRRASPPQELPVARGEIQAALAPANASSAGAHGGGGSFTALLGLPTSQAMELLLPRTTPPALATAPAPTFPSDPHLVDRAARLSTFAPPSPSPSSTSPAPPLPAAANAGKRKADPVDRAPKGKAAKKGKTAEEKLAGGDGDDEKPAYVHVRARRGQATDSHSLAERARREKINARMELLKELVPGCSKVSGTALVLDEIINHVQSLQRQVEYLSMRLAAVNPRVDFGGLDSFLTTECGRIAGFNCKNGIDLEQVTWPEMGVHGARQLMQLQQQFWHGDLAHPHQVASQWEKRGDGHPPVFSNSSPSLFGYDLTSSGAQQTPASKLKTEL

SEQ ID NO: 65230 - protein, 158 aa, Zea mays
  Clone ID: LIB4744-007-E1_FLI.pep
YRKITFIYTPPSFVAMALAAIYNLFIINKSGGLIYYKDYGSAGRMDTNDSLRLASLWHSMHAISQQLSPTTGCTGIDLLQAHNFDLHCFQSLTGTKFFVVCETGAPNMEMLLKAIYELYTDFVLKNPFYEMEMPIRCELFDHNLAQVIQKDRVALLGR

SEQ ID NO: 65231 - protein, 200 aa, Zea mays
  Clone ID: LIB4744-009-H5_FLI.pep
RGRPGKPVSHHKRARDPGRKKREKTSLSSRRPRSPTSRLLPACLPACKKEFVMASKRILKELKDLQKDPPTSCSAGPAGEDMFHWQATIMGPPDSPYAGGVFLVNIHFPPDYPFKPPKVSFKTKVFHPNINSNGSICLDILKEQWSPALTISKVLLSICSLLTDPNPDDPLVPEIAHMYKTDRPKYESTARSWTQKYAMG

SEQ ID NO: 65232 - protein, 303 aa, Zea mays
  Clone ID: LIB4744-011-B2_FLI.pep
TPFARCECGERGARRTRKSPAHGTRRRRHHITEASPSSRIFPAVGPVSLQLPETMSGGLDMSLDDLIKQSKSRPKDNPASLSGPARRAPHPARAAPYPPAAPKARAAADSPYGVYSKHIAAIAPPPLAKARSLETGTKLHISNLDSGVTIEDVQELFSEVGELKRYSMNYDKDGRSKGTVEVVFARKVDALDAIKRYNGVLLDGKPMNLELIGNNVEPPPMPPVIHSRPLQNYNDIHSSMPQSQRGGQRRAPQGNGRGGRSSQSSGGRGQGKGRGQDRNRTTISAADLDAELDKYHAAAVKEE

SEQ ID NO: 65233 - protein, 268 aa, Zea mays
  Clone ID: LIB4744-011-F5_FLI.pep
RGRPGYHTPRRRHEQRPPRGRHDRQPAEGRYDRRVRTAYRRATAAPRCGRVRRRRRAKASSAAQSRFRPALPLALSCLTVRDSDSALVSVLHSSDSSPRTGPMESDAEEEAAATPAAAATPGAGRLKGNPELTVDADMREMAKTAAWSVSSCKAGNGVAALRDDNLDTYWQSDGAQPHLVNIQFQKKVQLQLVVLYVDFKLDESYTPSKISIRAGDGFHNLKEIRTVELAKPVGWVHISLSGIDPRNPVPHQPFHFTSREFITYSTIR

SEQ ID NO: 65234 - protein, 250 aa, Zea mays
  Clone ID: LIB4744-012-C2_FLI.pep
PSRPAGLLPLHLPLASRNETQLHQQLLPADPTTEAFFFFLFIAAARGSRFSASPNDGHVRGLRPSSSSQLRRLPDRQSPAKAADGAEEERDQGGVRPLRHRRLRHHRCKGAERRDESPWIRDDTGANRADDRGGGQGRQRHHRLRRVRAHDDGQDGRAGRPGRAPQGVPHHRPGRQRKDLGHGHPAAGHRDRRALHAGRGPGDDRGRRRGRRRRDRPGGVHEDDEADRLWLWVLVVTDKPIPTYIDTYHR

SEQ ID NO: 65235 - protein, 211 aa, Zea mays
  Clone ID: LIB4744-014-H5_FLI.pep
PPAPAPAPAIVHMAAMPPAFTGNLKKALAGLRRINLDGLRWRVFDAKGQVLGRLASQIAVVLQGKDKPTYAPHVENGDMCIVLNAQDISVTGRKMTDKIYYWHTGYVGHLKERRLKDQMEKDPTEVIRKAVLRMLPRNKLRDDRDRKLRIFSGIEHPFHDRPLEAFVMPPRQVREMRPRARRAMLRAQKKEHSNRAKEEEDAKNATAEVTA

SEQ ID NO: 65236 - protein, 372 aa, Zea mays; identical to SEQ ID NO: 38470
  Clone ID: LIB4744-015-G5_FLI.pep

SEQ ID NO: 65237 - protein, 205 aa, Zea mays
  Clone ID: LIB4744-018-C1_FLI.pep
LEAGREIQIQIQQPAWAVAWRACSCSPARLAALIAFSFPQLLILSIKTEQTPHPILAPGVSLLQPPFLIRAANPTPSPSSSAEMDSSSLKSAQLLELMRQHLATDAGKEVTKKVGLVYQLNIAPKKIGVDEEIFVVDLKKGEVTKGPYQGKPDATFSFTDNDFLGIATGKTNPQIAFIRGAIKIKGSISAAQKFTPDIFPKPAKL

SEQ ID NO: 65238 - protein, 310 aa, Zea mays
  Clone ID: LIB4744-019-A12_FLI.pep
RGRPGRHRRASRASHTNATCSHGTEARATDGGGRRRPAGARLVGRRAELRVRVGPVLQPVRVLRDGRGLLRRRVPVGPLRRAGDQQRVRGQHRDAGLLRRAPRAGRRLVRGQRLLHPRRLPRRRRLLPGVRPHRHRRRLQARDRRLLRQRQPRDHKVLLHQRDRRAEQELLRPEQHAVAVPGGEGVLRPRPAADLLELQLRARGAEHRLRRAGRPRRGGAQRRARVPLRALVLDEQRARGHRLRPGLRRHHPGHQRRARVRRQEPQLRQQPRRLLQAVLPGFRRRPGQQPHLLNDLSLIGLLSCTYTCVG

SEQ ID NO: 65239 - protein, 283 aa, Zea mays
  Clone ID: LIB4744-020-B12_FLI.pep
GRQERPLAMACRGFFECVLKLLNLVVMAVGLAMVGYGAFLLVTWLQVAPLPPPSSSPDAVPPSGELVQLGRPLLLFVDASLSDGTAERLSSAWFIFAFIGVGAILFVTSIFGCAGARNGCCLSIYSFLIILFILVELAAGGFIFFNHSWKEVIPVDKTGNFDMMYSFLKENWRIAKWVALGAVVFEALLFTVAIIVQSGNQTDYDSDDEYIGARSGIQQPLVNQQAAAAAADPRVPNLDYRPIRNDAWSQRMREKYGVDSFDPNRFQPATISPGEQRNRCTIL

SEQ ID NO: 65240 - protein, 239 aa, Zea mays
  Clone ID: LIB4744-023-A6_FLI.pep
SRPAGASSPIPFPRLAERSAPSSAPIRTPVSPSVVGAGERVEMEETAAAAPAEKASSYRYWVREATGDAAPLPVPRKLDPAANGNGNPPPLGSVWNQAGTWEEKNLNSWANSRIKDLLGSLGSLKFPTGNASVDEVSKCSGDAFQVTVRNKKRVGYNYELSLRFKGEWLVKEENKKIKGHLDIPEFSFGEIDDLEVQVRFSDDKGLASDDKARICKDLKSFMAPIQEKMRVFEEELKGR

SEQ ID NO: 65241 - protein, 434 aa, Zea mays
  Clone ID: LIB4744-023-G4_FLI.pep
RGRPGVSMAAADSSPLHIVIFPWLAFGHLIPGLEFAERLAEHGQRVSFVSTQGILRRLRPVAPALASLIDLVALPFPRIDGLPDGAEATSDLPPGTAELHVQAMDRLAPAFSAFLGAACADGSDRKVDWVLLDNFHASMADVASEHKVPCILNMPYSAATTEDFGIPDPSVLPMFRPFVETFKRCKVIAARSSFELEPESLPLMTKILGKPVIPVGLLPPAPAGGNTQRDDSAALSWLDEQPSKSVVYVAFGSEYPMTVKQLHEIARGLELAGTRFLWALKRPSVAHPDEDLLPPGFEERTRGRGSVVTGWVPQTSILGHGAVAAFMMHCGWGSTIEALQYGHPLVMMPVLVDHLSTARVMEQRKAGVKVRKEKSDEAFLGDNIATAIRAVMCEEESKRIFVANAKRMQEIVADDECHKRYIDEFVQSLRTYKN

SEQ ID NO: 65242 - protein, 225 aa, Zea mays
  Clone ID: LIB4744-024-B3_FLI.pep
QSHDDLLAGGASLPGGVRDGGDRQRRVSPRDPGGRRRSPGRREEGDLQAPPDLPLRREDVQDRLPPGVRCGRDHVRRQHPHQHRPPPRPALRALLPGAHPRRAARPVPLRHQAGLHPVRWPPPLWGLLPIRRLGQAPRFPALHERPIWQLWRVEGRRCWGQQLGRAVHAQAGLQGRLDPRGGRRSRAQGPQQDHGLHQLDCREAGAGRGISAARHRGGTVPGVLS

SEQ ID NO: 65243 - protein, 261 aa, Zea mays
  Clone ID: LIB4744-024-C2_FLI.pep
RGRPGCVLSPCSLSLSLSLSLSLSLSLSCLQISVFDLMCTAMDDAVQVAEHYDSVVATDVSAEQLRHATPHPKVRYLHTRDATPGEEDLVAMLGCGEASVDLITVAQAVHWFDLPAFYGAARRVLRRPGGVIAVWGYNYRVSPVEDMMARFFSTTLPYWDPRARYCTDGYRDLPFPFEDIGLGKEGEPASLDVEHEMSFEGLIGMLRSWSAVTTAKQQGVDLLGARVVKELEEGWGGAELVRKVTYKAFLLAGTPGPMADE

SEQ ID NO: 65244 - protein, 270 aa, Zea mays
  Clone ID: LIB4744-024-D1_FLI.pep
AERRASKQAMWRRALAMVLFMAGAALLAGAAGASAQQGVWSIITRPMFQSMLSHRGDSGCQGAFYTYDAFIEAASKFPGFGTTGDEQTRRRELAAFFGQTSHETTGGWATAPDGPFAWGYCRVKEQKQTDPPYYGRGPIQLTHKYNYRLAGQALNLNLVGDPDLVARDPVVAFKTAIWFWMTPQSPKPSCHAVMTGDWRPSATDRAAGRLPGYGLTTNIINGGLECGEDRSTDGAKAAKDRVGYYKRYCGMLRVGYGDNMACRNQKPYGG

SEQ ID NO: 65245 - protein, 715 aa, Zea mays
  Clone ID: LIB4745-009-A8_FLI.pep
LEAGREPPFSTPSEQAPQMKMLRRLMLSLSFILLLPSYLAYPLCTDARAPVLLNTTLKFCASPSRNSRGCCDATADAALSKQFDAMAISDAACAAVVKSILCAKCSPYSADLFGAGPKIRTVPSLCNSTSSANSAESKETTTTTTQDYCKLVWDTCKDVSIASSPFQPPLQGTAPPPTSPSKLTDAWQSQSDFCGSFGGRSSVCLSGDTVSFNAAGPSPSPRPEPRGVCLERIDNGSYLSLAPHPDGSSRIFLGSQAGKIWLATVPEQGSGGALQFEGAGPFVDLTDQVHFDSALGLMGMAFHPGFATNGRFFASYNCDRTKSPSCTGRCSCNSDVGCDPSKLGTDSGAQPCQYQVVVSEYSARGSAAANVSQATSAADPSEVRRIFAMGLPYTSGHGGQVLFGPADGYLYLMLGDGGKGDPFNFAQNKKSLLGKIVRLDVDSTPSSSGGDLGNTSLWGNYSIPKDNPYADDSELEPEIWALGLRNPWRCSFDSERPSYFYCGDVGQDAYEEVDLISKGGNYGWRALEGPLVYHPQWAPGGNTSLSSIDAIPPIMGYSHSDVNKNIGSASIMGGYVYRGSADPCLYGRYLYADLYASAMWTGAEAPESGGNYTSALIPFSCSKESPIPCDAAAGSPLPSLGYVYSFGEDNSKDMYVLASKGVYRVVRPSLCSYTCPAERQETSPPAAPSSNKASMAEMGMGMLLVSVIVVWVLVT

SEQ ID NO: 65246 - protein, 200 aa, Zea mays
  Clone ID: LIB4745-009-F3_FLI.pep
LGRADAEPQQTRARTAYEGAKLPEVEEEENMQGGGGVDQPPMQMVLRVRHPSSLGGSGADEDDGEGSSRSALSVFKAKEEQIERRKMEVREKVFAHLGRVEEESKRLAFIRQELEGMADPTRKEVESIRKRIDTVNRQLKPLSKSCVKKEKEYKEVLEAYNEKSKEKALLVNRLIELVSESERMRMKKLEELNKTVDSLY

SEQ ID NO: 65247 - protein, 527 aa, Zea mays
  Clone ID: LIB4745-012-A12_FLI.pep
RDRRPPPEEHPKQEQRQPPTPAPAIPTMRRPTLSLALGLGLGLSLVALFAARGAHASIHEYGGGDFAPRANSFFFHGGSEGLYASDHSSNSSASFIRFDTVVFRRTLESASRHEEMQQKTGLVEAIIVEIQDRGKIGGSYLHSDAICCTPELDKEKSCRVGEVIIRPNPENPDWPKRIQTFFDGKNEETTMVTQIVSINKTGMYYLYFMFCDPQLKGLKITGRTVWRNPQGYLPGKMAPMMTFYGFMSLAYLVLGLLWFIQFVRCWKDILQLHYHITAVIALGMCEMAFWYFEYANFNSTGTRPMGITLWAVTFTAVKKTVSRLLLLVVSMGYGVVLPTLGGITSRVAALGFIYFVASEALELVENLGNINDFSGKTRLFLVLPVAVLDATFIIWIFSSLSRTLEKLQLRRSMAKLELYRKFTNSLAVSVLISIAWIGYELYFNATDPLSELWQRAWIIPSFWNVLSYALLGIICILWSPSRNPTGFAYSEDAGEGADEEGLSLVGSAVKGTGDMVNMHIFPEDKRA

SEQ ID NO: 65248 - protein, 362 aa, Zea mays
  Clone ID: LIB4745-013-A5_FLI.pep
FSRSALLDFCHRFRAHESRVTTQIPFPLRRTSREAVGAGREGEALAPSLPRTPMDPPRAVAVLLILLPVLAPVASGVPFVVLHGIGDECGNDGLSSFTKMLGEWSGSKGYCIEIGRGAWDSWLMPLQEQANTVCKKVKKMKELSEGYNIVGLSQGNLIGRAVIEYCDCGPPVKNFISIGGPHAGTASVPLCGSGFLCILIDDLIKSEIYSDYVQAHLAPSGYLKIPTDMEDYLKGCKFLPKLNNEIPSARNTTYKERFSSLENLVLIMFEDDAVLIPRETAWFGYYPDGAFSPVLPPQETKLYTEDWIGLKTLDEAGRVKFVSVPGGHLRITRSDMKKYIVPYLTPEASSKKSIHIHRMLSL

SEQ ID NO: 65249 - protein, 623 aa, Zea mays
  Clone ID: LIB4745-015-E11_FLI.pep
EEEMAGKGDGPAIGIDLGTTYSCVGVWQHDRVEIIANDQGNRTTPSYVAFTDSERLIGDAAKNQVAMNPINTVFDAKRLIGRRFSDASVQSDIKLWPFKVISGPGEKPMIVVQHKGEEKQFAAEEISSMVLIKMREIAEAYLGSTIKNAVVTVPAYFNDSQRQATKDAGVIAGLNVLRIINEPTAAAIAYGLDKKATSVGEKNVLIFDLGGGTFDVSLLTIEEGIFEVKATAGDTHLGGEDFDNRMVNHFVQEFKRKNKKDITGNPRALRRLRTACERAKRTLSSTAQTTIEIDSLYEGIDFYSTITRARFEELNMDLFRKCMEPVEKCLRDAKMDKSTVHDVVLVGGSTRIPRVQQLLQDFFNGKELCKNINPDEAVAYGAAVQAAILSGEGNEKVQDLLLLDVTPLSLGLETAGGVMTVLIPRNTTIPTKKEQVFSTYSDNQPGVLIQVYEGERTRTRDNNLLGKFELSGIPPAPRGVPQITVCFDIDANGILNVSAEDKTTGQKNKITITNDKGRLSKEEIEKMVQDAEKYKSEDEEHKKKVEAKNSLENYSYNMRNTIKDEKIASKLPADEEEDRGRHRRGHQLAGRQPARRGGRVRGQDEGAGEPLQPHHRQDVPGRG

SEQ ID NO: 65250 - protein, 364 aa, Zea mays
  Clone ID: LIB4745-015-E9_FLI.pep
QGRFSAINKASSRQTINRAKQIKDALHVLFIFHCCFALLCLPATMASTRAAATLLLLLALAGTSSAQLSTGFYSYSCPGVYGAVKSVMQSAIAREKRMGASILRLFFHDCFVQGCDASLLLDDTPSFQGEKMANPNNGSVRGFEVIDAVKSAVEKLCPGVVSCADILAIAARDSVVILGGPTWDVKVGRRDSTTASFSGANNNIPPPTSGLANLTSLFAAQGLSQKDMVALSGAHTIGQARCTNFRAHIYNDTDIDAAFARTRQSGCPSTSGAGGDNNLAPLDLQTPTVFENNYYRNLLAKKGLLHSDQELFNGGATDALVQSYVGSQSAFFADFVAGMIKMGDITPLTGSNNGQIRKNCRRVN

SEQ ID NO: 65251 - protein, 808 aa, Zea mays
  Clone ID: LIB4745-016-B3_FLI.pep
LEAGREPIKTIPTRTSFPFQHLHSQPRDDETLASPPPLSPGHHLAGTRRLDRARDHRPPSAAAAEERCKMLNGGGGGQKKRNTKIEPYRHRVETDPKFFDKSWRKLHDAIREIYNHNASGLSFEELYRTAYNMVLNKFAPQLYEKLTENMKGHLEEMRTCIEAAQGGLFLEELQRKWNDHNKALTMIRDILMYMDRTYIPTNKKTPVFEHGLELWRDTIVRSPMIQGRLFDTLLELIHRERTGDVINRGLMRTTTKMLMDLGLSVYQDDFERPFLEVSASFYSGESQQFIECCTCGEYLKQAERRLHEESERVSQYLDAKTNEKITAVVVKEMLANHMQRLILMENSGLVNMLVEDRYEDLTRMYTLFNHVPDGLATIRSVMVSHIKDTGKSLVTDPERLKDPVDFVQRLLNMKDKYDNIINVSFSNDKSFLNALNSSFENFINLNNRSPEFISLFVDDKLRKGVKEANEEDLETVLDKVMMLFRYLQEKDLFEKYYKQHLAKRLLSGKAASDDSERSMLVKLKTECGYQFTSKLEGMFTDLKTSQDTTQGFYASTSSELPADAPTMSVQILTTGSWPTQTCNTCNLPPEIVSVSEKFRSYYLGTHNGRRLTWQTNMGTADIKVTFGNGSKHELNVSTYQMCVLMLFNSADVLTYREIEQSTAIPAADLKRCLQSLALVKGKQVLRKEPMSRDIADDDSFCVNDKFTSKLFKVKIGTVVAQKETDPEKLETRQRVEEDRKPQIEAAIVRIMKSRRVLDHNSIMTEVTKQLQPRFMPNPVVIKKRIESLIERDFLERDKTDRKMYRYLA

SEQ ID NO: 65252 - protein, 377 aa, Zea mays
  Clone ID: LIB4745-016-H9_FLI.pep
TGQQEQHTGSAGGDLYGVLLYYKYAEVPDAAALAAFYEAHCRSLALVGRVRVGPDGVNATLGGQMNALEKHIAEMSSNDLFVGTDFKLASCDDPVDERVARECGFTSLSVRVVKELVTLCCNPALAPPEISSAGRHLSAAEFHSVLQNVAGTSLNAVASAEKKEVVVLDARNVYETRIGKFNVPNAKTLDPEIRQYSDLPSWIDKHAEQLHGKSILMYCTGGIRCEMASAYIRSKGEGFENVFQLYGGIQRYLEQFPDGGYFEGKNFVFDHRISVGSLKENILGACLICDSSFDDYSSRCRCSHCRMLVLVCPTCQDSTEEYACELCQKNGKEPCQLSTGQDCKIQRGLSESFEKPSISYHNVTSKVSWSDGKVASN

SEQ ID NO: 65253 - protein, 492 aa, Zea mays
  Clone ID: LIB4745-017-G10_FLI.pep
RGGKMVRLPYTTALTTLFSYGLLFAFGQLRDFFRKFVDWFKAKNVKGYAPICLGLEDFYVRRLYLRIQDCFGRPIASAPDSWFDVVERTSKDNNKTLQRTSNTTRCLNLGSYNYLGFAAADEYCTPRVIESLKKYSASTCSVRVDGGTTKLHNELEELAARFVGKPAAILFGMGYVTNSAIIPCLIGKGGLIISDSLNHNSIVNGARGSGATVRVFQHNSPAHLEEVLREQIAGGQPRTHRPWKKIIVIVEGIYSMEGELCKLPEIIAVAKKYKAYTYLDEAHSIGAVGQSGRGVCELLGVDPADVDIMMGTFTKSFGSCGGYIAASKEIIQHLKHSCPAHLYATSMSPPAVQQVISAIKVILGEDGSNRGAQKLARIRENSNFFRSELKKMGFEVLGDNDSPVMPIMLYNPAKIPAFSRECLRQKVAVVTVAFPATPLLLARARICISASHTREDLMKALDVISRVGDLVGIKYFPAEPPKIAGADHDKLE

SEQ ID NO: 65254 - protein, 600 aa, Zea mays
  Clone ID: LIB4745-018-G4_FLI.pep
AMAVAASPYFLLLFLFHSLAALASLAPPPSQPPPPRVPQKVQVWPKPVSISWPLPAYAPISPSFNIRASPSHPSLRHAIAYYTRLIRTERYTPIMPPVNYTVSGVPIRLLALSVSDPDVPLGPGVDESYTLSVPPNSSSADISAATPWGIIRGLETFSQLAWSSGAADASGQPIVPSEIEISDHPLFTHRGILLDTARNYYPVRDILRTIRAMASNKLNVFHWHITDSQSFPIVLPSVPNLANFGSYSPVMRYTDQDVRRIVRYAGAFGIRVIPEIDMPGHTGSWAGAYPEIVTCANKFWAPTAKPALAAEPCTGQLNPLNPKTYRVAEDVLRDLAALFPDPYLHAGADEVNTACWEDDPVVRGFLADGGSHDRLLELFVNATRPFLVHELNRTSVYWEDVLLGPKVSVGQTVLPHDTTVLQTWNNGAENTKRIVAAGYRAIVSSASYYYLDCGHGGWVGNDSRYDVQEKEHDGMPLFNDPGGTGGSWCAPFKTWQRIYDYDILHGLTEDEARRVLGGEVALWSEQSDAAVLDGRLWPRASAAAETLWSGNKGSNGRKRYANATVRLNEWRYRMVARGIRAEPIQPLWCPMHPRMCNLSQ

SEQ ID NO: 65255 - protein, 196 aa, Zea mays; identical to SEQ ID NO: 38778
  Clone ID: LIB4746-001-H3_FLI.pep

SEQ ID NO: 65256 - protein, 256 aa, Zea mays
  Clone ID: LIB4746-002-G8_FLI.pep
NPAPLGFTHPWARNRSNDGEIAVLREGAHEQGRVDQGGGRPSGGVHQGARRRVLALPSQGRRTCALRQELPPPVDQLPAARPQARQLHGGGGRAHHQAPQPTRQQMVPDRWKAAGQDRQRDQELLEHAHPAEAAEQGDRPGDTPPHQRAHVQHNHIVRGLGPGEGAQVPRPEPGPLHQPAVPGGGGGHAAEAGEAGGGRALLQLQPGAPQERGLQVQQLPRAQDRHARLQKTRDEMRASIHLSVCLCNFTPDNTQE

SEQ ID NO: 65257 - protein, 264 aa, Zea mays
  Clone ID: LIB4746-003-C8_FLI.pep
GVEFRSATPKRNKSLRRSIEKLVIVRMSSPQSAAPPVKLITAFGSPFAHRVEVALALKGVPYELVVEDLANKSELLLTHNPVHQSVPVLLHGDRAVCESLVIVEYVDETFHHGAAPGILPADPYDRATARFWADFIDNKCLKPMWLSMWTDGEAQARFVRETKESLGVLDAQLQGKRFFAGDALGFVDLAACTLAHWLGVLEEVAGVHLIAADGEYPALRRWAKEYVSDEVVSRSLPDRDELVAFFTASKERYKSWVRAEVERH

SEQ ID NO: 65258 - protein, 260 aa, Zea mays
  Clone ID: LIB4746-004-D2_FLI.pep
SRPAGNRSPAPSLPLPRLSPTPNMSSSPLPTTSGGAHIFPSPPRPRHRRCCQVIVAAAASPRSYGVGRRAVSLAGVAAWLATIVGRADAASPFDKYVKRKKLEPLETYVPAVLLTIDQFVDLEKSLEFEKPRYDESRSLLRSGPASSLRVNIRAVAQYASSNGQGKAASDAVDECLRALEDLDSLLLHASRNDPSASVETMRSKISVALAALDNLLQTVPSAVLDKGKAIADAYRTPVDDYVEENAAELDPRLKQLEGIL

SEQ ID NO: 65259 - protein, 359 aa, Zea mays
  Clone ID: LIB4746-005-A10_FLI.pep
PGASLLLTHRHRILAARTLSVSVSAAAGSSSIPVKMTARSALDEVTDTGAFDRSPSTFRSSVSRDGRFPAVAGRYHLYVSYACPWASRCLAFLKLKGLDHAIGVTAVKPIFERTKESDEHLGWVFPAAADEEPGAEPDPLNGARSVRELYEIASSNYAGKPTVPVLWDKQLKTVVNNESSEIIRMLNAEFNGIARNPGLDLYPAHLRASIDEANELVYDAINNGVYKCGFAKKQGPYDEAVTRLYEALDRCEEILGKRRYICGDQLTEADIRLFVTLIRFDEVYAVHFKCNKKLLREYPNLFNYTKDIYQIPGISSTVNMEHIRKHYYGSHPSINPYGIIPAGPNIDYNAPHDRERFSA

SEQ ID NO: 65260 - protein, 232 aa, Zea mays
  Clone ID: LIB4746-005-F3_FLI.pep
LEAGRVTPRTTSPDLSSCCFLGWFPSLAASPASSPNQRHESAMALASATSRPLLGRPAGTARPHLAVSSSSPASSIRFPRGADGGASRAAVSLRAPTPPAAATATSGSIAPAISLTEKALKHLNQMRAERNEVLCLRIGVKQGGCSGMSYTMEFENRENASPDDSVVEYDGFAIVCDPKSLLFMFGMELDYSDALIGGGFLFQNPNATKTCGCGKSFATGKETEAAATTCNN

SEQ ID NO: 65261 - protein, 263 aa, Zea mays
  Clone ID: LIB4746-007-F3_FLI.pep
SRPAGVTLLSQPALSLSSIQARKVETPRKQFPAMATAAHQVAATFLSFLSSSTHHLAPSSVSLGTTSVLPVSLRAAGTRGPRLAYRLRGRRVGAAVAQLPTTHPEVVSGEKKIRWSSRAVRSFAMAELEARKMRYPTTGTEGLLMGILVEGTSGAAKLLRANGITLLKVREEAANVLGKSEMFYFSPMHPPLTEAAQRALDWAVNEKLKSGEDGEVNANHLLLGIWSDDESAGHKILYSLGFDDVKASLLAKTADEEAAMSPR

SEQ ID NO: 65262 - protein, 478 aa, Zea mays
  Clone ID: LIB4746-009-F7_FLI.pep
GETISATMASSTSLSLCLHASSPSSSSPGLRRPSLASSSSSRSERTRKIRAKAVREDWRQKSKPIPPGAVYPAKDHCSRCGLCDTYYVARVKTACAFLGDGMSRVEDLERQVHGRGRKEGMDEMYFGVYDQLLYARKTEPVEGAQWTGIVTTIAVEMLKANMVDAVVCVQSDPDDRLAPRPVLARTPDEVIAAKGVKPTLSPNLNTLALVEAAGVKRLLFCGVGCQVQALRSVEKYLGLEKLYVLGTNCVDNGTREGLDKFLKAASSEPETVMHYEFMQDYKVHLKHLDGHIEEVPYFCLPANDLVDVIAPSCYSCFDYTNGLADLVVGYMGVPKYAGVSMTQHPQYITVRNDRGQEMLNLVAGLLESTPTISSGSRQPFVMETVKADDAAKLGKGPSKPAPRFVGDILAFLLNLVGPKGLEFARYSLDYHTIRNYLHVRRAWGKQRAEQHIPGYAKKIVEAYDKDGRIEAMVTQSGD

SEQ ID NO: 65263 - protein, 395 aa, Zea mays
  Clone ID: LIB4746-012-A6_FLI.pep
SRPAGSTIDYYYYHRGRILLCSYPLAYYLLFLRPPPPPSLLSPTTAPFRRLPSPIPSAVSACCEPGGNRPRSSPFVRRPPPRGRVDMALKTPHLPSNFARRPSSHHSFSQWHSPPHHPKLPPRPDPQTRVAIATKPPPPPHVVRKRSTTSTLMRCRDGLGLHGFTDDEAVHQTPEPEDHQTTELPVVTHPSVVFPGATLQLHAFEFRSRIMAHTLLQQGLSFGVVCCGGVEDVGCVVHVVECERLTDGRFFLTCVGRDRFRVVETVRTKHYAVARVQVFRDRDHSHHHHHHDLMQQVERHLGNVAALADKLGQKPPPPPLPYRQGDRRLHTAASLSFLVARLFVDDRREQQALLRMDDAAQRLAREGEYLERRSKYLAALAAIKDAFQHLSCNEK

SEQ ID NO: 65264 - protein, 261 aa, Zea mays
  Clone ID: LIB4746-014-A7_FLI.pep
HSDLQFFFPFLARLKHSILTSKQKSQKKKKEREHRPDGTVRSVALAGGGFRDDAAAALARGLGDALQRRPPVPASSPVPVLVLLPVLAGRALVSPVAAPELLVLLPDGLAPLHLLVLPRPHRLRHLLRGDEAVDLAKEKRVLGLQQLDPGDLGPTTAGAGGRRGVPGGGGGGLVICRNTEYDEGNVVSRVVPHDLGGGGGPVEPVDLPAGVLDDDRRRLRRLAVAHRSRPPARPSLQQQQRLWWAGLWAGLVVQGAATVAV

SEQ ID NO: 65265 - protein, 269 aa, Zea mays
  Clone ID: LIB4746-015-B7_FLI.pep
GKKQPTAIEVENSDFFTHTHMALMSLGAAGYTTATAPPRPRRCTLPFRAAASPAALDRRRRPHNVAGDFFVDHRCIDCQTCRWMAPEVFKRVDGKAAVAAQPSSEEERTKALQALLSCPTSSIHTEKPPKDILKVQNMFPLPIDDKLLPVEEATADVEWKLEGNGPWNLGTDFELIHTPGHTPGSVCLYFKPLKVLFTGDHVAKSEESDDLNLFLMYSKQSVSLQLESIRKLLELEFEWLLPGHGYRIKYKDVRAKNVAMESLLANYTS

SEQ ID NO: 65266 - protein, 448 aa, Zea mays
  Clone ID: LIB4746-016-B7_FLI.pep
TCPRQPRRRTVATTAAAAAATPLMESLEALVAHIQGLSGSPEELAHLHSLLKQADGEPLRAHAAALVPFLAHLSPETHSLGYIYLLDACAASASNLSDFGGGDFLVTIAGFLTACSADQIRLAPDKFLHVCKVLKDQVMQLNMPIRGIAPLRAAVRKIQSSPEQLTPVHADYLLLCLLAKQYKAGLSVLEDDIFEVDQPKDLFLYCYYGGMIYIGLKKFPKALELLHNAVTAPMSTLNAIAVEAYKKYILVSLIVNGQVPSFPKYTSISAQRSMKNHAQIYFELSTSYSNGRYTDLETFVESNSAAFQSDNNLGLVKQVLSSMYRRNIQRLTQTYLTLSLEDIARSVQLETPEDAEMHVLRMIEDGEIHATINQKDGMVSFHEDPEQYKSVEMVEHIDSSIQRLTALSKKLASIDENMSCDPSYLLKTGRDRGRFDYDDFDSVPHKYF

SEQ ID NO: 65267 - protein, 258 aa, Zea mays; identical to SEQ ID NO: 53230
  Clone ID: LIB4746-017-H12_FLI.pep

SEQ ID NO: 65268 - protein, 192 aa, Zea mays; identical to SEQ ID NO: 52178
  Clone ID: LIB4746-019-B8_FLI.pep

SEQ ID NO: 65269 - protein, 308 aa, Zea mays
  Clone ID: LIB4746-019-F4_FLI.pep
IIILHALLSLDFSRSGPPPLSPPPPPPLLCSVSSPMASAKFGAAQQVENRGALSKRSRNDVSVREGDWNCPQCGNVNFSFRNVCNRGACGAPRPSPSPSPRMMPGPPASGYDRSPLFYGGGGGAPPPIPLGTGSYGAPYPHLGMRYGYGPPVGPPGSYGLFSSYGPPGPMSGMGYGPGPELGRYSYGFRGSPMPVSSPWSGGALAENTDNIASRKRRGGPDGLSEGDWTCPKCDNINFSFRSTCNMKKCGAPRPTPGGNTSSSRKDNSNKEAPEGSWTCPECNNLNYPFRTVCNRKGCSYSKPAPANN

SEQ ID NO: 65270 - protein, 127 aa, Zea mays
  Clone ID: LIB4746-022-A11_FLI.pep
LEAGRESRQSSHNLQPPLRLPLAPAATTPVAESPAAETPGGPRALPPGLLASFTLLEPEERAAACTPSHRLASAPEPQLERSPATSRRPARSLRRHAPPRLGARRRRYYHNIKGDAFTPESIASRTC

SEQ ID NO: 65271 - protein, 280 aa, Zea mays
  Clone ID: LIB4746-022-E5_FLI.pep
ALSTAGSGSSSCLPPRVLAGPEVGLHPRDEEDLAVVDVGVNQGQRQRRRSTDHLALVVVLGSVAWADELVLGAVPRHDAAEVSAHGVDPVGGQRLVLLHHQVRGVTLEPLRERAIVGTVRVEPRLHRDVVAQLVLGVGPAAGVPGAGRDEEGAVGDDHADGGQRDDAEEEEVHQLPLLHVGDAVGGDAARRLARNAPLGALAAHAQAKPLHRLAQRSAGPVELGGIGGGGERRGGRHGCSRRGSVGVGSRDNTAVFHSLASTGFSEFFSRFSFNKYSQNL

SEQ ID NO: 65272 - protein, 265 aa, Zea mays
  Clone ID: LIB4746-023-H5_FLI.pep
RGRPGAHRHLHARSSSRTGRIAAMAAAAPASSVKEVLPSPLTSASEPPPLFDGTTRLYVAYLCPFAQRAWIARNYKGLQDKIKIVAIDLADRPAWYKEKVYPENKVPSLEHDNQVKGESLDLVKYIDSNFEGPSLLPEDPAKQQFAEELLGYTDAFNKAFYSCLVDREDVSEEAVAALDKIEDALGKFNDGPFFLGQFSLVDVAYVPFIERFQILYSNIKNYDVTKGRPNLQKFIEEVNKIDAYTQTKLDPQFLLEQTKKRLGIA

SEQ ID NO: 65273 - protein, 384 aa, Zea mays
  Clone ID: LIB4748-004-F3_FLI.pep
DQPHALTVLPPPPMALPPGAGAVAPATPFAANPCRLRRASGPPAAALRLGPLFWPWEKVKIGPLSVSPMGFGTWAWGNQLLWGYQESMDNELQDCFNLALRNGINLFDTADSYGTGRLNGQSERLLGKFILEFEGRIKSPDDVVIATKFAAYPWRLTSGQFVSACKSSLERLQLDRLGIGQLHWSTANYAPLQERALWDGLVEMYEKGLVSAVGVSNYGPKQLLKIHSYLASRGVPLSSAQVQFSLLSMGDDQMELKSVCDSLGIRIIAYSPLGLGMLTGKYGASNLPKGPRSVLFRQILPGLEPLLSCLRRIAEKKGKTMPQVAINWCMCKGTVPIPGVKTVRHVQENLGALGWRLSSAEISELESAAMAAPRKMIQNVFQTA

SEQ ID NO: 65274 - protein, 652 aa, Zea mays; identical to SEQ ID NO: 38995
  Clone ID: LIB4748-005-H4_FLI.pep

SEQ ID NO: 65275 - protein, 548 aa, Zea mays
  Clone ID: LIB4748-007-F4_FLI.pep
AMPPPAGLPPWPTPSTTRLATPTPTRPPPRTTHVQPPPPPYTRVRLPPPPPATTPLPPRLEPAAPKPAAVATLLPPSTASAASSSSTCLDCVHFGKCSGCTHEVDLDKPPVLQEVANFFKGHGVGDFTFSRGRLSQWRCRAKLAVRGTPENPLIGLYQEGTHSVIDIPECRAHHPSINAAVKLLRQGITELSIQPFDEDAGAGELRYVQMAVTTYNTSIPVDKRYEQGKVQVSLVWNSRDERSQNAEKLTSIIEYLWTNGGPKSSVHLIHSIWANFQTSTSNIIFGHKWRHLKGERDMWERYGGVDISLDPCSFGQANTLSFNSLLHKLNKYVPRSSTVVDLYSGAGVIGLSVAASRKCRSVKCIEINKQSKMSFETSASRLPANLGCTITWHNTDASVEPSHWLEGSSVVIVDPPRKGLHPSVISGLQKVALSERKAYKAKSSLAKVKDEKRPWILRAREAAVHVDNTTTEEGNETWPETLIYISCGWESFKRDCKSLISSKAWQLENAHAFNFFPGTDSIEILAIFKRESEAGQKKKKKAKKKKAK

SEQ ID NO: 65276 - protein, 477 aa, Zea mays
  Clone ID: LIB4748-010-F4_FLI.pep
PARISQCEERLGVLVHGPDNGLDLLHLALVGARGEQHLGGAGVRVAPGVHHLLEDPQALPVLLLPGVRADAGRPRHHVGGEAPRRQGAERRLHPVQVPRAPVRVHHHVVRAGVRGAGDRAVAALHGREEPLHVVQPPGPAVRVEHGVEREGVRAQPGLVQLRHHLLAPRHVAGPGVRRQEQHVRLHRRPHALLLQLLERCFRLLVKTSSSESIHQYVVRGSIRLAPHVFHQREDLRRPLRQPCAAVSFHQSIVGVHVRFVPSLLHLLEHLLCLLAQAFPRERVHQRRVGADVGLAPDRFHLPEHSQRRHRLICFPIHVDHQGVGLGVSSAALLLHPLVHFNRLLRTPRLQQTVQVRVVHSRSGRDPVPLHLRNHALGSVQLPGAAVRAQQQSVGVLRRHAASLQKRHVGRLRLAQLTLLAVRVDEQVVADDVGAERAPAQDPLADCDDRLPLPVQAELDSDVDDVVPKIVCLRDLVQ

SEQ ID NO: 65277 - protein, 311 aa, Zea mays
  Clone ID: LIB4748-012-F6_FLI.pep
PGKKKKTNLSTPRRVRGGAAMASSVAAAASTFLGTRLADPAPQNGRIVARFGFGLGGKAKPAPKKVAKTSTSSDRPLWFPGAVAPDYLDGSLVGDYGFDPFGLGKPVEYLQFELDSLDQNLAKNEAGGIIGTRFESSEVKSTPLQPYSEVFGLQRFRECELIHGRWAMLATLGALSVEWLTGVTWQDAGKVELVDGSSYLGQPLPFSISTLIWIEVLVIGYIEFQRNAELDPEKRLYPGGSYFDPLGLAADPEKKERLQLAEIKHARLAMVAFLGFAVQAAATGKGPLNNWATHLSDPLHTTIFDTFGGSS

SEQ ID NO: 65278 - protein, 599 aa, Zea mays
  Clone ID: LIB4748-013-C2_FLI.pep
PSPLNTTAHPPPPPPPPPKMGFDVGLVPYNPDGWGPPEVAAAPPSLGGGSSSVPFAPFSRSDKLGRIADWTRNPPGPGAFAAARDAVFDFAGLEDSIGLASADDSSFRLVDGKPPPRHPRFGPRWRFQQRPQLPQRRDEEVEARRREAEKERARRDRHWQQNRRTHHQFNRGGPSSSSAKPSVDIQPEWSVKEQIPFSSFSKLSFAVADQPEDLLVCGAVEYYDRTYDRVTPRAERRLERFKSRNFFKVTTTDDPVIRRLAENDTATVFANDTILAALMCAPRSVQSWDIVIQRVGNKLFFDKRDGSQLDLLTVNETAQEALPEAKEDINSAHSLAVEATYVNQNFSQQVLLRNGEKVTFDEPNPFATEGEEAASVAYRYRRWKLDEETSLVARCEVHAVSVDLRGERQFLTLNALNEFDPKVTGVDWRKKLETQRGAVLATELKNNANKLARWTAQALLAGADMMKLGYVSRLHPRDQYNHSILSVIGYKPRDFAAQINLNTANMWGIVKSIVDVCMKLGEGKYVLVKDPVKPQVRLYEVPNDAFENDYVEEPLPEEEQVRPFSEDVDASAKEMDAAAEAEATGTTAGAEKSGDVAAV

SEQ ID NO: 65279 - protein, 490 aa, Zea mays
  Clone ID: LIB4748-014-G3_FLI.pep
PGSFCFVSYRIVPLFPSRLVLSFFPPLLLHLQTYYCHREGKLFGAGAGSTLTPSSAAMGSLGGSAGAGDGGKVGLPALDVTLAFPQATPASLFPPAVSDYYQFDDLLTDEEKALRKKVRGIMEKEIAPIMTEYWEKAEFPFHAIPSLASLGLAGGTIKGYGCPGLSLTASAISIAEVARVDASCSTFILVHSSLAMSTIALCGSEAQKQKYLPSLTQFKTIGCWALTEPDYGSDASSLRTAATKVPGGWHLDGQKRWIGNSTFADVLIILARNADTNQLNGFIVKKGAPGLKATKIENKIGLRMVQNGDIILNKVFVPEEDRLTGINSFQDINKVLAMSRIMVAWQPIGISMGVYDICHRYLKERKQFGAPLAAFQLNQEKLVRMLGNIQAMLLVGWRLCKLYESGKMTPGRSSLGKAWTSKKAREVVSLGRELLGGNGILVDFLVAKAFCDVEPIFSYEGTYDINSLVAGREITGIASFKPAVSAKSRL

SEQ ID NO: 65280 - protein, 355 aa, Zea mays
  Clone ID: LIB4748-018-D3_FLI.pep
NTRSCLPSAISSSRLSSMGVQCLPDQILRSAAAACGAPGLQCGSPECLPCKHICVQEGGCGIGQPMLLAKVTHGRRNLPKVAPRQAGEQMVLNLELQAAMEPIHPRRAQDVERVVVAFPPGDAEASEAVSGEHLHDAVQERMARDAVVARVVAHPAGLDPDEADEPPSEHVRRGAGAGEDEVERRVEEDGHQGELYPGGGADALEEARGGELRQEAAVVGGRGGDGVVGEAADEEAAEERARRGRVVGGEGVGGVLPRQGDEREVAARVVGKPGRHVVHVARDGDPEVGGGRVLAELLGGDQAHVAGARGVSGGRHCVGRGRHCAAVAPMGGADLGGSEGEAGRIVEVGRFRPAS

SEQ ID NO: 65281 - protein, 206 aa, Zea mays
  Clone ID: LIB4756-002-D2_FLI.pep
LEAGRPSRIRFIALISRSRRKLQQRLTTASMAATSSSMSSVIFLLLATLAADASAATFTVKNNCNYTVWPAVIPAGGGERLDPGQTWTVSVPPGTTGRFWGRTGCSFSGGGSGGHCDTGDCAGALNCTVSGQPPTTLAEFSIGGAEDFYDISVVDGYNLPMAFSCSTGVGLVCTSPACPAAYLFPNDDSKTRGCSSNSNYQLTFCP

SEQ ID NO: 65282 - protein, 216 aa, Zea mays
  Clone ID: LIB4756-002-G1_FLI.pep
PKIENTPNTTNRRNSSDGGTSRMSELQFEQIREACNRRRGSLELLGCGADVGLALATGLLGQQRLMNVGQHPAGGDGDSSEQLTEFLVVAHGELDVARHDAVLLVVARRVARQFQHLCREILEDGGEVDGRTTADALGVLARLEVARDAADGELQPSLGRPRHSLGPLGLAPAAAGTHIHLFSSGTALSTGLTRRNRGHAGMAVVDLGGSGPGRPR

SEQ ID NO: 65283 - protein, 321 aa, Zea mays
  Clone ID: LIB4756-002-G5_FLI.pep
RGRPGEAPTHSSVRPSNAMVSLARRPLSAAVPAGNLLGIHLFRCPDAVGIVAKLSECIASRGGNIHSVDVFVPDDKPIFYSRSEFTYNPRLWPRHELHKDFLNLSRCFNAQTSTVRVPDLDPKYNISILASKQDHCLFDLLYRWQEGRLPVHINCVISNHDRPQDNHVRRFLQRHGIPYHYLPTAPANKREKEILELIQGTDFVVLARYMQILSENLLKAYGKDIINIHHGLLPSFKGGNPSRQAFSAGVKLIGATSHFVTPELDAGPIIEQMVERVSHRDTLQSFVVKSENLEKQCLAEAIKSYCELRVLPYELRKTVVF

SEQ ID NO: 65284 - protein, 253 aa, Zea mays
  Clone ID: LIB4756-003-D10_FLI.pep
SRPAGNHNSSILSSQYAHFIPANMGFTDLVSDAGLTLLNSYVRTRSYIVGYSPSQADVKVFQQIKEIPAPEKYPYAWRWYNHILTFQGEFDSLPGDPTKEFTAYGPESSELPLNPAKAPEKEAEDDEDIDLFGSDDEEEDAEAARIKEERLAEYNKKKAGKTKPAAKSIVTLDVKPWDDETNMDELKANVLSIEKDGLVWGASKLVAVGFGIKKLQINLVVEDEKVSLDELQQQIEEFEDHVQSTDIVAMQKL

SEQ ID NO: 65285 - protein, 224 aa, Zea mays
  Clone ID: LIB4756-003-H4_FLI.pep
AGREISCVPYLPFRSEVSLPPSPHSAVPPSRVACLQVPPLRNWVAADPPPPPCVRCSGDKRPPVPGLGGCTARRGSQQPLLHQGDRAAFKMLEYQNAIGGRLKLKGKALDVKDGGVKKKKKKYQREESSRIAHDELHKGGRSESPIDPNNERIESDKTGDEGNPHPDYGHLTPAERRYMEQKQNIDMQKMAKVANKSHRDRIQDFNQYLANLSEHYDIPKVGPG

SEQ ID NO: 65286 - protein, 241 aa, Zea mays
  Clone ID: LIB4756-005-D7_FLI.pep
IQRAQTQKRVQNQMAALTYFLLVAFLALVTSQAIASDPSPLQDFCVADKYSPVKVNGFVCKDPMAVNADDFFKAAKLDQPRDTKNKVGSNVTLINAMQLPGLNTLGISLARIDYAPLGQNPPHTHPRATEILTVLEGKLYVGFVTSNQANNNNKLFTKVLNKGDVFVFPQGLIHFQFNPVHDKPAVAIAALSSQNPGVITIANAVFGSKPPISDDVLAKAFQVQKGTIDWLQAQFWENNHY

SEQ ID NO: 65287 - protein, 208 aa, Zea mays
  Clone ID: LIB4756-005-E12_FLI.pep
LSQPRLPPASAMAVLLWRCICGPQQSFSKNRGASTPSPPAGRRSKYSGQSVKAMPMRLLTVGKKRYRGTQLLVEEYKEKLGHYCEFEDTLIRSNPKLTSDVKVQVEAEDTAMMQQLKSDDFVVVLDENGKDVISEQIADLIGDAGNTGSSRLTFCIGGPYGLGLQVRERADATIRLSSLVLNHQVALIVLMEQLYRAWTIIKGQKYHH

SEQ ID NO: 65288 - protein, 330 aa, Zea mays
  Clone ID: LIB4756-005-G7_FLI.pep
TTPASLKITMMRALAVVAMLATAFFAVPARAEQCGSQAGGALCPNCLCCSQFGWCGSTSDYCGSGCQSQCSGSCGSTPNPPSSGGVASIIPESLFNQMLLHRNDAACPANGFYTYAGFIAAANAFPGFGTTGAPDVQKRELAAFLAQTSHETTGGWATAPDGPYAWGYCFKEEQGGASGPDYCEPSAQWPCAAGKKYYGRGPIQISYNYNYGPAGQAIGAGILANPDMVATDPTVSFETAVWFWMTPQSPKPSCHDVMTGQWTPSAADTAAGRLPGYGVVTNIINGGLECGHGADSRVADRIGFYKRYCDLLGVSYGDNLDCANQTPFNG

SEQ ID NO: 65289 - protein, 247 aa, Zea mays
  Clone ID: LIB4756-006-G5_FLI.pep
DEEEAGAMEASSWDAVRKQARRLEAQLDDQMIAYRKLVSMKSDGSEDNIESDIERSLKQLQQVNSQMQTWVSSGGSEVLSHTLTRHMEILQDLTQEFYRLRSSLRAKQQHTSLLDLRDFDRAKFDVEEPSDSADQVLLREQTAIGRSTGQMDNVISQAQATLGSLMTQRSTFGGITTKISNVSSQLPTINHVLSSIRRKIHGYHHSFARCICLHVSHLHLLAVEVGLPEQRYYSVVSLGPHHQYRYR

SEQ ID NO: 65290 - protein, 184 aa, Zea mays
  Clone ID: LIB4756-007-E9_FLI.pep
LEAGRDDPEFRSPHQVTFFLNTANMDHAKLARMQASVRIGGKGTPRRKVKKVHRGAGTDDKKLQTALKKLNVQPIQAIEEVNMFKSDGNVIHFSAPKVHASVPANTFAIYGHGEDKELTELVPGILNQLGPDSLASLRKLAESYQSMQKEKGEDGEKKDDDEEDDDDIPDLVAGENFESKAEVE

SEQ ID NO: 65291 - protein, 246 aa, Zea mays
  Clone ID: LIB4756-007-F8_FLI.pep
KPRLLIPAAAEGRAMPKRTTHTYSSEDALPEGPESDLFVYYCKHCASHVLITDTQLQKMPKRRTDRAHVLDKAKHLSRLNVKEAGKVMLKRGEGKLEKQFRMSCVGCDLFVCYRSEEDLEVSPFIYVIDGALSSVAAETNPHDAPVPPCITQLEGGLVQVAIEVEDRAQRSAITRVNADDVRVTVAALAARGEANSELLEFMGKVLGLRLTQMTLQRGWNNKSKLLIVEDLSARQVYEKLLEAVQP

SEQ ID NO: 65292 - protein, 363 aa, Zea mays
  Clone ID: LIB4756-008-C2_FLI.pep
RGRPGSSRRTPSLSLASSLDVVLQRQRTTSDPTNMASAGTTAVVPEVALRSGNARTAMPMVGMGTASFPLVHEAVKDGVLSAIEVGFRHFDTASMYGTEKPLGDAVAEALRRGTLRSREDLFVTSKLWCSQNHPDLVLPSLRETLKNLQMEYVDLYLIHWPVCLKPGPPELPTRKENAVPLDLAGVWRAMEECQRLGLAKAIGVSNFTTRHLDGVLAVATVPPAVNQVELNPAWQQRTLRAYCADRGIHVAAYSPLGGQNWDGQGSAVLDSEVLAAIAKARGKTVAQVALRWIHEQGVTCIVKSYSKERLRQNLGIFDWELTDEERLKISQIPQRKVVQTSSLFSQEGEFTAVDPAELNILEE

SEQ ID NO: 65293 - protein, 600 aa, Zea mays
  Clone ID: CC-ZMPO148046A03_FLI.pep
IKKKRKSGKGTNVSPPVLRHLRYKHVCATSLSCAVYNMPCVRSLELEPEDVRRAGELEPQRAVDERPGGELLGVLPADDVEPRPGDPLAGTGAGAAVVVLGVVERLDAEVAVPGHVALGLDEVGDGALHDDEARELLPGSAQVRGDLEAVGEELLVGHQAAVLDDKPRLHVGVRAAVRGHRVLLVVHGPPRDDEAVLEHRRRVAEDEVNGAGDDAVAEELAPGVHVQRVLERVEPAVVERREVSLNAERHRLVPLRAGRVVEAHVLADEPGRLDGECGGLHGGDAVSEALAAGHAALLGPVAVHEDVDLVLGDHDDLVVEAGLHVDDVPPLLALGHGVHGLLDGLELAAAVLGHHRVRFRLVARRQELSLRRPHPHWPAFFVLLRQEPATRVLLEHAEVQLLQDPAEAVGDGERVAAELGGVAQHGVHVGLELLVDEAVDAGVHERHDAREPCLEVVGPADKHLDVAAGHLEHAPEVVNGVLEELLAVLPRALGHGVAGISLADRLGLLDRCFHRLQRHLGNAVEHLLGVLGAIGGLGERLLTRLLVQRGRAQGLDRLAGRGNGGFPRDGEVVAGLLAGVGDGGDHADDHRDDDDRPQAT

SEQ ID NO: 65294 - protein, 404 aa, Zea mays
  Clone ID: CC-ZMPO148063F08_FLI.pep
HHRDRRRRSRGPRSTRRRRARQLGRRSIRMQTSTCAPVVVPRAASSHLGYGGGDGGAAVVGVAAPPDLAVGAGLDAEQAELLHGAAEVVEEGCGVGCIELHQGLGAWVRPQLLVGAEQAEAALEVDEVHVVELAGRHDVVERGDGGVLEVVPAHVLQPPGVGRVHAGVELLRLPALVAEVVEAVGELLAVGEAQRVGAGQRHQLLHREPLGAEHLDEAVHGEVGVRQLHVGRRGRRRQRVPAPQRNRVPGPAGHGNQHARRQCEDVGAGHHPGALQLQGQLGAHHGVEGVPGEGVVDLRVVLRLLELGGRDQHRRVAPADEAVVEEDAEQARGRRRVRHLLRLHHLRNDPLRARARLAIEVRLQGAAAAARQRQLRRGARREGGHDDEEEGQAHGGWYLVLVHR

SEQ ID NO: 65295 - protein, 280 aa, Zea mays
  Clone ID: CC-ZMPO148072D11_FLI.pep
AGSWMAAPRPLLLSLLVAVLAVAADVANAGHAKPLTPGGRVVHHNHGKFTAGPWKPAHATFYGGRDGSGTTAGACGYKDTRAQGYGVQTVAVSTVLFGDGAACGGCYEVRCVDSPSGCKPSAAALVVTATDLCPPNDQQSADSGGWCNPPREHFDLSMPAFLQIAQEKAGIVPISYRRVACTKQGGIRYTITGNKYFNMVTITNVGGAGDIAAVSVKGSKRVKWTEMKRNWGQVWQTGEDLTCESLTFRVMTSDHRKATSWHVLPADWKFGVTYQASKNF

SEQ ID NO: 65296 - protein, 210 aa, Zea mays
  Clone ID: CC-ZMPO14820017D05_FLI.pep
PCGHAAPHSQNPSLVTMASSLLRSGHRLFLRRHRLPAAFSTATAEELIDVRKLPTNYDPSTFDPSSPSRPPPSDRVWRLVEDVSSLTLAETAALSSLLLRRLDIPSAPPIAILNSAAGLGGAATAGAAGEKAGAAGAAEKTVFELRLEGYDAASKIKVIKEIRSFTDLGLKEAKELVEKAPAVIKGGLSKDEAKAIIERMKAVGAKVVMD

SEQ ID NO: 65297 - protein, 324 aa, Zea mays subsp. mexicana
  Clone ID: UC-ZMROTEOSINTE003C10_FLI.pep
NHKAMAAAAKSVCVTGAGGFIASWLVKLLLSRGQYVVRGTVRDPGASKNAHLKELERAGERLQLLQADLLDYSSVASAIAGCEGVFHVACPVPSGRSSNPEVEVIGPAVVGTTNVLKACYEAKVKRVVVVSSVSAVFSNPNWPKDKVFDEDSWSDEDYCRKNEDWYYLSKTLSEREAFAFAAKSGLDVVTICPSLVFGPLMQSIVNTSSKVLLNYFKGDRETVENRLRNMVDVRDVADALVLAYENPEASGRYICSSHPLKVSDMINILKTLYPSYPYPKHFVETDGNITCSSEKLQKLGWTFRAIEETLRDSVESYKAFGILN

SEQ ID NO: 65298 - protein, 205 aa, Zea mays subsp. mexicana
  Clone ID: UC-ZMROTEOSINTE021B06_FLI.pep
GVRKMSGNPVGVDNTSRRKFDKEEYLERARQREQREKDEARKGKERGPPVQRQPLKHRDYEVDLDSRLGKTQVVTPIAPLNQQAGYYCSVCECVVKDSANYLDHINGKKHQRALGMSMRVERASLEQVQKRFEALKKRKDPSAFTEEDLDERIMKQQQEEEERKRQRKEKKKEKKREQATQHEPEDVDPDIAAMMGFGGFGSSKK

SEQ ID NO: 65299 - protein, 296 aa, Zea mays subsp. mexicana
  Clone ID: UC-ZMROTEOSINTE040E11_FLI.pep
GSAGRFLVVAMEFWGEEVKPGATVSCKVGDGLVIHLSQAALGEPKKASENVIVSVKIDDKKLVLGTLSVEKHPQISCDLVFDKDFELSHNSKTASVFFCGYKSPVPLFESDSGEDSSDEELEPDLIPIQNNEIKISTAKVPVKVGIQNADEDETSSGDDDDFTDSDSEMSEEDESSDEDELSSDADTSDDSGSEEQTPTPKKTDVVVGKKRAIEAETPSGKKAKSEQSAQKTGDKKVSTSHPAKQSSKTPSDKSTKTPTADKKSPKSGSHACKSCSKSFVSASALESHQKAKKHEA

SEQ ID NO: 65300 - protein, 303 aa, Zea mays
  Clone ID: UC-ZMFLB73018E05_FLI.pep
LRLNLPSTSAISLEVMGHQLHISQDPNSKHHGTTVWDASMVFVKFLEKNSRKGRFCPSKLKGKRVIELGAGCGLAGFGMALLGGDVTTTDQAEVLPLLMRNVERNRSWISQSNPDSDILANTKTDSVGSITVAELDWGNKEHIKAVEPPFDYIVGTDVVYSEHLLQPLMETITALSGPKTKILLGYEIRSTTVHEKMMEMWKSNFIVKTVSRSKMDVKYQHPSIHLYMMDLKAPLIPEVEAADNGNYEEEVEVAVNQEEDEDPGVKSESCSGSSPEAKSGSLDDWEIRRCGAMAARLLKDVKL

SEQ ID NO: 65301 - protein, 305 aa, Zea mays
  Clone ID: UC-ZMROB73039A10_FLI.pep
PGPANAASSFQISVGLAGTTNKTVKVPRNFTLKTPGPGYTCGRAIVGRPTKFFTADGRRATQALMTWNVTCTYSQFLAQKTPSCCVSLSSFYNDTIVNCPTCSCGCQNPSGSNCVNEDSPNLQAAIDGPGKWTGQPLVQCTSHMCPIRIHWHVKLNYKDYWRVKITITNFNFRMNYTQWNLVAQHPNFDNITQLFSFNYKPLTPYGGGINDTAMFWGVKFYNDLLMQAGKLGNVQSELLLRKDSRTFTFEKGWAFPRRVYFNGDNCVMPSPENYPWLPNASPLTKPLALPFLVFWVALAALLAYA

SEQ ID NO: 65302 - protein, 535 aa, Zea mays
  Clone ID: UC-ZMROB73055E10_FLI.pep
EAGIISSMEMAGAAGTEAWLPYVTTVASCAVGVFFLLYFYAPHWRIRDVPGPPALPVVGHLPLLARHGPDVFGLLAKKYGPIFRFHLGRQPLVIVADPELCREVGVRQFKLIPNRSLPAPIAGSPLHQKGLFFTRDERWSAMRNTIISLYQPSHLAGLVPTMQHCIERAADAIPAMVVQENGLVDFSDLSLKLATDIIGEAAFGVDFGLTASGPGCEAAEFIREHVHSTTSLKMDLSAPLSVVLGLVAPALQGPVRHLLSRVPGTADWRVARTNARLRARVDEIVVSRARGRGQHGERRKDFLSAVLDARDRSAALRELLTPDHVSALTYEHLLAGSATTAFTLSSAVYLVAGHPEVEAKLLAEVDAFGPRGAVPTADDLQHRFPYLDQVIKEAMRFYTVSPLIARVTSRQTELGGHTLPKGTWLWMAPGVLSRDAANFEDPGAFRPERFDPASEEQRRRHPCAHIPFGIGPRACVGQRFALQEVKLSMLHLYRRFLFRRSPRMESPPELQFGIVLNFKKGVKLVAVERCAAMPL

SEQ ID NO: 65303 - protein, 581 aa, Zea mays
  Clone ID: UC-ZMROB73080F12_FLI.pep
SSSSSPPPSPICCSTFLVRRRLVPLLRRHRMALLTAPAVAALLLLFWSAAYGGDAQDQGVPPPYQDASKDVEVRVRDLLARMTLAEKVGQMTQIERIVASPQALRDYYIGSLLSGGGSVPRKQATAAEWVTMVSDFQKACLSTRLGIPMIYGIDAVHGHNNVYGATIFPHNVGLGATRDPNLVKRIGAATALEVRATGIQYAFAPCIAVCRDPRWGRCYESYSEDHRIVQAMTELIPGLQGDVPQNFTSGMPFAAGKDKVAACAKHFVGDGGTQNGINENNTIIDQQGLMSIHMPAYLDALRKGVSTVMISYSSWNGLKMHANHDLITGFLKGRLNFQGFTISDWEGIDRITSPPGANYSYSVQASILAGIDMIMVPNNYQNFITILTGHVNSGLIPMSRIDDAVTRILRVKFTMGLFENPMPDPSLADQLGKQEHRDLAREAVRKSLVLLKNGKPGDAPLLPLPKKAARILVAGSHADNLGYQCGGWTIEWQGDTGRTTVGTTVLDAVKAAVDPSTEVVFAESPDAEFVRSGGFSYAIVAVGEHPYTETKGDSMNLTIPDPGPSTVQTVCAAVRCVTVLI

SEQ ID NO: 65304 - protein, 215 aa, Zea mays subsp. mexicana
  Clone ID: UC-ZMFLTEOSINTE056C04_FLI.pep
NIIHISRGKSCAATSPCLDIISVAIVRRHNISVGLHPGNVAAGLVVADDKDATVVAAHDARAADACSGAPHHLRVVATHLAGGAAVGGVVVPLFLVYPRSHCVHRLPIEAGGPPEDVLPVGPARVLETAVAGPLCGVLLCELLQLRAPGHRANTDGGTGAVLGSEVVLRRILRVGRVHGSGSCHDQPQEQDCELVGCLHCRSCYLGRQPGSVYVT

SEQ ID NO: 65305 - protein, 163 aa, Zea mays subsp. mexicana
  Clone ID: UC-ZMFLTEOSINTE066H09_FLI.pep
FYYPLAIKDDVGTIRIQRPHKGPFYASSKSIDQLIVNLGKWAKLYRIASMGFATFGVFLLAKRALQHFLERRRRHELQKRVLNAAAQRQAREAEGSKGTSDAEPNSKKDQLVLDICVICLEQEYNAVFVPCGHMCCCVACSSHLTNCPLCRRRIDQAVRTFRH

SEQ ID NO: 65306 - protein, 202 aa, Zea mays subsp. mexicana
  Clone ID: UC-ZMFLTEOSINTE097H03_FLI.pep
RETEEEKESMAATLARRAGRSAATTLWGAARGFASVGSDIVSAAPGVSLQKARSWDEGVATKFSTTPLKDIFYGKKVVIFGLPGAYTGVCSQAHVPSYKKNIDKLKAKGIDSVICVAVNDPYVLDGWAKKLEAKDTIEFYGDFDGSFHKSLDLEIDLSAALLGRRSHRWSAFVDDGKIKSFNVEEAPSDFKVSGAEVILDQI

SEQ ID NO: 65307 - protein, 517 aa, Zea mays subsp. mexicana
  Clone ID: UC-ZMFLTEOSINTE101D11_FLI.pep
FKHPFDVIVEFISEEIRHGPLILFLKDTEKICGNNDSYYGLKSKLKHFPAGAFIIGSQIQPDNRKEKANVSSPSLSKFRYSQAILGLTLQDIDGGNDNNKETSKAMKHLIKLFPNKVTLEAPQAEMELSRWNQMLNRDIEVLKGNANISKIRSFLTRLGLECTDPEAILVTDRILTNECIDKIIGFALSHQLKNCTNPDPPLGSVQFALSSGSLKHGVDMLKSIQSGSKSSTKRKSLKDIATENEFEKSLLADVIPPHEIGVTFEDIGALESVKDTLKELVMLPLQRPELFNRGQLMKPCKGILLFGPPGTGKTMLAKAVATEAGANFINISMSSISSKWLGEGEKFVKAVFSLASKIAPSVIFVDEVDGMLGRRENPGEHEAMRKMKNEFMVNWDGLRTREKERVLVLAATNRPFDLDEAVVRRLPRRLMVNLPDASNRRKILSVILAKEDLADDVDLETIANLTEGYSGSDLKNLCVTAAHRPIREILEKEKKELQLSFKWICSHAGESFSRSRK

SEQ ID NO: 65308 - protein, 273 aa, Zea mays subsp. mexicana
  Clone ID: UC-ZMFLTEOSINTE40A10_FLI.pep
PFCRRRSSCSPELEPKRTQHRRRTLPFSAALEMAANLEDVPSLDLMHELLRRMKCSSKPDKHLILIGPPGSGKGTQSPLIKDEYCLCHLATGDMLRAAVAAKTTLGIKAKEAMDKGELVSDNLVVGIIDEAMKKPSCQKGFILDGFPRTVTQAQKLDEMLAKQGANVDKVLNFAIDDAILEERITGRWIHPPSGRTYHTKFAPPKSPGVDDVTGEPLIQRRDDTAEVLKSRLEAFHKQTEPVIDYYSKKGLVVNLPAEKPPKEVTAEVLKALS

SEQ ID NO: 65309 - protein, 249 aa, Zea mays subsp. mexicana
  Clone ID: UC-ZMFLTEOSINTE44E11_FLI.pep
HHRRGEPGDCCLSANRRLRLAGCAHRGKAVPSGGSGEGDEALLLASPDGGVEHVLQRLVPEGEPEVLELLGREAHRLEVVLDPGEPLRDVVLGVPIPEHGGEAVDGDVVRGADVAPGRGRVLEEEDLGVAEVVEVDELHLLEDRVVRRVPRDERQRGDEAGRHGRADERADHERRLDYLILRVFGQEVHGRGDVEDAGAAPDGVVEAAFLRQVGFPYGQALRCSGKVHQWLRLTNVRGIAPGPPSPPGF

SEQ ID NO: 65310 - protein, 421 aa, Zea mays subsp. mexicana
  Clone ID: UC-ZMFLTEOSINTE95D03_FLI.pep
TLPTLSRCLVELEGLHHLPGEVGVVTAEVAVGGGLDEPVAALLQVEVDADHPGPEVEVLLHDLEDLLVGDRAGAVRVDEHGQGLRHADGVRHLHEAAAGEAAGHDALGGLPGHVGAAAVHLGGVLAGEGATAVGSPAAVRVDDDLAAGEAGVAVGPADDEAPGRVEVEDGLLVEVLLRDHGLDDVLLEVGGDLVVGDGLVVLGGDEHGVHADGHHGAALVHVLHRHLGLAVGPQPGAGAVLAHLGEARAQLGGQHVAERHQLGGLVGGVPEHVALVTRADLLGPLREVPVHALRDVGGLLLDVHQHLAAVGVEAHVVGGEPDLAAGVAHDLLVVHGRLGRDLAEHHHHVGLGAGLAGHLAVGVLREACVKHGVRHLVAQLVGVPLVHGLRGEKEALGRHCLLLALPTSCAAALYSGPARGR

SEQ ID NO: 65311 - protein, 139 aa, Zea mays
  Clone ID: LIB4172-048-H3_FLI.pep
NFEVVAAIRNIKEMRYTHQGEAIQNNNLKEKKYLDSSMARWLQYLRSSIPVIVIAFDDILMQRAPLFFRIENSFLWHQRGWIGTDERKSPSWSSACRWHLHRHSPRHRRSRLGPQGSGSWRGAWRPRRSPPRLHRGRSC

SEQ ID NO: 65312 - protein, 292 aa, Zea mays
  Clone ID: LIB4172-050-B9_FLI.pep
LPLLLLLALPGAYARPARQYLGQCPGLEYRLPPFAAALRATCPVSTEGYSSPYEVVSGEELLRMLDGKEEHTAVLFYASWCPFSQRTRSVFDDLSSMFPRVKHLAVEESSIMKAILSRYHVRALPSIIIARNSHVFWPLGSKDLDSLVSLYTAATGEEPVAYIGSRKWSAAQSTDGYAKAWNSSIISETVKREPYLALSILFICLRVFFFFFPKSFALIQDLWTGYREQINLGILGRLAQLLECVPHAVDVRKVWSKLRLVVGANENGRVWAALTSLPLGGRPSPIHGLLLD

SEQ ID NO: 65313 - protein, 887 aa, Zea mays
  Clone ID: LIB4172-053-A8_FLI.pep
PPEPPQLEKGAHGDAARRAGSDLGRWPRGGGFAWGPAEPGPRGSRSDSPGDAAGNALPQAAGGGSRVPSGGAEAGIRRRRGLRVARASEAAAMEQDPERACLRSFELHESESSLYVLGTNSDRTLWRLLKIDRSEPSELVIDECSTVYTESEHPDLLKGLDDEHRSTGGVKFVTKFYGIIGFIKFLGPYYMLIITEQKKIGEIFGHPVYQVTRTSMVELANSKTRSTFQNFKDENRYRKILNALDLRKDFFFSYSYHIMRSLQKNLADPQDGWTLYETIFVWNEYLTRRIRNCLRNTLWTVALVHGFFKQDKFSISGKDIMFTLIARRSRHYAGTRYLKRGVNEKGRVANDVETEQIVYEAVPGPTEVSSVVQNRGSIPLFWSQETSKLNLKPDIILHEMQNNYEATELHFENLRARYGNPIIILNLIKTRERRESILRREFDKAIKIINKSLSEENHLRFLHWDLHQNSQGKPTNVLDVLLKVAFRALNLTEFFYCQVAPNSETSAQCPTLLNGLDQYLCDDNNSDDTECTEIVGDVSQEDISGSSDSSGNATTEDKFENSGLPPPKPPKFQKGVLRTNCIDCLDRTNVAQYAHGLAALGHQLHALGFIESPELGLEAPLAHHLMHFYEMMGDTLAVQYSGSAAHNKVFSAKRGHLKLFIQSQEFFRTLQRHYSNTCIDANKQAAINLFLGYFQPQQEKPALWELESSAGKHNNNLFDGHPSTLKRVKSDGTILHESNASISGSGRCHNEQLSASQPDVQNGFQFPTSESDSLHENDISSACGSGVAHLRYTPTASDVLHVPRAKVEYCHDSGDSNFLDLEWLSTSGNSSDERSIATSTPDANLSNENVISGITPDIMENHLAEMQYQKLPRNFVQWVNHGDTFWY

SEQ ID NO: 65314 - protein, 412 aa, Zea mays
  Clone ID: LIB4172-053-B8_FLI.pep
SKFCVRVLGSFQSKAALVVDPVMVSTSGDTLSGPSTLATYRDELFSMADIVTPNVKEASKLLGDVSLHTISDMCNAAESIYKLGPKYVLVKGGDMPDSSDAIDVLFDGKEFTELRGLRIKTRNTHGTGCTLASCIAAELAKGATMLHAVQAAKKFVESALYHSKDLVIGNGPQGPFDHHFELKSPSYKMGSLQKFNPDDLFLYAVTDSGMNKKWGRSIKDAVKAAIEGGATIVQLREKDAETREFLEAAKACVEICKSSGVPLLINDRVDVALACDADGVHVGQSDMPAWEVRRLLGPGKIIGVSCKTPAQAEQAWKDGADYIGCGGVFPTTTKANNPTLGFEGLRTVCLASKLPVVAIGGINAGNAGSVMELGLPNLKGVAVVSALFDRERVAAETRNLRSILMKNAYSRS

SEQ ID NO: 65315 - protein, 321 aa, Zea mays
  Clone ID: LIB4172-055-G8_FLI.pep
ASSVVACCHSADFSMSFKIQLLSSIAIFAFALHLHPCVSTEFRRELSSWTTGIATWYGDANGAGSEGGACGYQYAVDQPPFSSLIAAGSPFIYDSGNGCGSCYQVVCSSNQACSGYPVTVVITDQGPGGGPCLSQASDGMCMNEGAHFDMSGTAFGAMAKPGMADQLRAAGLLQIQYTRVQCEWPGVDVTFSVDSGSNPNYLAVLIEYEDCESDLSAVDIMQSSAGQWVPMQHSWGAIWRLDSGSALQGPFHLRLTFSSGRVLIASNAIPAGWNAGAAYRAGGVAVTRARPRSGGSQAGEAAAGTFRGLVYHLLMFVVLAL

SEQ ID NO: 65316 - protein, 599 aa, Zea mays
  Clone ID: LIB4172-055-H8_FLI.pep
SPRAPLVNRGGREGGRAEPVLRSRARTHARSAAGRGRAYKATAGRARRGYSPPLPHMRAGAAARGDSPRAMSAAATPRHRLGVALLLLLLLGGADAKAHNYEDALRKSLLYFEAQRSGRLPHSQRVTWRHHSGLTDGLEQGVDLVGGYYDAGDHVKFGLPMAFTVTMLSWSLIEYGADVAAAGELGHALEAVKWGTDYFVKAHTRPDELWAEVGDGDTDHYCWQRPEDMTTSRQAYKVDRDHPGSDVAGETAAAMAAASIVFRDSNPHYAHLLLHHAQQLFEFADKYRGKYDSSIAEVKSYYASVSGYKDELLWAALWLHRATGRADYLDYVVDNADSFGGTGWAINEFSWDVKYAGVQILAARLLLRGEHATRHRSTLERYRAKAERYVCACLGRNTEGGADANVERSPGGMLYVRQWNNMQYVTSAAFLLSAYSDYLAEAGVRTVSCAGGETVAAREVAALARAQVDYVLGTNPRGVSYLVGYGPKYPSRVHHRAASIVPYKHSKEFIGCTQGFDHWFGRRSSNPNVLVGAIVGGPDRRDRFRDNRENYMQTEACTYNTAPMVGMFAKLHRLARQEREQGPTPAPAPAPVTSAAADV

SEQ ID NO: 65317 - protein, 277 aa, Zea mays
  Clone ID: LIB4185-002-D5_FLI.pep
SINRCLHIRTQTRAAERAHAGPKSITSSDPIRTCRWLSSLARLPARGFSRAEGDLVARPGRAREDGVGRVPGVRDRLRARLLEVLRPVVGAAAAALAVAGVAAPGHPPLLGGAVERDLLHGARRPAAAAPGTAAAAAGREERHGRVEAVDEGDVEPVGACAAERVLGQRDGLEPDLAARQRAAAVARLALPQRAVGDEAAPRAAPHAAAPRPRGHVDGPRLPGVQHRAAARQRRRPHGVRALVGHHDARGVRHRGAHEEESEYAQSGCHFRAVWLLY

SEQ ID NO: 65318 - protein, 324 aa, Zea mays
  Clone ID: LIB4185-010-F4_FLI.pep
RTAGAVGSLRAGPVARGGHAAVPTPHVRGSRSLAVWPVVLARSPRKLATSPSGQTTLEFAVGRGEEEEDEMARDDGFPVWEAALLAGVAAVFAAGLAGVYISMPRSDYSFLKLPRNLQELQVLTVHLEGYSSDYTIQVLVGYCAVYIFMQTFMIPGTIFMSLLAGALFGQLGGLALVIFAATAGASSCYFLSKLVGKPLVFSLWPDKLTFFQKQVAKRREKLLNYMLFLRVTPTLPNTFINFSSPIVGVPYHTFFFATAIGLVPAAYVTVRAGIALSDLRSLNDLYDPQSIAVLFLIGLVSVAPTLLGKNEKPTSASDMAANTN

SEQ ID NO: 65319 - protein, 215 aa, Zea mays
  Clone ID: LIB4185-011-F10_FLI.pep
TEVWKLFLSIAFYSVIDLVKKIQFYSKVEALLQPHYSRDLWKVRCDRGHGILAVRVWSPSGATATTLPAITWLLMITSWQGIWAALVADGAAGDGAALGDGHGHGRLDAGLPRGVGQHDGAQALGDAPDGAHLRAAARRHRGARVLRGRRARSKLERHLVHRDAAALSRAVRRIQPREAGHQEHRDDADAPCLELHFFPCCLVVHLTLCCLGCTT

SEQ ID NO: 65320 - protein, 226 aa, Zea mays
  Clone ID: LIB4185-011-F6_FLI.pep
PCQLNAATEQIQRDRGLSDSIFESRHLHAPVGHRLLAAEELVGDDLELLALLGLGDLLDRLWVGDPLQFGARAEHVLLLPLLTLLAGLPLGHLVLPDLFLELRLAGLVRALQRLLPDALLQRGRLPRHRHGRRSPGAGLLPPPSRQPPCDDAVVGGLAEGGRLRGVGEGRHGAELRRPVRVGIEVHGIRGRRLGILATLALAALAAEALIQAAEVDVGSHAESGRV

SEQ ID NO: 65321 - protein, 334 aa, Zea mays
  Clone ID: LIB4185-013-F8_FLI.pep
DPVETTAMATTTTHAANSCTGEGEGFRGSPLVVKSATPSKLKRQRVTRRSQTEQLNSAGPLASPQRVPLQPSLLPLVRVTREAALLGDVRDLDARVVDLAGAPPPRQHLAVGPHPLAVVPARHHHPELERARRRLPRAPRRPVVARHEPPVGRTHLRDVYGDDVGLPALVEEPDGEVAGGMAPVLHPHRQVPVLVLARHPFVLDVDGAACCEACGHAGARHGRERGAAEHEVGAVGPGAVRDHHPGARRAAQLLVLAPHLEAGAAADAGAVQRGAGGGEEPGAQGGGIGAVPTGAAGEGERGGVVGGLGVAHAAVAGGREEKLELEPDEEQRER

SEQ ID NO: 65322 - protein, 307 aa, Zea mays
  Clone ID: LIB4185-014-A6_FLI.pep
SFSYTRLLHLVSLSTTDHFHSFLLHQKPCFPRTTTAQLASSDVQAQVQQLVVADVLVVDDEVSVDELAVGRDGPDEPPGEEAGGELDVDDDLPHGGLLLAADGDEVAPADPPDPPGDVEEEQARGDELAPVPLVAADDEVRQAVGAAEQAELAVVLEPPLGLLDGGVDGEGRGAVGRVLLERRGELLDRVLLALGERLGLLARGQPRDVSGRGGRGGGGRGEKHRRQSQRGRERLHGGCERHTAAAAVAVAAGGGAGHGEARAWEARLGGEGGRGGGGEGGHLYCCCCCVRRGAGELIGRDQAGCAG

SEQ ID NO: 65323 - protein, 146 aa, Zea mays; identical to SEQ ID NO: 64860
  Clone ID: LIB4185-015-A4_FLI.pep

SEQ ID NO: 65324 - protein, 163 aa, Zea mays
  Clone ID: LIB4185-016-E4_FLI.pep
SKAAPSNSFLSSREGKNRQGERSGESREQGSAVTSSFSKVSRSAAMATRAASRFLQRRLLSSGGKVLSEEEKAAEKVYIKKMEQEKLEKLARKGPSSGEQPSSTTVSAASDVKTGAGPTESASANVSTDKNRNYAVLAGTIAALSGLGWYLLSKPKKSEEVVD

SEQ ID NO: 65325 - protein, 196 aa, Zea mays
  Clone ID: LIB4185-023-A10_FLI.pep
PNLSLAVGMSSSSSFPTSRFPFAAGARAPGGRGGGGGSSVRPWGSTGGTSVSSSGKRIQKELLDLNASDCSAGPKGDNLYHWLSTIFGPQGSPYERGIFFLDIVFPPDYPFKPPMVTFKTRIYHCNIDSTRKVHLDILKDGWSPAFTISKVLLAIKDIINNPDPYTPLVMSISRQYLTDRAKHDETAAEWTMRFAR

SEQ ID NO: 65326 - protein, 176 aa, Zea mays
  Clone ID: LIB4758-001-H2_FLI.pep
PRDSIILYCSISPSERTHSPTQMAAATALVSSSSLRAPAAFSVVVRAASRPAPVVAVVTPLPAAKAAAARGARLRAQATHNVKLITPDGEVQLKMPGDVYILDYAEEQGLDLPYSCRAGACSSCVGKIVSGSVNQFDQSFLDDDQVAEGFVLTCIAYPTSDLVIQTHKEDALVESY

SEQ ID NO: 65327 - protein, 204 aa, Zea mays
  Clone ID: LIB4758-001-H6_FLI.pep
NRLRTHGHGGGGGGRSRRLMVIIGEAGDGGGHRRQRPQLLRAELDAAALLRRRAAAAVPAGGAHRQAPGVLRHRHRRRGLRRAAAQGGDRPQALRRPGHGQGQEALHRDRGDRRRLRSHRGGRQERHLRRGRAAPRRDPRRRMPCLQQVEEGCPGERERLLHAPRALHRHDRQEAKAQALRFRIDFGSLYLLISCACQTFPILD

SEQ ID NO: 65328 - protein, 131 aa, Zea mays
  Clone ID: LIB4758-001-H7_FLI.pep
RKLPIFKISHGVARSREEHNSSSEEPSENVGALGDGRPEQRRGVDEMVQGRRVPNLFVRGVLGAEHVRAVGAEPQSGNPGDGGHLVPQHRIRRRQHLPLLSSSPSTSLTCYCSRSLLGSLLVGADRIMIHY

SEQ ID NO: 65329 - protein, 147 aa, Zea mays
  Clone ID: LIB4758-003-B10_FLI.pep
GFMVEYYGTPVNLKSIAQISTPDATSLLIQPYDKSSLKLIEKTIVAANLGVTPSNDGEVIRVTVPPLTSDRRKELSKTVAKLAEDGKVAIRNIRRDAIKAYDKLEKEKKLSEDNVKDLSADLQKVTDEYMKKIESIQKQKEQELMKI

SEQ ID NO: 65330 - protein, 184 aa, Zea mays
  Clone ID: LIB4758-005-A8_FLI.pep
RGSKTYKTIATPSPSLSLLQPNQARTTRHQVEELERAPIMAGVNSSVVGLKPAAAVPQAAAASSPAKRVQLAAPEGRRAALLGLAAVFAVTATTGSAKATIFDEYLEKSKANKELNDKKRLATSGANFARAYTVEFGSCQFPYNFTGCQDLAKQKKVPFISDDLEIECEGKEKFKCGSNVFWKW

SEQ ID NO: 65331 - protein, 234 aa, Zea mays
  Clone ID: LIB4758-005-B4_FLI.pep
PGNQISLSVANTPLFQPSPPCSYYPPRPSSSRSFWKPTQAMDAASIAAAAAAVATPPPGPAVTVQVPRGQVDLIDFIDWTGVECLNQDSSHSIVNALKQSLRDDEGLYLASDSDEQLLIYIPFMQVVKLHSVLFKGPEEEGPKTVKLFSNKEHMGFSNVNDYPPMDTLELSSDHLIENKPLPLKYVKFQNVRSLTVFIEDNQSGSDVSKIQKIALYGTTVDTTNMKDLKKIEEH

SEQ ID NO: 65332 - protein, 416 aa, Zea mays
  Clone ID: LIB4758-006-D7_FLI.pep
RWTHNANIYHHITPRRSRSARGDLIIKGRGGARVGVGHCHLLDPHRRRAVVDDAAVEPDLALGPREHLDVSHLDHGGDELLLPERLVGGEAVDGGVERGVDAQLVVGEEEAEVERQQLVVVVVQHRRRAGVDHRGRGRGRVGVGRAQRAQQCGVPGAQARVNDRGGSVVDAREKRCAEGAADGVGAGEDDHLLVGEVLGREAGHQLGRVERWRRQVAVGLRVQGDVAVPAARGHLVRQVAREVDAVARREGYDVRARHRLRAALLHRRLRRVDHLEPVEARVVGRRVALRRVVGGGEQHRCVAAPDEAVVEMEADEAGGDAGVVGEGARHRLADQGLGVGAARVVEPHLQLAARHRRQMEAQHHGGGHCRHRHSTVHHYSLACNRRHDEDVGCLWRRALDLAALLLCPPRACVLSR

SEQ ID NO: 65333 - protein, 508 aa, Zea mays
  Clone ID: LIB4758-009-C11_FLI.pep
VATMEDKVLIAVGTVAVVAVLSKLKSAVTKPKLNLPPGPWTLPLIGSIHHIVSNPLPYRAMRELAHKHGPLMMLWLGEVPTLVVSSPEAAQAITKTHDVSFADRHINSTVDILTFNGMDMVFGSYGEQWRQLRKLSVLELLSAARVQSFQRIREEEVARFMRSLAAPASAGATVDLSKMISSFINDTFVRESIGSRCKYQDEYLAALDTAIRVAAELSVGNIFPSSRLLQSLSTARRKAIASRDEMARILGQIIRETKESMDQGDKTSNESMISVLLRLQKDAGLPIELTDNVVMALMFDLFGAGSDTSSTTLTWCMTELVRYPATMAKAQAEVREAFKGKTTITEDDLSRANLRYLKLVVKEALRLHCPVPLLLPRKCREACQVMGYDIPKGTCVFVNVWAICRDPRYWEDAEEFKPERFENSNLDYKGTYYEYLPFGSGRRMCPGANLGVANLELALASLLYHFDWKLPSGQEPKDVDVWEAAGLVAKKNTGLVLHPVSHIAPDNA

SEQ ID NO: 65334 - protein, 172 aa, Zea mays; identical to SEQ ID NO: 36903
  Clone ID: LIB4758-011-G9_FLI.pep

SEQ ID NO: 65335 - protein, 147 aa, Zea mays
  Clone ID: LIB4758-012-G5_FLI.pep
HTDSVQLSAQHDARAKVERNCIYFLTSRGPTLSPVALLCFTWDPSHSGNVPDLQHRQYAVSGLASSPVRTVSTTLSSSFRMAGFIPPPASARTATRPRRGLGARAAGRDGAGTARRQAANAHARATATATASRPLLISPLTHSLSLH

SEQ ID NO: 65336 - protein, 159 aa, Zea mays
  Clone ID: LIB4758-013-G12_FLI.pep
NSQDLLRNGAGFLKSLLLLTAEVEFVGVVIHATSIFIHFLGTLLVKFFQQAEDAACDLAALLEALLGVRVLLLAVEEGNVLRAAPDRDVLRRRHQHRRSRDRLPRGVYGGAARRHRCGRGGFTGLLVLEIWRRTEGERKGRSETATPRRGRRRRDDGPG

SEQ ID NO: 65337 - protein, 246 aa, Zea mays; identical to SEQ ID NO: 61111
  Clone ID: LIB4758-014-C2_FLI.pep

SEQ ID NO: 65338 - protein, 194 aa, Zea mays
  Clone ID: LIB4758-015-E6_FLI.pep
FVISPPESRGRGSDMGFVGDTMESIRSMQIRQVLMQIISLGMIVTSALIIWKGLIVFTGSESPVVVVLSGSMEPGFKRGDILFLHMSKDPIRTGEIVVFNIDGREIPIVHRVIKVHERQDTAEVDILTKGDNNFGDDRLLYAHGQLWLQQHHIMGRAVGYLPYVGWVTIIMTEKPFIKYLLIGALGSLVITSKD

SEQ ID NO: 65339 - protein, 393 aa, Zea mays
  Clone ID: LIB4758-015-G4_FLI.pep
PLLPPSPPPPARRRESSFLMGNCAGVEGNAEINPSFSAPNSSGTAGSKSVSKNAADTSTFGTKTSGSSSSVPPTPRTEAEILESSNVRKFSFGELKGSTRNFRPDSLLGEGGFGSVFKGWMDERTLAPVRPGAGIIVAVKKLKLDSFQGHREWLAEVNYLGQLSHPNLVKLIGYCLEDEQRLLVYEYMPRGSLEHHLFRRGSNFQPLPWNLRMKVALEAARGLAFLHGDQAKVIYRDFKTSNILLDSEYNAKLSDFGLAKDGPSGDKSHVSTRVMGTQGYAAPEYLATGHLTAKSDVYSYGVVLLELLSGQRALDKNRPPGQHNLVEWARPYITNKRRVIHVLDSRLGSQYSLPAAQKVATLALQCLSMDARCRPGMDQVVTALEQLQRPRAH

SEQ ID NO: 65340 - protein, 345 aa, Zea mays
  Clone ID: LIB4758-017-H1_FLI.pep
PGSLFTCLAWAGAPAASSDLSPHFSHAHSLLPSPITTLPLQFTPTAPPLPLKSRAIADPPPPRSGRLPSRPIGSCSVDGTLNCGYSSFRGKRASMEDFYDIKSSKIDDKQIHLFGIFDGHGGSRAAEYLKEHLFENLMKHPGFMTNTKLAINETYRKTDSEFLDAERNSHRDDGSTASTAVLVGDHLYVANVGDSRAVISKAGKAIALSEDHKPNRSDERKRIESAGGIIMWAGTWRVGGVLAMSRAFGNRLLKQFVIADPEIQEQEINDELEFLIIASDGLWDVVPNEDAVSLVKMEEDPEAAARKLTETAFSRGSGDNITCIVVKFEHDKPGGGGYSPPGDKS

SEQ ID NO: 65341 - protein, 296 aa, Zea mays
  Clone ID: LIB4758-019-B6_FLI.pep
RGPSPLSVSSPSLFSSLQISLPHPPQNPNLSGSTLRLPPPPPPARPRKLGRASLSSAKSPTPCSGTSAATAMDMEVYERLTAETSHYRGTRFDALIGLDEVEPSDEEEDEEEEERAAGAGAGDELLCPFCSEELDAVGLWCHMDDEHRAEVNAGVCPICTDKVDMNLIVHISSQHRGFLKDKWRNQQGSSGVRYSTLALLKKDLHERISGSSRAAPVSTVPDPLLSSFVGSFYEVDLPKDAKKESLVETEVRSDNIEQRAAESFDEPLLPEVKEEKTRRSQFVQGLVLSLMFDDIL

SEQ ID NO: 65342 - protein, 203 aa, Zea mays
  Clone ID: LIB4758-020-F2_FLI.pep
RKHRRWLDARIQTLVCYGGGGGGATADTRAGPVARSSRQRCRGHRASRAEDLSEARIAGAVTARRAKAAELRADLQDVQRRRGGGHRVCHVHLQHIPLRHHHQARREGELEAAGPRRGAAVGRSGAVPAAEGPAALPPRRPHEDGRRGAVLQGRVPGRHHRRGLLRASQGRLPDVLGSVEPSRTRKPAHVFRVAGRSAAAAGL

SEQ ID NO: 65343 - protein, 342 aa, Zea mays
  Clone ID: LIB4759-004-A2_FLI.pep
KFHFIPSGGGRAIRYLWRERCRRQEKSTAFIREKRSYSYGSPRILLLLRAARRGHDMQAAAAAAPWTTKTLPVFGNHLGNPTRFTGASSSFHSTPASFAKWRNKWDCHKSEKGARKASRNYERYVVRQKRAEGKKALKDYLLYGKSLPHLQDGSTGSFANSHAIPRFKTFRKGPQTHWSSNSWQGVHNHRKNKKDKERFCNFFHDDHHVHPDDIFEAVFGAHYGFTWSQISWEGFHFRDKSFRFRWSGRESRRERIPCDSEDEESADESRETASVGSHAHRVILGLQPCGPLTLEDVKTAFRASALRWHPDRHPGSSQAMAEEKFKLCVNAYNSLCSVLKAA

SEQ ID NO: 65344 - protein, 249 aa, Zea mays
  Clone ID: LIB4759-005-E7_FLI.pep
PKTTGRRRDGGKNTAQAQAGRDVKLPLRARRRHLAAGGRIAAGSPRAPFRRRTGRSPDGSGSDDLRGLPEMAGKKRKAEAARLEETDRVLYGAFRGAANSLSQLYTLGMGAQKASFHAGERHAMEKLYEWILRQHENGLRLTVADVASHIQHEIQYGGDNASASPRSQYPSQSTAPTMHIPNTSNQQPSPSLFAPGNPGVDTVQEFHGLFKRIIQPHPAEPATLPPRAGRGCRVLRERCKPRCEPHGFE

SEQ ID NO: 65345 - protein, 524 aa, Zea mays
  Clone ID: LIB4759-008-F1_FLI.pep
TTPPRQAMACGSATAARPAARLPLLAAVVVASSFLAVAAPPGALLTSVPGFGNKQQLPSKHYAGYVTVDERHGRRLFYYLVESERDPARDPVVLWLNGGPGCSSFDGFVYEHGPFSFESSGGTAGSLPKLHLNPYSWSKVSSVIYLDSPAGVGLSYSNNVSDYETGDFKTAADSHTFLLKWFQLYPEFLANPFYIAGESYAGVYVPTLSSEVVKGIHKGVKPVINFKGYMVGNGVCDTVFDGNALVPFAHGMALISESIYKEASTACQGNYWNSSSAKCDEALSKVETEIDGLNIYDILEPCYHAPADTKQAAVTPQAQSTSELPQSFKDLGVTSNKPLPVRTRMHGRAWPLRAPVRDGRVPSWQELAADVASTSSGVPCMSDEVATAWLNNNSVRSAIHAEPVSSIGPWELCTDKLDFDHDAGSMIIYHKNLTSQGYRAFIYSGDHDMCVPYTGTEAWTASLGYAVVDPWRQWIVDEQVAGYTQGYEKGLTFATIKGAGHTVPEYKPQEALAFYSRWLAGAKL

SEQ ID NO: 65346 - protein, 533 aa, Zea mays
  Clone ID: LIB4759-010-A9_FLI.pep
GEAKSRIDMELSLTSSAALQFVLLLPLFSVLCILYLRQDPKKQPRAHGLKVYPLVGTLPHFVKNQRRFLHWSTDVLKRDPSHTLSFKALGLTGGVITANPANVEHILKTNFANYPKGELTVSMIEDFLGHGIFNSDGEQWLWQRKAASYEFSKRSLRSFVVDAVRFEVVERLLPLLDRAQRDGRTLDVQDVLERFALDNICRVAFGDDPACLAEEEGMGMAMAAQQRQSAEFMRAFNDAQSAIMARFMSPVKSLWRLKRLLNVEPERRMREAVRTVHGYADRIIRERRARGEAAGPARDDDFLSRFAASGEHSDESLRDVVTNFLLAGRDTTSSALTWFFWLVSTRPDVEEKIVREVRAVRRLGSAGAAAPAFSFDELRDMQYLHAAITESMRLYPPVAMDTHSCKEDDFLPDGTFVGKGWLTTYSAFVMGRVEDIWGADCEEFRPERWVGEDGAFRPESPFKYPVFHAGPRMCLGKEMAYIQMKSIAACVLERFSFQFVGGGERPGLVLSLTLRMQGGLPMKVVTRTNSALG

SEQ ID NO: 65347 - protein, 488 aa, Zea mays
  Clone ID: LIB4759-011-A11_FLI.pep
TANEQSSQAVQSPDHFPLVLLQSTRRPSPQARLGCCSWVLLPEPPDFDRGRVGRPMGSRVKEDERNEKIIRGLLKLPGNRRCINCNSLGPQYVCTSFSTFICTNCSGIHREFSHRVKSVSMAKFTSQEVSALQEGGNERAKEIYFKHWDLQGPVIDSSDVHRLRNFIKNVYVERRYSDQRIGEHLAQAKKPSSSRTDDPSPATFKDAKLYMSKNLIDFDSDLEPPQGVAQTDIQKGSSPQTDVGWATFDDATSKKTTTMPSTSSTNFLEGPMLQIADLTSAPQIRFSNAKSLSFAPSNRGNQLNQQNFSPVNTTQYSNTLLNRATSAPVHSQDIFAMSYRPVSSAWNWQPNPSVNMQYGQHRTHYPVGIVNTTQLAHPYPVNPVSLAGGPASAHASTRFPSLTSMQEALPNLGSTAVLSRAPVHQYMVQQHTVQVPNYTFPSGYEGTRGIAATASTYGLPPMDQRLAAQNLQVMNHGSLPRVGGNPFA

SEQ ID NO: 65348 - protein, 225 aa, Zea mays
  Clone ID: LIB4759-012-A11_FLI.pep
PGSLMIMERGDEELKLLGMWASPFVLRVQLALSLKGLSYEYVEVDISNKSELLLHSNPVHNKVPVLIHNGNPVCESQLILQYIDEAFAATGPCLLPADPYERAVARFWAAYIDDKVLASWMQASRGKTEEDRAEGRNQWLVVVETLEGALRDCAAGKGMMMPFFGGDSVGYVDVVLGSLLGWVSANQEVWGIECFHPRRAPLTASPHCKPSRRWCPKSAGWLSSA

SEQ ID NO: 65349 - protein, 360 aa, Zea mays
  Clone ID: LIB4759-016-D9_FLI.pep
VRGREQVKVCQLEIPMQIREGPARRQAPSAAGAPPPLSAMMLAMFATMASFYVAGRLWQDAQNRVYLIKELDRRTGQGQSAISVDDTLKVVACRQQGKRLASLEMELAAAKHEGFVGKYTPETNGTHSGKKPLVVIGIMTSFGRKNYRDAVRKSWLPTGSMLKKLEEEKGIVVRFVVGRSANRGDTFDREIDDENRSTKDFLILDDHIESDEELPKKTKSFFANAANTFDAAFYAKVNDDIYINVDTLSAMLETHWDKPRVYIGCMKSGEVFSDSTHKWYEPDWWKFGDGKSYFRHASSEMFVISRAIAQFISINKSVLRTYAHDDVSVGSWMIGLAVKHVNEAKLCCSSWPSGAMCSAL

SEQ ID NO: 65350 - protein, 519 aa, Zea mays
  Clone ID: LIB4759-017-C5_FLI.pep
TTRTTTSDVPPCIHEMVAEAAPSSSAAIWSLRRDEITFDRLHKFWSALSSRARYELLRLDKQTLIEHARKNLYCSRCNGLLLESFTQIMMYGKSLHHEGSCEPRIQEVEAEVQDPSVHPWGGLSTTKDGILTLLDCFINAKSLHEIQNVFDNARAREREREMLYPDACGGGGRGWISPVMPNYGRGHGTRDTCALHTARLSCDTLVDFWSALGDETRSSLLRMKEEDFIERLMHRFDSKRFCRDCRRNVIREFKELKELKRMRREPRCTSWFCVADTTFNCEVFEDAILVDWHQSLLEQDGIYHHFEWAIGTDEGKSDILNFENVGMIGQVHRKGLDLDQFEDYFVTLRACRLDGRRTEFCVKAHALKGQSCVHRRLIVGDGFVTITKGESIRSFFEHAEEAEEEDEDDVVDRDSNDPDGDIAHPQKHAKSPELAREFLLDAAAVIFKEQVEKAFREGTARQNAHSVFVSLALKLLEERVHVACKEIITLEKQTKLLEEEEKEKREEEERRDRRRTKEK

SEQ ID NO: 65351 - protein, 240 aa, Zea mays
  Clone ID: LIB4760-003-D2_FLI.pep
PGVPELITSLSASAGEPTMSAAGGDLPETVEVTLRAVGPSRPTTLRLPPLLSVAELRGCIARERRLAGTEEVRLRLILRGKTLPHQDDSHVTLRDGDTLIVAVAPKPPVNHLLDDDVEDEEEDELKFRIPQTTTLWKRKFFMFLRDKLRLPDIILMALFSLSMKAWIIIAMWFLLAPIAQKYDIGPLYIIGTGFLIILINLGRRQQGDVSAYSIFNEDFRELPGTLNADRIDADIRAGQF

SEQ ID NO: 65352 - protein, 170 aa, Zea mays
  Clone ID: LIB4760-004-D9_FLI.pep
RAYVSYGGEQHLPLVMSLVDEELSEPYSIFTYRYFVYLWPQLTFLAFDARDGKCVGTVVCKMGEHRGAFRGYIAMLVVLKPYRGRGIATELVTRSIRAMMESGCEELVSSDQVTLEAEVTNKGALALYGRLGFIRAKRLYRYYLNGVDAFRLKLLFPRPDNDPQIFGIID

SEQ ID NO: 65353 - protein, 253 aa, Zea mays
  Clone ID: LIB4760-006-F8_FLI.pep
TPRHCVAREPVTLLAAAPCRLVFAEASSRDDMELAEAPAPVPDEDGLDERGVALHLPRLLAGVVSGALTGIFALAGALTGAVTGAVAGRASDSGGVLRGAGLGAVAGAVLSIEVLEASRAYWCSSDRLGSHGGASSMADFIEQLLRARFVQEQLTASGYASYRWQDDLYDIFGDISSEGLSQESLKKLPHHVVSDHQTRDLLGEILCCPICLQDIVAGETARRLPGCSHAFHQPCVDRWLVGHGSCPVCRQRV

SEQ ID NO: 65354 - protein, 328 aa, Zea mays
  Clone ID: LIB4760-007-B6_FLI.pep
REASADGGNKGLALGQFVSLLITATGFASSELARRGINAPTSQSLLNYVLLAVAYGGVLLYRRQPLTIKWYYYLILGIIDVEANYIVVKSYQYTSLTSVMLLDCWSIPCVILLTWVFLKTKYGARKFLGVGVCVLGLILVVFSDVHASDRAKGPNPLKGDLFVILGSMLYACSNVTEEFVIKKSNRVELMAMLGLFGALISAIQISVLEREELHSITWTSGAVLPFLGFAVAMFLFYSAVPVILKLCGATMLNLSLLTSDMWAVLIRIFAYHEKVDWIYFVAFAATAGGIVLYSYSGSNEVEETAQVAGASDEHGKGRDEEAGTRNPA

SEQ ID NO: 65355 - protein, 253 aa, Zea mays
  Clone ID: LIB4760-007-E3_FLI.pep
RVLAPPALGNNPTCLPPSALLLLSSRRASMAASSASLLARRLIMSRRFLSSPLGSLSTTTATRSFSISSPGFKSFVVESDLENEHDQPPADQNRQQTSNSPRPPDTTRPLENGLDPGIYKAILVGKVGQEPMQKRLRSGKTVVLFSLGTGGIRNNRRPLDREEPHQYADRCSVQWHRVCVYPDRLGTVALNNVKTGTILYLEGNLETKVFCDPITGLVRRIREIAVRSSGRLLFLGNDANAPKLGEVKGVGYF

SEQ ID NO: 65356 - protein, 220 aa, Zea mays
  Clone ID: LIB4760-012-H9_FLI.pep
PRGAPASRLAVSSSSSCTSIPRLPSCASSAPTKATATAGGGDEAEAAGGPLGWPDPVLRPQAGAGAVCDGPSHRVADALHDMFLVLILTRLSLELAQENAADLELDIDLVWSDIKNLNLKGVHVDTVVMNPPFGTRRNGADMEFLSMALQVASQAVYSLHKTSTREHIKKAALRGFNAISAEVLCELRYNLPRTYKLHKKKEIDIAVDLWRFVPNAQRRS

SEQ ID NO: 65357 - protein, 309 aa, Zea mays
  Clone ID: LIB4760-019-A4_FLI.pep
WSSLPHHCSSVPAAPRVAARMNVKGGSRIPVPPPGASALVKVAVFGGAAVYAAVNSLYNVEGGHRAIVFNRIQGIKDKVYPEGTHFMIPWFERPIIYDVRARPNLVESTSGSRDLQMVKIGLRVLTRPMPERLPHIYRTLGENFNERVLPSIIHETLKAVVAQYNASQLITQRETVSREIRKILTERARFFNIALDDVSITSLSFGKEFTHAIEAKQVAAQEAERAKFIVEKAEQDKRSAIIRAQGEAKSAELIGQAIANNPAFLALRQIEAAREISHTISASANKVFLDSNDLLLNLQQLNVSSKQKK

SEQ ID NO: 65358 - protein, 197 aa, Zea mays
  Clone ID: LIB4761-002-E4_FLI.pep
NTPNLDCSSMYLKMCFTVVRCSSCRASIYLSSSAEVDIRPATFVHDLALAPVRVYHDSRERGDHDDPPDMGVGARPEDVHGARHGRSQQLGLGVGEGIVGDGAGHVEDAVTACNGRRQAAEVEQVGLEQPQPLRGAVQPQQVRVLGVAGIADGAVDLVSSAGEEALDEPRGHETPRAGHAHRLHRRRRPLSCCCLHC

SEQ ID NO: 65359 - protein, 202 aa, Zea mays
  Clone ID: LIB4761-002-E6_FLI.pep
KMAPHPQEDKSDRHSSGAGASREQERRPSKAWGILIFGLIGVTTASFAITQVRKSMDWFYTQLNKVQSTSSWTWRYTSNNSSRGSFSEEAKKRYYQRMQQEYEEEQERVQRIRHMQSVFNRERNKFGRGYESWRENGPPRGYNYIPRDDWYWQTDTSHSEHKNRRTYTPAGPRVYPMSHHYAVLGLDRSRATPYRCRSEDCF

SEQ ID NO: 65360 - protein, 486 aa, Zea mays
  Clone ID: LIB4761-003-B9_FLI.pep
RYAADDPSYLWVPPLALHLLQFLVFASPFLDLCLEPLIDSYLLLGMEHVISMEEILGPFWELLPPPAPEPEPEREQPPVTGIVVGSVIDVAAAGHGHGGGDMMDQQHATEWTFERLLEEEALTTSTPPPVVVVPNSCCSGALNVDRPPVMEEAVMMAPAAVSSAVVGDPMEYNAILRRKLEEDLEAFKMWRAASSVVTSDQRSQGSNNHTGGSSIRNNPVQNKLMNGEDPINNNHAQTAGLGVRLATSSSSRDPSPSDEDMDGEVEILGFKMPTEERVRKRKESNRESARRSRYRKAAHLKELEDQVAQLKAENSCLLRRIAALNQKYNDANVDNRVLRADMETLRAKVKMGEDSLKRVIEMSSSVPSSMPISAPTPSSDAPVPPPPIRDSIVGYFSATAADDDASVGNGFLRLQAHQEPASMVVGGTLSATEMNRVAAATHCAGAMELIQTAMGSMPPTSASGSTPPPQDYELLGPNGAIHMDMY

SEQ ID NO: 65361 - protein, 319 aa, Zea mays
  Clone ID: LIB4761-007-C2_FLI.pep
AAWRRHYPFFWAVRPSVPPPPSPLPLPQPRTRFSSSSSLRSTKRSAAKTSMDSSSVGEPFYVVRKGDVIGIYKTLSECQAQVSNSVRDPSVTVFKGYSLRKDTEEYLAARGLRNALYAIDATDARDELFDDLVPCPFQQPDGAASSTLKRSQEIEIGPSKKHPKVDEQVPLPDSHLSCILEFDGASKGNPGKAGAGAIIRQVDGSVIAQLREGLGIATNNAAEYRALILGLTYAAKKGFKYIRAQGDSKLVCNQVQDIWRVKNDNMASFCKKVKELKGTFHLFQIRHVLREYNSAADAQANFAVELPVGEVQEQSNFPC

SEQ ID NO: 65362 - protein, 447 aa, Zea mays
  Clone ID: LIB4761-011-B6_FLI.pep
RISAARLRLSVPPHTPMPLLHLSLPSHRLLVGGRGRLFFPSSPRRICLSVRAAGDAAVSVAEGAYGLPFRPEGAAHHRELSAAVAVVERACRLCVDVKRSLLSRRSSILEKNDQSPVTVADFGVQALISLELQRLFPSIPLVAEEDSASLRSSKADDNSSDILVESIFSAVVDKVSNNGSHLTQDDVLRAIDRGGKDAVSFDSNPATYWVLDPIDGTKGFLRGNDALYVVGLALVVNGKVTVGVMGCPNWTNDDIVNKKDDSVAACNGRGILMVSHIGCGTWSRRLSADIGQFNTAQDIWKRCFVDTCSIAHMAHYCIPDSQTWDMIPLSASYDSTTDATDPRNENEILLLSVFCGSLCKYLTIASGRASVFVLQALPTTQIKSWDHAVGVICVQEAGGQTSDWSGEPLDLAADLTSRRIIYPRGGVLVTNGALHDKLVEMISASYK

SEQ ID NO: 65363 - protein, 557 aa, Zea mays
  Clone ID: LIB4761-011-F5_FLI.pep
AELLCCLLPAIDSFVPRDGRWRYGPRRCCFSSDRRWEVALAHLRCLVDDVGGAGEVAGSDGPALALVVVVEGVGCVRDHGVGLEARRAGLDGLAVRAAGAARVVQRRLEPMLPGHRVRHAPRLPGRHLHPARRVGAGAARPAAVLLPPEAAVALAGAAAAEDELDVVHLLLVGVEDAVVALGGRPGLLVLVEEREEVHVDVGVGAARGAGVAGEHAAGQVAVVRRGVCRRSARLVGVALGRPPRLGDHDAHAVVALPEPADRGEHGVQLRVEEAVVLEAVPGVEHAGVGAEQGVVEGDVSRIAGVSEERVRVHHEVRPGLRQEVEHGLHDGLREVLPERARRGRVGRRERRERDGRRHLDGPVEAQPGQRGVHVGHGRDQLRRHVLGRREHLVAHGDALDLRGRVVRRHVPAHPQQRVGRARRRRRDLLVGQRHHHLDAGVCEGAQHGGVGVVQLHLRHALLLQQLHNRRWVRQVVRHAAVVHAHRPRLCRRKEERNRRGEEDGGEERAWGRHALLCSAARRGRAKTGAGVTGGVDECGADGKCAEVGDLWPVTSSR

SEQ ID NO: 65364 - protein, 262 aa, Zea mays
  Clone ID: LIB4761-011-G11_FLI.pep
REQPGTPDPPLPPPRLNPPPPRCVRGRGREAEAEAAMGSRLGRRVIHFANLPLKVMLPPAPLSSVQEFAVRTVPSASKVDIRRCLESMYGFSVAEVRTLNMEGKKLRRGPFLSAKPDYKKAYVTLRAPLAVSRDLFPIGAILAERERKASAAAARRKAVEGAEVEGESKGKHWMEDEREGFSRAGCGKVVYGNPGRLGRKRRGGDKVKEQAGDEAAKFPWSGMRLATEKPRRVRRSPSKKGIVLKQKSRKVSLQHRSKKLKA

SEQ ID NO: 65365 - protein, 396 aa, Zea mays
  Clone ID: LIB4761-013-E11_FLI.pep
HERWDVLTEMGGAAAAVLAVAAARRKSGPFVSLFSRAARRLHDAVETAAAEEDMAGTRSPRRRRRSSSSLLLGPEFPDTWDPSSRDTTPQSPPRCAQADYDRTASIIDGKSIAEDMRLHIAEEVCQMKCSVGHVPGLAVVLVGDRRDSESYVRYKTKGCEEVGIKSLLAKLPGNCSEDEVMDSVSRFNEDPSVHGILVQLPLPEFMDEEKILSIISLNKDVDGFHPLNVGNLALRSRNPLFVPCAAKACIELLLQSGIELMGKHVSVIGRSKVVGLPTSLLLQRHHATVSVIHAFTTNPEAITRESDIVISAAGVANLVRGSWLKQGAVVIDVGTNPIEDPTSDYGYRLTGDVCFEEAVNVASAITPVPGGVGPVTIAMLLGNTLDSAKRVYGLSD

SEQ ID NO: 65366 - protein, 435 aa, Zea mays
  Clone ID: LIB4761-013-G12_FLI.pep
TDSFLSYKYLLSTMFGRMPRKSSNNTKYYEVLGVSKTASQDELKKAYRKAAIKNHPDKGGDPEKFKELSQAYDVLSDPEKREIYDQYGEDALKEGMGGGSSSDFHIPFDIFEQLFPGSSTFGGGSSRGRRQKRGEDVVHTMKVSLDDLYNGTTKKLSLSRSALCSKCKGKGSKSGASGTCHGCRGAGMRTITRQIGLGMIQQMNTVCPECKGSGEIISDKDKCPSCKGNKVVQEKKVLEVHVEKGMQHNQKIVFQGQADEAPDTVTGDIVFVLQLKDHPKFKRMYDDLYVEHTISLTEALCGFQFVLTHLDGRQLLIKSDPGEVIKPGQHKAINDEGMPQHGRPFMKGRLFVEFNVVFPEPGALSPAQCRSLEKILPPKPGSQLSDMELDQCEETTLHDVNIEEEMRRRQQQKKQEAYDEDEEEDAQPRVQCAQQ

SEQ ID NO: 65367 - protein, 488 aa, Zea mays
  Clone ID: LIB4761-016-D8_FLI.pep
TNPALSLASRPTGYLTDSDRNRTRAYFSRRSRSRGASRLRHSPTADMAPSPWPLLATSLLLILFHHSPRAAAAFPPSLGDGLLGAARAPGFAAWLRGLRRRIHERPELAFQEHRTSELVRDELDAIGVPYAWPVAQTGVVATIAGGSDGPVVALRADMDALPLQELVDWEHKSKENGKMHACGHDAHTTMLLGAAKLLHARKDDLKGTVKLVFQPGEEGYGGAYHVLREGVLDDVSAIFGLHVDPGLPVGTVSSRPGPFLAAAGRFLVTVTGKGGHAAGPQDAVDPIVAASSAIVSLQLLVAREIDPLQAAVVSVTFMKGGDAYNVIPESASFGGTFRSLTTEGFSYLMKRIKEIIEGHAAVHRCTAAVDFMQEKLRPYPATVNDEGMYRHAREVAEAMLGQDKVSVGAQMMGAEDFSFYAEKFAGAFFMIGVRNKSMEEAMHPLHSPYFVIDEDVLPVGAAFHSAVAMEYLNKYSTTRQTELLRIEL

SEQ ID NO: 65368 - protein, 293 aa, Zea mays
  Clone ID: LIB4761-016-E6_FLI.pep
GLGASLKEALKWVTDQPAWQRSEGRDHVIPVHHPWSFKSVRRSVKKAIWLLPDMDSTGNWYKPGQVYLEKDVILPYVPNVDLCDHKCVLETQSKRSILLFFRGRLKRNAGGKIRSKLVEELKSAKDIVIEEGSTGAQGKAAAQDGMRKSLFCLSPAGDTPSSARLFDAIVSGCIPVIISDELELPFEGILDYREIALFVSASDAVQPGWLLKYLRGINAKRIREIQSNLVKYSRHFLYSSPAQPLGPEDLTWRMIAGKLVNIKLQIRRSQRLVKESRSICTCECRVGNTTRML

SEQ ID NO: 65369 - protein, 392 aa, Zea mays
  Clone ID: LIB4761-017-H7_FLI.pep
GLFLFLLPQVGAVASRVPYTAGSSAFLVFRASTTVYRKEGTMDMNSNANNSTAAAASAPINNQQEAVVSSPTRKEQARNPKKARAAPQQAGGSGEPRPRPPPDAAHSCPRCSSTNTKFCYYNNYNLTQPRYFCKTCRRYWTHGGTLRNVPVGGGCRRNKRASSSSSPFPGPSSTAATSAAMEKTVSTRLMLMATSTMAMPSPTAGLFVPDDMSPAFTPTTGGSGFDDLAGMDEQHQQGFLPFSPLSLSDQAPELAPGGGGDTTPSFLDMLTGGYLDGGGYGGMSGGSDAMDMPFSLPEMGPPTTDPMPFQLQWTSSELDNYINDDGGYAAGPAAGVQQQQQQQQQQINGGDHQKQDENKEAGNGKGNDDGGGGSSSVYSFWMNTSGSDGAEG

SEQ ID NO: 65370 - protein, 507 aa, Zea mays
  Clone ID: LIB4761-018-D12_FLI.pep
PPTPEARQYPVAQRISAEGGRGIAPFLTLMATAAADGPPVEPQSLKKLSLWSLKRSLDLFAPAHALLFTPDAESKRIRTGCKVSAEYGAVKDLTPEQGRGGQGKGPAPPSSTALALPGTQDTKDAHGEGSRNAIVPAPLMLPKAPESTIPGKNTTLSIPGSSDRFSTSALMERIPSRWPRPTWHAPWKNYRVISGHLGWVRSIAFDPANEWFCTGSADRTIKIWDLASGTLKLTLTGHIEQIRGLAVSQRHTYLFSAGDDKQVKCWDLEQNKVIRSYHGHLSGVYCLALHPTIDILLTGGRDSVCRVWDIRTKAHVSALTGHDNTVCSVFARPTDPQVVTGSHDTTIKFWDLVAGRTMCTLTHHKKSVRAMALHPKEKAFASASADNVKKFNLPKGEFLHNMLSQQKTIINSMAVNEDGVLATGGDNGSLWFWDWKSGHNFQQDQTIVQPGSLESEACIYAFSYDVSGSRLVSCEADKTIKMWKEDLTATPETHPINFKPPKDIRRY

SEQ ID NO: 65371 - protein, 311 aa, Zea mays
  Clone ID: LIB4762-002-F2_FLI.pep
SPSSLLGAGMAKSGGESTVEVPIPASASATRPKAKHRIEIEGYPVDGVSIGGQETCVIFPTLSLAFDIGRCPQRAVSQEFLFVSHGHLDHIGGLPMYVATRGLFRLRPPTIFVPACLRDLVERLFEVHRAMDQSELNHNLVPLEVGEEYELRRDLKVRAFRTYHAIPSQGYVIYSVKQKLKQEFIGLPGSEIKRLKLSGVEITNTVSTPEIAFSGDTTADFILDPDNADVLQAKILVVESTFPDDSISVEHAREYGHTHLFEITSQADKLQNKAILLIHFSARYTTEEIDAAINKLPPSFRSRVYALKEGF

SEQ ID NO: 65372 - protein, 304 aa, Zea mays
  Clone ID: LIB4762-003-A2_FLI.pep
KKKKEFGSASMAAASQLLSLFFLLLLPACDAIYCDEDDCYDLLGVKQDANASDIKKAYYKLSLKHHPDKNPDPESRKLFVKIANAYEILKDESTRAQYDFAIEHPEEVFYNTAQYYRAYYGHKTDPRAVLIGLLLIVSAFQYINQLTRYNQAMKSVKQTPAYKNRLKALEYERTGGIASKKKGIKQVDKKVEEELSNEVELQIHGVEKPSVWRLFGVQFILWPYSVGKALTWKICWFWRYRVKKLPYTWEDACYLTWISLQIPANAWKNMDESRKEDLVRRHLWEKSNMERYTSGTRKEPKRRR

SEQ ID NO: 65373 - protein, 223 aa, Zea mays
  Clone ID: LIB4762-003-C8_FLI.pep
GKYQLPETRTTPIPISHYGNTLRAEPSKLGADGGAAADQEGVGAGGGGRGVVVRGAVAGGDAGGAVHAGRRGRRRRRRAGGGGARRGAVGAAVRGDLRGGGGRDAAQHQRQVRRPSHPGAEPARARPRRRLPRPRHPDHAVQAQVDRWRSIGRREPNRMPLLTCCGVVKPPLHACRVRTTVCRLHCRGSVAMQEDAMYLLLSMREQRVARSSGRGLQPPVCKL

SEQ ID NO: 65374 - protein, 252 aa, Zea mays
  Clone ID: LIB4762-004-C5_FLI.pep
PGPFPSSTPAVPSCIDSSPVLHRPPPMDVDVDEATATPASASAKPASNGEAPSGAREVDVGEEYTLAGVLRSFVDGVWYPDEPLLRRLRAASCEAAPRLKGASRNSARDLLEWTRQGSGLRAILVISVGTIMPIALTGLLIFMFFLLIATANAIIVSALMSLAAAGGFLAIFFACLVAVYIGAVGVAIFAISAIVISSVVGVMITTGWVGFFWMIWFTARKSMDLTKHSISMTSSAVQSYSASRQVKQKHVD

SEQ ID NO: 65375 - protein, 250 aa, Zea mays
  Clone ID: LIB4762-005-C3_FLI.pep
SLCLSRVFDFSRRRCSSHIPREDACSSPIDTMAVFSDLHTADGLKSLEAHLAGKTYVSGDSITKDDIKVFAAVPSKPGAEFPNAARWYETVSAAVASRFPGKAVGVNLPAGSAPAAAAPADEAEDDDDLDLFGDETEEDKKAADERAAAAKASSKKKESGKSSVLMDVKPWDDETDMKKLEEAVRSVQMEGLTWGASKLVPVGYGIKKMTIMLTIVDDLVSIDTLIEDHLTQEPINEYVQSCDIVAFNKI

SEQ ID NO: 65376 - protein, 161 aa, Zea mays
  Clone ID: LIB4762-007-H9_FLI.pep
GTMGWKAAEKLIRHWKVLRGDNVMIIRGKDKGESGLIKRVIRSQNRVIVEGKNLVKKHIKQGEGHTGGIFSVEAPLHVSNVQVVDPVTGKPCKIGYKYLEDGTKVRYARGMYASGAVIPRPEILKERRKPRPTSPGPKDTPIELAQEKTYDEKAGIGMPDL

SEQ ID NO: 65377 - protein, 352 aa, Zea mays
  Clone ID: LIB4762-009-A10_FLI.pep
REFQISNPHRSPFPKGQNRPRSTPPLPAPADLLERRPAMAASNIGMMDGAYFVGRNEILAWINTTLQLGLSKVEEAASGAVACQLMDAAHPGAVPMHKVNFDAKTEYDMIQNYKVLQDVFNKLKITKHIEVNKLIKGRPLDNLEFMQWMKRYCDSVNGGFMSSYNASERRESSKGGKETNRRASVPSHTPAKSASTGHKAQASHGAKRASGQTAGAPQRSAKPSPVANSSGPAYDEQITELKLLVDSLERERDFYFSKLRDIEILCQNPEVEHVPVHAIQNILYTSEEDPQQQAPALSPIMEASEERPKQEAAHKRKSISDLDEFGMSSSSRQRLSDISDVQLCGSPLTSFS

SEQ ID NO: 65378 - protein, 218 aa, Zea mays
  Clone ID: LIB4762-011-A10_FLI.pep
LLRQLLRSRTVIRSMAATAGGNKIRNAKLVLLGDVGAGKSSLVLRFVKGQFVEFQESTIGAAFFSQTLAVNDETVKFEIWDTAGQERYHSLAPMYYRGAAAAIVVYDITNAASFTRAKKWVQELQAQGNSNTIVALAGNKADLLDTRQVSADEAKAYAQENGLFFMETSAKTATNVNDVFYEIAKKLLQGQQVQNPQGGMVLNQRPPERMVSSSSCCA

SEQ ID NO: 65379 - protein, 139 aa, Zea mays; identical to SEQ ID NO: 46134
  Clone ID: LIB4762-012-H11_FLI.pep

SEQ ID NO: 65380 - protein, 660 aa, Zea mays
  Clone ID: LIB4762-013-B6_FLI.pep
PGHVTGGLDRKIPSYDDFPETTAKQGVKKGKGIAMAASPQQQGQGGPGSGGWTPEQFWSLLDKADRRFARVRDLPSFGRQEPDEFAKAFRAYTQLWRMQQEHRHRLLDAGLRRWQVGEIAARIAHLYYAQYQRTADTALLSEAFVFYHAVLDRAYFQDADHHLTPAKHLRFLARFLLVALLLGRRSHTVPRLASDIRTLLDDSKKSFQDAEYKEWRHVVQEIARFLRADSPFMNMRPLRYSYAFDPPPDTLRTMPTTIKKRGLVLSDTILCSYYPNEVKFTDLSIDVFRMVQCLEWEPCGSFALNDGYSAHDESGQNQPNLLKDLRDAALPPNPLKTILYRPSVTHFLTVLSTKCEELPSNGIMLIYLSATGEMGTSGFCPDTGENVLSNFNKFDISSLSHTSSKENKEPCLWLGCRETEGSNCIYPGDLIPFTRRPLFLVIDSSTSYAFKSIHGTERGETSAMLLSPSSRSSAAGFSGDSTRHSGSQFTMFLTSPLQAFCLLLGNNGTDIDRDAYNKAEELLLLSLNEWAATLVASSSLHSIWVEVLGDPLLRRLLLRFIFCRATHSLFKPTNHKTEFLPTCMPPLPESVDAESMLSQSCVLRVASFFGAASQFSFAEVTTWPDVDSEEAVVTSSSGSANKGVPETARDSDISNSSSSF

SEQ ID NO: 65381 - protein, 349 aa, Zea mays
  Clone ID: LIB4762-014-C3_FLI.pep
PAGTHKNPNASAPGLSASPPSAKTLACIRARTKLRLRGASSCRQKLSGASAMVWFQCEDCGENLKKPKLAGHFRSCSAYKLSCIDCGELFSHDTVQGHTQCISEAEKYGPKGQTKPSNGAQGKADKPKPNADVDINVGLSTRPPWFCSLCKTTTTSKQTLLLHADGKRHRAKAKAFHVSQKQKDGAEQTPDVKEAGVVPTKESAQVNGGVSGDHERNEDKDAGKRKRMDDMTIEPGNTKRQLTQSGDEKSENKAKSKADELASGTDCKSVQKQKIKWKKIITKTLKANADGVMKLKKLQKLVSKELQECGVSKDKEELRATLMDKIASSSRFYVDGKNVRLVAKNEEES

SEQ ID NO: 65382 - protein, 215 aa, Zea mays
  Clone ID: LIB4762-015-D2_FLI.pep
IWTVKSRSDLPVATARAVTESEVSAQRAAAAMSSSSSFPNSRFPFAAGAGASGGSGSSVRPWGSSGGTSVSSSGKRIQKELLDLNASDCSAGPKGDNLYHWLSTIIGPQGSPYEGGIFFLDIVFPPDYPFKPPMVTFKTRIYHCNIDSTGKVHLDILKDGWSPAFTISKVLLAIKDIISNPDPYSPLMMSISRQYLTDRAKHDEIAAEWTMRFAR

SEQ ID NO: 65383 - protein, 319 aa, Zea mays
  Clone ID: LIB4762-015-G6_FLI.pep
LCVITLIPTVPLEGKEEKKNSLSLSFPALSLPLHPAATMSGLYSQGFSPARTLSPQIRSNPDADSQYLAELLAEHQKLGPFMQVLPICSRLLNQEIMRVSSMVHDHGFSDLDRRRFRSPSPMSSPIVRPNLHGNGFGPWNGMHQERLGFPPPGTSMDWQGAPPSPGSYIVKKIVRLEVPVDSYPNFNFVGRILGPRGNSLKRVEASTGCRVFIRGKGSIKDTEKEEKLKGKPGYEHLNEPLHILIEAELPANIVDTRLRQAQEVMEELLKPVDESQDFYKRQQLRELAMLNSTLREDSPHPGSVSPFSNGSMKRAKPSQ

SEQ ID NO: 65384 - protein, 227 aa, Zea mays
  Clone ID: LIB4762-018-A6_FLI.pep
INKNTPPPSMAMSRFGRSGQPENRESFSLLVLNVSFRTTADDLFPLFDRYGKVLDIYIPRDHRTGDPRGFAFVRYNYEDEARDAIDGLDGMRFDGRALMVQFAKYGPNAEKIHRGRITEENPKPRGRCRSRSPRQRYREDYRDRDYRRRSQSRSRERYEQAGYRDGDHRRHRTHSISPDYDRKRNRHSGSPVLKRSSHSRSRSPRRAPHEGIPSKPRDGRAACSGSP

SEQ ID NO: 65385 - protein, 150 aa, Zea mays
  Clone ID: LIB4762-020-E8_FLI.pep
GTSPSRQTGREGNRERSAMGSFLSSLVTPPPAADDPNCAVVAAHSKATYDEQWAAHKSSSKLMVIDFSASWCGPCRFIEPAFKELASRFSDAIFVKVDVDELAEVARTWKVEAMPTFVLVKDGKEVSRVVGAKKDELERKIRMFTSSSSS

SEQ ID NO: 65386 - protein, 457 aa, Zea mays
  Clone ID: LIB4762-021-E6_FLI.pep
TAAEGEQAAAPIAVMELSMSGSSLRTFGRCVTFLARVASELVLQAHPAKLEMHTLNSSRSAYASISLARDFFDQYHLDAAASAPSSTPLQCSVLLKSLLAVLRTPHAALDRLAVSLPEPDAPKLQITLHCLNGVRKTYWIVCSAEPEVQSLSLDRGRFPSRLAIRPRELARLSSNFQSSLQELTIIATDPASGLPDASGDVGGKAVELRSYNDPTKDDCDTRLHTQLWIDPAEEFVEFVHAGDPVDVTFGVKELKAFLTFCEGCEVDILLFFEKTGEPVLLVPRFGLDDGAASDFEATLVLATMTVSQLSDSDDAQQPATSAQNAGEPGAAAPTLVPENVSNHTKIWSELSGSTPKSIEANRENHAQKKRNASTNMLNDMSMLPNVTNAPSKPPVADNANNIMQPLQMDHMEERPEGISGIPRSQHHPSNWAGADDNDDDNEDDEELLVQTTPYYMD

SEQ ID NO: 65387 - protein, 191 aa, Zea mays
  Clone ID: LIB4762-021-F8_FLI.pep
CTTASGTRRLNRHEIKHTNTLNEEQWIHQQRTTSRSTSEMKNLGHSLRSCVRPPSAQRTLMEQSSGFTYLLRLSHTHRSCPWCSKLWRMSPSTAMTCFLRATAAGLLLYFTWNLALLSLLIEPSGIISSKNSSATSPSSSILSLLVYHLKPCTPPSPCGQGTSTGTGTCRSTWTGTLTLNPCLTPCAAALS

SEQ ID NO: 65388 - protein, 205 aa, Zea mays
  Clone ID: LIB4762-021-G10_FLI.pep
HAGLSNQLRLLSGRTNKDSLRSAFLLAAFILSVAISLPDPDLVLELKLGYLLLLPLQRLVHASNHLFRALLVALHGRHDLPDGPLHQDAADHPVASPRGVQRLDRAHHKGVLADLHLQLRDLRVELVHLGAHVGVGVGDYLLVYGFLAVATCSACHFPVGASSSPAKVLAKTWAPGVGRRRSRSCPHERERARRAHAACRGANSR

SEQ ID NO: 65389 - protein, 140 aa, Zea mays
  Clone ID: LIB4762-023-A1_FLI.pep
GSGVMQFLRGSGGGGGGFPVVAWEVLRRHFSKKRSVDVRRINPKVPKEEAVAISGRLLQILSDHGPLTVANTWNHAKDAGIAGLNSKTHMKILLKWMTGRNVVKLTCVHVGNAKKFLYSPSTESSSSSAGASPSSTSASQ

SEQ ID NO: 65390 - protein, 229 aa, Zea mays
  Clone ID: LIB4762-023-B12_FLI.pep
KLEDKENRSFIPFGFRFSPVGSRLPEGEEDMDLASVNEELAEIDGQIGDILRVLQNGFQKLEKIKDANRRSRQLEELTDKMRDCKRLIKDFERVSKAEAEHTDPATAKMLHDRKQSMIKELNSYVALKKQQASENKRIDLFDGPSAEDGFGEENVLLASNMTNQQLMDQGNQLMDETDQAIARSKQTVQETVNVGTETAAALKAQTEQMSRVVNELDSIHFSIKRHLNW

SEQ ID NO: 65391 - protein, 317 aa, Zea mays
  Clone ID: LIB4763-001-F1_FLI.pep
DLGSVAHGLVPKFAACIHESYDQRPAPPFGLSLPYTRRRPADLIGAGAMAGQNQRLNVVPTVTMLGVMKARLVGATRGHALLKKKSDALTVQFRAILKKIVAAKESMGETMRASSFSLAEAKYVAGDGVRHVILQSVRAASVRVRSHQENVAGVKLPKFTHFVDPAAASGAPSNASPSLTGLARGGQQVAACRSAHVKAIGVLVELASLQTSFLTLDEAIKTTNRRANALENVVKPRIENTISYIKGELDELEREDFFRLKKIQGYKKREIERQMAAARLFAEEQLAEDLALKRGISVGAAANPLVAGGDKDDDIIF

SEQ ID NO: 65392 - protein, 513 aa, Zea mays
  Clone ID: LIB4763-001-G4_FLI.pep
PMDAAAVHKRKRPEEADPSAGELDLSAADAVEVLDLRAAKRLLLAFERRLRDNLEARMKYPDDPARFADSEIALHAETDRLRLLAGAPELFPDLVPIGLASSLASLLTHDNVDLAAAAASLLADLTDSEDPSDLAAVQALADALVDANALDLLVHNLSRFSETDPDEAEAVHNTLAVLENLLDLRPNLADKVCGGTKLLRWLLSRVKAREFDANKQYASEILAILLQNSPANQKRLGQINGVDALLQAVAMYKSRDPKTSDEEEMLENLFDCLCCVLMPLENKERFVKAEGVELMIIIMKQKKLAYSSATRTLDFAMTKFPPACERFVDVLGLKTAFAAFMGKIPVNKKNKKESYQEELEERIISLIASLFGGITKGSRRMRLLGKFVENECEKIDRLMELYTRYSDRVKEETERLDSLDLEDLEMDDDERYNRKLEAGLYTLQLIALILGHIWHSGNSQMRARVELLLKQNKLTKQDVKSILEEYHDNIGDLDGPEEKERAQVRTKEIIDAL

SEQ ID NO: 65393 - protein, 465 aa, Zea mays
  Clone ID: LIB4763-002-H6_FLI.pep
GFSSAVSSPSTRHCTISIARPPCQLAAFTDSGPGTRHYYAPAERCVEVAARRSRSSLLFPPARCSRQWPNFRSIRSKPNENMRLVVVTIVGAVFGFLIGISFPTVNITKLHFPSSIVSYIEDKNSGISAQAILNHAWTAARNARGNGSQPISLDNFKVYVPTNPRGAESLAPGIVVPESDFHQHRLWGNPDEDLPFKPKYLVTFTVGISQKDNINRAVKKFSKDFAILLFHYDGRVTEWDEFEWSKRAIHVSVRKQAKWWYAKRFLHPDIVAAYEYIFIWDEDLGADHFNGEEYIKLVKKYRLEISQPGLEPDRGLTWQMTKRRGDRQVHMVTEEREGWCSDPHVPPCAGFVEIMAPVFSRDAWRCVWHMIQNDLVHGWGLDFALRKCVEPAHEKIGVVDSQWIVHQVIPSLGNQGQSENGRAPWEGVRERCRREWGLFQTRMAEAEKAYYEMMGITPPNVTFVS

SEQ ID NO: 65394 - protein, 476 aa, Zea mays
  Clone ID: LIB4763-003-A10_FLI.pep
WRSTLSSLHRFSISRPGEGDAARARAMDVEYDVIVLGTGLKECILSGLLSVDRLKVLHMDRNDYYGGDSTSLNLNQLWKRFKGEETPPAHIGASRDYNVDMVPKFMMANGTLVRVLIHTGVTKYMSFKAVDGSYVFNKGKIHKVPSTDMEALKSPLMGLFEKRRAGKFFLYVQDYKENDPSTHKGYNLTKLTTKELISKYGLDDNTIDFIGHAVALHRDDSYLTEPAIDTVKRMKLYAESVARFQGGSPYIYPLYGLGELPQGFARLSAVYGGTYMLSKPECKVEFDDEGKVCGVTSEGETAKCKKVVCDPSYLPDKVKNIGKVFRAIAIMSHPIPNTAESHSVQIILPQKQLGRRSDMYVFCCSYSHNVASKGKFIAFVSAQAETDNPEKELKPGIDLLGKVDELFIDIYDRYEPTNDSSADNCFISTSYDATTHFESTVMDVLSLYTKITGKTVDLSVDLSAASAAEDDMCYLS

SEQ ID NO: 65395 - protein, 533 aa, Zea mays
  Clone ID: LIB4763-003-D5_FLI.pep
PGHYTIVAKASTSAIMDHSVYYCLVALLPLVYFLLKSSWKKAPFGSGSRHGLKLPPGPWQLPVIGSIHHLRGFLAHHALRDLSLRYGPLMFLKLGELPVVVASTPEAAKEVMKTHDAIFSTRPLSSTIRTVSKDGLGIVWAPYGDHWRQLRKICTMQLLGARRVQSLRPAREEEAFRLVRAVMSSSTAAGGAAPPPLVDLGKLAAVYVAEASLRAILGRRFKVEDRDTLLRYVDDGVRLAGGFTPRDLFPSSWLVRALTHRAVREVDAYRDSLFAFMDVVVGERLDRRRSTEEEEEEGEDLIDVLLRSHKEGNLPFPLTMRTIEAVIFDLIGGGIETATTTLQWAMAELMRNPGIMAKAQAEVRGLFMGQTKVTEDRLGELPYLQLVIKETLRLHVPGPLLIPRECQEQCRILGYDVPRGAMVLVNAWAIARSPDHWEEPDAFVPERFVGDARDFKGNDLEFIPFGAGRRICPGMSFGLANVELGLASLLFYFDWSLPAGVLPAEMDMAETMGITARRKADLFLSATLSVKLP

SEQ ID NO: 65396 - protein, 497 aa, Zea mays
  Clone ID: LIB4763-005-B11_FLI.pep
GIPPSLFPSHTQLTYTMTTPRRDGQHHGDKRTVTRAASRNSDGHGAGDLSFGSTAGPRFAVAPPRPWAPPPEHAAVFVQPPDDPSTLIMLWGPPGEVPVAGFAAAPEGLPDAFAGSASCLPLARQVGLQAAGGQQGARNFVVSPLSFHAALALVAAGARGETQRELLRFLDSESLGELHRAAATALVARLSDLPQTSFACGVWVDRSRALTPEFMDTAASRYAAVAESVDFLKNSEAARQQINAFVKGATKGLIDDVLPPGSVDSSTALVLANAIYFKGAWARPFDPSRTIFAPFHLPDGGTVRVPFMTTTTSGFEDQRVAVFPGFKALKLPYKNDGGAQQDAFYMLLLLPDGETLTLNDLYDKVVSSPGFIRKHTPVDEVPVGRFMVPKFKFTFEFEASHDIQKLGVNRAFQSGDFSGMVSGGNGLIISGVYHKATVEVDEAGTVAAAATAEFMFMCARMHPPPVDFVADRPFLFAIVERSGVVLFLGHVVNPLVG

SEQ ID NO: 65397 - protein, 491 aa, Zea mays
  Clone ID: LIB4763-005-C8_FLI.pep
TSDPTMAADALRGLLPGVYAVLMVIAVTSAASSDASSVVVGLAKCADCTRKNLKAEAAFKGLEVAIKCKNSKGEYESKAMGKLDGFGAFSIPLSTDLHGADCVAQLHSAAGNPCPGQEPSRIVPQSSKGNFVVVPGKTDYPSKECASATLCGSIKKHLLDHFHKKPVPPKPKPEPKPEPEPKPEPKPEPENHPPTPTYGSSTPIYHPPSRQLFDKKHMFDHFHKHHDYHHFFDHFHKKPVPPKPKPEPKPEPKPKPQPEYHSPTPTYGSPTPIYHPPARHLFDKKPLLDHFHKDHDYHHFLDHFHKKPVPQKPKPEPKPEPKPQPKPEYHPPTPTYVSPTPIYHPPAETEMKYDKKHFFDHFHKDHDYHHFFDHFHKKPVPPKPKPEPEPKPKPQPKPEYKPPMPTYGSPTPIYHPPAKKEVAFDKKHFLDHFHKDHDYHHFFDHFHKKPVPPKPKPEPKPEPKPQPEPEYHPPTPTYGSPTPIYHPPAKH

SEQ ID NO: 65398 - protein, 350 aa, Zea mays
  Clone ID: LIB4763-005-G4_FLI.pep
RAMSDDAPSRLHHPDPDPELAVATGQDAAVEAPPPPPPAHDPGGSECRFCEMTRQHQPQCARRLPKRIILVRHGESQGNLDMSAYTTTPDYRIPLTALGAEQARAAGQRIRDVVAGSGNWKVYFYVSPYARTRATLREIGRAFPRDRVIGAREECRVREQDFGNFQVEERMRAVKETRQRFGRFFFRFPEGESAADVFDRVASFLESLWRDIDMGRLDQDPSCETNLVIVSHGLTSRVFLMKWFKWTVAQFERLNNFDNCEFRVMQLGPGGEYSLLVHHTQEELQQWGMSPEMIADQQWRASANRRCWAEECSSFIDTFFEEPYGSSETSSSDEDEAEDKEEETKLLEQL

SEQ ID NO: 65399 - protein, 499 aa, Zea mays
  Clone ID: LIB4763-006-A5_FLI.pep
PGRLLFSRLLAKSISIPESHTQPERTPEGPEPLPPPIHFRGSAAARNPSFCISAPSTSPPRSRRDVVGRRWGAAVPLHAEKKKKDLFGLFDGVPVSPGSFAMHSSASARGGRGLLLPAAAAAVVVLLLGAVAPAAGCYPRVFNFGDSLADTGNYPFVYGNDSAKLRPPYGETFFHRATGRASNGRLVVDFIADTLGLPFVRPYLSGRSAEDFAGGANFAVGGATALSPDFFRARGFHNMGNRVDLDMEMKWFRGLLDLLCPGNLAGCSDMMNQSLFLVGEIGGNDYNGPLLSGVPFEEIRAITPSVVAKISSTISELIQLGAKTLVVPGNLPIGCVPKYLMIFKSNKKEDYDPQTGCLRWMNEFSQYHNKLLVEQLKKLRRLHPGVTIIYADYYGAAMEIFLSPEHGIEYPLVACCGAEGPYGVSPTTSCGLGEYKLCDNPERYGSWDGLHPTESAYKVIAMGLLLGSYTRPPIASTTTSCPQLMELGSSAEYKRLYDL

SEQ ID NO: 65400 - protein, 254 aa, Zea mays
  Clone ID: LIB4763-006-D11_FLI.pep
ILLPPLRTTMASSKLQLPADDSVLLLITHSNLTTFAADIRVSQQTTVEALKDKLWRKTGTTVASMRLQLRDDSGTKIADLDDDAAPLAAYAPYNGYRIHVVDLDPSSLTSGGWLEDTSLVDKYKMSDETYDKLDTNFRKFKEKMVPKNSPSEDKEESEKHMEELCSKIKVGDRCEVEPGAKRGTVKFVGRAEALGRGFWVGVQYDEPLGKHDGMVKGIRFFECPQGHGAIVRPEKVKVGDFPERAFEDEDDDEI

SEQ ID NO: 65401 - protein, 293 aa, Zea mays
  Clone ID: LIB4763-007-C11_FLI.pep
RGQVKIPVGLGSRGAVLSHSLRTNTARAAPRSLSPAFPSAAGSEHIEDGLLLVRVRFVPSDPATMNIFKKKVDPKEALRTSKREMAVATRGVEREIGSLQMEEKKLVAEIKKTAKTGNEAATKILARQLVRLRQQILNLQGTRAQIRGVATHTQAMYAGTSISAGMKGASKAMSAMNKQMEPAKQIKVMKEFQKQSTQLDMTLEMMSDAIDETLDKDEAEEETEELTNQVLDEIGVDVASQLSSAPKGRIGATNKKVDNGQARPARNVAAPALEPSSAEVEDLERRLASLRRT

SEQ ID NO: 65402 - protein, 373 aa, Zea mays
  Clone ID: LIB4763-007-E6_FLI.pep
VAKRFPSLLTLLAAAAAACRLLPTAIDLGMDLGSCYLGGNADAVEFCPHRPFRHVLAAATYTLQEQERDRAGSISLFSVDVASEDASRRLQLLHTVETAGIFDMKWSPKSPLLAQADAHGRLALRRLEQEDGSDTGILLTDVSAEDISSSMCLYVDWNQTAESLSVGLSDGSLSLVSVREDRLEISQQWTAHQFEVWTCYFDRTSPHLLYSGSDDCCFSCWDLRESPPNIVFQNKKSHKMGVCCITQNPLEWNMLLTGSYDEFLRVWDMRFMAKPVNEKLINLGGGVWRMKYHPSIADVVLAACMHNGFAIVKVGSGDATIMETYCKHESLAYGADWQKSEEVEQNGNSSVVATCSFYDRLLRVWQPENLAEL

SEQ ID NO: 65403 - protein, 285 aa, Zea mays
  Clone ID: LIB4763-007-H7_FLI.pep
DMGQILGLVQVDQSTVAIKENFGKFSEVLEPGCHFLPWCIGQQIAGYLSLRVRQLDVRCETKTKDNVFVTVVASVQYRALADKASDAFYKLSNTREQIQSYVFDVIRATVPKLGLDDAFEQKNEIAKAVEEELEKAMSTYGYQIVQTLIVDIEPDDRVKRAMNEINAAARMRVAASEKAEAEKILQIKKAEGEAESKYLAGVGIARQRQAIVDGLRDSVLAFSENVPGTTAKDIMDMVLVTQYFDTMREIGASSKSSSVFIPHGPGAVKDVSAQIRDGLLQANLH

SEQ ID NO: 65404 - protein, 881 aa, Zea mays
  Clone ID: LIB4763-010-C6_FLI.pep
PGSHPTLPISHHHLLSHYLSAIPSDCLCDQDMASDGGGSSPPPASSPYGRPSSPLAVTNSSPSQPTRRPGGRRRRGSASPYASSPSLGGFETPPHPGRRTPSGAGAGAPRQPRQNSTGRFPPTPSTPMSTDDVPPSSEAGDDETDGGGGVDATPVFVWGTNISVQDVNAAILRFLRHFRDPRDAGRVDPVMDEGKYMRAIHRILELEGGESLDVDAHDVFDHDPDLYSKMVRYPLEVLAIFDIVLMDLVARIEPLFEKHIQTRIYNLKSSICLRNLNPSDIEKMVSIKGMIIRCSSVIPELKEAVFRCLVCGFYSEPVMVDRGRVTEPHICQKEQCKATNSMTLVHNRCRFSDKQIIKLQETPDEIPEGGTPHTVSVLMHDKLVDAGKPGDRVEITGIYRAMSIRIGPTQRTVKSIFKTYIDCLHIKKTDKSRLHVEDTMDIDNSNASKSTEEDFLSDKVEKLKELSKLPDIYERLTRSLAPNIWELDDVKRGLLCQLFGGNPLKLPSGASFRGDINILLVGDPGTSKSQLLQYMHKLSPRGIYTSGRGSSAVGLTAYVTKDPETGETVLESGALVLSDKGVCCIDEFDKMSDNARSMLHEVMEQQTVSIAKAGIIASLNARTSVLACANPTESRYNPRLSVIDNIHLAPTLLSRFDLIYLILDKADEQTDRRLAKHIVSLHFENPNLEELEVLDLQTLVSYISYARKYIQPQLSDEAAEELTRGYVEMRKRGNSPGSRKKVITATARQIESLIRLSEALARMRFSEVVEVRDVVEAFRLLEVAMQQSATDHATGTIDMDLIMTGISASERQRRENLVAATRNLIAEKMQLGGPSMRMIELLEELRKQSSMEIHMHELRGALGTLMTEGAVVIHGDNVRRV

SEQ ID NO: 65405 - protein, 419 aa, Zea mays
  Clone ID: LIB4763-010-E1_FLI.pep
GAKSPPFERSLQERFFFPPPTPQPTNTLYKAAPSHTQNAQAQAGQENSAGQSASWMAFFLALVCILVFLATASYVQYTRWQKGKGRFGGHGRSAPLKLPPGSMGWPYLGETLQLYSQDPSVFFASKQKRYGEIFKTHLLGCPCVMLASPEAARFVPVTQAHLFKPTYPRSKERMIGPSALFFHQGDYHLRLRRLVQGALGPDALRALVPEVEAAVRSTLASWDAGHVRSTFHAMKTLSFDVGIVTIFGGRLDERRKAELRKNYSVVEKGYNSFPNSLPGTLHYKAMQARRRLHGVLCDIMRERRGQAQAAGTGLLGCLMRSRGDDGAPLLSDEQIADNVIGVLFAAQDTTASALTWIVKYLHDHPKLLEAVRAEQAAVRDATGGGRQPLAWAHTKSMALTHRVRACVLGNAKLALYYYY

SEQ ID NO: 65406 - protein, 309 aa, Zea mays
  Clone ID: LIB4763-011-D12_FLI.pep
PGRPRPDIAMAILAVASPLKTLNPSPGDHSRCRLSSSLLHLPLPVPRWRRLRCSAQYSEAAAQPTSTTTARPADIPWSKELCNSVRLIGTVGTDVELRQLPSGSAVARGRLAVWKSATETTWVTLQFWDDLAIVASEHVKKGDRIFVSGRLESDTVDEGPEKRHVYYKLAVQQLNFIESQPVRLYEPEASQDALGGRRADYFNSISNSTEDKNRDNMSSSRSTEELWQVFFANPLDWWDNRANKKNPRYPDFKHKQTGEALWVDGRNNPNWVISQLAVLDSRMSSLQDNERKPVSYMYADEFMTLDGNR

SEQ ID NO: 65407 - protein, 617 aa, Zea mays
  Clone ID: LIB4763-012-B1_FLI.pep
PGTNPRTNTRARVQQRNGDGDAAILAPPPLSLPSMAVPPLLLVAVAVAALSILVLVVFAFRRCRRRRQRHPLQAAAVAPTPVAVQDEDIDRPLLSENQSDHSRQNISFLGSSVGEPSKIQTNRSNTSPRSHAIADTGRIYPAECCVTQGETHVINVENDTSEEFQLGSTLRRTPPPKWPTPDQKHRRRVSGDDNHNGSVPLKDNTYHSRLDLEVIAGPSHGISCSRQSSRPSMLPITLGRVPPSDLVLKDSEVSGKHAQINWNGKTLKWELVDMGSLNGTFLNSQAVHHPSAGSRHWGEPAELAHGDIITLGTSSKLSVQILLQNQRVPAGVGMASDPMVARRSGKKLPMEDISFCQCPLQGVEHFGLFGIFDGHGGDGAAKAVSKILPENLGYILSHPETKDRVQSCSDASDVLRYAFTLTEDTIDHQYEGCTGTALLIWFDQNKDCFAQCANLGDSACVMSVNGKTIDMTEDHRVTSATERARIARTGQPLRDGEARLSGLNLARMFGDKFLKEQDPRFSSEPYVSQAVRITKACTAFAVIASDGLWDVISTKRAVQLVVEGKGRRSSGDATSAAARVASRVLDEARSLRTKDNTSVIFVDFDVLRRVPCISPVD

SEQ ID NO: 65408 - protein, 429 aa, Zea mays
  Clone ID: LIB4763-012-D7_FLI.pep
EIEETMKVRRSEPVLVHATGAATTQEYYFLSNLDRNVAVLMKTVHIFSVSCDDVATLLRDSLSRVLSQYYPFEGRLAVREDGRLAVRNDRRGVPFVDAVSDYELQVVCDATAPGSELLGDLVYVSMQHENALEAPMLTVQVTTFKCGGFVLGLAMNHCLADGQSAAEFICSWAETARGVAMSTPPYLDRTVQRARPIPTVDFAHDEFAEIEDVSGLAGTFGKEPCVYRSFTFDAGKLHRLKQAASEQGQGGTKSSVFVALTAFVWVSRTRALRMLPDQKSKLLFAVDARLRVDPPLPPGFWGNAIIFACCISTARDLLSKPLSAAARSIREAIVRTDDAFIRSAVDYIELNSGARPSLMATTLVTAWNRLRFRAADFGWGEAIYSGPAELPQKEVAMFLRGVSDSQSTVLVIGMPVSCMQAFQETVDLL

SEQ ID NO: 65409 - protein, 508 aa, Zea mays
  Clone ID: LIB4763-012-H1_FLI.pep
LKPAMAAEPPAYLLLLPLIAIPLIVFLVLSRRRDDQRRFPPAPWALPVIGHLHHLAGAPPHRALRDLARRHGPLMTLRFCELRVVVASSPDAAREILRTHDVDFASRPIGPMLQLVFRGAEGLIFAPYGDGWRQLRKICTLELLSARRVHSFRPVREDEVGRLLGSVASAAAAGLPVNLSERITAFVADAAVRAIIGSRSEHRDEFLRLLMDGLKIIPGLSLPDLFPSSRLAMLVSSVPGKIERRRKGLLDIVDPIILEHQEKRAAGGIDEDEDLLDVLLRLQKDMDSQYPLTTDNIKSVLIDMFGASSETSATTLKWTMAELMRNPAVMRKAQDEVRGALAGHDEVAEDSLVNLRYLQLVIKETLRLHPPAPLLLPRECRSPCQVLGYDVPRGTMVLVNAWAIGRDPALWDAPEDFVPERFEESGRDFKGMDFEFIPFGAGRRMCPGMAFGLAHIELALAALLFHFDWKLPEGVVAEEIDMAEAVAITAPPRSDLVVLPVTRLPVSI

SEQ ID NO: 65410 - protein, 420 aa, Zea mays
  Clone ID: LIB4763-013-A1_FLI.pep
GFFPQNQNQKEGLLPTQRTAFPVSSSSSCCLLLSIFILPIARLDFSLEFAPPASPLTSLCLINAGITARTGPALPPFLLPPPLLLTATTGRALPPLCARCPGLPRALHRRRAPIRSEMDEAVPALATGQASTDGVTEQPVNVYIWDMDETLILLKSLLDGSYAGAFDGLKDHEKSTEIGKRWENLILELCDEHFFYEEIENYNEPYLNALNEYDDGRDLTSYDFEADCFSSPYDDANKKKLAYRHRAIGEKYAKGLEKVLDGHMVKVCNDQYSLTDKYTDGWLSSAHKLLEEALGKSASAPSANSSSINCIVTSGSLIPSLAKCLLYHLDDVVSSENVYSSWEVGKLQCFKWIKERFDGPNVRFCAIGDGHEECSAAQVMKWPFIKIEFRPEAHHRFPGLDLPTVQTYMDVIYESSSKDG

SEQ ID NO: 65411 - protein, 576 aa, Zea mays
  Clone ID: LIB4763-013-A10_FLI.pep
SHPIPSHPIRNRTTVTSPHRTAPNKTPHHATGVQGPSITHEQDRVEASAPSSASSQRREGTMSAARRRSPIPVLLFFLLLHSASPSPIKTVVVLVMENRSFDHMLGWMKRLNPEIDGVTGREWNPANASDPAAGRVYFRDGAAYVDPDPGHSFQEIRQQVFGSDDDAADNPPRMDGFAQQARSIGGGAMSDAVMRGFNPADVAVYRELVSQFAVCDRWFASVPSSTQPNRLFVHSGTSGGATSNNPTLLAEGYPQRTIFDNLHDAGLSFGVYFQDVPAVLFYRNLRKLKYLLDFHPLRPSFADHARRGTLPNYAVIEQHYLDSKLDPANDDHPSHDVYQGQMLVKYVYETLRASPQWNQTLLVITYDEHGGFFDHVPTPVAGVPSPDGIVGPPPYNFTFDRLGVRVPAILVSPWIDRGTVVHGPHGPTPTSQYEHSSIPATVKKIFGLPQDFLTRRDAWAGTFEGVVQGRTEPRTDCPEQLPTPTRIRQTEADEEAKLSEFQQEIIQLASVLNGDHHLATLQDRIKNDMNVREGIDYMKAAVKRYFQAGASARRMGVDGDQIVKMRPSLTTRIQRP

SEQ ID NO: 65412 - protein, 735 aa, Zea mays
  Clone ID: LIB4763-013-A11_FLI.pep
SSALVPALAPSPGTPARDARVDVLRLRDRLAPRLGSGLPPLRPSWISAAAPPYYNRSQNYQTRMATYEPKNILITGAAGFIASHVTNCLVRNYPHYKIVVLDKLDYCSSLKNLNPSRASPNLKFVKGDIASADLVNHLLVTESIDTIMHFAAQTHVDNSFGNSFEFTKNNIYGTHVLLEACKVTGQIRRFIHVSTDEVYGETDEDAVVGNHEASQLLPTNPYSATKAGAEMLVMAYGRSYGLPVITTRGNNVYGPNQFPEKLIPKFILLAMRGLPLPIHGDGSNVRSYLYCEDVAEAFEVVLHKGEVGHVYNIGTVKERRVIDVAKDICRLFGLDTEKVIRFVENRPFNDQRYFLDDQKLKRLGWAERTPWEEGLKKTIEWYTTNPDYWGDVTGALLPHPRMLMIPGVERHNWTEDIKSLTSSPAEASTTAPATSAKRTTAAPQKPLYKFLIYGRTGWIGGLLGKICDKQGIPYEYGKGRLEERSQLLEDIRNVKPTQVFNAAGVTGRPNVDWCETHKQDTIRTNVVGILNLADVCREQGLLMINYATGCIFEYDAKHPEGSGIGFKEEDTPNFTGSFYSKTKAMVEELLKEYDNVCTLRVRMPISSDLNNPRNFITKIARYDKVVNIPNSMTILDELLPISIEMAKRDCRGIWNFTNPGVVSHNEILEMYKKYINPDFKWTNFTLEEQSKVIVAPRSNNEMDASKLKAEFSQLMSIKDSLIKYVFEPNRKVPAN

SEQ ID NO: 65413 - protein, 397 aa, Zea mays
  Clone ID: LIB4763-013-G7_FLI.pep
LYGRPVGAMTMEHGEDCCVKVAVHARPLIGDEKLQGCKDCVAVVPGKPQVQIGSHSFTFDHVYGSTGTPSAAMFDECVAPLVDGLFQGYNATVLAYGQTGSGKTYTMGTACKEGSHIGIIPRAMAALFDKIENLKTQVEFQLRVSFIEILKEEVRDLLDPTAGTVGKAENGNGHAKLSVPGKPPVQIREASNGVITLAGSTEVHVTTQKEMAACLEQGSLSRATGSTNMNNQSSRSHAIFTITLEQMRKIDPIMTADGMPIEEMNEDYLCAKLHLVDLAGSERAKRTGSDGLRFKEGVHINRGLLALGNVISALGDEKKRKEGAHVPYRDSKLTRLLQDSLGGNSKTVMIACISPADINAEETLNTLKYANRARNIQNKPIVNRNPIADEMKRMRQQ

SEQ ID NO: 65414 - protein, 476 aa, Zea mays
  Clone ID: LIB4763-014-A1_FLI.pep
GASPKSEIKLDTAPAPNQITCSRDLLPGVPPVSRDPHDHTDPPPSASAMDAAPPTITKSPPSLVPPAGPTPGGSLPLSSIDKTAAVRVSVDFIQVFPAPTSGKEDWSPSSAIAAMREGFARALVPYYPIAGRIAEPVPGEPEIECTGEGVWFVEAEASCSLEEARNLERPLCIPKEELLPRPPAGVRVEDTLLLAQVTKFTCGGFSVGICFSHLVFDGQGAAQFLKAVGEMARGLPEPSIKPIWARDAIPNPPKPPLGPPPSFTAFNFEKSVVEIALDSIKRVKDQVASETNQKSSTFDVVTAMIFKCRALAVDFAPDAEVRLGFAASTRHLLSNVLPSVDGYYGNCVYPGGLTKTSQEVKEASLVEIVTAIREAKEALSSRFLDWLSGGAKENHYNVSLDYGTLVVTDWSHVGFNDVDYGFGEPSYVFTLNDDVNIVPSVVYLKPPKPKQGIRLVLQCVEGRHSAVFSEELQKHA

SEQ ID NO: 65415 - protein, 194 aa, Zea mays
  Clone ID: LIB4763-014-F5_FLI.pep
ASPPSGLDSSTPGRSASPTSRRRRVKSCVDAVVMEMVAVYCGGLYTAKPELAARRIEAIGFQVGHQLSERYTMERPRFSDHLEAIKFICKDFWSELFKKQIDNLKTNHRGTFVLQDNRFRWLTRVSLDPRIENTDSTENDSAALGDTAAQTTTMLLYFPCGLIRGALTNLGISCSVSADMSNLPACSFVVRIKT

SEQ ID NO: 65416 - protein, 578 aa, Zea mays
  Clone ID: LIB4763-017-B1_FLI.pep
REAEQRLFVLATRFEEKPILEETMMSPASERSLIIQSDDDDDARSGHDVEEPEQDSDSSSSSSSCATPRRGPSSPPYIQQWPQSYRQSIDILSSVQSPNLSFLGTPTLSRLSNSFLAITDSFRSKAPETISSFIKPLLGPAPSDDQQQQHEGTRKSSEYLVPSRRSSLQQIPEDQKPPVGGHGASHDQNCSYTQGVMNGINVLCGVGILSTPYAIKQGGWIGLAILCTFALLAWYTGVLLRHCLDSKEGLKTYPDIGHAAFGSTGRIVISIILYVELYACCIEYLILEGDNLSKLFPNAHLTIGSMTLNSHVFFAILTTIIVMPTTWLRDLSWLSYISAGGVIASILVVICLFLVGVVNDVGFENEGTALNAPGIPIAIGLYGYCYSGHGVFPNIYSSLKNRNQFPSILFTCIGLSTFLYAGAAVMGYKMFGEATESQFTLNLPDNSVISKIAVWTTVANPITKYALTIIPLAMSLEELLPPNQQKYSTIIMLRSSLVISTLLIALSVPFFGLVMALVGSLFAMLVTYILPCTCFLAILKTKVGWHQIAACSFIIVVRVCCAYVGTYSSLSKIIQNYA

SEQ ID NO: 65417 - protein, 406 aa, Zea mays
  Clone ID: LIB4763-017-F8_FLI.pep
ELRLTQSLASASSHGSGSASGVVVVSVAPAGYHRRRRQRLTVAGARLLHAHLQLRRLADRHGQLRPPDGEQPQPLRRAAIREDVLRQAYRPRQRRTPRHRLHRGRVRAGEGDGDPGGHGARGLPERRQLRHHLGHRQQRLLLRGQRHGHQALLAGHADAVVQNPPPRARAGGGGGGTASERQRQRGRAAERRAGGAGRDRRERLQLRLLAGRAAGRGAQVRAGRGGQAGGRHGGAHRDGGARLRGAREPALRLHAAVPAAVPRQRRVVGLRPGDGLPRLVQPLRAVPQPGARGAARQAPAPAPGRDHRLRRLVRGHDEHLPGPREARVHKRSADLLREPDRAVWQARVLRLQGPVHVRVLGRDAPDGGGVQGDRRRGAARAARVPCSSRRHLPSDMTLRRFIIGSF

SEQ ID NO: 65418 - protein, 490 aa, Zea mays
  Clone ID: LIB4763-018-E10_FLI.pep
KGRVLAPVPEKNSEPDLKPHNPRLLLRWTPRNRQGATNELAAKFPGDPRAKIWSGSNSPFACGRRAFLRAMSQRDGDLTGAHPEEGDRHAVRMDGSDDDELDQPTSKATEHITAMDVRKGKDMQGIPWNVMPTTRDKYRQSRLQGYANFENVPNSGRLSEKECMPAEKGQLYYEFQHSTRSVKPTIRHFQLRNLVWATTRHDVYLMSNFSVLHWSAMTCKKQEVINLLGHVTPCEKHHRNYYEGFYRTPVSTLAVKHNLLVTGGFHGEIICKFLDRQGVSYCCKTTNDDDGITNSLEIFEKPSGSLHFLASNNDCGLRDFDMEKFRICNHFHFAWPVNHTSLSPDGKLAAIVGDSPDGLLIDANSGKTVHKLHGHLDYSFASAWNPDGRTFATGNQDKTCRVWDVRNLSRSVVVLGGNIGAVRSIRYTPDGKFMAMTEPADFIHIFDVESGYSRKQELDFFGEIAGISFSPDTEALFVGVHDRFFSCCLL

SEQ ID NO: 65419 - protein, 230 aa, Zea mays; identical to SEQ ID NO: 41348
  Clone ID: LIB4764-001-A11_FLI.pep

SEQ ID NO: 65420 - protein, 407 aa, Zea mays
  Clone ID: LIB4764-002-C7_FLI.pep
GGPAPTKQGPRHRTRAPPVSSRRSSPALGPAACAMALDTADADAPRLRLDASAAVHPLLSDDGSTAAGETAEQLDARYAPYARRDAYGTMGRGPLPAAQAVRLALAAAVLLPLRFVAGMLVLLLYYLVCRACTLFVDADGGRPRLAGWRRKAVLRSGCALSRVMLFVFGFYWIRETRRRSTNAKGLNQDQFEESQRPGAIVSNHVSYVDILYHMSASFPSFVAKESVSRLPLIGLISNCLGCIFVQRESKSSEAKGVSGAVTERIQDVCQDKNTPMMLLFPEGTTTNGDYLLPFKTGAFLAGAPVQPVILKYPYRRFSPAWDSMDGARHVFLLLCQFVNHMEVVRLPVYYPSQLEKEDPKLYANNVRKLIAMEGNLVLSNIGLAEKRVYHAALTGSSLPGARHEKDD

SEQ ID NO: 65421 - protein, 156 aa, Zea mays
  Clone ID: LIB4764-002-E11_FLI.pep
LEAGRAVTLSLLGLTGAVAASAVSDLSVFLSCSSQAIEKATQNQQIVNAIGKPIMRGPWYSASIAVNHAKHSVSCTFPVSGPQGNGLLKLKAVRLGDESWYSYVQPTEWEILIMDAILDVHTEDGKHTTMRVTIPDNTPAPPPADCTACKSHAAEK

SEQ ID NO: 65422 - protein, 240 aa, Zea mays; identical to SEQ ID NO: 62173
  Clone ID: LIB4764-003-B12_FLI.pep

SEQ ID NO: 65423 - protein, 179 aa, Zea mays; identical to SEQ ID NO: 59729
  Clone ID: LIB4764-003-F11_FLI.pep

SEQ ID NO: 65424 - protein, 257 aa, Zea mays
  Clone ID: LIB4764-006-F4_FLI.pep
GAKPHPIPNNSSRHFTTASPHPPPLPSRQSTACLPLPSPPMATVARTLVAACPARSLLRLRSRRLPSSSSIRPARQRAGVGSVRCMARRPDSSYSPLRSGQGGDRAPTEMAPLFPGCDYEHWLIVMDKPGGEGATKQQMIDCYIQTLAQVLGSEEEAKKKIYNVSCERYFGFGCEIDEETSNKLEGLPGVLFVLPDSYVDAENKDYGAELFVNGEIVQRSPERQRRVEPVPQRAQDRPRYSDRTRYVKRRENQSYQR

SEQ ID NO: 65425 - protein, 318 aa, Zea mays
  Clone ID: LIB4764-010-D11_FLI.pep
GKRSHPTRRKRNKPNLAASWAARARGAMARSRTSGGGEYESGSDHDGALQKPLLPNSGSWYRMGMGSRQSSLNAAGTSSMAVLRESHVSAFLCTLIVALGPIQFGFTGGYSSPTQASIIRDLNLSISEFSVFGSLSNVGAMVGAIASGQMAEYVGRKGSLMIAAIPNVIGWLAISFAKDSSFLYMGRLLEGFGVGIISYVVPVYIAEISPQNMRGALGSVNQLSVTLGIMFAYLLGLFVPWRLLAVIGTLPCIVLIPGLFFIPESPRWLAKMNMMDDCETSLQVLRGFDADITAELNDIKRAVMSANKRATIRFQELN

SEQ ID NO: 65426 - protein, 410 aa, Zea mays
  Clone ID: LIB4764-010-D5_FLI.pep
PGLVVVGTFICALCVRDRSQLAPSQFAMAEDRSPKPIHCKAAVCRAAGEPLTIEEIVVDPPKAYEIRIRVVCTSLCHTDITFWKAKVAPVFPRILGHEAYGVVESVGEHVEGFAAGDTVVPTFLGQCERCASCASEHSNVCDAVPFVIGPGMRRDGTTRFRDARGSPLHDLLAVSSFSEYTVVDVNQVVKVDPAVPPKLACLLSCGAGTGVGAAWRSAKVEPGSTVAIFGLGSVGLAVVQGAKMCGASKIIGVDLNPDKEEVGRSFGVTDFVNPSQLDKRSVVEVIVEMTGGGVDYSFECIGVPSVMTDAFRCTKMGKGKTIVLGLGRDSDEVCLPSLELLFGRCVMGSLFGGLKPKTHIPVLAKKCMDNELQLDALVTHELGLQDINKAFDLLLQGKSLRCILWMDKDK

SEQ ID NO: 65427 - protein, 151 aa, Zea mays
  Clone ID: LIB4764-011-D3_FLI.pep
FPTRGRHLERRVNMEGDKKAGAVAEKEAAAADQSKEVAAGDVSLKELSRRLNDFAKERDWEQYHSPRNLLLAMIAEVGELSELFMWKGEVRKGLADWDEAEKEHLGEELSDVLLYLVRLSDMCGVDLGDAALRKIVKNAVKYPAPSKEQGA

SEQ ID NO: 65428 - protein, 256 aa, Zea mays
  Clone ID: LIB4764-012-C6_FLI.pep
QGRLPLSGATQHRRLAMTGYRSRSPSRSYSPRRRYSRSPPRRKRYDDPRDRYRWAGAGGGGDRRGYGRPLAQSGLLIRNISLTARPEDIRATFEQFGPIKDVYLPRNFHTRELRGFGFVRFRYPEDAAVAKREMHHQVIGGREISIVYAEENRKTPQEMRMRTRTSGRYMDERYTRLSRSPRSRSHSYSPPPSPVRRDFRGRERPDSYSPQYSHSPRPRDSRHHRSDGRSPTPSLDDHKPKATPVNGGHGPAVASR
